United States Patent Application Publication US 2018/0305689 A1 - sequence listing, part 98

SEQ ID NO: 1409249 - RNA, 19 nt, Artificial Sequence
  Description of Artificial Sequence: Synthetic oligonucleotide
  Antisense strand to SEQ ID NO: 1409248
aaugcuaaaccuuuaaacu

SEQ ID NO: 1409250 - RNA, 19 nt, Artificial Sequence
  Description of Artificial Sequence: Synthetic oligonucleotide
  Sense strand starting at position 814 of SEQ ID NO: 1243325
acaaauuaugcaggucaua

SEQ ID NO: 1409251 - RNA, 19 nt, Artificial Sequence
  Description of Artificial Sequence: Synthetic oligonucleotide
  Antisense strand to SEQ ID NO: 1409250
uaugaccugcauaauuugu

SEQ ID NO: 1409252 - RNA, 19 nt, Artificial Sequence
  Description of Artificial Sequence: Synthetic oligonucleotide
  Sense strand starting at position 864 of SEQ ID NO: 1243325
gggucuguaugacucuuaa

SEQ ID NO: 1409253 - RNA, 19 nt, Artificial Sequence
  Description of Artificial Sequence: Synthetic oligonucleotide
  Antisense strand to SEQ ID NO: 1409252
uuaagagucauacagaccc

SEQ ID NO: 1409254 - RNA, 19 nt, Artificial Sequence
  Description of Artificial Sequence: Synthetic oligonucleotide
  Sense strand starting at position 920 of SEQ ID NO: 1243325
uacagauucgcuuagguca

SEQ ID NO: 1409255 - RNA, 19 nt, Artificial Sequence
  Description of Artificial Sequence: Synthetic oligonucleotide
  Antisense strand to SEQ ID NO: 1409254
ugaccuaagcgaaucugua

SEQ ID NO: 1409256 - RNA, 19 nt, Artificial Sequence
  Description of Artificial Sequence: Synthetic oligonucleotide
  Sense strand starting at position 931 of SEQ ID NO: 1243325
uuaggucauuaucuuauca

SEQ ID NO: 1409257 - RNA, 19 nt, Artificial Sequence
  Description of Artificial Sequence: Synthetic oligonucleotide
  Antisense strand to SEQ ID NO: 1409256
ugauaagauaaugaccuaa

SEQ ID NO: 1409258 - RNA, 19 nt, Artificial Sequence
  Description of Artificial Sequence: Synthetic oligonucleotide
  Sense strand starting at position 941 of SEQ ID NO: 1243325
aucuuaucacugugaaagg

SEQ ID NO: 1409259 - RNA, 19 nt, Artificial Sequence
  Description of Artificial Sequence: Synthetic oligonucleotide
  Antisense strand to SEQ ID NO: 1409258
ccuuucacagugauaagau

SEQ ID NO: 1409260 - RNA, 19 nt, Artificial Sequence
  Description of Artificial Sequence: Synthetic oligonucleotide
  Sense strand starting at position 1096 of SEQ ID NO: 1243325
uggagaggcuaaucaaacu

SEQ ID NO: 1409261 - RNA, 19 nt, Artificial Sequence
  Description of Artificial Sequence: Synthetic oligonucleotide
  Antisense strand to SEQ ID NO: 1409260
aguuugauuagccucucca

SEQ ID NO: 1409262 - RNA, 19 nt, Artificial Sequence
  Description of Artificial Sequence: Synthetic oligonucleotide
  Sense strand starting at position 1427 of SEQ ID NO: 1243325
ugguauuaugacuagccua

SEQ ID NO: 1409263 - RNA, 19 nt, Artificial Sequence
  Description of Artificial Sequence: Synthetic oligonucleotide
  Antisense strand to SEQ ID NO: 1409262
uaggcuagucauaauacca

SEQ ID NO: 1409264 - RNA, 19 nt, Artificial Sequence
  Description of Artificial Sequence: Synthetic oligonucleotide
  Sense strand starting at position 1434 of SEQ ID NO: 1243325
augacuagccuauaagguu

SEQ ID NO: 1409265 - RNA, 19 nt, Artificial Sequence
  Description of Artificial Sequence: Synthetic oligonucleotide
  Antisense strand to SEQ ID NO: 1409264
aaccuuauaggcuagucau

SEQ ID NO: 1409266 - RNA, 19 nt, Artificial Sequence
  Description of Artificial Sequence: Synthetic oligonucleotide
  Sense strand starting at position 1556 of SEQ ID NO: 1243325
agguaaucguucucccaaa

SEQ ID NO: 1409267 - RNA, 19 nt, Artificial Sequence
  Description of Artificial Sequence: Synthetic oligonucleotide
  Antisense strand to SEQ ID NO: 1409266
uuugggagaacgauuaccu

SEQ ID NO: 1409268 - RNA, 19 nt, Artificial Sequence
  Description of Artificial Sequence: Synthetic oligonucleotide
  Sense strand starting at position 1567 of SEQ ID NO: 1243325
cucccaaagugugcagaaa

SEQ ID NO: 1409269 - RNA, 19 nt, Artificial Sequence
  Description of Artificial Sequence: Synthetic oligonucleotide
  Antisense strand to SEQ ID NO: 1409268
uuucugcacacuuugggag

SEQ ID NO: 1409270 - RNA, 19 nt, Artificial Sequence
  Description of Artificial Sequence: Synthetic oligonucleotide
  Sense strand starting at position 1686 of SEQ ID NO: 1243325
aggccuuggcgacauucua

SEQ ID NO: 1409271 - RNA, 19 nt, Artificial Sequence
  Description of Artificial Sequence: Synthetic oligonucleotide
  Antisense strand to SEQ ID NO: 1409270
uagaaugucgccaaggccu

SEQ ID NO: 1409272 - RNA, 19 nt, Artificial Sequence
  Description of Artificial Sequence: Synthetic oligonucleotide
  Sense strand starting at position 2103 of SEQ ID NO: 1243325
ggagguucgcuucaugaau

SEQ ID NO: 1409273 - RNA, 19 nt, Artificial Sequence
  Description of Artificial Sequence: Synthetic oligonucleotide
  Antisense strand to SEQ ID NO: 1409272
auucaugaagcgaaccucc

SEQ ID NO: 1409274 - RNA, 19 nt, Artificial Sequence
  Description of Artificial Sequence: Synthetic oligonucleotide
  Sense strand starting at position 2309 of SEQ ID NO: 1243325
aagaccagugccugauaaa

SEQ ID NO: 1409275 - RNA, 19 nt, Artificial Sequence
  Description of Artificial Sequence: Synthetic oligonucleotide
  Antisense strand to SEQ ID NO: 1409274
uuuaucaggcacuggucuu

SEQ ID NO: 1409276 - RNA, 19 nt, Artificial Sequence
  Description of Artificial Sequence: Synthetic oligonucleotide
  Sense strand starting at position 2310 of SEQ ID NO: 1243325
agaccagugccugauaaau

SEQ ID NO: 1409277 - RNA, 19 nt, Artificial Sequence
  Description of Artificial Sequence: Synthetic oligonucleotide
  Antisense strand to SEQ ID NO: 1409276
auuuaucaggcacuggucu

SEQ ID NO: 1409278 - RNA, 19 nt, Artificial Sequence
  Description of Artificial Sequence: Synthetic oligonucleotide
  Sense strand starting at position 2420 of SEQ ID NO: 1243325
uuucuauuaucucugaguu

SEQ ID NO: 1409279 - RNA, 19 nt, Artificial Sequence
  Description of Artificial Sequence: Synthetic oligonucleotide
  Antisense strand to SEQ ID NO: 1409278
aacucagagauaauagaaa

SEQ ID NO: 1409280 - RNA, 19 nt, Artificial Sequence
  Description of Artificial Sequence: Synthetic oligonucleotide
  Sense strand starting at position 2421 of SEQ ID NO: 1243325
uucuauuaucucugaguuu

SEQ ID NO: 1409281 - RNA, 19 nt, Artificial Sequence
  Description of Artificial Sequence: Synthetic oligonucleotide
  Antisense strand to SEQ ID NO: 1409280
aaacucagagauaauagaa

SEQ ID NO: 1409282 - RNA, 19 nt, Artificial Sequence
  Description of Artificial Sequence: Synthetic oligonucleotide
  Sense strand starting at position 2464 of SEQ ID NO: 1243325
uuuccugugucccuaauuu

SEQ ID NO: 1409283 - RNA, 19 nt, Artificial Sequence
  Description of Artificial Sequence: Synthetic oligonucleotide
  Antisense strand to SEQ ID NO: 1409282
aaauuagggacacaggaaa

SEQ ID NO: 1409284 - RNA, 19 nt, Artificial Sequence
  Description of Artificial Sequence: Synthetic oligonucleotide
  Sense strand starting at position 2517 of SEQ ID NO: 1243325
cagugaugccaagacuaau

SEQ ID NO: 1409285 - RNA, 19 nt, Artificial Sequence
  Description of Artificial Sequence: Synthetic oligonucleotide
  Antisense strand to SEQ ID NO: 1409284
auuagucuuggcaucacug

SEQ ID NO: 1409286 - RNA, 19 nt, Artificial Sequence
  Description of Artificial Sequence: Synthetic oligonucleotide
  Sense strand starting at position 2523 of SEQ ID NO: 1243325
ugccaagacuaaucuuugu

SEQ ID NO: 1409287 - RNA, 19 nt, Artificial Sequence
  Description of Artificial Sequence: Synthetic oligonucleotide
  Antisense strand to SEQ ID NO: 1409286
acaaagauuagucuuggca

SEQ ID NO: 1409288 - RNA, 19 nt, Artificial Sequence
  Description of Artificial Sequence: Synthetic oligonucleotide
  Sense strand starting at position 2534 of SEQ ID NO: 1243325
aucuuuguugcugaaggaa

SEQ ID NO: 1409289 - RNA, 19 nt, Artificial Sequence
  Description of Artificial Sequence: Synthetic oligonucleotide
  Antisense strand to SEQ ID NO: 1409288
uuccuucagcaacaaagau

SEQ ID NO: 1409290 - RNA, 19 nt, Artificial Sequence
  Description of Artificial Sequence: Synthetic oligonucleotide
  Sense strand starting at position 2616 of SEQ ID NO: 1243325
uugucuccucaucaugagu

SEQ ID NO: 1409291 - RNA, 19 nt, Artificial Sequence
  Description of Artificial Sequence: Synthetic oligonucleotide
  Antisense strand to SEQ ID NO: 1409290
acucaugaugaggagacaa

SEQ ID NO: 1409292 - RNA, 19 nt, Artificial Sequence
  Description of Artificial Sequence: Synthetic oligonucleotide
  Sense strand starting at position 2718 of SEQ ID NO: 1243325
uagugucuuggaggaugga

SEQ ID NO: 1409293 - RNA, 19 nt, Artificial Sequence
  Description of Artificial Sequence: Synthetic oligonucleotide
  Antisense strand to SEQ ID NO: 1409292
uccauccuccaagacacua

SEQ ID NO: 1409294 - RNA, 19 nt, Artificial Sequence
  Description of Artificial Sequence: Synthetic oligonucleotide
  Sense strand starting at position 2750 of SEQ ID NO: 1243325
uguggugcucuugccgaua

SEQ ID NO: 1409295 - RNA, 19 nt, Artificial Sequence
  Description of Artificial Sequence: Synthetic oligonucleotide
  Antisense strand to SEQ ID NO: 1409294
uaucggcaagagcaccaca

SEQ ID NO: 1409296 - RNA, 19 nt, Artificial Sequence
  Description of Artificial Sequence: Synthetic oligonucleotide
  Sense strand starting at position 2813 of SEQ ID NO: 1243325
cugauuuacugcucaguuu

SEQ ID NO: 1409297 - RNA, 19 nt, Artificial Sequence
  Description of Artificial Sequence: Synthetic oligonucleotide
  Antisense strand to SEQ ID NO: 1409296
aaacugagcaguaaaucag

SEQ ID NO: 1409298 - RNA, 19 nt, Artificial Sequence
  Description of Artificial Sequence: Synthetic oligonucleotide
  Sense strand starting at position 2862 of SEQ ID NO: 1243325
gcucaaguccuaggauaua

SEQ ID NO: 1409299 - RNA, 19 nt, Artificial Sequence
  Description of Artificial Sequence: Synthetic oligonucleotide
  Antisense strand to SEQ ID NO: 1409298
uauauccuaggacuugagc

SEQ ID NO: 1409300 - RNA, 19 nt, Artificial Sequence
  Description of Artificial Sequence: Synthetic oligonucleotide
  Sense strand starting at position 2979 of SEQ ID NO: 1243325
accuauuaggcaggcauaa

SEQ ID NO: 1409301 - RNA, 19 nt, Artificial Sequence
  Description of Artificial Sequence: Synthetic oligonucleotide
  Antisense strand to SEQ ID NO: 1409300
uuaugccugccuaauaggu

SEQ ID NO: 1409302 - RNA, 19 nt, Artificial Sequence
  Description of Artificial Sequence: Synthetic oligonucleotide
  Sense strand starting at position 2981 of SEQ ID NO: 1243325
cuauuaggcaggcauaagu

SEQ ID NO: 1409303 - RNA, 19 nt, Artificial Sequence
  Description of Artificial Sequence: Synthetic oligonucleotide
  Antisense strand to SEQ ID NO: 1409302
acuuaugccugccuaauag

SEQ ID NO: 1409304 - RNA, 19 nt, Artificial Sequence
  Description of Artificial Sequence: Synthetic oligonucleotide
  Sense strand starting at position 2992 of SEQ ID NO: 1243325
gcauaagucacaggagacu

SEQ ID NO: 1409305 - RNA, 19 nt, Artificial Sequence
  Description of Artificial Sequence: Synthetic oligonucleotide
  Antisense strand to SEQ ID NO: 1409304
agucuccugugacuuaugc

SEQ ID NO: 1409306 - RNA, 19 nt, Artificial Sequence
  Description of Artificial Sequence: Synthetic oligonucleotide
  Sense strand starting at position 3048 of SEQ ID NO: 1243325
ggcugcuuaggauacauaa

SEQ ID NO: 1409307 - RNA, 19 nt, Artificial Sequence
  Description of Artificial Sequence: Synthetic oligonucleotide
  Antisense strand to SEQ ID NO: 1409306
uuauguauccuaagcagcc

SEQ ID NO: 1409308 - RNA, 19 nt, Artificial Sequence
  Description of Artificial Sequence: Synthetic oligonucleotide
  Sense strand starting at position 3380 of SEQ ID NO: 1243325
uuuauaaaggucugaccaa

SEQ ID NO: 1409309 - RNA, 19 nt, Artificial Sequence
  Description of Artificial Sequence: Synthetic oligonucleotide
  Antisense strand to SEQ ID NO: 1409308
uuggucagaccuuuauaaa

SEQ ID NO: 1409310 - RNA, 19 nt, Artificial Sequence
  Description of Artificial Sequence: Synthetic oligonucleotide
  Sense strand starting at position 3483 of SEQ ID NO: 1243325
ccaauaauauguccaggca

SEQ ID NO: 1409311 - RNA, 19 nt, Artificial Sequence
  Description of Artificial Sequence: Synthetic oligonucleotide
  Antisense strand to SEQ ID NO: 1409310
ugccuggacauauuauugg

SEQ ID NO: 1409312 - RNA, 19 nt, Artificial Sequence
  Description of Artificial Sequence: Synthetic oligonucleotide
  Sense strand starting at position 3513 of SEQ ID NO: 1243325
ucagaaagaucaguuugcu

SEQ ID NO: 1409313 - RNA, 19 nt, Artificial Sequence
  Description of Artificial Sequence: Synthetic oligonucleotide
  Antisense strand to SEQ ID NO: 1409312
agcaaacugaucuuucuga

SEQ ID NO: 1409314 - RNA, 19 nt, Artificial Sequence
  Description of Artificial Sequence: Synthetic oligonucleotide
  Sense strand starting at position 3652 of SEQ ID NO: 1243325
cccauuuguuaugccauca

SEQ ID NO: 1409315 - RNA, 19 nt, Artificial Sequence
  Description of Artificial Sequence: Synthetic oligonucleotide
  Antisense strand to SEQ ID NO: 1409314
ugauggcauaacaaauggg

SEQ ID NO: 1409316 - RNA, 19 nt, Artificial Sequence
  Description of Artificial Sequence: Synthetic oligonucleotide
  Sense strand starting at position 3786 of SEQ ID NO: 1243325
gcacuuagcucaucugaaa

SEQ ID NO: 1409317 - RNA, 19 nt, Artificial Sequence
  Description of Artificial Sequence: Synthetic oligonucleotide
  Antisense strand to SEQ ID NO: 1409316
uuucagaugagcuaagugc

SEQ ID NO: 1409318 - RNA, 19 nt, Artificial Sequence
  Description of Artificial Sequence: Synthetic oligonucleotide
  Sense strand starting at position 3843 of SEQ ID NO: 1243325
cagagaccugcuugauuga

SEQ ID NO: 1409319 - RNA, 19 nt, Artificial Sequence
  Description of Artificial Sequence: Synthetic oligonucleotide
  Antisense strand to SEQ ID NO: 1409318
ucaaucaagcaggucucug

SEQ ID NO: 1409320 - RNA, 19 nt, Artificial Sequence
  Description of Artificial Sequence: Synthetic oligonucleotide
  Sense strand starting at position 3934 of SEQ ID NO: 1243325
uuuacuggugaaugaauca

SEQ ID NO: 1409321 - RNA, 19 nt, Artificial Sequence
  Description of Artificial Sequence: Synthetic oligonucleotide
  Antisense strand to SEQ ID NO: 1409320
ugauucauucaccaguaaa

SEQ ID NO: 1409322 - RNA, 19 nt, Artificial Sequence
  Description of Artificial Sequence: Synthetic oligonucleotide
  Sense strand starting at position 3941 of SEQ ID NO: 1243325
gugaaugaaucagcaaaug

SEQ ID NO: 1409323 - RNA, 19 nt, Artificial Sequence
  Description of Artificial Sequence: Synthetic oligonucleotide
  Antisense strand to SEQ ID NO: 1409322
cauuugcugauucauucac

SEQ ID NO: 1409324 - RNA, 19 nt, Artificial Sequence
  Description of Artificial Sequence: Synthetic oligonucleotide
  Sense strand starting at position 100 of SEQ ID NO: 1243326
ccauguuacugagcaggga

SEQ ID NO: 1409325 - RNA, 19 nt, Artificial Sequence
  Description of Artificial Sequence: Synthetic oligonucleotide
  Antisense strand to SEQ ID NO: 1409324
ucccugcucaguaacaugg

SEQ ID NO: 1409326 - RNA, 19 nt, Artificial Sequence
  Description of Artificial Sequence: Synthetic oligonucleotide
  Sense strand starting at position 321 of SEQ ID NO: 1243326
agugucagcuuccuuaaag

SEQ ID NO: 1409327 - RNA, 19 nt, Artificial Sequence
  Description of Artificial Sequence: Synthetic oligonucleotide
  Antisense strand to SEQ ID NO: 1409326
cuuuaaggaagcugacacu

SEQ ID NO: 1409328 - RNA, 19 nt, Artificial Sequence
  Description of Artificial Sequence: Synthetic oligonucleotide
  Sense strand starting at position 369 of SEQ ID NO: 1243326
agggcucuguggucaaaug

SEQ ID NO: 1409329 - RNA, 19 nt, Artificial Sequence
  Description of Artificial Sequence: Synthetic oligonucleotide
  Antisense strand to SEQ ID NO: 1409328
cauuugaccacagagcccu

SEQ ID NO: 1409330 - RNA, 19 nt, Artificial Sequence
  Description of Artificial Sequence: Synthetic oligonucleotide
  Sense strand starting at position 370 of SEQ ID NO: 1243326
gggcucuguggucaaaugu

SEQ ID NO: 1409331 - RNA, 19 nt, Artificial Sequence
  Description of Artificial Sequence: Synthetic oligonucleotide
  Antisense strand to SEQ ID NO: 1409330
acauuugaccacagagccc

SEQ ID NO: 1409332 - RNA, 19 nt, Artificial Sequence
  Description of Artificial Sequence: Synthetic oligonucleotide
  Sense strand starting at position 376 of SEQ ID NO: 1243326
uguggucaaaugugagguu

SEQ ID NO: 1409333 - RNA, 19 nt, Artificial Sequence
  Description of Artificial Sequence: Synthetic oligonucleotide
  Antisense strand to SEQ ID NO: 1409332
aaccucacauuugaccaca

SEQ ID NO: 1409334 - RNA, 19 nt, Artificial Sequence
  Description of Artificial Sequence: Synthetic oligonucleotide
  Sense strand starting at position 379 of SEQ ID NO: 1243326
ggucaaaugugagguucua

SEQ ID NO: 1409335 - RNA, 19 nt, Artificial Sequence
  Description of Artificial Sequence: Synthetic oligonucleotide
  Antisense strand to SEQ ID NO: 1409334
uagaaccucacauuugacc

SEQ ID NO: 1409336 - RNA, 19 nt, Artificial Sequence
  Description of Artificial Sequence: Synthetic oligonucleotide
  Sense strand starting at position 392 of SEQ ID NO: 1243326
guucuagagucuccuuugu

SEQ ID NO: 1409337 - RNA, 19 nt, Artificial Sequence
  Description of Artificial Sequence: Synthetic oligonucleotide
  Antisense strand to SEQ ID NO: 1409336
acaaaggagacucuagaac

SEQ ID NO: 1409338 - RNA, 19 nt, Artificial Sequence
  Description of Artificial Sequence: Synthetic oligonucleotide
  Sense strand starting at position 428 of SEQ ID NO: 1243326
cuccaccucugcguagaua

SEQ ID NO: 1409339 - RNA, 19 nt, Artificial Sequence
  Description of Artificial Sequence: Synthetic oligonucleotide
  Antisense strand to SEQ ID NO: 1409338
uaucuacgcagagguggag

SEQ ID NO: 1409340 - RNA, 19 nt, Artificial Sequence
  Description of Artificial Sequence: Synthetic oligonucleotide
  Sense strand starting at position 437 of SEQ ID NO: 1243326
ugcguagauacagaacuua

SEQ ID NO: 1409341 - RNA, 19 nt, Artificial Sequence
  Description of Artificial Sequence: Synthetic oligonucleotide
  Antisense strand to SEQ ID NO: 1409340
uaaguucuguaucuacgca

SEQ ID NO: 1409342 - RNA, 19 nt, Artificial Sequence
  Description of Artificial Sequence: Synthetic oligonucleotide
  Sense strand starting at position 508 of SEQ ID NO: 1243326
aauaacagcuaucgggaau

SEQ ID NO: 1409343 - RNA, 19 nt, Artificial Sequence
  Description of Artificial Sequence: Synthetic oligonucleotide
  Antisense strand to SEQ ID NO: 1409342
auucccgauagcuguuauu

SEQ ID NO: 1409344 - RNA, 19 nt, Artificial Sequence
  Description of Artificial Sequence: Synthetic oligonucleotide
  Sense strand starting at position 542 of SEQ ID NO: 1243326
cuguuaagacagugcugua

SEQ ID NO: 1409345 - RNA, 19 nt, Artificial Sequence
  Description of Artificial Sequence: Synthetic oligonucleotide
  Antisense strand to SEQ ID NO: 1409344
uacagcacugucuuaacag

SEQ ID NO: 1409346 - RNA, 19 nt, Artificial Sequence
  Description of Artificial Sequence: Synthetic oligonucleotide
  Sense strand starting at position 612 of SEQ ID NO: 1243326
gugauaugccauuauauga

SEQ ID NO: 1409347 - RNA, 19 nt, Artificial Sequence
  Description of Artificial Sequence: Synthetic oligonucleotide
  Antisense strand to SEQ ID NO: 1409346
ucauauaauggcauaucac

SEQ ID NO: 1409348 - RNA, 19 nt, Artificial Sequence
  Description of Artificial Sequence: Synthetic oligonucleotide
  Sense strand starting at position 617 of SEQ ID NO: 1243326
augccauuauaugaaauga

SEQ ID NO: 1409349 - RNA, 19 nt, Artificial Sequence
  Description of Artificial Sequence: Synthetic oligonucleotide
  Antisense strand to SEQ ID NO: 1409348
ucauuucauauaauggcau

SEQ ID NO: 1409350 - RNA, 19 nt, Artificial Sequence
  Description of Artificial Sequence: Synthetic oligonucleotide
  Sense strand starting at position 720 of SEQ ID NO: 1243326
gaagaaagacuuuguguuu

SEQ ID NO: 1409351 - RNA, 19 nt, Artificial Sequence
  Description of Artificial Sequence: Synthetic oligonucleotide
  Antisense strand to SEQ ID NO: 1409350
aaacacaaagucuuucuuc

SEQ ID NO: 1409352 - RNA, 19 nt, Artificial Sequence
  Description of Artificial Sequence: Synthetic oligonucleotide
  Sense strand starting at position 1054 of SEQ ID NO: 1243326
aggagugacuggugagguu

SEQ ID NO: 1409353 - RNA, 19 nt, Artificial Sequence
  Description of Artificial Sequence: Synthetic oligonucleotide
  Antisense strand to SEQ ID NO: 1409352
aaccucaccagucacuccu

SEQ ID NO: 1409354 - RNA, 19 nt, Artificial Sequence
  Description of Artificial Sequence: Synthetic oligonucleotide
  Sense strand starting at position 1160 of SEQ ID NO: 1243326
aauugagaaggcugauauu

SEQ ID NO: 1409355 - RNA, 19 nt, Artificial Sequence
  Description of Artificial Sequence: Synthetic oligonucleotide
  Antisense strand to SEQ ID NO: 1409354
aauaucagccuucucaauu

SEQ ID NO: 1409356 - RNA, 19 nt, Artificial Sequence
  Description of Artificial Sequence: Synthetic oligonucleotide
  Sense strand starting at position 1512 of SEQ ID NO: 1243326
aggcacugucucuaucaca

SEQ ID NO: 1409357 - RNA, 19 nt, Artificial Sequence
  Description of Artificial Sequence: Synthetic oligonucleotide
  Antisense strand to SEQ ID NO: 1409356
ugugauagagacagugccu

SEQ ID NO: 1409358 - RNA, 19 nt, Artificial Sequence
  Description of Artificial Sequence: Synthetic oligonucleotide
  Sense strand starting at position 2162 of SEQ ID NO: 1243326
uuagaugucgcuuguuuga

SEQ ID NO: 1409359 - RNA, 19 nt, Artificial Sequence
  Description of Artificial Sequence: Synthetic oligonucleotide
  Antisense strand to SEQ ID NO: 1409358
ucaaacaagcgacaucuaa

SEQ ID NO: 1409360 - RNA, 19 nt, Artificial Sequence
  Description of Artificial Sequence: Synthetic oligonucleotide
  Sense strand starting at position 2193 of SEQ ID NO: 1243326
cccaguccuuucucuagau

SEQ ID NO: 1409361 - RNA, 19 nt, Artificial Sequence
  Description of Artificial Sequence: Synthetic oligonucleotide
  Antisense strand to SEQ ID NO: 1409360
aucuagagaaaggacuggg

SEQ ID NO: 1409362 - RNA, 19 nt, Artificial Sequence
  Description of Artificial Sequence: Synthetic oligonucleotide
  Sense strand starting at position 2194 of SEQ ID NO: 1243326
ccaguccuuucucuagauu

SEQ ID NO: 1409363 - RNA, 19 nt, Artificial Sequence
  Description of Artificial Sequence: Synthetic oligonucleotide
  Antisense strand to SEQ ID NO: 1409362
aaucuagagaaaggacugg

SEQ ID NO: 1409364 - RNA, 19 nt, Artificial Sequence
  Description of Artificial Sequence: Synthetic oligonucleotide
  Sense strand starting at position 2197 of SEQ ID NO: 1243326
guccuuucucuagauuggu

SEQ ID NO: 1409365 - RNA, 19 nt, Artificial Sequence
  Description of Artificial Sequence: Synthetic oligonucleotide
  Antisense strand to SEQ ID NO: 1409364
accaaucuagagaaaggac

SEQ ID NO: 1409366 - RNA, 19 nt, Artificial Sequence
  Description of Artificial Sequence: Synthetic oligonucleotide
  Sense strand starting at position 2206 of SEQ ID NO: 1243326
cuagauuggucacaccuca

SEQ ID NO: 1409367 - RNA, 19 nt, Artificial Sequence
  Description of Artificial Sequence: Synthetic oligonucleotide
  Antisense strand to SEQ ID NO: 1409366
ugaggugugaccaaucuag

SEQ ID NO: 1409368 - RNA, 19 nt, Artificial Sequence
  Description of Artificial Sequence: Synthetic oligonucleotide
  Sense strand starting at position 2605 of SEQ ID NO: 1243326
ccucguggaguuuauacua

SEQ ID NO: 1409369 - RNA, 19 nt, Artificial Sequence
  Description of Artificial Sequence: Synthetic oligonucleotide
  Antisense strand to SEQ ID NO: 1409368
uaguauaaacuccacgagg

SEQ ID NO: 1409370 - RNA, 19 nt, Artificial Sequence
  Description of Artificial Sequence: Synthetic oligonucleotide
  Sense strand starting at position 2654 of SEQ ID NO: 1243326
gcaaauauaugauguguga

SEQ ID NO: 1409371 - RNA, 19 nt, Artificial Sequence
  Description of Artificial Sequence: Synthetic oligonucleotide
  Antisense strand to SEQ ID NO: 1409370
ucacacaucauauauuugc

SEQ ID NO: 1409372 - RNA, 19 nt, Artificial Sequence
  Description of Artificial Sequence: Synthetic oligonucleotide
  Sense strand starting at position 2658 of SEQ ID NO: 1243326
auauaugaugugugaggua

SEQ ID NO: 1409373 - RNA, 19 nt, Artificial Sequence
  Description of Artificial Sequence: Synthetic oligonucleotide
  Antisense strand to SEQ ID NO: 1409372
uaccucacacaucauauau

SEQ ID NO: 1409374 - RNA, 19 nt, Artificial Sequence
  Description of Artificial Sequence: Synthetic oligonucleotide
  Sense strand starting at position 2663 of SEQ ID NO: 1243326
ugaugugugagguagugaa

SEQ ID NO: 1409375 - RNA, 19 nt, Artificial Sequence
  Description of Artificial Sequence: Synthetic oligonucleotide
  Antisense strand to SEQ ID NO: 1409374
uucacuaccucacacauca

SEQ ID NO: 1409376 - RNA, 19 nt, Artificial Sequence
  Description of Artificial Sequence: Synthetic oligonucleotide
  Sense strand starting at position 3167 of SEQ ID NO: 1243326
gaacaaagcuccgucgcaa

SEQ ID NO: 1409377 - RNA, 19 nt, Artificial Sequence
  Description of Artificial Sequence: Synthetic oligonucleotide
  Antisense strand to SEQ ID NO: 1409376
uugcgacggagcuuuguuc

SEQ ID NO: 1409378 - RNA, 19 nt, Artificial Sequence
  Description of Artificial Sequence: Synthetic oligonucleotide
  Sense strand starting at position 3519 of SEQ ID NO: 1243326
aucuguuuagccuacaaga

SEQ ID NO: 1409379 - RNA, 19 nt, Artificial Sequence
  Description of Artificial Sequence: Synthetic oligonucleotide
  Antisense strand to SEQ ID NO: 1409378
ucuuguaggcuaaacagau

SEQ ID NO: 1409380 - RNA, 19 nt, Artificial Sequence
  Description of Artificial Sequence: Synthetic oligonucleotide
  Sense strand starting at position 3539 of SEQ ID NO: 1243326
ccaagaaauuggcucugga

SEQ ID NO: 1409381 - RNA, 19 nt, Artificial Sequence
  Description of Artificial Sequence: Synthetic oligonucleotide
  Antisense strand to SEQ ID NO: 1409380
uccagagccaauuucuugg

SEQ ID NO: 1409382 - RNA, 19 nt, Artificial Sequence
  Description of Artificial Sequence: Synthetic oligonucleotide
  Sense strand starting at position 3542 of SEQ ID NO: 1243326
agaaauuggcucuggacag

SEQ ID NO: 1409383 - RNA, 19 nt, Artificial Sequence
  Description of Artificial Sequence: Synthetic oligonucleotide
  Antisense strand to SEQ ID NO: 1409382
cuguccagagccaauuucu

SEQ ID NO: 1409384 - RNA, 19 nt, Artificial Sequence
  Description of Artificial Sequence: Synthetic oligonucleotide
  Sense strand starting at position 3543 of SEQ ID NO: 1243326
gaaauuggcucuggacagu

SEQ ID NO: 1409385 - RNA, 19 nt, Artificial Sequence
  Description of Artificial Sequence: Synthetic oligonucleotide
  Antisense strand to SEQ ID NO: 1409384
acuguccagagccaauuuc

SEQ ID NO: 1409386 - RNA, 19 nt, Artificial Sequence
  Description of Artificial Sequence: Synthetic oligonucleotide
  Sense strand starting at position 3559 of SEQ ID NO: 1243326
agugcugucauccauguau

SEQ ID NO: 1409387 - RNA, 19 nt, Artificial Sequence
  Description of Artificial Sequence: Synthetic oligonucleotide
  Antisense strand to SEQ ID NO: 1409386
auacauggaugacagcacu

SEQ ID NO: 1409388 - RNA, 19 nt, Artificial Sequence
  Description of Artificial Sequence: Synthetic oligonucleotide
  Sense strand starting at position 3561 of SEQ ID NO: 1243326
ugcugucauccauguauuc

SEQ ID NO: 1409389 - RNA, 19 nt, Artificial Sequence
  Description of Artificial Sequence: Synthetic oligonucleotide
  Antisense strand to SEQ ID NO: 1409388
gaauacauggaugacagca

SEQ ID NO: 1409390 - RNA, 19 nt, Artificial Sequence
  Description of Artificial Sequence: Synthetic oligonucleotide
  Sense strand starting at position 3699 of SEQ ID NO: 1243326
gucacugcacccugugaaa

SEQ ID NO: 1409391 - RNA, 19 nt, Artificial Sequence
  Description of Artificial Sequence: Synthetic oligonucleotide
  Antisense strand to SEQ ID NO: 1409390
uuucacagggugcagugac

SEQ ID NO: 1409392 - RNA, 19 nt, Artificial Sequence
  Description of Artificial Sequence: Synthetic oligonucleotide
  Sense strand starting at position 3773 of SEQ ID NO: 1243326
uuuauauaucuguggguuc

SEQ ID NO: 1409393 - RNA, 19 nt, Artificial Sequence
  Description of Artificial Sequence: Synthetic oligonucleotide
  Antisense strand to SEQ ID NO: 1409392
gaacccacagauauauaaa

SEQ ID NO: 1409394 - RNA, 19 nt, Artificial Sequence
  Description of Artificial Sequence: Synthetic oligonucleotide
  Sense strand starting at position 3859 of SEQ ID NO: 1243326
cccgcauguugggaaggau

SEQ ID NO: 1409395 - RNA, 19 nt, Artificial Sequence
  Description of Artificial Sequence: Synthetic oligonucleotide
  Antisense strand to SEQ ID NO: 1409394
auccuucccaacaugcggg

SEQ ID NO: 1409396 - RNA, 19 nt, Artificial Sequence
  Description of Artificial Sequence: Synthetic oligonucleotide
  Sense strand starting at position 3862 of SEQ ID NO: 1243326
gcauguugggaaggaucuu

SEQ ID NO: 1409397 - RNA, 19 nt, Artificial Sequence
  Description of Artificial Sequence: Synthetic oligonucleotide
  Antisense strand to SEQ ID NO: 1409396
aagauccuucccaacaugc

SEQ ID NO: 1409398 - RNA, 19 nt, Artificial Sequence
  Description of Artificial Sequence: Synthetic oligonucleotide
  Sense strand starting at position 3917 of SEQ ID NO: 1243326
agacucuuggcuuagguaa

SEQ ID NO: 1409399 - RNA, 19 nt, Artificial Sequence
  Description of Artificial Sequence: Synthetic oligonucleotide
  Antisense strand to SEQ ID NO: 1409398
uuaccuaagccaagagucu

SEQ ID NO: 1409400 - RNA, 19 nt, Artificial Sequence
  Description of Artificial Sequence: Synthetic oligonucleotide
  Sense strand starting at position 3929 of SEQ ID NO: 1243326
uagguaaucaagggcggaa

SEQ ID NO: 1409401 - RNA, 19 nt, Artificial Sequence
  Description of Artificial Sequence: Synthetic oligonucleotide
  Antisense strand to SEQ ID NO: 1409400
uuccgcccuugauuaccua

SEQ ID NO: 1409402 - RNA, 19 nt, Artificial Sequence
  Description of Artificial Sequence: Synthetic oligonucleotide
  Sense strand starting at position 3931 of SEQ ID NO: 1243326
gguaaucaagggcggaaau

SEQ ID NO: 1409403 - RNA, 19 nt, Artificial Sequence
  Description of Artificial Sequence: Synthetic oligonucleotide
  Antisense strand to SEQ ID NO: 1409402
auuuccgcccuugauuacc

SEQ ID NO: 1409404 - RNA, 19 nt, Artificial Sequence
  Description of Artificial Sequence: Synthetic oligonucleotide
  Sense strand starting at position 71 of SEQ ID NO: 1243327
ucacucccugugcagaaau

SEQ ID NO: 1409405 - RNA, 19 nt, Artificial Sequence
  Description of Artificial Sequence: Synthetic oligonucleotide
  Antisense strand to SEQ ID NO: 1409404
auuucugcacagggaguga

SEQ ID NO: 1409406 - RNA, 19 nt, Artificial Sequence
  Description of Artificial Sequence: Synthetic oligonucleotide
  Sense strand starting at position 73 of SEQ ID NO: 1243327
acucccugugcagaaauua

SEQ ID NO: 1409407 - RNA, 19 nt, Artificial Sequence
  Description of Artificial Sequence: Synthetic oligonucleotide
  Antisense strand to SEQ ID NO: 1409406
uaauuucugcacagggagu

SEQ ID NO: 1409408 - RNA, 19 nt, Artificial Sequence
  Description of Artificial Sequence: Synthetic oligonucleotide
  Sense strand starting at position 240 of SEQ ID NO: 1243327
gcauauaaagacugcuuua

SEQ ID NO: 1409409 - RNA, 19 nt, Artificial Sequence
  Description of Artificial Sequence: Synthetic oligonucleotide
  Antisense strand to SEQ ID NO: 1409408
uaaagcagucuuuauaugc

SEQ ID NO: 1409410 - RNA, 19 nt, Artificial Sequence
  Description of Artificial Sequence: Synthetic oligonucleotide
  Sense strand starting at position 343 of SEQ ID NO: 1243327
uugagaaccauccgugauu

SEQ ID NO: 1409411 - RNA, 19 nt, Artificial Sequence
  Description of Artificial Sequence: Synthetic oligonucleotide
  Antisense strand to SEQ ID NO: 1409410
aaucacggaugguucucaa

SEQ ID NO: 1409412 - RNA, 19 nt, Artificial Sequence
  Description of Artificial Sequence: Synthetic oligonucleotide
  Sense strand starting at position 345 of SEQ ID NO: 1243327
gagaaccauccgugauugu

SEQ ID NO: 1409413 - RNA, 19 nt, Artificial Sequence
  Description of Artificial Sequence: Synthetic oligonucleotide
  Antisense strand to SEQ ID NO: 1409412
acaaucacggaugguucuc

SEQ ID NO: 1409414 - RNA, 19 nt, Artificial Sequence
  Description of Artificial Sequence: Synthetic oligonucleotide
  Sense strand starting at position 364 of SEQ ID NO: 1243327
ggacaauggcucuaagguc

SEQ ID NO: 1409415 - RNA, 19 nt, Artificial Sequence
  Description of Artificial Sequence: Synthetic oligonucleotide
  Antisense strand to SEQ ID NO: 1409414
gaccuuagagccauugucc

SEQ ID NO: 1409416 - RNA, 19 nt, Artificial Sequence
  Description of Artificial Sequence: Synthetic oligonucleotide
  Sense strand starting at position 371 of SEQ ID NO: 1243327
ggcucuaagguccaaacaa

SEQ ID NO: 1409417 - RNA, 19 nt, Artificial Sequence
  Description of Artificial Sequence: Synthetic oligonucleotide
  Antisense strand to SEQ ID NO: 1409416
uuguuuggaccuuagagcc

SEQ ID NO: 1409418 - RNA, 19 nt, Artificial Sequence
  Description of Artificial Sequence: Synthetic oligonucleotide
  Sense strand starting at position 609 of SEQ ID NO: 1243327
guucucuuggcagacaaau

SEQ ID NO: 1409419 - RNA, 19 nt, Artificial Sequence
  Description of Artificial Sequence: Synthetic oligonucleotide
  Antisense strand to SEQ ID NO: 1409418
auuugucugccaagagaac

SEQ ID NO: 1409420 - RNA, 19 nt, Artificial Sequence
  Description of Artificial Sequence: Synthetic oligonucleotide
  Sense strand starting at position 649 of SEQ ID NO: 1243327
agcugagguuccuugaaga

SEQ ID NO: 1409421 - RNA, 19 nt, Artificial Sequence
  Description of Artificial Sequence: Synthetic oligonucleotide
  Antisense strand to SEQ ID NO: 1409420
ucuucaaggaaccucagcu

SEQ ID NO: 1409422 - RNA, 19 nt, Artificial Sequence
  Description of Artificial Sequence: Synthetic oligonucleotide
  Sense strand starting at position 707 of SEQ ID NO: 1243327
uuggcaauuauuggcagau

SEQ ID NO: 1409423 - RNA, 19 nt, Artificial Sequence
  Description of Artificial Sequence: Synthetic oligonucleotide
  Antisense strand to SEQ ID NO: 1409422
aucugccaauaauugccaa

SEQ ID NO: 1409424 - RNA, 19 nt, Artificial Sequence
  Description of Artificial Sequence: Synthetic oligonucleotide
  Sense strand starting at position 708 of SEQ ID NO: 1243327
uggcaauuauuggcagauu

SEQ ID NO: 1409425 - RNA, 19 nt, Artificial Sequence
  Description of Artificial Sequence: Synthetic oligonucleotide
  Antisense strand to SEQ ID NO: 1409424
aaucugccaauaauugcca

SEQ ID NO: 1409426 - RNA, 19 nt, Artificial Sequence
  Description of Artificial Sequence: Synthetic oligonucleotide
  Sense strand starting at position 800 of SEQ ID NO: 1243327
gugauaucuguggccgcau

SEQ ID NO: 1409427 - RNA, 19 nt, Artificial Sequence
  Description of Artificial Sequence: Synthetic oligonucleotide
  Antisense strand to SEQ ID NO: 1409426
augcggccacagauaucac

SEQ ID NO: 1409428 - RNA, 19 nt, Artificial Sequence
  Description of Artificial Sequence: Synthetic oligonucleotide
  Sense strand starting at position 847 of SEQ ID NO: 1243327
agcaguucuguugagggua

SEQ ID NO: 1409429 - RNA, 19 nt, Artificial Sequence
  Description of Artificial Sequence: Synthetic oligonucleotide
  Antisense strand to SEQ ID NO: 1409428
uacccucaacagaacugcu

SEQ ID NO: 1409430 - RNA, 19 nt, Artificial Sequence
  Description of Artificial Sequence: Synthetic oligonucleotide
  Sense strand starting at position 874 of SEQ ID NO: 1243327
gaacauggcuuccugauag

SEQ ID NO: 1409431 - RNA, 19 nt, Artificial Sequence
  Description of Artificial Sequence: Synthetic oligonucleotide
  Antisense strand to SEQ ID NO: 1409430
cuaucaggaagccauguuc

SEQ ID NO: 1409432 - RNA, 19 nt, Artificial Sequence
  Description of Artificial Sequence: Synthetic oligonucleotide
  Sense strand starting at position 947 of SEQ ID NO: 1243327
ggauuauccagccauuggu

SEQ ID NO: 1409433 - RNA, 19 nt, Artificial Sequence
  Description of Artificial Sequence: Synthetic oligonucleotide
  Antisense strand to SEQ ID NO: 1409432
accaauggcuggauaaucc

SEQ ID NO: 1409434 - RNA, 19 nt, Artificial Sequence
  Description of Artificial Sequence: Synthetic oligonucleotide
  Sense strand starting at position 1029 of SEQ ID NO: 1243327
cgcuguccggcauuaugaa

SEQ ID NO: 1409435 - RNA, 19 nt, Artificial Sequence
  Description of Artificial Sequence: Synthetic oligonucleotide
  Antisense strand to SEQ ID NO: 1409434
uucauaaugccggacagcg

SEQ ID NO: 1409436 - RNA, 19 nt, Artificial Sequence
  Description of Artificial Sequence: Synthetic oligonucleotide
  Sense strand starting at position 1071 of SEQ ID NO: 1243327
uggcaacuccaccgauuau

SEQ ID NO: 1409437 - RNA, 19 nt, Artificial Sequence
  Description of Artificial Sequence: Synthetic oligonucleotide
  Antisense strand to SEQ ID NO: 1409436
auaaucgguggaguugcca

SEQ ID NO: 1409438 - RNA, 19 nt, Artificial Sequence
  Description of Artificial Sequence: Synthetic oligonucleotide
  Sense strand starting at position 1082 of SEQ ID NO: 1243327
ccgauuauaauccaagggu

SEQ ID NO: 1409439 - RNA, 19 nt, Artificial Sequence
  Description of Artificial Sequence: Synthetic oligonucleotide
  Antisense strand to SEQ ID NO: 1409438
acccuuggauuauaaucgg

SEQ ID NO: 1409440 - RNA, 19 nt, Artificial Sequence
  Description of Artificial Sequence: Synthetic oligonucleotide
  Sense strand starting at position 1085 of SEQ ID NO: 1243327
auuauaauccaaggguuga

SEQ ID NO: 1409441 - RNA, 19 nt, Artificial Sequence
  Description of Artificial Sequence: Synthetic oligonucleotide
  Antisense strand to SEQ ID NO: 1409440
ucaacccuuggauuauaau

SEQ ID NO: 1409442 - RNA, 19 nt, Artificial Sequence
  Description of Artificial Sequence: Synthetic oligonucleotide
  Sense strand starting at position 1152 of SEQ ID NO: 1243327
cccgaaagccuuugaccau

SEQ ID NO: 1409443 - RNA, 19 nt, Artificial Sequence
  Description of Artificial Sequence: Synthetic oligonucleotide
  Antisense strand to SEQ ID NO: 1409442
auggucaaaggcuuucggg

SEQ ID NO: 1409444 - RNA, 19 nt, Artificial Sequence
  Description of Artificial Sequence: Synthetic oligonucleotide
  Sense strand starting at position 1886 of SEQ ID NO: 1243327
ugcacaaucuuccugauag

SEQ ID NO: 1409445 - RNA, 19 nt, Artificial Sequence
  Description of Artificial Sequence: Synthetic oligonucleotide
  Antisense strand to SEQ ID NO: 1409444
cuaucaggaagauugugca

SEQ ID NO: 1409446 - RNA, 19 nt, Artificial Sequence
  Description of Artificial Sequence: Synthetic oligonucleotide
  Sense strand starting at position 1924 of SEQ ID NO: 1243327
uauuuauagcccuggcgau

SEQ ID NO: 1409447 - RNA, 19 nt, Artificial Sequence
  Description of Artificial Sequence: Synthetic oligonucleotide
  Antisense strand to SEQ ID NO: 1409446
aucgccagggcuauaaaua

SEQ ID NO: 1409448 - RNA, 19 nt, Artificial Sequence
  Description of Artificial Sequence: Synthetic oligonucleotide
  Sense strand starting at position 1925 of SEQ ID NO: 1243327
auuuauagcccuggcgauu

SEQ ID NO: 1409449 - RNA, 19 nt, Artificial Sequence
  Description of Artificial Sequence: Synthetic oligonucleotide
  Antisense strand to SEQ ID NO: 1409448
aaucgccagggcuauaaau

SEQ ID NO: 1409450 - RNA, 19 nt, Artificial Sequence
  Description of Artificial Sequence: Synthetic oligonucleotide
  Sense strand starting at position 2069 of SEQ ID NO: 1243327
uucgcucucuuaguaauuu

SEQ ID NO: 1409451 - RNA, 19 nt, Artificial Sequence
  Description of Artificial Sequence: Synthetic oligonucleotide
  Antisense strand to SEQ ID NO: 1409450
aaauuacuaagagagcgaa

SEQ ID NO: 1409452 - RNA, 19 nt, Artificial Sequence
  Description of Artificial Sequence: Synthetic oligonucleotide
  Sense strand starting at position 2150 of SEQ ID NO: 1243327
gcaaauuguagacgaggga

SEQ ID NO: 1409453 - RNA, 19 nt, Artificial Sequence
  Description of Artificial Sequence: Synthetic oligonucleotide
  Antisense strand to SEQ ID NO: 1409452
ucccucgucuacaauuugc

SEQ ID NO: 1409454 - RNA, 19 nt, Artificial Sequence
  Description of Artificial Sequence: Synthetic oligonucleotide
  Sense strand starting at position 2167 of SEQ ID NO: 1243327
gaagauuggucacucggca

SEQ ID NO: 1409455 - RNA, 19 nt, Artificial Sequence
  Description of Artificial Sequence: Synthetic oligonucleotide
  Antisense strand to SEQ ID NO: 1409454
ugccgagugaccaaucuuc

SEQ ID NO: 1409456 - RNA, 19 nt, Artificial Sequence
  Description of Artificial Sequence: Synthetic oligonucleotide
  Sense strand starting at position 2188 of SEQ ID NO: 1243327
ccucaugaucggcaggauu

SEQ ID NO: 1409457 - RNA, 19 nt, Artificial Sequence
  Description of Artificial Sequence: Synthetic oligonucleotide
  Antisense strand to SEQ ID NO: 1409456
aauccugccgaucaugagg

SEQ ID NO: 1409458 - RNA, 19 nt, Artificial Sequence
  Description of Artificial Sequence: Synthetic oligonucleotide
  Sense strand starting at position 2208 of SEQ ID NO: 1243327
ucccaaaggucacuugaca

SEQ ID NO: 1409459 - RNA, 19 nt, Artificial Sequence
  Description of Artificial Sequence: Synthetic oligonucleotide
  Antisense strand to SEQ ID NO: 1409458
ugucaagugaccuuuggga

SEQ ID NO: 1409460 - RNA, 19 nt, Artificial Sequence
  Description of Artificial Sequence: Synthetic oligonucleotide
  Sense strand starting at position 2552 of SEQ ID NO: 1243327
auggauucuaaugguguuu

SEQ ID NO: 1409461 - RNA, 19 nt, Artificial Sequence
  Description of Artificial Sequence: Synthetic oligonucleotide
  Antisense strand to SEQ ID NO: 1409460
aaacaccauuagaauccau

SEQ ID NO: 1409462 - RNA, 19 nt, Artificial Sequence
  Description of Artificial Sequence: Synthetic oligonucleotide
  Sense strand starting at position 2624 of SEQ ID NO: 1243327
ggaacagaguggguuacau

SEQ ID NO: 1409463 - RNA, 19 nt, Artificial Sequence
  Description of Artificial Sequence: Synthetic oligonucleotide
  Antisense strand to SEQ ID NO: 1409462
auguaacccacucuguucc

SEQ ID NO: 1409464 - RNA, 19 nt, Artificial Sequence
  Description of Artificial Sequence: Synthetic oligonucleotide
  Sense strand starting at position 2636 of SEQ ID NO: 1243327
guuacauaggacuggucua

SEQ ID NO: 1409465 - RNA, 19 nt, Artificial Sequence
  Description of Artificial Sequence: Synthetic oligonucleotide
  Antisense strand to SEQ ID NO: 1409464
uagaccaguccuauguaac

SEQ ID NO: 1409466 - RNA, 19 nt, Artificial Sequence
  Description of Artificial Sequence: Synthetic oligonucleotide
  Sense strand starting at position 3208 of SEQ ID NO: 1243327
aggccagcuugaucuauau

SEQ ID NO: 1409467 - RNA, 19 nt, Artificial Sequence
  Description of Artificial Sequence: Synthetic oligonucleotide
  Antisense strand to SEQ ID NO: 1409466
auauagaucaagcuggccu

SEQ ID NO: 1409468 - RNA, 19 nt, Artificial Sequence
  Description of Artificial Sequence: Synthetic oligonucleotide
  Sense strand starting at position 3214 of SEQ ID NO: 1243327
gcuugaucuauauggugaa

SEQ ID NO: 1409469 - RNA, 19 nt, Artificial Sequence
  Description of Artificial Sequence: Synthetic oligonucleotide
  Antisense strand to SEQ ID NO: 1409468
uucaccauauagaucaagc

SEQ ID NO: 1409470 - RNA, 19 nt, Artificial Sequence
  Description of Artificial Sequence: Synthetic oligonucleotide
  Sense strand starting at position 3573 of SEQ ID NO: 1243327
gcuggcugaccuugaggaa

SEQ ID NO: 1409471 - RNA, 19 nt, Artificial Sequence
  Description of Artificial Sequence: Synthetic oligonucleotide
  Antisense strand to SEQ ID NO: 1409470
uuccucaaggucagccagc

SEQ ID NO: 1409472 - RNA, 19 nt, Artificial Sequence
  Description of Artificial Sequence: Synthetic oligonucleotide
  Sense strand starting at position 3626 of SEQ ID NO: 1243327
cuguuaaaccagggucaca

SEQ ID NO: 1409473 - RNA, 19 nt, Artificial Sequence
  Description of Artificial Sequence: Synthetic oligonucleotide
  Antisense strand to SEQ ID NO: 1409472
ugugacccugguuuaacag

SEQ ID NO: 1409474 - RNA, 19 nt, Artificial Sequence
  Description of Artificial Sequence: Synthetic oligonucleotide
  Sense strand starting at position 3714 of SEQ ID NO: 1243327
gccuauuguacagggaaag

SEQ ID NO: 1409475 - RNA, 19 nt, Artificial Sequence
  Description of Artificial Sequence: Synthetic oligonucleotide
  Antisense strand to SEQ ID NO: 1409474
cuuucccuguacaauaggc

SEQ ID NO: 1409476 - RNA, 19 nt, Artificial Sequence
  Description of Artificial Sequence: Synthetic oligonucleotide
  Sense strand starting at position 3768 of SEQ ID NO: 1243327
guauuaugucuguaaucac

SEQ ID NO: 1409477 - RNA, 19 nt, Artificial Sequence
  Description of Artificial Sequence: Synthetic oligonucleotide
  Antisense strand to SEQ ID NO: 1409476
gugauuacagacauaauac

SEQ ID NO: 1409478 - RNA, 19 nt, Artificial Sequence
  Description of Artificial Sequence: Synthetic oligonucleotide
  Sense strand starting at position 3779 of SEQ ID NO: 1243327
guaaucaccucaccugagu

SEQ ID NO: 1409479 - RNA, 19 nt, Artificial Sequence
  Description of Artificial Sequence: Synthetic oligonucleotide
  Antisense strand to SEQ ID NO: 1409478
acucaggugaggugauuac

SEQ ID NO: 1409480 - RNA, 19 nt, Artificial Sequence
  Description of Artificial Sequence: Synthetic oligonucleotide
  Sense strand starting at position 3825 of SEQ ID NO: 1243327
gguuauacauucucuuagu

SEQ ID NO: 1409481 - RNA, 19 nt, Artificial Sequence
  Description of Artificial Sequence: Synthetic oligonucleotide
  Antisense strand to SEQ ID NO: 1409480
acuaagagaauguauaacc

SEQ ID NO: 1409482 - RNA, 19 nt, Artificial Sequence
  Description of Artificial Sequence: Synthetic oligonucleotide
  Sense strand starting at position 3835 of SEQ ID NO: 1243327
ucucuuaguucuuuggacu

SEQ ID NO: 1409483 - RNA, 19 nt, Artificial Sequence
  Description of Artificial Sequence: Synthetic oligonucleotide
  Antisense strand to SEQ ID NO: 1409482
aguccaaagaacuaagaga

SEQ ID NO: 1409484 - RNA, 19 nt, Artificial Sequence
  Description of Artificial Sequence: Synthetic oligonucleotide
  Sense strand starting at position 6 of SEQ ID NO: 1243328
gagggaagucacuauguuc

SEQ ID NO: 1409485 - RNA, 19 nt, Artificial Sequence
  Description of Artificial Sequence: Synthetic oligonucleotide
  Antisense strand to SEQ ID NO: 1409484
gaacauagugacuucccuc

SEQ ID NO: 1409486 - RNA, 19 nt, Artificial Sequence
  Description of Artificial Sequence: Synthetic oligonucleotide
  Sense strand starting at position 9 of SEQ ID NO: 1243328
ggaagucacuauguucuca

SEQ ID NO: 1409487 - RNA, 19 nt, Artificial Sequence
  Description of Artificial Sequence: Synthetic oligonucleotide
  Antisense strand to SEQ ID NO: 1409486
ugagaacauagugacuucc

SEQ ID NO: 1409488 - RNA, 19 nt, Artificial Sequence
  Description of Artificial Sequence: Synthetic oligonucleotide
  Sense strand starting at position 312 of SEQ ID NO: 1243328
gagcauccgcuuugccaau

SEQ ID NO: 1409489 - RNA, 19 nt, Artificial Sequence
  Description of Artificial Sequence: Synthetic oligonucleotide
  Antisense strand to SEQ ID NO: 1409488
auuggcaaagcggaugcuc

SEQ ID NO: 1409490 - RNA, 19 nt, Artificial Sequence
  Description of Artificial Sequence: Synthetic oligonucleotide
  Sense strand starting at position 323 of SEQ ID NO: 1243328
uugccaaugacugggauga

SEQ ID NO: 1409491 - RNA, 19 nt, Artificial Sequence
  Description of Artificial Sequence: Synthetic oligonucleotide
  Antisense strand to SEQ ID NO: 1409490
ucaucccagucauuggcaa

SEQ ID NO: 1409492 - RNA, 19 nt, Artificial Sequence
  Description of Artificial Sequence: Synthetic oligonucleotide
  Sense strand starting at position 324 of SEQ ID NO: 1243328
ugccaaugacugggaugau

SEQ ID NO: 1409493 - RNA, 19 nt, Artificial Sequence
  Description of Artificial Sequence: Synthetic oligonucleotide
  Antisense strand to SEQ ID NO: 1409492
aucaucccagucauuggca

SEQ ID NO: 1409494 - RNA, 19 nt, Artificial Sequence
  Description of Artificial Sequence: Synthetic oligonucleotide
  Sense strand starting at position 325 of SEQ ID NO: 1243328
gccaaugacugggaugaug

SEQ ID NO: 1409495 - RNA, 19 nt, Artificial Sequence
  Description of Artificial Sequence: Synthetic oligonucleotide
  Antisense strand to SEQ ID NO: 1409494
caucaucccagucauuggc

SEQ ID NO: 1409496 - RNA, 19 nt, Artificial Sequence
  Description of Artificial Sequence: Synthetic oligonucleotide
  Sense strand starting at position 327 of SEQ ID NO: 1243328
caaugacugggaugauguu

SEQ ID NO: 1409497 - RNA, 19 nt, Artificial Sequence
  Description of Artificial Sequence: Synthetic oligonucleotide
  Antisense strand to SEQ ID NO: 1409496
aacaucaucccagucauug

SEQ ID NO: 1409498 - RNA, 19 nt, Artificial Sequence
  Description of Artificial Sequence: Synthetic oligonucleotide
  Sense strand starting at position 354 of SEQ ID NO: 1243328
cguguacugcccggaggaa

SEQ ID NO: 1409499 - RNA, 19 nt, Artificial Sequence
  Description of Artificial Sequence: Synthetic oligonucleotide
  Antisense strand to SEQ ID NO: 1409498
uuccuccgggcaguacacg

SEQ ID NO: 1409500 - RNA, 19 nt, Artificial Sequence
  Description of Artificial Sequence: Synthetic oligonucleotide
  Sense strand starting at position 403 of SEQ ID NO: 1243328
agggauuggucauugccca

SEQ ID NO: 1409501 - RNA, 19 nt, Artificial Sequence
  Description of Artificial Sequence: Synthetic oligonucleotide
  Antisense strand to SEQ ID NO: 1409500
ugggcaaugaccaaucccu

SEQ ID NO: 1409502 - RNA, 19 nt, Artificial Sequence
  Description of Artificial Sequence: Synthetic oligonucleotide
  Sense strand starting at position 532 of SEQ ID NO: 1243328
gggaguccuggauguucuu

SEQ ID NO: 1409503 - RNA, 19 nt, Artificial Sequence
  Description of Artificial Sequence: Synthetic oligonucleotide
  Antisense strand to SEQ ID NO: 1409502
aagaacauccaggacuccc

SEQ ID NO: 1409504 - RNA, 19 nt, Artificial Sequence
  Description of Artificial Sequence: Synthetic oligonucleotide
  Sense strand starting at position 574 of SEQ ID NO: 1243328
uaagguacugcucaaauug

SEQ ID NO: 1409505 - RNA, 19 nt, Artificial Sequence
  Description of Artificial Sequence: Synthetic oligonucleotide
  Antisense strand to SEQ ID NO: 1409504
caauuugagcaguaccuua

SEQ ID NO: 1409506 - RNA, 19 nt, Artificial Sequence
  Description of Artificial Sequence: Synthetic oligonucleotide
  Sense strand starting at position 585 of SEQ ID NO: 1243328
ucaaauugcuccucgauga

SEQ ID NO: 1409507 - RNA, 19 nt, Artificial Sequence
  Description of Artificial Sequence: Synthetic oligonucleotide
  Antisense strand to SEQ ID NO: 1409506
ucaucgaggagcaauuuga

SEQ ID NO: 1409508 - RNA, 19 nt, Artificial Sequence
  Description of Artificial Sequence: Synthetic oligonucleotide
  Sense strand starting at position 589 of SEQ ID NO: 1243328
auugcuccucgaugaauuu

SEQ ID NO: 1409509 - RNA, 19 nt, Artificial Sequence
  Description of Artificial Sequence: Synthetic oligonucleotide
  Antisense strand to SEQ ID NO: 1409508
aaauucaucgaggagcaau

SEQ ID NO: 1409510 - RNA, 19 nt, Artificial Sequence
  Description of Artificial Sequence: Synthetic oligonucleotide
  Sense strand starting at position 695 of SEQ ID NO: 1243328
gugggaguagaaugucauu

SEQ ID NO: 1409511 - RNA, 19 nt, Artificial Sequence
  Description of Artificial Sequence: Synthetic oligonucleotide
  Antisense strand to SEQ ID NO: 1409510
aaugacauucuacucccac

SEQ ID NO: 1409512 - RNA, 19 nt, Artificial Sequence
  Description of Artificial Sequence: Synthetic oligonucleotide
  Sense strand starting at position 698 of SEQ ID NO: 1243328
ggaguagaaugucauuucu

SEQ ID NO: 1409513 - RNA, 19 nt, Artificial Sequence
  Description of Artificial Sequence: Synthetic oligonucleotide
  Antisense strand to SEQ ID NO: 1409512
agaaaugacauucuacucc

SEQ ID NO: 1409514 - RNA, 19 nt, Artificial Sequence
  Description of Artificial Sequence: Synthetic oligonucleotide
  Sense strand starting at position 753 of SEQ ID NO: 1243328
gggccuaggugagucauca

SEQ ID NO: 1409515 - RNA, 19 nt, Artificial Sequence
  Description of Artificial Sequence: Synthetic oligonucleotide
  Antisense strand to SEQ ID NO: 1409514
ugaugacucaccuaggccc

SEQ ID NO: 1409516 - RNA, 19 nt, Artificial Sequence
  Description of Artificial Sequence: Synthetic oligonucleotide
  Sense strand starting at position 757 of SEQ ID NO: 1243328
cuaggugagucaucaagaa

SEQ ID NO: 1409517 - RNA, 19 nt, Artificial Sequence
  Description of Artificial Sequence: Synthetic oligonucleotide
  Antisense strand to SEQ ID NO: 1409516
uucuugaugacucaccuag

SEQ ID NO: 1409518 - RNA, 19 nt, Artificial Sequence
  Description of Artificial Sequence: Synthetic oligonucleotide
  Sense strand starting at position 761 of SEQ ID NO: 1243328
gugagucaucaagaagcac

SEQ ID NO: 1409519 - RNA, 19 nt, Artificial Sequence
  Description of Artificial Sequence: Synthetic oligonucleotide
  Antisense strand to SEQ ID NO: 1409518
gugcuucuugaugacucac

SEQ ID NO: 1409520 - RNA, 19 nt, Artificial Sequence
  Description of Artificial Sequence: Synthetic oligonucleotide
  Sense strand starting at position 843 of SEQ ID NO: 1243328
uccuguaacucuccaggga

SEQ ID NO: 1409521 - RNA, 19 nt, Artificial Sequence
  Description of Artificial Sequence: Synthetic oligonucleotide
  Antisense strand to SEQ ID NO: 1409520
ucccuggagaguuacagga

SEQ ID NO: 1409522 - RNA, 19 nt, Artificial Sequence
  Description of Artificial Sequence: Synthetic oligonucleotide
  Sense strand starting at position 858 of SEQ ID NO: 1243328
gggagucgccacugugaaa

SEQ ID NO: 1409523 - RNA, 19 nt, Artificial Sequence
  Description of Artificial Sequence: Synthetic oligonucleotide
  Antisense strand to SEQ ID NO: 1409522
uuucacaguggcgacuccc

SEQ ID NO: 1409524 - RNA, 19 nt, Artificial Sequence
  Description of Artificial Sequence: Synthetic oligonucleotide
  Sense strand starting at position 1068 of SEQ ID NO: 1243328
ggcucugaggcagaauuaa

SEQ ID NO: 1409525 - RNA, 19 nt, Artificial Sequence
  Description of Artificial Sequence: Synthetic oligonucleotide
  Antisense strand to SEQ ID NO: 1409524
uuaauucugccucagagcc

SEQ ID NO: 1409526 - RNA, 19 nt, Artificial Sequence
  Description of Artificial Sequence: Synthetic oligonucleotide
  Sense strand starting at position 1282 of SEQ ID NO: 1243328
ugaggaagaggcuguugau

SEQ ID NO: 1409527 - RNA, 19 nt, Artificial Sequence
  Description of Artificial Sequence: Synthetic oligonucleotide
  Antisense strand to SEQ ID NO: 1409526
aucaacagccucuuccuca

SEQ ID NO: 1409528 - RNA, 19 nt, Artificial Sequence
  Description of Artificial Sequence: Synthetic oligonucleotide
  Sense strand starting at position 1428 of SEQ ID NO: 1243328
ccaccauuagcgugaaguc

SEQ ID NO: 1409529 - RNA, 19 nt, Artificial Sequence
  Description of Artificial Sequence: Synthetic oligonucleotide
  Antisense strand to SEQ ID NO: 1409528
gacuucacgcuaauggugg

SEQ ID NO: 1409530 - RNA, 19 nt, Artificial Sequence
  Description of Artificial Sequence: Synthetic oligonucleotide
  Sense strand starting at position 1429 of SEQ ID NO: 1243328
caccauuagcgugaaguca

SEQ ID NO: 1409531 - RNA, 19 nt, Artificial Sequence
  Description of Artificial Sequence: Synthetic oligonucleotide
  Antisense strand to SEQ ID NO: 1409530
ugacuucacgcuaauggug

SEQ ID NO: 1409532 - RNA, 19 nt, Artificial Sequence
  Description of Artificial Sequence: Synthetic oligonucleotide
  Sense strand starting at position 1500 of SEQ ID NO: 1243328
ccacguacuccuuguccua

SEQ ID NO: 1409533 - RNA, 19 nt, Artificial Sequence
  Description of Artificial Sequence: Synthetic oligonucleotide
  Antisense strand to SEQ ID NO: 1409532
uaggacaaggaguacgugg

SEQ ID NO: 1409534 - RNA, 19 nt, Artificial Sequence
  Description of Artificial Sequence: Synthetic oligonucleotide
  Sense strand starting at position 1578 of SEQ ID NO: 1243328
uugaguuccugggcuagga

SEQ ID NO: 1409535 - RNA, 19 nt, Artificial Sequence
  Description of Artificial Sequence: Synthetic oligonucleotide
  Antisense strand to SEQ ID NO: 1409534
uccuagcccaggaacucaa

SEQ ID NO: 1409536 - RNA, 19 nt, Artificial Sequence
  Description of Artificial Sequence: Synthetic oligonucleotide
  Sense strand starting at position 1638 of SEQ ID NO: 1243328
ggccgagaugcccagguuu

SEQ ID NO: 1409537 - RNA, 19 nt, Artificial Sequence
  Description of Artificial Sequence: Synthetic oligonucleotide
  Antisense strand to SEQ ID NO: 1409536
aaaccugggcaucucggcc

SEQ ID NO: 1409538 - RNA, 19 nt, Artificial Sequence
  Description of Artificial Sequence: Synthetic oligonucleotide
  Sense strand starting at position 1640 of SEQ ID NO: 1243328
ccgagaugcccagguuucu

SEQ ID NO: 1409539 - RNA, 19 nt, Artificial Sequence
  Description of Artificial Sequence: Synthetic oligonucleotide
  Antisense strand to SEQ ID NO: 1409538
agaaaccugggcaucucgg

SEQ ID NO: 1409540 - RNA, 19 nt, Artificial Sequence
  Description of Artificial Sequence: Synthetic oligonucleotide
  Sense strand starting at position 1649 of SEQ ID NO: 1243328
ccagguuucuggguguaag

SEQ ID NO: 1409541 - RNA, 19 nt, Artificial Sequence
  Description of Artificial Sequence: Synthetic oligonucleotide
  Antisense strand to SEQ ID NO: 1409540
cuuacacccagaaaccugg

SEQ ID NO: 1409542 - RNA, 19 nt, Artificial Sequence
  Description of Artificial Sequence: Synthetic oligonucleotide
  Sense strand starting at position 1933 of SEQ ID NO: 1243328
cuccaucaucguggugaga

SEQ ID NO: 1409543 - RNA, 19 nt, Artificial Sequence
  Description of Artificial Sequence: Synthetic oligonucleotide
  Antisense strand to SEQ ID NO: 1409542
ucucaccacgaugauggag

SEQ ID NO: 1409544 - RNA, 19 nt, Artificial Sequence
  Description of Artificial Sequence: Synthetic oligonucleotide
  Sense strand starting at position 1936 of SEQ ID NO: 1243328
caucaucguggugagacau

SEQ ID NO: 1409545 - RNA, 19 nt, Artificial Sequence
  Description of Artificial Sequence: Synthetic oligonucleotide
  Antisense strand to SEQ ID NO: 1409544
augucucaccacgaugaug

SEQ ID NO: 1409546 - RNA, 19 nt, Artificial Sequence
  Description of Artificial Sequence: Synthetic oligonucleotide
  Sense strand starting at position 2187 of SEQ ID NO: 1243328
ccaggcauguugguacaau

SEQ ID NO: 1409547 - RNA, 19 nt, Artificial Sequence
  Description of Artificial Sequence: Synthetic oligonucleotide
  Antisense strand to SEQ ID NO: 1409546
auuguaccaacaugccugg

SEQ ID NO: 1409548 - RNA, 19 nt, Artificial Sequence
  Description of Artificial Sequence: Synthetic oligonucleotide
  Sense strand starting at position 2682 of SEQ ID NO: 1243328
ccaugaugggauugggagu

SEQ ID NO: 1409549 - RNA, 19 nt, Artificial Sequence
  Description of Artificial Sequence: Synthetic oligonucleotide
  Antisense strand to SEQ ID NO: 1409548
acucccaaucccaucaugg

SEQ ID NO: 1409550 - RNA, 19 nt, Artificial Sequence
  Description of Artificial Sequence: Synthetic oligonucleotide
  Sense strand starting at position 2763 of SEQ ID NO: 1243328
acaccacugcccgagagau

SEQ ID NO: 1409551 - RNA, 19 nt, Artificial Sequence
  Description of Artificial Sequence: Synthetic oligonucleotide
  Antisense strand to SEQ ID NO: 1409550
aucucucgggcaguggugu

SEQ ID NO: 1409552 - RNA, 19 nt, Artificial Sequence
  Description of Artificial Sequence: Synthetic oligonucleotide
  Sense strand starting at position 2788 of SEQ ID NO: 1243328
ucagaauccuggccaaaga

SEQ ID NO: 1409553 - RNA, 19 nt, Artificial Sequence
  Description of Artificial Sequence: Synthetic oligonucleotide
  Antisense strand to SEQ ID NO: 1409552
ucuuuggccaggauucuga

SEQ ID NO: 1409554 - RNA, 19 nt, Artificial Sequence
  Description of Artificial Sequence: Synthetic oligonucleotide
  Sense strand starting at position 2837 of SEQ ID NO: 1243328
cccaguaacucagagucaa

SEQ ID NO: 1409555 - RNA, 19 nt, Artificial Sequence
  Description of Artificial Sequence: Synthetic oligonucleotide
  Antisense strand to SEQ ID NO: 1409554
uugacucugaguuacuggg

SEQ ID NO: 1409556 - RNA, 19 nt, Artificial Sequence
  Description of Artificial Sequence: Synthetic oligonucleotide
  Sense strand starting at position 2847 of SEQ ID NO: 1243328
cagagucaagucugaauuc

SEQ ID NO: 1409557 - RNA, 19 nt, Artificial Sequence
  Description of Artificial Sequence: Synthetic oligonucleotide
  Antisense strand to SEQ ID NO: 1409556
gaauucagacuugacucug

SEQ ID NO: 1409558 - RNA, 19 nt, Artificial Sequence
  Description of Artificial Sequence: Synthetic oligonucleotide
  Sense strand starting at position 2857 of SEQ ID NO: 1243328
ucugaauucuggccugacu

SEQ ID NO: 1409559 - RNA, 19 nt, Artificial Sequence
  Description of Artificial Sequence: Synthetic oligonucleotide
  Antisense strand to SEQ ID NO: 1409558
agucaggccagaauucaga

SEQ ID NO: 1409560 - RNA, 19 nt, Artificial Sequence
  Description of Artificial Sequence: Synthetic oligonucleotide
  Sense strand starting at position 2994 of SEQ ID NO: 1243328
ucaaguguuucuuuccaag

SEQ ID NO: 1409561 - RNA, 19 nt, Artificial Sequence
  Description of Artificial Sequence: Synthetic oligonucleotide
  Antisense strand to SEQ ID NO: 1409560
cuuggaaagaaacacuuga

SEQ ID NO: 1409562 - RNA, 19 nt, Artificial Sequence
  Description of Artificial Sequence: Synthetic oligonucleotide
  Sense strand starting at position 3012 of SEQ ID NO: 1243328
gggcucugccucuaugcaa

SEQ ID NO: 1409563 - RNA, 19 nt, Artificial Sequence
  Description of Artificial Sequence: Synthetic oligonucleotide
  Antisense strand to SEQ ID NO: 1409562
uugcauagaggcagagccc

SEQ ID NO: 1409564 - RNA, 19 nt, Artificial Sequence
  Description of Artificial Sequence: Synthetic oligonucleotide
  Sense strand starting at position 825 of SEQ ID NO: 1243329
aucccugugaggugcuauu

SEQ ID NO: 1409565 - RNA, 19 nt, Artificial Sequence
  Description of Artificial Sequence: Synthetic oligonucleotide
  Antisense strand to SEQ ID NO: 1409564
aauagcaccucacagggau

SEQ ID NO: 1409566 - RNA, 19 nt, Artificial Sequence
  Description of Artificial Sequence: Synthetic oligonucleotide
  Sense strand starting at position 1609 of SEQ ID NO: 1243329
guugauagagagcgagaaa

SEQ ID NO: 1409567 - RNA, 19 nt, Artificial Sequence
  Description of Artificial Sequence: Synthetic oligonucleotide
  Antisense strand to SEQ ID NO: 1409566
uuucucgcucucuaucaac

SEQ ID NO: 1409568 - RNA, 19 nt, Artificial Sequence
  Description of Artificial Sequence: Synthetic oligonucleotide
  Sense strand starting at position 1843 of SEQ ID NO: 1243329
gugacaguuaaccgaagaa

SEQ ID NO: 1409569 - RNA, 19 nt, Artificial Sequence
  Description of Artificial Sequence: Synthetic oligonucleotide
  Antisense strand to SEQ ID NO: 1409568
uucuucgguuaacugucac

SEQ ID NO: 1409570 - RNA, 19 nt, Artificial Sequence
  Description of Artificial Sequence: Synthetic oligonucleotide
  Sense strand starting at position 1855 of SEQ ID NO: 1243329
cgaagaaucugagcuccau

SEQ ID NO: 1409571 - RNA, 19 nt, Artificial Sequence
  Description of Artificial Sequence: Synthetic oligonucleotide
  Antisense strand to SEQ ID NO: 1409570
auggagcucagauucuucg

SEQ ID NO: 1409572 - RNA, 19 nt, Artificial Sequence
  Description of Artificial Sequence: Synthetic oligonucleotide
  Sense strand starting at position 2247 of SEQ ID NO: 1243329
ugaaguaagugcuguuacu

SEQ ID NO: 1409573 - RNA, 19 nt, Artificial Sequence
  Description of Artificial Sequence: Synthetic oligonucleotide
  Antisense strand to SEQ ID NO: 1409572
aguaacagcacuuacuuca

SEQ ID NO: 1409574 - RNA, 19 nt, Artificial Sequence
  Description of Artificial Sequence: Synthetic oligonucleotide
  Sense strand starting at position 2372 of SEQ ID NO: 1243329
caucuagauuuccggugua

SEQ ID NO: 1409575 - RNA, 19 nt, Artificial Sequence
  Description of Artificial Sequence: Synthetic oligonucleotide
  Antisense strand to SEQ ID NO: 1409574
uacaccggaaaucuagaug

SEQ ID NO: 1409576 - RNA, 19 nt, Artificial Sequence
  Description of Artificial Sequence: Synthetic oligonucleotide
  Sense strand starting at position 2375 of SEQ ID NO: 1243329
cuagauuuccgguguaucu

SEQ ID NO: 1409577 - RNA, 19 nt, Artificial Sequence
  Description of Artificial Sequence: Synthetic oligonucleotide
  Antisense strand to SEQ ID NO: 1409576
agauacaccggaaaucuag

SEQ ID NO: 1409578 - RNA, 19 nt, Artificial Sequence
  Description of Artificial Sequence: Synthetic oligonucleotide
  Sense strand starting at position 2382 of SEQ ID NO: 1243329
uccgguguaucuuagaggu

SEQ ID NO: 1409579 - RNA, 19 nt, Artificial Sequence
  Description of Artificial Sequence: Synthetic oligonucleotide
  Antisense strand to SEQ ID NO: 1409578
accucuaagauacaccgga

SEQ ID NO: 1409580 - RNA, 19 nt, Artificial Sequence
  Description of Artificial Sequence: Synthetic oligonucleotide
  Sense strand starting at position 2384 of SEQ ID NO: 1243329
cgguguaucuuagagguua

SEQ ID NO: 1409581 - RNA, 19 nt, Artificial Sequence
  Description of Artificial Sequence: Synthetic oligonucleotide
  Antisense strand to SEQ ID NO: 1409580
uaaccucuaagauacaccg

SEQ ID NO: 1409582 - RNA, 19 nt, Artificial Sequence
  Description of Artificial Sequence: Synthetic oligonucleotide
  Sense strand starting at position 2386 of SEQ ID NO: 1243329
guguaucuuagagguuauc

SEQ ID NO: 1409583 - RNA, 19 nt, Artificial Sequence
  Description of Artificial Sequence: Synthetic oligonucleotide
  Antisense strand to SEQ ID NO: 1409582
gauaaccucuaagauacac

SEQ ID NO: 1409584 - RNA, 19 nt, Artificial Sequence
  Description of Artificial Sequence: Synthetic oligonucleotide
  Sense strand starting at position 2397 of SEQ ID NO: 1243329
agguuaucacccugacuug

SEQ ID NO: 1409585 - RNA, 19 nt, Artificial Sequence
  Description of Artificial Sequence: Synthetic oligonucleotide
  Antisense strand to SEQ ID NO: 1409584
caagucagggugauaaccu

SEQ ID NO: 1409586 - RNA, 19 nt, Artificial Sequence
  Description of Artificial Sequence: Synthetic oligonucleotide
  Sense strand starting at position 2398 of SEQ ID NO: 1243329
gguuaucacccugacuuga

SEQ ID NO: 1409587 - RNA, 19 nt, Artificial Sequence
  Description of Artificial Sequence: Synthetic oligonucleotide
  Antisense strand to SEQ ID NO: 1409586
ucaagucagggugauaacc

SEQ ID NO: 1409588 - RNA, 19 nt, Artificial Sequence
  Description of Artificial Sequence: Synthetic oligonucleotide
  Sense strand starting at position 2400 of SEQ ID NO: 1243329
uuaucacccugacuugaga

SEQ ID NO: 1409589 - RNA, 19 nt, Artificial Sequence
  Description of Artificial Sequence: Synthetic oligonucleotide
  Antisense strand to SEQ ID NO: 1409588
ucucaagucagggugauaa

SEQ ID NO: 1409590 - RNA, 19 nt, Artificial Sequence
  Description of Artificial Sequence: Synthetic oligonucleotide
  Sense strand starting at position 2469 of SEQ ID NO: 1243329
gccuuacugucucucugau

SEQ ID NO: 1409591 - RNA, 19 nt, Artificial Sequence
  Description of Artificial Sequence: Synthetic oligonucleotide
  Antisense strand to SEQ ID NO: 1409590
aucagagagacaguaaggc

SEQ ID NO: 1409592 - RNA, 19 nt, Artificial Sequence
  Description of Artificial Sequence: Synthetic oligonucleotide
  Sense strand starting at position 3237 of SEQ ID NO: 1243329
cugauaagcuguuucuuau

SEQ ID NO: 1409593 - RNA, 19 nt, Artificial Sequence
  Description of Artificial Sequence: Synthetic oligonucleotide
  Antisense strand to SEQ ID NO: 1409592
auaagaaacagcuuaucag

SEQ ID NO: 1409594 - RNA, 19 nt, Artificial Sequence
  Description of Artificial Sequence: Synthetic oligonucleotide
  Sense strand starting at position 3243 of SEQ ID NO: 1243329
agcuguuucuuauaccaag

SEQ ID NO: 1409595 - RNA, 19 nt, Artificial Sequence
  Description of Artificial Sequence: Synthetic oligonucleotide
  Antisense strand to SEQ ID NO: 1409594
cuugguauaagaaacagcu

SEQ ID NO: 1409596 - RNA, 19 nt, Artificial Sequence
  Description of Artificial Sequence: Synthetic oligonucleotide
  Sense strand starting at position 3272 of SEQ ID NO: 1243329
acaguuaauucuuucuugu

SEQ ID NO: 1409597 - RNA, 19 nt, Artificial Sequence
  Description of Artificial Sequence: Synthetic oligonucleotide
  Antisense strand to SEQ ID NO: 1409596
acaagaaagaauuaacugu

SEQ ID NO: 1409598 - RNA, 19 nt, Artificial Sequence
  Description of Artificial Sequence: Synthetic oligonucleotide
  Sense strand starting at position 3286 of SEQ ID NO: 1243329
cuuguuuccugguacuuga

SEQ ID NO: 1409599 - RNA, 19 nt, Artificial Sequence
  Description of Artificial Sequence: Synthetic oligonucleotide
  Antisense strand to SEQ ID NO: 1409598
ucaaguaccaggaaacaag

SEQ ID NO: 1409600 - RNA, 19 nt, Artificial Sequence
  Description of Artificial Sequence: Synthetic oligonucleotide
  Sense strand starting at position 3317 of SEQ ID NO: 1243329
uaggcauuccuguguccuu

SEQ ID NO: 1409601 - RNA, 19 nt, Artificial Sequence
  Description of Artificial Sequence: Synthetic oligonucleotide
  Antisense strand to SEQ ID NO: 1409600
aaggacacaggaaugccua

SEQ ID NO: 1409602 - RNA, 19 nt, Artificial Sequence
  Description of Artificial Sequence: Synthetic oligonucleotide
  Sense strand starting at position 3322 of SEQ ID NO: 1243329
auuccuguguccuugcuau

SEQ ID NO: 1409603 - RNA, 19 nt, Artificial Sequence
  Description of Artificial Sequence: Synthetic oligonucleotide
  Antisense strand to SEQ ID NO: 1409602
auagcaaggacacaggaau

SEQ ID NO: 1409604 - RNA, 19 nt, Artificial Sequence
  Description of Artificial Sequence: Synthetic oligonucleotide
  Sense strand starting at position 3329 of SEQ ID NO: 1243329
uguccuugcuauuggcaaa

SEQ ID NO: 1409605 - RNA, 19 nt, Artificial Sequence
  Description of Artificial Sequence: Synthetic oligonucleotide
  Antisense strand to SEQ ID NO: 1409604
uuugccaauagcaaggaca

SEQ ID NO: 1409606 - RNA, 19 nt, Artificial Sequence
  Description of Artificial Sequence: Synthetic oligonucleotide
  Sense strand starting at position 3332 of SEQ ID NO: 1243329
ccuugcuauuggcaaaugu

SEQ ID NO: 1409607 - RNA, 19 nt, Artificial Sequence
  Description of Artificial Sequence: Synthetic oligonucleotide
  Antisense strand to SEQ ID NO: 1409606
acauuugccaauagcaagg

SEQ ID NO: 1409608 - RNA, 19 nt, Artificial Sequence
  Description of Artificial Sequence: Synthetic oligonucleotide
  Sense strand starting at position 3543 of SEQ ID NO: 1243329
agaccaugcugggcuaauu

SEQ ID NO: 1409609 - RNA, 19 nt, Artificial Sequence
  Description of Artificial Sequence: Synthetic oligonucleotide
  Antisense strand to SEQ ID NO: 1409608
aauuagcccagcauggucu

SEQ ID NO: 1409610 - RNA, 19 nt, Artificial Sequence
  Description of Artificial Sequence: Synthetic oligonucleotide
  Sense strand starting at position 3589 of SEQ ID NO: 1243329
cccuauguugcccaagauu

SEQ ID NO: 1409611 - RNA, 19 nt, Artificial Sequence
  Description of Artificial Sequence: Synthetic oligonucleotide
  Antisense strand to SEQ ID NO: 1409610
aaucuugggcaacauaggg

SEQ ID NO: 1409612 - RNA, 19 nt, Artificial Sequence
  Description of Artificial Sequence: Synthetic oligonucleotide
  Sense strand starting at position 3727 of SEQ ID NO: 1243329
uccuaaguucucuguugca

SEQ ID NO: 1409613 - RNA, 19 nt, Artificial Sequence
  Description of Artificial Sequence: Synthetic oligonucleotide
  Antisense strand to SEQ ID NO: 1409612
ugcaacagagaacuuagga

SEQ ID NO: 1409614 - RNA, 19 nt, Artificial Sequence
  Description of Artificial Sequence: Synthetic oligonucleotide
  Sense strand starting at position 3770 of SEQ ID NO: 1243329
gugagaaagucgccacaga

SEQ ID NO: 1409615 - RNA, 19 nt, Artificial Sequence
  Description of Artificial Sequence: Synthetic oligonucleotide
  Antisense strand to SEQ ID NO: 1409614
ucuguggcgacuuucucac

SEQ ID NO: 1409616 - RNA, 19 nt, Artificial Sequence
  Description of Artificial Sequence: Synthetic oligonucleotide
  Sense strand starting at position 3808 of SEQ ID NO: 1243329
cguggcugugucuaaguaa

SEQ ID NO: 1409617 - RNA, 19 nt, Artificial Sequence
  Description of Artificial Sequence: Synthetic oligonucleotide
  Antisense strand to SEQ ID NO: 1409616
uuacuuagacacagccacg

SEQ ID NO: 1409618 - RNA, 19 nt, Artificial Sequence
  Description of Artificial Sequence: Synthetic oligonucleotide
  Sense strand starting at position 194 of SEQ ID NO: 1243330
uacuuugaguccuaggaag

SEQ ID NO: 1409619 - RNA, 19 nt, Artificial Sequence
  Description of Artificial Sequence: Synthetic oligonucleotide
  Antisense strand to SEQ ID NO: 1409618
cuuccuaggacucaaagua

SEQ ID NO: 1409620 - RNA, 19 nt, Artificial Sequence
  Description of Artificial Sequence: Synthetic oligonucleotide
  Sense strand starting at position 196 of SEQ ID NO: 1243330
cuuugaguccuaggaagga

SEQ ID NO: 1409621 - RNA, 19 nt, Artificial Sequence
  Description of Artificial Sequence: Synthetic oligonucleotide
  Antisense strand to SEQ ID NO: 1409620
uccuuccuaggacucaaag

SEQ ID NO: 1409622 - RNA, 19 nt, Artificial Sequence
  Description of Artificial Sequence: Synthetic oligonucleotide
  Sense strand starting at position 228 of SEQ ID NO: 1243330
aagagagcucagggugaau

SEQ ID NO: 1409623 - RNA, 19 nt, Artificial Sequence
  Description of Artificial Sequence: Synthetic oligonucleotide
  Antisense strand to SEQ ID NO: 1409622
auucacccugagcucucuu

SEQ ID NO: 1409624 - RNA, 19 nt, Artificial Sequence
  Description of Artificial Sequence: Synthetic oligonucleotide
  Sense strand starting at position 332 of SEQ ID NO: 1243330
uaccguucuaggugcugaa

SEQ ID NO: 1409625 - RNA, 19 nt, Artificial Sequence
  Description of Artificial Sequence: Synthetic oligonucleotide
  Antisense strand to SEQ ID NO: 1409624
uucagcaccuagaacggua

SEQ ID NO: 1409626 - RNA, 19 nt, Artificial Sequence
  Description of Artificial Sequence: Synthetic oligonucleotide
  Sense strand starting at position 336 of SEQ ID NO: 1243330
guucuaggugcugaacaga

SEQ ID NO: 1409627 - RNA, 19 nt, Artificial Sequence
  Description of Artificial Sequence: Synthetic oligonucleotide
  Antisense strand to SEQ ID NO: 1409626
ucuguucagcaccuagaac

SEQ ID NO: 1409628 - RNA, 19 nt, Artificial Sequence
  Description of Artificial Sequence: Synthetic oligonucleotide
  Sense strand starting at position 2207 of SEQ ID NO: 1243330
accuuuccuucccguuauu

SEQ ID NO: 1409629 - RNA, 19 nt, Artificial Sequence
  Description of Artificial Sequence: Synthetic oligonucleotide
  Antisense strand to SEQ ID NO: 1409628
aauaacgggaaggaaaggu

SEQ ID NO: 1409630 - RNA, 19 nt, Artificial Sequence
  Description of Artificial Sequence: Synthetic oligonucleotide
  Sense strand starting at position 2234 of SEQ ID NO: 1243330
gugucuggcugcuuaggau

SEQ ID NO: 1409631 - RNA, 19 nt, Artificial Sequence
  Description of Artificial Sequence: Synthetic oligonucleotide
  Antisense strand to SEQ ID NO: 1409630
auccuaagcagccagacac

SEQ ID NO: 1409632 - RNA, 19 nt, Artificial Sequence
  Description of Artificial Sequence: Synthetic oligonucleotide
  Sense strand starting at position 2271 of SEQ ID NO: 1243330
gagagugaggccuguagaa

SEQ ID NO: 1409633 - RNA, 19 nt, Artificial Sequence
  Description of Artificial Sequence: Synthetic oligonucleotide
  Antisense strand to SEQ ID NO: 1409632
uucuacaggccucacucuc

SEQ ID NO: 1409634 - RNA, 19 nt, Artificial Sequence
  Description of Artificial Sequence: Synthetic oligonucleotide
  Sense strand starting at position 2295 of SEQ ID NO: 1243330
ccuacuuugccguacucaa

SEQ ID NO: 1409635 - RNA, 19 nt, Artificial Sequence
  Description of Artificial Sequence: Synthetic oligonucleotide
  Antisense strand to SEQ ID NO: 1409634
uugaguacggcaaaguagg

SEQ ID NO: 1409636 - RNA, 19 nt, Artificial Sequence
  Description of Artificial Sequence: Synthetic oligonucleotide
  Sense strand starting at position 2372 of SEQ ID NO: 1243330
gggccuaagugcccuuaaa

SEQ ID NO: 1409637 - RNA, 19 nt, Artificial Sequence
  Description of Artificial Sequence: Synthetic oligonucleotide
  Antisense strand to SEQ ID NO: 1409636
uuuaagggcacuuaggccc

SEQ ID NO: 1409638 - RNA, 19 nt, Artificial Sequence
  Description of Artificial Sequence: Synthetic oligonucleotide
  Sense strand starting at position 2386 of SEQ ID NO: 1243330
uuaaaugggccuuguaaua

SEQ ID NO: 1409639 - RNA, 19 nt, Artificial Sequence
  Description of Artificial Sequence: Synthetic oligonucleotide
  Antisense strand to SEQ ID NO: 1409638
uauuacaaggcccauuuaa

SEQ ID NO: 1409640 - RNA, 19 nt, Artificial Sequence
  Description of Artificial Sequence: Synthetic oligonucleotide
  Sense strand starting at position 2391 of SEQ ID NO: 1243330
ugggccuuguaauaauaaa

SEQ ID NO: 1409641 - RNA, 19 nt, Artificial Sequence
  Description of Artificial Sequence: Synthetic oligonucleotide
  Antisense strand to SEQ ID NO: 1409640
uuuauuauuacaaggccca

SEQ ID NO: 1409642 - RNA, 19 nt, Artificial Sequence
  Description of Artificial Sequence: Synthetic oligonucleotide
  Sense strand starting at position 2489 of SEQ ID NO: 1243330
gcccuaugcucacgggaug

SEQ ID NO: 1409643 - RNA, 19 nt, Artificial Sequence
  Description of Artificial Sequence: Synthetic oligonucleotide
  Antisense strand to SEQ ID NO: 1409642
caucccgugagcauagggc

SEQ ID NO: 1409644 - RNA, 19 nt, Artificial Sequence
  Description of Artificial Sequence: Synthetic oligonucleotide
  Sense strand starting at position 2500 of SEQ ID NO: 1243330
acgggaugccuccgcacaa

SEQ ID NO: 1409645 - RNA, 19 nt, Artificial Sequence
  Description of Artificial Sequence: Synthetic oligonucleotide
  Antisense strand to SEQ ID NO: 1409644
uugugcggaggcaucccgu

SEQ ID NO: 1409646 - RNA, 19 nt, Artificial Sequence
  Description of Artificial Sequence: Synthetic oligonucleotide
  Sense strand starting at position 2643 of SEQ ID NO: 1243330
ccaagcuccugauaugugu

SEQ ID NO: 1409647 - RNA, 19 nt, Artificial Sequence
  Description of Artificial Sequence: Synthetic oligonucleotide
  Antisense strand to SEQ ID NO: 1409646
acacauaucaggagcuugg

SEQ ID NO: 1409648 - RNA, 19 nt, Artificial Sequence
  Description of Artificial Sequence: Synthetic oligonucleotide
  Sense strand starting at position 2649 of SEQ ID NO: 1243330
uccugauauguguacauca

SEQ ID NO: 1409649 - RNA, 19 nt, Artificial Sequence
  Description of Artificial Sequence: Synthetic oligonucleotide
  Antisense strand to SEQ ID NO: 1409648
ugauguacacauaucagga

SEQ ID NO: 1409650 - RNA, 19 nt, Artificial Sequence
  Description of Artificial Sequence: Synthetic oligonucleotide
  Sense strand starting at position 2687 of SEQ ID NO: 1243330
ugggcaagucauugaccua

SEQ ID NO: 1409651 - RNA, 19 nt, Artificial Sequence
  Description of Artificial Sequence: Synthetic oligonucleotide
  Antisense strand to SEQ ID NO: 1409650
uaggucaaugacuugccca

SEQ ID NO: 1409652 - RNA, 19 nt, Artificial Sequence
  Description of Artificial Sequence: Synthetic oligonucleotide
  Sense strand starting at position 2688 of SEQ ID NO: 1243330
gggcaagucauugaccuaa

SEQ ID NO: 1409653 - RNA, 19 nt, Artificial Sequence
  Description of Artificial Sequence: Synthetic oligonucleotide
  Antisense strand to SEQ ID NO: 1409652
uuaggucaaugacuugccc

SEQ ID NO: 1409654 - RNA, 19 nt, Artificial Sequence
  Description of Artificial Sequence: Synthetic oligonucleotide
  Sense strand starting at position 2690 of SEQ ID NO: 1243330
gcaagucauugaccuaagu

SEQ ID NO: 1409655 - RNA, 19 nt, Artificial Sequence
  Description of Artificial Sequence: Synthetic oligonucleotide
  Antisense strand to SEQ ID NO: 1409654
acuuaggucaaugacuugc

SEQ ID NO: 1409656 - RNA, 19 nt, Artificial Sequence
  Description of Artificial Sequence: Synthetic oligonucleotide
  Sense strand starting at position 2720 of SEQ ID NO: 1243330
ccuuuaaacuuggauguca

SEQ ID NO: 1409657 - RNA, 19 nt, Artificial Sequence
  Description of Artificial Sequence: Synthetic oligonucleotide
  Antisense strand to SEQ ID NO: 1409656
ugacauccaaguuuaaagg

SEQ ID NO: 1409658 - RNA, 19 nt, Artificial Sequence
  Description of Artificial Sequence: Synthetic oligonucleotide
  Sense strand starting at position 2722 of SEQ ID NO: 1243330
uuuaaacuuggaugucaau

SEQ ID NO: 1409659 - RNA, 19 nt, Artificial Sequence
  Description of Artificial Sequence: Synthetic oligonucleotide
  Antisense strand to SEQ ID NO: 1409658
auugacauccaaguuuaaa

SEQ ID NO: 1409660 - RNA, 19 nt, Artificial Sequence
  Description of Artificial Sequence: Synthetic oligonucleotide
  Sense strand starting at position 2769 of SEQ ID NO: 1243330
acccuuagagccugguuua

SEQ ID NO: 1409661 - RNA, 19 nt, Artificial Sequence
  Description of Artificial Sequence: Synthetic oligonucleotide
  Antisense strand to SEQ ID NO: 1409660
uaaaccaggcucuaagggu

SEQ ID NO: 1409662 - RNA, 19 nt, Artificial Sequence
  Description of Artificial Sequence: Synthetic oligonucleotide
  Sense strand starting at position 2770 of SEQ ID NO: 1243330
cccuuagagccugguuuau

SEQ ID NO: 1409663 - RNA, 19 nt, Artificial Sequence
  Description of Artificial Sequence: Synthetic oligonucleotide
  Antisense strand to SEQ ID NO: 1409662
auaaaccaggcucuaaggg

SEQ ID NO: 1409664 - RNA, 19 nt, Artificial Sequence
  Description of Artificial Sequence: Synthetic oligonucleotide
  Sense strand starting at position 2776 of SEQ ID NO: 1243330
gagccugguuuaugcaaau

SEQ ID NO: 1409665 - RNA, 19 nt, Artificial Sequence
  Description of Artificial Sequence: Synthetic oligonucleotide
  Antisense strand to SEQ ID NO: 1409664
auuugcauaaaccaggcuc

SEQ ID NO: 1409666 - RNA, 19 nt, Artificial Sequence
  Description of Artificial Sequence: Synthetic oligonucleotide
  Sense strand starting at position 2829 of SEQ ID NO: 1243330
agacuuauccaaggucuca

SEQ ID NO: 1409667 - RNA, 19 nt, Artificial Sequence
  Description of Artificial Sequence: Synthetic oligonucleotide
  Antisense strand to SEQ ID NO: 1409666
ugagaccuuggauaagucu

SEQ ID NO: 1409668 - RNA, 19 nt, Artificial Sequence
  Description of Artificial Sequence: Synthetic oligonucleotide
  Sense strand starting at position 2860 of SEQ ID NO: 1243330
gaagaagauuaggacucua

SEQ ID NO: 1409669 - RNA, 19 nt, Artificial Sequence
  Description of Artificial Sequence: Synthetic oligonucleotide
  Antisense strand to SEQ ID NO: 1409668
uagaguccuaaucuucuuc

SEQ ID NO: 1409670 - RNA, 19 nt, Artificial Sequence
  Description of Artificial Sequence: Synthetic oligonucleotide
  Sense strand starting at position 2921 of SEQ ID NO: 1243330
aggcauagguguugagauc

SEQ ID NO: 1409671 - RNA, 19 nt, Artificial Sequence
  Description of Artificial Sequence: Synthetic oligonucleotide
  Antisense strand to SEQ ID NO: 1409670
gaucucaacaccuaugccu

SEQ ID NO: 1409672 - RNA, 19 nt, Artificial Sequence
  Description of Artificial Sequence: Synthetic oligonucleotide
  Sense strand starting at position 2922 of SEQ ID NO: 1243330
ggcauagguguugagauca

SEQ ID NO: 1409673 - RNA, 19 nt, Artificial Sequence
  Description of Artificial Sequence: Synthetic oligonucleotide
  Antisense strand to SEQ ID NO: 1409672
ugaucucaacaccuaugcc

SEQ ID NO: 1409674 - RNA, 19 nt, Artificial Sequence
  Description of Artificial Sequence: Synthetic oligonucleotide
  Sense strand starting at position 2935 of SEQ ID NO: 1243330
agaucagauuccuuucugu

SEQ ID NO: 1409675 - RNA, 19 nt, Artificial Sequence
  Description of Artificial Sequence: Synthetic oligonucleotide
  Antisense strand to SEQ ID NO: 1409674
acagaaaggaaucugaucu

SEQ ID NO: 1409676 - RNA, 19 nt, Artificial Sequence
  Description of Artificial Sequence: Synthetic oligonucleotide
  Sense strand starting at position 2948 of SEQ ID NO: 1243330
uucuguuccaguugaaagg

SEQ ID NO: 1409677 - RNA, 19 nt, Artificial Sequence
  Description of Artificial Sequence: Synthetic oligonucleotide
  Antisense strand to SEQ ID NO: 1409676
ccuuucaacuggaacagaa

SEQ ID NO: 1409678 - RNA, 19 nt, Artificial Sequence
  Description of Artificial Sequence: Synthetic oligonucleotide
  Sense strand starting at position 2990 of SEQ ID NO: 1243330
aagagagauucccguguga

SEQ ID NO: 1409679 - RNA, 19 nt, Artificial Sequence
  Description of Artificial Sequence: Synthetic oligonucleotide
  Antisense strand to SEQ ID NO: 1409678
ucacacgggaaucucucuu

SEQ ID NO: 1409680 - RNA, 19 nt, Artificial Sequence
  Description of Artificial Sequence: Synthetic oligonucleotide
  Sense strand starting at position 2992 of SEQ ID NO: 1243330
gagagauucccgugugagg

SEQ ID NO: 1409681 - RNA, 19 nt, Artificial Sequence
  Description of Artificial Sequence: Synthetic oligonucleotide
  Antisense strand to SEQ ID NO: 1409680
ccucacacgggaaucucuc

SEQ ID NO: 1409682 - RNA, 19 nt, Artificial Sequence
  Description of Artificial Sequence: Synthetic oligonucleotide
  Sense strand starting at position 3081 of SEQ ID NO: 1243330
ccuguuuccuuaucucuga

SEQ ID NO: 1409683 - RNA, 19 nt, Artificial Sequence
  Description of Artificial Sequence: Synthetic oligonucleotide
  Antisense strand to SEQ ID NO: 1409682
ucagagauaaggaaacagg

SEQ ID NO: 1409684 - RNA, 19 nt, Artificial Sequence
  Description of Artificial Sequence: Synthetic oligonucleotide
  Sense strand starting at position 3122 of SEQ ID NO: 1243330
cgcuuaagguguugugaga

SEQ ID NO: 1409685 - RNA, 19 nt, Artificial Sequence
  Description of Artificial Sequence: Synthetic oligonucleotide
  Antisense strand to SEQ ID NO: 1409684
ucucacaacaccuuaagcg

SEQ ID NO: 1409686 - RNA, 19 nt, Artificial Sequence
  Description of Artificial Sequence: Synthetic oligonucleotide
  Sense strand starting at position 3172 of SEQ ID NO: 1243330
guaugugguaguugcucaa

SEQ ID NO: 1409687 - RNA, 19 nt, Artificial Sequence
  Description of Artificial Sequence: Synthetic oligonucleotide
  Antisense strand to SEQ ID NO: 1409686
uugagcaacuaccacauac

SEQ ID NO: 1409688 - RNA, 19 nt, Artificial Sequence
  Description of Artificial Sequence: Synthetic oligonucleotide
  Sense strand starting at position 3175 of SEQ ID NO: 1243330
ugugguaguugcucaagaa

SEQ ID NO: 1409689 - RNA, 19 nt, Artificial Sequence
  Description of Artificial Sequence: Synthetic oligonucleotide
  Antisense strand to SEQ ID NO: 1409688
uucuugagcaacuaccaca

SEQ ID NO: 1409690 - RNA, 19 nt, Artificial Sequence
  Description of Artificial Sequence: Synthetic oligonucleotide
  Sense strand starting at position 3176 of SEQ ID NO: 1243330
gugguaguugcucaagaaa

SEQ ID NO: 1409691 - RNA, 19 nt, Artificial Sequence
  Description of Artificial Sequence: Synthetic oligonucleotide
  Antisense strand to SEQ ID NO: 1409690
uuucuugagcaacuaccac

SEQ ID NO: 1409692 - RNA, 19 nt, Artificial Sequence
  Description of Artificial Sequence: Synthetic oligonucleotide
  Sense strand starting at position 3179 of SEQ ID NO: 1243330
guaguugcucaagaaagaa

SEQ ID NO: 1409693 - RNA, 19 nt, Artificial Sequence
  Description of Artificial Sequence: Synthetic oligonucleotide
  Antisense strand to SEQ ID NO: 1409692
uucuuucuugagcaacuac

SEQ ID NO: 1409694 - RNA, 19 nt, Artificial Sequence
  Description of Artificial Sequence: Synthetic oligonucleotide
  Sense strand starting at position 3 of SEQ ID NO: 1243331
ggaacuuucgcagaucaaa

SEQ ID NO: 1409695 - RNA, 19 nt, Artificial Sequence
  Description of Artificial Sequence: Synthetic oligonucleotide
  Antisense strand to SEQ ID NO: 1409694
uuugaucugcgaaaguucc

SEQ ID NO: 1409696 - RNA, 19 nt, Artificial Sequence
  Description of Artificial Sequence: Synthetic oligonucleotide
  Sense strand starting at position 11 of SEQ ID NO: 1243331
cgcagaucaaagugggaaa

SEQ ID NO: 1409697 - RNA, 19 nt, Artificial Sequence
  Description of Artificial Sequence: Synthetic oligonucleotide
  Antisense strand to SEQ ID NO: 1409696
uuucccacuuugaucugcg

SEQ ID NO: 1409698 - RNA, 19 nt, Artificial Sequence
  Description of Artificial Sequence: Synthetic oligonucleotide
  Sense strand starting at position 116 of SEQ ID NO: 1243331
auagaauagagcugguaua

SEQ ID NO: 1409699 - RNA, 19 nt, Artificial Sequence
  Description of Artificial Sequence: Synthetic oligonucleotide
  Antisense strand to SEQ ID NO: 1409698
uauaccagcucuauucuau

SEQ ID NO: 1409700 - RNA, 19 nt, Artificial Sequence
  Description of Artificial Sequence: Synthetic oligonucleotide
  Sense strand starting at position 117 of SEQ ID NO: 1243331
uagaauagagcugguauaa

SEQ ID NO: 1409701 - RNA, 19 nt, Artificial Sequence
  Description of Artificial Sequence: Synthetic oligonucleotide
  Antisense strand to SEQ ID NO: 1409700
uuauaccagcucuauucua

SEQ ID NO: 1409702 - RNA, 19 nt, Artificial Sequence
  Description of Artificial Sequence: Synthetic oligonucleotide
  Sense strand starting at position 140 of SEQ ID NO: 1243331
agcuuuauaucaguucuag

SEQ ID NO: 1409703 - RNA, 19 nt, Artificial Sequence
  Description of Artificial Sequence: Synthetic oligonucleotide
  Antisense strand to SEQ ID NO: 1409702
cuagaacugauauaaagcu

SEQ ID NO: 1409704 - RNA, 19 nt, Artificial Sequence
  Description of Artificial Sequence: Synthetic oligonucleotide
  Sense strand starting at position 168 of SEQ ID NO: 1243331
agaccuuuggccugugaau

SEQ ID NO: 1409705 - RNA, 19 nt, Artificial Sequence
  Description of Artificial Sequence: Synthetic oligonucleotide
  Antisense strand to SEQ ID NO: 1409704
auucacaggccaaaggucu

SEQ ID NO: 1409706 - RNA, 19 nt, Artificial Sequence
  Description of Artificial Sequence: Synthetic oligonucleotide
  Sense strand starting at position 180 of SEQ ID NO: 1243331
ugugaauguccucaucccu

SEQ ID NO: 1409707 - RNA, 19 nt, Artificial Sequence
  Description of Artificial Sequence: Synthetic oligonucleotide
  Antisense strand to SEQ ID NO: 1409706
agggaugaggacauucaca

SEQ ID NO: 1409708 - RNA, 19 nt, Artificial Sequence
  Description of Artificial Sequence: Synthetic oligonucleotide
  Sense strand starting at position 208 of SEQ ID NO: 1243331
ggagacuaucacuguucca

SEQ ID NO: 1409709 - RNA, 19 nt, Artificial Sequence
  Description of Artificial Sequence: Synthetic oligonucleotide
  Antisense strand to SEQ ID NO: 1409708
uggaacagugauagucucc

SEQ ID NO: 1409710 - RNA, 19 nt, Artificial Sequence
  Description of Artificial Sequence: Synthetic oligonucleotide
  Sense strand starting at position 258 of SEQ ID NO: 1243331
ggcucacugaugugaucag

SEQ ID NO: 1409711 - RNA, 19 nt, Artificial Sequence
  Description of Artificial Sequence: Synthetic oligonucleotide
  Antisense strand to SEQ ID NO: 1409710
cugaucacaucagugagcc

SEQ ID NO: 1409712 - RNA, 19 nt, Artificial Sequence
  Description of Artificial Sequence: Synthetic oligonucleotide
  Sense strand starting at position 335 of SEQ ID NO: 1243331
augguaguauaguuuauca

SEQ ID NO: 1409713 - RNA, 19 nt, Artificial Sequence
  Description of Artificial Sequence: Synthetic oligonucleotide
  Antisense strand to SEQ ID NO: 1409712
ugauaaacuauacuaccau

SEQ ID NO: 1409714 - RNA, 19 nt, Artificial Sequence
  Description of Artificial Sequence: Synthetic oligonucleotide
  Sense strand starting at position 337 of SEQ ID NO: 1243331
gguaguauaguuuaucaga

SEQ ID NO: 1409715 - RNA, 19 nt, Artificial Sequence
  Description of Artificial Sequence: Synthetic oligonucleotide
  Antisense strand to SEQ ID NO: 1409714
ucugauaaacuauacuacc

SEQ ID NO: 1409716 - RNA, 19 nt, Artificial Sequence
  Description of Artificial Sequence: Synthetic oligonucleotide
  Sense strand starting at position 544 of SEQ ID NO: 1243331
ccacucaccgcagaguauu

SEQ ID NO: 1409717 - RNA, 19 nt, Artificial Sequence
  Description of Artificial Sequence: Synthetic oligonucleotide
  Antisense strand to SEQ ID NO: 1409716
aauacucugcggugagugg

SEQ ID NO: 1409718 - RNA, 19 nt, Artificial Sequence
  Description of Artificial Sequence: Synthetic oligonucleotide
  Sense strand starting at position 668 of SEQ ID NO: 1243331
gaaagcugccauugacaga

SEQ ID NO: 1409719 - RNA, 19 nt, Artificial Sequence
  Description of Artificial Sequence: Synthetic oligonucleotide
  Antisense strand to SEQ ID NO: 1409718
ucugucaauggcagcuuuc

SEQ ID NO: 1409720 - RNA, 19 nt, Artificial Sequence
  Description of Artificial Sequence: Synthetic oligonucleotide
  Sense strand starting at position 699 of SEQ ID NO: 1243331
cccugucuugggugaggga

SEQ ID NO: 1409721 - RNA, 19 nt, Artificial Sequence
  Description of Artificial Sequence: Synthetic oligonucleotide
  Antisense strand to SEQ ID NO: 1409720
ucccucacccaagacaggg

SEQ ID NO: 1409722 - RNA, 19 nt, Artificial Sequence
  Description of Artificial Sequence: Synthetic oligonucleotide
  Sense strand starting at position 747 of SEQ ID NO: 1243331
uuugucccucuauagaguu

SEQ ID NO: 1409723 - RNA, 19 nt, Artificial Sequence
  Description of Artificial Sequence: Synthetic oligonucleotide
  Antisense strand to SEQ ID NO: 1409722
aacucuauagagggacaaa

SEQ ID NO: 1409724 - RNA, 19 nt, Artificial Sequence
  Description of Artificial Sequence: Synthetic oligonucleotide
  Sense strand starting at position 2078 of SEQ ID NO: 1243331
cuggaaucguuccucauga

SEQ ID NO: 1409725 - RNA, 19 nt, Artificial Sequence
  Description of Artificial Sequence: Synthetic oligonucleotide
  Antisense strand to SEQ ID NO: 1409724
ucaugaggaacgauuccag

SEQ ID NO: 1409726 - RNA, 19 nt, Artificial Sequence
  Description of Artificial Sequence: Synthetic oligonucleotide
  Sense strand starting at position 2079 of SEQ ID NO: 1243331
uggaaucguuccucaugaa

SEQ ID NO: 1409727 - RNA, 19 nt, Artificial Sequence
  Description of Artificial Sequence: Synthetic oligonucleotide
  Antisense strand to SEQ ID NO: 1409726
uucaugaggaacgauucca

SEQ ID NO: 1409728 - RNA, 19 nt, Artificial Sequence
  Description of Artificial Sequence: Synthetic oligonucleotide
  Sense strand starting at position 2080 of SEQ ID NO: 1243331
ggaaucguuccucaugaaa

SEQ ID NO: 1409729 - RNA, 19 nt, Artificial Sequence
  Description of Artificial Sequence: Synthetic oligonucleotide
  Antisense strand to SEQ ID NO: 1409728
uuucaugaggaacgauucc

SEQ ID NO: 1409730 - RNA, 19 nt, Artificial Sequence
  Description of Artificial Sequence: Synthetic oligonucleotide
  Sense strand starting at position 2407 of SEQ ID NO: 1243331
guguguuucagaguggcgu

SEQ ID NO: 1409731 - RNA, 19 nt, Artificial Sequence
  Description of Artificial Sequence: Synthetic oligonucleotide
  Antisense strand to SEQ ID NO: 1409730
acgccacucugaaacacac

SEQ ID NO: 1409732 - RNA, 19 nt, Artificial Sequence
  Description of Artificial Sequence: Synthetic oligonucleotide
  Sense strand starting at position 2550 of SEQ ID NO: 1243331
ucuaccuauuggguaaaua

SEQ ID NO: 1409733 - RNA, 19 nt, Artificial Sequence
  Description of Artificial Sequence: Synthetic oligonucleotide
  Antisense strand to SEQ ID NO: 1409732
uauuuacccaauagguaga

SEQ ID NO: 1409734 - RNA, 19 nt, Artificial Sequence
  Description of Artificial Sequence: Synthetic oligonucleotide
  Sense strand starting at position 2636 of SEQ ID NO: 1243331
ugugaauauagagguuaca

SEQ ID NO: 1409735 - RNA, 19 nt, Artificial Sequence
  Description of Artificial Sequence: Synthetic oligonucleotide
  Antisense strand to SEQ ID NO: 1409734
uguaaccucuauauucaca

SEQ ID NO: 1409736 - RNA, 19 nt, Artificial Sequence
  Description of Artificial Sequence: Synthetic oligonucleotide
  Sense strand starting at position 3026 of SEQ ID NO: 1243331
uggucuguuacucaggcaa

SEQ ID NO: 1409737 - RNA, 19 nt, Artificial Sequence
  Description of Artificial Sequence: Synthetic oligonucleotide
  Antisense strand to SEQ ID NO: 1409736
uugccugaguaacagacca

SEQ ID NO: 1409738 - RNA, 19 nt, Artificial Sequence
  Description of Artificial Sequence: Synthetic oligonucleotide
  Sense strand starting at position 3110 of SEQ ID NO: 1243331
aauguaaggauugguaugu

SEQ ID NO: 1409739 - RNA, 19 nt, Artificial Sequence
  Description of Artificial Sequence: Synthetic oligonucleotide
  Antisense strand to SEQ ID NO: 1409738
acauaccaauccuuacauu

SEQ ID NO: 1409740 - RNA, 19 nt, Artificial Sequence
  Description of Artificial Sequence: Synthetic oligonucleotide
  Sense strand starting at position 3111 of SEQ ID NO: 1243331
auguaaggauugguauguu

SEQ ID NO: 1409741 - RNA, 19 nt, Artificial Sequence
  Description of Artificial Sequence: Synthetic oligonucleotide
  Antisense strand to SEQ ID NO: 1409740
aacauaccaauccuuacau

SEQ ID NO: 1409742 - RNA, 19 nt, Artificial Sequence
  Description of Artificial Sequence: Synthetic oligonucleotide
  Sense strand starting at position 3114 of SEQ ID NO: 1243331
uaaggauugguauguugac

SEQ ID NO: 1409743 - RNA, 19 nt, Artificial Sequence
  Description of Artificial Sequence: Synthetic oligonucleotide
  Antisense strand to SEQ ID NO: 1409742
gucaacauaccaauccuua

SEQ ID NO: 1409744 - RNA, 19 nt, Artificial Sequence
  Description of Artificial Sequence: Synthetic oligonucleotide
  Sense strand starting at position 3120 of SEQ ID NO: 1243331
uugguauguugacuaaaga

SEQ ID NO: 1409745 - RNA, 19 nt, Artificial Sequence
  Description of Artificial Sequence: Synthetic oligonucleotide
  Antisense strand to SEQ ID NO: 1409744
ucuuuagucaacauaccaa

SEQ ID NO: 1409746 - RNA, 19 nt, Artificial Sequence
  Description of Artificial Sequence: Synthetic oligonucleotide
  Sense strand starting at position 3178 of SEQ ID NO: 1243331
uuagaagccuuauugagga

SEQ ID NO: 1409747 - RNA, 19 nt, Artificial Sequence
  Description of Artificial Sequence: Synthetic oligonucleotide
  Antisense strand to SEQ ID NO: 1409746
uccucaauaaggcuucuaa

SEQ ID NO: 1409748 - RNA, 19 nt, Artificial Sequence
  Description of Artificial Sequence: Synthetic oligonucleotide
  Sense strand starting at position 3210 of SEQ ID NO: 1243331
ccuguagcccaggaguaau

SEQ ID NO: 1409749 - RNA, 19 nt, Artificial Sequence
  Description of Artificial Sequence: Synthetic oligonucleotide
  Antisense strand to SEQ ID NO: 1409748
auuacuccugggcuacagg

SEQ ID NO: 1409750 - RNA, 19 nt, Artificial Sequence
  Description of Artificial Sequence: Synthetic oligonucleotide
  Sense strand starting at position 3264 of SEQ ID NO: 1243331
gguuauacauaggugaaga

SEQ ID NO: 1409751 - RNA, 19 nt, Artificial Sequence
  Description of Artificial Sequence: Synthetic oligonucleotide
  Antisense strand to SEQ ID NO: 1409750
ucuucaccuauguauaacc

SEQ ID NO: 1409752 - RNA, 19 nt, Artificial Sequence
  Description of Artificial Sequence: Synthetic oligonucleotide
  Sense strand starting at position 3265 of SEQ ID NO: 1243331
guuauacauaggugaagau

SEQ ID NO: 1409753 - RNA, 19 nt, Artificial Sequence
  Description of Artificial Sequence: Synthetic oligonucleotide
  Antisense strand to SEQ ID NO: 1409752
aucuucaccuauguauaac

SEQ ID NO: 1409754 - RNA, 19 nt, Artificial Sequence
  Description of Artificial Sequence: Synthetic oligonucleotide
  Sense strand starting at position 3315 of SEQ ID NO: 1243331
ggauaaguauaucugguua

SEQ ID NO: 1409755 - RNA, 19 nt, Artificial Sequence
  Description of Artificial Sequence: Synthetic oligonucleotide
  Antisense strand to SEQ ID NO: 1409754
uaaccagauauacuuaucc

SEQ ID NO: 1409756 - RNA, 19 nt, Artificial Sequence
  Description of Artificial Sequence: Synthetic oligonucleotide
  Sense strand starting at position 3319 of SEQ ID NO: 1243331
aaguauaucugguuauaga

SEQ ID NO: 1409757 - RNA, 19 nt, Artificial Sequence
  Description of Artificial Sequence: Synthetic oligonucleotide
  Antisense strand to SEQ ID NO: 1409756
ucuauaaccagauauacuu

SEQ ID NO: 1409758 - RNA, 19 nt, Artificial Sequence
  Description of Artificial Sequence: Synthetic oligonucleotide
  Sense strand starting at position 3334 of SEQ ID NO: 1243331
uagauugcagaguauaauc

SEQ ID NO: 1409759 - RNA, 19 nt, Artificial Sequence
  Description of Artificial Sequence: Synthetic oligonucleotide
  Antisense strand to SEQ ID NO: 1409758
gauuauacucugcaaucua

SEQ ID NO: 1409760 - RNA, 19 nt, Artificial Sequence
  Description of Artificial Sequence: Synthetic oligonucleotide
  Sense strand starting at position 3336 of SEQ ID NO: 1243331
gauugcagaguauaaucau

SEQ ID NO: 1409761 - RNA, 19 nt, Artificial Sequence
  Description of Artificial Sequence: Synthetic oligonucleotide
  Antisense strand to SEQ ID NO: 1409760
augauuauacucugcaauc

SEQ ID NO: 1409762 - RNA, 19 nt, Artificial Sequence
  Description of Artificial Sequence: Synthetic oligonucleotide
  Sense strand starting at position 3339 of SEQ ID NO: 1243331
ugcagaguauaaucauuaa

SEQ ID NO: 1409763 - RNA, 19 nt, Artificial Sequence
  Description of Artificial Sequence: Synthetic oligonucleotide
  Antisense strand to SEQ ID NO: 1409762
uuaaugauuauacucugca

SEQ ID NO: 1409764 - RNA, 19 nt, Artificial Sequence
  Description of Artificial Sequence: Synthetic oligonucleotide
  Sense strand starting at position 3359 of SEQ ID NO: 1243331
ccugucagacaugaucgua

SEQ ID NO: 1409765 - RNA, 19 nt, Artificial Sequence
  Description of Artificial Sequence: Synthetic oligonucleotide
  Antisense strand to SEQ ID NO: 1409764
uacgaucaugucugacagg

SEQ ID NO: 1409766 - RNA, 19 nt, Artificial Sequence
  Description of Artificial Sequence: Synthetic oligonucleotide
  Sense strand starting at position 3375 of SEQ ID NO: 1243331
guauguuuaggagaaggca

SEQ ID NO: 1409767 - RNA, 19 nt, Artificial Sequence
  Description of Artificial Sequence: Synthetic oligonucleotide
  Antisense strand to SEQ ID NO: 1409766
ugccuucuccuaaacauac

SEQ ID NO: 1409768 - RNA, 19 nt, Artificial Sequence
  Description of Artificial Sequence: Synthetic oligonucleotide
  Sense strand starting at position 3389 of SEQ ID NO: 1243331
aggcaaagaguaggucauu

SEQ ID NO: 1409769 - RNA, 19 nt, Artificial Sequence
  Description of Artificial Sequence: Synthetic oligonucleotide
  Antisense strand to SEQ ID NO: 1409768
aaugaccuacucuuugccu

SEQ ID NO: 1409770 - RNA, 19 nt, Artificial Sequence
  Description of Artificial Sequence: Synthetic oligonucleotide
  Sense strand starting at position 3403 of SEQ ID NO: 1243331
ucauuuaucuuugaaggaa

SEQ ID NO: 1409771 - RNA, 19 nt, Artificial Sequence
  Description of Artificial Sequence: Synthetic oligonucleotide
  Antisense strand to SEQ ID NO: 1409770
uuccuucaaagauaaauga

SEQ ID NO: 1409772 - RNA, 19 nt, Artificial Sequence
  Description of Artificial Sequence: Synthetic oligonucleotide
  Sense strand starting at position 3406 of SEQ ID NO: 1243331
uuuaucuuugaaggaaugu

SEQ ID NO: 1409773 - RNA, 19 nt, Artificial Sequence
  Description of Artificial Sequence: Synthetic oligonucleotide
  Antisense strand to SEQ ID NO: 1409772
acauuccuucaaagauaaa

SEQ ID NO: 1409774 - RNA, 19 nt, Artificial Sequence
  Description of Artificial Sequence: Synthetic oligonucleotide
  Sense strand starting at position 208 of SEQ ID NO: 1243332
ccauuucccuguuuaguau

SEQ ID NO: 1409775 - RNA, 19 nt, Artificial Sequence
  Description of Artificial Sequence: Synthetic oligonucleotide
  Antisense strand to SEQ ID NO: 1409774
auacuaaacagggaaaugg

SEQ ID NO: 1409776 - RNA, 19 nt, Artificial Sequence
  Description of Artificial Sequence: Synthetic oligonucleotide
  Sense strand starting at position 215 of SEQ ID NO: 1243332
ccuguuuaguauucugauu

SEQ ID NO: 1409777 - RNA, 19 nt, Artificial Sequence
  Description of Artificial Sequence: Synthetic oligonucleotide
  Antisense strand to SEQ ID NO: 1409776
aaucagaauacuaaacagg

SEQ ID NO: 1409778 - RNA, 19 nt, Artificial Sequence
  Description of Artificial Sequence: Synthetic oligonucleotide
  Sense strand starting at position 220 of SEQ ID NO: 1243332
uuaguauucugauugcacu

SEQ ID NO: 1409779 - RNA, 19 nt, Artificial Sequence
  Description of Artificial Sequence: Synthetic oligonucleotide
  Antisense strand to SEQ ID NO: 1409778
agugcaaucagaauacuaa

SEQ ID NO: 1409780 - RNA, 19 nt, Artificial Sequence
  Description of Artificial Sequence: Synthetic oligonucleotide
  Sense strand starting at position 248 of SEQ ID NO: 1243332
ugauucgagauccacuagu

SEQ ID NO: 1409781 - RNA, 19 nt, Artificial Sequence
  Description of Artificial Sequence: Synthetic oligonucleotide
  Antisense strand to SEQ ID NO: 1409780
acuaguggaucucgaauca

SEQ ID NO: 1409782 - RNA, 19 nt, Artificial Sequence
  Description of Artificial Sequence: Synthetic oligonucleotide
  Sense strand starting at position 287 of SEQ ID NO: 1243332
gucucugucuuccaccauu

SEQ ID NO: 1409783 - RNA, 19 nt, Artificial Sequence
  Description of Artificial Sequence: Synthetic oligonucleotide
  Antisense strand to SEQ ID NO: 1409782
aaugguggaagacagagac

SEQ ID NO: 1409784 - RNA, 19 nt, Artificial Sequence
  Description of Artificial Sequence: Synthetic oligonucleotide
  Sense strand starting at position 310 of SEQ ID NO: 1243332
ugagucugguucucugaau

SEQ ID NO: 1409785 - RNA, 19 nt, Artificial Sequence
  Description of Artificial Sequence: Synthetic oligonucleotide
  Antisense strand to SEQ ID NO: 1409784
auucagagaaccagacuca

SEQ ID NO: 1409786 - RNA, 19 nt, Artificial Sequence
  Description of Artificial Sequence: Synthetic oligonucleotide
  Sense strand starting at position 311 of SEQ ID NO: 1243332
gagucugguucucugaauu

SEQ ID NO: 1409787 - RNA, 19 nt, Artificial Sequence
  Description of Artificial Sequence: Synthetic oligonucleotide
  Antisense strand to SEQ ID NO: 1409786
aauucagagaaccagacuc

SEQ ID NO: 1409788 - RNA, 19 nt, Artificial Sequence
  Description of Artificial Sequence: Synthetic oligonucleotide
  Sense strand starting at position 361 of SEQ ID NO: 1243332
gucugacugucaccuaauc

SEQ ID NO: 1409789 - RNA, 19 nt, Artificial Sequence
  Description of Artificial Sequence: Synthetic oligonucleotide
  Antisense strand to SEQ ID NO: 1409788
gauuaggugacagucagac

SEQ ID NO: 1409790 - RNA, 19 nt, Artificial Sequence
  Description of Artificial Sequence: Synthetic oligonucleotide
  Sense strand starting at position 417 of SEQ ID NO: 1243332
guuugacuuucucugacag

SEQ ID NO: 1409791 - RNA, 19 nt, Artificial Sequence
  Description of Artificial Sequence: Synthetic oligonucleotide
  Antisense strand to SEQ ID NO: 1409790
cugucagagaaagucaaac

SEQ ID NO: 1409792 - RNA, 19 nt, Artificial Sequence
  Description of Artificial Sequence: Synthetic oligonucleotide
  Sense strand starting at position 418 of SEQ ID NO: 1243332
uuugacuuucucugacagu

SEQ ID NO: 1409793 - RNA, 19 nt, Artificial Sequence
  Description of Artificial Sequence: Synthetic oligonucleotide
  Antisense strand to SEQ ID NO: 1409792
acugucagagaaagucaaa

SEQ ID NO: 1409794 - RNA, 19 nt, Artificial Sequence
  Description of Artificial Sequence: Synthetic oligonucleotide
  Sense strand starting at position 450 of SEQ ID NO: 1243332
cccugaaucucacaggaau

SEQ ID NO: 1409795 - RNA, 19 nt, Artificial Sequence
  Description of Artificial Sequence: Synthetic oligonucleotide
  Antisense strand to SEQ ID NO: 1409794
auuccugugagauucaggg

SEQ ID NO: 1409796 - RNA, 19 nt, Artificial Sequence
  Description of Artificial Sequence: Synthetic oligonucleotide
  Sense strand starting at position 727 of SEQ ID NO: 1243332
ggugaaguugugugagcuu

SEQ ID NO: 1409797 - RNA, 19 nt, Artificial Sequence
  Description of Artificial Sequence: Synthetic oligonucleotide
  Antisense strand to SEQ ID NO: 1409796
aagcucacacaacuucacc

SEQ ID NO: 1409798 - RNA, 19 nt, Artificial Sequence
  Description of Artificial Sequence: Synthetic oligonucleotide
  Sense strand starting at position 943 of SEQ ID NO: 1243332
ggcugugugggccuucauu

SEQ ID NO: 1409799 - RNA, 19 nt, Artificial Sequence
  Description of Artificial Sequence: Synthetic oligonucleotide
  Antisense strand to SEQ ID NO: 1409798
aaugaaggcccacacagcc

SEQ ID NO: 1409800 - RNA, 19 nt, Artificial Sequence
  Description of Artificial Sequence: Synthetic oligonucleotide
  Sense strand starting at position 1295 of SEQ ID NO: 1243332
ucaucugucuuuguccauu

SEQ ID NO: 1409801 - RNA, 19 nt, Artificial Sequence
  Description of Artificial Sequence: Synthetic oligonucleotide
  Antisense strand to SEQ ID NO: 1409800
aauggacaaagacagauga

SEQ ID NO: 1409802 - RNA, 19 nt, Artificial Sequence
  Description of Artificial Sequence: Synthetic oligonucleotide
  Sense strand starting at position 1492 of SEQ ID NO: 1243332
ucucaauauugaggguuaa

SEQ ID NO: 1409803 - RNA, 19 nt, Artificial Sequence
  Description of Artificial Sequence: Synthetic oligonucleotide
  Antisense strand to SEQ ID NO: 1409802
uuaacccucaauauugaga

SEQ ID NO: 1409804 - RNA, 19 nt, Artificial Sequence
  Description of Artificial Sequence: Synthetic oligonucleotide
  Sense strand starting at position 1493 of SEQ ID NO: 1243332
cucaauauugaggguuaag

SEQ ID NO: 1409805 - RNA, 19 nt, Artificial Sequence
  Description of Artificial Sequence: Synthetic oligonucleotide
  Antisense strand to SEQ ID NO: 1409804
cuuaacccucaauauugag

SEQ ID NO: 1409806 - RNA, 19 nt, Artificial Sequence
  Description of Artificial Sequence: Synthetic oligonucleotide
  Sense strand starting at position 1527 of SEQ ID NO: 1243332
gccugaaagcucuggcuug

SEQ ID NO: 1409807 - RNA, 19 nt, Artificial Sequence
  Description of Artificial Sequence: Synthetic oligonucleotide
  Antisense strand to SEQ ID NO: 1409806
caagccagagcuuucaggc

SEQ ID NO: 1409808 - RNA, 19 nt, Artificial Sequence
  Description of Artificial Sequence: Synthetic oligonucleotide
  Sense strand starting at position 1587 of SEQ ID NO: 1243332
ucggaagacccaggauauu

SEQ ID NO: 1409809 - RNA, 19 nt, Artificial Sequence
  Description of Artificial Sequence: Synthetic oligonucleotide
  Antisense strand to SEQ ID NO: 1409808
aauauccugggucuuccga

SEQ ID NO: 1409810 - RNA, 19 nt, Artificial Sequence
  Description of Artificial Sequence: Synthetic oligonucleotide
  Sense strand starting at position 1593 of SEQ ID NO: 1243332
gacccaggauauuaagaga

SEQ ID NO: 1409811 - RNA, 19 nt, Artificial Sequence
  Description of Artificial Sequence: Synthetic oligonucleotide
  Antisense strand to SEQ ID NO: 1409810
ucucuuaauauccuggguc

SEQ ID NO: 1409812 - RNA, 19 nt, Artificial Sequence
  Description of Artificial Sequence: Synthetic oligonucleotide
  Sense strand starting at position 1596 of SEQ ID NO: 1243332
ccaggauauuaagagaaag

SEQ ID NO: 1409813 - RNA, 19 nt, Artificial Sequence
  Description of Artificial Sequence: Synthetic oligonucleotide
  Antisense strand to SEQ ID NO: 1409812
cuuucucuuaauauccugg

SEQ ID NO: 1409814 - RNA, 19 nt, Artificial Sequence
  Description of Artificial Sequence: Synthetic oligonucleotide
  Sense strand starting at position 1686 of SEQ ID NO: 1243332
agggacagcucagcagaau

SEQ ID NO: 1409815 - RNA, 19 nt, Artificial Sequence
  Description of Artificial Sequence: Synthetic oligonucleotide
  Antisense strand to SEQ ID NO: 1409814
auucugcugagcugucccu

SEQ ID NO: 1409816 - RNA, 19 nt, Artificial Sequence
  Description of Artificial Sequence: Synthetic oligonucleotide
  Sense strand starting at position 1687 of SEQ ID NO: 1243332
gggacagcucagcagaauu

SEQ ID NO: 1409817 - RNA, 19 nt, Artificial Sequence
  Description of Artificial Sequence: Synthetic oligonucleotide
  Antisense strand to SEQ ID NO: 1409816
aauucugcugagcuguccc

SEQ ID NO: 1409818 - RNA, 19 nt, Artificial Sequence
  Description of Artificial Sequence: Synthetic oligonucleotide
  Sense strand starting at position 1779 of SEQ ID NO: 1243332
cucugugccucucuaagua

SEQ ID NO: 1409819 - RNA, 19 nt, Artificial Sequence
  Description of Artificial Sequence: Synthetic oligonucleotide
  Antisense strand to SEQ ID NO: 1409818
uacuuagagaggcacagag

SEQ ID NO: 1409820 - RNA, 19 nt, Artificial Sequence
  Description of Artificial Sequence: Synthetic oligonucleotide
  Sense strand starting at position 1783 of SEQ ID NO: 1243332
gugccucucuaaguaaucu

SEQ ID NO: 1409821 - RNA, 19 nt, Artificial Sequence
  Description of Artificial Sequence: Synthetic oligonucleotide
  Antisense strand to SEQ ID NO: 1409820
agauuacuuagagaggcac

SEQ ID NO: 1409822 - RNA, 19 nt, Artificial Sequence
  Description of Artificial Sequence: Synthetic oligonucleotide
  Sense strand starting at position 1824 of SEQ ID NO: 1243332
ccguuuaucuuucccuuua

SEQ ID NO: 1409823 - RNA, 19 nt, Artificial Sequence
  Description of Artificial Sequence: Synthetic oligonucleotide
  Antisense strand to SEQ ID NO: 1409822
uaaagggaaagauaaacgg

SEQ ID NO: 1409824 - RNA, 19 nt, Artificial Sequence
  Description of Artificial Sequence: Synthetic oligonucleotide
  Sense strand starting at position 2679 of SEQ ID NO: 1243332
ccacgauugugacaagucu

SEQ ID NO: 1409825 - RNA, 19 nt, Artificial Sequence
  Description of Artificial Sequence: Synthetic oligonucleotide
  Antisense strand to SEQ ID NO: 1409824
agacuugucacaaucgugg

SEQ ID NO: 1409826 - RNA, 19 nt, Artificial Sequence
  Description of Artificial Sequence: Synthetic oligonucleotide
  Sense strand starting at position 2688 of SEQ ID NO: 1243332
ugacaagucucguggguga

SEQ ID NO: 1409827 - RNA, 19 nt, Artificial Sequence
  Description of Artificial Sequence: Synthetic oligonucleotide
  Antisense strand to SEQ ID NO: 1409826
ucacccacgagacuuguca

SEQ ID NO: 1409828 - RNA, 19 nt, Artificial Sequence
  Description of Artificial Sequence: Synthetic oligonucleotide
  Sense strand starting at position 3229 of SEQ ID NO: 1243332
gcugauuugcugugccacu

SEQ ID NO: 1409829 - RNA, 19 nt, Artificial Sequence
  Description of Artificial Sequence: Synthetic oligonucleotide
  Antisense strand to SEQ ID NO: 1409828
aguggcacagcaaaucagc

SEQ ID NO: 1409830 - RNA, 19 nt, Artificial Sequence
  Description of Artificial Sequence: Synthetic oligonucleotide
  Sense strand starting at position 3290 of SEQ ID NO: 1243332
gagugacgucagggugagu

SEQ ID NO: 1409831 - RNA, 19 nt, Artificial Sequence
  Description of Artificial Sequence: Synthetic oligonucleotide
  Antisense strand to SEQ ID NO: 1409830
acucacccugacgucacuc

SEQ ID NO: 1409832 - RNA, 19 nt, Artificial Sequence
  Description of Artificial Sequence: Synthetic oligonucleotide
  Sense strand starting at position 112 of SEQ ID NO: 1243333
uaagguauauguuuaacgu

SEQ ID NO: 1409833 - RNA, 19 nt, Artificial Sequence
  Description of Artificial Sequence: Synthetic oligonucleotide
  Antisense strand to SEQ ID NO: 1409832
acguuaaacauauaccuua

SEQ ID NO: 1409834 - RNA, 19 nt, Artificial Sequence
  Description of Artificial Sequence: Synthetic oligonucleotide
  Sense strand starting at position 113 of SEQ ID NO: 1243333
aagguauauguuuaacguu

SEQ ID NO: 1409835 - RNA, 19 nt, Artificial Sequence
  Description of Artificial Sequence: Synthetic oligonucleotide
  Antisense strand to SEQ ID NO: 1409834
aacguuaaacauauaccuu

SEQ ID NO: 1409836 - RNA, 19 nt, Artificial Sequence
  Description of Artificial Sequence: Synthetic oligonucleotide
  Sense strand starting at position 229 of SEQ ID NO: 1243333
gcuucugaaucccugaaca

SEQ ID NO: 1409837 - RNA, 19 nt, Artificial Sequence
  Description of Artificial Sequence: Synthetic oligonucleotide
  Antisense strand to SEQ ID NO: 1409836
uguucagggauucagaagc

SEQ ID NO: 1409838 - RNA, 19 nt, Artificial Sequence
  Description of Artificial Sequence: Synthetic oligonucleotide
  Sense strand starting at position 354 of SEQ ID NO: 1243333
ucccaaaucuaguuggauu

SEQ ID NO: 1409839 - RNA, 19 nt, Artificial Sequence
  Description of Artificial Sequence: Synthetic oligonucleotide
  Antisense strand to SEQ ID NO: 1409838
aauccaacuagauuuggga

SEQ ID NO: 1409840 - RNA, 19 nt, Artificial Sequence
  Description of Artificial Sequence: Synthetic oligonucleotide
  Sense strand starting at position 424 of SEQ ID NO: 1243333
ggaggaucaguccaguacu

SEQ ID NO: 1409841 - RNA, 19 nt, Artificial Sequence
  Description of Artificial Sequence: Synthetic oligonucleotide
  Antisense strand to SEQ ID NO: 1409840
aguacuggacugauccucc

SEQ ID NO: 1409842 - RNA, 19 nt, Artificial Sequence
  Description of Artificial Sequence: Synthetic oligonucleotide
  Sense strand starting at position 773 of SEQ ID NO: 1243333
agauaaauuugguaagcuu

SEQ ID NO: 1409843 - RNA, 19 nt, Artificial Sequence
  Description of Artificial Sequence: Synthetic oligonucleotide
  Antisense strand to SEQ ID NO: 1409842
aagcuuaccaaauuuaucu

SEQ ID NO: 1409844 - RNA, 19 nt, Artificial Sequence
  Description of Artificial Sequence: Synthetic oligonucleotide
  Sense strand starting at position 1241 of SEQ ID NO: 1243333
gacugugacuccgucacaa

SEQ ID NO: 1409845 - RNA, 19 nt, Artificial Sequence
  Description of Artificial Sequence: Synthetic oligonucleotide
  Antisense strand to SEQ ID NO: 1409844
uugugacggagucacaguc

SEQ ID NO: 1409846 - RNA, 19 nt, Artificial Sequence
  Description of Artificial Sequence: Synthetic oligonucleotide
  Sense strand starting at position 1426 of SEQ ID NO: 1243333
gagacaaguugcccaacua

SEQ ID NO: 1409847 - RNA, 19 nt, Artificial Sequence
  Description of Artificial Sequence: Synthetic oligonucleotide
  Antisense strand to SEQ ID NO: 1409846
uaguugggcaacuugucuc

SEQ ID NO: 1409848 - RNA, 19 nt, Artificial Sequence
  Description of Artificial Sequence: Synthetic oligonucleotide
  Sense strand starting at position 1462 of SEQ ID NO: 1243333
accggagucuuggcucuaa

SEQ ID NO: 1409849 - RNA, 19 nt, Artificial Sequence
  Description of Artificial Sequence: Synthetic oligonucleotide
  Antisense strand to SEQ ID NO: 1409848
uuagagccaagacuccggu

SEQ ID NO: 1409850 - RNA, 19 nt, Artificial Sequence
  Description of Artificial Sequence: Synthetic oligonucleotide
  Sense strand starting at position 1466 of SEQ ID NO: 1243333
gagucuuggcucuaaagac

SEQ ID NO: 1409851 - RNA, 19 nt, Artificial Sequence
  Description of Artificial Sequence: Synthetic oligonucleotide
  Antisense strand to SEQ ID NO: 1409850
gucuuuagagccaagacuc

SEQ ID NO: 1409852 - RNA, 19 nt, Artificial Sequence
  Description of Artificial Sequence: Synthetic oligonucleotide
  Sense strand starting at position 1478 of SEQ ID NO: 1243333
uaaagacuguuuccguuau

SEQ ID NO: 1409853 - RNA, 19 nt, Artificial Sequence
  Description of Artificial Sequence: Synthetic oligonucleotide
  Antisense strand to SEQ ID NO: 1409852
auaacggaaacagucuuua

SEQ ID NO: 1409854 - RNA, 19 nt, Artificial Sequence
  Description of Artificial Sequence: Synthetic oligonucleotide
  Sense strand starting at position 1480 of SEQ ID NO: 1243333
aagacuguuuccguuauuu

SEQ ID NO: 1409855 - RNA, 19 nt, Artificial Sequence
  Description of Artificial Sequence: Synthetic oligonucleotide
  Antisense strand to SEQ ID NO: 1409854
aaauaacggaaacagucuu

SEQ ID NO: 1409856 - RNA, 19 nt, Artificial Sequence
  Description of Artificial Sequence: Synthetic oligonucleotide
  Sense strand starting at position 2005 of SEQ ID NO: 1243333
caauccgcgccugaagaau

SEQ ID NO: 1409857 - RNA, 19 nt, Artificial Sequence
  Description of Artificial Sequence: Synthetic oligonucleotide
  Antisense strand to SEQ ID NO: 1409856
auucuucaggcgcggauug

SEQ ID NO: 1409858 - RNA, 19 nt, Artificial Sequence
  Description of Artificial Sequence: Synthetic oligonucleotide
  Sense strand starting at position 2352 of SEQ ID NO: 1243333
ucauucgcucccugacaga

SEQ ID NO: 1409859 - RNA, 19 nt, Artificial Sequence
  Description of Artificial Sequence: Synthetic oligonucleotide
  Antisense strand to SEQ ID NO: 1409858
ucugucagggagcgaauga

SEQ ID NO: 1409860 - RNA, 19 nt, Artificial Sequence
  Description of Artificial Sequence: Synthetic oligonucleotide
  Sense strand starting at position 2491 of SEQ ID NO: 1243333
gugggaaacucuccuugcu

SEQ ID NO: 1409861 - RNA, 19 nt, Artificial Sequence
  Description of Artificial Sequence: Synthetic oligonucleotide
  Antisense strand to SEQ ID NO: 1409860
agcaaggagaguuucccac

SEQ ID NO: 1409862 - RNA, 19 nt, Artificial Sequence
  Description of Artificial Sequence: Synthetic oligonucleotide
  Sense strand starting at position 2545 of SEQ ID NO: 1243333
aagcuagucggguauauga

SEQ ID NO: 1409863 - RNA, 19 nt, Artificial Sequence
  Description of Artificial Sequence: Synthetic oligonucleotide
  Antisense strand to SEQ ID NO: 1409862
ucauauacccgacuagcuu

SEQ ID NO: 1409864 - RNA, 19 nt, Artificial Sequence
  Description of Artificial Sequence: Synthetic oligonucleotide
  Sense strand starting at position 2553 of SEQ ID NO: 1243333
cggguauaugaguaguccu

SEQ ID NO: 1409865 - RNA, 19 nt, Artificial Sequence
  Description of Artificial Sequence: Synthetic oligonucleotide
  Antisense strand to SEQ ID NO: 1409864
aggacuacucauauacccg

SEQ ID NO: 1409866 - RNA, 19 nt, Artificial Sequence
  Description of Artificial Sequence: Synthetic oligonucleotide
  Sense strand starting at position 2602 of SEQ ID NO: 1243333
gagcuugucuucccugaua

SEQ ID NO: 1409867 - RNA, 19 nt, Artificial Sequence
  Description of Artificial Sequence: Synthetic oligonucleotide
  Antisense strand to SEQ ID NO: 1409866
uaucagggaagacaagcuc

SEQ ID NO: 1409868 - RNA, 19 nt, Artificial Sequence
  Description of Artificial Sequence: Synthetic oligonucleotide
  Sense strand starting at position 2605 of SEQ ID NO: 1243333
cuugucuucccugauaccu

SEQ ID NO: 1409869 - RNA, 19 nt, Artificial Sequence
  Description of Artificial Sequence: Synthetic oligonucleotide
  Antisense strand to SEQ ID NO: 1409868
agguaucagggaagacaag

SEQ ID NO: 1409870 - RNA, 19 nt, Artificial Sequence
  Description of Artificial Sequence: Synthetic oligonucleotide
  Sense strand starting at position 2613 of SEQ ID NO: 1243333
cccugauaccugggcgauc

SEQ ID NO: 1409871 - RNA, 19 nt, Artificial Sequence
  Description of Artificial Sequence: Synthetic oligonucleotide
  Antisense strand to SEQ ID NO: 1409870
gaucgcccagguaucaggg

SEQ ID NO: 1409872 - RNA, 19 nt, Artificial Sequence
  Description of Artificial Sequence: Synthetic oligonucleotide
  Sense strand starting at position 2656 of SEQ ID NO: 1243333
cguugauuucccugaucca

SEQ ID NO: 1409873 - RNA, 19 nt, Artificial Sequence
  Description of Artificial Sequence: Synthetic oligonucleotide
  Antisense strand to SEQ ID NO: 1409872
uggaucagggaaaucaacg

SEQ ID NO: 1409874 - RNA, 19 nt, Artificial Sequence
  Description of Artificial Sequence: Synthetic oligonucleotide
  Sense strand starting at position 2682 of SEQ ID NO: 1243333
caguuucuccacgggagua

SEQ ID NO: 1409875 - RNA, 19 nt, Artificial Sequence
  Description of Artificial Sequence: Synthetic oligonucleotide
  Antisense strand to SEQ ID NO: 1409874
uacucccguggagaaacug

SEQ ID NO: 1409876 - RNA, 19 nt, Artificial Sequence
  Description of Artificial Sequence: Synthetic oligonucleotide
  Sense strand starting at position 2683 of SEQ ID NO: 1243333
aguuucuccacgggaguaa

SEQ ID NO: 1409877 - RNA, 19 nt, Artificial Sequence
  Description of Artificial Sequence: Synthetic oligonucleotide
  Antisense strand to SEQ ID NO: 1409876
uuacucccguggagaaacu

SEQ ID NO: 1409878 - RNA, 19 nt, Artificial Sequence
  Description of Artificial Sequence: Synthetic oligonucleotide
  Sense strand starting at position 2684 of SEQ ID NO: 1243333
guuucuccacgggaguaaa

SEQ ID NO: 1409879 - RNA, 19 nt, Artificial Sequence
  Description of Artificial Sequence: Synthetic oligonucleotide
  Antisense strand to SEQ ID NO: 1409878
uuuacucccguggagaaac

SEQ ID NO: 1409880 - RNA, 19 nt, Artificial Sequence
  Description of Artificial Sequence: Synthetic oligonucleotide
  Sense strand starting at position 2695 of SEQ ID NO: 1243333
ggaguaaaguuagucugag

SEQ ID NO: 1409881 - RNA, 19 nt, Artificial Sequence
  Description of Artificial Sequence: Synthetic oligonucleotide
  Antisense strand to SEQ ID NO: 1409880
cucagacuaacuuuacucc

SEQ ID NO: 1409882 - RNA, 19 nt, Artificial Sequence
  Description of Artificial Sequence: Synthetic oligonucleotide
  Sense strand starting at position 2711 of SEQ ID NO: 1243333
gagaguauuugccaaauug

SEQ ID NO: 1409883 - RNA, 19 nt, Artificial Sequence
  Description of Artificial Sequence: Synthetic oligonucleotide
  Antisense strand to SEQ ID NO: 1409882
caauuuggcaaauacucuc

SEQ ID NO: 1409884 - RNA, 19 nt, Artificial Sequence
  Description of Artificial Sequence: Synthetic oligonucleotide
  Sense strand starting at position 2722 of SEQ ID NO: 1243333
ccaaauugcuugguucuca

SEQ ID NO: 1409885 - RNA, 19 nt, Artificial Sequence
  Description of Artificial Sequence: Synthetic oligonucleotide
  Antisense strand to SEQ ID NO: 1409884
ugagaaccaagcaauuugg

SEQ ID NO: 1409886 - RNA, 19 nt, Artificial Sequence
  Description of Artificial Sequence: Synthetic oligonucleotide
  Sense strand starting at position 2797 of SEQ ID NO: 1243333
ccuguuauuuaagagggaa

SEQ ID NO: 1409887 - RNA, 19 nt, Artificial Sequence
  Description of Artificial Sequence: Synthetic oligonucleotide
  Antisense strand to SEQ ID NO: 1409886
uucccucuuaaauaacagg

SEQ ID NO: 1409888 - RNA, 19 nt, Artificial Sequence
  Description of Artificial Sequence: Synthetic oligonucleotide
  Sense strand starting at position 2809 of SEQ ID NO: 1243333
gagggaagccuuugcagau

SEQ ID NO: 1409889 - RNA, 19 nt, Artificial Sequence
  Description of Artificial Sequence: Synthetic oligonucleotide
  Antisense strand to SEQ ID NO: 1409888
aucugcaaaggcuucccuc

SEQ ID NO: 1409890 - RNA, 19 nt, Artificial Sequence
  Description of Artificial Sequence: Synthetic oligonucleotide
  Sense strand starting at position 2810 of SEQ ID NO: 1243333
agggaagccuuugcagauu

SEQ ID NO: 1409891 - RNA, 19 nt, Artificial Sequence
  Description of Artificial Sequence: Synthetic oligonucleotide
  Antisense strand to SEQ ID NO: 1409890
aaucugcaaaggcuucccu

SEQ ID NO: 1409892 - RNA, 19 nt, Artificial Sequence
  Description of Artificial Sequence: Synthetic oligonucleotide
  Sense strand starting at position 2825 of SEQ ID NO: 1243333
gauuaacuucuugaagcgu

SEQ ID NO: 1409893 - RNA, 19 nt, Artificial Sequence
  Description of Artificial Sequence: Synthetic oligonucleotide
  Antisense strand to SEQ ID NO: 1409892
acgcuucaagaaguuaauc

SEQ ID NO: 1409894 - RNA, 19 nt, Artificial Sequence
  Description of Artificial Sequence: Synthetic oligonucleotide
  Sense strand starting at position 2895 of SEQ ID NO: 1243333
uggucaaaugcacaucuuu

SEQ ID NO: 1409895 - RNA, 19 nt, Artificial Sequence
  Description of Artificial Sequence: Synthetic oligonucleotide
  Antisense strand to SEQ ID NO: 1409894
aaagaugugcauuugacca

SEQ ID NO: 1409896 - RNA, 19 nt, Artificial Sequence
  Description of Artificial Sequence: Synthetic oligonucleotide
  Sense strand starting at position 2946 of SEQ ID NO: 1243333
uucucuaaucuuggacaag

SEQ ID NO: 1409897 - RNA, 19 nt, Artificial Sequence
  Description of Artificial Sequence: Synthetic oligonucleotide
  Antisense strand to SEQ ID NO: 1409896
cuuguccaagauuagagaa

SEQ ID NO: 1409898 - RNA, 19 nt, Artificial Sequence
  Description of Artificial Sequence: Synthetic oligonucleotide
  Sense strand starting at position 3008 of SEQ ID NO: 1243333
uguggacuauucuccaauu

SEQ ID NO: 1409899 - RNA, 19 nt, Artificial Sequence
  Description of Artificial Sequence: Synthetic oligonucleotide
  Antisense strand to SEQ ID NO: 1409898
aauuggagaauaguccaca

SEQ ID NO: 1409900 - RNA, 19 nt, Artificial Sequence
  Description of Artificial Sequence: Synthetic oligonucleotide
  Sense strand starting at position 3134 of SEQ ID NO: 1243333
agaucuaagcucuaagcuu

SEQ ID NO: 1409901 - RNA, 19 nt, Artificial Sequence
  Description of Artificial Sequence: Synthetic oligonucleotide
  Antisense strand to SEQ ID NO: 1409900
aagcuuagagcuuagaucu

SEQ ID NO: 1409902 - RNA, 19 nt, Artificial Sequence
  Description of Artificial Sequence: Synthetic oligonucleotide
  Sense strand starting at position 3200 of SEQ ID NO: 1243333
gcaguuucagccugaggga

SEQ ID NO: 1409903 - RNA, 19 nt, Artificial Sequence
  Description of Artificial Sequence: Synthetic oligonucleotide
  Antisense strand to SEQ ID NO: 1409902
ucccucaggcugaaacugc

SEQ ID NO: 1409904 - RNA, 19 nt, Artificial Sequence
  Description of Artificial Sequence: Synthetic oligonucleotide
  Sense strand starting at position 3215 of SEQ ID NO: 1243333
gggagaggugaucguugau

SEQ ID NO: 1409905 - RNA, 19 nt, Artificial Sequence
  Description of Artificial Sequence: Synthetic oligonucleotide
  Antisense strand to SEQ ID NO: 1409904
aucaacgaucaccucuccc

SEQ ID NO: 1409906 - RNA, 19 nt, Artificial Sequence
  Description of Artificial Sequence: Synthetic oligonucleotide
  Sense strand starting at position 3218 of SEQ ID NO: 1243333
agaggugaucguugauauc

SEQ ID NO: 1409907 - RNA, 19 nt, Artificial Sequence
  Description of Artificial Sequence: Synthetic oligonucleotide
  Antisense strand to SEQ ID NO: 1409906
gauaucaacgaucaccucu

SEQ ID NO: 1409908 - RNA, 19 nt, Artificial Sequence
  Description of Artificial Sequence: Synthetic oligonucleotide
  Sense strand starting at position 3373 of SEQ ID NO: 1243333
ugcuguugugcugcaauca

SEQ ID NO: 1409909 - RNA, 19 nt, Artificial Sequence
  Description of Artificial Sequence: Synthetic oligonucleotide
  Antisense strand to SEQ ID NO: 1409908
ugauugcagcacaacagca

SEQ ID NO: 1409910 - RNA, 19 nt, Artificial Sequence
  Description of Artificial Sequence: Synthetic oligonucleotide
  Sense strand starting at position 3383 of SEQ ID NO: 1243333
cugcaaucagaauggauga

SEQ ID NO: 1409911 - RNA, 19 nt, Artificial Sequence
  Description of Artificial Sequence: Synthetic oligonucleotide
  Antisense strand to SEQ ID NO: 1409910
ucauccauucugauugcag

SEQ ID NO: 1409912 - RNA, 19 nt, Artificial Sequence
  Description of Artificial Sequence: Synthetic oligonucleotide
  Sense strand starting at position 2039 of SEQ ID NO: 1243334
gaccgaagacggugugaau

SEQ ID NO: 1409913 - RNA, 19 nt, Artificial Sequence
  Description of Artificial Sequence: Synthetic oligonucleotide
  Antisense strand to SEQ ID NO: 1409912
auucacaccgucuucgguc

SEQ ID NO: 1409914 - RNA, 19 nt, Artificial Sequence
  Description of Artificial Sequence: Synthetic oligonucleotide
  Sense strand starting at position 2050 of SEQ ID NO: 1243334
gugugaaucucguagggcu

SEQ ID NO: 1409915 - RNA, 19 nt, Artificial Sequence
  Description of Artificial Sequence: Synthetic oligonucleotide
  Antisense strand to SEQ ID NO: 1409914
agcccuacgagauucacac

SEQ ID NO: 1409916 - RNA, 19 nt, Artificial Sequence
  Description of Artificial Sequence: Synthetic oligonucleotide
  Sense strand starting at position 2138 of SEQ ID NO: 1243334
gagcguccucccggaggaa

SEQ ID NO: 1409917 - RNA, 19 nt, Artificial Sequence
  Description of Artificial Sequence: Synthetic oligonucleotide
  Antisense strand to SEQ ID NO: 1409916
uuccuccgggaggacgcuc

SEQ ID NO: 1409918 - RNA, 19 nt, Artificial Sequence
  Description of Artificial Sequence: Synthetic oligonucleotide
  Sense strand starting at position 2139 of SEQ ID NO: 1243334
agcguccucccggaggaaa

SEQ ID NO: 1409919 - RNA, 19 nt, Artificial Sequence
  Description of Artificial Sequence: Synthetic oligonucleotide
  Antisense strand to SEQ ID NO: 1409918
uuuccuccgggaggacgcu

SEQ ID NO: 1409920 - RNA, 19 nt, Artificial Sequence
  Description of Artificial Sequence: Synthetic oligonucleotide
  Sense strand starting at position 2140 of SEQ ID NO: 1243334
gcguccucccggaggaaau

SEQ ID NO: 1409921 - RNA, 19 nt, Artificial Sequence
  Description of Artificial Sequence: Synthetic oligonucleotide
  Antisense strand to SEQ ID NO: 1409920
auuuccuccgggaggacgc

SEQ ID NO: 1409922 - RNA, 19 nt, Artificial Sequence
  Description of Artificial Sequence: Synthetic oligonucleotide
  Sense strand starting at position 2141 of SEQ ID NO: 1243334
cguccucccggaggaaauu

SEQ ID NO: 1409923 - RNA, 19 nt, Artificial Sequence
  Description of Artificial Sequence: Synthetic oligonucleotide
  Antisense strand to SEQ ID NO: 1409922
aauuuccuccgggaggacg

SEQ ID NO: 1409924 - RNA, 19 nt, Artificial Sequence
  Description of Artificial Sequence: Synthetic oligonucleotide
  Sense strand starting at position 2150 of SEQ ID NO: 1243334
ggaggaaauucgggacaaa

SEQ ID NO: 1409925 - RNA, 19 nt, Artificial Sequence
  Description of Artificial Sequence: Synthetic oligonucleotide
  Antisense strand to SEQ ID NO: 1409924
uuugucccgaauuuccucc

SEQ ID NO: 1409926 - RNA, 19 nt, Artificial Sequence
  Description of Artificial Sequence: Synthetic oligonucleotide
  Sense strand starting at position 2173 of SEQ ID NO: 1243334
cgaugucgaccauagagaa

SEQ ID NO: 1409927 - RNA, 19 nt, Artificial Sequence
  Description of Artificial Sequence: Synthetic oligonucleotide
  Antisense strand to SEQ ID NO: 1409926
uucucuauggucgacaucg

SEQ ID NO: 1409928 - RNA, 19 nt, Artificial Sequence
  Description of Artificial Sequence: Synthetic oligonucleotide
  Sense strand starting at position 2263 of SEQ ID NO: 1243334
agaugaugaggcuguguga

SEQ ID NO: 1409929 - RNA, 19 nt, Artificial Sequence
  Description of Artificial Sequence: Synthetic oligonucleotide
  Antisense strand to SEQ ID NO: 1409928
ucacacagccucaucaucu

SEQ ID NO: 1409930 - RNA, 19 nt, Artificial Sequence
  Description of Artificial Sequence: Synthetic oligonucleotide
  Sense strand starting at position 2416 of SEQ ID NO: 1243334
cuugguuuaucugaggaaa

SEQ ID NO: 1409931 - RNA, 19 nt, Artificial Sequence
  Description of Artificial Sequence: Synthetic oligonucleotide
  Antisense strand to SEQ ID NO: 1409930
uuuccucagauaaaccaag

SEQ ID NO: 1409932 - RNA, 19 nt, Artificial Sequence
  Description of Artificial Sequence: Synthetic oligonucleotide
  Sense strand starting at position 2418 of SEQ ID NO: 1243334
ugguuuaucugaggaaagg

SEQ ID NO: 1409933 - RNA, 19 nt, Artificial Sequence
  Description of Artificial Sequence: Synthetic oligonucleotide
  Antisense strand to SEQ ID NO: 1409932
ccuuuccucagauaaacca

SEQ ID NO: 1409934 - RNA, 19 nt, Artificial Sequence
  Description of Artificial Sequence: Synthetic oligonucleotide
  Sense strand starting at position 3473 of SEQ ID NO: 1243334
gucaauuccagacgugcuu

SEQ ID NO: 1409935 - RNA, 19 nt, Artificial Sequence
  Description of Artificial Sequence: Synthetic oligonucleotide
  Antisense strand to SEQ ID NO: 1409934
aagcacgucuggaauugac

SEQ ID NO: 1409936 - RNA, 19 nt, Artificial Sequence
  Description of Artificial Sequence: Synthetic oligonucleotide
  Sense strand starting at position 3495 of SEQ ID NO: 1243334
ggacgucugugggcauaua

SEQ ID NO: 1409937 - RNA, 19 nt, Artificial Sequence
  Description of Artificial Sequence: Synthetic oligonucleotide
  Antisense strand to SEQ ID NO: 1409936
uauaugcccacagacgucc

SEQ ID NO: 1409938 - RNA, 19 nt, Artificial Sequence
  Description of Artificial Sequence: Synthetic oligonucleotide
  Sense strand starting at position 3506 of SEQ ID NO: 1243334
ggcauauagucuggagcua

SEQ ID NO: 1409939 - RNA, 19 nt, Artificial Sequence
  Description of Artificial Sequence: Synthetic oligonucleotide
  Antisense strand to SEQ ID NO: 1409938
uagcuccagacuauaugcc

SEQ ID NO: 1409940 - RNA, 19 nt, Artificial Sequence
  Description of Artificial Sequence: Synthetic oligonucleotide
  Sense strand starting at position 3507 of SEQ ID NO: 1243334
gcauauagucuggagcuaa

SEQ ID NO: 1409941 - RNA, 19 nt, Artificial Sequence
  Description of Artificial Sequence: Synthetic oligonucleotide
  Antisense strand to SEQ ID NO: 1409940
uuagcuccagacuauaugc

SEQ ID NO: 1409942 - RNA, 19 nt, Artificial Sequence
  Description of Artificial Sequence: Synthetic oligonucleotide
  Sense strand starting at position 3613 of SEQ ID NO: 1243334
ccauccagugucugauuga

SEQ ID NO: 1409943 - RNA, 19 nt, Artificial Sequence
  Description of Artificial Sequence: Synthetic oligonucleotide
  Antisense strand to SEQ ID NO: 1409942
ucaaucagacacuggaugg

SEQ ID NO: 1409944 - RNA, 19 nt, Artificial Sequence
  Description of Artificial Sequence: Synthetic oligonucleotide
  Sense strand starting at position 3661 of SEQ ID NO: 1243334
gaagcuauggcccaaguaa

SEQ ID NO: 1409945 - RNA, 19 nt, Artificial Sequence
  Description of Artificial Sequence: Synthetic oligonucleotide
  Antisense strand to SEQ ID NO: 1409944
uuacuugggccauagcuuc

SEQ ID NO: 1409946 - RNA, 19 nt, Artificial Sequence
  Description of Artificial Sequence: Synthetic oligonucleotide
  Sense strand starting at position 3805 of SEQ ID NO: 1243334
cuccucucuuaguggcaaa

SEQ ID NO: 1409947 - RNA, 19 nt, Artificial Sequence
  Description of Artificial Sequence: Synthetic oligonucleotide
  Antisense strand to SEQ ID NO: 1409946
uuugccacuaagagaggag

SEQ ID NO: 1409948 - RNA, 19 nt, Artificial Sequence
  Description of Artificial Sequence: Synthetic oligonucleotide
  Sense strand starting at position 3893 of SEQ ID NO: 1243334
uucugagauucccaaugaa

SEQ ID NO: 1409949 - RNA, 19 nt, Artificial Sequence
  Description of Artificial Sequence: Synthetic oligonucleotide
  Antisense strand to SEQ ID NO: 1409948
uucauugggaaucucagaa

SEQ ID NO: 1409950 - RNA, 19 nt, Artificial Sequence
  Description of Artificial Sequence: Synthetic oligonucleotide
  Sense strand starting at position 2257 of SEQ ID NO: 1243335
gaccgaagacggugugaau

SEQ ID NO: 1409951 - RNA, 19 nt, Artificial Sequence
  Description of Artificial Sequence: Synthetic oligonucleotide
  Antisense strand to SEQ ID NO: 1409950
auucacaccgucuucgguc

SEQ ID NO: 1409952 - RNA, 19 nt, Artificial Sequence
  Description of Artificial Sequence: Synthetic oligonucleotide
  Sense strand starting at position 2268 of SEQ ID NO: 1243335
gugugaaucucguagggcu

SEQ ID NO: 1409953 - RNA, 19 nt, Artificial Sequence
  Description of Artificial Sequence: Synthetic oligonucleotide
  Antisense strand to SEQ ID NO: 1409952
agcccuacgagauucacac

SEQ ID NO: 1409954 - RNA, 19 nt, Artificial Sequence
  Description of Artificial Sequence: Synthetic oligonucleotide
  Sense strand starting at position 2356 of SEQ ID NO: 1243335
gagcguccucccggaggaa

SEQ ID NO: 1409955 - RNA, 19 nt, Artificial Sequence
  Description of Artificial Sequence: Synthetic oligonucleotide
  Antisense strand to SEQ ID NO: 1409954
uuccuccgggaggacgcuc

SEQ ID NO: 1409956 - RNA, 19 nt, Artificial Sequence
  Description of Artificial Sequence: Synthetic oligonucleotide
  Sense strand starting at position 2357 of SEQ ID NO: 1243335
agcguccucccggaggaaa

SEQ ID NO: 1409957 - RNA, 19 nt, Artificial Sequence
  Description of Artificial Sequence: Synthetic oligonucleotide
  Antisense strand to SEQ ID NO: 1409956
uuuccuccgggaggacgcu

SEQ ID NO: 1409958 - RNA, 19 nt, Artificial Sequence
  Description of Artificial Sequence: Synthetic oligonucleotide
  Sense strand starting at position 2358 of SEQ ID NO: 1243335
gcguccucccggaggaaau

SEQ ID NO: 1409959 - RNA, 19 nt, Artificial Sequence
  Description of Artificial Sequence: Synthetic oligonucleotide
  Antisense strand to SEQ ID NO: 1409958
auuuccuccgggaggacgc

SEQ ID NO: 1409960 - RNA, 19 nt, Artificial Sequence
  Description of Artificial Sequence: Synthetic oligonucleotide
  Sense strand starting at position 2359 of SEQ ID NO: 1243335
cguccucccggaggaaauu

SEQ ID NO: 1409961 - RNA, 19 nt, Artificial Sequence
  Description of Artificial Sequence: Synthetic oligonucleotide
  Antisense strand to SEQ ID NO: 1409960
aauuuccuccgggaggacg

SEQ ID NO: 1409962 - RNA, 19 nt, Artificial Sequence
  Description of Artificial Sequence: Synthetic oligonucleotide
  Sense strand starting at position 2368 of SEQ ID NO: 1243335
ggaggaaauucgggacaaa

SEQ ID NO: 1409963 - RNA, 19 nt, Artificial Sequence
  Description of Artificial Sequence: Synthetic oligonucleotide
  Antisense strand to SEQ ID NO: 1409962
uuugucccgaauuuccucc

SEQ ID NO: 1409964 - RNA, 19 nt, Artificial Sequence
  Description of Artificial Sequence: Synthetic oligonucleotide
  Sense strand starting at position 2391 of SEQ ID NO: 1243335
cgaugucgaccauagagaa

SEQ ID NO: 1409965 - RNA, 19 nt, Artificial Sequence
  Description of Artificial Sequence: Synthetic oligonucleotide
  Antisense strand to SEQ ID NO: 1409964
uucucuauggucgacaucg

SEQ ID NO: 1409966 - RNA, 19 nt, Artificial Sequence
  Description of Artificial Sequence: Synthetic oligonucleotide
  Sense strand starting at position 2481 of SEQ ID NO: 1243335
agaugaugaggcuguguga

SEQ ID NO: 1409967 - RNA, 19 nt, Artificial Sequence
  Description of Artificial Sequence: Synthetic oligonucleotide
  Antisense strand to SEQ ID NO: 1409966
ucacacagccucaucaucu

SEQ ID NO: 1409968 - RNA, 19 nt, Artificial Sequence
  Description of Artificial Sequence: Synthetic oligonucleotide
  Sense strand starting at position 2634 of SEQ ID NO: 1243335
cuugguuuaucugaggaaa

SEQ ID NO: 1409969 - RNA, 19 nt, Artificial Sequence
  Description of Artificial Sequence: Synthetic oligonucleotide
  Antisense strand to SEQ ID NO: 1409968
uuuccucagauaaaccaag

SEQ ID NO: 1409970 - RNA, 19 nt, Artificial Sequence
  Description of Artificial Sequence: Synthetic oligonucleotide
  Sense strand starting at position 2636 of SEQ ID NO: 1243335
ugguuuaucugaggaaagg

SEQ ID NO: 1409971 - RNA, 19 nt, Artificial Sequence
  Description of Artificial Sequence: Synthetic oligonucleotide
  Antisense strand to SEQ ID NO: 1409970
ccuuuccucagauaaacca

SEQ ID NO: 1409972 - RNA, 19 nt, Artificial Sequence
  Description of Artificial Sequence: Synthetic oligonucleotide
  Sense strand starting at position 3691 of SEQ ID NO: 1243335
gucaauuccagacgugcuu

SEQ ID NO: 1409973 - RNA, 19 nt, Artificial Sequence
  Description of Artificial Sequence: Synthetic oligonucleotide
  Antisense strand to SEQ ID NO: 1409972
aagcacgucuggaauugac

SEQ ID NO: 1409974 - RNA, 19 nt, Artificial Sequence
  Description of Artificial Sequence: Synthetic oligonucleotide
  Sense strand starting at position 3713 of SEQ ID NO: 1243335
ggacgucugugggcauaua

SEQ ID NO: 1409975 - RNA, 19 nt, Artificial Sequence
  Description of Artificial Sequence: Synthetic oligonucleotide
  Antisense strand to SEQ ID NO: 1409974
uauaugcccacagacgucc

SEQ ID NO: 1409976 - RNA, 19 nt, Artificial Sequence
  Description of Artificial Sequence: Synthetic oligonucleotide
  Sense strand starting at position 3724 of SEQ ID NO: 1243335
ggcauauagucuggagcua

SEQ ID NO: 1409977 - RNA, 19 nt, Artificial Sequence
  Description of Artificial Sequence: Synthetic oligonucleotide
  Antisense strand to SEQ ID NO: 1409976
uagcuccagacuauaugcc

SEQ ID NO: 1409978 - RNA, 19 nt, Artificial Sequence
  Description of Artificial Sequence: Synthetic oligonucleotide
  Sense strand starting at position 3725 of SEQ ID NO: 1243335
gcauauagucuggagcuaa

SEQ ID NO: 1409979 - RNA, 19 nt, Artificial Sequence
  Description of Artificial Sequence: Synthetic oligonucleotide
  Antisense strand to SEQ ID NO: 1409978
uuagcuccagacuauaugc

SEQ ID NO: 1409980 - RNA, 19 nt, Artificial Sequence
  Description of Artificial Sequence: Synthetic oligonucleotide
  Sense strand starting at position 3831 of SEQ ID NO: 1243335
ccauccagugucugauuga

SEQ ID NO: 1409981 - RNA, 19 nt, Artificial Sequence
  Description of Artificial Sequence: Synthetic oligonucleotide
  Antisense strand to SEQ ID NO: 1409980
ucaaucagacacuggaugg

SEQ ID NO: 1409982 - RNA, 19 nt, Artificial Sequence
  Description of Artificial Sequence: Synthetic oligonucleotide
  Sense strand starting at position 3879 of SEQ ID NO: 1243335
gaagcuauggcccaaguaa

SEQ ID NO: 1409983 - RNA, 19 nt, Artificial Sequence
  Description of Artificial Sequence: Synthetic oligonucleotide
  Antisense strand to SEQ ID NO: 1409982
uuacuugggccauagcuuc

SEQ ID NO: 1409984 - RNA, 19 nt, Artificial Sequence
  Description of Artificial Sequence: Synthetic oligonucleotide
  Sense strand starting at position 2275 of SEQ ID NO: 1243336
gaccgaagacggugugaau

SEQ ID NO: 1409985 - RNA, 19 nt, Artificial Sequence
  Description of Artificial Sequence: Synthetic oligonucleotide
  Antisense strand to SEQ ID NO: 1409984
auucacaccgucuucgguc

SEQ ID NO: 1409986 - RNA, 19 nt, Artificial Sequence
  Description of Artificial Sequence: Synthetic oligonucleotide
  Sense strand starting at position 2286 of SEQ ID NO: 1243336
gugugaaucucguagggcu

SEQ ID NO: 1409987 - RNA, 19 nt, Artificial Sequence
  Description of Artificial Sequence: Synthetic oligonucleotide
  Antisense strand to SEQ ID NO: 1409986
agcccuacgagauucacac

SEQ ID NO: 1409988 - RNA, 19 nt, Artificial Sequence
  Description of Artificial Sequence: Synthetic oligonucleotide
  Sense strand starting at position 2374 of SEQ ID NO: 1243336
gagcguccucccggaggaa

SEQ ID NO: 1409989 - RNA, 19 nt, Artificial Sequence
  Description of Artificial Sequence: Synthetic oligonucleotide
  Antisense strand to SEQ ID NO: 1409988
uuccuccgggaggacgcuc

SEQ ID NO: 1409990 - RNA, 19 nt, Artificial Sequence
  Description of Artificial Sequence: Synthetic oligonucleotide
  Sense strand starting at position 2375 of SEQ ID NO: 1243336
agcguccucccggaggaaa

SEQ ID NO: 1409991 - RNA, 19 nt, Artificial Sequence
  Description of Artificial Sequence: Synthetic oligonucleotide
  Antisense strand to SEQ ID NO: 1409990
uuuccuccgggaggacgcu

SEQ ID NO: 1409992 - RNA, 19 nt, Artificial Sequence
  Description of Artificial Sequence: Synthetic oligonucleotide
  Sense strand starting at position 2376 of SEQ ID NO: 1243336
gcguccucccggaggaaau

SEQ ID NO: 1409993 - RNA, 19 nt, Artificial Sequence
  Description of Artificial Sequence: Synthetic oligonucleotide
  Antisense strand to SEQ ID NO: 1409992
auuuccuccgggaggacgc

SEQ ID NO: 1409994 - RNA, 19 nt, Artificial Sequence
  Description of Artificial Sequence: Synthetic oligonucleotide
  Sense strand starting at position 2377 of SEQ ID NO: 1243336
cguccucccggaggaaauu

SEQ ID NO: 1409995 - RNA, 19 nt, Artificial Sequence
  Description of Artificial Sequence: Synthetic oligonucleotide
  Antisense strand to SEQ ID NO: 1409994
aauuuccuccgggaggacg

SEQ ID NO: 1409996 - RNA, 19 nt, Artificial Sequence
  Description of Artificial Sequence: Synthetic oligonucleotide
  Sense strand starting at position 2386 of SEQ ID NO: 1243336
ggaggaaauucgggacaaa

SEQ ID NO: 1409997 - RNA, 19 nt, Artificial Sequence
  Description of Artificial Sequence: Synthetic oligonucleotide
  Antisense strand to SEQ ID NO: 1409996
uuugucccgaauuuccucc

SEQ ID NO: 1409998 - RNA, 19 nt, Artificial Sequence
  Description of Artificial Sequence: Synthetic oligonucleotide
  Sense strand starting at position 2409 of SEQ ID NO: 1243336
cgaugucgaccauagagaa

SEQ ID NO: 1409999 - RNA, 19 nt, Artificial Sequence
  Description of Artificial Sequence: Synthetic oligonucleotide
  Antisense strand to SEQ ID NO: 1409998
uucucuauggucgacaucg

SEQ ID NO: 1410000 - RNA, 19 nt, Artificial Sequence
  Description of Artificial Sequence: Synthetic oligonucleotide
  Sense strand starting at position 2499 of SEQ ID NO: 1243336
agaugaugaggcuguguga

SEQ ID NO: 1410001 - RNA, 19 nt, Artificial Sequence
  Description of Artificial Sequence: Synthetic oligonucleotide
  Antisense strand to SEQ ID NO: 1410000
ucacacagccucaucaucu

SEQ ID NO: 1410002 - RNA, 19 nt, Artificial Sequence
  Description of Artificial Sequence: Synthetic oligonucleotide
  Sense strand starting at position 2652 of SEQ ID NO: 1243336
cuugguuuaucugaggaaa

SEQ ID NO: 1410003 - RNA, 19 nt, Artificial Sequence
  Description of Artificial Sequence: Synthetic oligonucleotide
  Antisense strand to SEQ ID NO: 1410002
uuuccucagauaaaccaag

SEQ ID NO: 1410004 - RNA, 19 nt, Artificial Sequence
  Description of Artificial Sequence: Synthetic oligonucleotide
  Sense strand starting at position 2654 of SEQ ID NO: 1243336
ugguuuaucugaggaaagg

SEQ ID NO: 1410005 - RNA, 19 nt, Artificial Sequence
  Description of Artificial Sequence: Synthetic oligonucleotide
  Antisense strand to SEQ ID NO: 1410004
ccuuuccucagauaaacca

SEQ ID NO: 1410006 - RNA, 19 nt, Artificial Sequence
  Description of Artificial Sequence: Synthetic oligonucleotide
  Sense strand starting at position 3709 of SEQ ID NO: 1243336
gucaauuccagacgugcuu

SEQ ID NO: 1410007 - RNA, 19 nt, Artificial Sequence
  Description of Artificial Sequence: Synthetic oligonucleotide
  Antisense strand to SEQ ID NO: 1410006
aagcacgucuggaauugac

SEQ ID NO: 1410008 - RNA, 19 nt, Artificial Sequence
  Description of Artificial Sequence: Synthetic oligonucleotide
  Sense strand starting at position 3731 of SEQ ID NO: 1243336
ggacgucugugggcauaua

SEQ ID NO: 1410009 - RNA, 19 nt, Artificial Sequence
  Description of Artificial Sequence: Synthetic oligonucleotide
  Antisense strand to SEQ ID NO: 1410008
uauaugcccacagacgucc

SEQ ID NO: 1410010 - RNA, 19 nt, Artificial Sequence
  Description of Artificial Sequence: Synthetic oligonucleotide
  Sense strand starting at position 3742 of SEQ ID NO: 1243336
ggcauauagucuggagcua

SEQ ID NO: 1410011 - RNA, 19 nt, Artificial Sequence
  Description of Artificial Sequence: Synthetic oligonucleotide
  Antisense strand to SEQ ID NO: 1410010
uagcuccagacuauaugcc

SEQ ID NO: 1410012 - RNA, 19 nt, Artificial Sequence
  Description of Artificial Sequence: Synthetic oligonucleotide
  Sense strand starting at position 3743 of SEQ ID NO: 1243336
gcauauagucuggagcuaa

SEQ ID NO: 1410013 - RNA, 19 nt, Artificial Sequence
  Description of Artificial Sequence: Synthetic oligonucleotide
  Antisense strand to SEQ ID NO: 1410012
uuagcuccagacuauaugc

SEQ ID NO: 1410014 - RNA, 19 nt, Artificial Sequence
  Description of Artificial Sequence: Synthetic oligonucleotide
  Sense strand starting at position 3849 of SEQ ID NO: 1243336
ccauccagugucugauuga

SEQ ID NO: 1410015 - RNA, 19 nt, Artificial Sequence
  Description of Artificial Sequence: Synthetic oligonucleotide
  Antisense strand to SEQ ID NO: 1410014
ucaaucagacacuggaugg

SEQ ID NO: 1410016 - RNA, 19 nt, Artificial Sequence
  Description of Artificial Sequence: Synthetic oligonucleotide
  Sense strand starting at position 3897 of SEQ ID NO: 1243336
gaagcuauggcccaaguaa

SEQ ID NO: 1410017 - RNA, 19 nt, Artificial Sequence
  Description of Artificial Sequence: Synthetic oligonucleotide
  Antisense strand to SEQ ID NO: 1410016
uuacuugggccauagcuuc

SEQ ID NO: 1410018 - RNA, 19 nt, Artificial Sequence
  Description of Artificial Sequence: Synthetic oligonucleotide
  Sense strand starting at position 42 of SEQ ID NO: 1243337
aaguguacucaagggucua

SEQ ID NO: 1410019 - RNA, 19 nt, Artificial Sequence
  Description of Artificial Sequence: Synthetic oligonucleotide
  Antisense strand to SEQ ID NO: 1410018
uagacccuugaguacacuu

SEQ ID NO: 1410020 - RNA, 19 nt, Artificial Sequence
  Description of Artificial Sequence: Synthetic oligonucleotide
  Sense strand starting at position 53 of SEQ ID NO: 1243337
agggucuacugcucacaaa

SEQ ID NO: 1410021 - RNA, 19 nt, Artificial Sequence
  Description of Artificial Sequence: Synthetic oligonucleotide
  Antisense strand to SEQ ID NO: 1410020
uuugugagcaguagacccu

SEQ ID NO: 1410022 - RNA, 19 nt, Artificial Sequence
  Description of Artificial Sequence: Synthetic oligonucleotide
  Sense strand starting at position 99 of SEQ ID NO: 1243337
aucaguaccuuacugguua

SEQ ID NO: 1410023 - RNA, 19 nt, Artificial Sequence
  Description of Artificial Sequence: Synthetic oligonucleotide
  Antisense strand to SEQ ID NO: 1410022
uaaccaguaagguacugau

SEQ ID NO: 1410024 - RNA, 19 nt, Artificial Sequence
  Description of Artificial Sequence: Synthetic oligonucleotide
  Sense strand starting at position 104 of SEQ ID NO: 1243337
uaccuuacugguuauguga

SEQ ID NO: 1410025 - RNA, 19 nt, Artificial Sequence
  Description of Artificial Sequence: Synthetic oligonucleotide
  Antisense strand to SEQ ID NO: 1410024
ucacauaaccaguaaggua

SEQ ID NO: 1410026 - RNA, 19 nt, Artificial Sequence
  Description of Artificial Sequence: Synthetic oligonucleotide
  Sense strand starting at position 107 of SEQ ID NO: 1243337
cuuacugguuaugugacaa

SEQ ID NO: 1410027 - RNA, 19 nt, Artificial Sequence
  Description of Artificial Sequence: Synthetic oligonucleotide
  Antisense strand to SEQ ID NO: 1410026
uugucacauaaccaguaag

SEQ ID NO: 1410028 - RNA, 19 nt, Artificial Sequence
  Description of Artificial Sequence: Synthetic oligonucleotide
  Sense strand starting at position 286 of SEQ ID NO: 1243337
ucuuuauagcuuuauggag

SEQ ID NO: 1410029 - RNA, 19 nt, Artificial Sequence
  Description of Artificial Sequence: Synthetic oligonucleotide
  Antisense strand to SEQ ID NO: 1410028
cuccauaaagcuauaaaga

SEQ ID NO: 1410030 - RNA, 19 nt, Artificial Sequence
  Description of Artificial Sequence: Synthetic oligonucleotide
  Sense strand starting at position 840 of SEQ ID NO: 1243337
ucacgucauugccuauuaa

SEQ ID NO: 1410031 - RNA, 19 nt, Artificial Sequence
  Description of Artificial Sequence: Synthetic oligonucleotide
  Antisense strand to SEQ ID NO: 1410030
uuaauaggcaaugacguga

SEQ ID NO: 1410032 - RNA, 19 nt, Artificial Sequence
  Description of Artificial Sequence: Synthetic oligonucleotide
  Sense strand starting at position 1128 of SEQ ID NO: 1243337
uuggcauagucuuccagau

SEQ ID NO: 1410033 - RNA, 19 nt, Artificial Sequence
  Description of Artificial Sequence: Synthetic oligonucleotide
  Antisense strand to SEQ ID NO: 1410032
aucuggaagacuaugccaa

SEQ ID NO: 1410034 - RNA, 19 nt, Artificial Sequence
  Description of Artificial Sequence: Synthetic oligonucleotide
  Sense strand starting at position 1177 of SEQ ID NO: 1243337
guuggauagguggguuaau

SEQ ID NO: 1410035 - RNA, 19 nt, Artificial Sequence
  Description of Artificial Sequence: Synthetic oligonucleotide
  Antisense strand to SEQ ID NO: 1410034
auuaacccaccuauccaac

SEQ ID NO: 1410036 - RNA, 19 nt, Artificial Sequence
  Description of Artificial Sequence: Synthetic oligonucleotide
  Sense strand starting at position 1178 of SEQ ID NO: 1243337
uuggauagguggguuaaua

SEQ ID NO: 1410037 - RNA, 19 nt, Artificial Sequence
  Description of Artificial Sequence: Synthetic oligonucleotide
  Antisense strand to SEQ ID NO: 1410036
uauuaacccaccuauccaa

SEQ ID NO: 1410038 - RNA, 19 nt, Artificial Sequence
  Description of Artificial Sequence: Synthetic oligonucleotide
  Sense strand starting at position 1188 of SEQ ID NO: 1243337
ggguuaauaguggaauugu

SEQ ID NO: 1410039 - RNA, 19 nt, Artificial Sequence
  Description of Artificial Sequence: Synthetic oligonucleotide
  Antisense strand to SEQ ID NO: 1410038
acaauuccacuauuaaccc

SEQ ID NO: 1410040 - RNA, 19 nt, Artificial Sequence
  Description of Artificial Sequence: Synthetic oligonucleotide
  Sense strand starting at position 1317 of SEQ ID NO: 1243337
gaaacucuaugaggaggaa

SEQ ID NO: 1410041 - RNA, 19 nt, Artificial Sequence
  Description of Artificial Sequence: Synthetic oligonucleotide
  Antisense strand to SEQ ID NO: 1410040
uuccuccucauagaguuuc

SEQ ID NO: 1410042 - RNA, 19 nt, Artificial Sequence
  Description of Artificial Sequence: Synthetic oligonucleotide
  Sense strand starting at position 1479 of SEQ ID NO: 1243337
agggaagugugguucguga

SEQ ID NO: 1410043 - RNA, 19 nt, Artificial Sequence
  Description of Artificial Sequence: Synthetic oligonucleotide
  Antisense strand to SEQ ID NO: 1410042
ucacgaaccacacuucccu

SEQ ID NO: 1410044 - RNA, 19 nt, Artificial Sequence
  Description of Artificial Sequence: Synthetic oligonucleotide
  Sense strand starting at position 1493 of SEQ ID NO: 1243337
cgugaucuccuuugagaug

SEQ ID NO: 1410045 - RNA, 19 nt, Artificial Sequence
  Description of Artificial Sequence: Synthetic oligonucleotide
  Antisense strand to SEQ ID NO: 1410044
caucucaaaggagaucacg

SEQ ID NO: 1410046 - RNA, 19 nt, Artificial Sequence
  Description of Artificial Sequence: Synthetic oligonucleotide
  Sense strand starting at position 1574 of SEQ ID NO: 1243337
uagggaauuccuggcccaa

SEQ ID NO: 1410047 - RNA, 19 nt, Artificial Sequence
  Description of Artificial Sequence: Synthetic oligonucleotide
  Antisense strand to SEQ ID NO: 1410046
uugggccaggaauucccua

SEQ ID NO: 1410048 - RNA, 19 nt, Artificial Sequence
  Description of Artificial Sequence: Synthetic oligonucleotide
  Sense strand starting at position 1576 of SEQ ID NO: 1243337
gggaauuccuggcccaauc

SEQ ID NO: 1410049 - RNA, 19 nt, Artificial Sequence
  Description of Artificial Sequence: Synthetic oligonucleotide
  Antisense strand to SEQ ID NO: 1410048
gauugggccaggaauuccc

SEQ ID NO: 1410050 - RNA, 19 nt, Artificial Sequence
  Description of Artificial Sequence: Synthetic oligonucleotide
  Sense strand starting at position 1852 of SEQ ID NO: 1243337
gcucaccuuucuccagaga

SEQ ID NO: 1410051 - RNA, 19 nt, Artificial Sequence
  Description of Artificial Sequence: Synthetic oligonucleotide
  Antisense strand to SEQ ID NO: 1410050
ucucuggagaaaggugagc

SEQ ID NO: 1410052 - RNA, 19 nt, Artificial Sequence
  Description of Artificial Sequence: Synthetic oligonucleotide
  Sense strand starting at position 2004 of SEQ ID NO: 1243337
gcaggcucugcugauuuga

SEQ ID NO: 1410053 - RNA, 19 nt, Artificial Sequence
  Description of Artificial Sequence: Synthetic oligonucleotide
  Antisense strand to SEQ ID NO: 1410052
ucaaaucagcagagccugc

SEQ ID NO: 1410054 - RNA, 19 nt, Artificial Sequence
  Description of Artificial Sequence: Synthetic oligonucleotide
  Sense strand starting at position 2168 of SEQ ID NO: 1243337
ggaauauaauuuggaauga

SEQ ID NO: 1410055 - RNA, 19 nt, Artificial Sequence
  Description of Artificial Sequence: Synthetic oligonucleotide
  Antisense strand to SEQ ID NO: 1410054
ucauuccaaauuauauucc

SEQ ID NO: 1410056 - RNA, 19 nt, Artificial Sequence
  Description of Artificial Sequence: Synthetic oligonucleotide
  Sense strand starting at position 2203 of SEQ ID NO: 1243337
accagcaaugccuggaaau

SEQ ID NO: 1410057 - RNA, 19 nt, Artificial Sequence
  Description of Artificial Sequence: Synthetic oligonucleotide
  Antisense strand to SEQ ID NO: 1410056
auuuccaggcauugcuggu

SEQ ID NO: 1410058 - RNA, 19 nt, Artificial Sequence
  Description of Artificial Sequence: Synthetic oligonucleotide
  Sense strand starting at position 2204 of SEQ ID NO: 1243337
ccagcaaugccuggaaaug

SEQ ID NO: 1410059 - RNA, 19 nt, Artificial Sequence
  Description of Artificial Sequence: Synthetic oligonucleotide
  Antisense strand to SEQ ID NO: 1410058
cauuuccaggcauugcugg

SEQ ID NO: 1410060 - RNA, 19 nt, Artificial Sequence
  Description of Artificial Sequence: Synthetic oligonucleotide
  Sense strand starting at position 2205 of SEQ ID NO: 1243337
cagcaaugccuggaaauga

SEQ ID NO: 1410061 - RNA, 19 nt, Artificial Sequence
  Description of Artificial Sequence: Synthetic oligonucleotide
  Antisense strand to SEQ ID NO: 1410060
ucauuuccaggcauugcug

SEQ ID NO: 1410062 - RNA, 19 nt, Artificial Sequence
  Description of Artificial Sequence: Synthetic oligonucleotide
  Sense strand starting at position 2567 of SEQ ID NO: 1243337
gcauauugugugcaagaua

SEQ ID NO: 1410063 - RNA, 19 nt, Artificial Sequence
  Description of Artificial Sequence: Synthetic oligonucleotide
  Antisense strand to SEQ ID NO: 1410062
uaucuugcacacaauaugc

SEQ ID NO: 1410064 - RNA, 19 nt, Artificial Sequence
  Description of Artificial Sequence: Synthetic oligonucleotide
  Sense strand starting at position 2595 of SEQ ID NO: 1243337
augcguuaccuggauuguu

SEQ ID NO: 1410065 - RNA, 19 nt, Artificial Sequence
  Description of Artificial Sequence: Synthetic oligonucleotide
  Antisense strand to SEQ ID NO: 1410064
aacaauccagguaacgcau

SEQ ID NO: 1410066 - RNA, 19 nt, Artificial Sequence
  Description of Artificial Sequence: Synthetic oligonucleotide
  Sense strand starting at position 2604 of SEQ ID NO: 1243337
cuggauuguucuguuuaau

SEQ ID NO: 1410067 - RNA, 19 nt, Artificial Sequence
  Description of Artificial Sequence: Synthetic oligonucleotide
  Antisense strand to SEQ ID NO: 1410066
auuaaacagaacaauccag

SEQ ID NO: 1410068 - RNA, 19 nt, Artificial Sequence
  Description of Artificial Sequence: Synthetic oligonucleotide
  Sense strand starting at position 2690 of SEQ ID NO: 1243337
cuaagaaguuaagucacuu

SEQ ID NO: 1410069 - RNA, 19 nt, Artificial Sequence
  Description of Artificial Sequence: Synthetic oligonucleotide
  Antisense strand to SEQ ID NO: 1410068
aagugacuuaacuucuuag

SEQ ID NO: 1410070 - RNA, 19 nt, Artificial Sequence
  Description of Artificial Sequence: Synthetic oligonucleotide
  Sense strand starting at position 2862 of SEQ ID NO: 1243337
ggaccaagagccuggucau

SEQ ID NO: 1410071 - RNA, 19 nt, Artificial Sequence
  Description of Artificial Sequence: Synthetic oligonucleotide
  Antisense strand to SEQ ID NO: 1410070
augaccaggcucuuggucc

SEQ ID NO: 1410072 - RNA, 19 nt, Artificial Sequence
  Description of Artificial Sequence: Synthetic oligonucleotide
  Sense strand starting at position 2869 of SEQ ID NO: 1243337
gagccuggucaugacaguu

SEQ ID NO: 1410073 - RNA, 19 nt, Artificial Sequence
  Description of Artificial Sequence: Synthetic oligonucleotide
  Antisense strand to SEQ ID NO: 1410072
aacugucaugaccaggcuc

SEQ ID NO: 1410074 - RNA, 19 nt, Artificial Sequence
  Description of Artificial Sequence: Synthetic oligonucleotide
  Sense strand starting at position 2886 of SEQ ID NO: 1243337
uucgucugugcagucuuaa

SEQ ID NO: 1410075 - RNA, 19 nt, Artificial Sequence
  Description of Artificial Sequence: Synthetic oligonucleotide
  Antisense strand to SEQ ID NO: 1410074
uuaagacugcacagacgaa

SEQ ID NO: 1410076 - RNA, 19 nt, Artificial Sequence
  Description of Artificial Sequence: Synthetic oligonucleotide
  Sense strand starting at position 2887 of SEQ ID NO: 1243337
ucgucugugcagucuuaau

SEQ ID NO: 1410077 - RNA, 19 nt, Artificial Sequence
  Description of Artificial Sequence: Synthetic oligonucleotide
  Antisense strand to SEQ ID NO: 1410076
auuaagacugcacagacga

SEQ ID NO: 1410078 - RNA, 19 nt, Artificial Sequence
  Description of Artificial Sequence: Synthetic oligonucleotide
  Sense strand starting at position 2889 of SEQ ID NO: 1243337
gucugugcagucuuaaugu

SEQ ID NO: 1410079 - RNA, 19 nt, Artificial Sequence
  Description of Artificial Sequence: Synthetic oligonucleotide
  Antisense strand to SEQ ID NO: 1410078
acauuaagacugcacagac

SEQ ID NO: 1410080 - RNA, 19 nt, Artificial Sequence
  Description of Artificial Sequence: Synthetic oligonucleotide
  Sense strand starting at position 2909 of SEQ ID NO: 1243337
gggaaacauuuccacuuau

SEQ ID NO: 1410081 - RNA, 19 nt, Artificial Sequence
  Description of Artificial Sequence: Synthetic oligonucleotide
  Antisense strand to SEQ ID NO: 1410080
auaaguggaaauguuuccc

SEQ ID NO: 1410082 - RNA, 19 nt, Artificial Sequence
  Description of Artificial Sequence: Synthetic oligonucleotide
  Sense strand starting at position 2934 of SEQ ID NO: 1243337
gaagaaacaccuugggcua

SEQ ID NO: 1410083 - RNA, 19 nt, Artificial Sequence
  Description of Artificial Sequence: Synthetic oligonucleotide
  Antisense strand to SEQ ID NO: 1410082
uagcccaagguguuucuuc

SEQ ID NO: 1410084 - RNA, 19 nt, Artificial Sequence
  Description of Artificial Sequence: Synthetic oligonucleotide
  Sense strand starting at position 2947 of SEQ ID NO: 1243337
gggcuaaagucucucggau

SEQ ID NO: 1410085 - RNA, 19 nt, Artificial Sequence
  Description of Artificial Sequence: Synthetic oligonucleotide
  Antisense strand to SEQ ID NO: 1410084
auccgagagacuuuagccc

SEQ ID NO: 1410086 - RNA, 19 nt, Artificial Sequence
  Description of Artificial Sequence: Synthetic oligonucleotide
  Sense strand starting at position 3014 of SEQ ID NO: 1243337
gcacuuaauugggcuaacu

SEQ ID NO: 1410087 - RNA, 19 nt, Artificial Sequence
  Description of Artificial Sequence: Synthetic oligonucleotide
  Antisense strand to SEQ ID NO: 1410086
aguuagcccaauuaagugc

SEQ ID NO: 1410088 - RNA, 19 nt, Artificial Sequence
  Description of Artificial Sequence: Synthetic oligonucleotide
  Sense strand starting at position 3016 of SEQ ID NO: 1243337
acuuaauugggcuaacuuu

SEQ ID NO: 1410089 - RNA, 19 nt, Artificial Sequence
  Description of Artificial Sequence: Synthetic oligonucleotide
  Antisense strand to SEQ ID NO: 1410088
aaaguuagcccaauuaagu

SEQ ID NO: 1410090 - RNA, 19 nt, Artificial Sequence
  Description of Artificial Sequence: Synthetic oligonucleotide
  Sense strand starting at position 3066 of SEQ ID NO: 1243337
ugcagaaucugaccuuaca

SEQ ID NO: 1410091 - RNA, 19 nt, Artificial Sequence
  Description of Artificial Sequence: Synthetic oligonucleotide
  Antisense strand to SEQ ID NO: 1410090
uguaaggucagauucugca

SEQ ID NO: 1410092 - RNA, 19 nt, Artificial Sequence
  Description of Artificial Sequence: Synthetic oligonucleotide
  Sense strand starting at position 3110 of SEQ ID NO: 1243337
uauugagcaccaugaggua

SEQ ID NO: 1410093 - RNA, 19 nt, Artificial Sequence
  Description of Artificial Sequence: Synthetic oligonucleotide
  Antisense strand to SEQ ID NO: 1410092
uaccucauggugcucaaua

SEQ ID NO: 1410094 - RNA, 19 nt, Artificial Sequence
  Description of Artificial Sequence: Synthetic oligonucleotide
  Sense strand starting at position 3168 of SEQ ID NO: 1243337
ugaggaugacgcuagcuuu

SEQ ID NO: 1410095 - RNA, 19 nt, Artificial Sequence
  Description of Artificial Sequence: Synthetic oligonucleotide
  Antisense strand to SEQ ID NO: 1410094
aaagcuagcgucauccuca

SEQ ID NO: 1410096 - RNA, 19 nt, Artificial Sequence
  Description of Artificial Sequence: Synthetic oligonucleotide
  Sense strand starting at position 3257 of SEQ ID NO: 1243337
gcagcaucacuggagacaa

SEQ ID NO: 1410097 - RNA, 19 nt, Artificial Sequence
  Description of Artificial Sequence: Synthetic oligonucleotide
  Antisense strand to SEQ ID NO: 1410096
uugucuccagugaugcugc

SEQ ID NO: 1410098 - RNA, 19 nt, Artificial Sequence
  Description of Artificial Sequence: Synthetic oligonucleotide
  Sense strand starting at position 63 of SEQ ID NO: 1243338
gaguuugcgaaucgauuua

SEQ ID NO: 1410099 - RNA, 19 nt, Artificial Sequence
  Description of Artificial Sequence: Synthetic oligonucleotide
  Antisense strand to SEQ ID NO: 1410098
uaaaucgauucgcaaacuc

SEQ ID NO: 1410100 - RNA, 19 nt, Artificial Sequence
  Description of Artificial Sequence: Synthetic oligonucleotide
  Sense strand starting at position 70 of SEQ ID NO: 1243338
cgaaucgauuuagacacuu

SEQ ID NO: 1410101 - RNA, 19 nt, Artificial Sequence
  Description of Artificial Sequence: Synthetic oligonucleotide
  Antisense strand to SEQ ID NO: 1410100
aagugucuaaaucgauucg

SEQ ID NO: 1410102 - RNA, 19 nt, Artificial Sequence
  Description of Artificial Sequence: Synthetic oligonucleotide
  Sense strand starting at position 118 of SEQ ID NO: 1243338
ggcaaauagcuccauuaau

SEQ ID NO: 1410103 - RNA, 19 nt, Artificial Sequence
  Description of Artificial Sequence: Synthetic oligonucleotide
  Antisense strand to SEQ ID NO: 1410102
auuaauggagcuauuugcc

SEQ ID NO: 1410104 - RNA, 19 nt, Artificial Sequence
  Description of Artificial Sequence: Synthetic oligonucleotide
  Sense strand starting at position 179 of SEQ ID NO: 1243338
gggcuugcauaaugaacaa

SEQ ID NO: 1410105 - RNA, 19 nt, Artificial Sequence
  Description of Artificial Sequence: Synthetic oligonucleotide
  Antisense strand to SEQ ID NO: 1410104
uuguucauuaugcaagccc

SEQ ID NO: 1410106 - RNA, 19 nt, Artificial Sequence
  Description of Artificial Sequence: Synthetic oligonucleotide
  Sense strand starting at position 204 of SEQ ID NO: 1243338
cccgaaaguugacgaaauc

SEQ ID NO: 1410107 - RNA, 19 nt, Artificial Sequence
  Description of Artificial Sequence: Synthetic oligonucleotide
  Antisense strand to SEQ ID NO: 1410106
gauuucgucaacuuucggg

SEQ ID NO: 1410108 - RNA, 19 nt, Artificial Sequence
  Description of Artificial Sequence: Synthetic oligonucleotide
  Sense strand starting at position 205 of SEQ ID NO: 1243338
ccgaaaguugacgaaauca

SEQ ID NO: 1410109 - RNA, 19 nt, Artificial Sequence
  Description of Artificial Sequence: Synthetic oligonucleotide
  Antisense strand to SEQ ID NO: 1410108
ugauuucgucaacuuucgg

SEQ ID NO: 1410110 - RNA, 19 nt, Artificial Sequence
  Description of Artificial Sequence: Synthetic oligonucleotide
  Sense strand starting at position 213 of SEQ ID NO: 1243338
ugacgaaaucagggugcuu

SEQ ID NO: 1410111 - RNA, 19 nt, Artificial Sequence
  Description of Artificial Sequence: Synthetic oligonucleotide
  Antisense strand to SEQ ID NO: 1410110
aagcacccugauuucguca

SEQ ID NO: 1410112 - RNA, 19 nt, Artificial Sequence
  Description of Artificial Sequence: Synthetic oligonucleotide
  Sense strand starting at position 492 of SEQ ID NO: 1243338
gcgagucguacgaguugca

SEQ ID NO: 1410113 - RNA, 19 nt, Artificial Sequence
  Description of Artificial Sequence: Synthetic oligonucleotide
  Antisense strand to SEQ ID NO: 1410112
ugcaacucguacgacucgc

SEQ ID NO: 1410114 - RNA, 19 nt, Artificial Sequence
  Description of Artificial Sequence: Synthetic oligonucleotide
  Sense strand starting at position 849 of SEQ ID NO: 1243338
uuggcuucccggugacauc

SEQ ID NO: 1410115 - RNA, 19 nt, Artificial Sequence
  Description of Artificial Sequence: Synthetic oligonucleotide
  Antisense strand to SEQ ID NO: 1410114
gaugucaccgggaagccaa

SEQ ID NO: 1410116 - RNA, 19 nt, Artificial Sequence
  Description of Artificial Sequence: Synthetic oligonucleotide
  Sense strand starting at position 2008 of SEQ ID NO: 1243338
gcgacacuuguggaaugaa

SEQ ID NO: 1410117 - RNA, 19 nt, Artificial Sequence
  Description of Artificial Sequence: Synthetic oligonucleotide
  Antisense strand to SEQ ID NO: 1410116
uucauuccacaagugucgc

SEQ ID NO: 1410118 - RNA, 19 nt, Artificial Sequence
  Description of Artificial Sequence: Synthetic oligonucleotide
  Sense strand starting at position 2366 of SEQ ID NO: 1243338
ggccgaaaucugugcauca

SEQ ID NO: 1410119 - RNA, 19 nt, Artificial Sequence
  Description of Artificial Sequence: Synthetic oligonucleotide
  Antisense strand to SEQ ID NO: 1410118
ugaugcacagauuucggcc

SEQ ID NO: 1410120 - RNA, 19 nt, Artificial Sequence
  Description of Artificial Sequence: Synthetic oligonucleotide
  Sense strand starting at position 2367 of SEQ ID NO: 1243338
gccgaaaucugugcaucag

SEQ ID NO: 1410121 - RNA, 19 nt, Artificial Sequence
  Description of Artificial Sequence: Synthetic oligonucleotide
  Antisense strand to SEQ ID NO: 1410120
cugaugcacagauuucggc

SEQ ID NO: 1410122 - RNA, 19 nt, Artificial Sequence
  Description of Artificial Sequence: Synthetic oligonucleotide
  Sense strand starting at position 2447 of SEQ ID NO: 1243338
ggugcagucuggucaggau

SEQ ID NO: 1410123 - RNA, 19 nt, Artificial Sequence
  Description of Artificial Sequence: Synthetic oligonucleotide
  Antisense strand to SEQ ID NO: 1410122
auccugaccagacugcacc

SEQ ID NO: 1410124 - RNA, 19 nt, Artificial Sequence
  Description of Artificial Sequence: Synthetic oligonucleotide
  Sense strand starting at position 2713 of SEQ ID NO: 1243338
gaaggucuuuccuuggaag

SEQ ID NO: 1410125 - RNA, 19 nt, Artificial Sequence
  Description of Artificial Sequence: Synthetic oligonucleotide
  Antisense strand to SEQ ID NO: 1410124
cuuccaaggaaagaccuuc

SEQ ID NO: 1410126 - RNA, 19 nt, Artificial Sequence
  Description of Artificial Sequence: Synthetic oligonucleotide
  Sense strand starting at position 2714 of SEQ ID NO: 1243338
aaggucuuuccuuggaagu

SEQ ID NO: 1410127 - RNA, 19 nt, Artificial Sequence
  Description of Artificial Sequence: Synthetic oligonucleotide
  Antisense strand to SEQ ID NO: 1410126
acuuccaaggaaagaccuu

SEQ ID NO: 1410128 - RNA, 19 nt, Artificial Sequence
  Description of Artificial Sequence: Synthetic oligonucleotide
  Sense strand starting at position 2715 of SEQ ID NO: 1243338
aggucuuuccuuggaaguc

SEQ ID NO: 1410129 - RNA, 19 nt, Artificial Sequence
  Description of Artificial Sequence: Synthetic oligonucleotide
  Antisense strand to SEQ ID NO: 1410128
gacuuccaaggaaagaccu

SEQ ID NO: 1410130 - RNA, 19 nt, Artificial Sequence
  Description of Artificial Sequence: Synthetic oligonucleotide
  Sense strand starting at position 3006 of SEQ ID NO: 1243338
uccucuguguuuccaaauc

SEQ ID NO: 1410131 - RNA, 19 nt, Artificial Sequence
  Description of Artificial Sequence: Synthetic oligonucleotide
  Antisense strand to SEQ ID NO: 1410130
gauuuggaaacacagagga

SEQ ID NO: 1410132 - RNA, 19 nt, Artificial Sequence
  Description of Artificial Sequence: Synthetic oligonucleotide
  Sense strand starting at position 3240 of SEQ ID NO: 1243338
aggagauaauguuuccaca

SEQ ID NO: 1410133 - RNA, 19 nt, Artificial Sequence
  Description of Artificial Sequence: Synthetic oligonucleotide
  Antisense strand to SEQ ID NO: 1410132
uguggaaacauuaucuccu

SEQ ID NO: 1410134 - RNA, 19 nt, Artificial Sequence
  Description of Artificial Sequence: Synthetic oligonucleotide
  Sense strand starting at position 3316 of SEQ ID NO: 1243338
aaaguugggcgacauguaa

SEQ ID NO: 1410135 - RNA, 19 nt, Artificial Sequence
  Description of Artificial Sequence: Synthetic oligonucleotide
  Antisense strand to SEQ ID NO: 1410134
uuacaugucgcccaacuuu

SEQ ID NO: 1410136 - RNA, 19 nt, Artificial Sequence
  Description of Artificial Sequence: Synthetic oligonucleotide
  Sense strand starting at position 3361 of SEQ ID NO: 1243338
gagaaagggugggaggauu

SEQ ID NO: 1410137 - RNA, 19 nt, Artificial Sequence
  Description of Artificial Sequence: Synthetic oligonucleotide
  Antisense strand to SEQ ID NO: 1410136
aauccucccacccuuucuc

SEQ ID NO: 1410138 - RNA, 19 nt, Artificial Sequence
  Description of Artificial Sequence: Synthetic oligonucleotide
  Sense strand starting at position 3373 of SEQ ID NO: 1243338
gaggauuuauugggacucu

SEQ ID NO: 1410139 - RNA, 19 nt, Artificial Sequence
  Description of Artificial Sequence: Synthetic oligonucleotide
  Antisense strand to SEQ ID NO: 1410138
agagucccaauaaauccuc

SEQ ID NO: 1410140 - RNA, 19 nt, Artificial Sequence
  Description of Artificial Sequence: Synthetic oligonucleotide
  Sense strand starting at position 3408 of SEQ ID NO: 1243338
aaaugagaaguuuggcuaa

SEQ ID NO: 1410141 - RNA, 19 nt, Artificial Sequence
  Description of Artificial Sequence: Synthetic oligonucleotide
  Antisense strand to SEQ ID NO: 1410140
uuagccaaacuucucauuu

SEQ ID NO: 1410142 - RNA, 19 nt, Artificial Sequence
  Description of Artificial Sequence: Synthetic oligonucleotide
  Sense strand starting at position 3410 of SEQ ID NO: 1243338
augagaaguuuggcuaauc

SEQ ID NO: 1410143 - RNA, 19 nt, Artificial Sequence
  Description of Artificial Sequence: Synthetic oligonucleotide
  Antisense strand to SEQ ID NO: 1410142
gauuagccaaacuucucau

SEQ ID NO: 1410144 - RNA, 19 nt, Artificial Sequence
  Description of Artificial Sequence: Synthetic oligonucleotide
  Sense strand starting at position 3505 of SEQ ID NO: 1243338
agggcauacccaggaguau

SEQ ID NO: 1410145 - RNA, 19 nt, Artificial Sequence
  Description of Artificial Sequence: Synthetic oligonucleotide
  Antisense strand to SEQ ID NO: 1410144
auacuccuggguaugcccu

SEQ ID NO: 1410146 - RNA, 19 nt, Artificial Sequence
  Description of Artificial Sequence: Synthetic oligonucleotide
  Sense strand starting at position 3506 of SEQ ID NO: 1243338
gggcauacccaggaguauu

SEQ ID NO: 1410147 - RNA, 19 nt, Artificial Sequence
  Description of Artificial Sequence: Synthetic oligonucleotide
  Antisense strand to SEQ ID NO: 1410146
aauacuccuggguaugccc

SEQ ID NO: 1410148 - RNA, 19 nt, Artificial Sequence
  Description of Artificial Sequence: Synthetic oligonucleotide
  Sense strand starting at position 3514 of SEQ ID NO: 1243338
ccaggaguauuauauucca

SEQ ID NO: 1410149 - RNA, 19 nt, Artificial Sequence
  Description of Artificial Sequence: Synthetic oligonucleotide
  Antisense strand to SEQ ID NO: 1410148
uggaauauaauacuccugg

SEQ ID NO: 1410150 - RNA, 19 nt, Artificial Sequence
  Description of Artificial Sequence: Synthetic oligonucleotide
  Sense strand starting at position 3553 of SEQ ID NO: 1243338
gaacacguuuaauccagau

SEQ ID NO: 1410151 - RNA, 19 nt, Artificial Sequence
  Description of Artificial Sequence: Synthetic oligonucleotide
  Antisense strand to SEQ ID NO: 1410150
aucuggauuaaacguguuc

SEQ ID NO: 1410152 - RNA, 19 nt, Artificial Sequence
  Description of Artificial Sequence: Synthetic oligonucleotide
  Sense strand starting at position 3612 of SEQ ID NO: 1243338
uauggaaagucugucauga

SEQ ID NO: 1410153 - RNA, 19 nt, Artificial Sequence
  Description of Artificial Sequence: Synthetic oligonucleotide
  Antisense strand to SEQ ID NO: 1410152
ucaugacagacuuuccaua

SEQ ID NO: 1410154 - RNA, 19 nt, Artificial Sequence
  Description of Artificial Sequence: Synthetic oligonucleotide
  Sense strand starting at position 3614 of SEQ ID NO: 1243338
uggaaagucugucaugacu

SEQ ID NO: 1410155 - RNA, 19 nt, Artificial Sequence
  Description of Artificial Sequence: Synthetic oligonucleotide
  Antisense strand to SEQ ID NO: 1410154
agucaugacagacuuucca

SEQ ID NO: 1410156 - RNA, 19 nt, Artificial Sequence
  Description of Artificial Sequence: Synthetic oligonucleotide
  Sense strand starting at position 3654 of SEQ ID NO: 1243338
ccuugugaguccuacaaac

SEQ ID NO: 1410157 - RNA, 19 nt, Artificial Sequence
  Description of Artificial Sequence: Synthetic oligonucleotide
  Antisense strand to SEQ ID NO: 1410156
guuuguaggacucacaagg

SEQ ID NO: 1410158 - RNA, 19 nt, Artificial Sequence
  Description of Artificial Sequence: Synthetic oligonucleotide
  Sense strand starting at position 3656 of SEQ ID NO: 1243338
uugugaguccuacaaacac

SEQ ID NO: 1410159 - RNA, 19 nt, Artificial Sequence
  Description of Artificial Sequence: Synthetic oligonucleotide
  Antisense strand to SEQ ID NO: 1410158
guguuuguaggacucacaa

SEQ ID NO: 1410160 - RNA, 19 nt, Artificial Sequence
  Description of Artificial Sequence: Synthetic oligonucleotide
  Sense strand starting at position 3679 of SEQ ID NO: 1243338
acuggugugugagagcuaa

SEQ ID NO: 1410161 - RNA, 19 nt, Artificial Sequence
  Description of Artificial Sequence: Synthetic oligonucleotide
  Antisense strand to SEQ ID NO: 1410160
uuagcucucacacaccagu

SEQ ID NO: 1410162 - RNA, 19 nt, Artificial Sequence
  Description of Artificial Sequence: Synthetic oligonucleotide
  Sense strand starting at position 3683 of SEQ ID NO: 1243338
gugugugagagcuaaugag

SEQ ID NO: 1410163 - RNA, 19 nt, Artificial Sequence
  Description of Artificial Sequence: Synthetic oligonucleotide
  Antisense strand to SEQ ID NO: 1410162
cucauuagcucucacacac

SEQ ID NO: 1410164 - RNA, 19 nt, Artificial Sequence
  Description of Artificial Sequence: Synthetic oligonucleotide
  Sense strand starting at position 3693 of SEQ ID NO: 1243338
gcuaaugagagcugacauu

SEQ ID NO: 1410165 - RNA, 19 nt, Artificial Sequence
  Description of Artificial Sequence: Synthetic oligonucleotide
  Antisense strand to SEQ ID NO: 1410164
aaugucagcucucauuagc

SEQ ID NO: 1410166 - RNA, 19 nt, Artificial Sequence
  Description of Artificial Sequence: Synthetic oligonucleotide
  Sense strand starting at position 3766 of SEQ ID NO: 1243338
caagaaagcuuagagcagu

SEQ ID NO: 1410167 - RNA, 19 nt, Artificial Sequence
  Description of Artificial Sequence: Synthetic oligonucleotide
  Antisense strand to SEQ ID NO: 1410166
acugcucuaagcuuucuug

SEQ ID NO: 1410168 - RNA, 19 nt, Artificial Sequence
  Description of Artificial Sequence: Synthetic oligonucleotide
  Sense strand starting at position 3796 of SEQ ID NO: 1243338
agcagacagucuggaaaua

SEQ ID NO: 1410169 - RNA, 19 nt, Artificial Sequence
  Description of Artificial Sequence: Synthetic oligonucleotide
  Antisense strand to SEQ ID NO: 1410168
uauuuccagacugucugcu

SEQ ID NO: 1410170 - RNA, 19 nt, Artificial Sequence
  Description of Artificial Sequence: Synthetic oligonucleotide
  Sense strand starting at position 3808 of SEQ ID NO: 1243338
ggaaauauuugcugaacca

SEQ ID NO: 1410171 - RNA, 19 nt, Artificial Sequence
  Description of Artificial Sequence: Synthetic oligonucleotide
  Antisense strand to SEQ ID NO: 1410170
ugguucagcaaauauuucc

SEQ ID NO: 1410172 - RNA, 19 nt, Artificial Sequence
  Description of Artificial Sequence: Synthetic oligonucleotide
  Sense strand starting at position 3827 of SEQ ID NO: 1243338
ccgagugacugguuucaug

SEQ ID NO: 1410173 - RNA, 19 nt, Artificial Sequence
  Description of Artificial Sequence: Synthetic oligonucleotide
  Antisense strand to SEQ ID NO: 1410172
caugaaaccagucacucgg

SEQ ID NO: 1410174 - RNA, 19 nt, Artificial Sequence
  Description of Artificial Sequence: Synthetic oligonucleotide
  Sense strand starting at position 3928 of SEQ ID NO: 1243338
ccaaguagcucugccaaau

SEQ ID NO: 1410175 - RNA, 19 nt, Artificial Sequence
  Description of Artificial Sequence: Synthetic oligonucleotide
  Antisense strand to SEQ ID NO: 1410174
auuuggcagagcuacuugg

SEQ ID NO: 1410176 - RNA, 19 nt, Artificial Sequence
  Description of Artificial Sequence: Synthetic oligonucleotide
  Sense strand starting at position 3941 of SEQ ID NO: 1243338
ccaaaugagugccagaauu

SEQ ID NO: 1410177 - RNA, 19 nt, Artificial Sequence
  Description of Artificial Sequence: Synthetic oligonucleotide
  Antisense strand to SEQ ID NO: 1410176
aauucuggcacucauuugg

SEQ ID NO: 1410178 - RNA, 19 nt, Artificial Sequence
  Description of Artificial Sequence: Synthetic oligonucleotide
  Sense strand starting at position 16 of SEQ ID NO: 1243339
aucagucaauguccuaaga

SEQ ID NO: 1410179 - RNA, 19 nt, Artificial Sequence
  Description of Artificial Sequence: Synthetic oligonucleotide
  Antisense strand to SEQ ID NO: 1410178
ucuuaggacauugacugau

SEQ ID NO: 1410180 - RNA, 19 nt, Artificial Sequence
  Description of Artificial Sequence: Synthetic oligonucleotide
  Sense strand starting at position 448 of SEQ ID NO: 1243339
gaagcaauguugguuacca

SEQ ID NO: 1410181 - RNA, 19 nt, Artificial Sequence
  Description of Artificial Sequence: Synthetic oligonucleotide
  Antisense strand to SEQ ID NO: 1410180
ugguaaccaacauugcuuc

SEQ ID NO: 1410182 - RNA, 19 nt, Artificial Sequence
  Description of Artificial Sequence: Synthetic oligonucleotide
  Sense strand starting at position 449 of SEQ ID NO: 1243339
aagcaauguugguuaccaa

SEQ ID NO: 1410183 - RNA, 19 nt, Artificial Sequence
  Description of Artificial Sequence: Synthetic oligonucleotide
  Antisense strand to SEQ ID NO: 1410182
uugguaaccaacauugcuu

SEQ ID NO: 1410184 - RNA, 19 nt, Artificial Sequence
  Description of Artificial Sequence: Synthetic oligonucleotide
  Sense strand starting at position 450 of SEQ ID NO: 1243339
agcaauguugguuaccaau

SEQ ID NO: 1410185 - RNA, 19 nt, Artificial Sequence
  Description of Artificial Sequence: Synthetic oligonucleotide
  Antisense strand to SEQ ID NO: 1410184
auugguaaccaacauugcu

SEQ ID NO: 1410186 - RNA, 19 nt, Artificial Sequence
  Description of Artificial Sequence: Synthetic oligonucleotide
  Sense strand starting at position 483 of SEQ ID NO: 1243339
gcaacuuagguuuagauua

SEQ ID NO: 1410187 - RNA, 19 nt, Artificial Sequence
  Description of Artificial Sequence: Synthetic oligonucleotide
  Antisense strand to SEQ ID NO: 1410186
uaaucuaaaccuaaguugc

SEQ ID NO: 1410188 - RNA, 19 nt, Artificial Sequence
  Description of Artificial Sequence: Synthetic oligonucleotide
  Sense strand starting at position 490 of SEQ ID NO: 1243339
agguuuagauuacccaagu

SEQ ID NO: 1410189 - RNA, 19 nt, Artificial Sequence
  Description of Artificial Sequence: Synthetic oligonucleotide
  Antisense strand to SEQ ID NO: 1410188
acuuggguaaucuaaaccu

SEQ ID NO: 1410190 - RNA, 19 nt, Artificial Sequence
  Description of Artificial Sequence: Synthetic oligonucleotide
  Sense strand starting at position 491 of SEQ ID NO: 1243339
gguuuagauuacccaagug

SEQ ID NO: 1410191 - RNA, 19 nt, Artificial Sequence
  Description of Artificial Sequence: Synthetic oligonucleotide
  Antisense strand to SEQ ID NO: 1410190
cacuuggguaaucuaaacc

SEQ ID NO: 1410192 - RNA, 19 nt, Artificial Sequence
  Description of Artificial Sequence: Synthetic oligonucleotide
  Sense strand starting at position 559 of SEQ ID NO: 1243339
agauuaauuccacgucacu

SEQ ID NO: 1410193 - RNA, 19 nt, Artificial Sequence
  Description of Artificial Sequence: Synthetic oligonucleotide
  Antisense strand to SEQ ID NO: 1410192
agugacguggaauuaaucu

SEQ ID NO: 1410194 - RNA, 19 nt, Artificial Sequence
  Description of Artificial Sequence: Synthetic oligonucleotide
  Sense strand starting at position 588 of SEQ ID NO: 1243339
uuuaaaguuccagaggcaa

SEQ ID NO: 1410195 - RNA, 19 nt, Artificial Sequence
  Description of Artificial Sequence: Synthetic oligonucleotide
  Antisense strand to SEQ ID NO: 1410194
uugccucuggaacuuuaaa

SEQ ID NO: 1410196 - RNA, 19 nt, Artificial Sequence
  Description of Artificial Sequence: Synthetic oligonucleotide
  Sense strand starting at position 613 of SEQ ID NO: 1243339
ugacaauuccaucguaaug

SEQ ID NO: 1410197 - RNA, 19 nt, Artificial Sequence
  Description of Artificial Sequence: Synthetic oligonucleotide
  Antisense strand to SEQ ID NO: 1410196
cauuacgauggaauuguca

SEQ ID NO: 1410198 - RNA, 19 nt, Artificial Sequence
  Description of Artificial Sequence: Synthetic oligonucleotide
  Sense strand starting at position 679 of SEQ ID NO: 1243339
cccagugugacccagguau

SEQ ID NO: 1410199 - RNA, 19 nt, Artificial Sequence
  Description of Artificial Sequence: Synthetic oligonucleotide
  Antisense strand to SEQ ID NO: 1410198
auaccugggucacacuggg

SEQ ID NO: 1410200 - RNA, 19 nt, Artificial Sequence
  Description of Artificial Sequence: Synthetic oligonucleotide
  Sense strand starting at position 724 of SEQ ID NO: 1243339
ggagcucuccuguaaucca

SEQ ID NO: 1410201 - RNA, 19 nt, Artificial Sequence
  Description of Artificial Sequence: Synthetic oligonucleotide
  Antisense strand to SEQ ID NO: 1410200
uggauuacaggagagcucc

SEQ ID NO: 1410202 - RNA, 19 nt, Artificial Sequence
  Description of Artificial Sequence: Synthetic oligonucleotide
  Sense strand starting at position 752 of SEQ ID NO: 1243339
ucaguagauucuuuguaca

SEQ ID NO: 1410203 - RNA, 19 nt, Artificial Sequence
  Description of Artificial Sequence: Synthetic oligonucleotide
  Antisense strand to SEQ ID NO: 1410202
uguacaaagaaucuacuga

SEQ ID NO: 1410204 - RNA, 19 nt, Artificial Sequence
  Description of Artificial Sequence: Synthetic oligonucleotide
  Sense strand starting at position 754 of SEQ ID NO: 1243339
aguagauucuuuguacaua

SEQ ID NO: 1410205 - RNA, 19 nt, Artificial Sequence
  Description of Artificial Sequence: Synthetic oligonucleotide
  Antisense strand to SEQ ID NO: 1410204
uauguacaaagaaucuacu

SEQ ID NO: 1410206 - RNA, 19 nt, Artificial Sequence
  Description of Artificial Sequence: Synthetic oligonucleotide
  Sense strand starting at position 975 of SEQ ID NO: 1243339
gcaguaaacucaguuuaua

SEQ ID NO: 1410207 - RNA, 19 nt, Artificial Sequence
  Description of Artificial Sequence: Synthetic oligonucleotide
  Antisense strand to SEQ ID NO: 1410206
uauaaacugaguuuacugc

SEQ ID NO: 1410208 - RNA, 19 nt, Artificial Sequence
  Description of Artificial Sequence: Synthetic oligonucleotide
  Sense strand starting at position 1045 of SEQ ID NO: 1243339
uugaccuagcaauaguuau

SEQ ID NO: 1410209 - RNA, 19 nt, Artificial Sequence
  Description of Artificial Sequence: Synthetic oligonucleotide
  Antisense strand to SEQ ID NO: 1410208
auaacuauugcuaggucaa

SEQ ID NO: 1410210 - RNA, 19 nt, Artificial Sequence
  Description of Artificial Sequence: Synthetic oligonucleotide
  Sense strand starting at position 1077 of SEQ ID NO: 1243339
acaguucgggcucacauua

SEQ ID NO: 1410211 - RNA, 19 nt, Artificial Sequence
  Description of Artificial Sequence: Synthetic oligonucleotide
  Antisense strand to SEQ ID NO: 1410210
uaaugugagcccgaacugu

SEQ ID NO: 1410212 - RNA, 19 nt, Artificial Sequence
  Description of Artificial Sequence: Synthetic oligonucleotide
  Sense strand starting at position 1082 of SEQ ID NO: 1243339
ucgggcucacauuacaaua

SEQ ID NO: 1410213 - RNA, 19 nt, Artificial Sequence
  Description of Artificial Sequence: Synthetic oligonucleotide
  Antisense strand to SEQ ID NO: 1410212
uauuguaaugugagcccga

SEQ ID NO: 1410214 - RNA, 19 nt, Artificial Sequence
  Description of Artificial Sequence: Synthetic oligonucleotide
  Sense strand starting at position 1181 of SEQ ID NO: 1243339
gguauuucuugggaacgga

SEQ ID NO: 1410215 - RNA, 19 nt, Artificial Sequence
  Description of Artificial Sequence: Synthetic oligonucleotide
  Antisense strand to SEQ ID NO: 1410214
uccguucccaagaaauacc

SEQ ID NO: 1410216 - RNA, 19 nt, Artificial Sequence
  Description of Artificial Sequence: Synthetic oligonucleotide
  Sense strand starting at position 1324 of SEQ ID NO: 1243339
ugcagaagucaugacguaa

SEQ ID NO: 1410217 - RNA, 19 nt, Artificial Sequence
  Description of Artificial Sequence: Synthetic oligonucleotide
  Antisense strand to SEQ ID NO: 1410216
uuacgucaugacuucugca

SEQ ID NO: 1410218 - RNA, 19 nt, Artificial Sequence
  Description of Artificial Sequence: Synthetic oligonucleotide
  Sense strand starting at position 1590 of SEQ ID NO: 1243339
agccuuucccgucaugaga

SEQ ID NO: 1410219 - RNA, 19 nt, Artificial Sequence
  Description of Artificial Sequence: Synthetic oligonucleotide
  Antisense strand to SEQ ID NO: 1410218
ucucaugacgggaaaggcu

SEQ ID NO: 1410220 - RNA, 19 nt, Artificial Sequence
  Description of Artificial Sequence: Synthetic oligonucleotide
  Sense strand starting at position 1702 of SEQ ID NO: 1243339
gucugaggucaggauccaa

SEQ ID NO: 1410221 - RNA, 19 nt, Artificial Sequence
  Description of Artificial Sequence: Synthetic oligonucleotide
  Antisense strand to SEQ ID NO: 1410220
uuggauccugaccucagac

SEQ ID NO: 1410222 - RNA, 19 nt, Artificial Sequence
  Description of Artificial Sequence: Synthetic oligonucleotide
  Sense strand starting at position 2254 of SEQ ID NO: 1243339
ucgaaccuuccucagcauu

SEQ ID NO: 1410223 - RNA, 19 nt, Artificial Sequence
  Description of Artificial Sequence: Synthetic oligonucleotide
  Antisense strand to SEQ ID NO: 1410222
aaugcugaggaagguucga

SEQ ID NO: 1410224 - RNA, 19 nt, Artificial Sequence
  Description of Artificial Sequence: Synthetic oligonucleotide
  Sense strand starting at position 2316 of SEQ ID NO: 1243339
gucagaacagucgaauauc

SEQ ID NO: 1410225 - RNA, 19 nt, Artificial Sequence
  Description of Artificial Sequence: Synthetic oligonucleotide
  Antisense strand to SEQ ID NO: 1410224
gauauucgacuguucugac

SEQ ID NO: 1410226 - RNA, 19 nt, Artificial Sequence
  Description of Artificial Sequence: Synthetic oligonucleotide
  Sense strand starting at position 2417 of SEQ ID NO: 1243339
ucgugcgaacucuaaauuu

SEQ ID NO: 1410227 - RNA, 19 nt, Artificial Sequence
  Description of Artificial Sequence: Synthetic oligonucleotide
  Antisense strand to SEQ ID NO: 1410226
aaauuuagaguucgcacga

SEQ ID NO: 1410228 - RNA, 19 nt, Artificial Sequence
  Description of Artificial Sequence: Synthetic oligonucleotide
  Sense strand starting at position 2470 of SEQ ID NO: 1243339
ggcuauuuaccgggcauca

SEQ ID NO: 1410229 - RNA, 19 nt, Artificial Sequence
  Description of Artificial Sequence: Synthetic oligonucleotide
  Antisense strand to SEQ ID NO: 1410228
ugaugcccgguaaauagcc

SEQ ID NO: 1410230 - RNA, 19 nt, Artificial Sequence
  Description of Artificial Sequence: Synthetic oligonucleotide
  Sense strand starting at position 2742 of SEQ ID NO: 1243339
aguccugcgccucagauuu

SEQ ID NO: 1410231 - RNA, 19 nt, Artificial Sequence
  Description of Artificial Sequence: Synthetic oligonucleotide
  Antisense strand to SEQ ID NO: 1410230
aaaucugaggcgcaggacu

SEQ ID NO: 1410232 - RNA, 19 nt, Artificial Sequence
  Description of Artificial Sequence: Synthetic oligonucleotide
  Sense strand starting at position 2795 of SEQ ID NO: 1243339
cugucauuacaucaugcuu

SEQ ID NO: 1410233 - RNA, 19 nt, Artificial Sequence
  Description of Artificial Sequence: Synthetic oligonucleotide
  Antisense strand to SEQ ID NO: 1410232
aagcaugauguaaugacag

SEQ ID NO: 1410234 - RNA, 19 nt, Artificial Sequence
  Description of Artificial Sequence: Synthetic oligonucleotide
  Sense strand starting at position 3562 of SEQ ID NO: 1243339
ggaagcauucuagagucau

SEQ ID NO: 1410235 - RNA, 19 nt, Artificial Sequence
  Description of Artificial Sequence: Synthetic oligonucleotide
  Antisense strand to SEQ ID NO: 1410234
augacucuagaaugcuucc

SEQ ID NO: 1410236 - RNA, 19 nt, Artificial Sequence
  Description of Artificial Sequence: Synthetic oligonucleotide
  Sense strand starting at position 3568 of SEQ ID NO: 1243339
auucuagagucaucuacac

SEQ ID NO: 1410237 - RNA, 19 nt, Artificial Sequence
  Description of Artificial Sequence: Synthetic oligonucleotide
  Antisense strand to SEQ ID NO: 1410236
guguagaugacucuagaau

SEQ ID NO: 1410238 - RNA, 19 nt, Artificial Sequence
  Description of Artificial Sequence: Synthetic oligonucleotide
  Sense strand starting at position 3682 of SEQ ID NO: 1243339
auguguaucauggauggua

SEQ ID NO: 1410239 - RNA, 19 nt, Artificial Sequence
  Description of Artificial Sequence: Synthetic oligonucleotide
  Antisense strand to SEQ ID NO: 1410238
uaccauccaugauacacau

SEQ ID NO: 1410240 - RNA, 19 nt, Artificial Sequence
  Description of Artificial Sequence: Synthetic oligonucleotide
  Sense strand starting at position 3684 of SEQ ID NO: 1243339
guguaucauggaugguaca

SEQ ID NO: 1410241 - RNA, 19 nt, Artificial Sequence
  Description of Artificial Sequence: Synthetic oligonucleotide
  Antisense strand to SEQ ID NO: 1410240
uguaccauccaugauacac

SEQ ID NO: 1410242 - RNA, 19 nt, Artificial Sequence
  Description of Artificial Sequence: Synthetic oligonucleotide
  Sense strand starting at position 3694 of SEQ ID NO: 1243339
gaugguacauauuccagaa

SEQ ID NO: 1410243 - RNA, 19 nt, Artificial Sequence
  Description of Artificial Sequence: Synthetic oligonucleotide
  Antisense strand to SEQ ID NO: 1410242
uucuggaauauguaccauc

SEQ ID NO: 1410244 - RNA, 19 nt, Artificial Sequence
  Description of Artificial Sequence: Synthetic oligonucleotide
  Sense strand starting at position 3751 of SEQ ID NO: 1243339
gucaucaauuagucacaga

SEQ ID NO: 1410245 - RNA, 19 nt, Artificial Sequence
  Description of Artificial Sequence: Synthetic oligonucleotide
  Antisense strand to SEQ ID NO: 1410244
ucugugacuaauugaugac

SEQ ID NO: 1410246 - RNA, 19 nt, Artificial Sequence
  Description of Artificial Sequence: Synthetic oligonucleotide
  Sense strand starting at position 3776 of SEQ ID NO: 1243339
auuuguagauuccaagaaa

SEQ ID NO: 1410247 - RNA, 19 nt, Artificial Sequence
  Description of Artificial Sequence: Synthetic oligonucleotide
  Antisense strand to SEQ ID NO: 1410246
uuucuuggaaucuacaaau

SEQ ID NO: 1410248 - RNA, 19 nt, Artificial Sequence
  Description of Artificial Sequence: Synthetic oligonucleotide
  Sense strand starting at position 3817 of SEQ ID NO: 1243339
ccuugcaaaggugaucaaa

SEQ ID NO: 1410249 - RNA, 19 nt, Artificial Sequence
  Description of Artificial Sequence: Synthetic oligonucleotide
  Antisense strand to SEQ ID NO: 1410248
uuugaucaccuuugcaagg

SEQ ID NO: 1410250 - RNA, 19 nt, Artificial Sequence
  Description of Artificial Sequence: Synthetic oligonucleotide
  Sense strand starting at position 3819 of SEQ ID NO: 1243339
uugcaaaggugaucaaaca

SEQ ID NO: 1410251 - RNA, 19 nt, Artificial Sequence
  Description of Artificial Sequence: Synthetic oligonucleotide
  Antisense strand to SEQ ID NO: 1410250
uguuugaucaccuuugcaa

SEQ ID NO: 1410252 - RNA, 19 nt, Artificial Sequence
  Description of Artificial Sequence: Synthetic oligonucleotide
  Sense strand starting at position 3831 of SEQ ID NO: 1243339
ucaaacaugucugccaaga

SEQ ID NO: 1410253 - RNA, 19 nt, Artificial Sequence
  Description of Artificial Sequence: Synthetic oligonucleotide
  Antisense strand to SEQ ID NO: 1410252
ucuuggcagacauguuuga

SEQ ID NO: 1410254 - RNA, 19 nt, Artificial Sequence
  Description of Artificial Sequence: Synthetic oligonucleotide
  Sense strand starting at position 3887 of SEQ ID NO: 1243339
auucucaacuagguagaau

SEQ ID NO: 1410255 - RNA, 19 nt, Artificial Sequence
  Description of Artificial Sequence: Synthetic oligonucleotide
  Antisense strand to SEQ ID NO: 1410254
auucuaccuaguugagaau

SEQ ID NO: 1410256 - RNA, 19 nt, Artificial Sequence
  Description of Artificial Sequence: Synthetic oligonucleotide
  Sense strand starting at position 3899 of SEQ ID NO: 1243339
guagaauauuuacacuagu

SEQ ID NO: 1410257 - RNA, 19 nt, Artificial Sequence
  Description of Artificial Sequence: Synthetic oligonucleotide
  Antisense strand to SEQ ID NO: 1410256
acuaguguaaauauucuac

SEQ ID NO: 1410258 - RNA, 19 nt, Artificial Sequence
  Description of Artificial Sequence: Synthetic oligonucleotide
  Sense strand starting at position 35 of SEQ ID NO: 1243340
uguguaaucuacuuugagu

SEQ ID NO: 1410259 - RNA, 19 nt, Artificial Sequence
  Description of Artificial Sequence: Synthetic oligonucleotide
  Antisense strand to SEQ ID NO: 1410258
acucaaaguagauuacaca

SEQ ID NO: 1410260 - RNA, 19 nt, Artificial Sequence
  Description of Artificial Sequence: Synthetic oligonucleotide
  Sense strand starting at position 37 of SEQ ID NO: 1243340
uguaaucuacuuugagucu

SEQ ID NO: 1410261 - RNA, 19 nt, Artificial Sequence
  Description of Artificial Sequence: Synthetic oligonucleotide
  Antisense strand to SEQ ID NO: 1410260
agacucaaaguagauuaca

SEQ ID NO: 1410262 - RNA, 19 nt, Artificial Sequence
  Description of Artificial Sequence: Synthetic oligonucleotide
  Sense strand starting at position 67 of SEQ ID NO: 1243340
agucuaaaguccuccuaac

SEQ ID NO: 1410263 - RNA, 19 nt, Artificial Sequence
  Description of Artificial Sequence: Synthetic oligonucleotide
  Antisense strand to SEQ ID NO: 1410262
guuaggaggacuuuagacu

SEQ ID NO: 1410264 - RNA, 19 nt, Artificial Sequence
  Description of Artificial Sequence: Synthetic oligonucleotide
  Sense strand starting at position 245 of SEQ ID NO: 1243340
uucuaaguugguuaacuca

SEQ ID NO: 1410265 - RNA, 19 nt, Artificial Sequence
  Description of Artificial Sequence: Synthetic oligonucleotide
  Antisense strand to SEQ ID NO: 1410264
ugaguuaaccaacuuagaa

SEQ ID NO: 1410266 - RNA, 19 nt, Artificial Sequence
  Description of Artificial Sequence: Synthetic oligonucleotide
  Sense strand starting at position 259 of SEQ ID NO: 1243340
acucaaguccuugaaagug

SEQ ID NO: 1410267 - RNA, 19 nt, Artificial Sequence
  Description of Artificial Sequence: Synthetic oligonucleotide
  Antisense strand to SEQ ID NO: 1410266
cacuuucaaggacuugagu

SEQ ID NO: 1410268 - RNA, 19 nt, Artificial Sequence
  Description of Artificial Sequence: Synthetic oligonucleotide
  Sense strand starting at position 400 of SEQ ID NO: 1243340
cucagaaagucuguuaauu

SEQ ID NO: 1410269 - RNA, 19 nt, Artificial Sequence
  Description of Artificial Sequence: Synthetic oligonucleotide
  Antisense strand to SEQ ID NO: 1410268
aauuaacagacuuucugag

SEQ ID NO: 1410270 - RNA, 19 nt, Artificial Sequence
  Description of Artificial Sequence: Synthetic oligonucleotide
  Sense strand starting at position 479 of SEQ ID NO: 1243340
acuaaagaucugugaccug

SEQ ID NO: 1410271 - RNA, 19 nt, Artificial Sequence
  Description of Artificial Sequence: Synthetic oligonucleotide
  Antisense strand to SEQ ID NO: 1410270
caggucacagaucuuuagu

SEQ ID NO: 1410272 - RNA, 19 nt, Artificial Sequence
  Description of Artificial Sequence: Synthetic oligonucleotide
  Sense strand starting at position 482 of SEQ ID NO: 1243340
aaagaucugugaccugauu

SEQ ID NO: 1410273 - RNA, 19 nt, Artificial Sequence
  Description of Artificial Sequence: Synthetic oligonucleotide
  Antisense strand to SEQ ID NO: 1410272
aaucaggucacagaucuuu

SEQ ID NO: 1410274 - RNA, 19 nt, Artificial Sequence
  Description of Artificial Sequence: Synthetic oligonucleotide
  Sense strand starting at position 557 of SEQ ID NO: 1243340
ucguaaguuuagcuauuaa

SEQ ID NO: 1410275 - RNA, 19 nt, Artificial Sequence
  Description of Artificial Sequence: Synthetic oligonucleotide
  Antisense strand to SEQ ID NO: 1410274
uuaauagcuaaacuuacga

SEQ ID NO: 1410276 - RNA, 19 nt, Artificial Sequence
  Description of Artificial Sequence: Synthetic oligonucleotide
  Sense strand starting at position 594 of SEQ ID NO: 1243340
agcauuuguugagaacuua

SEQ ID NO: 1410277 - RNA, 19 nt, Artificial Sequence
  Description of Artificial Sequence: Synthetic oligonucleotide
  Antisense strand to SEQ ID NO: 1410276
uaaguucucaacaaaugcu

SEQ ID NO: 1410278 - RNA, 19 nt, Artificial Sequence
  Description of Artificial Sequence: Synthetic oligonucleotide
  Sense strand starting at position 726 of SEQ ID NO: 1243340
agagaaguaucugcccaag

SEQ ID NO: 1410279 - RNA, 19 nt, Artificial Sequence
  Description of Artificial Sequence: Synthetic oligonucleotide
  Antisense strand to SEQ ID NO: 1410278
cuugggcagauacuucucu

SEQ ID NO: 1410280 - RNA, 19 nt, Artificial Sequence
  Description of Artificial Sequence: Synthetic oligonucleotide
  Sense strand starting at position 812 of SEQ ID NO: 1243340
cauccaacugcugaagagu

SEQ ID NO: 1410281 - RNA, 19 nt, Artificial Sequence
  Description of Artificial Sequence: Synthetic oligonucleotide
  Antisense strand to SEQ ID NO: 1410280
acucuucagcaguuggaug

SEQ ID NO: 1410282 - RNA, 19 nt, Artificial Sequence
  Description of Artificial Sequence: Synthetic oligonucleotide
  Sense strand starting at position 815 of SEQ ID NO: 1243340
ccaacugcugaagaguuaa

SEQ ID NO: 1410283 - RNA, 19 nt, Artificial Sequence
  Description of Artificial Sequence: Synthetic oligonucleotide
  Antisense strand to SEQ ID NO: 1410282
uuaacucuucagcaguugg

SEQ ID NO: 1410284 - RNA, 19 nt, Artificial Sequence
  Description of Artificial Sequence: Synthetic oligonucleotide
  Sense strand starting at position 937 of SEQ ID NO: 1243340
guuuauggccucuaugacu

SEQ ID NO: 1410285 - RNA, 19 nt, Artificial Sequence
  Description of Artificial Sequence: Synthetic oligonucleotide
  Antisense strand to SEQ ID NO: 1410284
agucauagaggccauaaac

SEQ ID NO: 1410286 - RNA, 19 nt, Artificial Sequence
  Description of Artificial Sequence: Synthetic oligonucleotide
  Sense strand starting at position 945 of SEQ ID NO: 1243340
ccucuaugacuuuggcaaa

SEQ ID NO: 1410287 - RNA, 19 nt, Artificial Sequence
  Description of Artificial Sequence: Synthetic oligonucleotide
  Antisense strand to SEQ ID NO: 1410286
uuugccaaagucauagagg

SEQ ID NO: 1410288 - RNA, 19 nt, Artificial Sequence
  Description of Artificial Sequence: Synthetic oligonucleotide
  Sense strand starting at position 1031 of SEQ ID NO: 1243340
uuauguaucuuuccaggaa

SEQ ID NO: 1410289 - RNA, 19 nt, Artificial Sequence
  Description of Artificial Sequence: Synthetic oligonucleotide
  Antisense strand to SEQ ID NO: 1410288
uuccuggaaagauacauaa

SEQ ID NO: 1410290 - RNA, 19 nt, Artificial Sequence
  Description of Artificial Sequence: Synthetic oligonucleotide
  Sense strand starting at position 1080 of SEQ ID NO: 1243340
cggaguggcccagguuauu

SEQ ID NO: 1410291 - RNA, 19 nt, Artificial Sequence
  Description of Artificial Sequence: Synthetic oligonucleotide
  Antisense strand to SEQ ID NO: 1410290
aauaaccugggccacuccg

SEQ ID NO: 1410292 - RNA, 19 nt, Artificial Sequence
  Description of Artificial Sequence: Synthetic oligonucleotide
  Sense strand starting at position 1107 of SEQ ID NO: 1243340
guuauaaauuugggagagu

SEQ ID NO: 1410293 - RNA, 19 nt, Artificial Sequence
  Description of Artificial Sequence: Synthetic oligonucleotide
  Antisense strand to SEQ ID NO: 1410292
acucucccaaauuuauaac

SEQ ID NO: 1410294 - RNA, 19 nt, Artificial Sequence
  Description of Artificial Sequence: Synthetic oligonucleotide
  Sense strand starting at position 1108 of SEQ ID NO: 1243340
uuauaaauuugggagaguu

SEQ ID NO: 1410295 - RNA, 19 nt, Artificial Sequence
  Description of Artificial Sequence: Synthetic oligonucleotide
  Antisense strand to SEQ ID NO: 1410294
aacucucccaaauuuauaa

SEQ ID NO: 1410296 - RNA, 19 nt, Artificial Sequence
  Description of Artificial Sequence: Synthetic oligonucleotide
  Sense strand starting at position 1162 of SEQ ID NO: 1243340
uaggaaaugccagguuuau

SEQ ID NO: 1410297 - RNA, 19 nt, Artificial Sequence
  Description of Artificial Sequence: Synthetic oligonucleotide
  Antisense strand to SEQ ID NO: 1410296
auaaaccuggcauuuccua

SEQ ID NO: 1410298 - RNA, 19 nt, Artificial Sequence
  Description of Artificial Sequence: Synthetic oligonucleotide
  Sense strand starting at position 2731 of SEQ ID NO: 1243340
uguccaugcucaucuggaa

SEQ ID NO: 1410299 - RNA, 19 nt, Artificial Sequence
  Description of Artificial Sequence: Synthetic oligonucleotide
  Antisense strand to SEQ ID NO: 1410298
uuccagaugagcauggaca

SEQ ID NO: 1410300 - RNA, 19 nt, Artificial Sequence
  Description of Artificial Sequence: Synthetic oligonucleotide
  Sense strand starting at position 2743 of SEQ ID NO: 1243340
ucuggaaagucccuaauua

SEQ ID NO: 1410301 - RNA, 19 nt, Artificial Sequence
  Description of Artificial Sequence: Synthetic oligonucleotide
  Antisense strand to SEQ ID NO: 1410300
uaauuagggacuuuccaga

SEQ ID NO: 1410302 - RNA, 19 nt, Artificial Sequence
  Description of Artificial Sequence: Synthetic oligonucleotide
  Sense strand starting at position 2825 of SEQ ID NO: 1243340
gugcuaugagcagaagcaa

SEQ ID NO: 1410303 - RNA, 19 nt, Artificial Sequence
  Description of Artificial Sequence: Synthetic oligonucleotide
  Antisense strand to SEQ ID NO: 1410302
uugcuucugcucauagcac

SEQ ID NO: 1410304 - RNA, 19 nt, Artificial Sequence
  Description of Artificial Sequence: Synthetic oligonucleotide
  Sense strand starting at position 2869 of SEQ ID NO: 1243340
acuggaauuccauguaaga

SEQ ID NO: 1410305 - RNA, 19 nt, Artificial Sequence
  Description of Artificial Sequence: Synthetic oligonucleotide
  Antisense strand to SEQ ID NO: 1410304
ucuuacauggaauuccagu

SEQ ID NO: 1410306 - RNA, 19 nt, Artificial Sequence
  Description of Artificial Sequence: Synthetic oligonucleotide
  Sense strand starting at position 2951 of SEQ ID NO: 1243340
ggccgaggccgauggauua

SEQ ID NO: 1410307 - RNA, 19 nt, Artificial Sequence
  Description of Artificial Sequence: Synthetic oligonucleotide
  Antisense strand to SEQ ID NO: 1410306
uaauccaucggccucggcc

SEQ ID NO: 1410308 - RNA, 19 nt, Artificial Sequence
  Description of Artificial Sequence: Synthetic oligonucleotide
  Sense strand starting at position 3241 of SEQ ID NO: 1243340
auucccaguguaugauaaa

SEQ ID NO: 1410309 - RNA, 19 nt, Artificial Sequence
  Description of Artificial Sequence: Synthetic oligonucleotide
  Antisense strand to SEQ ID NO: 1410308
uuuaucauacacugggaau

SEQ ID NO: 1410310 - RNA, 19 nt, Artificial Sequence
  Description of Artificial Sequence: Synthetic oligonucleotide
  Sense strand starting at position 3343 of SEQ ID NO: 1243340
aguuauagcuccucaguac

SEQ ID NO: 1410311 - RNA, 19 nt, Artificial Sequence
  Description of Artificial Sequence: Synthetic oligonucleotide
  Antisense strand to SEQ ID NO: 1410310
guacugaggagcuauaacu

SEQ ID NO: 1410312 - RNA, 19 nt, Artificial Sequence
  Description of Artificial Sequence: Synthetic oligonucleotide
  Sense strand starting at position 3344 of SEQ ID NO: 1243340
guuauagcuccucaguaca

SEQ ID NO: 1410313 - RNA, 19 nt, Artificial Sequence
  Description of Artificial Sequence: Synthetic oligonucleotide
  Antisense strand to SEQ ID NO: 1410312
uguacugaggagcuauaac

SEQ ID NO: 1410314 - RNA, 19 nt, Artificial Sequence
  Description of Artificial Sequence: Synthetic oligonucleotide
  Sense strand starting at position 3363 of SEQ ID NO: 1243340
cgggaaggucaauagaguu

SEQ ID NO: 1410315 - RNA, 19 nt, Artificial Sequence
  Description of Artificial Sequence: Synthetic oligonucleotide
  Antisense strand to SEQ ID NO: 1410314
aacucuauugaccuucccg

SEQ ID NO: 1410316 - RNA, 19 nt, Artificial Sequence
  Description of Artificial Sequence: Synthetic oligonucleotide
  Sense strand starting at position 3370 of SEQ ID NO: 1243340
gucaauagaguucgguuca

SEQ ID NO: 1410317 - RNA, 19 nt, Artificial Sequence
  Description of Artificial Sequence: Synthetic oligonucleotide
  Antisense strand to SEQ ID NO: 1410316
ugaaccgaacucuauugac

SEQ ID NO: 1410318 - RNA, 19 nt, Artificial Sequence
  Description of Artificial Sequence: Synthetic oligonucleotide
  Sense strand starting at position 3420 of SEQ ID NO: 1243340
cagacuaugugcuuggcau

SEQ ID NO: 1410319 - RNA, 19 nt, Artificial Sequence
  Description of Artificial Sequence: Synthetic oligonucleotide
  Antisense strand to SEQ ID NO: 1410318
augccaagcacauagucug

SEQ ID NO: 1410320 - RNA, 19 nt, Artificial Sequence
  Description of Artificial Sequence: Synthetic oligonucleotide
  Sense strand starting at position 3421 of SEQ ID NO: 1243340
agacuaugugcuuggcaua

SEQ ID NO: 1410321 - RNA, 19 nt, Artificial Sequence
  Description of Artificial Sequence: Synthetic oligonucleotide
  Antisense strand to SEQ ID NO: 1410320
uaugccaagcacauagucu

SEQ ID NO: 1410322 - RNA, 19 nt, Artificial Sequence
  Description of Artificial Sequence: Synthetic oligonucleotide
  Sense strand starting at position 3555 of SEQ ID NO: 1243340
gugaaauggauacggacua

SEQ ID NO: 1410323 - RNA, 19 nt, Artificial Sequence
  Description of Artificial Sequence: Synthetic oligonucleotide
  Antisense strand to SEQ ID NO: 1410322
uaguccguauccauuucac

SEQ ID NO: 1410324 - RNA, 19 nt, Artificial Sequence
  Description of Artificial Sequence: Synthetic oligonucleotide
  Sense strand starting at position 3584 of SEQ ID NO: 1243340
ugccaacguggcgauuaaa

SEQ ID NO: 1410325 - RNA, 19 nt, Artificial Sequence
  Description of Artificial Sequence: Synthetic oligonucleotide
  Antisense strand to SEQ ID NO: 1410324
uuuaaucgccacguuggca

SEQ ID NO: 1410326 - RNA, 19 nt, Artificial Sequence
  Description of Artificial Sequence: Synthetic oligonucleotide
  Sense strand starting at position 3587 of SEQ ID NO: 1243340
caacguggcgauuaaaguu

SEQ ID NO: 1410327 - RNA, 19 nt, Artificial Sequence
  Description of Artificial Sequence: Synthetic oligonucleotide
  Antisense strand to SEQ ID NO: 1410326
aacuuuaaucgccacguug

SEQ ID NO: 1410328 - RNA, 19 nt, Artificial Sequence
  Description of Artificial Sequence: Synthetic oligonucleotide
  Sense strand starting at position 3716 of SEQ ID NO: 1243340
gcugacagucgaggacuua

SEQ ID NO: 1410329 - RNA, 19 nt, Artificial Sequence
  Description of Artificial Sequence: Synthetic oligonucleotide
  Antisense strand to SEQ ID NO: 1410328
uaaguccucgacugucagc

SEQ ID NO: 1410330 - RNA, 19 nt, Artificial Sequence
  Description of Artificial Sequence: Synthetic oligonucleotide
  Sense strand starting at position 3743 of SEQ ID NO: 1243340
acuaguggauucucuuaaa

SEQ ID NO: 1410331 - RNA, 19 nt, Artificial Sequence
  Description of Artificial Sequence: Synthetic oligonucleotide
  Antisense strand to SEQ ID NO: 1410330
uuuaagagaauccacuagu

SEQ ID NO: 1410332 - RNA, 19 nt, Artificial Sequence
  Description of Artificial Sequence: Synthetic oligonucleotide
  Sense strand starting at position 3864 of SEQ ID NO: 1243340
ggaauucucaaacgugcuu

SEQ ID NO: 1410333 - RNA, 19 nt, Artificial Sequence
  Description of Artificial Sequence: Synthetic oligonucleotide
  Antisense strand to SEQ ID NO: 1410332
aagcacguuugagaauucc

SEQ ID NO: 1410334 - RNA, 19 nt, Artificial Sequence
  Description of Artificial Sequence: Synthetic oligonucleotide
  Sense strand starting at position 3901 of SEQ ID NO: 1243340
ccugcucuccucuagaaga

SEQ ID NO: 1410335 - RNA, 19 nt, Artificial Sequence
  Description of Artificial Sequence: Synthetic oligonucleotide
  Antisense strand to SEQ ID NO: 1410334
ucuucuagaggagagcagg

SEQ ID NO: 1410336 - RNA, 19 nt, Artificial Sequence
  Description of Artificial Sequence: Synthetic oligonucleotide
  Sense strand starting at position 3903 of SEQ ID NO: 1243340
ugcucuccucuagaagagu

SEQ ID NO: 1410337 - RNA, 19 nt, Artificial Sequence
  Description of Artificial Sequence: Synthetic oligonucleotide
  Antisense strand to SEQ ID NO: 1410336
acucuucuagaggagagca

SEQ ID NO: 1410338 - RNA, 19 nt, Artificial Sequence
  Description of Artificial Sequence: Synthetic oligonucleotide
  Sense strand starting at position 607 of SEQ ID NO: 1243341
uggccuuagaagugauuag

SEQ ID NO: 1410339 - RNA, 19 nt, Artificial Sequence
  Description of Artificial Sequence: Synthetic oligonucleotide
  Antisense strand to SEQ ID NO: 1410338
cuaaucacuucuaaggcca

SEQ ID NO: 1410340 - RNA, 19 nt, Artificial Sequence
  Description of Artificial Sequence: Synthetic oligonucleotide
  Sense strand starting at position 629 of SEQ ID NO: 1243341
guugccuagccuuguaaug

SEQ ID NO: 1410341 - RNA, 19 nt, Artificial Sequence
  Description of Artificial Sequence: Synthetic oligonucleotide
  Antisense strand to SEQ ID NO: 1410340
cauuacaaggcuaggcaac

SEQ ID NO: 1410342 - RNA, 19 nt, Artificial Sequence
  Description of Artificial Sequence: Synthetic oligonucleotide
  Sense strand starting at position 641 of SEQ ID NO: 1243341
uguaaugggcgacaggauu

SEQ ID NO: 1410343 - RNA, 19 nt, Artificial Sequence
  Description of Artificial Sequence: Synthetic oligonucleotide
  Antisense strand to SEQ ID NO: 1410342
aauccugucgcccauuaca

SEQ ID NO: 1410344 - RNA, 19 nt, Artificial Sequence
  Description of Artificial Sequence: Synthetic oligonucleotide
  Sense strand starting at position 647 of SEQ ID NO: 1243341
gggcgacaggauuauuauc

SEQ ID NO: 1410345 - RNA, 19 nt, Artificial Sequence
  Description of Artificial Sequence: Synthetic oligonucleotide
  Antisense strand to SEQ ID NO: 1410344
gauaauaauccugucgccc

SEQ ID NO: 1410346 - RNA, 19 nt, Artificial Sequence
  Description of Artificial Sequence: Synthetic oligonucleotide
  Sense strand starting at position 658 of SEQ ID NO: 1243341
uuauuaucacccuggagag

SEQ ID NO: 1410347 - RNA, 19 nt, Artificial Sequence
  Description of Artificial Sequence: Synthetic oligonucleotide
  Antisense strand to SEQ ID NO: 1410346
cucuccagggugauaauaa

SEQ ID NO: 1410348 - RNA, 19 nt, Artificial Sequence
  Description of Artificial Sequence: Synthetic oligonucleotide
  Sense strand starting at position 676 of SEQ ID NO: 1243341
ggugaaagcuuguccaagg

SEQ ID NO: 1410349 - RNA, 19 nt, Artificial Sequence
  Description of Artificial Sequence: Synthetic oligonucleotide
  Antisense strand to SEQ ID NO: 1410348
ccuuggacaagcuuucacc

SEQ ID NO: 1410350 - RNA, 19 nt, Artificial Sequence
  Description of Artificial Sequence: Synthetic oligonucleotide
  Sense strand starting at position 878 of SEQ ID NO: 1243341
cugcgaauuuaguaagucu

SEQ ID NO: 1410351 - RNA, 19 nt, Artificial Sequence
  Description of Artificial Sequence: Synthetic oligonucleotide
  Antisense strand to SEQ ID NO: 1410350
agacuuacuaaauucgcag

SEQ ID NO: 1410352 - RNA, 19 nt, Artificial Sequence
  Description of Artificial Sequence: Synthetic oligonucleotide
  Sense strand starting at position 893 of SEQ ID NO: 1243341
gucuuagccucagaaucaa

SEQ ID NO: 1410353 - RNA, 19 nt, Artificial Sequence
  Description of Artificial Sequence: Synthetic oligonucleotide
  Antisense strand to SEQ ID NO: 1410352
uugauucugaggcuaagac

SEQ ID NO: 1410354 - RNA, 19 nt, Artificial Sequence
  Description of Artificial Sequence: Synthetic oligonucleotide
  Sense strand starting at position 1254 of SEQ ID NO: 1243341
gcccaauugucauauggga

SEQ ID NO: 1410355 - RNA, 19 nt, Artificial Sequence
  Description of Artificial Sequence: Synthetic oligonucleotide
  Antisense strand to SEQ ID NO: 1410354
ucccauaugacaauugggc

SEQ ID NO: 1410356 - RNA, 19 nt, Artificial Sequence
  Description of Artificial Sequence: Synthetic oligonucleotide
  Sense strand starting at position 1487 of SEQ ID NO: 1243341
gguugcuagugauuggcua

SEQ ID NO: 1410357 - RNA, 19 nt, Artificial Sequence
  Description of Artificial Sequence: Synthetic oligonucleotide
  Antisense strand to SEQ ID NO: 1410356
uagccaaucacuagcaacc

SEQ ID NO: 1410358 - RNA, 19 nt, Artificial Sequence
  Description of Artificial Sequence: Synthetic oligonucleotide
  Sense strand starting at position 1488 of SEQ ID NO: 1243341
guugcuagugauuggcuaa

SEQ ID NO: 1410359 - RNA, 19 nt, Artificial Sequence
  Description of Artificial Sequence: Synthetic oligonucleotide
  Antisense strand to SEQ ID NO: 1410358
uuagccaaucacuagcaac

SEQ ID NO: 1410360 - RNA, 19 nt, Artificial Sequence
  Description of Artificial Sequence: Synthetic oligonucleotide
  Sense strand starting at position 1489 of SEQ ID NO: 1243341
uugcuagugauuggcuaau

SEQ ID NO: 1410361 - RNA, 19 nt, Artificial Sequence
  Description of Artificial Sequence: Synthetic oligonucleotide
  Antisense strand to SEQ ID NO: 1410360
auuagccaaucacuagcaa

SEQ ID NO: 1410362 - RNA, 19 nt, Artificial Sequence
  Description of Artificial Sequence: Synthetic oligonucleotide
  Sense strand starting at position 1491 of SEQ ID NO: 1243341
gcuagugauuggcuaauau

SEQ ID NO: 1410363 - RNA, 19 nt, Artificial Sequence
  Description of Artificial Sequence: Synthetic oligonucleotide
  Antisense strand to SEQ ID NO: 1410362
auauuagccaaucacuagc

SEQ ID NO: 1410364 - RNA, 19 nt, Artificial Sequence
  Description of Artificial Sequence: Synthetic oligonucleotide
  Sense strand starting at position 1495 of SEQ ID NO: 1243341
gugauuggcuaauauacau

SEQ ID NO: 1410365 - RNA, 19 nt, Artificial Sequence
  Description of Artificial Sequence: Synthetic oligonucleotide
  Antisense strand to SEQ ID NO: 1410364
auguauauuagccaaucac

SEQ ID NO: 1410366 - RNA, 19 nt, Artificial Sequence
  Description of Artificial Sequence: Synthetic oligonucleotide
  Sense strand starting at position 1514 of SEQ ID NO: 1243341
uccaacaugugcccagauu

SEQ ID NO: 1410367 - RNA, 19 nt, Artificial Sequence
  Description of Artificial Sequence: Synthetic oligonucleotide
  Antisense strand to SEQ ID NO: 1410366
aaucugggcacauguugga

SEQ ID NO: 1410368 - RNA, 19 nt, Artificial Sequence
  Description of Artificial Sequence: Synthetic oligonucleotide
  Sense strand starting at position 1662 of SEQ ID NO: 1243341
aguggccagucuucugaga

SEQ ID NO: 1410369 - RNA, 19 nt, Artificial Sequence
  Description of Artificial Sequence: Synthetic oligonucleotide
  Antisense strand to SEQ ID NO: 1410368
ucucagaagacuggccacu

SEQ ID NO: 1410370 - RNA, 19 nt, Artificial Sequence
  Description of Artificial Sequence: Synthetic oligonucleotide
  Sense strand starting at position 1667 of SEQ ID NO: 1243341
ccagucuucugagacagca

SEQ ID NO: 1410371 - RNA, 19 nt, Artificial Sequence
  Description of Artificial Sequence: Synthetic oligonucleotide
  Antisense strand to SEQ ID NO: 1410370
ugcugucucagaagacugg

SEQ ID NO: 1410372 - RNA, 19 nt, Artificial Sequence
  Description of Artificial Sequence: Synthetic oligonucleotide
  Sense strand starting at position 2125 of SEQ ID NO: 1243341
accauuugauuguggagau

SEQ ID NO: 1410373 - RNA, 19 nt, Artificial Sequence
  Description of Artificial Sequence: Synthetic oligonucleotide
  Antisense strand to SEQ ID NO: 1410372
aucuccacaaucaaauggu

SEQ ID NO: 1410374 - RNA, 19 nt, Artificial Sequence
  Description of Artificial Sequence: Synthetic oligonucleotide
  Sense strand starting at position 2205 of SEQ ID NO: 1243341
uggaguggcucuucugagu

SEQ ID NO: 1410375 - RNA, 19 nt, Artificial Sequence
  Description of Artificial Sequence: Synthetic oligonucleotide
  Antisense strand to SEQ ID NO: 1410374
acucagaagagccacucca

SEQ ID NO: 1410376 - RNA, 19 nt, Artificial Sequence
  Description of Artificial Sequence: Synthetic oligonucleotide
  Sense strand starting at position 2254 of SEQ ID NO: 1243341
ccaagaaggaguugucaga

SEQ ID NO: 1410377 - RNA, 19 nt, Artificial Sequence
  Description of Artificial Sequence: Synthetic oligonucleotide
  Antisense strand to SEQ ID NO: 1410376
ucugacaacuccuucuugg

SEQ ID NO: 1410378 - RNA, 19 nt, Artificial Sequence
  Description of Artificial Sequence: Synthetic oligonucleotide
  Sense strand starting at position 2535 of SEQ ID NO: 1243341
gcugcaugcaccgaucauu

SEQ ID NO: 1410379 - RNA, 19 nt, Artificial Sequence
  Description of Artificial Sequence: Synthetic oligonucleotide
  Antisense strand to SEQ ID NO: 1410378
aaugaucggugcaugcagc

SEQ ID NO: 1410380 - RNA, 19 nt, Artificial Sequence
  Description of Artificial Sequence: Synthetic oligonucleotide
  Sense strand starting at position 2538 of SEQ ID NO: 1243341
gcaugcaccgaucauuaga

SEQ ID NO: 1410381 - RNA, 19 nt, Artificial Sequence
  Description of Artificial Sequence: Synthetic oligonucleotide
  Antisense strand to SEQ ID NO: 1410380
ucuaaugaucggugcaugc

SEQ ID NO: 1410382 - RNA, 19 nt, Artificial Sequence
  Description of Artificial Sequence: Synthetic oligonucleotide
  Sense strand starting at position 2540 of SEQ ID NO: 1243341
augcaccgaucauuagauu

SEQ ID NO: 1410383 - RNA, 19 nt, Artificial Sequence
  Description of Artificial Sequence: Synthetic oligonucleotide
  Antisense strand to SEQ ID NO: 1410382
aaucuaaugaucggugcau

SEQ ID NO: 1410384 - RNA, 19 nt, Artificial Sequence
  Description of Artificial Sequence: Synthetic oligonucleotide
  Sense strand starting at position 2543 of SEQ ID NO: 1243341
caccgaucauuagauugga

SEQ ID NO: 1410385 - RNA, 19 nt, Artificial Sequence
  Description of Artificial Sequence: Synthetic oligonucleotide
  Antisense strand to SEQ ID NO: 1410384
uccaaucuaaugaucggug

SEQ ID NO: 1410386 - RNA, 19 nt, Artificial Sequence
  Description of Artificial Sequence: Synthetic oligonucleotide
  Sense strand starting at position 2546 of SEQ ID NO: 1243341
cgaucauuagauuggaaca

SEQ ID NO: 1410387 - RNA, 19 nt, Artificial Sequence
  Description of Artificial Sequence: Synthetic oligonucleotide
  Antisense strand to SEQ ID NO: 1410386
uguuccaaucuaaugaucg

SEQ ID NO: 1410388 - RNA, 19 nt, Artificial Sequence
  Description of Artificial Sequence: Synthetic oligonucleotide
  Sense strand starting at position 2548 of SEQ ID NO: 1243341
aucauuagauuggaacaaa

SEQ ID NO: 1410389 - RNA, 19 nt, Artificial Sequence
  Description of Artificial Sequence: Synthetic oligonucleotide
  Antisense strand to SEQ ID NO: 1410388
uuuguuccaaucuaaugau

SEQ ID NO: 1410390 - RNA, 19 nt, Artificial Sequence
  Description of Artificial Sequence: Synthetic oligonucleotide
  Sense strand starting at position 2604 of SEQ ID NO: 1243341
gucuguaaucuauagauua

SEQ ID NO: 1410391 - RNA, 19 nt, Artificial Sequence
  Description of Artificial Sequence: Synthetic oligonucleotide
  Antisense strand to SEQ ID NO: 1410390
uaaucuauagauuacagac

SEQ ID NO: 1410392 - RNA, 19 nt, Artificial Sequence
  Description of Artificial Sequence: Synthetic oligonucleotide
  Sense strand starting at position 2621 of SEQ ID NO: 1243341
uacauaaccgauuagguca

SEQ ID NO: 1410393 - RNA, 19 nt, Artificial Sequence
  Description of Artificial Sequence: Synthetic oligonucleotide
  Antisense strand to SEQ ID NO: 1410392
ugaccuaaucgguuaugua

SEQ ID NO: 1410394 - RNA, 19 nt, Artificial Sequence
  Description of Artificial Sequence: Synthetic oligonucleotide
  Sense strand starting at position 2639 of SEQ ID NO: 1243341
agggcucgaucuuuaacua

SEQ ID NO: 1410395 - RNA, 19 nt, Artificial Sequence
  Description of Artificial Sequence: Synthetic oligonucleotide
  Antisense strand to SEQ ID NO: 1410394
uaguuaaagaucgagcccu

SEQ ID NO: 1410396 - RNA, 19 nt, Artificial Sequence
  Description of Artificial Sequence: Synthetic oligonucleotide
  Sense strand starting at position 2804 of SEQ ID NO: 1243341
gguccuacucuaugagagu

SEQ ID NO: 1410397 - RNA, 19 nt, Artificial Sequence
  Description of Artificial Sequence: Synthetic oligonucleotide
  Antisense strand to SEQ ID NO: 1410396
acucucauagaguaggacc

SEQ ID NO: 1410398 - RNA, 19 nt, Artificial Sequence
  Description of Artificial Sequence: Synthetic oligonucleotide
  Sense strand starting at position 3282 of SEQ ID NO: 1243341
ggcauacaccaucauguuu

SEQ ID NO: 1410399 - RNA, 19 nt, Artificial Sequence
  Description of Artificial Sequence: Synthetic oligonucleotide
  Antisense strand to SEQ ID NO: 1410398
aaacaugaugguguaugcc

SEQ ID NO: 1410400 - RNA, 19 nt, Artificial Sequence
  Description of Artificial Sequence: Synthetic oligonucleotide
  Sense strand starting at position 3457 of SEQ ID NO: 1243341
cugcgcuuagcugguauaa

SEQ ID NO: 1410401 - RNA, 19 nt, Artificial Sequence
  Description of Artificial Sequence: Synthetic oligonucleotide
  Antisense strand to SEQ ID NO: 1410400
uuauaccagcuaagcgcag

SEQ ID NO: 1410402 - RNA, 19 nt, Artificial Sequence
  Description of Artificial Sequence: Synthetic oligonucleotide
  Sense strand starting at position 3458 of SEQ ID NO: 1243341
ugcgcuuagcugguauaau

SEQ ID NO: 1410403 - RNA, 19 nt, Artificial Sequence
  Description of Artificial Sequence: Synthetic oligonucleotide
  Antisense strand to SEQ ID NO: 1410402
auuauaccagcuaagcgca

SEQ ID NO: 1410404 - RNA, 19 nt, Artificial Sequence
  Description of Artificial Sequence: Synthetic oligonucleotide
  Sense strand starting at position 3557 of SEQ ID NO: 1243341
ccugucucccaaugucuau

SEQ ID NO: 1410405 - RNA, 19 nt, Artificial Sequence
  Description of Artificial Sequence: Synthetic oligonucleotide
  Antisense strand to SEQ ID NO: 1410404
auagacauugggagacagg

SEQ ID NO: 1410406 - RNA, 19 nt, Artificial Sequence
  Description of Artificial Sequence: Synthetic oligonucleotide
  Sense strand starting at position 3570 of SEQ ID NO: 1243341
gucuauguguaccuccaga

SEQ ID NO: 1410407 - RNA, 19 nt, Artificial Sequence
  Description of Artificial Sequence: Synthetic oligonucleotide
  Antisense strand to SEQ ID NO: 1410406
ucuggagguacacauagac

SEQ ID NO: 1410408 - RNA, 19 nt, Artificial Sequence
  Description of Artificial Sequence: Synthetic oligonucleotide
  Sense strand starting at position 3575 of SEQ ID NO: 1243341
uguguaccuccagagacau

SEQ ID NO: 1410409 - RNA, 19 nt, Artificial Sequence
  Description of Artificial Sequence: Synthetic oligonucleotide
  Antisense strand to SEQ ID NO: 1410408
augucucuggagguacaca

SEQ ID NO: 1410410 - RNA, 19 nt, Artificial Sequence
  Description of Artificial Sequence: Synthetic oligonucleotide
  Sense strand starting at position 3615 of SEQ ID NO: 1243341
agcucagcaggucagaauu

SEQ ID NO: 1410411 - RNA, 19 nt, Artificial Sequence
  Description of Artificial Sequence: Synthetic oligonucleotide
  Antisense strand to SEQ ID NO: 1410410
aauucugaccugcugagcu

SEQ ID NO: 1410412 - RNA, 19 nt, Artificial Sequence
  Description of Artificial Sequence: Synthetic oligonucleotide
  Sense strand starting at position 3621 of SEQ ID NO: 1243341
gcaggucagaauuguaauc

SEQ ID NO: 1410413 - RNA, 19 nt, Artificial Sequence
  Description of Artificial Sequence: Synthetic oligonucleotide
  Antisense strand to SEQ ID NO: 1410412
gauuacaauucugaccugc

SEQ ID NO: 1410414 - RNA, 19 nt, Artificial Sequence
  Description of Artificial Sequence: Synthetic oligonucleotide
  Sense strand starting at position 3623 of SEQ ID NO: 1243341
aggucagaauuguaaucca

SEQ ID NO: 1410415 - RNA, 19 nt, Artificial Sequence
  Description of Artificial Sequence: Synthetic oligonucleotide
  Antisense strand to SEQ ID NO: 1410414
uggauuacaauucugaccu

SEQ ID NO: 1410416 - RNA, 19 nt, Artificial Sequence
  Description of Artificial Sequence: Synthetic oligonucleotide
  Sense strand starting at position 3751 of SEQ ID NO: 1243341
gggccauuggguuauaaag

SEQ ID NO: 1410417 - RNA, 19 nt, Artificial Sequence
  Description of Artificial Sequence: Synthetic oligonucleotide
  Antisense strand to SEQ ID NO: 1410416
cuuuauaacccaauggccc

SEQ ID NO: 1410418 - RNA, 19 nt, Artificial Sequence
  Description of Artificial Sequence: Synthetic oligonucleotide
  Sense strand starting at position 176 of SEQ ID NO: 1243342
gcaggacucagccaaugua

SEQ ID NO: 1410419 - RNA, 19 nt, Artificial Sequence
  Description of Artificial Sequence: Synthetic oligonucleotide
  Antisense strand to SEQ ID NO: 1410418
uacauuggcugaguccugc

SEQ ID NO: 1410420 - RNA, 19 nt, Artificial Sequence
  Description of Artificial Sequence: Synthetic oligonucleotide
  Sense strand starting at position 499 of SEQ ID NO: 1243342
auggcagucaagugauaca

SEQ ID NO: 1410421 - RNA, 19 nt, Artificial Sequence
  Description of Artificial Sequence: Synthetic oligonucleotide
  Antisense strand to SEQ ID NO: 1410420
uguaucacuugacugccau

SEQ ID NO: 1410422 - RNA, 19 nt, Artificial Sequence
  Description of Artificial Sequence: Synthetic oligonucleotide
  Sense strand starting at position 541 of SEQ ID NO: 1243342
gggcauggaucaucucagu

SEQ ID NO: 1410423 - RNA, 19 nt, Artificial Sequence
  Description of Artificial Sequence: Synthetic oligonucleotide
  Antisense strand to SEQ ID NO: 1410422
acugagaugauccaugccc

SEQ ID NO: 1410424 - RNA, 19 nt, Artificial Sequence
  Description of Artificial Sequence: Synthetic oligonucleotide
  Sense strand starting at position 559 of SEQ ID NO: 1243342
ucgugucaccaucacagau

SEQ ID NO: 1410425 - RNA, 19 nt, Artificial Sequence
  Description of Artificial Sequence: Synthetic oligonucleotide
  Antisense strand to SEQ ID NO: 1410424
aucugugauggugacacga

SEQ ID NO: 1410426 - RNA, 19 nt, Artificial Sequence
  Description of Artificial Sequence: Synthetic oligonucleotide
  Sense strand starting at position 642 of SEQ ID NO: 1243342
caugaucggucacagauau

SEQ ID NO: 1410427 - RNA, 19 nt, Artificial Sequence
  Description of Artificial Sequence: Synthetic oligonucleotide
  Antisense strand to SEQ ID NO: 1410426
auaucugugaccgaucaug

SEQ ID NO: 1410428 - RNA, 19 nt, Artificial Sequence
  Description of Artificial Sequence: Synthetic oligonucleotide
  Sense strand starting at position 700 of SEQ ID NO: 1243342
cugucaacccugcaggaaa

SEQ ID NO: 1410429 - RNA, 19 nt, Artificial Sequence
  Description of Artificial Sequence: Synthetic oligonucleotide
  Antisense strand to SEQ ID NO: 1410428
uuuccugcaggguugacag

SEQ ID NO: 1410430 - RNA, 19 nt, Artificial Sequence
  Description of Artificial Sequence: Synthetic oligonucleotide
  Sense strand starting at position 727 of SEQ ID NO: 1243342
gugagaaugcccugaccug

SEQ ID NO: 1410431 - RNA, 19 nt, Artificial Sequence
  Description of Artificial Sequence: Synthetic oligonucleotide
  Antisense strand to SEQ ID NO: 1410430
caggucagggcauucucac

SEQ ID NO: 1410432 - RNA, 19 nt, Artificial Sequence
  Description of Artificial Sequence: Synthetic oligonucleotide
  Sense strand starting at position 998 of SEQ ID NO: 1243342
gaguuaaggugcuggaauc

SEQ ID NO: 1410433 - RNA, 19 nt, Artificial Sequence
  Description of Artificial Sequence: Synthetic oligonucleotide
  Antisense strand to SEQ ID NO: 1410432
gauuccagcaccuuaacuc

SEQ ID NO: 1410434 - RNA, 19 nt, Artificial Sequence
  Description of Artificial Sequence: Synthetic oligonucleotide
  Sense strand starting at position 1073 of SEQ ID NO: 1243342
acugcuuccuaaugagagu

SEQ ID NO: 1410435 - RNA, 19 nt, Artificial Sequence
  Description of Artificial Sequence: Synthetic oligonucleotide
  Antisense strand to SEQ ID NO: 1410434
acucucauuaggaagcagu

SEQ ID NO: 1410436 - RNA, 19 nt, Artificial Sequence
  Description of Artificial Sequence: Synthetic oligonucleotide
  Sense strand starting at position 1097 of SEQ ID NO: 1243342
uacuuaucccaagggugau

SEQ ID NO: 1410437 - RNA, 19 nt, Artificial Sequence
  Description of Artificial Sequence: Synthetic oligonucleotide
  Antisense strand to SEQ ID NO: 1410436
aucacccuugggauaagua

SEQ ID NO: 1410438 - RNA, 19 nt, Artificial Sequence
  Description of Artificial Sequence: Synthetic oligonucleotide
  Sense strand starting at position 1109 of SEQ ID NO: 1243342
gggugaugcuggaggauua

SEQ ID NO: 1410439 - RNA, 19 nt, Artificial Sequence
  Description of Artificial Sequence: Synthetic oligonucleotide
  Antisense strand to SEQ ID NO: 1410438
uaauccuccagcaucaccc

SEQ ID NO: 1410440 - RNA, 19 nt, Artificial Sequence
  Description of Artificial Sequence: Synthetic oligonucleotide
  Sense strand starting at position 1110 of SEQ ID NO: 1243342
ggugaugcuggaggauuaa

SEQ ID NO: 1410441 - RNA, 19 nt, Artificial Sequence
  Description of Artificial Sequence: Synthetic oligonucleotide
  Antisense strand to SEQ ID NO: 1410440
uuaauccuccagcaucacc

SEQ ID NO: 1410442 - RNA, 19 nt, Artificial Sequence
  Description of Artificial Sequence: Synthetic oligonucleotide
  Sense strand starting at position 1170 of SEQ ID NO: 1243342
augugagugcuucacugag

SEQ ID NO: 1410443 - RNA, 19 nt, Artificial Sequence
  Description of Artificial Sequence: Synthetic oligonucleotide
  Antisense strand to SEQ ID NO: 1410442
cucagugaagcacucacau

SEQ ID NO: 1410444 - RNA, 19 nt, Artificial Sequence
  Description of Artificial Sequence: Synthetic oligonucleotide
  Sense strand starting at position 1189 of SEQ ID NO: 1243342
gcccacugucccuacagau

SEQ ID NO: 1410445 - RNA, 19 nt, Artificial Sequence
  Description of Artificial Sequence: Synthetic oligonucleotide
  Antisense strand to SEQ ID NO: 1410444
aucuguagggacagugggc

SEQ ID NO: 1410446 - RNA, 19 nt, Artificial Sequence
  Description of Artificial Sequence: Synthetic oligonucleotide
  Sense strand starting at position 1315 of SEQ ID NO: 1243342
gggagcggaucgucucaaa

SEQ ID NO: 1410447 - RNA, 19 nt, Artificial Sequence
  Description of Artificial Sequence: Synthetic oligonucleotide
  Antisense strand to SEQ ID NO: 1410446
uuugagacgauccgcuccc

SEQ ID NO: 1410448 - RNA, 19 nt, Artificial Sequence
  Description of Artificial Sequence: Synthetic oligonucleotide
  Sense strand starting at position 1340 of SEQ ID NO: 1243342
gacgcugaaucucaaauga

SEQ ID NO: 1410449 - RNA, 19 nt, Artificial Sequence
  Description of Artificial Sequence: Synthetic oligonucleotide
  Antisense strand to SEQ ID NO: 1410448
ucauuugagauucagcguc

SEQ ID NO: 1410450 - RNA, 19 nt, Artificial Sequence
  Description of Artificial Sequence: Synthetic oligonucleotide
  Sense strand starting at position 1381 of SEQ ID NO: 1243342
gugggauucaccgaaguug

SEQ ID NO: 1410451 - RNA, 19 nt, Artificial Sequence
  Description of Artificial Sequence: Synthetic oligonucleotide
  Antisense strand to SEQ ID NO: 1410450
caacuucggugaaucccac

SEQ ID NO: 1410452 - RNA, 19 nt, Artificial Sequence
  Description of Artificial Sequence: Synthetic oligonucleotide
  Sense strand starting at position 2118 of SEQ ID NO: 1243342
gggcccgauuccuguguga

SEQ ID NO: 1410453 - RNA, 19 nt, Artificial Sequence
  Description of Artificial Sequence: Synthetic oligonucleotide
  Antisense strand to SEQ ID NO: 1410452
ucacacaggaaucgggccc

SEQ ID NO: 1410454 - RNA, 19 nt, Artificial Sequence
  Description of Artificial Sequence: Synthetic oligonucleotide
  Sense strand starting at position 2120 of SEQ ID NO: 1243342
gcccgauuccugugugacc

SEQ ID NO: 1410455 - RNA, 19 nt, Artificial Sequence
  Description of Artificial Sequence: Synthetic oligonucleotide
  Antisense strand to SEQ ID NO: 1410454
ggucacacaggaaucgggc

SEQ ID NO: 1410456 - RNA, 19 nt, Artificial Sequence
  Description of Artificial Sequence: Synthetic oligonucleotide
  Sense strand starting at position 2130 of SEQ ID NO: 1243342
ugugugaccucgggugaga

SEQ ID NO: 1410457 - RNA, 19 nt, Artificial Sequence
  Description of Artificial Sequence: Synthetic oligonucleotide
  Antisense strand to SEQ ID NO: 1410456
ucucacccgaggucacaca

SEQ ID NO: 1410458 - RNA, 19 nt, Artificial Sequence
  Description of Artificial Sequence: Synthetic oligonucleotide
  Sense strand starting at position 2272 of SEQ ID NO: 1243342
uacgaagcgcucuguuacu

SEQ ID NO: 1410459 - RNA, 19 nt, Artificial Sequence
  Description of Artificial Sequence: Synthetic oligonucleotide
  Antisense strand to SEQ ID NO: 1410458
aguaacagagcgcuucgua

SEQ ID NO: 1410460 - RNA, 19 nt, Artificial Sequence
  Description of Artificial Sequence: Synthetic oligonucleotide
  Sense strand starting at position 2274 of SEQ ID NO: 1243342
cgaagcgcucuguuacuua

SEQ ID NO: 1410461 - RNA, 19 nt, Artificial Sequence
  Description of Artificial Sequence: Synthetic oligonucleotide
  Antisense strand to SEQ ID NO: 1410460
uaaguaacagagcgcuucg

SEQ ID NO: 1410462 - RNA, 19 nt, Artificial Sequence
  Description of Artificial Sequence: Synthetic oligonucleotide
  Sense strand starting at position 2278 of SEQ ID NO: 1243342
gcgcucuguuacuuaggga

SEQ ID NO: 1410463 - RNA, 19 nt, Artificial Sequence
  Description of Artificial Sequence: Synthetic oligonucleotide
  Antisense strand to SEQ ID NO: 1410462
ucccuaaguaacagagcgc

SEQ ID NO: 1410464 - RNA, 19 nt, Artificial Sequence
  Description of Artificial Sequence: Synthetic oligonucleotide
  Sense strand starting at position 2663 of SEQ ID NO: 1243342
auccaagccguuuacuuau

SEQ ID NO: 1410465 - RNA, 19 nt, Artificial Sequence
  Description of Artificial Sequence: Synthetic oligonucleotide
  Antisense strand to SEQ ID NO: 1410464
auaaguaaacggcuuggau

SEQ ID NO: 1410466 - RNA, 19 nt, Artificial Sequence
  Description of Artificial Sequence: Synthetic oligonucleotide
  Sense strand starting at position 2725 of SEQ ID NO: 1243342
uuacuuaucuagcuggcuu

SEQ ID NO: 1410467 - RNA, 19 nt, Artificial Sequence
  Description of Artificial Sequence: Synthetic oligonucleotide
  Antisense strand to SEQ ID NO: 1410466
aagccagcuagauaaguaa

SEQ ID NO: 1410468 - RNA, 19 nt, Artificial Sequence
  Description of Artificial Sequence: Synthetic oligonucleotide
  Sense strand starting at position 2775 of SEQ ID NO: 1243342
agcccaucuuacuugucua

SEQ ID NO: 1410469 - RNA, 19 nt, Artificial Sequence
  Description of Artificial Sequence: Synthetic oligonucleotide
  Antisense strand to SEQ ID NO: 1410468
uagacaaguaagaugggcu

SEQ ID NO: 1410470 - RNA, 19 nt, Artificial Sequence
  Description of Artificial Sequence: Synthetic oligonucleotide
  Sense strand starting at position 3058 of SEQ ID NO: 1243342
gccgccucuucugaaggaa

SEQ ID NO: 1410471 - RNA, 19 nt, Artificial Sequence
  Description of Artificial Sequence: Synthetic oligonucleotide
  Antisense strand to SEQ ID NO: 1410470
uuccuucagaagaggcggc

SEQ ID NO: 1410472 - RNA, 19 nt, Artificial Sequence
  Description of Artificial Sequence: Synthetic oligonucleotide
  Sense strand starting at position 3193 of SEQ ID NO: 1243342
accugagaccuauaguuuc

SEQ ID NO: 1410473 - RNA, 19 nt, Artificial Sequence
  Description of Artificial Sequence: Synthetic oligonucleotide
  Antisense strand to SEQ ID NO: 1410472
gaaacuauaggucucaggu

SEQ ID NO: 1410474 - RNA, 19 nt, Artificial Sequence
  Description of Artificial Sequence: Synthetic oligonucleotide
  Sense strand starting at position 3199 of SEQ ID NO: 1243342
gaccuauaguuucugggca

SEQ ID NO: 1410475 - RNA, 19 nt, Artificial Sequence
  Description of Artificial Sequence: Synthetic oligonucleotide
  Antisense strand to SEQ ID NO: 1410474
ugcccagaaacuauagguc

SEQ ID NO: 1410476 - RNA, 19 nt, Artificial Sequence
  Description of Artificial Sequence: Synthetic oligonucleotide
  Sense strand starting at position 3200 of SEQ ID NO: 1243342
accuauaguuucugggcau

SEQ ID NO: 1410477 - RNA, 19 nt, Artificial Sequence
  Description of Artificial Sequence: Synthetic oligonucleotide
  Antisense strand to SEQ ID NO: 1410476
augcccagaaacuauaggu

SEQ ID NO: 1410478 - RNA, 19 nt, Artificial Sequence
  Description of Artificial Sequence: Synthetic oligonucleotide
  Sense strand starting at position 3372 of SEQ ID NO: 1243342
agaccagcguggucaaaua

SEQ ID NO: 1410479 - RNA, 19 nt, Artificial Sequence
  Description of Artificial Sequence: Synthetic oligonucleotide
  Antisense strand to SEQ ID NO: 1410478
uauuugaccacgcuggucu

SEQ ID NO: 1410480 - RNA, 19 nt, Artificial Sequence
  Description of Artificial Sequence: Synthetic oligonucleotide
  Sense strand starting at position 82 of SEQ ID NO: 1243343
aagagugaugucugggaca

SEQ ID NO: 1410481 - RNA, 19 nt, Artificial Sequence
  Description of Artificial Sequence: Synthetic oligonucleotide
  Antisense strand to SEQ ID NO: 1410480
ugucccagacaucacucuu

SEQ ID NO: 1410482 - RNA, 19 nt, Artificial Sequence
  Description of Artificial Sequence: Synthetic oligonucleotide
  Sense strand starting at position 84 of SEQ ID NO: 1243343
gagugaugucugggacaag

SEQ ID NO: 1410483 - RNA, 19 nt, Artificial Sequence
  Description of Artificial Sequence: Synthetic oligonucleotide
  Antisense strand to SEQ ID NO: 1410482
cuugucccagacaucacuc

SEQ ID NO: 1410484 - RNA, 19 nt, Artificial Sequence
  Description of Artificial Sequence: Synthetic oligonucleotide
  Sense strand starting at position 432 of SEQ ID NO: 1243343
guugcuuuggugugagaaa

SEQ ID NO: 1410485 - RNA, 19 nt, Artificial Sequence
  Description of Artificial Sequence: Synthetic oligonucleotide
  Antisense strand to SEQ ID NO: 1410484
uuucucacaccaaagcaac

SEQ ID NO: 1410486 - RNA, 19 nt, Artificial Sequence
  Description of Artificial Sequence: Synthetic oligonucleotide
  Sense strand starting at position 678 of SEQ ID NO: 1243343
aggagaaucgcugagcuug

SEQ ID NO: 1410487 - RNA, 19 nt, Artificial Sequence
  Description of Artificial Sequence: Synthetic oligonucleotide
  Antisense strand to SEQ ID NO: 1410486
caagcucagcgauucuccu

SEQ ID NO: 1410488 - RNA, 19 nt, Artificial Sequence
  Description of Artificial Sequence: Synthetic oligonucleotide
  Sense strand starting at position 833 of SEQ ID NO: 1243343
gcugaaugcaugggucaga

SEQ ID NO: 1410489 - RNA, 19 nt, Artificial Sequence
  Description of Artificial Sequence: Synthetic oligonucleotide
  Antisense strand to SEQ ID NO: 1410488
ucugacccaugcauucagc

SEQ ID NO: 1410490 - RNA, 19 nt, Artificial Sequence
  Description of Artificial Sequence: Synthetic oligonucleotide
  Sense strand starting at position 836 of SEQ ID NO: 1243343
gaaugcaugggucagaguu

SEQ ID NO: 1410491 - RNA, 19 nt, Artificial Sequence
  Description of Artificial Sequence: Synthetic oligonucleotide
  Antisense strand to SEQ ID NO: 1410490
aacucugacccaugcauuc

SEQ ID NO: 1410492 - RNA, 19 nt, Artificial Sequence
  Description of Artificial Sequence: Synthetic oligonucleotide
  Sense strand starting at position 851 of SEQ ID NO: 1243343
aguuuaggagcuuaaacua

SEQ ID NO: 1410493 - RNA, 19 nt, Artificial Sequence
  Description of Artificial Sequence: Synthetic oligonucleotide
  Antisense strand to SEQ ID NO: 1410492
uaguuuaagcuccuaaacu

SEQ ID NO: 1410494 - RNA, 19 nt, Artificial Sequence
  Description of Artificial Sequence: Synthetic oligonucleotide
  Sense strand starting at position 858 of SEQ ID NO: 1243343
gagcuuaaacuacgucuua

SEQ ID NO: 1410495 - RNA, 19 nt, Artificial Sequence
  Description of Artificial Sequence: Synthetic oligonucleotide
  Antisense strand to SEQ ID NO: 1410494
uaagacguaguuuaagcuc

SEQ ID NO: 1410496 - RNA, 19 nt, Artificial Sequence
  Description of Artificial Sequence: Synthetic oligonucleotide
  Sense strand starting at position 859 of SEQ ID NO: 1243343
agcuuaaacuacgucuuaa

SEQ ID NO: 1410497 - RNA, 19 nt, Artificial Sequence
  Description of Artificial Sequence: Synthetic oligonucleotide
  Antisense strand to SEQ ID NO: 1410496
uuaagacguaguuuaagcu

SEQ ID NO: 1410498 - RNA, 19 nt, Artificial Sequence
  Description of Artificial Sequence: Synthetic oligonucleotide
  Sense strand starting at position 933 of SEQ ID NO: 1243343
gcagauauuugggaaucuu

SEQ ID NO: 1410499 - RNA, 19 nt, Artificial Sequence
  Description of Artificial Sequence: Synthetic oligonucleotide
  Antisense strand to SEQ ID NO: 1410498
aagauucccaaauaucugc

SEQ ID NO: 1410500 - RNA, 19 nt, Artificial Sequence
  Description of Artificial Sequence: Synthetic oligonucleotide
  Sense strand starting at position 1059 of SEQ ID NO: 1243343
agcgaagaaccauggacuu

SEQ ID NO: 1410501 - RNA, 19 nt, Artificial Sequence
  Description of Artificial Sequence: Synthetic oligonucleotide
  Antisense strand to SEQ ID NO: 1410500
aaguccaugguucuucgcu

SEQ ID NO: 1410502 - RNA, 19 nt, Artificial Sequence
  Description of Artificial Sequence: Synthetic oligonucleotide
  Sense strand starting at position 1209 of SEQ ID NO: 1243343
gugaguggccucuggaaag

SEQ ID NO: 1410503 - RNA, 19 nt, Artificial Sequence
  Description of Artificial Sequence: Synthetic oligonucleotide
  Antisense strand to SEQ ID NO: 1410502
cuuuccagaggccacucac

SEQ ID NO: 1410504 - RNA, 19 nt, Artificial Sequence
  Description of Artificial Sequence: Synthetic oligonucleotide
  Sense strand starting at position 1419 of SEQ ID NO: 1243343
cugucauaguagucaauuc

SEQ ID NO: 1410505 - RNA, 19 nt, Artificial Sequence
  Description of Artificial Sequence: Synthetic oligonucleotide
  Antisense strand to SEQ ID NO: 1410504
gaauugacuacuaugacag

SEQ ID NO: 1410506 - RNA, 19 nt, Artificial Sequence
  Description of Artificial Sequence: Synthetic oligonucleotide
  Sense strand starting at position 1427 of SEQ ID NO: 1243343
guagucaauuccucuggaa

SEQ ID NO: 1410507 - RNA, 19 nt, Artificial Sequence
  Description of Artificial Sequence: Synthetic oligonucleotide
  Antisense strand to SEQ ID NO: 1410506
uuccagaggaauugacuac

SEQ ID NO: 1410508 - RNA, 19 nt, Artificial Sequence
  Description of Artificial Sequence: Synthetic oligonucleotide
  Sense strand starting at position 1429 of SEQ ID NO: 1243343
agucaauuccucuggaagc

SEQ ID NO: 1410509 - RNA, 19 nt, Artificial Sequence
  Description of Artificial Sequence: Synthetic oligonucleotide
  Antisense strand to SEQ ID NO: 1410508
gcuuccagaggaauugacu

SEQ ID NO: 1410510 - RNA, 19 nt, Artificial Sequence
  Description of Artificial Sequence: Synthetic oligonucleotide
  Sense strand starting at position 1486 of SEQ ID NO: 1243343
ugccauguccugugaagag

SEQ ID NO: 1410511 - RNA, 19 nt, Artificial Sequence
  Description of Artificial Sequence: Synthetic oligonucleotide
  Antisense strand to SEQ ID NO: 1410510
cucuucacaggacauggca

SEQ ID NO: 1410512 - RNA, 19 nt, Artificial Sequence
  Description of Artificial Sequence: Synthetic oligonucleotide
  Sense strand starting at position 1699 of SEQ ID NO: 1243343
ggacaucauucccuccagu

SEQ ID NO: 1410513 - RNA, 19 nt, Artificial Sequence
  Description of Artificial Sequence: Synthetic oligonucleotide
  Antisense strand to SEQ ID NO: 1410512
acuggagggaaugaugucc

SEQ ID NO: 1410514 - RNA, 19 nt, Artificial Sequence
  Description of Artificial Sequence: Synthetic oligonucleotide
  Sense strand starting at position 2075 of SEQ ID NO: 1243343
aguggauuccaggagccuu

SEQ ID NO: 1410515 - RNA, 19 nt, Artificial Sequence
  Description of Artificial Sequence: Synthetic oligonucleotide
  Antisense strand to SEQ ID NO: 1410514
aaggcuccuggaauccacu

SEQ ID NO: 1410516 - RNA, 19 nt, Artificial Sequence
  Description of Artificial Sequence: Synthetic oligonucleotide
  Sense strand starting at position 2091 of SEQ ID NO: 1243343
cuucuaggguugccuaaga

SEQ ID NO: 1410517 - RNA, 19 nt, Artificial Sequence
  Description of Artificial Sequence: Synthetic oligonucleotide
  Antisense strand to SEQ ID NO: 1410516
ucuuaggcaacccuagaag

SEQ ID NO: 1410518 - RNA, 19 nt, Artificial Sequence
  Description of Artificial Sequence: Synthetic oligonucleotide
  Sense strand starting at position 2380 of SEQ ID NO: 1243343
acucuugucccuuaugagu

SEQ ID NO: 1410519 - RNA, 19 nt, Artificial Sequence
  Description of Artificial Sequence: Synthetic oligonucleotide
  Antisense strand to SEQ ID NO: 1410518
acucauaagggacaagagu

SEQ ID NO: 1410520 - RNA, 19 nt, Artificial Sequence
  Description of Artificial Sequence: Synthetic oligonucleotide
  Sense strand starting at position 2586 of SEQ ID NO: 1243343
uggcaugguguccagugau

SEQ ID NO: 1410521 - RNA, 19 nt, Artificial Sequence
  Description of Artificial Sequence: Synthetic oligonucleotide
  Antisense strand to SEQ ID NO: 1410520
aucacuggacaccaugcca

SEQ ID NO: 1410522 - RNA, 19 nt, Artificial Sequence
  Description of Artificial Sequence: Synthetic oligonucleotide
  Sense strand starting at position 2589 of SEQ ID NO: 1243343
caugguguccagugaugga

SEQ ID NO: 1410523 - RNA, 19 nt, Artificial Sequence
  Description of Artificial Sequence: Synthetic oligonucleotide
  Antisense strand to SEQ ID NO: 1410522
uccaucacuggacaccaug

SEQ ID NO: 1410524 - RNA, 19 nt, Artificial Sequence
  Description of Artificial Sequence: Synthetic oligonucleotide
  Sense strand starting at position 2715 of SEQ ID NO: 1243343
cuugacugcagcugagaau

SEQ ID NO: 1410525 - RNA, 19 nt, Artificial Sequence
  Description of Artificial Sequence: Synthetic oligonucleotide
  Antisense strand to SEQ ID NO: 1410524
auucucagcugcagucaag

SEQ ID NO: 1410526 - RNA, 19 nt, Artificial Sequence
  Description of Artificial Sequence: Synthetic oligonucleotide
  Sense strand starting at position 2728 of SEQ ID NO: 1243343
gagaaugcugauugaggca

SEQ ID NO: 1410527 - RNA, 19 nt, Artificial Sequence
  Description of Artificial Sequence: Synthetic oligonucleotide
  Antisense strand to SEQ ID NO: 1410526
ugccucaaucagcauucuc

SEQ ID NO: 1410528 - RNA, 19 nt, Artificial Sequence
  Description of Artificial Sequence: Synthetic oligonucleotide
  Sense strand starting at position 2743 of SEQ ID NO: 1243343
ggcauccuccuguaucuga

SEQ ID NO: 1410529 - RNA, 19 nt, Artificial Sequence
  Description of Artificial Sequence: Synthetic oligonucleotide
  Antisense strand to SEQ ID NO: 1410528
ucagauacaggaggaugcc

SEQ ID NO: 1410530 - RNA, 19 nt, Artificial Sequence
  Description of Artificial Sequence: Synthetic oligonucleotide
  Sense strand starting at position 2794 of SEQ ID NO: 1243343
ugcuuucucugagccaaca

SEQ ID NO: 1410531 - RNA, 19 nt, Artificial Sequence
  Description of Artificial Sequence: Synthetic oligonucleotide
  Antisense strand to SEQ ID NO: 1410530
uguuggcucagagaaagca

SEQ ID NO: 1410532 - RNA, 19 nt, Artificial Sequence
  Description of Artificial Sequence: Synthetic oligonucleotide
  Sense strand starting at position 2870 of SEQ ID NO: 1243343
aagugugcccaugacaguu

SEQ ID NO: 1410533 - RNA, 19 nt, Artificial Sequence
  Description of Artificial Sequence: Synthetic oligonucleotide
  Antisense strand to SEQ ID NO: 1410532
aacugucaugggcacacuu

SEQ ID NO: 1410534 - RNA, 19 nt, Artificial Sequence
  Description of Artificial Sequence: Synthetic oligonucleotide
  Sense strand starting at position 2911 of SEQ ID NO: 1243343
cuucccacagcaugugaaa

SEQ ID NO: 1410535 - RNA, 19 nt, Artificial Sequence
  Description of Artificial Sequence: Synthetic oligonucleotide
  Antisense strand to SEQ ID NO: 1410534
uuucacaugcugugggaag

SEQ ID NO: 1410536 - RNA, 19 nt, Artificial Sequence
  Description of Artificial Sequence: Synthetic oligonucleotide
  Sense strand starting at position 3079 of SEQ ID NO: 1243343
ggucaugucggacacucua

SEQ ID NO: 1410537 - RNA, 19 nt, Artificial Sequence
  Description of Artificial Sequence: Synthetic oligonucleotide
  Antisense strand to SEQ ID NO: 1410536
uagaguguccgacaugacc

SEQ ID NO: 1410538 - RNA, 19 nt, Artificial Sequence
  Description of Artificial Sequence: Synthetic oligonucleotide
  Sense strand starting at position 3254 of SEQ ID NO: 1243343
agugucucccuuugauaaa

SEQ ID NO: 1410539 - RNA, 19 nt, Artificial Sequence
  Description of Artificial Sequence: Synthetic oligonucleotide
  Antisense strand to SEQ ID NO: 1410538
uuuaucaaagggagacacu

SEQ ID NO: 1410540 - RNA, 19 nt, Artificial Sequence
  Description of Artificial Sequence: Synthetic oligonucleotide
  Sense strand starting at position 3372 of SEQ ID NO: 1243343
agauaaagucaccaucugu

SEQ ID NO: 1410541 - RNA, 19 nt, Artificial Sequence
  Description of Artificial Sequence: Synthetic oligonucleotide
  Antisense strand to SEQ ID NO: 1410540
acagauggugacuuuaucu

SEQ ID NO: 1410542 - RNA, 19 nt, Artificial Sequence
  Description of Artificial Sequence: Synthetic oligonucleotide
  Sense strand starting at position 3383 of SEQ ID NO: 1243343
ccaucugucucaccugagu

SEQ ID NO: 1410543 - RNA, 19 nt, Artificial Sequence
  Description of Artificial Sequence: Synthetic oligonucleotide
  Antisense strand to SEQ ID NO: 1410542
acucaggugagacagaugg

SEQ ID NO: 1410544 - RNA, 19 nt, Artificial Sequence
  Description of Artificial Sequence: Synthetic oligonucleotide
  Sense strand starting at position 3470 of SEQ ID NO: 1243343
guuggcuauuucuucugau

SEQ ID NO: 1410545 - RNA, 19 nt, Artificial Sequence
  Description of Artificial Sequence: Synthetic oligonucleotide
  Antisense strand to SEQ ID NO: 1410544
aucagaagaaauagccaac

SEQ ID NO: 1410546 - RNA, 19 nt, Artificial Sequence
  Description of Artificial Sequence: Synthetic oligonucleotide
  Sense strand starting at position 3471 of SEQ ID NO: 1243343
uuggcuauuucuucugauu

SEQ ID NO: 1410547 - RNA, 19 nt, Artificial Sequence
  Description of Artificial Sequence: Synthetic oligonucleotide
  Antisense strand to SEQ ID NO: 1410546
aaucagaagaaauagccaa

SEQ ID NO: 1410548 - RNA, 19 nt, Artificial Sequence
  Description of Artificial Sequence: Synthetic oligonucleotide
  Sense strand starting at position 3495 of SEQ ID NO: 1243343
guggaaguaggcuggaaau

SEQ ID NO: 1410549 - RNA, 19 nt, Artificial Sequence
  Description of Artificial Sequence: Synthetic oligonucleotide
  Antisense strand to SEQ ID NO: 1410548
auuuccagccuacuuccac

SEQ ID NO: 1410550 - RNA, 19 nt, Artificial Sequence
  Description of Artificial Sequence: Synthetic oligonucleotide
  Sense strand starting at position 3568 of SEQ ID NO: 1243343
uggucuuucuggguagacu

SEQ ID NO: 1410551 - RNA, 19 nt, Artificial Sequence
  Description of Artificial Sequence: Synthetic oligonucleotide
  Antisense strand to SEQ ID NO: 1410550
agucuacccagaaagacca

SEQ ID NO: 1410552 - RNA, 19 nt, Artificial Sequence
  Description of Artificial Sequence: Synthetic oligonucleotide
  Sense strand starting at position 3585 of SEQ ID NO: 1243343
cuguauugcuauccagaaa

SEQ ID NO: 1410553 - RNA, 19 nt, Artificial Sequence
  Description of Artificial Sequence: Synthetic oligonucleotide
  Antisense strand to SEQ ID NO: 1410552
uuucuggauagcaauacag

SEQ ID NO: 1410554 - RNA, 19 nt, Artificial Sequence
  Description of Artificial Sequence: Synthetic oligonucleotide
  Sense strand starting at position 3639 of SEQ ID NO: 1243343
gccuguaaaugguccucua

SEQ ID NO: 1410555 - RNA, 19 nt, Artificial Sequence
  Description of Artificial Sequence: Synthetic oligonucleotide
  Antisense strand to SEQ ID NO: 1410554
uagaggaccauuuacaggc

SEQ ID NO: 1410556 - RNA, 19 nt, Artificial Sequence
  Description of Artificial Sequence: Synthetic oligonucleotide
  Sense strand starting at position 3642 of SEQ ID NO: 1243343
uguaaaugguccucuaaga

SEQ ID NO: 1410557 - RNA, 19 nt, Artificial Sequence
  Description of Artificial Sequence: Synthetic oligonucleotide
  Antisense strand to SEQ ID NO: 1410556
ucuuagaggaccauuuaca

SEQ ID NO: 1410558 - RNA, 19 nt, Artificial Sequence
  Description of Artificial Sequence: Synthetic oligonucleotide
  Sense strand starting at position 3683 of SEQ ID NO: 1243343
cagcuaucacucuaggaug

SEQ ID NO: 1410559 - RNA, 19 nt, Artificial Sequence
  Description of Artificial Sequence: Synthetic oligonucleotide
  Antisense strand to SEQ ID NO: 1410558
cauccuagagugauagcug

SEQ ID NO: 1410560 - RNA, 19 nt, Artificial Sequence
  Description of Artificial Sequence: Synthetic oligonucleotide
  Sense strand starting at position 57 of SEQ ID NO: 1243344
aagugugcccaugacaguu

SEQ ID NO: 1410561 - RNA, 19 nt, Artificial Sequence
  Description of Artificial Sequence: Synthetic oligonucleotide
  Antisense strand to SEQ ID NO: 1410560
aacugucaugggcacacuu

SEQ ID NO: 1410562 - RNA, 19 nt, Artificial Sequence
  Description of Artificial Sequence: Synthetic oligonucleotide
  Sense strand starting at position 98 of SEQ ID NO: 1243344
cuucccacagcaugugaaa

SEQ ID NO: 1410563 - RNA, 19 nt, Artificial Sequence
  Description of Artificial Sequence: Synthetic oligonucleotide
  Antisense strand to SEQ ID NO: 1410562
uuucacaugcugugggaag

SEQ ID NO: 1410564 - RNA, 19 nt, Artificial Sequence
  Description of Artificial Sequence: Synthetic oligonucleotide
  Sense strand starting at position 266 of SEQ ID NO: 1243344
ggucaugucggacacucua

SEQ ID NO: 1410565 - RNA, 19 nt, Artificial Sequence
  Description of Artificial Sequence: Synthetic oligonucleotide
  Antisense strand to SEQ ID NO: 1410564
uagaguguccgacaugacc

SEQ ID NO: 1410566 - RNA, 19 nt, Artificial Sequence
  Description of Artificial Sequence: Synthetic oligonucleotide
  Sense strand starting at position 274 of SEQ ID NO: 1243344
cggacacucuaugauaucu

SEQ ID NO: 1410567 - RNA, 19 nt, Artificial Sequence
  Description of Artificial Sequence: Synthetic oligonucleotide
  Antisense strand to SEQ ID NO: 1410566
agauaucauagaguguccg

SEQ ID NO: 1410568 - RNA, 19 nt, Artificial Sequence
  Description of Artificial Sequence: Synthetic oligonucleotide
  Sense strand starting at position 441 of SEQ ID NO: 1243344
agugucucccuuugauaaa

SEQ ID NO: 1410569 - RNA, 19 nt, Artificial Sequence
  Description of Artificial Sequence: Synthetic oligonucleotide
  Antisense strand to SEQ ID NO: 1410568
uuuaucaaagggagacacu

SEQ ID NO: 1410570 - RNA, 19 nt, Artificial Sequence
  Description of Artificial Sequence: Synthetic oligonucleotide
  Sense strand starting at position 489 of SEQ ID NO: 1243344
aguuauacagcucgucuua

SEQ ID NO: 1410571 - RNA, 19 nt, Artificial Sequence
  Description of Artificial Sequence: Synthetic oligonucleotide
  Antisense strand to SEQ ID NO: 1410570
uaagacgagcuguauaacu

SEQ ID NO: 1410572 - RNA, 19 nt, Artificial Sequence
  Description of Artificial Sequence: Synthetic oligonucleotide
  Sense strand starting at position 491 of SEQ ID NO: 1243344
uuauacagcucgucuuacu

SEQ ID NO: 1410573 - RNA, 19 nt, Artificial Sequence
  Description of Artificial Sequence: Synthetic oligonucleotide
  Antisense strand to SEQ ID NO: 1410572
aguaagacgagcuguauaa

SEQ ID NO: 1410574 - RNA, 19 nt, Artificial Sequence
  Description of Artificial Sequence: Synthetic oligonucleotide
  Sense strand starting at position 559 of SEQ ID NO: 1243344
agauaaagucaccaucugu

SEQ ID NO: 1410575 - RNA, 19 nt, Artificial Sequence
  Description of Artificial Sequence: Synthetic oligonucleotide
  Antisense strand to SEQ ID NO: 1410574
acagauggugacuuuaucu

SEQ ID NO: 1410576 - RNA, 19 nt, Artificial Sequence
  Description of Artificial Sequence: Synthetic oligonucleotide
  Sense strand starting at position 570 of SEQ ID NO: 1243344
ccaucugucucaccugagu

SEQ ID NO: 1410577 - RNA, 19 nt, Artificial Sequence
  Description of Artificial Sequence: Synthetic oligonucleotide
  Antisense strand to SEQ ID NO: 1410576
acucaggugagacagaugg

SEQ ID NO: 1410578 - RNA, 19 nt, Artificial Sequence
  Description of Artificial Sequence: Synthetic oligonucleotide
  Sense strand starting at position 657 of SEQ ID NO: 1243344
guuggcuauuucuucugau

SEQ ID NO: 1410579 - RNA, 19 nt, Artificial Sequence
  Description of Artificial Sequence: Synthetic oligonucleotide
  Antisense strand to SEQ ID NO: 1410578
aucagaagaaauagccaac

SEQ ID NO: 1410580 - RNA, 19 nt, Artificial Sequence
  Description of Artificial Sequence: Synthetic oligonucleotide
  Sense strand starting at position 658 of SEQ ID NO: 1243344
uuggcuauuucuucugauu

SEQ ID NO: 1410581 - RNA, 19 nt, Artificial Sequence
  Description of Artificial Sequence: Synthetic oligonucleotide
  Antisense strand to SEQ ID NO: 1410580
aaucagaagaaauagccaa

SEQ ID NO: 1410582 - RNA, 19 nt, Artificial Sequence
  Description of Artificial Sequence: Synthetic oligonucleotide
  Sense strand starting at position 660 of SEQ ID NO: 1243344
ggcuauuucuucugauucu

SEQ ID NO: 1410583 - RNA, 19 nt, Artificial Sequence
  Description of Artificial Sequence: Synthetic oligonucleotide
  Antisense strand to SEQ ID NO: 1410582
agaaucagaagaaauagcc

SEQ ID NO: 1410584 - RNA, 19 nt, Artificial Sequence
  Description of Artificial Sequence: Synthetic oligonucleotide
  Sense strand starting at position 682 of SEQ ID NO: 1243344
guggaaguaggcuggaaau

SEQ ID NO: 1410585 - RNA, 19 nt, Artificial Sequence
  Description of Artificial Sequence: Synthetic oligonucleotide
  Antisense strand to SEQ ID NO: 1410584
auuuccagccuacuuccac

SEQ ID NO: 1410586 - RNA, 19 nt, Artificial Sequence
  Description of Artificial Sequence: Synthetic oligonucleotide
  Sense strand starting at position 755 of SEQ ID NO: 1243344
uggucuuucuggguagacu

SEQ ID NO: 1410587 - RNA, 19 nt, Artificial Sequence
  Description of Artificial Sequence: Synthetic oligonucleotide
  Antisense strand to SEQ ID NO: 1410586
agucuacccagaaagacca

SEQ ID NO: 1410588 - RNA, 19 nt, Artificial Sequence
  Description of Artificial Sequence: Synthetic oligonucleotide
  Sense strand starting at position 772 of SEQ ID NO: 1243344
cuguauugcuauccagaaa

SEQ ID NO: 1410589 - RNA, 19 nt, Artificial Sequence
  Description of Artificial Sequence: Synthetic oligonucleotide
  Antisense strand to SEQ ID NO: 1410588
uuucuggauagcaauacag

SEQ ID NO: 1410590 - RNA, 19 nt, Artificial Sequence
  Description of Artificial Sequence: Synthetic oligonucleotide
  Sense strand starting at position 826 of SEQ ID NO: 1243344
gccuguaaaugguccucua

SEQ ID NO: 1410591 - RNA, 19 nt, Artificial Sequence
  Description of Artificial Sequence: Synthetic oligonucleotide
  Antisense strand to SEQ ID NO: 1410590
uagaggaccauuuacaggc

SEQ ID NO: 1410592 - RNA, 19 nt, Artificial Sequence
  Description of Artificial Sequence: Synthetic oligonucleotide
  Sense strand starting at position 829 of SEQ ID NO: 1243344
uguaaaugguccucuaaga

SEQ ID NO: 1410593 - RNA, 19 nt, Artificial Sequence
  Description of Artificial Sequence: Synthetic oligonucleotide
  Antisense strand to SEQ ID NO: 1410592
ucuuagaggaccauuuaca

SEQ ID NO: 1410594 - RNA, 19 nt, Artificial Sequence
  Description of Artificial Sequence: Synthetic oligonucleotide
  Sense strand starting at position 870 of SEQ ID NO: 1243344
cagcuaucacucuaggaug

SEQ ID NO: 1410595 - RNA, 19 nt, Artificial Sequence
  Description of Artificial Sequence: Synthetic oligonucleotide
  Antisense strand to SEQ ID NO: 1410594
cauccuagagugauagcug

SEQ ID NO: 1410596 - RNA, 19 nt, Artificial Sequence
  Description of Artificial Sequence: Synthetic oligonucleotide
  Sense strand starting at position 1257 of SEQ ID NO: 1243344
uugguuuccucuucuauga

SEQ ID NO: 1410597 - RNA, 19 nt, Artificial Sequence
  Description of Artificial Sequence: Synthetic oligonucleotide
  Antisense strand to SEQ ID NO: 1410596
ucauagaagaggaaaccaa

SEQ ID NO: 1410598 - RNA, 19 nt, Artificial Sequence
  Description of Artificial Sequence: Synthetic oligonucleotide
  Sense strand starting at position 1266 of SEQ ID NO: 1243344
ucuucuaugaaguggagau

SEQ ID NO: 1410599 - RNA, 19 nt, Artificial Sequence
  Description of Artificial Sequence: Synthetic oligonucleotide
  Antisense strand to SEQ ID NO: 1410598
aucuccacuucauagaaga

SEQ ID NO: 1410600 - RNA, 19 nt, Artificial Sequence
  Description of Artificial Sequence: Synthetic oligonucleotide
  Sense strand starting at position 1392 of SEQ ID NO: 1243344
ugggaauguaagggucuaa

SEQ ID NO: 1410601 - RNA, 19 nt, Artificial Sequence
  Description of Artificial Sequence: Synthetic oligonucleotide
  Antisense strand to SEQ ID NO: 1410600
uuagacccuuacauuccca

SEQ ID NO: 1410602 - RNA, 19 nt, Artificial Sequence
  Description of Artificial Sequence: Synthetic oligonucleotide
  Sense strand starting at position 1407 of SEQ ID NO: 1243344
cuaaguagugccuggaugu

SEQ ID NO: 1410603 - RNA, 19 nt, Artificial Sequence
  Description of Artificial Sequence: Synthetic oligonucleotide
  Antisense strand to SEQ ID NO: 1410602
acauccaggcacuacuuag

SEQ ID NO: 1410604 - RNA, 19 nt, Artificial Sequence
  Description of Artificial Sequence: Synthetic oligonucleotide
  Sense strand starting at position 1539 of SEQ ID NO: 1243344
cccaguaaaucugaauaug

SEQ ID NO: 1410605 - RNA, 19 nt, Artificial Sequence
  Description of Artificial Sequence: Synthetic oligonucleotide
  Antisense strand to SEQ ID NO: 1410604
cauauucagauuuacuggg

SEQ ID NO: 1410606 - RNA, 19 nt, Artificial Sequence
  Description of Artificial Sequence: Synthetic oligonucleotide
  Sense strand starting at position 1650 of SEQ ID NO: 1243344
uccugaucccuguguacac

SEQ ID NO: 1410607 - RNA, 19 nt, Artificial Sequence
  Description of Artificial Sequence: Synthetic oligonucleotide
  Antisense strand to SEQ ID NO: 1410606
guguacacagggaucagga

SEQ ID NO: 1410608 - RNA, 19 nt, Artificial Sequence
  Description of Artificial Sequence: Synthetic oligonucleotide
  Sense strand starting at position 1797 of SEQ ID NO: 1243344
aggagauagaucugaggcu

SEQ ID NO: 1410609 - RNA, 19 nt, Artificial Sequence
  Description of Artificial Sequence: Synthetic oligonucleotide
  Antisense strand to SEQ ID NO: 1410608
agccucagaucuaucuccu

SEQ ID NO: 1410610 - RNA, 19 nt, Artificial Sequence
  Description of Artificial Sequence: Synthetic oligonucleotide
  Sense strand starting at position 1992 of SEQ ID NO: 1243344
gcaggacucagccaaugua

SEQ ID NO: 1410611 - RNA, 19 nt, Artificial Sequence
  Description of Artificial Sequence: Synthetic oligonucleotide
  Antisense strand to SEQ ID NO: 1410610
uacauuggcugaguccugc

SEQ ID NO: 1410612 - RNA, 19 nt, Artificial Sequence
  Description of Artificial Sequence: Synthetic oligonucleotide
  Sense strand starting at position 2315 of SEQ ID NO: 1243344
auggcagucaagugauaca

SEQ ID NO: 1410613 - RNA, 19 nt, Artificial Sequence
  Description of Artificial Sequence: Synthetic oligonucleotide
  Antisense strand to SEQ ID NO: 1410612
uguaucacuugacugccau

SEQ ID NO: 1410614 - RNA, 19 nt, Artificial Sequence
  Description of Artificial Sequence: Synthetic oligonucleotide
  Sense strand starting at position 2357 of SEQ ID NO: 1243344
gggcauggaucaucucagu

SEQ ID NO: 1410615 - RNA, 19 nt, Artificial Sequence
  Description of Artificial Sequence: Synthetic oligonucleotide
  Antisense strand to SEQ ID NO: 1410614
acugagaugauccaugccc

SEQ ID NO: 1410616 - RNA, 19 nt, Artificial Sequence
  Description of Artificial Sequence: Synthetic oligonucleotide
  Sense strand starting at position 2375 of SEQ ID NO: 1243344
ucgugucaccaucacagau

SEQ ID NO: 1410617 - RNA, 19 nt, Artificial Sequence
  Description of Artificial Sequence: Synthetic oligonucleotide
  Antisense strand to SEQ ID NO: 1410616
aucugugauggugacacga

SEQ ID NO: 1410618 - RNA, 19 nt, Artificial Sequence
  Description of Artificial Sequence: Synthetic oligonucleotide
  Sense strand starting at position 2516 of SEQ ID NO: 1243344
cugucaacccugcaggaaa

SEQ ID NO: 1410619 - RNA, 19 nt, Artificial Sequence
  Description of Artificial Sequence: Synthetic oligonucleotide
  Antisense strand to SEQ ID NO: 1410618
uuuccugcaggguugacag

SEQ ID NO: 1410620 - RNA, 19 nt, Artificial Sequence
  Description of Artificial Sequence: Synthetic oligonucleotide
  Sense strand starting at position 2543 of SEQ ID NO: 1243344
gugagaaugcccugaccug

SEQ ID NO: 1410621 - RNA, 19 nt, Artificial Sequence
  Description of Artificial Sequence: Synthetic oligonucleotide
  Antisense strand to SEQ ID NO: 1410620
caggucagggcauucucac

SEQ ID NO: 1410622 - RNA, 19 nt, Artificial Sequence
  Description of Artificial Sequence: Synthetic oligonucleotide
  Sense strand starting at position 2913 of SEQ ID NO: 1243344
uacuuaucccaagggugau

SEQ ID NO: 1410623 - RNA, 19 nt, Artificial Sequence
  Description of Artificial Sequence: Synthetic oligonucleotide
  Antisense strand to SEQ ID NO: 1410622
aucacccuugggauaagua

SEQ ID NO: 1410624 - RNA, 19 nt, Artificial Sequence
  Description of Artificial Sequence: Synthetic oligonucleotide
  Sense strand starting at position 2925 of SEQ ID NO: 1243344
gggugaugcuggaggauua

SEQ ID NO: 1410625 - RNA, 19 nt, Artificial Sequence
  Description of Artificial Sequence: Synthetic oligonucleotide
  Antisense strand to SEQ ID NO: 1410624
uaauccuccagcaucaccc

SEQ ID NO: 1410626 - RNA, 19 nt, Artificial Sequence
  Description of Artificial Sequence: Synthetic oligonucleotide
  Sense strand starting at position 2926 of SEQ ID NO: 1243344
ggugaugcuggaggauuaa

SEQ ID NO: 1410627 - RNA, 19 nt, Artificial Sequence
  Description of Artificial Sequence: Synthetic oligonucleotide
  Antisense strand to SEQ ID NO: 1410626
uuaauccuccagcaucacc

SEQ ID NO: 1410628 - RNA, 19 nt, Artificial Sequence
  Description of Artificial Sequence: Synthetic oligonucleotide
  Sense strand starting at position 2986 of SEQ ID NO: 1243344
augugagugcuucacugag

SEQ ID NO: 1410629 - RNA, 19 nt, Artificial Sequence
  Description of Artificial Sequence: Synthetic oligonucleotide
  Antisense strand to SEQ ID NO: 1410628
cucagugaagcacucacau

SEQ ID NO: 1410630 - RNA, 19 nt, Artificial Sequence
  Description of Artificial Sequence: Synthetic oligonucleotide
  Sense strand starting at position 3005 of SEQ ID NO: 1243344
gcccacugucccuacagau

SEQ ID NO: 1410631 - RNA, 19 nt, Artificial Sequence
  Description of Artificial Sequence: Synthetic oligonucleotide
  Antisense strand to SEQ ID NO: 1410630
aucuguagggacagugggc

SEQ ID NO: 1410632 - RNA, 19 nt, Artificial Sequence
  Description of Artificial Sequence: Synthetic oligonucleotide
  Sense strand starting at position 3131 of SEQ ID NO: 1243344
gggagcggaucgucucaaa

SEQ ID NO: 1410633 - RNA, 19 nt, Artificial Sequence
  Description of Artificial Sequence: Synthetic oligonucleotide
  Antisense strand to SEQ ID NO: 1410632
uuugagacgauccgcuccc

SEQ ID NO: 1410634 - RNA, 19 nt, Artificial Sequence
  Description of Artificial Sequence: Synthetic oligonucleotide
  Sense strand starting at position 3156 of SEQ ID NO: 1243344
gacgcugaaucucaaauga

SEQ ID NO: 1410635 - RNA, 19 nt, Artificial Sequence
  Description of Artificial Sequence: Synthetic oligonucleotide
  Antisense strand to SEQ ID NO: 1410634
ucauuugagauucagcguc

SEQ ID NO: 1410636 - RNA, 19 nt, Artificial Sequence
  Description of Artificial Sequence: Synthetic oligonucleotide
  Sense strand starting at position 3197 of SEQ ID NO: 1243344
gugggauucaccgaaguug

SEQ ID NO: 1410637 - RNA, 19 nt, Artificial Sequence
  Description of Artificial Sequence: Synthetic oligonucleotide
  Antisense strand to SEQ ID NO: 1410636
caacuucggugaaucccac

SEQ ID NO: 1410638 - RNA, 19 nt, Artificial Sequence
  Description of Artificial Sequence: Synthetic oligonucleotide
  Sense strand starting at position 3936 of SEQ ID NO: 1243344
gcccgauuccugugugacc

SEQ ID NO: 1410639 - RNA, 19 nt, Artificial Sequence
  Description of Artificial Sequence: Synthetic oligonucleotide
  Antisense strand to SEQ ID NO: 1410638
ggucacacaggaaucgggc

SEQ ID NO: 1410640 - RNA, 19 nt, Artificial Sequence
  Description of Artificial Sequence: Synthetic oligonucleotide
  Sense strand starting at position 181 of SEQ ID NO: 1243345
ggcggaagcuagcucugau

SEQ ID NO: 1410641 - RNA, 19 nt, Artificial Sequence
  Description of Artificial Sequence: Synthetic oligonucleotide
  Antisense strand to SEQ ID NO: 1410640
aucagagcuagcuuccgcc

SEQ ID NO: 1410642 - RNA, 19 nt, Artificial Sequence
  Description of Artificial Sequence: Synthetic oligonucleotide
  Sense strand starting at position 320 of SEQ ID NO: 1243345
cgagcugaagcccaagaua

SEQ ID NO: 1410643 - RNA, 19 nt, Artificial Sequence
  Description of Artificial Sequence: Synthetic oligonucleotide
  Antisense strand to SEQ ID NO: 1410642
uaucuugggcuucagcucg

SEQ ID NO: 1410644 - RNA, 19 nt, Artificial Sequence
  Description of Artificial Sequence: Synthetic oligonucleotide
  Sense strand starting at position 341 of SEQ ID NO: 1243345
cccguuucuccaggugacu

SEQ ID NO: 1410645 - RNA, 19 nt, Artificial Sequence
  Description of Artificial Sequence: Synthetic oligonucleotide
  Antisense strand to SEQ ID NO: 1410644
agucaccuggagaaacggg

SEQ ID NO: 1410646 - RNA, 19 nt, Artificial Sequence
  Description of Artificial Sequence: Synthetic oligonucleotide
  Sense strand starting at position 771 of SEQ ID NO: 1243345
gcaggacaucacuguaguu

SEQ ID NO: 1410647 - RNA, 19 nt, Artificial Sequence
  Description of Artificial Sequence: Synthetic oligonucleotide
  Antisense strand to SEQ ID NO: 1410646
aacuacagugauguccugc

SEQ ID NO: 1410648 - RNA, 19 nt, Artificial Sequence
  Description of Artificial Sequence: Synthetic oligonucleotide
  Sense strand starting at position 783 of SEQ ID NO: 1243345
uguaguucucugugacccu

SEQ ID NO: 1410649 - RNA, 19 nt, Artificial Sequence
  Description of Artificial Sequence: Synthetic oligonucleotide
  Antisense strand to SEQ ID NO: 1410648
agggucacagagaacuaca

SEQ ID NO: 1410650 - RNA, 19 nt, Artificial Sequence
  Description of Artificial Sequence: Synthetic oligonucleotide
  Sense strand starting at position 798 of SEQ ID NO: 1243345
cccuguaacccaugcguuu

SEQ ID NO: 1410651 - RNA, 19 nt, Artificial Sequence
  Description of Artificial Sequence: Synthetic oligonucleotide
  Antisense strand to SEQ ID NO: 1410650
aaacgcauggguuacaggg

SEQ ID NO: 1410652 - RNA, 19 nt, Artificial Sequence
  Description of Artificial Sequence: Synthetic oligonucleotide
  Sense strand starting at position 811 of SEQ ID NO: 1243345
gcguuuaccuggcauggga

SEQ ID NO: 1410653 - RNA, 19 nt, Artificial Sequence
  Description of Artificial Sequence: Synthetic oligonucleotide
  Antisense strand to SEQ ID NO: 1410652
ucccaugccagguaaacgc

SEQ ID NO: 1410654 - RNA, 19 nt, Artificial Sequence
  Description of Artificial Sequence: Synthetic oligonucleotide
  Sense strand starting at position 813 of SEQ ID NO: 1243345
guuuaccuggcaugggaua

SEQ ID NO: 1410655 - RNA, 19 nt, Artificial Sequence
  Description of Artificial Sequence: Synthetic oligonucleotide
  Antisense strand to SEQ ID NO: 1410654
uaucccaugccagguaaac

SEQ ID NO: 1410656 - RNA, 19 nt, Artificial Sequence
  Description of Artificial Sequence: Synthetic oligonucleotide
  Sense strand starting at position 825 of SEQ ID NO: 1243345
ugggauacgucggugcaga

SEQ ID NO: 1410657 - RNA, 19 nt, Artificial Sequence
  Description of Artificial Sequence: Synthetic oligonucleotide
  Antisense strand to SEQ ID NO: 1410656
ucugcaccgacguauccca

SEQ ID NO: 1410658 - RNA, 19 nt, Artificial Sequence
  Description of Artificial Sequence: Synthetic oligonucleotide
  Sense strand starting at position 912 of SEQ ID NO: 1243345
gcagcaagaguccacucau

SEQ ID NO: 1410659 - RNA, 19 nt, Artificial Sequence
  Description of Artificial Sequence: Synthetic oligonucleotide
  Antisense strand to SEQ ID NO: 1410658
augaguggacucuugcugc

SEQ ID NO: 1410660 - RNA, 19 nt, Artificial Sequence
  Description of Artificial Sequence: Synthetic oligonucleotide
  Sense strand starting at position 1524 of SEQ ID NO: 1243345
cuagcugaacccugagagu

SEQ ID NO: 1410661 - RNA, 19 nt, Artificial Sequence
  Description of Artificial Sequence: Synthetic oligonucleotide
  Antisense strand to SEQ ID NO: 1410660
acucucaggguucagcuag

SEQ ID NO: 1410662 - RNA, 19 nt, Artificial Sequence
  Description of Artificial Sequence: Synthetic oligonucleotide
  Sense strand starting at position 1600 of SEQ ID NO: 1243345
gccugcucccaggaugaca

SEQ ID NO: 1410663 - RNA, 19 nt, Artificial Sequence
  Description of Artificial Sequence: Synthetic oligonucleotide
  Antisense strand to SEQ ID NO: 1410662
ugucauccugggagcaggc

SEQ ID NO: 1410664 - RNA, 19 nt, Artificial Sequence
  Description of Artificial Sequence: Synthetic oligonucleotide
  Sense strand starting at position 1848 of SEQ ID NO: 1243345
gggcuugguccaggucaca

SEQ ID NO: 1410665 - RNA, 19 nt, Artificial Sequence
  Description of Artificial Sequence: Synthetic oligonucleotide
  Antisense strand to SEQ ID NO: 1410664
ugugaccuggaccaagccc

SEQ ID NO: 1410666 - RNA, 19 nt, Artificial Sequence
  Description of Artificial Sequence: Synthetic oligonucleotide
  Sense strand starting at position 1932 of SEQ ID NO: 1243345
uucugcuugucccuagaua

SEQ ID NO: 1410667 - RNA, 19 nt, Artificial Sequence
  Description of Artificial Sequence: Synthetic oligonucleotide
  Antisense strand to SEQ ID NO: 1410666
uaucuagggacaagcagaa

SEQ ID NO: 1410668 - RNA, 19 nt, Artificial Sequence
  Description of Artificial Sequence: Synthetic oligonucleotide
  Sense strand starting at position 1933 of SEQ ID NO: 1243345
ucugcuugucccuagauag

SEQ ID NO: 1410669 - RNA, 19 nt, Artificial Sequence
  Description of Artificial Sequence: Synthetic oligonucleotide
  Antisense strand to SEQ ID NO: 1410668
cuaucuagggacaagcaga

SEQ ID NO: 1410670 - RNA, 19 nt, Artificial Sequence
  Description of Artificial Sequence: Synthetic oligonucleotide
  Sense strand starting at position 2050 of SEQ ID NO: 1243345
gggccuugguggcgucaua

SEQ ID NO: 1410671 - RNA, 19 nt, Artificial Sequence
  Description of Artificial Sequence: Synthetic oligonucleotide
  Antisense strand to SEQ ID NO: 1410670
uaugacgccaccaaggccc

SEQ ID NO: 1410672 - RNA, 19 nt, Artificial Sequence
  Description of Artificial Sequence: Synthetic oligonucleotide
  Sense strand starting at position 2090 of SEQ ID NO: 1243345
ggccaagggucauagccau

SEQ ID NO: 1410673 - RNA, 19 nt, Artificial Sequence
  Description of Artificial Sequence: Synthetic oligonucleotide
  Antisense strand to SEQ ID NO: 1410672
auggcuaugacccuuggcc

SEQ ID NO: 1410674 - RNA, 19 nt, Artificial Sequence
  Description of Artificial Sequence: Synthetic oligonucleotide
  Sense strand starting at position 2096 of SEQ ID NO: 1243345
gggucauagccaugacaca

SEQ ID NO: 1410675 - RNA, 19 nt, Artificial Sequence
  Description of Artificial Sequence: Synthetic oligonucleotide
  Antisense strand to SEQ ID NO: 1410674
ugugucauggcuaugaccc

SEQ ID NO: 1410676 - RNA, 19 nt, Artificial Sequence
  Description of Artificial Sequence: Synthetic oligonucleotide
  Sense strand starting at position 2286 of SEQ ID NO: 1243345
gggucuucuuggcaagcuu

SEQ ID NO: 1410677 - RNA, 19 nt, Artificial Sequence
  Description of Artificial Sequence: Synthetic oligonucleotide
  Antisense strand to SEQ ID NO: 1410676
aagcuugccaagaagaccc

SEQ ID NO: 1410678 - RNA, 19 nt, Artificial Sequence
  Description of Artificial Sequence: Synthetic oligonucleotide
  Sense strand starting at position 2321 of SEQ ID NO: 1243345
ccgugcuaugcccgagauu

SEQ ID NO: 1410679 - RNA, 19 nt, Artificial Sequence
  Description of Artificial Sequence: Synthetic oligonucleotide
  Antisense strand to SEQ ID NO: 1410678
aaucucgggcauagcacgg

SEQ ID NO: 1410680 - RNA, 19 nt, Artificial Sequence
  Description of Artificial Sequence: Synthetic oligonucleotide
  Sense strand starting at position 2322 of SEQ ID NO: 1243345
cgugcuaugcccgagauuu

SEQ ID NO: 1410681 - RNA, 19 nt, Artificial Sequence
  Description of Artificial Sequence: Synthetic oligonucleotide
  Antisense strand to SEQ ID NO: 1410680
aaaucucgggcauagcacg

SEQ ID NO: 1410682 - RNA, 19 nt, Artificial Sequence
  Description of Artificial Sequence: Synthetic oligonucleotide
  Sense strand starting at position 2654 of SEQ ID NO: 1243345
cacgcagaucgucaagguu

SEQ ID NO: 1410683 - RNA, 19 nt, Artificial Sequence
  Description of Artificial Sequence: Synthetic oligonucleotide
  Antisense strand to SEQ ID NO: 1410682
aaccuugacgaucugcgug

SEQ ID NO: 1410684 - RNA, 19 nt, Artificial Sequence
  Description of Artificial Sequence: Synthetic oligonucleotide
  Sense strand starting at position 2772 of SEQ ID NO: 1243345
cagagacucugccuuggaa

SEQ ID NO: 1410685 - RNA, 19 nt, Artificial Sequence
  Description of Artificial Sequence: Synthetic oligonucleotide
  Antisense strand to SEQ ID NO: 1410684
uuccaaggcagagucucug

SEQ ID NO: 1410686 - RNA, 19 nt, Artificial Sequence
  Description of Artificial Sequence: Synthetic oligonucleotide
  Sense strand starting at position 2822 of SEQ ID NO: 1243345
gcuggugguccugaagcaa

SEQ ID NO: 1410687 - RNA, 19 nt, Artificial Sequence
  Description of Artificial Sequence: Synthetic oligonucleotide
  Antisense strand to SEQ ID NO: 1410686
uugcuucaggaccaccagc

SEQ ID NO: 1410688 - RNA, 19 nt, Artificial Sequence
  Description of Artificial Sequence: Synthetic oligonucleotide
  Sense strand starting at position 222 of SEQ ID NO: 1243346
acucuucucccaugugacu

SEQ ID NO: 1410689 - RNA, 19 nt, Artificial Sequence
  Description of Artificial Sequence: Synthetic oligonucleotide
  Antisense strand to SEQ ID NO: 1410688
agucacaugggagaagagu

SEQ ID NO: 1410690 - RNA, 19 nt, Artificial Sequence
  Description of Artificial Sequence: Synthetic oligonucleotide
  Sense strand starting at position 236 of SEQ ID NO: 1243346
ugacuucucccacgugaca

SEQ ID NO: 1410691 - RNA, 19 nt, Artificial Sequence
  Description of Artificial Sequence: Synthetic oligonucleotide
  Antisense strand to SEQ ID NO: 1410690
ugucacgugggagaaguca

SEQ ID NO: 1410692 - RNA, 19 nt, Artificial Sequence
  Description of Artificial Sequence: Synthetic oligonucleotide
  Sense strand starting at position 638 of SEQ ID NO: 1243346
agccaucuguuaucaagca

SEQ ID NO: 1410693 - RNA, 19 nt, Artificial Sequence
  Description of Artificial Sequence: Synthetic oligonucleotide
  Antisense strand to SEQ ID NO: 1410692
ugcuugauaacagauggcu

SEQ ID NO: 1410694 - RNA, 19 nt, Artificial Sequence
  Description of Artificial Sequence: Synthetic oligonucleotide
  Sense strand starting at position 709 of SEQ ID NO: 1243346
ccagaaagaucugucagau

SEQ ID NO: 1410695 - RNA, 19 nt, Artificial Sequence
  Description of Artificial Sequence: Synthetic oligonucleotide
  Antisense strand to SEQ ID NO: 1410694
aucugacagaucuuucugg

SEQ ID NO: 1410696 - RNA, 19 nt, Artificial Sequence
  Description of Artificial Sequence: Synthetic oligonucleotide
  Sense strand starting at position 713 of SEQ ID NO: 1243346
aaagaucugucagauguca

SEQ ID NO: 1410697 - RNA, 19 nt, Artificial Sequence
  Description of Artificial Sequence: Synthetic oligonucleotide
  Antisense strand to SEQ ID NO: 1410696
ugacaucugacagaucuuu

SEQ ID NO: 1410698 - RNA, 19 nt, Artificial Sequence
  Description of Artificial Sequence: Synthetic oligonucleotide
  Sense strand starting at position 722 of SEQ ID NO: 1243346
ucagaugucacagggcuua

SEQ ID NO: 1410699 - RNA, 19 nt, Artificial Sequence
  Description of Artificial Sequence: Synthetic oligonucleotide
  Antisense strand to SEQ ID NO: 1410698
uaagcccugugacaucuga

SEQ ID NO: 1410700 - RNA, 19 nt, Artificial Sequence
  Description of Artificial Sequence: Synthetic oligonucleotide
  Sense strand starting at position 870 of SEQ ID NO: 1243346
cugccagagcugugaccau

SEQ ID NO: 1410701 - RNA, 19 nt, Artificial Sequence
  Description of Artificial Sequence: Synthetic oligonucleotide
  Antisense strand to SEQ ID NO: 1410700
auggucacagcucuggcag

SEQ ID NO: 1410702 - RNA, 19 nt, Artificial Sequence
  Description of Artificial Sequence: Synthetic oligonucleotide
  Sense strand starting at position 927 of SEQ ID NO: 1243346
cagagugauucguccaagg

SEQ ID NO: 1410703 - RNA, 19 nt, Artificial Sequence
  Description of Artificial Sequence: Synthetic oligonucleotide
  Antisense strand to SEQ ID NO: 1410702
ccuuggacgaaucacucug

SEQ ID NO: 1410704 - RNA, 19 nt, Artificial Sequence
  Description of Artificial Sequence: Synthetic oligonucleotide
  Sense strand starting at position 929 of SEQ ID NO: 1243346
gagugauucguccaagguc

SEQ ID NO: 1410705 - RNA, 19 nt, Artificial Sequence
  Description of Artificial Sequence: Synthetic oligonucleotide
  Antisense strand to SEQ ID NO: 1410704
gaccuuggacgaaucacuc

SEQ ID NO: 1410706 - RNA, 19 nt, Artificial Sequence
  Description of Artificial Sequence: Synthetic oligonucleotide
  Sense strand starting at position 1107 of SEQ ID NO: 1243346
gauucucugccuugguuaa

SEQ ID NO: 1410707 - RNA, 19 nt, Artificial Sequence
  Description of Artificial Sequence: Synthetic oligonucleotide
  Antisense strand to SEQ ID NO: 1410706
uuaaccaaggcagagaauc

SEQ ID NO: 1410708 - RNA, 19 nt, Artificial Sequence
  Description of Artificial Sequence: Synthetic oligonucleotide
  Sense strand starting at position 1109 of SEQ ID NO: 1243346
uucucugccuugguuaaga

SEQ ID NO: 1410709 - RNA, 19 nt, Artificial Sequence
  Description of Artificial Sequence: Synthetic oligonucleotide
  Antisense strand to SEQ ID NO: 1410708
ucuuaaccaaggcagagaa

SEQ ID NO: 1410710 - RNA, 19 nt, Artificial Sequence
  Description of Artificial Sequence: Synthetic oligonucleotide
  Sense strand starting at position 1140 of SEQ ID NO: 1243346
cccacugcucacuggcaaa

SEQ ID NO: 1410711 - RNA, 19 nt, Artificial Sequence
  Description of Artificial Sequence: Synthetic oligonucleotide
  Antisense strand to SEQ ID NO: 1410710
uuugccagugagcaguggg

SEQ ID NO: 1410712 - RNA, 19 nt, Artificial Sequence
  Description of Artificial Sequence: Synthetic oligonucleotide
  Sense strand starting at position 1245 of SEQ ID NO: 1243346
ggaucugauucuccucacu

SEQ ID NO: 1410713 - RNA, 19 nt, Artificial Sequence
  Description of Artificial Sequence: Synthetic oligonucleotide
  Antisense strand to SEQ ID NO: 1410712
agugaggagaaucagaucc

SEQ ID NO: 1410714 - RNA, 19 nt, Artificial Sequence
  Description of Artificial Sequence: Synthetic oligonucleotide
  Sense strand starting at position 1323 of SEQ ID NO: 1243346
gagggaagaguuugggcua

SEQ ID NO: 1410715 - RNA, 19 nt, Artificial Sequence
  Description of Artificial Sequence: Synthetic oligonucleotide
  Antisense strand to SEQ ID NO: 1410714
uagcccaaacucuucccuc

SEQ ID NO: 1410716 - RNA, 19 nt, Artificial Sequence
  Description of Artificial Sequence: Synthetic oligonucleotide
  Sense strand starting at position 1326 of SEQ ID NO: 1243346
ggaagaguuugggcuacuu

SEQ ID NO: 1410717 - RNA, 19 nt, Artificial Sequence
  Description of Artificial Sequence: Synthetic oligonucleotide
  Antisense strand to SEQ ID NO: 1410716
aaguagcccaaacucuucc

SEQ ID NO: 1410718 - RNA, 19 nt, Artificial Sequence
  Description of Artificial Sequence: Synthetic oligonucleotide
  Sense strand starting at position 1328 of SEQ ID NO: 1243346
aagaguuugggcuacuucu

SEQ ID NO: 1410719 - RNA, 19 nt, Artificial Sequence
  Description of Artificial Sequence: Synthetic oligonucleotide
  Antisense strand to SEQ ID NO: 1410718
agaaguagcccaaacucuu

SEQ ID NO: 1410720 - RNA, 19 nt, Artificial Sequence
  Description of Artificial Sequence: Synthetic oligonucleotide
  Sense strand starting at position 1381 of SEQ ID NO: 1243346
ggcucucacgcuuacucau

SEQ ID NO: 1410721 - RNA, 19 nt, Artificial Sequence
  Description of Artificial Sequence: Synthetic oligonucleotide
  Antisense strand to SEQ ID NO: 1410720
augaguaagcgugagagcc

SEQ ID NO: 1410722 - RNA, 19 nt, Artificial Sequence
  Description of Artificial Sequence: Synthetic oligonucleotide
  Sense strand starting at position 1843 of SEQ ID NO: 1243346
agggaaagggucugagcuu

SEQ ID NO: 1410723 - RNA, 19 nt, Artificial Sequence
  Description of Artificial Sequence: Synthetic oligonucleotide
  Antisense strand to SEQ ID NO: 1410722
aagcucagacccuuucccu

SEQ ID NO: 1410724 - RNA, 19 nt, Artificial Sequence
  Description of Artificial Sequence: Synthetic oligonucleotide
  Sense strand starting at position 1844 of SEQ ID NO: 1243346
gggaaagggucugagcuuu

SEQ ID NO: 1410725 - RNA, 19 nt, Artificial Sequence
  Description of Artificial Sequence: Synthetic oligonucleotide
  Antisense strand to SEQ ID NO: 1410724
aaagcucagacccuuuccc

SEQ ID NO: 1410726 - RNA, 19 nt, Artificial Sequence
  Description of Artificial Sequence: Synthetic oligonucleotide
  Sense strand starting at position 1984 of SEQ ID NO: 1243346
gugagcaugcaucacauga

SEQ ID NO: 1410727 - RNA, 19 nt, Artificial Sequence
  Description of Artificial Sequence: Synthetic oligonucleotide
  Antisense strand to SEQ ID NO: 1410726
ucaugugaugcaugcucac

SEQ ID NO: 1410728 - RNA, 19 nt, Artificial Sequence
  Description of Artificial Sequence: Synthetic oligonucleotide
  Sense strand starting at position 2036 of SEQ ID NO: 1243346
guuguaguuuccgcaaaug

SEQ ID NO: 1410729 - RNA, 19 nt, Artificial Sequence
  Description of Artificial Sequence: Synthetic oligonucleotide
  Antisense strand to SEQ ID NO: 1410728
cauuugcggaaacuacaac

SEQ ID NO: 1410730 - RNA, 19 nt, Artificial Sequence
  Description of Artificial Sequence: Synthetic oligonucleotide
  Sense strand starting at position 2052 of SEQ ID NO: 1243346
augugaagcuuggacaaca

SEQ ID NO: 1410731 - RNA, 19 nt, Artificial Sequence
  Description of Artificial Sequence: Synthetic oligonucleotide
  Antisense strand to SEQ ID NO: 1410730
uguuguccaagcuucacau

SEQ ID NO: 1410732 - RNA, 19 nt, Artificial Sequence
  Description of Artificial Sequence: Synthetic oligonucleotide
  Sense strand starting at position 2124 of SEQ ID NO: 1243346
cagccagcucguguuuauc

SEQ ID NO: 1410733 - RNA, 19 nt, Artificial Sequence
  Description of Artificial Sequence: Synthetic oligonucleotide
  Antisense strand to SEQ ID NO: 1410732
gauaaacacgagcuggcug

SEQ ID NO: 1410734 - RNA, 19 nt, Artificial Sequence
  Description of Artificial Sequence: Synthetic oligonucleotide
  Sense strand starting at position 2130 of SEQ ID NO: 1243346
gcucguguuuauccucuua

SEQ ID NO: 1410735 - RNA, 19 nt, Artificial Sequence
  Description of Artificial Sequence: Synthetic oligonucleotide
  Antisense strand to SEQ ID NO: 1410734
uaagaggauaaacacgagc

SEQ ID NO: 1410736 - RNA, 19 nt, Artificial Sequence
  Description of Artificial Sequence: Synthetic oligonucleotide
  Sense strand starting at position 2132 of SEQ ID NO: 1243346
ucguguuuauccucuuacu

SEQ ID NO: 1410737 - RNA, 19 nt, Artificial Sequence
  Description of Artificial Sequence: Synthetic oligonucleotide
  Antisense strand to SEQ ID NO: 1410736
aguaagaggauaaacacga

SEQ ID NO: 1410738 - RNA, 19 nt, Artificial Sequence
  Description of Artificial Sequence: Synthetic oligonucleotide
  Sense strand starting at position 2250 of SEQ ID NO: 1243346
aaagcuguuuggccucauu

SEQ ID NO: 1410739 - RNA, 19 nt, Artificial Sequence
  Description of Artificial Sequence: Synthetic oligonucleotide
  Antisense strand to SEQ ID NO: 1410738
aaugaggccaaacagcuuu

SEQ ID NO: 1410740 - RNA, 19 nt, Artificial Sequence
  Description of Artificial Sequence: Synthetic oligonucleotide
  Sense strand starting at position 2253 of SEQ ID NO: 1243346
gcuguuuggccucauuauc

SEQ ID NO: 1410741 - RNA, 19 nt, Artificial Sequence
  Description of Artificial Sequence: Synthetic oligonucleotide
  Antisense strand to SEQ ID NO: 1410740
gauaaugaggccaaacagc

SEQ ID NO: 1410742 - RNA, 19 nt, Artificial Sequence
  Description of Artificial Sequence: Synthetic oligonucleotide
  Sense strand starting at position 2357 of SEQ ID NO: 1243346
cggucuuuccugcaaggga

SEQ ID NO: 1410743 - RNA, 19 nt, Artificial Sequence
  Description of Artificial Sequence: Synthetic oligonucleotide
  Antisense strand to SEQ ID NO: 1410742
ucccuugcaggaaagaccg

SEQ ID NO: 1410744 - RNA, 19 nt, Artificial Sequence
  Description of Artificial Sequence: Synthetic oligonucleotide
  Sense strand starting at position 2405 of SEQ ID NO: 1243346
cgguuuagacucuagaaca

SEQ ID NO: 1410745 - RNA, 19 nt, Artificial Sequence
  Description of Artificial Sequence: Synthetic oligonucleotide
  Antisense strand to SEQ ID NO: 1410744
uguucuagagucuaaaccg

SEQ ID NO: 1410746 - RNA, 19 nt, Artificial Sequence
  Description of Artificial Sequence: Synthetic oligonucleotide
  Sense strand starting at position 2430 of SEQ ID NO: 1243346
gagggauuguaggugcuca

SEQ ID NO: 1410747 - RNA, 19 nt, Artificial Sequence
  Description of Artificial Sequence: Synthetic oligonucleotide
  Antisense strand to SEQ ID NO: 1410746
ugagcaccuacaaucccuc

SEQ ID NO: 1410748 - RNA, 19 nt, Artificial Sequence
  Description of Artificial Sequence: Synthetic oligonucleotide
  Sense strand starting at position 2434 of SEQ ID NO: 1243346
gauuguaggugcucaguaa

SEQ ID NO: 1410749 - RNA, 19 nt, Artificial Sequence
  Description of Artificial Sequence: Synthetic oligonucleotide
  Antisense strand to SEQ ID NO: 1410748
uuacugagcaccuacaauc

SEQ ID NO: 1410750 - RNA, 19 nt, Artificial Sequence
  Description of Artificial Sequence: Synthetic oligonucleotide
  Sense strand starting at position 2500 of SEQ ID NO: 1243346
ggcugugugucacucauaa

SEQ ID NO: 1410751 - RNA, 19 nt, Artificial Sequence
  Description of Artificial Sequence: Synthetic oligonucleotide
  Antisense strand to SEQ ID NO: 1410750
uuaugagugacacacagcc

SEQ ID NO: 1410752 - RNA, 19 nt, Artificial Sequence
  Description of Artificial Sequence: Synthetic oligonucleotide
  Sense strand starting at position 2511 of SEQ ID NO: 1243346
acucauaaauugucacgua

SEQ ID NO: 1410753 - RNA, 19 nt, Artificial Sequence
  Description of Artificial Sequence: Synthetic oligonucleotide
  Antisense strand to SEQ ID NO: 1410752
uacgugacaauuuaugagu

SEQ ID NO: 1410754 - RNA, 19 nt, Artificial Sequence
  Description of Artificial Sequence: Synthetic oligonucleotide
  Sense strand starting at position 2566 of SEQ ID NO: 1243346
ggauaugcucuccacugca

SEQ ID NO: 1410755 - RNA, 19 nt, Artificial Sequence
  Description of Artificial Sequence: Synthetic oligonucleotide
  Antisense strand to SEQ ID NO: 1410754
ugcaguggagagcauaucc

SEQ ID NO: 1410756 - RNA, 19 nt, Artificial Sequence
  Description of Artificial Sequence: Synthetic oligonucleotide
  Sense strand starting at position 2600 of SEQ ID NO: 1243346
aucagagguccucaccgau

SEQ ID NO: 1410757 - RNA, 19 nt, Artificial Sequence
  Description of Artificial Sequence: Synthetic oligonucleotide
  Antisense strand to SEQ ID NO: 1410756
aucggugaggaccucugau

SEQ ID NO: 1410758 - RNA, 19 nt, Artificial Sequence
  Description of Artificial Sequence: Synthetic oligonucleotide
  Sense strand starting at position 2991 of SEQ ID NO: 1243346
gaaucauacugguugagug

SEQ ID NO: 1410759 - RNA, 19 nt, Artificial Sequence
  Description of Artificial Sequence: Synthetic oligonucleotide
  Antisense strand to SEQ ID NO: 1410758
cacucaaccaguaugauuc

SEQ ID NO: 1410760 - RNA, 19 nt, Artificial Sequence
  Description of Artificial Sequence: Synthetic oligonucleotide
  Sense strand starting at position 3318 of SEQ ID NO: 1243346
aucaguuaaggccgcuaua

SEQ ID NO: 1410761 - RNA, 19 nt, Artificial Sequence
  Description of Artificial Sequence: Synthetic oligonucleotide
  Antisense strand to SEQ ID NO: 1410760
uauagcggccuuaacugau

SEQ ID NO: 1410762 - RNA, 19 nt, Artificial Sequence
  Description of Artificial Sequence: Synthetic oligonucleotide
  Sense strand starting at position 3321 of SEQ ID NO: 1243346
aguuaaggccgcuauaaca

SEQ ID NO: 1410763 - RNA, 19 nt, Artificial Sequence
  Description of Artificial Sequence: Synthetic oligonucleotide
  Antisense strand to SEQ ID NO: 1410762
uguuauagcggccuuaacu

SEQ ID NO: 1410764 - RNA, 19 nt, Artificial Sequence
  Description of Artificial Sequence: Synthetic oligonucleotide
  Sense strand starting at position 3838 of SEQ ID NO: 1243346
uggucuuguuucuucuuau

SEQ ID NO: 1410765 - RNA, 19 nt, Artificial Sequence
  Description of Artificial Sequence: Synthetic oligonucleotide
  Antisense strand to SEQ ID NO: 1410764
auaagaagaaacaagacca

SEQ ID NO: 1410766 - RNA, 19 nt, Artificial Sequence
  Description of Artificial Sequence: Synthetic oligonucleotide
  Sense strand starting at position 3839 of SEQ ID NO: 1243346
ggucuuguuucuucuuaua

SEQ ID NO: 1410767 - RNA, 19 nt, Artificial Sequence
  Description of Artificial Sequence: Synthetic oligonucleotide
  Antisense strand to SEQ ID NO: 1410766
uauaagaagaaacaagacc

SEQ ID NO: 1410768 - RNA, 19 nt, Artificial Sequence
  Description of Artificial Sequence: Synthetic oligonucleotide
  Sense strand starting at position 137 of SEQ ID NO: 1243347
ugccaugaguuuccauuua

SEQ ID NO: 1410769 - RNA, 19 nt, Artificial Sequence
  Description of Artificial Sequence: Synthetic oligonucleotide
  Antisense strand to SEQ ID NO: 1410768
uaaauggaaacucauggca

SEQ ID NO: 1410770 - RNA, 19 nt, Artificial Sequence
  Description of Artificial Sequence: Synthetic oligonucleotide
  Sense strand starting at position 304 of SEQ ID NO: 1243347
cagcaagaucugugugaaa

SEQ ID NO: 1410771 - RNA, 19 nt, Artificial Sequence
  Description of Artificial Sequence: Synthetic oligonucleotide
  Antisense strand to SEQ ID NO: 1410770
uuucacacagaucuugcug

SEQ ID NO: 1410772 - RNA, 19 nt, Artificial Sequence
  Description of Artificial Sequence: Synthetic oligonucleotide
  Sense strand starting at position 306 of SEQ ID NO: 1243347
gcaagaucugugugaaaug

SEQ ID NO: 1410773 - RNA, 19 nt, Artificial Sequence
  Description of Artificial Sequence: Synthetic oligonucleotide
  Antisense strand to SEQ ID NO: 1410772
cauuucacacagaucuugc

SEQ ID NO: 1410774 - RNA, 19 nt, Artificial Sequence
  Description of Artificial Sequence: Synthetic oligonucleotide
  Sense strand starting at position 423 of SEQ ID NO: 1243347
cccucuguggcuugagaug

SEQ ID NO: 1410775 - RNA, 19 nt, Artificial Sequence
  Description of Artificial Sequence: Synthetic oligonucleotide
  Antisense strand to SEQ ID NO: 1410774
caucucaagccacagaggg

SEQ ID NO: 1410776 - RNA, 19 nt, Artificial Sequence
  Description of Artificial Sequence: Synthetic oligonucleotide
  Sense strand starting at position 585 of SEQ ID NO: 1243347
ccgaccacgccaugucaua

SEQ ID NO: 1410777 - RNA, 19 nt, Artificial Sequence
  Description of Artificial Sequence: Synthetic oligonucleotide
  Antisense strand to SEQ ID NO: 1410776
uaugacauggcguggucgg

SEQ ID NO: 1410778 - RNA, 19 nt, Artificial Sequence
  Description of Artificial Sequence: Synthetic oligonucleotide
  Sense strand starting at position 666 of SEQ ID NO: 1243347
acaugcaucuugucugacu

SEQ ID NO: 1410779 - RNA, 19 nt, Artificial Sequence
  Description of Artificial Sequence: Synthetic oligonucleotide
  Antisense strand to SEQ ID NO: 1410778
agucagacaagaugcaugu

SEQ ID NO: 1410780 - RNA, 19 nt, Artificial Sequence
  Description of Artificial Sequence: Synthetic oligonucleotide
  Sense strand starting at position 794 of SEQ ID NO: 1243347
cgacacuaguuuccaaaca

SEQ ID NO: 1410781 - RNA, 19 nt, Artificial Sequence
  Description of Artificial Sequence: Synthetic oligonucleotide
  Antisense strand to SEQ ID NO: 1410780
uguuuggaaacuagugucg

SEQ ID NO: 1410782 - RNA, 19 nt, Artificial Sequence
  Description of Artificial Sequence: Synthetic oligonucleotide
  Sense strand starting at position 871 of SEQ ID NO: 1243347
ccguaagacgugugagaaa

SEQ ID NO: 1410783 - RNA, 19 nt, Artificial Sequence
  Description of Artificial Sequence: Synthetic oligonucleotide
  Antisense strand to SEQ ID NO: 1410782
uuucucacacgucuuacgg

SEQ ID NO: 1410784 - RNA, 19 nt, Artificial Sequence
  Description of Artificial Sequence: Synthetic oligonucleotide
  Sense strand starting at position 895 of SEQ ID NO: 1243347
ggccaaagagcuuaccaca

SEQ ID NO: 1410785 - RNA, 19 nt, Artificial Sequence
  Description of Artificial Sequence: Synthetic oligonucleotide
  Antisense strand to SEQ ID NO: 1410784
ugugguaagcucuuuggcc

SEQ ID NO: 1410786 - RNA, 19 nt, Artificial Sequence
  Description of Artificial Sequence: Synthetic oligonucleotide
  Sense strand starting at position 962 of SEQ ID NO: 1243347
uaaagcugugcucaucagu

SEQ ID NO: 1410787 - RNA, 19 nt, Artificial Sequence
  Description of Artificial Sequence: Synthetic oligonucleotide
  Antisense strand to SEQ ID NO: 1410786
acugaugagcacagcuuua

SEQ ID NO: 1410788 - RNA, 19 nt, Artificial Sequence
  Description of Artificial Sequence: Synthetic oligonucleotide
  Sense strand starting at position 1029 of SEQ ID NO: 1243347
agggaauucuggcuuugca

SEQ ID NO: 1410789 - RNA, 19 nt, Artificial Sequence
  Description of Artificial Sequence: Synthetic oligonucleotide
  Antisense strand to SEQ ID NO: 1410788
ugcaaagccagaauucccu

SEQ ID NO: 1410790 - RNA, 19 nt, Artificial Sequence
  Description of Artificial Sequence: Synthetic oligonucleotide
  Sense strand starting at position 1524 of SEQ ID NO: 1243347
gguuccuucccaggugaaa

SEQ ID NO: 1410791 - RNA, 19 nt, Artificial Sequence
  Description of Artificial Sequence: Synthetic oligonucleotide
  Antisense strand to SEQ ID NO: 1410790
uuucaccugggaaggaacc

SEQ ID NO: 1410792 - RNA, 19 nt, Artificial Sequence
  Description of Artificial Sequence: Synthetic oligonucleotide
  Sense strand starting at position 1585 of SEQ ID NO: 1243347
ccggaagcuguguaucaga

SEQ ID NO: 1410793 - RNA, 19 nt, Artificial Sequence
  Description of Artificial Sequence: Synthetic oligonucleotide
  Antisense strand to SEQ ID NO: 1410792
ucugauacacagcuuccgg

SEQ ID NO: 1410794 - RNA, 19 nt, Artificial Sequence
  Description of Artificial Sequence: Synthetic oligonucleotide
  Sense strand starting at position 1622 of SEQ ID NO: 1243347
gggauauucucaucccagg

SEQ ID NO: 1410795 - RNA, 19 nt, Artificial Sequence
  Description of Artificial Sequence: Synthetic oligonucleotide
  Antisense strand to SEQ ID NO: 1410794
ccugggaugagaauauccc

SEQ ID NO: 1410796 - RNA, 19 nt, Artificial Sequence
  Description of Artificial Sequence: Synthetic oligonucleotide
  Sense strand starting at position 1666 of SEQ ID NO: 1243347
ucauuagcugagcgggaua

SEQ ID NO: 1410797 - RNA, 19 nt, Artificial Sequence
  Description of Artificial Sequence: Synthetic oligonucleotide
  Antisense strand to SEQ ID NO: 1410796
uaucccgcucagcuaauga

SEQ ID NO: 1410798 - RNA, 19 nt, Artificial Sequence
  Description of Artificial Sequence: Synthetic oligonucleotide
  Sense strand starting at position 1699 of SEQ ID NO: 1243347
gaagcuauagcuuacagga

SEQ ID NO: 1410799 - RNA, 19 nt, Artificial Sequence
  Description of Artificial Sequence: Synthetic oligonucleotide
  Antisense strand to SEQ ID NO: 1410798
uccuguaagcuauagcuuc

SEQ ID NO: 1410800 - RNA, 19 nt, Artificial Sequence
  Description of Artificial Sequence: Synthetic oligonucleotide
  Sense strand starting at position 2050 of SEQ ID NO: 1243347
cucccuaaguucucgauau

SEQ ID NO: 1410801 - RNA, 19 nt, Artificial Sequence
  Description of Artificial Sequence: Synthetic oligonucleotide
  Antisense strand to SEQ ID NO: 1410800
auaucgagaacuuagggag

SEQ ID NO: 1410802 - RNA, 19 nt, Artificial Sequence
  Description of Artificial Sequence: Synthetic oligonucleotide
  Sense strand starting at position 2054 of SEQ ID NO: 1243347
cuaaguucucgauauccuu

SEQ ID NO: 1410803 - RNA, 19 nt, Artificial Sequence
  Description of Artificial Sequence: Synthetic oligonucleotide
  Antisense strand to SEQ ID NO: 1410802
aaggauaucgagaacuuag

SEQ ID NO: 1410804 - RNA, 19 nt, Artificial Sequence
  Description of Artificial Sequence: Synthetic oligonucleotide
  Sense strand starting at position 2057 of SEQ ID NO: 1243347
aguucucgauauccuuauu

SEQ ID NO: 1410805 - RNA, 19 nt, Artificial Sequence
  Description of Artificial Sequence: Synthetic oligonucleotide
  Antisense strand to SEQ ID NO: 1410804
aauaaggauaucgagaacu

SEQ ID NO: 1410806 - RNA, 19 nt, Artificial Sequence
  Description of Artificial Sequence: Synthetic oligonucleotide
  Sense strand starting at position 2062 of SEQ ID NO: 1243347
ucgauauccuuauuugucu

SEQ ID NO: 1410807 - RNA, 19 nt, Artificial Sequence
  Description of Artificial Sequence: Synthetic oligonucleotide
  Antisense strand to SEQ ID NO: 1410806
agacaaauaaggauaucga

SEQ ID NO: 1410808 - RNA, 19 nt, Artificial Sequence
  Description of Artificial Sequence: Synthetic oligonucleotide
  Sense strand starting at position 2525 of SEQ ID NO: 1243347
gggugagugagucauuaac

SEQ ID NO: 1410809 - RNA, 19 nt, Artificial Sequence
  Description of Artificial Sequence: Synthetic oligonucleotide
  Antisense strand to SEQ ID NO: 1410808
guuaaugacucacucaccc

SEQ ID NO: 1410810 - RNA, 19 nt, Artificial Sequence
  Description of Artificial Sequence: Synthetic oligonucleotide
  Sense strand starting at position 2527 of SEQ ID NO: 1243347
gugagugagucauuaacua

SEQ ID NO: 1410811 - RNA, 19 nt, Artificial Sequence
  Description of Artificial Sequence: Synthetic oligonucleotide
  Antisense strand to SEQ ID NO: 1410810
uaguuaaugacucacucac

SEQ ID NO: 1410812 - RNA, 19 nt, Artificial Sequence
  Description of Artificial Sequence: Synthetic oligonucleotide
  Sense strand starting at position 2558 of SEQ ID NO: 1243347
cgaguaugugucaggguca

SEQ ID NO: 1410813 - RNA, 19 nt, Artificial Sequence
  Description of Artificial Sequence: Synthetic oligonucleotide
  Antisense strand to SEQ ID NO: 1410812
ugacccugacacauacucg

SEQ ID NO: 1410814 - RNA, 19 nt, Artificial Sequence
  Description of Artificial Sequence: Synthetic oligonucleotide
  Sense strand starting at position 2979 of SEQ ID NO: 1243347
gugcgucucagagcuaauc

SEQ ID NO: 1410815 - RNA, 19 nt, Artificial Sequence
  Description of Artificial Sequence: Synthetic oligonucleotide
  Antisense strand to SEQ ID NO: 1410814
gauuagcucugagacgcac

SEQ ID NO: 1410816 - RNA, 19 nt, Artificial Sequence
  Description of Artificial Sequence: Synthetic oligonucleotide
  Sense strand starting at position 3069 of SEQ ID NO: 1243347
ccacgcuugagugaugaca

SEQ ID NO: 1410817 - RNA, 19 nt, Artificial Sequence
  Description of Artificial Sequence: Synthetic oligonucleotide
  Antisense strand to SEQ ID NO: 1410816
ugucaucacucaagcgugg

SEQ ID NO: 1410818 - RNA, 19 nt, Artificial Sequence
  Description of Artificial Sequence: Synthetic oligonucleotide
  Sense strand starting at position 3167 of SEQ ID NO: 1243347
gcagcucagauccggaauu

SEQ ID NO: 1410819 - RNA, 19 nt, Artificial Sequence
  Description of Artificial Sequence: Synthetic oligonucleotide
  Antisense strand to SEQ ID NO: 1410818
aauuccggaucugagcugc

SEQ ID NO: 1410820 - RNA, 19 nt, Artificial Sequence
  Description of Artificial Sequence: Synthetic oligonucleotide
  Sense strand starting at position 3187 of SEQ ID NO: 1243347
gacuguuuauuccuggaac

SEQ ID NO: 1410821 - RNA, 19 nt, Artificial Sequence
  Description of Artificial Sequence: Synthetic oligonucleotide
  Antisense strand to SEQ ID NO: 1410820
guuccaggaauaaacaguc

SEQ ID NO: 1410822 - RNA, 19 nt, Artificial Sequence
  Description of Artificial Sequence: Synthetic oligonucleotide
  Sense strand starting at position 3190 of SEQ ID NO: 1243347
uguuuauuccuggaaccca

SEQ ID NO: 1410823 - RNA, 19 nt, Artificial Sequence
  Description of Artificial Sequence: Synthetic oligonucleotide
  Antisense strand to SEQ ID NO: 1410822
uggguuccaggaauaaaca

SEQ ID NO: 1410824 - RNA, 19 nt, Artificial Sequence
  Description of Artificial Sequence: Synthetic oligonucleotide
  Sense strand starting at position 3236 of SEQ ID NO: 1243347
uccaguuugcaucagaauc

SEQ ID NO: 1410825 - RNA, 19 nt, Artificial Sequence
  Description of Artificial Sequence: Synthetic oligonucleotide
  Antisense strand to SEQ ID NO: 1410824
gauucugaugcaaacugga

SEQ ID NO: 1410826 - RNA, 19 nt, Artificial Sequence
  Description of Artificial Sequence: Synthetic oligonucleotide
  Sense strand starting at position 3297 of SEQ ID NO: 1243347
ccuguuucugacugagugu

SEQ ID NO: 1410827 - RNA, 19 nt, Artificial Sequence
  Description of Artificial Sequence: Synthetic oligonucleotide
  Antisense strand to SEQ ID NO: 1410826
acacucagucagaaacagg

SEQ ID NO: 1410828 - RNA, 19 nt, Artificial Sequence
  Description of Artificial Sequence: Synthetic oligonucleotide
  Sense strand starting at position 3453 of SEQ ID NO: 1243347
cuaaucaguccuuaucugu

SEQ ID NO: 1410829 - RNA, 19 nt, Artificial Sequence
  Description of Artificial Sequence: Synthetic oligonucleotide
  Antisense strand to SEQ ID NO: 1410828
acagauaaggacugauuag

SEQ ID NO: 1410830 - RNA, 19 nt, Artificial Sequence
  Description of Artificial Sequence: Synthetic oligonucleotide
  Sense strand starting at position 3464 of SEQ ID NO: 1243347
uuaucuguccgacaccaga

SEQ ID NO: 1410831 - RNA, 19 nt, Artificial Sequence
  Description of Artificial Sequence: Synthetic oligonucleotide
  Antisense strand to SEQ ID NO: 1410830
ucuggugucggacagauaa

SEQ ID NO: 1410832 - RNA, 19 nt, Artificial Sequence
  Description of Artificial Sequence: Synthetic oligonucleotide
  Sense strand starting at position 3510 of SEQ ID NO: 1243347
gguuucuaauggucucaac

SEQ ID NO: 1410833 - RNA, 19 nt, Artificial Sequence
  Description of Artificial Sequence: Synthetic oligonucleotide
  Antisense strand to SEQ ID NO: 1410832
guugagaccauuagaaacc

SEQ ID NO: 1410834 - RNA, 19 nt, Artificial Sequence
  Description of Artificial Sequence: Synthetic oligonucleotide
  Sense strand starting at position 3690 of SEQ ID NO: 1243347
caaugacccggaugacauu

SEQ ID NO: 1410835 - RNA, 19 nt, Artificial Sequence
  Description of Artificial Sequence: Synthetic oligonucleotide
  Antisense strand to SEQ ID NO: 1410834
aaugucauccgggucauug

SEQ ID NO: 1410836 - RNA, 19 nt, Artificial Sequence
  Description of Artificial Sequence: Synthetic oligonucleotide
  Sense strand starting at position 3710 of SEQ ID NO: 1243347
acgccacugcugcauaaau

SEQ ID NO: 1410837 - RNA, 19 nt, Artificial Sequence
  Description of Artificial Sequence: Synthetic oligonucleotide
  Antisense strand to SEQ ID NO: 1410836
auuuaugcagcaguggcgu

SEQ ID NO: 1410838 - RNA, 19 nt, Artificial Sequence
  Description of Artificial Sequence: Synthetic oligonucleotide
  Sense strand starting at position 3739 of SEQ ID NO: 1243347
gaaccuagccuggaugagu

SEQ ID NO: 1410839 - RNA, 19 nt, Artificial Sequence
  Description of Artificial Sequence: Synthetic oligonucleotide
  Antisense strand to SEQ ID NO: 1410838
acucauccaggcuagguuc

SEQ ID NO: 1410840 - RNA, 19 nt, Artificial Sequence
  Description of Artificial Sequence: Synthetic oligonucleotide
  Sense strand starting at position 3761 of SEQ ID NO: 1243347
cgcggauuccugagcgggu

SEQ ID NO: 1410841 - RNA, 19 nt, Artificial Sequence
  Description of Artificial Sequence: Synthetic oligonucleotide
  Antisense strand to SEQ ID NO: 1410840
acccgcucaggaauccgcg

SEQ ID NO: 1410842 - RNA, 19 nt, Artificial Sequence
  Description of Artificial Sequence: Synthetic oligonucleotide
  Sense strand starting at position 3942 of SEQ ID NO: 1243347
ccacaaggacucugacagu

SEQ ID NO: 1410843 - RNA, 19 nt, Artificial Sequence
  Description of Artificial Sequence: Synthetic oligonucleotide
  Antisense strand to SEQ ID NO: 1410842
acugucagaguccuugugg

SEQ ID NO: 1410844 - RNA, 19 nt, Artificial Sequence
  Description of Artificial Sequence: Synthetic oligonucleotide
  Sense strand starting at position 3952 of SEQ ID NO: 1243347
ucugacagugccugaauga

SEQ ID NO: 1410845 - RNA, 19 nt, Artificial Sequence
  Description of Artificial Sequence: Synthetic oligonucleotide
  Antisense strand to SEQ ID NO: 1410844
ucauucaggcacugucaga

SEQ ID NO: 1410846 - RNA, 19 nt, Artificial Sequence
  Description of Artificial Sequence: Synthetic oligonucleotide
  Sense strand starting at position 3962 of SEQ ID NO: 1243347
ccugaaugagugugugaga

SEQ ID NO: 1410847 - RNA, 19 nt, Artificial Sequence
  Description of Artificial Sequence: Synthetic oligonucleotide
  Antisense strand to SEQ ID NO: 1410846
ucucacacacucauucagg

SEQ ID NO: 1410848 - RNA, 19 nt, Artificial Sequence
  Description of Artificial Sequence: Synthetic oligonucleotide
  Sense strand starting at position 14 of SEQ ID NO: 1243348
gcaauaaauguugguacaa

SEQ ID NO: 1410849 - RNA, 19 nt, Artificial Sequence
  Description of Artificial Sequence: Synthetic oligonucleotide
  Antisense strand to SEQ ID NO: 1410848
uuguaccaacauuuauugc

SEQ ID NO: 1410850 - RNA, 19 nt, Artificial Sequence
  Description of Artificial Sequence: Synthetic oligonucleotide
  Sense strand starting at position 32 of SEQ ID NO: 1243348
acaaauaaaugugggauuu

SEQ ID NO: 1410851 - RNA, 19 nt, Artificial Sequence
  Description of Artificial Sequence: Synthetic oligonucleotide
  Antisense strand to SEQ ID NO: 1410850
aaaucccacauuuauuugu

SEQ ID NO: 1410852 - RNA, 19 nt, Artificial Sequence
  Description of Artificial Sequence: Synthetic oligonucleotide
  Sense strand starting at position 155 of SEQ ID NO: 1243348
ugucaacuauugcccagaa

SEQ ID NO: 1410853 - RNA, 19 nt, Artificial Sequence
  Description of Artificial Sequence: Synthetic oligonucleotide
  Antisense strand to SEQ ID NO: 1410852
uucugggcaauaguugaca

SEQ ID NO: 1410854 - RNA, 19 nt, Artificial Sequence
  Description of Artificial Sequence: Synthetic oligonucleotide
  Sense strand starting at position 156 of SEQ ID NO: 1243348
gucaacuauugcccagaau

SEQ ID NO: 1410855 - RNA, 19 nt, Artificial Sequence
  Description of Artificial Sequence: Synthetic oligonucleotide
  Antisense strand to SEQ ID NO: 1410854
auucugggcaauaguugac

SEQ ID NO: 1410856 - RNA, 19 nt, Artificial Sequence
  Description of Artificial Sequence: Synthetic oligonucleotide
  Sense strand starting at position 369 of SEQ ID NO: 1243348
cuaugauaguacuacauuu

SEQ ID NO: 1410857 - RNA, 19 nt, Artificial Sequence
  Description of Artificial Sequence: Synthetic oligonucleotide
  Antisense strand to SEQ ID NO: 1410856
aaauguaguacuaucauag

SEQ ID NO: 1410858 - RNA, 19 nt, Artificial Sequence
  Description of Artificial Sequence: Synthetic oligonucleotide
  Sense strand starting at position 766 of SEQ ID NO: 1243348
gauauuguggcugagcuca

SEQ ID NO: 1410859 - RNA, 19 nt, Artificial Sequence
  Description of Artificial Sequence: Synthetic oligonucleotide
  Antisense strand to SEQ ID NO: 1410858
ugagcucagccacaauauc

SEQ ID NO: 1410860 - RNA, 19 nt, Artificial Sequence
  Description of Artificial Sequence: Synthetic oligonucleotide
  Sense strand starting at position 779 of SEQ ID NO: 1243348
agcucauggccacaggaau

SEQ ID NO: 1410861 - RNA, 19 nt, Artificial Sequence
  Description of Artificial Sequence: Synthetic oligonucleotide
  Antisense strand to SEQ ID NO: 1410860
auuccuguggccaugagcu

SEQ ID NO: 1410862 - RNA, 19 nt, Artificial Sequence
  Description of Artificial Sequence: Synthetic oligonucleotide
  Sense strand starting at position 856 of SEQ ID NO: 1243348
cuuagacucuguccaugaa

SEQ ID NO: 1410863 - RNA, 19 nt, Artificial Sequence
  Description of Artificial Sequence: Synthetic oligonucleotide
  Antisense strand to SEQ ID NO: 1410862
uucauggacagagucuaag

SEQ ID NO: 1410864 - RNA, 19 nt, Artificial Sequence
  Description of Artificial Sequence: Synthetic oligonucleotide
  Sense strand starting at position 857 of SEQ ID NO: 1243348
uuagacucuguccaugaau

SEQ ID NO: 1410865 - RNA, 19 nt, Artificial Sequence
  Description of Artificial Sequence: Synthetic oligonucleotide
  Antisense strand to SEQ ID NO: 1410864
auucauggacagagucuaa

SEQ ID NO: 1410866 - RNA, 19 nt, Artificial Sequence
  Description of Artificial Sequence: Synthetic oligonucleotide
  Sense strand starting at position 859 of SEQ ID NO: 1243348
agacucuguccaugaauua

SEQ ID NO: 1410867 - RNA, 19 nt, Artificial Sequence
  Description of Artificial Sequence: Synthetic oligonucleotide
  Antisense strand to SEQ ID NO: 1410866
uaauucauggacagagucu

SEQ ID NO: 1410868 - RNA, 19 nt, Artificial Sequence
  Description of Artificial Sequence: Synthetic oligonucleotide
  Sense strand starting at position 905 of SEQ ID NO: 1243348
uucugugucaguuagauga

SEQ ID NO: 1410869 - RNA, 19 nt, Artificial Sequence
  Description of Artificial Sequence: Synthetic oligonucleotide
  Antisense strand to SEQ ID NO: 1410868
ucaucuaacugacacagaa

SEQ ID NO: 1410870 - RNA, 19 nt, Artificial Sequence
  Description of Artificial Sequence: Synthetic oligonucleotide
  Sense strand starting at position 909 of SEQ ID NO: 1243348
gugucaguuagaugagauc

SEQ ID NO: 1410871 - RNA, 19 nt, Artificial Sequence
  Description of Artificial Sequence: Synthetic oligonucleotide
  Antisense strand to SEQ ID NO: 1410870
gaucucaucuaacugacac

SEQ ID NO: 1410872 - RNA, 19 nt, Artificial Sequence
  Description of Artificial Sequence: Synthetic oligonucleotide
  Sense strand starting at position 918 of SEQ ID NO: 1243348
agaugagauccaggcguaa

SEQ ID NO: 1410873 - RNA, 19 nt, Artificial Sequence
  Description of Artificial Sequence: Synthetic oligonucleotide
  Antisense strand to SEQ ID NO: 1410872
uuacgccuggaucucaucu

SEQ ID NO: 1410874 - RNA, 19 nt, Artificial Sequence
  Description of Artificial Sequence: Synthetic oligonucleotide
  Sense strand starting at position 920 of SEQ ID NO: 1243348
augagauccaggcguaaag

SEQ ID NO: 1410875 - RNA, 19 nt, Artificial Sequence
  Description of Artificial Sequence: Synthetic oligonucleotide
  Antisense strand to SEQ ID NO: 1410874
cuuuacgccuggaucucau

SEQ ID NO: 1410876 - RNA, 19 nt, Artificial Sequence
  Description of Artificial Sequence: Synthetic oligonucleotide
  Sense strand starting at position 922 of SEQ ID NO: 1243348
gagauccaggcguaaaguu

SEQ ID NO: 1410877 - RNA, 19 nt, Artificial Sequence
  Description of Artificial Sequence: Synthetic oligonucleotide
  Antisense strand to SEQ ID NO: 1410876
aacuuuacgccuggaucuc

SEQ ID NO: 1410878 - RNA, 19 nt, Artificial Sequence
  Description of Artificial Sequence: Synthetic oligonucleotide
  Sense strand starting at position 956 of SEQ ID NO: 1243348
acacguaccagugaagacu

SEQ ID NO: 1410879 - RNA, 19 nt, Artificial Sequence
  Description of Artificial Sequence: Synthetic oligonucleotide
  Antisense strand to SEQ ID NO: 1410878
agucuucacugguacgugu

SEQ ID NO: 1410880 - RNA, 19 nt, Artificial Sequence
  Description of Artificial Sequence: Synthetic oligonucleotide
  Sense strand starting at position 1036 of SEQ ID NO: 1243348
aaugcuuauguggauacau

SEQ ID NO: 1410881 - RNA, 19 nt, Artificial Sequence
  Description of Artificial Sequence: Synthetic oligonucleotide
  Antisense strand to SEQ ID NO: 1410880
auguauccacauaagcauu

SEQ ID NO: 1410882 - RNA, 19 nt, Artificial Sequence
  Description of Artificial Sequence: Synthetic oligonucleotide
  Sense strand starting at position 1063 of SEQ ID NO: 1243348
guuaucucuggguaacaca

SEQ ID NO: 1410883 - RNA, 19 nt, Artificial Sequence
  Description of Artificial Sequence: Synthetic oligonucleotide
  Antisense strand to SEQ ID NO: 1410882
uguguuacccagagauaac

SEQ ID NO: 1410884 - RNA, 19 nt, Artificial Sequence
  Description of Artificial Sequence: Synthetic oligonucleotide
  Sense strand starting at position 1153 of SEQ ID NO: 1243348
aaauguuuggcucaauguc

SEQ ID NO: 1410885 - RNA, 19 nt, Artificial Sequence
  Description of Artificial Sequence: Synthetic oligonucleotide
  Antisense strand to SEQ ID NO: 1410884
gacauugagccaaacauuu

SEQ ID NO: 1410886 - RNA, 19 nt, Artificial Sequence
  Description of Artificial Sequence: Synthetic oligonucleotide
  Sense strand starting at position 1416 of SEQ ID NO: 1243348
ggugucuuaccuuauucca

SEQ ID NO: 1410887 - RNA, 19 nt, Artificial Sequence
  Description of Artificial Sequence: Synthetic oligonucleotide
  Antisense strand to SEQ ID NO: 1410886
uggaauaagguaagacacc

SEQ ID NO: 1410888 - RNA, 19 nt, Artificial Sequence
  Description of Artificial Sequence: Synthetic oligonucleotide
  Sense strand starting at position 1418 of SEQ ID NO: 1243348
ugucuuaccuuauuccaga

SEQ ID NO: 1410889 - RNA, 19 nt, Artificial Sequence
  Description of Artificial Sequence: Synthetic oligonucleotide
  Antisense strand to SEQ ID NO: 1410888
ucuggaauaagguaagaca

SEQ ID NO: 1410890 - RNA, 19 nt, Artificial Sequence
  Description of Artificial Sequence: Synthetic oligonucleotide
  Sense strand starting at position 1419 of SEQ ID NO: 1243348
gucuuaccuuauuccagau

SEQ ID NO: 1410891 - RNA, 19 nt, Artificial Sequence
  Description of Artificial Sequence: Synthetic oligonucleotide
  Antisense strand to SEQ ID NO: 1410890
aucuggaauaagguaagac

SEQ ID NO: 1410892 - RNA, 19 nt, Artificial Sequence
  Description of Artificial Sequence: Synthetic oligonucleotide
  Sense strand starting at position 1643 of SEQ ID NO: 1243348
gauuaaaggaagcgugaau

SEQ ID NO: 1410893 - RNA, 19 nt, Artificial Sequence
  Description of Artificial Sequence: Synthetic oligonucleotide
  Antisense strand to SEQ ID NO: 1410892
auucacgcuuccuuuaauc

SEQ ID NO: 1410894 - RNA, 19 nt, Artificial Sequence
  Description of Artificial Sequence: Synthetic oligonucleotide
  Sense strand starting at position 2646 of SEQ ID NO: 1243348
gagagaaucuugcuauguu

SEQ ID NO: 1410895 - RNA, 19 nt, Artificial Sequence
  Description of Artificial Sequence: Synthetic oligonucleotide
  Antisense strand to SEQ ID NO: 1410894
aacauagcaagauucucuc

SEQ ID NO: 1410896 - RNA, 19 nt, Artificial Sequence
  Description of Artificial Sequence: Synthetic oligonucleotide
  Sense strand starting at position 3069 of SEQ ID NO: 1243348
ccaacaacccucgaaguua

SEQ ID NO: 1410897 - RNA, 19 nt, Artificial Sequence
  Description of Artificial Sequence: Synthetic oligonucleotide
  Antisense strand to SEQ ID NO: 1410896
uaacuucgaggguuguugg

SEQ ID NO: 1410898 - RNA, 19 nt, Artificial Sequence
  Description of Artificial Sequence: Synthetic oligonucleotide
  Sense strand starting at position 3102 of SEQ ID NO: 1243348
uaucuuacugacgagguaa

SEQ ID NO: 1410899 - RNA, 19 nt, Artificial Sequence
  Description of Artificial Sequence: Synthetic oligonucleotide
  Antisense strand to SEQ ID NO: 1410898
uuaccucgucaguaagaua

SEQ ID NO: 1410900 - RNA, 19 nt, Artificial Sequence
  Description of Artificial Sequence: Synthetic oligonucleotide
  Sense strand starting at position 3137 of SEQ ID NO: 1243348
gagucaucggcccaggauc

SEQ ID NO: 1410901 - RNA, 19 nt, Artificial Sequence
  Description of Artificial Sequence: Synthetic oligonucleotide
  Antisense strand to SEQ ID NO: 1410900
gauccugggccgaugacuc

SEQ ID NO: 1410902 - RNA, 19 nt, Artificial Sequence
  Description of Artificial Sequence: Synthetic oligonucleotide
  Sense strand starting at position 3230 of SEQ ID NO: 1243348
gguggcuugacuggauaaa

SEQ ID NO: 1410903 - RNA, 19 nt, Artificial Sequence
  Description of Artificial Sequence: Synthetic oligonucleotide
  Antisense strand to SEQ ID NO: 1410902
uuuauccagucaagccacc

SEQ ID NO: 1410904 - RNA, 19 nt, Artificial Sequence
  Description of Artificial Sequence: Synthetic oligonucleotide
  Sense strand starting at position 3231 of SEQ ID NO: 1243348
guggcuugacuggauaaag

SEQ ID NO: 1410905 - RNA, 19 nt, Artificial Sequence
  Description of Artificial Sequence: Synthetic oligonucleotide
  Antisense strand to SEQ ID NO: 1410904
cuuuauccagucaagccac

SEQ ID NO: 1410906 - RNA, 19 nt, Artificial Sequence
  Description of Artificial Sequence: Synthetic oligonucleotide
  Sense strand starting at position 3375 of SEQ ID NO: 1243348
gacagaaggccaugaaucu

SEQ ID NO: 1410907 - RNA, 19 nt, Artificial Sequence
  Description of Artificial Sequence: Synthetic oligonucleotide
  Antisense strand to SEQ ID NO: 1410906
agauucauggccuucuguc

SEQ ID NO: 1410908 - RNA, 19 nt, Artificial Sequence
  Description of Artificial Sequence: Synthetic oligonucleotide
  Sense strand starting at position 3381 of SEQ ID NO: 1243348
aggccaugaaucugugauc

SEQ ID NO: 1410909 - RNA, 19 nt, Artificial Sequence
  Description of Artificial Sequence: Synthetic oligonucleotide
  Antisense strand to SEQ ID NO: 1410908
gaucacagauucauggccu

SEQ ID NO: 1410910 - RNA, 19 nt, Artificial Sequence
  Description of Artificial Sequence: Synthetic oligonucleotide
  Sense strand starting at position 3390 of SEQ ID NO: 1243348
aucugugaucugcagcaga

SEQ ID NO: 1410911 - RNA, 19 nt, Artificial Sequence
  Description of Artificial Sequence: Synthetic oligonucleotide
  Antisense strand to SEQ ID NO: 1410910
ucugcugcagaucacagau

SEQ ID NO: 1410912 - RNA, 19 nt, Artificial Sequence
  Description of Artificial Sequence: Synthetic oligonucleotide
  Sense strand starting at position 3475 of SEQ ID NO: 1243348
aguccugacuucuugggaa

SEQ ID NO: 1410913 - RNA, 19 nt, Artificial Sequence
  Description of Artificial Sequence: Synthetic oligonucleotide
  Antisense strand to SEQ ID NO: 1410912
uucccaagaagucaggacu

SEQ ID NO: 1410914 - RNA, 19 nt, Artificial Sequence
  Description of Artificial Sequence: Synthetic oligonucleotide
  Sense strand starting at position 3477 of SEQ ID NO: 1243348
uccugacuucuugggaaug

SEQ ID NO: 1410915 - RNA, 19 nt, Artificial Sequence
  Description of Artificial Sequence: Synthetic oligonucleotide
  Antisense strand to SEQ ID NO: 1410914
cauucccaagaagucagga

SEQ ID NO: 1410916 - RNA, 19 nt, Artificial Sequence
  Description of Artificial Sequence: Synthetic oligonucleotide
  Sense strand starting at position 3656 of SEQ ID NO: 1243348
agaacuucugauuguucua

SEQ ID NO: 1410917 - RNA, 19 nt, Artificial Sequence
  Description of Artificial Sequence: Synthetic oligonucleotide
  Antisense strand to SEQ ID NO: 1410916
uagaacaaucagaaguucu

SEQ ID NO: 1410918 - RNA, 19 nt, Artificial Sequence
  Description of Artificial Sequence: Synthetic oligonucleotide
  Sense strand starting at position 3659 of SEQ ID NO: 1243348
acuucugauuguucuagag

SEQ ID NO: 1410919 - RNA, 19 nt, Artificial Sequence
  Description of Artificial Sequence: Synthetic oligonucleotide
  Antisense strand to SEQ ID NO: 1410918
cucuagaacaaucagaagu

SEQ ID NO: 1410920 - RNA, 19 nt, Artificial Sequence
  Description of Artificial Sequence: Synthetic oligonucleotide
  Sense strand starting at position 3663 of SEQ ID NO: 1243348
cugauuguucuagagaagu

SEQ ID NO: 1410921 - RNA, 19 nt, Artificial Sequence
  Description of Artificial Sequence: Synthetic oligonucleotide
  Antisense strand to SEQ ID NO: 1410920
acuucucuagaacaaucag

SEQ ID NO: 1410922 - RNA, 19 nt, Artificial Sequence
  Description of Artificial Sequence: Synthetic oligonucleotide
  Sense strand starting at position 3673 of SEQ ID NO: 1243348
uagagaaguucugcaaagu

SEQ ID NO: 1410923 - RNA, 19 nt, Artificial Sequence
  Description of Artificial Sequence: Synthetic oligonucleotide
  Antisense strand to SEQ ID NO: 1410922
acuuugcagaacuucucua

SEQ ID NO: 1410924 - RNA, 19 nt, Artificial Sequence
  Description of Artificial Sequence: Synthetic oligonucleotide
  Sense strand starting at position 3674 of SEQ ID NO: 1243348
agagaaguucugcaaaguu

SEQ ID NO: 1410925 - RNA, 19 nt, Artificial Sequence
  Description of Artificial Sequence: Synthetic oligonucleotide
  Antisense strand to SEQ ID NO: 1410924
aacuuugcagaacuucucu

SEQ ID NO: 1410926 - RNA, 19 nt, Artificial Sequence
  Description of Artificial Sequence: Synthetic oligonucleotide
  Sense strand starting at position 3785 of SEQ ID NO: 1243348
cccucagugcuauaaagaa

SEQ ID NO: 1410927 - RNA, 19 nt, Artificial Sequence
  Description of Artificial Sequence: Synthetic oligonucleotide
  Antisense strand to SEQ ID NO: 1410926
uucuuuauagcacugaggg

SEQ ID NO: 1410928 - RNA, 19 nt, Artificial Sequence
  Description of Artificial Sequence: Synthetic oligonucleotide
  Sense strand starting at position 9 of SEQ ID NO: 1243349
ugcuuuguugugcuuccaa

SEQ ID NO: 1410929 - RNA, 19 nt, Artificial Sequence
  Description of Artificial Sequence: Synthetic oligonucleotide
  Antisense strand to SEQ ID NO: 1410928
uuggaagcacaacaaagca

SEQ ID NO: 1410930 - RNA, 19 nt, Artificial Sequence
  Description of Artificial Sequence: Synthetic oligonucleotide
  Sense strand starting at position 147 of SEQ ID NO: 1243349
cuacucauccuuuagaugu

SEQ ID NO: 1410931 - RNA, 19 nt, Artificial Sequence
  Description of Artificial Sequence: Synthetic oligonucleotide
  Antisense strand to SEQ ID NO: 1410930
acaucuaaaggaugaguag

SEQ ID NO: 1410932 - RNA, 19 nt, Artificial Sequence
  Description of Artificial Sequence: Synthetic oligonucleotide
  Sense strand starting at position 274 of SEQ ID NO: 1243349
aguguaacacuugaugugu

SEQ ID NO: 1410933 - RNA, 19 nt, Artificial Sequence
  Description of Artificial Sequence: Synthetic oligonucleotide
  Antisense strand to SEQ ID NO: 1410932
acacaucaaguguuacacu

SEQ ID NO: 1410934 - RNA, 19 nt, Artificial Sequence
  Description of Artificial Sequence: Synthetic oligonucleotide
  Sense strand starting at position 332 of SEQ ID NO: 1243349
aagaaagguccaugucucu

SEQ ID NO: 1410935 - RNA, 19 nt, Artificial Sequence
  Description of Artificial Sequence: Synthetic oligonucleotide
  Antisense strand to SEQ ID NO: 1410934
agagacauggaccuuucuu

SEQ ID NO: 1410936 - RNA, 19 nt, Artificial Sequence
  Description of Artificial Sequence: Synthetic oligonucleotide
  Sense strand starting at position 382 of SEQ ID NO: 1243349
gcaauaaauguugguacaa

SEQ ID NO: 1410937 - RNA, 19 nt, Artificial Sequence
  Description of Artificial Sequence: Synthetic oligonucleotide
  Antisense strand to SEQ ID NO: 1410936
uuguaccaacauuuauugc

SEQ ID NO: 1410938 - RNA, 19 nt, Artificial Sequence
  Description of Artificial Sequence: Synthetic oligonucleotide
  Sense strand starting at position 400 of SEQ ID NO: 1243349
acaaauaaaugugggauuu

SEQ ID NO: 1410939 - RNA, 19 nt, Artificial Sequence
  Description of Artificial Sequence: Synthetic oligonucleotide
  Antisense strand to SEQ ID NO: 1410938
aaaucccacauuuauuugu

SEQ ID NO: 1410940 - RNA, 19 nt, Artificial Sequence
  Description of Artificial Sequence: Synthetic oligonucleotide
  Sense strand starting at position 523 of SEQ ID NO: 1243349
ugucaacuauugcccagaa

SEQ ID NO: 1410941 - RNA, 19 nt, Artificial Sequence
  Description of Artificial Sequence: Synthetic oligonucleotide
  Antisense strand to SEQ ID NO: 1410940
uucugggcaauaguugaca

SEQ ID NO: 1410942 - RNA, 19 nt, Artificial Sequence
  Description of Artificial Sequence: Synthetic oligonucleotide
  Sense strand starting at position 524 of SEQ ID NO: 1243349
gucaacuauugcccagaau

SEQ ID NO: 1410943 - RNA, 19 nt, Artificial Sequence
  Description of Artificial Sequence: Synthetic oligonucleotide
  Antisense strand to SEQ ID NO: 1410942
auucugggcaauaguugac

SEQ ID NO: 1410944 - RNA, 19 nt, Artificial Sequence
  Description of Artificial Sequence: Synthetic oligonucleotide
  Sense strand starting at position 737 of SEQ ID NO: 1243349
cuaugauaguacuacauuu

SEQ ID NO: 1410945 - RNA, 19 nt, Artificial Sequence
  Description of Artificial Sequence: Synthetic oligonucleotide
  Antisense strand to SEQ ID NO: 1410944
aaauguaguacuaucauag

SEQ ID NO: 1410946 - RNA, 19 nt, Artificial Sequence
  Description of Artificial Sequence: Synthetic oligonucleotide
  Sense strand starting at position 1134 of SEQ ID NO: 1243349
gauauuguggcugagcuca

SEQ ID NO: 1410947 - RNA, 19 nt, Artificial Sequence
  Description of Artificial Sequence: Synthetic oligonucleotide
  Antisense strand to SEQ ID NO: 1410946
ugagcucagccacaauauc

SEQ ID NO: 1410948 - RNA, 19 nt, Artificial Sequence
  Description of Artificial Sequence: Synthetic oligonucleotide
  Sense strand starting at position 1147 of SEQ ID NO: 1243349
agcucauggccacaggaau

SEQ ID NO: 1410949 - RNA, 19 nt, Artificial Sequence
  Description of Artificial Sequence: Synthetic oligonucleotide
  Antisense strand to SEQ ID NO: 1410948
auuccuguggccaugagcu

SEQ ID NO: 1410950 - RNA, 19 nt, Artificial Sequence
  Description of Artificial Sequence: Synthetic oligonucleotide
  Sense strand starting at position 1224 of SEQ ID NO: 1243349
cuuagacucuguccaugaa

SEQ ID NO: 1410951 - RNA, 19 nt, Artificial Sequence
  Description of Artificial Sequence: Synthetic oligonucleotide
  Antisense strand to SEQ ID NO: 1410950
uucauggacagagucuaag

SEQ ID NO: 1410952 - RNA, 19 nt, Artificial Sequence
  Description of Artificial Sequence: Synthetic oligonucleotide
  Sense strand starting at position 1225 of SEQ ID NO: 1243349
uuagacucuguccaugaau

SEQ ID NO: 1410953 - RNA, 19 nt, Artificial Sequence
  Description of Artificial Sequence: Synthetic oligonucleotide
  Antisense strand to SEQ ID NO: 1410952
auucauggacagagucuaa

SEQ ID NO: 1410954 - RNA, 19 nt, Artificial Sequence
  Description of Artificial Sequence: Synthetic oligonucleotide
  Sense strand starting at position 1227 of SEQ ID NO: 1243349
agacucuguccaugaauua

SEQ ID NO: 1410955 - RNA, 19 nt, Artificial Sequence
  Description of Artificial Sequence: Synthetic oligonucleotide
  Antisense strand to SEQ ID NO: 1410954
uaauucauggacagagucu

SEQ ID NO: 1410956 - RNA, 19 nt, Artificial Sequence
  Description of Artificial Sequence: Synthetic oligonucleotide
  Sense strand starting at position 1273 of SEQ ID NO: 1243349
uucugugucaguuagauga

SEQ ID NO: 1410957 - RNA, 19 nt, Artificial Sequence
  Description of Artificial Sequence: Synthetic oligonucleotide
  Antisense strand to SEQ ID NO: 1410956
ucaucuaacugacacagaa

SEQ ID NO: 1410958 - RNA, 19 nt, Artificial Sequence
  Description of Artificial Sequence: Synthetic oligonucleotide
  Sense strand starting at position 1277 of SEQ ID NO: 1243349
gugucaguuagaugagauc

SEQ ID NO: 1410959 - RNA, 19 nt, Artificial Sequence
  Description of Artificial Sequence: Synthetic oligonucleotide
  Antisense strand to SEQ ID NO: 1410958
gaucucaucuaacugacac

SEQ ID NO: 1410960 - RNA, 19 nt, Artificial Sequence
  Description of Artificial Sequence: Synthetic oligonucleotide
  Sense strand starting at position 1286 of SEQ ID NO: 1243349
agaugagauccaggcguaa

SEQ ID NO: 1410961 - RNA, 19 nt, Artificial Sequence
  Description of Artificial Sequence: Synthetic oligonucleotide
  Antisense strand to SEQ ID NO: 1410960
uuacgccuggaucucaucu

SEQ ID NO: 1410962 - RNA, 19 nt, Artificial Sequence
  Description of Artificial Sequence: Synthetic oligonucleotide
  Sense strand starting at position 1288 of SEQ ID NO: 1243349
augagauccaggcguaaag

SEQ ID NO: 1410963 - RNA, 19 nt, Artificial Sequence
  Description of Artificial Sequence: Synthetic oligonucleotide
  Antisense strand to SEQ ID NO: 1410962
cuuuacgccuggaucucau

SEQ ID NO: 1410964 - RNA, 19 nt, Artificial Sequence
  Description of Artificial Sequence: Synthetic oligonucleotide
  Sense strand starting at position 1290 of SEQ ID NO: 1243349
gagauccaggcguaaaguu

SEQ ID NO: 1410965 - RNA, 19 nt, Artificial Sequence
  Description of Artificial Sequence: Synthetic oligonucleotide
  Antisense strand to SEQ ID NO: 1410964
aacuuuacgccuggaucuc

SEQ ID NO: 1410966 - RNA, 19 nt, Artificial Sequence
  Description of Artificial Sequence: Synthetic oligonucleotide
  Sense strand starting at position 1324 of SEQ ID NO: 1243349
acacguaccagugaagacu

SEQ ID NO: 1410967 - RNA, 19 nt, Artificial Sequence
  Description of Artificial Sequence: Synthetic oligonucleotide
  Antisense strand to SEQ ID NO: 1410966
agucuucacugguacgugu

SEQ ID NO: 1410968 - RNA, 19 nt, Artificial Sequence
  Description of Artificial Sequence: Synthetic oligonucleotide
  Sense strand starting at position 1342 of SEQ ID NO: 1243349
uuguauuugccuuguaguu

SEQ ID NO: 1410969 - RNA, 19 nt, Artificial Sequence
  Description of Artificial Sequence: Synthetic oligonucleotide
  Antisense strand to SEQ ID NO: 1410968
aacuacaaggcaaauacaa

SEQ ID NO: 1410970 - RNA, 19 nt, Artificial Sequence
  Description of Artificial Sequence: Synthetic oligonucleotide
  Sense strand starting at position 1404 of SEQ ID NO: 1243349
aaugcuuauguggauacau

SEQ ID NO: 1410971 - RNA, 19 nt, Artificial Sequence
  Description of Artificial Sequence: Synthetic oligonucleotide
  Antisense strand to SEQ ID NO: 1410970
auguauccacauaagcauu

SEQ ID NO: 1410972 - RNA, 19 nt, Artificial Sequence
  Description of Artificial Sequence: Synthetic oligonucleotide
  Sense strand starting at position 1431 of SEQ ID NO: 1243349
guuaucucuggguaacaca

SEQ ID NO: 1410973 - RNA, 19 nt, Artificial Sequence
  Description of Artificial Sequence: Synthetic oligonucleotide
  Antisense strand to SEQ ID NO: 1410972
uguguuacccagagauaac

SEQ ID NO: 1410974 - RNA, 19 nt, Artificial Sequence
  Description of Artificial Sequence: Synthetic oligonucleotide
  Sense strand starting at position 1521 of SEQ ID NO: 1243349
aaauguuuggcucaauguc

SEQ ID NO: 1410975 - RNA, 19 nt, Artificial Sequence
  Description of Artificial Sequence: Synthetic oligonucleotide
  Antisense strand to SEQ ID NO: 1410974
gacauugagccaaacauuu

SEQ ID NO: 1410976 - RNA, 19 nt, Artificial Sequence
  Description of Artificial Sequence: Synthetic oligonucleotide
  Sense strand starting at position 1784 of SEQ ID NO: 1243349
ggugucuuaccuuauucca

SEQ ID NO: 1410977 - RNA, 19 nt, Artificial Sequence
  Description of Artificial Sequence: Synthetic oligonucleotide
  Antisense strand to SEQ ID NO: 1410976
uggaauaagguaagacacc

SEQ ID NO: 1410978 - RNA, 19 nt, Artificial Sequence
  Description of Artificial Sequence: Synthetic oligonucleotide
  Sense strand starting at position 1786 of SEQ ID NO: 1243349
ugucuuaccuuauuccaga

SEQ ID NO: 1410979 - RNA, 19 nt, Artificial Sequence
  Description of Artificial Sequence: Synthetic oligonucleotide
  Antisense strand to SEQ ID NO: 1410978
ucuggaauaagguaagaca

SEQ ID NO: 1410980 - RNA, 19 nt, Artificial Sequence
  Description of Artificial Sequence: Synthetic oligonucleotide
  Sense strand starting at position 1787 of SEQ ID NO: 1243349
gucuuaccuuauuccagau

SEQ ID NO: 1410981 - RNA, 19 nt, Artificial Sequence
  Description of Artificial Sequence: Synthetic oligonucleotide
  Antisense strand to SEQ ID NO: 1410980
aucuggaauaagguaagac

SEQ ID NO: 1410982 - RNA, 19 nt, Artificial Sequence
  Description of Artificial Sequence: Synthetic oligonucleotide
  Sense strand starting at position 2011 of SEQ ID NO: 1243349
gauuaaaggaagcgugaau

SEQ ID NO: 1410983 - RNA, 19 nt, Artificial Sequence
  Description of Artificial Sequence: Synthetic oligonucleotide
  Antisense strand to SEQ ID NO: 1410982
auucacgcuuccuuuaauc

SEQ ID NO: 1410984 - RNA, 19 nt, Artificial Sequence
  Description of Artificial Sequence: Synthetic oligonucleotide
  Sense strand starting at position 3014 of SEQ ID NO: 1243349
gagagaaucuugcuauguu

SEQ ID NO: 1410985 - RNA, 19 nt, Artificial Sequence
  Description of Artificial Sequence: Synthetic oligonucleotide
  Antisense strand to SEQ ID NO: 1410984
aacauagcaagauucucuc

SEQ ID NO: 1410986 - RNA, 19 nt, Artificial Sequence
  Description of Artificial Sequence: Synthetic oligonucleotide
  Sense strand starting at position 3437 of SEQ ID NO: 1243349
ccaacaacccucgaaguua

SEQ ID NO: 1410987 - RNA, 19 nt, Artificial Sequence
  Description of Artificial Sequence: Synthetic oligonucleotide
  Antisense strand to SEQ ID NO: 1410986
uaacuucgaggguuguugg

SEQ ID NO: 1410988 - RNA, 19 nt, Artificial Sequence
  Description of Artificial Sequence: Synthetic oligonucleotide
  Sense strand starting at position 3470 of SEQ ID NO: 1243349
uaucuuacugacgagguaa

SEQ ID NO: 1410989 - RNA, 19 nt, Artificial Sequence
  Description of Artificial Sequence: Synthetic oligonucleotide
  Antisense strand to SEQ ID NO: 1410988
uuaccucgucaguaagaua

SEQ ID NO: 1410990 - RNA, 19 nt, Artificial Sequence
  Description of Artificial Sequence: Synthetic oligonucleotide
  Sense strand starting at position 3505 of SEQ ID NO: 1243349
gagucaucggcccaggauc

SEQ ID NO: 1410991 - RNA, 19 nt, Artificial Sequence
  Description of Artificial Sequence: Synthetic oligonucleotide
  Antisense strand to SEQ ID NO: 1410990
gauccugggccgaugacuc

SEQ ID NO: 1410992 - RNA, 19 nt, Artificial Sequence
  Description of Artificial Sequence: Synthetic oligonucleotide
  Sense strand starting at position 3598 of SEQ ID NO: 1243349
gguggcuugacuggauaaa

SEQ ID NO: 1410993 - RNA, 19 nt, Artificial Sequence
  Description of Artificial Sequence: Synthetic oligonucleotide
  Antisense strand to SEQ ID NO: 1410992
uuuauccagucaagccacc

SEQ ID NO: 1410994 - RNA, 19 nt, Artificial Sequence
  Description of Artificial Sequence: Synthetic oligonucleotide
  Sense strand starting at position 3599 of SEQ ID NO: 1243349
guggcuugacuggauaaag

SEQ ID NO: 1410995 - RNA, 19 nt, Artificial Sequence
  Description of Artificial Sequence: Synthetic oligonucleotide
  Antisense strand to SEQ ID NO: 1410994
cuuuauccagucaagccac

SEQ ID NO: 1410996 - RNA, 19 nt, Artificial Sequence
  Description of Artificial Sequence: Synthetic oligonucleotide
  Sense strand starting at position 3743 of SEQ ID NO: 1243349
gacagaaggccaugaaucu

SEQ ID NO: 1410997 - RNA, 19 nt, Artificial Sequence
  Description of Artificial Sequence: Synthetic oligonucleotide
  Antisense strand to SEQ ID NO: 1410996
agauucauggccuucuguc

SEQ ID NO: 1410998 - RNA, 19 nt, Artificial Sequence
  Description of Artificial Sequence: Synthetic oligonucleotide
  Sense strand starting at position 3749 of SEQ ID NO: 1243349
aggccaugaaucugugauc

SEQ ID NO: 1410999 - RNA, 19 nt, Artificial Sequence
  Description of Artificial Sequence: Synthetic oligonucleotide
  Antisense strand to SEQ ID NO: 1410998
gaucacagauucauggccu

SEQ ID NO: 1411000 - RNA, 19 nt, Artificial Sequence
  Description of Artificial Sequence: Synthetic oligonucleotide
  Sense strand starting at position 3750 of SEQ ID NO: 1243349
ggccaugaaucugugaucu

SEQ ID NO: 1411001 - RNA, 19 nt, Artificial Sequence
  Description of Artificial Sequence: Synthetic oligonucleotide
  Antisense strand to SEQ ID NO: 1411000
agaucacagauucauggcc

SEQ ID NO: 1411002 - RNA, 19 nt, Artificial Sequence
  Description of Artificial Sequence: Synthetic oligonucleotide
  Sense strand starting at position 3758 of SEQ ID NO: 1243349
aucugugaucugcagcaga

SEQ ID NO: 1411003 - RNA, 19 nt, Artificial Sequence
  Description of Artificial Sequence: Synthetic oligonucleotide
  Antisense strand to SEQ ID NO: 1411002
ucugcugcagaucacagau

SEQ ID NO: 1411004 - RNA, 19 nt, Artificial Sequence
  Description of Artificial Sequence: Synthetic oligonucleotide
  Sense strand starting at position 3843 of SEQ ID NO: 1243349
aguccugacuucuugggaa

SEQ ID NO: 1411005 - RNA, 19 nt, Artificial Sequence
  Description of Artificial Sequence: Synthetic oligonucleotide
  Antisense strand to SEQ ID NO: 1411004
uucccaagaagucaggacu

SEQ ID NO: 1411006 - RNA, 19 nt, Artificial Sequence
  Description of Artificial Sequence: Synthetic oligonucleotide
  Sense strand starting at position 3845 of SEQ ID NO: 1243349
uccugacuucuugggaaug

SEQ ID NO: 1411007 - RNA, 19 nt, Artificial Sequence
  Description of Artificial Sequence: Synthetic oligonucleotide
  Antisense strand to SEQ ID NO: 1411006
cauucccaagaagucagga

SEQ ID NO: 1411008 - RNA, 19 nt, Artificial Sequence
  Description of Artificial Sequence: Synthetic oligonucleotide
  Sense strand starting at position 149 of SEQ ID NO: 1243350
agguguucucacugagggu

SEQ ID NO: 1411009 - RNA, 19 nt, Artificial Sequence
  Description of Artificial Sequence: Synthetic oligonucleotide
  Antisense strand to SEQ ID NO: 1411008
acccucagugagaacaccu

SEQ ID NO: 1411010 - RNA, 19 nt, Artificial Sequence
  Description of Artificial Sequence: Synthetic oligonucleotide
  Sense strand starting at position 525 of SEQ ID NO: 1243350
ccuuguuucuggcugaaga

SEQ ID NO: 1411011 - RNA, 19 nt, Artificial Sequence
  Description of Artificial Sequence: Synthetic oligonucleotide
  Antisense strand to SEQ ID NO: 1411010
ucuucagccagaaacaagg

SEQ ID NO: 1411012 - RNA, 19 nt, Artificial Sequence
  Description of Artificial Sequence: Synthetic oligonucleotide
  Sense strand starting at position 527 of SEQ ID NO: 1243350
uuguuucuggcugaagauu

SEQ ID NO: 1411013 - RNA, 19 nt, Artificial Sequence
  Description of Artificial Sequence: Synthetic oligonucleotide
  Antisense strand to SEQ ID NO: 1411012
aaucuucagccagaaacaa

SEQ ID NO: 1411014 - RNA, 19 nt, Artificial Sequence
  Description of Artificial Sequence: Synthetic oligonucleotide
  Sense strand starting at position 541 of SEQ ID NO: 1243350
agauuaacgagccaaguuu

SEQ ID NO: 1411015 - RNA, 19 nt, Artificial Sequence
  Description of Artificial Sequence: Synthetic oligonucleotide
  Antisense strand to SEQ ID NO: 1411014
aaacuuggcucguuaaucu

SEQ ID NO: 1411016 - RNA, 19 nt, Artificial Sequence
  Description of Artificial Sequence: Synthetic oligonucleotide
  Sense strand starting at position 549 of SEQ ID NO: 1243350
gagccaaguuucccugauc

SEQ ID NO: 1411017 - RNA, 19 nt, Artificial Sequence
  Description of Artificial Sequence: Synthetic oligonucleotide
  Antisense strand to SEQ ID NO: 1411016
gaucagggaaacuuggcuc

SEQ ID NO: 1411018 - RNA, 19 nt, Artificial Sequence
  Description of Artificial Sequence: Synthetic oligonucleotide
  Sense strand starting at position 552 of SEQ ID NO: 1243350
ccaaguuucccugaucguu

SEQ ID NO: 1411019 - RNA, 19 nt, Artificial Sequence
  Description of Artificial Sequence: Synthetic oligonucleotide
  Antisense strand to SEQ ID NO: 1411018
aacgaucagggaaacuugg

SEQ ID NO: 1411020 - RNA, 19 nt, Artificial Sequence
  Description of Artificial Sequence: Synthetic oligonucleotide
  Sense strand starting at position 1532 of SEQ ID NO: 1243350
guggauuuggcuugaccuu

SEQ ID NO: 1411021 - RNA, 19 nt, Artificial Sequence
  Description of Artificial Sequence: Synthetic oligonucleotide
  Antisense strand to SEQ ID NO: 1411020
aaggucaagccaaauccac

SEQ ID NO: 1411022 - RNA, 19 nt, Artificial Sequence
  Description of Artificial Sequence: Synthetic oligonucleotide
  Sense strand starting at position 1617 of SEQ ID NO: 1243350
gaaugucgacccugaugaa

SEQ ID NO: 1411023 - RNA, 19 nt, Artificial Sequence
  Description of Artificial Sequence: Synthetic oligonucleotide
  Antisense strand to SEQ ID NO: 1411022
uucaucagggucgacauuc

SEQ ID NO: 1411024 - RNA, 19 nt, Artificial Sequence
  Description of Artificial Sequence: Synthetic oligonucleotide
  Sense strand starting at position 1697 of SEQ ID NO: 1243350
cugggucucccugagaacu

SEQ ID NO: 1411025 - RNA, 19 nt, Artificial Sequence
  Description of Artificial Sequence: Synthetic oligonucleotide
  Antisense strand to SEQ ID NO: 1411024
aguucucagggagacccag

SEQ ID NO: 1411026 - RNA, 19 nt, Artificial Sequence
  Description of Artificial Sequence: Synthetic oligonucleotide
  Sense strand starting at position 2111 of SEQ ID NO: 1243350
gcugaaucaggucauauca

SEQ ID NO: 1411027 - RNA, 19 nt, Artificial Sequence
  Description of Artificial Sequence: Synthetic oligonucleotide
  Antisense strand to SEQ ID NO: 1411026
ugauaugaccugauucagc

SEQ ID NO: 1411028 - RNA, 19 nt, Artificial Sequence
  Description of Artificial Sequence: Synthetic oligonucleotide
  Sense strand starting at position 2119 of SEQ ID NO: 1243350
aggucauaucaaggcugaa

SEQ ID NO: 1411029 - RNA, 19 nt, Artificial Sequence
  Description of Artificial Sequence: Synthetic oligonucleotide
  Antisense strand to SEQ ID NO: 1411028
uucagccuugauaugaccu

SEQ ID NO: 1411030 - RNA, 19 nt, Artificial Sequence
  Description of Artificial Sequence: Synthetic oligonucleotide
  Sense strand starting at position 2712 of SEQ ID NO: 1243350
aggucugucuucccaacaa

SEQ ID NO: 1411031 - RNA, 19 nt, Artificial Sequence
  Description of Artificial Sequence: Synthetic oligonucleotide
  Antisense strand to SEQ ID NO: 1411030
uuguugggaagacagaccu

SEQ ID NO: 1411032 - RNA, 19 nt, Artificial Sequence
  Description of Artificial Sequence: Synthetic oligonucleotide
  Sense strand starting at position 2731 of SEQ ID NO: 1243350
acuagugucuccucaagag

SEQ ID NO: 1411033 - RNA, 19 nt, Artificial Sequence
  Description of Artificial Sequence: Synthetic oligonucleotide
  Antisense strand to SEQ ID NO: 1411032
cucuugaggagacacuagu

SEQ ID NO: 1411034 - RNA, 19 nt, Artificial Sequence
  Description of Artificial Sequence: Synthetic oligonucleotide
  Sense strand starting at position 2963 of SEQ ID NO: 1243350
aagggagaggcugguuaau

SEQ ID NO: 1411035 - RNA, 19 nt, Artificial Sequence
  Description of Artificial Sequence: Synthetic oligonucleotide
  Antisense strand to SEQ ID NO: 1411034
auuaaccagccucucccuu

SEQ ID NO: 1411036 - RNA, 19 nt, Artificial Sequence
  Description of Artificial Sequence: Synthetic oligonucleotide
  Sense strand starting at position 2965 of SEQ ID NO: 1243350
gggagaggcugguuaauau

SEQ ID NO: 1411037 - RNA, 19 nt, Artificial Sequence
  Description of Artificial Sequence: Synthetic oligonucleotide
  Antisense strand to SEQ ID NO: 1411036
auauuaaccagccucuccc

SEQ ID NO: 1411038 - RNA, 19 nt, Artificial Sequence
  Description of Artificial Sequence: Synthetic oligonucleotide
  Sense strand starting at position 2975 of SEQ ID NO: 1243350
gguuaauaucuguaugucu

SEQ ID NO: 1411039 - RNA, 19 nt, Artificial Sequence
  Description of Artificial Sequence: Synthetic oligonucleotide
  Antisense strand to SEQ ID NO: 1411038
agacauacagauauuaacc

SEQ ID NO: 1411040 - RNA, 19 nt, Artificial Sequence
  Description of Artificial Sequence: Synthetic oligonucleotide
  Sense strand starting at position 2977 of SEQ ID NO: 1243350
uuaauaucuguaugucuac

SEQ ID NO: 1411041 - RNA, 19 nt, Artificial Sequence
  Description of Artificial Sequence: Synthetic oligonucleotide
  Antisense strand to SEQ ID NO: 1411040
guagacauacagauauuaa

SEQ ID NO: 1411042 - RNA, 19 nt, Artificial Sequence
  Description of Artificial Sequence: Synthetic oligonucleotide
  Sense strand starting at position 2988 of SEQ ID NO: 1243350
augucuaccuuucuagaag

SEQ ID NO: 1411043 - RNA, 19 nt, Artificial Sequence
  Description of Artificial Sequence: Synthetic oligonucleotide
  Antisense strand to SEQ ID NO: 1411042
cuucuagaaagguagacau

SEQ ID NO: 1411044 - RNA, 19 nt, Artificial Sequence
  Description of Artificial Sequence: Synthetic oligonucleotide
  Sense strand starting at position 3043 of SEQ ID NO: 1243350
gaaaguccugccugauuau

SEQ ID NO: 1411045 - RNA, 19 nt, Artificial Sequence
  Description of Artificial Sequence: Synthetic oligonucleotide
  Antisense strand to SEQ ID NO: 1411044
auaaucaggcaggacuuuc

SEQ ID NO: 1411046 - RNA, 19 nt, Artificial Sequence
  Description of Artificial Sequence: Synthetic oligonucleotide
  Sense strand starting at position 3068 of SEQ ID NO: 1243350
gauggucaucccggagaug

SEQ ID NO: 1411047 - RNA, 19 nt, Artificial Sequence
  Description of Artificial Sequence: Synthetic oligonucleotide
  Antisense strand to SEQ ID NO: 1411046
caucuccgggaugaccauc

SEQ ID NO: 1411048 - RNA, 19 nt, Artificial Sequence
  Description of Artificial Sequence: Synthetic oligonucleotide
  Sense strand starting at position 3099 of SEQ ID NO: 1243350
aaaugcuuugaguguaaua

SEQ ID NO: 1411049 - RNA, 19 nt, Artificial Sequence
  Description of Artificial Sequence: Synthetic oligonucleotide
  Antisense strand to SEQ ID NO: 1411048
uauuacacucaaagcauuu

SEQ ID NO: 1411050 - RNA, 19 nt, Artificial Sequence
  Description of Artificial Sequence: Synthetic oligonucleotide
  Sense strand starting at position 3101 of SEQ ID NO: 1243350
augcuuugaguguaauaug

SEQ ID NO: 1411051 - RNA, 19 nt, Artificial Sequence
  Description of Artificial Sequence: Synthetic oligonucleotide
  Antisense strand to SEQ ID NO: 1411050
cauauuacacucaaagcau

SEQ ID NO: 1411052 - RNA, 19 nt, Artificial Sequence
  Description of Artificial Sequence: Synthetic oligonucleotide
  Sense strand starting at position 3106 of SEQ ID NO: 1243350
uugaguguaauaugacaga

SEQ ID NO: 1411053 - RNA, 19 nt, Artificial Sequence
  Description of Artificial Sequence: Synthetic oligonucleotide
  Antisense strand to SEQ ID NO: 1411052
ucugucauauuacacucaa

SEQ ID NO: 1411054 - RNA, 19 nt, Artificial Sequence
  Description of Artificial Sequence: Synthetic oligonucleotide
  Sense strand starting at position 3133 of SEQ ID NO: 1243350
gaaggaguuccuuagcuug

SEQ ID NO: 1411055 - RNA, 19 nt, Artificial Sequence
  Description of Artificial Sequence: Synthetic oligonucleotide
  Antisense strand to SEQ ID NO: 1411054
caagcuaaggaacuccuuc

SEQ ID NO: 1411056 - RNA, 19 nt, Artificial Sequence
  Description of Artificial Sequence: Synthetic oligonucleotide
  Sense strand starting at position 3178 of SEQ ID NO: 1243350
ugagaauuugugugcaacg

SEQ ID NO: 1411057 - RNA, 19 nt, Artificial Sequence
  Description of Artificial Sequence: Synthetic oligonucleotide
  Antisense strand to SEQ ID NO: 1411056
cguugcacacaaauucuca

SEQ ID NO: 1411058 - RNA, 19 nt, Artificial Sequence
  Description of Artificial Sequence: Synthetic oligonucleotide
  Sense strand starting at position 3209 of SEQ ID NO: 1243350
aggugauuccaguauggac

SEQ ID NO: 1411059 - RNA, 19 nt, Artificial Sequence
  Description of Artificial Sequence: Synthetic oligonucleotide
  Antisense strand to SEQ ID NO: 1411058
guccauacuggaaucaccu

SEQ ID NO: 1411060 - RNA, 19 nt, Artificial Sequence
  Description of Artificial Sequence: Synthetic oligonucleotide
  Sense strand starting at position 3563 of SEQ ID NO: 1243350
gcguaagggugugucauuu

SEQ ID NO: 1411061 - RNA, 19 nt, Artificial Sequence
  Description of Artificial Sequence: Synthetic oligonucleotide
  Antisense strand to SEQ ID NO: 1411060
aaaugacacacccuuacgc

SEQ ID NO: 1411062 - RNA, 19 nt, Artificial Sequence
  Description of Artificial Sequence: Synthetic oligonucleotide
  Sense strand starting at position 3567 of SEQ ID NO: 1243350
aagggugugucauuuguca

SEQ ID NO: 1411063 - RNA, 19 nt, Artificial Sequence
  Description of Artificial Sequence: Synthetic oligonucleotide
  Antisense strand to SEQ ID NO: 1411062
ugacaaaugacacacccuu

SEQ ID NO: 1411064 - RNA, 19 nt, Artificial Sequence
  Description of Artificial Sequence: Synthetic oligonucleotide
  Sense strand starting at position 3569 of SEQ ID NO: 1243350
gggugugucauuugucagg

SEQ ID NO: 1411065 - RNA, 19 nt, Artificial Sequence
  Description of Artificial Sequence: Synthetic oligonucleotide
  Antisense strand to SEQ ID NO: 1411064
ccugacaaaugacacaccc

SEQ ID NO: 1411066 - RNA, 19 nt, Artificial Sequence
  Description of Artificial Sequence: Synthetic oligonucleotide
  Sense strand starting at position 3571 of SEQ ID NO: 1243350
gugugucauuugucagguu

SEQ ID NO: 1411067 - RNA, 19 nt, Artificial Sequence
  Description of Artificial Sequence: Synthetic oligonucleotide
  Antisense strand to SEQ ID NO: 1411066
aaccugacaaaugacacac

SEQ ID NO: 1411068 - RNA, 19 nt, Artificial Sequence
  Description of Artificial Sequence: Synthetic oligonucleotide
  Sense strand starting at position 3603 of SEQ ID NO: 1243350
guuggagccucaucccaaa

SEQ ID NO: 1411069 - RNA, 19 nt, Artificial Sequence
  Description of Artificial Sequence: Synthetic oligonucleotide
  Antisense strand to SEQ ID NO: 1411068
uuugggaugaggcuccaac

SEQ ID NO: 1411070 - RNA, 19 nt, Artificial Sequence
  Description of Artificial Sequence: Synthetic oligonucleotide
  Sense strand starting at position 3687 of SEQ ID NO: 1243350
ggguaucuauucccugauu

SEQ ID NO: 1411071 - RNA, 19 nt, Artificial Sequence
  Description of Artificial Sequence: Synthetic oligonucleotide
  Antisense strand to SEQ ID NO: 1411070
aaucagggaauagauaccc

SEQ ID NO: 1411072 - RNA, 19 nt, Artificial Sequence
  Description of Artificial Sequence: Synthetic oligonucleotide
  Sense strand starting at position 3692 of SEQ ID NO: 1243350
ucuauucccugauuugugu

SEQ ID NO: 1411073 - RNA, 19 nt, Artificial Sequence
  Description of Artificial Sequence: Synthetic oligonucleotide
  Antisense strand to SEQ ID NO: 1411072
acacaaaucagggaauaga

SEQ ID NO: 1411074 - RNA, 19 nt, Artificial Sequence
  Description of Artificial Sequence: Synthetic oligonucleotide
  Sense strand starting at position 3700 of SEQ ID NO: 1243350
cugauuugugucugucacu

SEQ ID NO: 1411075 - RNA, 19 nt, Artificial Sequence
  Description of Artificial Sequence: Synthetic oligonucleotide
  Antisense strand to SEQ ID NO: 1411074
agugacagacacaaaucag

SEQ ID NO: 1411076 - RNA, 19 nt, Artificial Sequence
  Description of Artificial Sequence: Synthetic oligonucleotide
  Sense strand starting at position 3826 of SEQ ID NO: 1243350
aagucaggguaucuggaaa

SEQ ID NO: 1411077 - RNA, 19 nt, Artificial Sequence
  Description of Artificial Sequence: Synthetic oligonucleotide
  Antisense strand to SEQ ID NO: 1411076
uuuccagauacccugacuu

SEQ ID NO: 1411078 - RNA, 19 nt, Artificial Sequence
  Description of Artificial Sequence: Synthetic oligonucleotide
  Sense strand starting at position 3910 of SEQ ID NO: 1243350
gcuucagagggugaugagu

SEQ ID NO: 1411079 - RNA, 19 nt, Artificial Sequence
  Description of Artificial Sequence: Synthetic oligonucleotide
  Antisense strand to SEQ ID NO: 1411078
acucaucacccucugaagc

SEQ ID NO: 1411080 - RNA, 19 nt, Artificial Sequence
  Description of Artificial Sequence: Synthetic oligonucleotide
  Sense strand starting at position 3918 of SEQ ID NO: 1243350
gggugaugaguuuaaagug

SEQ ID NO: 1411081 - RNA, 19 nt, Artificial Sequence
  Description of Artificial Sequence: Synthetic oligonucleotide
  Antisense strand to SEQ ID NO: 1411080
cacuuuaaacucaucaccc

SEQ ID NO: 1411082 - RNA, 19 nt, Artificial Sequence
  Description of Artificial Sequence: Synthetic oligonucleotide
  Sense strand starting at position 3923 of SEQ ID NO: 1243350
augaguuuaaagugccuga

SEQ ID NO: 1411083 - RNA, 19 nt, Artificial Sequence
  Description of Artificial Sequence: Synthetic oligonucleotide
  Antisense strand to SEQ ID NO: 1411082
ucaggcacuuuaaacucau

SEQ ID NO: 1411084 - RNA, 19 nt, Artificial Sequence
  Description of Artificial Sequence: Synthetic oligonucleotide
  Sense strand starting at position 3927 of SEQ ID NO: 1243350
guuuaaagugccugagaga

SEQ ID NO: 1411085 - RNA, 19 nt, Artificial Sequence
  Description of Artificial Sequence: Synthetic oligonucleotide
  Antisense strand to SEQ ID NO: 1411084
ucucucaggcacuuuaaac

SEQ ID NO: 1411086 - RNA, 19 nt, Artificial Sequence
  Description of Artificial Sequence: Synthetic oligonucleotide
  Sense strand starting at position 3941 of SEQ ID NO: 1243350
agagaaauccagugccaag

SEQ ID NO: 1411087 - RNA, 19 nt, Artificial Sequence
  Description of Artificial Sequence: Synthetic oligonucleotide
  Antisense strand to SEQ ID NO: 1411086
cuuggcacuggauuucucu

SEQ ID NO: 1411088 - RNA, 19 nt, Artificial Sequence
  Description of Artificial Sequence: Synthetic oligonucleotide
  Sense strand starting at position 250 of SEQ ID NO: 1243351
aaagcaaguguccagagua

SEQ ID NO: 1411089 - RNA, 19 nt, Artificial Sequence
  Description of Artificial Sequence: Synthetic oligonucleotide
  Antisense strand to SEQ ID NO: 1411088
uacucuggacacuugcuuu

SEQ ID NO: 1411090 - RNA, 19 nt, Artificial Sequence
  Description of Artificial Sequence: Synthetic oligonucleotide
  Sense strand starting at position 605 of SEQ ID NO: 1243351
cuauguuauucuuccugga

SEQ ID NO: 1411091 - RNA, 19 nt, Artificial Sequence
  Description of Artificial Sequence: Synthetic oligonucleotide
  Antisense strand to SEQ ID NO: 1411090
uccaggaagaauaacauag

SEQ ID NO: 1411092 - RNA, 19 nt, Artificial Sequence
  Description of Artificial Sequence: Synthetic oligonucleotide
  Sense strand starting at position 607 of SEQ ID NO: 1243351
auguuauucuuccuggauu

SEQ ID NO: 1411093 - RNA, 19 nt, Artificial Sequence
  Description of Artificial Sequence: Synthetic oligonucleotide
  Antisense strand to SEQ ID NO: 1411092
aauccaggaagaauaacau

SEQ ID NO: 1411094 - RNA, 19 nt, Artificial Sequence
  Description of Artificial Sequence: Synthetic oligonucleotide
  Sense strand starting at position 633 of SEQ ID NO: 1243351
ggugaucucuaggcucuca

SEQ ID NO: 1411095 - RNA, 19 nt, Artificial Sequence
  Description of Artificial Sequence: Synthetic oligonucleotide
  Antisense strand to SEQ ID NO: 1411094
ugagagccuagagaucacc

SEQ ID NO: 1411096 - RNA, 19 nt, Artificial Sequence
  Description of Artificial Sequence: Synthetic oligonucleotide
  Sense strand starting at position 748 of SEQ ID NO: 1243351
cugcaaugcggcuagaacu

SEQ ID NO: 1411097 - RNA, 19 nt, Artificial Sequence
  Description of Artificial Sequence: Synthetic oligonucleotide
  Antisense strand to SEQ ID NO: 1411096
aguucuagccgcauugcag

SEQ ID NO: 1411098 - RNA, 19 nt, Artificial Sequence
  Description of Artificial Sequence: Synthetic oligonucleotide
  Sense strand starting at position 857 of SEQ ID NO: 1243351
ggcugugcucccugagaau

SEQ ID NO: 1411099 - RNA, 19 nt, Artificial Sequence
  Description of Artificial Sequence: Synthetic oligonucleotide
  Antisense strand to SEQ ID NO: 1411098
auucucagggagcacagcc

SEQ ID NO: 1411100 - RNA, 19 nt, Artificial Sequence
  Description of Artificial Sequence: Synthetic oligonucleotide
  Sense strand starting at position 1000 of SEQ ID NO: 1243351
ggcucagagugcuagauuu

SEQ ID NO: 1411101 - RNA, 19 nt, Artificial Sequence
  Description of Artificial Sequence: Synthetic oligonucleotide
  Antisense strand to SEQ ID NO: 1411100
aaaucuagcacucugagcc

SEQ ID NO: 1411102 - RNA, 19 nt, Artificial Sequence
  Description of Artificial Sequence: Synthetic oligonucleotide
  Sense strand starting at position 1069 of SEQ ID NO: 1243351
ucaagagcucuuggaaucu

SEQ ID NO: 1411103 - RNA, 19 nt, Artificial Sequence
  Description of Artificial Sequence: Synthetic oligonucleotide
  Antisense strand to SEQ ID NO: 1411102
agauuccaagagcucuuga

SEQ ID NO: 1411104 - RNA, 19 nt, Artificial Sequence
  Description of Artificial Sequence: Synthetic oligonucleotide
  Sense strand starting at position 1242 of SEQ ID NO: 1243351
gacacuuccgcuggaauga

SEQ ID NO: 1411105 - RNA, 19 nt, Artificial Sequence
  Description of Artificial Sequence: Synthetic oligonucleotide
  Antisense strand to SEQ ID NO: 1411104
ucauuccagcggaaguguc

SEQ ID NO: 1411106 - RNA, 19 nt, Artificial Sequence
  Description of Artificial Sequence: Synthetic oligonucleotide
  Sense strand starting at position 1252 of SEQ ID NO: 1243351
cuggaaugagcucgaggua

SEQ ID NO: 1411107 - RNA, 19 nt, Artificial Sequence
  Description of Artificial Sequence: Synthetic oligonucleotide
  Antisense strand to SEQ ID NO: 1411106
uaccucgagcucauuccag

SEQ ID NO: 1411108 - RNA, 19 nt, Artificial Sequence
  Description of Artificial Sequence: Synthetic oligonucleotide
  Sense strand starting at position 1390 of SEQ ID NO: 1243351
uguguauuccagcuccugu

SEQ ID NO: 1411109 - RNA, 19 nt, Artificial Sequence
  Description of Artificial Sequence: Synthetic oligonucleotide
  Antisense strand to SEQ ID NO: 1411108
acaggagcuggaauacaca

SEQ ID NO: 1411110 - RNA, 19 nt, Artificial Sequence
  Description of Artificial Sequence: Synthetic oligonucleotide
  Sense strand starting at position 2064 of SEQ ID NO: 1243351
cccaaauggcugggauuga

SEQ ID NO: 1411111 - RNA, 19 nt, Artificial Sequence
  Description of Artificial Sequence: Synthetic oligonucleotide
  Antisense strand to SEQ ID NO: 1411110
ucaaucccagccauuuggg

SEQ ID NO: 1411112 - RNA, 19 nt, Artificial Sequence
  Description of Artificial Sequence: Synthetic oligonucleotide
  Sense strand starting at position 2065 of SEQ ID NO: 1243351
ccaaauggcugggauugaa

SEQ ID NO: 1411113 - RNA, 19 nt, Artificial Sequence
  Description of Artificial Sequence: Synthetic oligonucleotide
  Antisense strand to SEQ ID NO: 1411112
uucaaucccagccauuugg

SEQ ID NO: 1411114 - RNA, 19 nt, Artificial Sequence
  Description of Artificial Sequence: Synthetic oligonucleotide
  Sense strand starting at position 2155 of SEQ ID NO: 1243351
agccuucucggacacuuaa

SEQ ID NO: 1411115 - RNA, 19 nt, Artificial Sequence
  Description of Artificial Sequence: Synthetic oligonucleotide
  Antisense strand to SEQ ID NO: 1411114
uuaaguguccgagaaggcu

SEQ ID NO: 1411116 - RNA, 19 nt, Artificial Sequence
  Description of Artificial Sequence: Synthetic oligonucleotide
  Sense strand starting at position 2840 of SEQ ID NO: 1243351
cuggucaguuucuuuauca

SEQ ID NO: 1411117 - RNA, 19 nt, Artificial Sequence
  Description of Artificial Sequence: Synthetic oligonucleotide
  Antisense strand to SEQ ID NO: 1411116
ugauaaagaaacugaccag

SEQ ID NO: 1411118 - RNA, 19 nt, Artificial Sequence
  Description of Artificial Sequence: Synthetic oligonucleotide
  Sense strand starting at position 2841 of SEQ ID NO: 1243351
uggucaguuucuuuaucaa

SEQ ID NO: 1411119 - RNA, 19 nt, Artificial Sequence
  Description of Artificial Sequence: Synthetic oligonucleotide
  Antisense strand to SEQ ID NO: 1411118
uugauaaagaaacugacca

SEQ ID NO: 1411120 - RNA, 19 nt, Artificial Sequence
  Description of Artificial Sequence: Synthetic oligonucleotide
  Sense strand starting at position 2844 of SEQ ID NO: 1243351
ucaguuucuuuaucaacga

SEQ ID NO: 1411121 - RNA, 19 nt, Artificial Sequence
  Description of Artificial Sequence: Synthetic oligonucleotide
  Antisense strand to SEQ ID NO: 1411120
ucguugauaaagaaacuga

SEQ ID NO: 1411122 - RNA, 19 nt, Artificial Sequence
  Description of Artificial Sequence: Synthetic oligonucleotide
  Sense strand starting at position 2848 of SEQ ID NO: 1243351
uuucuuuaucaacgaaaug

SEQ ID NO: 1411123 - RNA, 19 nt, Artificial Sequence
  Description of Artificial Sequence: Synthetic oligonucleotide
  Antisense strand to SEQ ID NO: 1411122
cauuucguugauaaagaaa

SEQ ID NO: 1411124 - RNA, 19 nt, Artificial Sequence
  Description of Artificial Sequence: Synthetic oligonucleotide
  Sense strand starting at position 2935 of SEQ ID NO: 1243351
gcggcuuagcauguugaca

SEQ ID NO: 1411125 - RNA, 19 nt, Artificial Sequence
  Description of Artificial Sequence: Synthetic oligonucleotide
  Antisense strand to SEQ ID NO: 1411124
ugucaacaugcuaagccgc

SEQ ID NO: 1411126 - RNA, 19 nt, Artificial Sequence
  Description of Artificial Sequence: Synthetic oligonucleotide
  Sense strand starting at position 2974 of SEQ ID NO: 1243351
uccugcaucucuguuauuu

SEQ ID NO: 1411127 - RNA, 19 nt, Artificial Sequence
  Description of Artificial Sequence: Synthetic oligonucleotide
  Antisense strand to SEQ ID NO: 1411126
aaauaacagagaugcagga

SEQ ID NO: 1411128 - RNA, 19 nt, Artificial Sequence
  Description of Artificial Sequence: Synthetic oligonucleotide
  Sense strand starting at position 3027 of SEQ ID NO: 1243351
ccguguucugugaggcuga

SEQ ID NO: 1411129 - RNA, 19 nt, Artificial Sequence
  Description of Artificial Sequence: Synthetic oligonucleotide
  Antisense strand to SEQ ID NO: 1411128
ucagccucacagaacacgg

SEQ ID NO: 1411130 - RNA, 19 nt, Artificial Sequence
  Description of Artificial Sequence: Synthetic oligonucleotide
  Sense strand starting at position 3156 of SEQ ID NO: 1243351
cgcaacauaacucggagau

SEQ ID NO: 1411131 - RNA, 19 nt, Artificial Sequence
  Description of Artificial Sequence: Synthetic oligonucleotide
  Antisense strand to SEQ ID NO: 1411130
aucuccgaguuauguugcg

SEQ ID NO: 1411132 - RNA, 19 nt, Artificial Sequence
  Description of Artificial Sequence: Synthetic oligonucleotide
  Sense strand starting at position 3157 of SEQ ID NO: 1243351
gcaacauaacucggagauu

SEQ ID NO: 1411133 - RNA, 19 nt, Artificial Sequence
  Description of Artificial Sequence: Synthetic oligonucleotide
  Antisense strand to SEQ ID NO: 1411132
aaucuccgaguuauguugc

SEQ ID NO: 1411134 - RNA, 19 nt, Artificial Sequence
  Description of Artificial Sequence: Synthetic oligonucleotide
  Sense strand starting at position 3169 of SEQ ID NO: 1243351
ggagauuccugaccucaug

SEQ ID NO: 1411135 - RNA, 19 nt, Artificial Sequence
  Description of Artificial Sequence: Synthetic oligonucleotide
  Antisense strand to SEQ ID NO: 1411134
caugaggucaggaaucucc

SEQ ID NO: 1411136 - RNA, 19 nt, Artificial Sequence
  Description of Artificial Sequence: Synthetic oligonucleotide
  Sense strand starting at position 3301 of SEQ ID NO: 1243351
cagggaauuugagaaggua

SEQ ID NO: 1411137 - RNA, 19 nt, Artificial Sequence
  Description of Artificial Sequence: Synthetic oligonucleotide
  Antisense strand to SEQ ID NO: 1411136
uaccuucucaaauucccug

SEQ ID NO: 1411138 - RNA, 19 nt, Artificial Sequence
  Description of Artificial Sequence: Synthetic oligonucleotide
  Sense strand starting at position 3496 of SEQ ID NO: 1243351
guguauagagucuaucaca

SEQ ID NO: 1411139 - RNA, 19 nt, Artificial Sequence
  Description of Artificial Sequence: Synthetic oligonucleotide
  Antisense strand to SEQ ID NO: 1411138
ugugauagacucuauacac

SEQ ID NO: 1411140 - RNA, 19 nt, Artificial Sequence
  Description of Artificial Sequence: Synthetic oligonucleotide
  Sense strand starting at position 3514 of SEQ ID NO: 1243351
aacccaguguggucaggau

SEQ ID NO: 1411141 - RNA, 19 nt, Artificial Sequence
  Description of Artificial Sequence: Synthetic oligonucleotide
  Antisense strand to SEQ ID NO: 1411140
auccugaccacacuggguu

SEQ ID NO: 1411142 - RNA, 19 nt, Artificial Sequence
  Description of Artificial Sequence: Synthetic oligonucleotide
  Sense strand starting at position 3531 of SEQ ID NO: 1243351
auguguugugaccacagau

SEQ ID NO: 1411143 - RNA, 19 nt, Artificial Sequence
  Description of Artificial Sequence: Synthetic oligonucleotide
  Antisense strand to SEQ ID NO: 1411142
aucuguggucacaacacau

SEQ ID NO: 1411144 - RNA, 19 nt, Artificial Sequence
  Description of Artificial Sequence: Synthetic oligonucleotide
  Sense strand starting at position 3541 of SEQ ID NO: 1243351
accacagauguguggaagu

SEQ ID NO: 1411145 - RNA, 19 nt, Artificial Sequence
  Description of Artificial Sequence: Synthetic oligonucleotide
  Antisense strand to SEQ ID NO: 1411144
acuuccacacaucuguggu

SEQ ID NO: 1411146 - RNA, 19 nt, Artificial Sequence
  Description of Artificial Sequence: Synthetic oligonucleotide
  Sense strand starting at position 3592 of SEQ ID NO: 1243351
uguugauccaaggaggcuu

SEQ ID NO: 1411147 - RNA, 19 nt, Artificial Sequence
  Description of Artificial Sequence: Synthetic oligonucleotide
  Antisense strand to SEQ ID NO: 1411146
aagccuccuuggaucaaca

SEQ ID NO: 1411148 - RNA, 19 nt, Artificial Sequence
  Description of Artificial Sequence: Synthetic oligonucleotide
  Sense strand starting at position 3737 of SEQ ID NO: 1243351
gccugaguuguucaggucu

SEQ ID NO: 1411149 - RNA, 19 nt, Artificial Sequence
  Description of Artificial Sequence: Synthetic oligonucleotide
  Antisense strand to SEQ ID NO: 1411148
agaccugaacaacucaggc

SEQ ID NO: 1411150 - RNA, 19 nt, Artificial Sequence
  Description of Artificial Sequence: Synthetic oligonucleotide
  Sense strand starting at position 3831 of SEQ ID NO: 1243351
uuguuacaucgcuauccga

SEQ ID NO: 1411151 - RNA, 19 nt, Artificial Sequence
  Description of Artificial Sequence: Synthetic oligonucleotide
  Antisense strand to SEQ ID NO: 1411150
ucggauagcgauguaacaa

SEQ ID NO: 1411152 - RNA, 19 nt, Artificial Sequence
  Description of Artificial Sequence: Synthetic oligonucleotide
  Sense strand starting at position 3834 of SEQ ID NO: 1243351
uuacaucgcuauccgaauu

SEQ ID NO: 1411153 - RNA, 19 nt, Artificial Sequence
  Description of Artificial Sequence: Synthetic oligonucleotide
  Antisense strand to SEQ ID NO: 1411152
aauucggauagcgauguaa

SEQ ID NO: 1411154 - RNA, 19 nt, Artificial Sequence
  Description of Artificial Sequence: Synthetic oligonucleotide
  Sense strand starting at position 3844 of SEQ ID NO: 1243351
auccgaauuuguccuaguu

SEQ ID NO: 1411155 - RNA, 19 nt, Artificial Sequence
  Description of Artificial Sequence: Synthetic oligonucleotide
  Antisense strand to SEQ ID NO: 1411154
aacuaggacaaauucggau

SEQ ID NO: 1411156 - RNA, 19 nt, Artificial Sequence
  Description of Artificial Sequence: Synthetic oligonucleotide
  Sense strand starting at position 3852 of SEQ ID NO: 1243351
uuguccuaguuguuuaacu

SEQ ID NO: 1411157 - RNA, 19 nt, Artificial Sequence
  Description of Artificial Sequence: Synthetic oligonucleotide
  Antisense strand to SEQ ID NO: 1411156
aguuaaacaacuaggacaa

SEQ ID NO: 1411158 - RNA, 19 nt, Artificial Sequence
  Description of Artificial Sequence: Synthetic oligonucleotide
  Sense strand starting at position 3853 of SEQ ID NO: 1243351
uguccuaguuguuuaacuu

SEQ ID NO: 1411159 - RNA, 19 nt, Artificial Sequence
  Description of Artificial Sequence: Synthetic oligonucleotide
  Antisense strand to SEQ ID NO: 1411158
aaguuaaacaacuaggaca

SEQ ID NO: 1411160 - RNA, 19 nt, Artificial Sequence
  Description of Artificial Sequence: Synthetic oligonucleotide
  Sense strand starting at position 3854 of SEQ ID NO: 1243351
guccuaguuguuuaacuuu

SEQ ID NO: 1411161 - RNA, 19 nt, Artificial Sequence
  Description of Artificial Sequence: Synthetic oligonucleotide
  Antisense strand to SEQ ID NO: 1411160
aaaguuaaacaacuaggac

SEQ ID NO: 1411162 - RNA, 19 nt, Artificial Sequence
  Description of Artificial Sequence: Synthetic oligonucleotide
  Sense strand starting at position 3886 of SEQ ID NO: 1243351
ggugguaugugagcuccau

SEQ ID NO: 1411163 - RNA, 19 nt, Artificial Sequence
  Description of Artificial Sequence: Synthetic oligonucleotide
  Antisense strand to SEQ ID NO: 1411162
auggagcucacauaccacc

SEQ ID NO: 1411164 - RNA, 19 nt, Artificial Sequence
  Description of Artificial Sequence: Synthetic oligonucleotide
  Sense strand starting at position 3977 of SEQ ID NO: 1243351
cuaugaagugaaugaguua

SEQ ID NO: 1411165 - RNA, 19 nt, Artificial Sequence
  Description of Artificial Sequence: Synthetic oligonucleotide
  Antisense strand to SEQ ID NO: 1411164
uaacucauucacuucauag

SEQ ID NO: 1411166 - RNA, 19 nt, Artificial Sequence
  Description of Artificial Sequence: Synthetic oligonucleotide
  Sense strand starting at position 3980 of SEQ ID NO: 1243351
ugaagugaaugaguuaaug

SEQ ID NO: 1411167 - RNA, 19 nt, Artificial Sequence
  Description of Artificial Sequence: Synthetic oligonucleotide
  Antisense strand to SEQ ID NO: 1411166
cauuaacucauucacuuca

SEQ ID NO: 1411168 - RNA, 19 nt, Artificial Sequence
  Description of Artificial Sequence: Synthetic oligonucleotide
  Sense strand starting at position 259 of SEQ ID NO: 1243352
ucaagagcucuuggaaucu

SEQ ID NO: 1411169 - RNA, 19 nt, Artificial Sequence
  Description of Artificial Sequence: Synthetic oligonucleotide
  Antisense strand to SEQ ID NO: 1411168
agauuccaagagcucuuga

SEQ ID NO: 1411170 - RNA, 19 nt, Artificial Sequence
  Description of Artificial Sequence: Synthetic oligonucleotide
  Sense strand starting at position 432 of SEQ ID NO: 1243352
gacacuuccgcuggaauga

SEQ ID NO: 1411171 - RNA, 19 nt, Artificial Sequence
  Description of Artificial Sequence: Synthetic oligonucleotide
  Antisense strand to SEQ ID NO: 1411170
ucauuccagcggaaguguc

SEQ ID NO: 1411172 - RNA, 19 nt, Artificial Sequence
  Description of Artificial Sequence: Synthetic oligonucleotide
  Sense strand starting at position 442 of SEQ ID NO: 1243352
cuggaaugagcucgaggua

SEQ ID NO: 1411173 - RNA, 19 nt, Artificial Sequence
  Description of Artificial Sequence: Synthetic oligonucleotide
  Antisense strand to SEQ ID NO: 1411172
uaccucgagcucauuccag

SEQ ID NO: 1411174 - RNA, 19 nt, Artificial Sequence
  Description of Artificial Sequence: Synthetic oligonucleotide
  Sense strand starting at position 580 of SEQ ID NO: 1243352
uguguauuccagcuccugu

SEQ ID NO: 1411175 - RNA, 19 nt, Artificial Sequence
  Description of Artificial Sequence: Synthetic oligonucleotide
  Antisense strand to SEQ ID NO: 1411174
acaggagcuggaauacaca

SEQ ID NO: 1411176 - RNA, 19 nt, Artificial Sequence
  Description of Artificial Sequence: Synthetic oligonucleotide
  Sense strand starting at position 1254 of SEQ ID NO: 1243352
cccaaauggcugggauuga

SEQ ID NO: 1411177 - RNA, 19 nt, Artificial Sequence
  Description of Artificial Sequence: Synthetic oligonucleotide
  Antisense strand to SEQ ID NO: 1411176
ucaaucccagccauuuggg

SEQ ID NO: 1411178 - RNA, 19 nt, Artificial Sequence
  Description of Artificial Sequence: Synthetic oligonucleotide
  Sense strand starting at position 1345 of SEQ ID NO: 1243352
agccuucucggacacuuaa

SEQ ID NO: 1411179 - RNA, 19 nt, Artificial Sequence
  Description of Artificial Sequence: Synthetic oligonucleotide
  Antisense strand to SEQ ID NO: 1411178
uuaaguguccgagaaggcu

SEQ ID NO: 1411180 - RNA, 19 nt, Artificial Sequence
  Description of Artificial Sequence: Synthetic oligonucleotide
  Sense strand starting at position 2031 of SEQ ID NO: 1243352
uggucaguuucuuuaucaa

SEQ ID NO: 1411181 - RNA, 19 nt, Artificial Sequence
  Description of Artificial Sequence: Synthetic oligonucleotide
  Antisense strand to SEQ ID NO: 1411180
uugauaaagaaacugacca

SEQ ID NO: 1411182 - RNA, 19 nt, Artificial Sequence
  Description of Artificial Sequence: Synthetic oligonucleotide
  Sense strand starting at position 2034 of SEQ ID NO: 1243352
ucaguuucuuuaucaacga

SEQ ID NO: 1411183 - RNA, 19 nt, Artificial Sequence
  Description of Artificial Sequence: Synthetic oligonucleotide
  Antisense strand to SEQ ID NO: 1411182
ucguugauaaagaaacuga

SEQ ID NO: 1411184 - RNA, 19 nt, Artificial Sequence
  Description of Artificial Sequence: Synthetic oligonucleotide
  Sense strand starting at position 2038 of SEQ ID NO: 1243352
uuucuuuaucaacgaaaug

SEQ ID NO: 1411185 - RNA, 19 nt, Artificial Sequence
  Description of Artificial Sequence: Synthetic oligonucleotide
  Antisense strand to SEQ ID NO: 1411184
cauuucguugauaaagaaa

SEQ ID NO: 1411186 - RNA, 19 nt, Artificial Sequence
  Description of Artificial Sequence: Synthetic oligonucleotide
  Sense strand starting at position 2125 of SEQ ID NO: 1243352
gcggcuuagcauguugaca

SEQ ID NO: 1411187 - RNA, 19 nt, Artificial Sequence
  Description of Artificial Sequence: Synthetic oligonucleotide
  Antisense strand to SEQ ID NO: 1411186
ugucaacaugcuaagccgc

SEQ ID NO: 1411188 - RNA, 19 nt, Artificial Sequence
  Description of Artificial Sequence: Synthetic oligonucleotide
  Sense strand starting at position 2164 of SEQ ID NO: 1243352
uccugcaucucuguuauuu

SEQ ID NO: 1411189 - RNA, 19 nt, Artificial Sequence
  Description of Artificial Sequence: Synthetic oligonucleotide
  Antisense strand to SEQ ID NO: 1411188
aaauaacagagaugcagga

SEQ ID NO: 1411190 - RNA, 19 nt, Artificial Sequence
  Description of Artificial Sequence: Synthetic oligonucleotide
  Sense strand starting at position 2217 of SEQ ID NO: 1243352
ccguguucugugaggcuga

SEQ ID NO: 1411191 - RNA, 19 nt, Artificial Sequence
  Description of Artificial Sequence: Synthetic oligonucleotide
  Antisense strand to SEQ ID NO: 1411190
ucagccucacagaacacgg

SEQ ID NO: 1411192 - RNA, 19 nt, Artificial Sequence
  Description of Artificial Sequence: Synthetic oligonucleotide
  Sense strand starting at position 2346 of SEQ ID NO: 1243352
cgcaacauaacucggagau

SEQ ID NO: 1411193 - RNA, 19 nt, Artificial Sequence
  Description of Artificial Sequence: Synthetic oligonucleotide
  Antisense strand to SEQ ID NO: 1411192
aucuccgaguuauguugcg

SEQ ID NO: 1411194 - RNA, 19 nt, Artificial Sequence
  Description of Artificial Sequence: Synthetic oligonucleotide
  Sense strand starting at position 2347 of SEQ ID NO: 1243352
gcaacauaacucggagauu

SEQ ID NO: 1411195 - RNA, 19 nt, Artificial Sequence
  Description of Artificial Sequence: Synthetic oligonucleotide
  Antisense strand to SEQ ID NO: 1411194
aaucuccgaguuauguugc

SEQ ID NO: 1411196 - RNA, 19 nt, Artificial Sequence
  Description of Artificial Sequence: Synthetic oligonucleotide
  Sense strand starting at position 2359 of SEQ ID NO: 1243352
ggagauuccugaccucaug

SEQ ID NO: 1411197 - RNA, 19 nt, Artificial Sequence
  Description of Artificial Sequence: Synthetic oligonucleotide
  Antisense strand to SEQ ID NO: 1411196
caugaggucaggaaucucc

SEQ ID NO: 1411198 - RNA, 19 nt, Artificial Sequence
  Description of Artificial Sequence: Synthetic oligonucleotide
  Sense strand starting at position 2491 of SEQ ID NO: 1243352
cagggaauuugagaaggua

SEQ ID NO: 1411199 - RNA, 19 nt, Artificial Sequence
  Description of Artificial Sequence: Synthetic oligonucleotide
  Antisense strand to SEQ ID NO: 1411198
uaccuucucaaauucccug

SEQ ID NO: 1411200 - RNA, 19 nt, Artificial Sequence
  Description of Artificial Sequence: Synthetic oligonucleotide
  Sense strand starting at position 2686 of SEQ ID NO: 1243352
guguauagagucuaucaca

SEQ ID NO: 1411201 - RNA, 19 nt, Artificial Sequence
  Description of Artificial Sequence: Synthetic oligonucleotide
  Antisense strand to SEQ ID NO: 1411200
ugugauagacucuauacac

SEQ ID NO: 1411202 - RNA, 19 nt, Artificial Sequence
  Description of Artificial Sequence: Synthetic oligonucleotide
  Sense strand starting at position 2704 of SEQ ID NO: 1243352
aacccaguguggucaggau

SEQ ID NO: 1411203 - RNA, 19 nt, Artificial Sequence
  Description of Artificial Sequence: Synthetic oligonucleotide
  Antisense strand to SEQ ID NO: 1411202
auccugaccacacuggguu

SEQ ID NO: 1411204 - RNA, 19 nt, Artificial Sequence
  Description of Artificial Sequence: Synthetic oligonucleotide
  Sense strand starting at position 2721 of SEQ ID NO: 1243352
auguguugugaccacagau

SEQ ID NO: 1411205 - RNA, 19 nt, Artificial Sequence
  Description of Artificial Sequence: Synthetic oligonucleotide
  Antisense strand to SEQ ID NO: 1411204
aucuguggucacaacacau

SEQ ID NO: 1411206 - RNA, 19 nt, Artificial Sequence
  Description of Artificial Sequence: Synthetic oligonucleotide
  Sense strand starting at position 2731 of SEQ ID NO: 1243352
accacagauguguggaagu

SEQ ID NO: 1411207 - RNA, 19 nt, Artificial Sequence
  Description of Artificial Sequence: Synthetic oligonucleotide
  Antisense strand to SEQ ID NO: 1411206
acuuccacacaucuguggu

SEQ ID NO: 1411208 - RNA, 19 nt, Artificial Sequence
  Description of Artificial Sequence: Synthetic oligonucleotide
  Sense strand starting at position 2782 of SEQ ID NO: 1243352
uguugauccaaggaggcuu

SEQ ID NO: 1411209 - RNA, 19 nt, Artificial Sequence
  Description of Artificial Sequence: Synthetic oligonucleotide
  Antisense strand to SEQ ID NO: 1411208
aagccuccuuggaucaaca

SEQ ID NO: 1411210 - RNA, 19 nt, Artificial Sequence
  Description of Artificial Sequence: Synthetic oligonucleotide
  Sense strand starting at position 3034 of SEQ ID NO: 1243352
auccgaauuuguccuaguu

SEQ ID NO: 1411211 - RNA, 19 nt, Artificial Sequence
  Description of Artificial Sequence: Synthetic oligonucleotide
  Antisense strand to SEQ ID NO: 1411210
aacuaggacaaauucggau

SEQ ID NO: 1411212 - RNA, 19 nt, Artificial Sequence
  Description of Artificial Sequence: Synthetic oligonucleotide
  Sense strand starting at position 3044 of SEQ ID NO: 1243352
guccuaguuguuuaacuuu

SEQ ID NO: 1411213 - RNA, 19 nt, Artificial Sequence
  Description of Artificial Sequence: Synthetic oligonucleotide
  Antisense strand to SEQ ID NO: 1411212
aaaguuaaacaacuaggac

SEQ ID NO: 1411214 - RNA, 19 nt, Artificial Sequence
  Description of Artificial Sequence: Synthetic oligonucleotide
  Sense strand starting at position 3167 of SEQ ID NO: 1243352
cuaugaagugaaugaguua

SEQ ID NO: 1411215 - RNA, 19 nt, Artificial Sequence
  Description of Artificial Sequence: Synthetic oligonucleotide
  Antisense strand to SEQ ID NO: 1411214
uaacucauucacuucauag

SEQ ID NO: 1411216 - RNA, 19 nt, Artificial Sequence
  Description of Artificial Sequence: Synthetic oligonucleotide
  Sense strand starting at position 3170 of SEQ ID NO: 1243352
ugaagugaaugaguuaaug

SEQ ID NO: 1411217 - RNA, 19 nt, Artificial Sequence
  Description of Artificial Sequence: Synthetic oligonucleotide
  Antisense strand to SEQ ID NO: 1411216
cauuaacucauucacuuca

SEQ ID NO: 1411218 - RNA, 19 nt, Artificial Sequence
  Description of Artificial Sequence: Synthetic oligonucleotide
  Sense strand starting at position 3204 of SEQ ID NO: 1243352
guguguggcgguguuuaga

SEQ ID NO: 1411219 - RNA, 19 nt, Artificial Sequence
  Description of Artificial Sequence: Synthetic oligonucleotide
  Antisense strand to SEQ ID NO: 1411218
ucuaaacaccgccacacac

SEQ ID NO: 1411220 - RNA, 19 nt, Artificial Sequence
  Description of Artificial Sequence: Synthetic oligonucleotide
  Sense strand starting at position 3380 of SEQ ID NO: 1243352
agcucagaacuguagguuu

SEQ ID NO: 1411221 - RNA, 19 nt, Artificial Sequence
  Description of Artificial Sequence: Synthetic oligonucleotide
  Antisense strand to SEQ ID NO: 1411220
aaaccuacaguucugagcu

SEQ ID NO: 1411222 - RNA, 19 nt, Artificial Sequence
  Description of Artificial Sequence: Synthetic oligonucleotide
  Sense strand starting at position 3404 of SEQ ID NO: 1243352
caugaaagguguuuaucuc

SEQ ID NO: 1411223 - RNA, 19 nt, Artificial Sequence
  Description of Artificial Sequence: Synthetic oligonucleotide
  Antisense strand to SEQ ID NO: 1411222
gagauaaacaccuuucaug

SEQ ID NO: 1411224 - RNA, 19 nt, Artificial Sequence
  Description of Artificial Sequence: Synthetic oligonucleotide
  Sense strand starting at position 3410 of SEQ ID NO: 1243352
agguguuuaucuccuuuga

SEQ ID NO: 1411225 - RNA, 19 nt, Artificial Sequence
  Description of Artificial Sequence: Synthetic oligonucleotide
  Antisense strand to SEQ ID NO: 1411224
ucaaaggagauaaacaccu

SEQ ID NO: 1411226 - RNA, 19 nt, Artificial Sequence
  Description of Artificial Sequence: Synthetic oligonucleotide
  Sense strand starting at position 3414 of SEQ ID NO: 1243352
guuuaucuccuuugaucua

SEQ ID NO: 1411227 - RNA, 19 nt, Artificial Sequence
  Description of Artificial Sequence: Synthetic oligonucleotide
  Antisense strand to SEQ ID NO: 1411226
uagaucaaaggagauaaac

SEQ ID NO: 1411228 - RNA, 19 nt, Artificial Sequence
  Description of Artificial Sequence: Synthetic oligonucleotide
  Sense strand starting at position 3423 of SEQ ID NO: 1243352
cuuugaucuauuggacgau

SEQ ID NO: 1411229 - RNA, 19 nt, Artificial Sequence
  Description of Artificial Sequence: Synthetic oligonucleotide
  Antisense strand to SEQ ID NO: 1411228
aucguccaauagaucaaag

SEQ ID NO: 1411230 - RNA, 19 nt, Artificial Sequence
  Description of Artificial Sequence: Synthetic oligonucleotide
  Sense strand starting at position 3426 of SEQ ID NO: 1243352
ugaucuauuggacgaucau

SEQ ID NO: 1411231 - RNA, 19 nt, Artificial Sequence
  Description of Artificial Sequence: Synthetic oligonucleotide
  Antisense strand to SEQ ID NO: 1411230
augaucguccaauagauca

SEQ ID NO: 1411232 - RNA, 19 nt, Artificial Sequence
  Description of Artificial Sequence: Synthetic oligonucleotide
  Sense strand starting at position 3471 of SEQ ID NO: 1243352
agaaucaucuuuccacgua

SEQ ID NO: 1411233 - RNA, 19 nt, Artificial Sequence
  Description of Artificial Sequence: Synthetic oligonucleotide
  Antisense strand to SEQ ID NO: 1411232
uacguggaaagaugauucu

SEQ ID NO: 1411234 - RNA, 19 nt, Artificial Sequence
  Description of Artificial Sequence: Synthetic oligonucleotide
  Sense strand starting at position 3484 of SEQ ID NO: 1243352
cacguaucaggucaggaaa

SEQ ID NO: 1411235 - RNA, 19 nt, Artificial Sequence
  Description of Artificial Sequence: Synthetic oligonucleotide
  Antisense strand to SEQ ID NO: 1411234
uuuccugaccugauacgug

SEQ ID NO: 1411236 - RNA, 19 nt, Artificial Sequence
  Description of Artificial Sequence: Synthetic oligonucleotide
  Sense strand starting at position 3610 of SEQ ID NO: 1243352
ccaagucaugguggagaca

SEQ ID NO: 1411237 - RNA, 19 nt, Artificial Sequence
  Description of Artificial Sequence: Synthetic oligonucleotide
  Antisense strand to SEQ ID NO: 1411236
ugucuccaccaugacuugg

SEQ ID NO: 1411238 - RNA, 19 nt, Artificial Sequence
  Description of Artificial Sequence: Synthetic oligonucleotide
  Sense strand starting at position 3629 of SEQ ID NO: 1243352
cucagaaucucucuaguag

SEQ ID NO: 1411239 - RNA, 19 nt, Artificial Sequence
  Description of Artificial Sequence: Synthetic oligonucleotide
  Antisense strand to SEQ ID NO: 1411238
cuacuagagagauucugag

SEQ ID NO: 1411240 - RNA, 19 nt, Artificial Sequence
  Description of Artificial Sequence: Synthetic oligonucleotide
  Sense strand starting at position 3630 of SEQ ID NO: 1243352
ucagaaucucucuaguagu

SEQ ID NO: 1411241 - RNA, 19 nt, Artificial Sequence
  Description of Artificial Sequence: Synthetic oligonucleotide
  Antisense strand to SEQ ID NO: 1411240
acuacuagagagauucuga

SEQ ID NO: 1411242 - RNA, 19 nt, Artificial Sequence
  Description of Artificial Sequence: Synthetic oligonucleotide
  Sense strand starting at position 3876 of SEQ ID NO: 1243352
gccugaaacuccucugaaa

SEQ ID NO: 1411243 - RNA, 19 nt, Artificial Sequence
  Description of Artificial Sequence: Synthetic oligonucleotide
  Antisense strand to SEQ ID NO: 1411242
uuucagaggaguuucaggc

SEQ ID NO: 1411244 - RNA, 19 nt, Artificial Sequence
  Description of Artificial Sequence: Synthetic oligonucleotide
  Sense strand starting at position 3917 of SEQ ID NO: 1243352
uuaauuaacucuggauuug

SEQ ID NO: 1411245 - RNA, 19 nt, Artificial Sequence
  Description of Artificial Sequence: Synthetic oligonucleotide
  Antisense strand to SEQ ID NO: 1411244
caaauccagaguuaauuaa

SEQ ID NO: 1411246 - RNA, 19 nt, Artificial Sequence
  Description of Artificial Sequence: Synthetic oligonucleotide
  Sense strand starting at position 3956 of SEQ ID NO: 1243352
cuauacuucucuguauaug

SEQ ID NO: 1411247 - RNA, 19 nt, Artificial Sequence
  Description of Artificial Sequence: Synthetic oligonucleotide
  Antisense strand to SEQ ID NO: 1411246
cauauacagagaaguauag

SEQ ID NO: 1411248 - RNA, 19 nt, Artificial Sequence
  Description of Artificial Sequence: Synthetic oligonucleotide
  Sense strand starting at position 162 of SEQ ID NO: 1243353
ugguaauaguccuuacuug

SEQ ID NO: 1411249 - RNA, 19 nt, Artificial Sequence
  Description of Artificial Sequence: Synthetic oligonucleotide
  Antisense strand to SEQ ID NO: 1411248
caaguaaggacuauuacca

SEQ ID NO: 1411250 - RNA, 19 nt, Artificial Sequence
  Description of Artificial Sequence: Synthetic oligonucleotide
  Sense strand starting at position 198 of SEQ ID NO: 1243353
ugcuaagaaauguggacaa

SEQ ID NO: 1411251 - RNA, 19 nt, Artificial Sequence
  Description of Artificial Sequence: Synthetic oligonucleotide
  Antisense strand to SEQ ID NO: 1411250
uuguccacauuucuuagca

SEQ ID NO: 1411252 - RNA, 19 nt, Artificial Sequence
  Description of Artificial Sequence: Synthetic oligonucleotide
  Sense strand starting at position 423 of SEQ ID NO: 1243353
gcaucauuccuaggguaau

SEQ ID NO: 1411253 - RNA, 19 nt, Artificial Sequence
  Description of Artificial Sequence: Synthetic oligonucleotide
  Antisense strand to SEQ ID NO: 1411252
auuacccuaggaaugaugc

SEQ ID NO: 1411254 - RNA, 19 nt, Artificial Sequence
  Description of Artificial Sequence: Synthetic oligonucleotide
  Sense strand starting at position 560 of SEQ ID NO: 1243353
gagcaaagauuggagaaga

SEQ ID NO: 1411255 - RNA, 19 nt, Artificial Sequence
  Description of Artificial Sequence: Synthetic oligonucleotide
  Antisense strand to SEQ ID NO: 1411254
ucuucuccaaucuuugcuc

SEQ ID NO: 1411256 - RNA, 19 nt, Artificial Sequence
  Description of Artificial Sequence: Synthetic oligonucleotide
  Sense strand starting at position 699 of SEQ ID NO: 1243353
cucagaccaugguuaugua

SEQ ID NO: 1411257 - RNA, 19 nt, Artificial Sequence
  Description of Artificial Sequence: Synthetic oligonucleotide
  Antisense strand to SEQ ID NO: 1411256
uacauaaccauggucugag

SEQ ID NO: 1411258 - RNA, 19 nt, Artificial Sequence
  Description of Artificial Sequence: Synthetic oligonucleotide
  Sense strand starting at position 700 of SEQ ID NO: 1243353
ucagaccaugguuauguaa

SEQ ID NO: 1411259 - RNA, 19 nt, Artificial Sequence
  Description of Artificial Sequence: Synthetic oligonucleotide
  Antisense strand to SEQ ID NO: 1411258
uuacauaaccauggucuga

SEQ ID NO: 1411260 - RNA, 19 nt, Artificial Sequence
  Description of Artificial Sequence: Synthetic oligonucleotide
  Sense strand starting at position 703 of SEQ ID NO: 1243353
gaccaugguuauguaaguu

SEQ ID NO: 1411261 - RNA, 19 nt, Artificial Sequence
  Description of Artificial Sequence: Synthetic oligonucleotide
  Antisense strand to SEQ ID NO: 1411260
aacuuacauaaccaugguc

SEQ ID NO: 1411262 - RNA, 19 nt, Artificial Sequence
  Description of Artificial Sequence: Synthetic oligonucleotide
  Sense strand starting at position 711 of SEQ ID NO: 1243353
uuauguaaguugucaacau

SEQ ID NO: 1411263 - RNA, 19 nt, Artificial Sequence
  Description of Artificial Sequence: Synthetic oligonucleotide
  Antisense strand to SEQ ID NO: 1411262
auguugacaacuuacauaa

SEQ ID NO: 1411264 - RNA, 19 nt, Artificial Sequence
  Description of Artificial Sequence: Synthetic oligonucleotide
  Sense strand starting at position 715 of SEQ ID NO: 1243353
guaaguugucaacauuagg

SEQ ID NO: 1411265 - RNA, 19 nt, Artificial Sequence
  Description of Artificial Sequence: Synthetic oligonucleotide
  Antisense strand to SEQ ID NO: 1411264
ccuaauguugacaacuuac

SEQ ID NO: 1411266 - RNA, 19 nt, Artificial Sequence
  Description of Artificial Sequence: Synthetic oligonucleotide
  Sense strand starting at position 844 of SEQ ID NO: 1243353
agugcuucucgugcacaca

SEQ ID NO: 1411267 - RNA, 19 nt, Artificial Sequence
  Description of Artificial Sequence: Synthetic oligonucleotide
  Antisense strand to SEQ ID NO: 1411266
ugugugcacgagaagcacu

SEQ ID NO: 1411268 - RNA, 19 nt, Artificial Sequence
  Description of Artificial Sequence: Synthetic oligonucleotide
  Sense strand starting at position 854 of SEQ ID NO: 1243353
gugcacacaugguccaaau

SEQ ID NO: 1411269 - RNA, 19 nt, Artificial Sequence
  Description of Artificial Sequence: Synthetic oligonucleotide
  Antisense strand to SEQ ID NO: 1411268
auuuggaccaugugugcac

SEQ ID NO: 1411270 - RNA, 19 nt, Artificial Sequence
  Description of Artificial Sequence: Synthetic oligonucleotide
  Sense strand starting at position 856 of SEQ ID NO: 1243353
gcacacaugguccaaauaa

SEQ ID NO: 1411271 - RNA, 19 nt, Artificial Sequence
  Description of Artificial Sequence: Synthetic oligonucleotide
  Antisense strand to SEQ ID NO: 1411270
uuauuuggaccaugugugc

SEQ ID NO: 1411272 - RNA, 19 nt, Artificial Sequence
  Description of Artificial Sequence: Synthetic oligonucleotide
  Sense strand starting at position 1066 of SEQ ID NO: 1243353
cugacaucaucaguuccua

SEQ ID NO: 1411273 - RNA, 19 nt, Artificial Sequence
  Description of Artificial Sequence: Synthetic oligonucleotide
  Antisense strand to SEQ ID NO: 1411272
uaggaacugaugaugucag

SEQ ID NO: 1411274 - RNA, 19 nt, Artificial Sequence
  Description of Artificial Sequence: Synthetic oligonucleotide
  Sense strand starting at position 1251 of SEQ ID NO: 1243353
uuaccuguuuauuugugua

SEQ ID NO: 1411275 - RNA, 19 nt, Artificial Sequence
  Description of Artificial Sequence: Synthetic oligonucleotide
  Antisense strand to SEQ ID NO: 1411274
uacacaaauaaacagguaa

SEQ ID NO: 1411276 - RNA, 19 nt, Artificial Sequence
  Description of Artificial Sequence: Synthetic oligonucleotide
  Sense strand starting at position 1253 of SEQ ID NO: 1243353
accuguuuauuuguguauu

SEQ ID NO: 1411277 - RNA, 19 nt, Artificial Sequence
  Description of Artificial Sequence: Synthetic oligonucleotide
  Antisense strand to SEQ ID NO: 1411276
aauacacaaauaaacaggu

SEQ ID NO: 1411278 - RNA, 19 nt, Artificial Sequence
  Description of Artificial Sequence: Synthetic oligonucleotide
  Sense strand starting at position 1367 of SEQ ID NO: 1243353
guggcugcucaguaaacau

SEQ ID NO: 1411279 - RNA, 19 nt, Artificial Sequence
  Description of Artificial Sequence: Synthetic oligonucleotide
  Antisense strand to SEQ ID NO: 1411278
auguuuacugagcagccac

SEQ ID NO: 1411280 - RNA, 19 nt, Artificial Sequence
  Description of Artificial Sequence: Synthetic oligonucleotide
  Sense strand starting at position 1482 of SEQ ID NO: 1243353
gggucugugacuuacucau

SEQ ID NO: 1411281 - RNA, 19 nt, Artificial Sequence
  Description of Artificial Sequence: Synthetic oligonucleotide
  Antisense strand to SEQ ID NO: 1411280
augaguaagucacagaccc

SEQ ID NO: 1411282 - RNA, 19 nt, Artificial Sequence
  Description of Artificial Sequence: Synthetic oligonucleotide
  Sense strand starting at position 1484 of SEQ ID NO: 1243353
gucugugacuuacucauaa

SEQ ID NO: 1411283 - RNA, 19 nt, Artificial Sequence
  Description of Artificial Sequence: Synthetic oligonucleotide
  Antisense strand to SEQ ID NO: 1411282
uuaugaguaagucacagac

SEQ ID NO: 1411284 - RNA, 19 nt, Artificial Sequence
  Description of Artificial Sequence: Synthetic oligonucleotide
  Sense strand starting at position 2215 of SEQ ID NO: 1243353
ggaaacgugcuauagcaga

SEQ ID NO: 1411285 - RNA, 19 nt, Artificial Sequence
  Description of Artificial Sequence: Synthetic oligonucleotide
  Antisense strand to SEQ ID NO: 1411284
ucugcuauagcacguuucc

SEQ ID NO: 1411286 - RNA, 19 nt, Artificial Sequence
  Description of Artificial Sequence: Synthetic oligonucleotide
  Sense strand starting at position 2542 of SEQ ID NO: 1243353
uuauauccuugucuccgaa

SEQ ID NO: 1411287 - RNA, 19 nt, Artificial Sequence
  Description of Artificial Sequence: Synthetic oligonucleotide
  Antisense strand to SEQ ID NO: 1411286
uucggagacaaggauauaa

SEQ ID NO: 1411288 - RNA, 19 nt, Artificial Sequence
  Description of Artificial Sequence: Synthetic oligonucleotide
  Sense strand starting at position 2756 of SEQ ID NO: 1243353
aggaauuagccuuaagcua

SEQ ID NO: 1411289 - RNA, 19 nt, Artificial Sequence
  Description of Artificial Sequence: Synthetic oligonucleotide
  Antisense strand to SEQ ID NO: 1411288
uagcuuaaggcuaauuccu

SEQ ID NO: 1411290 - RNA, 19 nt, Artificial Sequence
  Description of Artificial Sequence: Synthetic oligonucleotide
  Sense strand starting at position 2763 of SEQ ID NO: 1243353
agccuuaagcuaugauuag

SEQ ID NO: 1411291 - RNA, 19 nt, Artificial Sequence
  Description of Artificial Sequence: Synthetic oligonucleotide
  Antisense strand to SEQ ID NO: 1411290
cuaaucauagcuuaaggcu

SEQ ID NO: 1411292 - RNA, 19 nt, Artificial Sequence
  Description of Artificial Sequence: Synthetic oligonucleotide
  Sense strand starting at position 2772 of SEQ ID NO: 1243353
cuaugauuagccugugagg

SEQ ID NO: 1411293 - RNA, 19 nt, Artificial Sequence
  Description of Artificial Sequence: Synthetic oligonucleotide
  Antisense strand to SEQ ID NO: 1411292
ccucacaggcuaaucauag

SEQ ID NO: 1411294 - RNA, 19 nt, Artificial Sequence
  Description of Artificial Sequence: Synthetic oligonucleotide
  Sense strand starting at position 2774 of SEQ ID NO: 1243353
augauuagccugugaggug

SEQ ID NO: 1411295 - RNA, 19 nt, Artificial Sequence
  Description of Artificial Sequence: Synthetic oligonucleotide
  Antisense strand to SEQ ID NO: 1411294
caccucacaggcuaaucau

SEQ ID NO: 1411296 - RNA, 19 nt, Artificial Sequence
  Description of Artificial Sequence: Synthetic oligonucleotide
  Sense strand starting at position 2817 of SEQ ID NO: 1243353
ccuccaucgcaagauguau

SEQ ID NO: 1411297 - RNA, 19 nt, Artificial Sequence
  Description of Artificial Sequence: Synthetic oligonucleotide
  Antisense strand to SEQ ID NO: 1411296
auacaucuugcgauggagg

SEQ ID NO: 1411298 - RNA, 19 nt, Artificial Sequence
  Description of Artificial Sequence: Synthetic oligonucleotide
  Sense strand starting at position 2865 of SEQ ID NO: 1243353
cagccacagugauugguua

SEQ ID NO: 1411299 - RNA, 19 nt, Artificial Sequence
  Description of Artificial Sequence: Synthetic oligonucleotide
  Antisense strand to SEQ ID NO: 1411298
uaaccaaucacuguggcug

SEQ ID NO: 1411300 - RNA, 19 nt, Artificial Sequence
  Description of Artificial Sequence: Synthetic oligonucleotide
  Sense strand starting at position 2872 of SEQ ID NO: 1243353
agugauugguuaguagaug

SEQ ID NO: 1411301 - RNA, 19 nt, Artificial Sequence
  Description of Artificial Sequence: Synthetic oligonucleotide
  Antisense strand to SEQ ID NO: 1411300
caucuacuaaccaaucacu

SEQ ID NO: 1411302 - RNA, 19 nt, Artificial Sequence
  Description of Artificial Sequence: Synthetic oligonucleotide
  Sense strand starting at position 2915 of SEQ ID NO: 1243353
ugagaaucuucucugggac

SEQ ID NO: 1411303 - RNA, 19 nt, Artificial Sequence
  Description of Artificial Sequence: Synthetic oligonucleotide
  Antisense strand to SEQ ID NO: 1411302
gucccagagaagauucuca

SEQ ID NO: 1411304 - RNA, 19 nt, Artificial Sequence
  Description of Artificial Sequence: Synthetic oligonucleotide
  Sense strand starting at position 3215 of SEQ ID NO: 1243353
aagccaguuugaguugaau

SEQ ID NO: 1411305 - RNA, 19 nt, Artificial Sequence
  Description of Artificial Sequence: Synthetic oligonucleotide
  Antisense strand to SEQ ID NO: 1411304
auucaacucaaacuggcuu

SEQ ID NO: 1411306 - RNA, 19 nt, Artificial Sequence
  Description of Artificial Sequence: Synthetic oligonucleotide
  Sense strand starting at position 3226 of SEQ ID NO: 1243353
aguugaauuucugacaauu

SEQ ID NO: 1411307 - RNA, 19 nt, Artificial Sequence
  Description of Artificial Sequence: Synthetic oligonucleotide
  Antisense strand to SEQ ID NO: 1411306
aauugucagaaauucaacu

SEQ ID NO: 1411308 - RNA, 19 nt, Artificial Sequence
  Description of Artificial Sequence: Synthetic oligonucleotide
  Sense strand starting at position 3491 of SEQ ID NO: 1243353
cuacuuucugcagaugugu

SEQ ID NO: 1411309 - RNA, 19 nt, Artificial Sequence
  Description of Artificial Sequence: Synthetic oligonucleotide
  Antisense strand to SEQ ID NO: 1411308
acacaucugcagaaaguag

SEQ ID NO: 1411310 - RNA, 19 nt, Artificial Sequence
  Description of Artificial Sequence: Synthetic oligonucleotide
  Sense strand starting at position 3719 of SEQ ID NO: 1243353
ggaaauagauucucugggu

SEQ ID NO: 1411311 - RNA, 19 nt, Artificial Sequence
  Description of Artificial Sequence: Synthetic oligonucleotide
  Antisense strand to SEQ ID NO: 1411310
acccagagaaucuauuucc

SEQ ID NO: 1411312 - RNA, 19 nt, Artificial Sequence
  Description of Artificial Sequence: Synthetic oligonucleotide
  Sense strand starting at position 3720 of SEQ ID NO: 1243353
gaaauagauucucugggua

SEQ ID NO: 1411313 - RNA, 19 nt, Artificial Sequence
  Description of Artificial Sequence: Synthetic oligonucleotide
  Antisense strand to SEQ ID NO: 1411312
uacccagagaaucuauuuc

SEQ ID NO: 1411314 - RNA, 19 nt, Artificial Sequence
  Description of Artificial Sequence: Synthetic oligonucleotide
  Sense strand starting at position 3724 of SEQ ID NO: 1243353
uagauucucuggguacuca

SEQ ID NO: 1411315 - RNA, 19 nt, Artificial Sequence
  Description of Artificial Sequence: Synthetic oligonucleotide
  Antisense strand to SEQ ID NO: 1411314
ugaguacccagagaaucua

SEQ ID NO: 1411316 - RNA, 19 nt, Artificial Sequence
  Description of Artificial Sequence: Synthetic oligonucleotide
  Sense strand starting at position 3732 of SEQ ID NO: 1243353
cuggguacucagcagguaa

SEQ ID NO: 1411317 - RNA, 19 nt, Artificial Sequence
  Description of Artificial Sequence: Synthetic oligonucleotide
  Antisense strand to SEQ ID NO: 1411316
uuaccugcugaguacccag

SEQ ID NO: 1411318 - RNA, 19 nt, Artificial Sequence
  Description of Artificial Sequence: Synthetic oligonucleotide
  Sense strand starting at position 3743 of SEQ ID NO: 1243353
gcagguaagcuggauuaga

SEQ ID NO: 1411319 - RNA, 19 nt, Artificial Sequence
  Description of Artificial Sequence: Synthetic oligonucleotide
  Antisense strand to SEQ ID NO: 1411318
ucuaauccagcuuaccugc

SEQ ID NO: 1411320 - RNA, 19 nt, Artificial Sequence
  Description of Artificial Sequence: Synthetic oligonucleotide
  Sense strand starting at position 3760 of SEQ ID NO: 1243353
gaacccagguuuccagaau

SEQ ID NO: 1411321 - RNA, 19 nt, Artificial Sequence
  Description of Artificial Sequence: Synthetic oligonucleotide
  Antisense strand to SEQ ID NO: 1411320
auucuggaaaccuggguuc

SEQ ID NO: 1411322 - RNA, 19 nt, Artificial Sequence
  Description of Artificial Sequence: Synthetic oligonucleotide
  Sense strand starting at position 3806 of SEQ ID NO: 1243353
cugaaugcucuccacguaa

SEQ ID NO: 1411323 - RNA, 19 nt, Artificial Sequence
  Description of Artificial Sequence: Synthetic oligonucleotide
  Antisense strand to SEQ ID NO: 1411322
uuacguggagagcauucag

SEQ ID NO: 1411324 - RNA, 19 nt, Artificial Sequence
  Description of Artificial Sequence: Synthetic oligonucleotide
  Sense strand starting at position 3848 of SEQ ID NO: 1243353
ccuugucaauaccugugaa

SEQ ID NO: 1411325 - RNA, 19 nt, Artificial Sequence
  Description of Artificial Sequence: Synthetic oligonucleotide
  Antisense strand to SEQ ID NO: 1411324
uucacagguauugacaagg

SEQ ID NO: 1411326 - RNA, 19 nt, Artificial Sequence
  Description of Artificial Sequence: Synthetic oligonucleotide
  Sense strand starting at position 3939 of SEQ ID NO: 1243353
uaugaacaaccgugacuuu

SEQ ID NO: 1411327 - RNA, 19 nt, Artificial Sequence
  Description of Artificial Sequence: Synthetic oligonucleotide
  Antisense strand to SEQ ID NO: 1411326
aaagucacgguuguucaua

SEQ ID NO: 1411328 - RNA, 19 nt, Artificial Sequence
  Description of Artificial Sequence: Synthetic oligonucleotide
  Sense strand starting at position 30 of SEQ ID NO: 1243354
uuaacuuucucguuggaag

SEQ ID NO: 1411329 - RNA, 19 nt, Artificial Sequence
  Description of Artificial Sequence: Synthetic oligonucleotide
  Antisense strand to SEQ ID NO: 1411328
cuuccaacgagaaaguuaa

SEQ ID NO: 1411330 - RNA, 19 nt, Artificial Sequence
  Description of Artificial Sequence: Synthetic oligonucleotide
  Sense strand starting at position 31 of SEQ ID NO: 1243354
uaacuuucucguuggaaga

SEQ ID NO: 1411331 - RNA, 19 nt, Artificial Sequence
  Description of Artificial Sequence: Synthetic oligonucleotide
  Antisense strand to SEQ ID NO: 1411330
ucuuccaacgagaaaguua

SEQ ID NO: 1411332 - RNA, 19 nt, Artificial Sequence
  Description of Artificial Sequence: Synthetic oligonucleotide
  Sense strand starting at position 32 of SEQ ID NO: 1243354
aacuuucucguuggaagag

SEQ ID NO: 1411333 - RNA, 19 nt, Artificial Sequence
  Description of Artificial Sequence: Synthetic oligonucleotide
  Antisense strand to SEQ ID NO: 1411332
cucuuccaacgagaaaguu

SEQ ID NO: 1411334 - RNA, 19 nt, Artificial Sequence
  Description of Artificial Sequence: Synthetic oligonucleotide
  Sense strand starting at position 47 of SEQ ID NO: 1243354
agagcuaacugcuuucuua

SEQ ID NO: 1411335 - RNA, 19 nt, Artificial Sequence
  Description of Artificial Sequence: Synthetic oligonucleotide
  Antisense strand to SEQ ID NO: 1411334
uaagaaagcaguuagcucu

SEQ ID NO: 1411336 - RNA, 19 nt, Artificial Sequence
  Description of Artificial Sequence: Synthetic oligonucleotide
  Sense strand starting at position 67 of SEQ ID NO: 1243354
ucaagauccucugcucaga

SEQ ID NO: 1411337 - RNA, 19 nt, Artificial Sequence
  Description of Artificial Sequence: Synthetic oligonucleotide
  Antisense strand to SEQ ID NO: 1411336
ucugagcagaggaucuuga

SEQ ID NO: 1411338 - RNA, 19 nt, Artificial Sequence
  Description of Artificial Sequence: Synthetic oligonucleotide
  Sense strand starting at position 89 of SEQ ID NO: 1243354
accugugcucuauggugau

SEQ ID NO: 1411339 - RNA, 19 nt, Artificial Sequence
  Description of Artificial Sequence: Synthetic oligonucleotide
  Antisense strand to SEQ ID NO: 1411338
aucaccauagagcacaggu

SEQ ID NO: 1411340 - RNA, 19 nt, Artificial Sequence
  Description of Artificial Sequence: Synthetic oligonucleotide
  Sense strand starting at position 95 of SEQ ID NO: 1243354
gcucuauggugaucccacu

SEQ ID NO: 1411341 - RNA, 19 nt, Artificial Sequence
  Description of Artificial Sequence: Synthetic oligonucleotide
  Antisense strand to SEQ ID NO: 1411340
agugggaucaccauagagc

SEQ ID NO: 1411342 - RNA, 19 nt, Artificial Sequence
  Description of Artificial Sequence: Synthetic oligonucleotide
  Sense strand starting at position 454 of SEQ ID NO: 1243354
aaagcaaguguccagagua

SEQ ID NO: 1411343 - RNA, 19 nt, Artificial Sequence
  Description of Artificial Sequence: Synthetic oligonucleotide
  Antisense strand to SEQ ID NO: 1411342
uacucuggacacuugcuuu

SEQ ID NO: 1411344 - RNA, 19 nt, Artificial Sequence
  Description of Artificial Sequence: Synthetic oligonucleotide
  Sense strand starting at position 809 of SEQ ID NO: 1243354
cuauguuauucuuccugga

SEQ ID NO: 1411345 - RNA, 19 nt, Artificial Sequence
  Description of Artificial Sequence: Synthetic oligonucleotide
  Antisense strand to SEQ ID NO: 1411344
uccaggaagaauaacauag

SEQ ID NO: 1411346 - RNA, 19 nt, Artificial Sequence
  Description of Artificial Sequence: Synthetic oligonucleotide
  Sense strand starting at position 811 of SEQ ID NO: 1243354
auguuauucuuccuggauu

SEQ ID NO: 1411347 - RNA, 19 nt, Artificial Sequence
  Description of Artificial Sequence: Synthetic oligonucleotide
  Antisense strand to SEQ ID NO: 1411346
aauccaggaagaauaacau

SEQ ID NO: 1411348 - RNA, 19 nt, Artificial Sequence
  Description of Artificial Sequence: Synthetic oligonucleotide
  Sense strand starting at position 824 of SEQ ID NO: 1243354
uggauuggcuguaggugau

SEQ ID NO: 1411349 - RNA, 19 nt, Artificial Sequence
  Description of Artificial Sequence: Synthetic oligonucleotide
  Antisense strand to SEQ ID NO: 1411348
aucaccuacagccaaucca

SEQ ID NO: 1411350 - RNA, 19 nt, Artificial Sequence
  Description of Artificial Sequence: Synthetic oligonucleotide
  Sense strand starting at position 837 of SEQ ID NO: 1243354
ggugaucucuaggcucuca

SEQ ID NO: 1411351 - RNA, 19 nt, Artificial Sequence
  Description of Artificial Sequence: Synthetic oligonucleotide
  Antisense strand to SEQ ID NO: 1411350
ugagagccuagagaucacc

SEQ ID NO: 1411352 - RNA, 19 nt, Artificial Sequence
  Description of Artificial Sequence: Synthetic oligonucleotide
  Sense strand starting at position 952 of SEQ ID NO: 1243354
cugcaaugcggcuagaacu

SEQ ID NO: 1411353 - RNA, 19 nt, Artificial Sequence
  Description of Artificial Sequence: Synthetic oligonucleotide
  Antisense strand to SEQ ID NO: 1411352
aguucuagccgcauugcag

SEQ ID NO: 1411354 - RNA, 19 nt, Artificial Sequence
  Description of Artificial Sequence: Synthetic oligonucleotide
  Sense strand starting at position 1061 of SEQ ID NO: 1243354
ggcugugcucccugagaau

SEQ ID NO: 1411355 - RNA, 19 nt, Artificial Sequence
  Description of Artificial Sequence: Synthetic oligonucleotide
  Antisense strand to SEQ ID NO: 1411354
auucucagggagcacagcc

SEQ ID NO: 1411356 - RNA, 19 nt, Artificial Sequence
  Description of Artificial Sequence: Synthetic oligonucleotide
  Sense strand starting at position 1079 of SEQ ID NO: 1243354
uggcauuauuucugauacu

SEQ ID NO: 1411357 - RNA, 19 nt, Artificial Sequence
  Description of Artificial Sequence: Synthetic oligonucleotide
  Antisense strand to SEQ ID NO: 1411356
aguaucagaaauaaugcca

SEQ ID NO: 1411358 - RNA, 19 nt, Artificial Sequence
  Description of Artificial Sequence: Synthetic oligonucleotide
  Sense strand starting at position 1204 of SEQ ID NO: 1243354
ggcucagagugcuagauuu

SEQ ID NO: 1411359 - RNA, 19 nt, Artificial Sequence
  Description of Artificial Sequence: Synthetic oligonucleotide
  Antisense strand to SEQ ID NO: 1411358
aaaucuagcacucugagcc

SEQ ID NO: 1411360 - RNA, 19 nt, Artificial Sequence
  Description of Artificial Sequence: Synthetic oligonucleotide
  Sense strand starting at position 1273 of SEQ ID NO: 1243354
ucaagagcucuuggaaucu

SEQ ID NO: 1411361 - RNA, 19 nt, Artificial Sequence
  Description of Artificial Sequence: Synthetic oligonucleotide
  Antisense strand to SEQ ID NO: 1411360
agauuccaagagcucuuga

SEQ ID NO: 1411362 - RNA, 19 nt, Artificial Sequence
  Description of Artificial Sequence: Synthetic oligonucleotide
  Sense strand starting at position 1446 of SEQ ID NO: 1243354
gacacuuccgcuggaauga

SEQ ID NO: 1411363 - RNA, 19 nt, Artificial Sequence
  Description of Artificial Sequence: Synthetic oligonucleotide
  Antisense strand to SEQ ID NO: 1411362
ucauuccagcggaaguguc

SEQ ID NO: 1411364 - RNA, 19 nt, Artificial Sequence
  Description of Artificial Sequence: Synthetic oligonucleotide
  Sense strand starting at position 1456 of SEQ ID NO: 1243354
cuggaaugagcucgaggua

SEQ ID NO: 1411365 - RNA, 19 nt, Artificial Sequence
  Description of Artificial Sequence: Synthetic oligonucleotide
  Antisense strand to SEQ ID NO: 1411364
uaccucgagcucauuccag

SEQ ID NO: 1411366 - RNA, 19 nt, Artificial Sequence
  Description of Artificial Sequence: Synthetic oligonucleotide
  Sense strand starting at position 1594 of SEQ ID NO: 1243354
uguguauuccagcuccugu

SEQ ID NO: 1411367 - RNA, 19 nt, Artificial Sequence
  Description of Artificial Sequence: Synthetic oligonucleotide
  Antisense strand to SEQ ID NO: 1411366
acaggagcuggaauacaca

SEQ ID NO: 1411368 - RNA, 19 nt, Artificial Sequence
  Description of Artificial Sequence: Synthetic oligonucleotide
  Sense strand starting at position 2268 of SEQ ID NO: 1243354
cccaaauggcugggauuga

SEQ ID NO: 1411369 - RNA, 19 nt, Artificial Sequence
  Description of Artificial Sequence: Synthetic oligonucleotide
  Antisense strand to SEQ ID NO: 1411368
ucaaucccagccauuuggg

SEQ ID NO: 1411370 - RNA, 19 nt, Artificial Sequence
  Description of Artificial Sequence: Synthetic oligonucleotide
  Sense strand starting at position 2269 of SEQ ID NO: 1243354
ccaaauggcugggauugaa

SEQ ID NO: 1411371 - RNA, 19 nt, Artificial Sequence
  Description of Artificial Sequence: Synthetic oligonucleotide
  Antisense strand to SEQ ID NO: 1411370
uucaaucccagccauuugg

SEQ ID NO: 1411372 - RNA, 19 nt, Artificial Sequence
  Description of Artificial Sequence: Synthetic oligonucleotide
  Sense strand starting at position 2359 of SEQ ID NO: 1243354
agccuucucggacacuuaa

SEQ ID NO: 1411373 - RNA, 19 nt, Artificial Sequence
  Description of Artificial Sequence: Synthetic oligonucleotide
  Antisense strand to SEQ ID NO: 1411372
uuaaguguccgagaaggcu

SEQ ID NO: 1411374 - RNA, 19 nt, Artificial Sequence
  Description of Artificial Sequence: Synthetic oligonucleotide
  Sense strand starting at position 3044 of SEQ ID NO: 1243354
cuggucaguuucuuuauca

SEQ ID NO: 1411375 - RNA, 19 nt, Artificial Sequence
  Description of Artificial Sequence: Synthetic oligonucleotide
  Antisense strand to SEQ ID NO: 1411374
ugauaaagaaacugaccag

SEQ ID NO: 1411376 - RNA, 19 nt, Artificial Sequence
  Description of Artificial Sequence: Synthetic oligonucleotide
  Sense strand starting at position 3045 of SEQ ID NO: 1243354
uggucaguuucuuuaucaa

SEQ ID NO: 1411377 - RNA, 19 nt, Artificial Sequence
  Description of Artificial Sequence: Synthetic oligonucleotide
  Antisense strand to SEQ ID NO: 1411376
uugauaaagaaacugacca

SEQ ID NO: 1411378 - RNA, 19 nt, Artificial Sequence
  Description of Artificial Sequence: Synthetic oligonucleotide
  Sense strand starting at position 3048 of SEQ ID NO: 1243354
ucaguuucuuuaucaacga

SEQ ID NO: 1411379 - RNA, 19 nt, Artificial Sequence
  Description of Artificial Sequence: Synthetic oligonucleotide
  Antisense strand to SEQ ID NO: 1411378
ucguugauaaagaaacuga

SEQ ID NO: 1411380 - RNA, 19 nt, Artificial Sequence
  Description of Artificial Sequence: Synthetic oligonucleotide
  Sense strand starting at position 3052 of SEQ ID NO: 1243354
uuucuuuaucaacgaaaug

SEQ ID NO: 1411381 - RNA, 19 nt, Artificial Sequence
  Description of Artificial Sequence: Synthetic oligonucleotide
  Antisense strand to SEQ ID NO: 1411380
cauuucguugauaaagaaa

SEQ ID NO: 1411382 - RNA, 19 nt, Artificial Sequence
  Description of Artificial Sequence: Synthetic oligonucleotide
  Sense strand starting at position 3139 of SEQ ID NO: 1243354
gcggcuuagcauguugaca

SEQ ID NO: 1411383 - RNA, 19 nt, Artificial Sequence
  Description of Artificial Sequence: Synthetic oligonucleotide
  Antisense strand to SEQ ID NO: 1411382
ugucaacaugcuaagccgc

SEQ ID NO: 1411384 - RNA, 19 nt, Artificial Sequence
  Description of Artificial Sequence: Synthetic oligonucleotide
  Sense strand starting at position 3178 of SEQ ID NO: 1243354
uccugcaucucuguuauuu

SEQ ID NO: 1411385 - RNA, 19 nt, Artificial Sequence
  Description of Artificial Sequence: Synthetic oligonucleotide
  Antisense strand to SEQ ID NO: 1411384
aaauaacagagaugcagga

SEQ ID NO: 1411386 - RNA, 19 nt, Artificial Sequence
  Description of Artificial Sequence: Synthetic oligonucleotide
  Sense strand starting at position 3231 of SEQ ID NO: 1243354
ccguguucugugaggcuga

SEQ ID NO: 1411387 - RNA, 19 nt, Artificial Sequence
  Description of Artificial Sequence: Synthetic oligonucleotide
  Antisense strand to SEQ ID NO: 1411386
ucagccucacagaacacgg

SEQ ID NO: 1411388 - RNA, 19 nt, Artificial Sequence
  Description of Artificial Sequence: Synthetic oligonucleotide
  Sense strand starting at position 3360 of SEQ ID NO: 1243354
cgcaacauaacucggagau

SEQ ID NO: 1411389 - RNA, 19 nt, Artificial Sequence
  Description of Artificial Sequence: Synthetic oligonucleotide
  Antisense strand to SEQ ID NO: 1411388
aucuccgaguuauguugcg

SEQ ID NO: 1411390 - RNA, 19 nt, Artificial Sequence
  Description of Artificial Sequence: Synthetic oligonucleotide
  Sense strand starting at position 3361 of SEQ ID NO: 1243354
gcaacauaacucggagauu

SEQ ID NO: 1411391 - RNA, 19 nt, Artificial Sequence
  Description of Artificial Sequence: Synthetic oligonucleotide
  Antisense strand to SEQ ID NO: 1411390
aaucuccgaguuauguugc

SEQ ID NO: 1411392 - RNA, 19 nt, Artificial Sequence
  Description of Artificial Sequence: Synthetic oligonucleotide
  Sense strand starting at position 3373 of SEQ ID NO: 1243354
ggagauuccugaccucaug

SEQ ID NO: 1411393 - RNA, 19 nt, Artificial Sequence
  Description of Artificial Sequence: Synthetic oligonucleotide
  Antisense strand to SEQ ID NO: 1411392
caugaggucaggaaucucc

SEQ ID NO: 1411394 - RNA, 19 nt, Artificial Sequence
  Description of Artificial Sequence: Synthetic oligonucleotide
  Sense strand starting at position 3505 of SEQ ID NO: 1243354
cagggaauuugagaaggua

SEQ ID NO: 1411395 - RNA, 19 nt, Artificial Sequence
  Description of Artificial Sequence: Synthetic oligonucleotide
  Antisense strand to SEQ ID NO: 1411394
uaccuucucaaauucccug

SEQ ID NO: 1411396 - RNA, 19 nt, Artificial Sequence
  Description of Artificial Sequence: Synthetic oligonucleotide
  Sense strand starting at position 3700 of SEQ ID NO: 1243354
guguauagagucuaucaca

SEQ ID NO: 1411397 - RNA, 19 nt, Artificial Sequence
  Description of Artificial Sequence: Synthetic oligonucleotide
  Antisense strand to SEQ ID NO: 1411396
ugugauagacucuauacac

SEQ ID NO: 1411398 - RNA, 19 nt, Artificial Sequence
  Description of Artificial Sequence: Synthetic oligonucleotide
  Sense strand starting at position 3718 of SEQ ID NO: 1243354
aacccaguguggucaggau

SEQ ID NO: 1411399 - RNA, 19 nt, Artificial Sequence
  Description of Artificial Sequence: Synthetic oligonucleotide
  Antisense strand to SEQ ID NO: 1411398
auccugaccacacuggguu

SEQ ID NO: 1411400 - RNA, 19 nt, Artificial Sequence
  Description of Artificial Sequence: Synthetic oligonucleotide
  Sense strand starting at position 3735 of SEQ ID NO: 1243354
auguguugugaccacagau

SEQ ID NO: 1411401 - RNA, 19 nt, Artificial Sequence
  Description of Artificial Sequence: Synthetic oligonucleotide
  Antisense strand to SEQ ID NO: 1411400
aucuguggucacaacacau

SEQ ID NO: 1411402 - RNA, 19 nt, Artificial Sequence
  Description of Artificial Sequence: Synthetic oligonucleotide
  Sense strand starting at position 3745 of SEQ ID NO: 1243354
accacagauguguggaagu

SEQ ID NO: 1411403 - RNA, 19 nt, Artificial Sequence
  Description of Artificial Sequence: Synthetic oligonucleotide
  Antisense strand to SEQ ID NO: 1411402
acuuccacacaucuguggu

SEQ ID NO: 1411404 - RNA, 19 nt, Artificial Sequence
  Description of Artificial Sequence: Synthetic oligonucleotide
  Sense strand starting at position 3796 of SEQ ID NO: 1243354
uguugauccaaggaggcuu

SEQ ID NO: 1411405 - RNA, 19 nt, Artificial Sequence
  Description of Artificial Sequence: Synthetic oligonucleotide
  Antisense strand to SEQ ID NO: 1411404
aagccuccuuggaucaaca

SEQ ID NO: 1411406 - RNA, 19 nt, Artificial Sequence
  Description of Artificial Sequence: Synthetic oligonucleotide
  Sense strand starting at position 3941 of SEQ ID NO: 1243354
gccugaguuguucaggucu

SEQ ID NO: 1411407 - RNA, 19 nt, Artificial Sequence
  Description of Artificial Sequence: Synthetic oligonucleotide
  Antisense strand to SEQ ID NO: 1411406
agaccugaacaacucaggc

SEQ ID NO: 1411408 - RNA, 19 nt, Artificial Sequence
  Description of Artificial Sequence: Synthetic oligonucleotide
  Sense strand starting at position 216 of SEQ ID NO: 1243355
gauccaugccaugggauga

SEQ ID NO: 1411409 - RNA, 19 nt, Artificial Sequence
  Description of Artificial Sequence: Synthetic oligonucleotide
  Antisense strand to SEQ ID NO: 1411408
ucaucccauggcauggauc

SEQ ID NO: 1411410 - RNA, 19 nt, Artificial Sequence
  Description of Artificial Sequence: Synthetic oligonucleotide
  Sense strand starting at position 227 of SEQ ID NO: 1243355
ugggaugaaucugagaauu

SEQ ID NO: 1411411 - RNA, 19 nt, Artificial Sequence
  Description of Artificial Sequence: Synthetic oligonucleotide
  Antisense strand to SEQ ID NO: 1411410
aauucucagauucauccca

SEQ ID NO: 1411412 - RNA, 19 nt, Artificial Sequence
  Description of Artificial Sequence: Synthetic oligonucleotide
  Sense strand starting at position 229 of SEQ ID NO: 1243355
ggaugaaucugagaauugc

SEQ ID NO: 1411413 - RNA, 19 nt, Artificial Sequence
  Description of Artificial Sequence: Synthetic oligonucleotide
  Antisense strand to SEQ ID NO: 1411412
gcaauucucagauucaucc

SEQ ID NO: 1411414 - RNA, 19 nt, Artificial Sequence
  Description of Artificial Sequence: Synthetic oligonucleotide
  Sense strand starting at position 283 of SEQ ID NO: 1243355
uguggcaucugcuacaagu

SEQ ID NO: 1411415 - RNA, 19 nt, Artificial Sequence
  Description of Artificial Sequence: Synthetic oligonucleotide
  Antisense strand to SEQ ID NO: 1411414
acuuguagcagaugccaca

SEQ ID NO: 1411416 - RNA, 19 nt, Artificial Sequence
  Description of Artificial Sequence: Synthetic oligonucleotide
  Sense strand starting at position 677 of SEQ ID NO: 1243355
uuaucucuggccuggugaa

SEQ ID NO: 1411417 - RNA, 19 nt, Artificial Sequence
  Description of Artificial Sequence: Synthetic oligonucleotide
  Antisense strand to SEQ ID NO: 1411416
uucaccaggccagagauaa

SEQ ID NO: 1411418 - RNA, 19 nt, Artificial Sequence
  Description of Artificial Sequence: Synthetic oligonucleotide
  Sense strand starting at position 733 of SEQ ID NO: 1243355
cauggcuguuucccagaga

SEQ ID NO: 1411419 - RNA, 19 nt, Artificial Sequence
  Description of Artificial Sequence: Synthetic oligonucleotide
  Antisense strand to SEQ ID NO: 1411418
ucucugggaaacagccaug

SEQ ID NO: 1411420 - RNA, 19 nt, Artificial Sequence
  Description of Artificial Sequence: Synthetic oligonucleotide
  Sense strand starting at position 734 of SEQ ID NO: 1243355
auggcuguuucccagagaa

SEQ ID NO: 1411421 - RNA, 19 nt, Artificial Sequence
  Description of Artificial Sequence: Synthetic oligonucleotide
  Antisense strand to SEQ ID NO: 1411420
uucucugggaaacagccau

SEQ ID NO: 1411422 - RNA, 19 nt, Artificial Sequence
  Description of Artificial Sequence: Synthetic oligonucleotide
  Sense strand starting at position 838 of SEQ ID NO: 1243355
gggaucccuuagccuaaau

SEQ ID NO: 1411423 - RNA, 19 nt, Artificial Sequence
  Description of Artificial Sequence: Synthetic oligonucleotide
  Antisense strand to SEQ ID NO: 1411422
auuuaggcuaagggauccc

SEQ ID NO: 1411424 - RNA, 19 nt, Artificial Sequence
  Description of Artificial Sequence: Synthetic oligonucleotide
  Sense strand starting at position 877 of SEQ ID NO: 1243355
acacgauguuauuacuacu

SEQ ID NO: 1411425 - RNA, 19 nt, Artificial Sequence
  Description of Artificial Sequence: Synthetic oligonucleotide
  Antisense strand to SEQ ID NO: 1411424
aguaguaauaacaucgugu

SEQ ID NO: 1411426 - RNA, 19 nt, Artificial Sequence
  Description of Artificial Sequence: Synthetic oligonucleotide
  Sense strand starting at position 880 of SEQ ID NO: 1243355
cgauguuauuacuacuguu

SEQ ID NO: 1411427 - RNA, 19 nt, Artificial Sequence
  Description of Artificial Sequence: Synthetic oligonucleotide
  Antisense strand to SEQ ID NO: 1411426
aacaguaguaauaacaucg

SEQ ID NO: 1411428 - RNA, 19 nt, Artificial Sequence
  Description of Artificial Sequence: Synthetic oligonucleotide
  Sense strand starting at position 1022 of SEQ ID NO: 1243355
uaaaccgauugcucaguua

SEQ ID NO: 1411429 - RNA, 19 nt, Artificial Sequence
  Description of Artificial Sequence: Synthetic oligonucleotide
  Antisense strand to SEQ ID NO: 1411428
uaacugagcaaucgguuua

SEQ ID NO: 1411430 - RNA, 19 nt, Artificial Sequence
  Description of Artificial Sequence: Synthetic oligonucleotide
  Sense strand starting at position 1274 of SEQ ID NO: 1243355
gggaugguccaggaacgua

SEQ ID NO: 1411431 - RNA, 19 nt, Artificial Sequence
  Description of Artificial Sequence: Synthetic oligonucleotide
  Antisense strand to SEQ ID NO: 1411430
uacguuccuggaccauccc

SEQ ID NO: 1411432 - RNA, 19 nt, Artificial Sequence
  Description of Artificial Sequence: Synthetic oligonucleotide
  Sense strand starting at position 1279 of SEQ ID NO: 1243355
gguccaggaacguaaagau

SEQ ID NO: 1411433 - RNA, 19 nt, Artificial Sequence
  Description of Artificial Sequence: Synthetic oligonucleotide
  Antisense strand to SEQ ID NO: 1411432
aucuuuacguuccuggacc

SEQ ID NO: 1411434 - RNA, 19 nt, Artificial Sequence
  Description of Artificial Sequence: Synthetic oligonucleotide
  Sense strand starting at position 1766 of SEQ ID NO: 1243355
cguugagcagcgugauguu

SEQ ID NO: 1411435 - RNA, 19 nt, Artificial Sequence
  Description of Artificial Sequence: Synthetic oligonucleotide
  Antisense strand to SEQ ID NO: 1411434
aacaucacgcugcucaacg

SEQ ID NO: 1411436 - RNA, 19 nt, Artificial Sequence
  Description of Artificial Sequence: Synthetic oligonucleotide
  Sense strand starting at position 2829 of SEQ ID NO: 1243355
gcuuguuauuccuagggaa

SEQ ID NO: 1411437 - RNA, 19 nt, Artificial Sequence
  Description of Artificial Sequence: Synthetic oligonucleotide
  Antisense strand to SEQ ID NO: 1411436
uucccuaggaauaacaagc

SEQ ID NO: 1411438 - RNA, 19 nt, Artificial Sequence
  Description of Artificial Sequence: Synthetic oligonucleotide
  Sense strand starting at position 2831 of SEQ ID NO: 1243355
uuguuauuccuagggaaug

SEQ ID NO: 1411439 - RNA, 19 nt, Artificial Sequence
  Description of Artificial Sequence: Synthetic oligonucleotide
  Antisense strand to SEQ ID NO: 1411438
cauucccuaggaauaacaa

SEQ ID NO: 1411440 - RNA, 19 nt, Artificial Sequence
  Description of Artificial Sequence: Synthetic oligonucleotide
  Sense strand starting at position 2916 of SEQ ID NO: 1243355
ggcuccuaggccuggaaau

SEQ ID NO: 1411441 - RNA, 19 nt, Artificial Sequence
  Description of Artificial Sequence: Synthetic oligonucleotide
  Antisense strand to SEQ ID NO: 1411440
auuuccaggccuaggagcc

SEQ ID NO: 1411442 - RNA, 19 nt, Artificial Sequence
  Description of Artificial Sequence: Synthetic oligonucleotide
  Sense strand starting at position 3017 of SEQ ID NO: 1243355
ggaggaagcuccucaguau

SEQ ID NO: 1411443 - RNA, 19 nt, Artificial Sequence
  Description of Artificial Sequence: Synthetic oligonucleotide
  Antisense strand to SEQ ID NO: 1411442
auacugaggagcuuccucc

SEQ ID NO: 1411444 - RNA, 19 nt, Artificial Sequence
  Description of Artificial Sequence: Synthetic oligonucleotide
  Sense strand starting at position 3068 of SEQ ID NO: 1243355
aaacgaguccuuggaagcu

SEQ ID NO: 1411445 - RNA, 19 nt, Artificial Sequence
  Description of Artificial Sequence: Synthetic oligonucleotide
  Antisense strand to SEQ ID NO: 1411444
agcuuccaaggacucguuu

SEQ ID NO: 1411446 - RNA, 19 nt, Artificial Sequence
  Description of Artificial Sequence: Synthetic oligonucleotide
  Sense strand starting at position 3336 of SEQ ID NO: 1243355
cagggcuugucauucugga

SEQ ID NO: 1411447 - RNA, 19 nt, Artificial Sequence
  Description of Artificial Sequence: Synthetic oligonucleotide
  Antisense strand to SEQ ID NO: 1411446
uccagaaugacaagcccug

SEQ ID NO: 1411448 - RNA, 19 nt, Artificial Sequence
  Description of Artificial Sequence: Synthetic oligonucleotide
  Sense strand starting at position 3378 of SEQ ID NO: 1243355
gggcauuccucugcgguga

SEQ ID NO: 1411449 - RNA, 19 nt, Artificial Sequence
  Description of Artificial Sequence: Synthetic oligonucleotide
  Antisense strand to SEQ ID NO: 1411448
ucaccgcagaggaaugccc

SEQ ID NO: 1411450 - RNA, 19 nt, Artificial Sequence
  Description of Artificial Sequence: Synthetic oligonucleotide
  Sense strand starting at position 3379 of SEQ ID NO: 1243355
ggcauuccucugcggugau

SEQ ID NO: 1411451 - RNA, 19 nt, Artificial Sequence
  Description of Artificial Sequence: Synthetic oligonucleotide
  Antisense strand to SEQ ID NO: 1411450
aucaccgcagaggaaugcc

SEQ ID NO: 1411452 - RNA, 19 nt, Artificial Sequence
  Description of Artificial Sequence: Synthetic oligonucleotide
  Sense strand starting at position 3380 of SEQ ID NO: 1243355
gcauuccucugcggugaua

SEQ ID NO: 1411453 - RNA, 19 nt, Artificial Sequence
  Description of Artificial Sequence: Synthetic oligonucleotide
  Antisense strand to SEQ ID NO: 1411452
uaucaccgcagaggaaugc

SEQ ID NO: 1411454 - RNA, 19 nt, Artificial Sequence
  Description of Artificial Sequence: Synthetic oligonucleotide
  Sense strand starting at position 3382 of SEQ ID NO: 1243355
auuccucugcggugauaaa

SEQ ID NO: 1411455 - RNA, 19 nt, Artificial Sequence
  Description of Artificial Sequence: Synthetic oligonucleotide
  Antisense strand to SEQ ID NO: 1411454
uuuaucaccgcagaggaau

SEQ ID NO: 1411456 - RNA, 19 nt, Artificial Sequence
  Description of Artificial Sequence: Synthetic oligonucleotide
  Sense strand starting at position 3612 of SEQ ID NO: 1243355
cuagacagcuucuuaugca

SEQ ID NO: 1411457 - RNA, 19 nt, Artificial Sequence
  Description of Artificial Sequence: Synthetic oligonucleotide
  Antisense strand to SEQ ID NO: 1411456
ugcauaagaagcugucuag

SEQ ID NO: 1411458 - RNA, 19 nt, Artificial Sequence
  Description of Artificial Sequence: Synthetic oligonucleotide
  Sense strand starting at position 3620 of SEQ ID NO: 1243355
cuucuuaugcaauagggua

SEQ ID NO: 1411459 - RNA, 19 nt, Artificial Sequence
  Description of Artificial Sequence: Synthetic oligonucleotide
  Antisense strand to SEQ ID NO: 1411458
uacccuauugcauaagaag

SEQ ID NO: 1411460 - RNA, 19 nt, Artificial Sequence
  Description of Artificial Sequence: Synthetic oligonucleotide
  Sense strand starting at position 3767 of SEQ ID NO: 1243355
ccaccauucuucuuugagu

SEQ ID NO: 1411461 - RNA, 19 nt, Artificial Sequence
  Description of Artificial Sequence: Synthetic oligonucleotide
  Antisense strand to SEQ ID NO: 1411460
acucaaagaagaauggugg

SEQ ID NO: 1411462 - RNA, 19 nt, Artificial Sequence
  Description of Artificial Sequence: Synthetic oligonucleotide
  Sense strand starting at position 3773 of SEQ ID NO: 1243355
uucuucuuugaguaacaag

SEQ ID NO: 1411463 - RNA, 19 nt, Artificial Sequence
  Description of Artificial Sequence: Synthetic oligonucleotide
  Antisense strand to SEQ ID NO: 1411462
cuuguuacucaaagaagaa

SEQ ID NO: 1411464 - RNA, 19 nt, Artificial Sequence
  Description of Artificial Sequence: Synthetic oligonucleotide
  Sense strand starting at position 3776 of SEQ ID NO: 1243355
uucuuugaguaacaagaaa

SEQ ID NO: 1411465 - RNA, 19 nt, Artificial Sequence
  Description of Artificial Sequence: Synthetic oligonucleotide
  Antisense strand to SEQ ID NO: 1411464
uuucuuguuacucaaagaa

SEQ ID NO: 1411466 - RNA, 19 nt, Artificial Sequence
  Description of Artificial Sequence: Synthetic oligonucleotide
  Sense strand starting at position 3934 of SEQ ID NO: 1243355
cagggugagugagaauuaa

SEQ ID NO: 1411467 - RNA, 19 nt, Artificial Sequence
  Description of Artificial Sequence: Synthetic oligonucleotide
  Antisense strand to SEQ ID NO: 1411466
uuaauucucacucacccug

SEQ ID NO: 1411468 - RNA, 19 nt, Artificial Sequence
  Description of Artificial Sequence: Synthetic oligonucleotide
  Sense strand starting at position 145 of SEQ ID NO: 1243356
gcccaaaccugucagagaa

SEQ ID NO: 1411469 - RNA, 19 nt, Artificial Sequence
  Description of Artificial Sequence: Synthetic oligonucleotide
  Antisense strand to SEQ ID NO: 1411468
uucucugacagguuugggc

SEQ ID NO: 1411470 - RNA, 19 nt, Artificial Sequence
  Description of Artificial Sequence: Synthetic oligonucleotide
  Sense strand starting at position 147 of SEQ ID NO: 1243356
ccaaaccugucagagaacu

SEQ ID NO: 1411471 - RNA, 19 nt, Artificial Sequence
  Description of Artificial Sequence: Synthetic oligonucleotide
  Antisense strand to SEQ ID NO: 1411470
aguucucugacagguuugg

SEQ ID NO: 1411472 - RNA, 19 nt, Artificial Sequence
  Description of Artificial Sequence: Synthetic oligonucleotide
  Sense strand starting at position 159 of SEQ ID NO: 1243356
gagaacuggccuugucaca

SEQ ID NO: 1411473 - RNA, 19 nt, Artificial Sequence
  Description of Artificial Sequence: Synthetic oligonucleotide
  Antisense strand to SEQ ID NO: 1411472
ugugacaaggccaguucuc

SEQ ID NO: 1411474 - RNA, 19 nt, Artificial Sequence
  Description of Artificial Sequence: Synthetic oligonucleotide
  Sense strand starting at position 164 of SEQ ID NO: 1243356
cuggccuugucacauuaaa

SEQ ID NO: 1411475 - RNA, 19 nt, Artificial Sequence
  Description of Artificial Sequence: Synthetic oligonucleotide
  Antisense strand to SEQ ID NO: 1411474
uuuaaugugacaaggccag

SEQ ID NO: 1411476 - RNA, 19 nt, Artificial Sequence
  Description of Artificial Sequence: Synthetic oligonucleotide
  Sense strand starting at position 220 of SEQ ID NO: 1243356
gugggcaccguuuacauaa

SEQ ID NO: 1411477 - RNA, 19 nt, Artificial Sequence
  Description of Artificial Sequence: Synthetic oligonucleotide
  Antisense strand to SEQ ID NO: 1411476
uuauguaaacggugcccac

SEQ ID NO: 1411478 - RNA, 19 nt, Artificial Sequence
  Description of Artificial Sequence: Synthetic oligonucleotide
  Sense strand starting at position 589 of SEQ ID NO: 1243356
gcacaaaggucaggaaauu

SEQ ID NO: 1411479 - RNA, 19 nt, Artificial Sequence
  Description of Artificial Sequence: Synthetic oligonucleotide
  Antisense strand to SEQ ID NO: 1411478
aauuuccugaccuuugugc

SEQ ID NO: 1411480 - RNA, 19 nt, Artificial Sequence
  Description of Artificial Sequence: Synthetic oligonucleotide
  Sense strand starting at position 601 of SEQ ID NO: 1243356
ggaaauuucuucuacuaag

SEQ ID NO: 1411481 - RNA, 19 nt, Artificial Sequence
  Description of Artificial Sequence: Synthetic oligonucleotide
  Antisense strand to SEQ ID NO: 1411480
cuuaguagaagaaauuucc

SEQ ID NO: 1411482 - RNA, 19 nt, Artificial Sequence
  Description of Artificial Sequence: Synthetic oligonucleotide
  Sense strand starting at position 764 of SEQ ID NO: 1243356
aguguaacgacuugaauaa

SEQ ID NO: 1411483 - RNA, 19 nt, Artificial Sequence
  Description of Artificial Sequence: Synthetic oligonucleotide
  Antisense strand to SEQ ID NO: 1411482
uuauucaagucguuacacu

SEQ ID NO: 1411484 - RNA, 19 nt, Artificial Sequence
  Description of Artificial Sequence: Synthetic oligonucleotide
  Sense strand starting at position 765 of SEQ ID NO: 1243356
guguaacgacuugaauaac

SEQ ID NO: 1411485 - RNA, 19 nt, Artificial Sequence
  Description of Artificial Sequence: Synthetic oligonucleotide
  Antisense strand to SEQ ID NO: 1411484
guuauucaagucguuacac

SEQ ID NO: 1411486 - RNA, 19 nt, Artificial Sequence
  Description of Artificial Sequence: Synthetic oligonucleotide
  Sense strand starting at position 777 of SEQ ID NO: 1243356
gaauaacgaucugagauca

SEQ ID NO: 1411487 - RNA, 19 nt, Artificial Sequence
  Description of Artificial Sequence: Synthetic oligonucleotide
  Antisense strand to SEQ ID NO: 1411486
ugaucucagaucguuauuc

SEQ ID NO: 1411488 - RNA, 19 nt, Artificial Sequence
  Description of Artificial Sequence: Synthetic oligonucleotide
  Sense strand starting at position 791 of SEQ ID NO: 1243356
gaucaaaguugggaagcaa

SEQ ID NO: 1411489 - RNA, 19 nt, Artificial Sequence
  Description of Artificial Sequence: Synthetic oligonucleotide
  Antisense strand to SEQ ID NO: 1411488
uugcuucccaacuuugauc

SEQ ID NO: 1411490 - RNA, 19 nt, Artificial Sequence
  Description of Artificial Sequence: Synthetic oligonucleotide
  Sense strand starting at position 949 of SEQ ID NO: 1243356
ucugaaaucugggagcagu

SEQ ID NO: 1411491 - RNA, 19 nt, Artificial Sequence
  Description of Artificial Sequence: Synthetic oligonucleotide
  Antisense strand to SEQ ID NO: 1411490
acugcucccagauuucaga

SEQ ID NO: 1411492 - RNA, 19 nt, Artificial Sequence
  Description of Artificial Sequence: Synthetic oligonucleotide
  Sense strand starting at position 1224 of SEQ ID NO: 1243356
gagagauagucacacaaga

SEQ ID NO: 1411493 - RNA, 19 nt, Artificial Sequence
  Description of Artificial Sequence: Synthetic oligonucleotide
  Antisense strand to SEQ ID NO: 1411492
ucuugugugacuaucucuc

SEQ ID NO: 1411494 - RNA, 19 nt, Artificial Sequence
  Description of Artificial Sequence: Synthetic oligonucleotide
  Sense strand starting at position 1347 of SEQ ID NO: 1243356
ugcggcauucucuaaagua

SEQ ID NO: 1411495 - RNA, 19 nt, Artificial Sequence
  Description of Artificial Sequence: Synthetic oligonucleotide
  Antisense strand to SEQ ID NO: 1411494
uacuuuagagaaugccgca

SEQ ID NO: 1411496 - RNA, 19 nt, Artificial Sequence
  Description of Artificial Sequence: Synthetic oligonucleotide
  Sense strand starting at position 1388 of SEQ ID NO: 1243356
aaucgucauucuugcgaca

SEQ ID NO: 1411497 - RNA, 19 nt, Artificial Sequence
  Description of Artificial Sequence: Synthetic oligonucleotide
  Antisense strand to SEQ ID NO: 1411496
ugucgcaagaaugacgauu

SEQ ID NO: 1411498 - RNA, 19 nt, Artificial Sequence
  Description of Artificial Sequence: Synthetic oligonucleotide
  Sense strand starting at position 1597 of SEQ ID NO: 1243356
ggguuucccucuccacaca

SEQ ID NO: 1411499 - RNA, 19 nt, Artificial Sequence
  Description of Artificial Sequence: Synthetic oligonucleotide
  Antisense strand to SEQ ID NO: 1411498
uguguggagagggaaaccc

SEQ ID NO: 1411500 - RNA, 19 nt, Artificial Sequence
  Description of Artificial Sequence: Synthetic oligonucleotide
  Sense strand starting at position 2309 of SEQ ID NO: 1243356
guuccuaucucgcacuuga

SEQ ID NO: 1411501 - RNA, 19 nt, Artificial Sequence
  Description of Artificial Sequence: Synthetic oligonucleotide
  Antisense strand to SEQ ID NO: 1411500
ucaagugcgagauaggaac

SEQ ID NO: 1411502 - RNA, 19 nt, Artificial Sequence
  Description of Artificial Sequence: Synthetic oligonucleotide
  Sense strand starting at position 2662 of SEQ ID NO: 1243356
ccaucuuucucucgaguuc

SEQ ID NO: 1411503 - RNA, 19 nt, Artificial Sequence
  Description of Artificial Sequence: Synthetic oligonucleotide
  Antisense strand to SEQ ID NO: 1411502
gaacucgagagaaagaugg

SEQ ID NO: 1411504 - RNA, 19 nt, Artificial Sequence
  Description of Artificial Sequence: Synthetic oligonucleotide
  Sense strand starting at position 2739 of SEQ ID NO: 1243356
ugagcccuccuccgaaauu

SEQ ID NO: 1411505 - RNA, 19 nt, Artificial Sequence
  Description of Artificial Sequence: Synthetic oligonucleotide
  Antisense strand to SEQ ID NO: 1411504
aauuucggaggagggcuca

SEQ ID NO: 1411506 - RNA, 19 nt, Artificial Sequence
  Description of Artificial Sequence: Synthetic oligonucleotide
  Sense strand starting at position 2749 of SEQ ID NO: 1243356
uccgaaauuuccuguccac

SEQ ID NO: 1411507 - RNA, 19 nt, Artificial Sequence
  Description of Artificial Sequence: Synthetic oligonucleotide
  Antisense strand to SEQ ID NO: 1411506
guggacaggaaauuucgga

SEQ ID NO: 1411508 - RNA, 19 nt, Artificial Sequence
  Description of Artificial Sequence: Synthetic oligonucleotide
  Sense strand starting at position 2814 of SEQ ID NO: 1243356
gccuuaugaccacaaguac

SEQ ID NO: 1411509 - RNA, 19 nt, Artificial Sequence
  Description of Artificial Sequence: Synthetic oligonucleotide
  Antisense strand to SEQ ID NO: 1411508
guacuuguggucauaaggc

SEQ ID NO: 1411510 - RNA, 19 nt, Artificial Sequence
  Description of Artificial Sequence: Synthetic oligonucleotide
  Sense strand starting at position 3040 of SEQ ID NO: 1243356
aauacagauugcgaugacu

SEQ ID NO: 1411511 - RNA, 19 nt, Artificial Sequence
  Description of Artificial Sequence: Synthetic oligonucleotide
  Antisense strand to SEQ ID NO: 1411510
agucaucgcaaucuguauu

SEQ ID NO: 1411512 - RNA, 19 nt, Artificial Sequence
  Description of Artificial Sequence: Synthetic oligonucleotide
  Sense strand starting at position 3042 of SEQ ID NO: 1243356
uacagauugcgaugacuuu

SEQ ID NO: 1411513 - RNA, 19 nt, Artificial Sequence
  Description of Artificial Sequence: Synthetic oligonucleotide
  Antisense strand to SEQ ID NO: 1411512
aaagucaucgcaaucugua

SEQ ID NO: 1411514 - RNA, 19 nt, Artificial Sequence
  Description of Artificial Sequence: Synthetic oligonucleotide
  Sense strand starting at position 3048 of SEQ ID NO: 1243356
uugcgaugacuuuguaucu

SEQ ID NO: 1411515 - RNA, 19 nt, Artificial Sequence
  Description of Artificial Sequence: Synthetic oligonucleotide
  Antisense strand to SEQ ID NO: 1411514
agauacaaagucaucgcaa

SEQ ID NO: 1411516 - RNA, 19 nt, Artificial Sequence
  Description of Artificial Sequence: Synthetic oligonucleotide
  Sense strand starting at position 3173 of SEQ ID NO: 1243356
cuaagugucagugagugga

SEQ ID NO: 1411517 - RNA, 19 nt, Artificial Sequence
  Description of Artificial Sequence: Synthetic oligonucleotide
  Antisense strand to SEQ ID NO: 1411516
uccacucacugacacuuag

SEQ ID NO: 1411518 - RNA, 19 nt, Artificial Sequence
  Description of Artificial Sequence: Synthetic oligonucleotide
  Sense strand starting at position 3191 of SEQ ID NO: 1243356
acguauauauuuggaucaa

SEQ ID NO: 1411519 - RNA, 19 nt, Artificial Sequence
  Description of Artificial Sequence: Synthetic oligonucleotide
  Antisense strand to SEQ ID NO: 1411518
uugauccaaauauauacgu

SEQ ID NO: 1411520 - RNA, 19 nt, Artificial Sequence
  Description of Artificial Sequence: Synthetic oligonucleotide
  Sense strand starting at position 3192 of SEQ ID NO: 1243356
cguauauauuuggaucaau

SEQ ID NO: 1411521 - RNA, 19 nt, Artificial Sequence
  Description of Artificial Sequence: Synthetic oligonucleotide
  Antisense strand to SEQ ID NO: 1411520
auugauccaaauauauacg

SEQ ID NO: 1411522 - RNA, 19 nt, Artificial Sequence
  Description of Artificial Sequence: Synthetic oligonucleotide
  Sense strand starting at position 3672 of SEQ ID NO: 1243356
gcagucucauacccaguua

SEQ ID NO: 1411523 - RNA, 19 nt, Artificial Sequence
  Description of Artificial Sequence: Synthetic oligonucleotide
  Antisense strand to SEQ ID NO: 1411522
uaacuggguaugagacugc

SEQ ID NO: 1411524 - RNA, 19 nt, Artificial Sequence
  Description of Artificial Sequence: Synthetic oligonucleotide
  Sense strand starting at position 3730 of SEQ ID NO: 1243356
ugaaucagauguucuccaa

SEQ ID NO: 1411525 - RNA, 19 nt, Artificial Sequence
  Description of Artificial Sequence: Synthetic oligonucleotide
  Antisense strand to SEQ ID NO: 1411524
uuggagaacaucugauuca

SEQ ID NO: 1411526 - RNA, 19 nt, Artificial Sequence
  Description of Artificial Sequence: Synthetic oligonucleotide
  Sense strand starting at position 3751 of SEQ ID NO: 1243356
ccaucaguguuccucagga

SEQ ID NO: 1411527 - RNA, 19 nt, Artificial Sequence
  Description of Artificial Sequence: Synthetic oligonucleotide
  Antisense strand to SEQ ID NO: 1411526
uccugaggaacacugaugg

SEQ ID NO: 1411528 - RNA, 19 nt, Artificial Sequence
  Description of Artificial Sequence: Synthetic oligonucleotide
  Sense strand starting at position 3974 of SEQ ID NO: 1243356
gauguaucucgcucugucu

SEQ ID NO: 1411529 - RNA, 19 nt, Artificial Sequence
  Description of Artificial Sequence: Synthetic oligonucleotide
  Antisense strand to SEQ ID NO: 1411528
agacagagcgagauacauc

SEQ ID NO: 1411530 - RNA, 19 nt, Artificial Sequence
  Description of Artificial Sequence: Synthetic oligonucleotide
  Sense strand starting at position 109 of SEQ ID NO: 1243357
ggcacacuuuauguugaga

SEQ ID NO: 1411531 - RNA, 19 nt, Artificial Sequence
  Description of Artificial Sequence: Synthetic oligonucleotide
  Antisense strand to SEQ ID NO: 1411530
ucucaacauaaagugugcc

SEQ ID NO: 1411532 - RNA, 19 nt, Artificial Sequence
  Description of Artificial Sequence: Synthetic oligonucleotide
  Sense strand starting at position 213 of SEQ ID NO: 1243357
ucuaauuccugaguuuaag

SEQ ID NO: 1411533 - RNA, 19 nt, Artificial Sequence
  Description of Artificial Sequence: Synthetic oligonucleotide
  Antisense strand to SEQ ID NO: 1411532
cuuaaacucaggaauuaga

SEQ ID NO: 1411534 - RNA, 19 nt, Artificial Sequence
  Description of Artificial Sequence: Synthetic oligonucleotide
  Sense strand starting at position 615 of SEQ ID NO: 1243357
uuuggaagugauugcaaau

SEQ ID NO: 1411535 - RNA, 19 nt, Artificial Sequence
  Description of Artificial Sequence: Synthetic oligonucleotide
  Antisense strand to SEQ ID NO: 1411534
auuugcaaucacuuccaaa

SEQ ID NO: 1411536 - RNA, 19 nt, Artificial Sequence
  Description of Artificial Sequence: Synthetic oligonucleotide
  Sense strand starting at position 621 of SEQ ID NO: 1243357
agugauugcaaaugaaguu

SEQ ID NO: 1411537 - RNA, 19 nt, Artificial Sequence
  Description of Artificial Sequence: Synthetic oligonucleotide
  Antisense strand to SEQ ID NO: 1411536
aacuucauuugcaaucacu

SEQ ID NO: 1411538 - RNA, 19 nt, Artificial Sequence
  Description of Artificial Sequence: Synthetic oligonucleotide
  Sense strand starting at position 622 of SEQ ID NO: 1243357
gugauugcaaaugaaguua

SEQ ID NO: 1411539 - RNA, 19 nt, Artificial Sequence
  Description of Artificial Sequence: Synthetic oligonucleotide
  Antisense strand to SEQ ID NO: 1411538
uaacuucauuugcaaucac

SEQ ID NO: 1411540 - RNA, 19 nt, Artificial Sequence
  Description of Artificial Sequence: Synthetic oligonucleotide
  Sense strand starting at position 719 of SEQ ID NO: 1243357
auaugcuauccaggacuau

SEQ ID NO: 1411541 - RNA, 19 nt, Artificial Sequence
  Description of Artificial Sequence: Synthetic oligonucleotide
  Antisense strand to SEQ ID NO: 1411540
auaguccuggauagcauau

SEQ ID NO: 1411542 - RNA, 19 nt, Artificial Sequence
  Description of Artificial Sequence: Synthetic oligonucleotide
  Sense strand starting at position 802 of SEQ ID NO: 1243357
caucucagucagggugaaa

SEQ ID NO: 1411543 - RNA, 19 nt, Artificial Sequence
  Description of Artificial Sequence: Synthetic oligonucleotide
  Antisense strand to SEQ ID NO: 1411542
uuucacccugacugagaug

SEQ ID NO: 1411544 - RNA, 19 nt, Artificial Sequence
  Description of Artificial Sequence: Synthetic oligonucleotide
  Sense strand starting at position 820 of SEQ ID NO: 1243357
aggcaauguccuugcaagu

SEQ ID NO: 1411545 - RNA, 19 nt, Artificial Sequence
  Description of Artificial Sequence: Synthetic oligonucleotide
  Antisense strand to SEQ ID NO: 1411544
acuugcaaggacauugccu

SEQ ID NO: 1411546 - RNA, 19 nt, Artificial Sequence
  Description of Artificial Sequence: Synthetic oligonucleotide
  Sense strand starting at position 946 of SEQ ID NO: 1243357
cagguucucugccuagaag

SEQ ID NO: 1411547 - RNA, 19 nt, Artificial Sequence
  Description of Artificial Sequence: Synthetic oligonucleotide
  Antisense strand to SEQ ID NO: 1411546
cuucuaggcagagaaccug

SEQ ID NO: 1411548 - RNA, 19 nt, Artificial Sequence
  Description of Artificial Sequence: Synthetic oligonucleotide
  Sense strand starting at position 947 of SEQ ID NO: 1243357
agguucucugccuagaagu

SEQ ID NO: 1411549 - RNA, 19 nt, Artificial Sequence
  Description of Artificial Sequence: Synthetic oligonucleotide
  Antisense strand to SEQ ID NO: 1411548
acuucuaggcagagaaccu

SEQ ID NO: 1411550 - RNA, 19 nt, Artificial Sequence
  Description of Artificial Sequence: Synthetic oligonucleotide
  Sense strand starting at position 960 of SEQ ID NO: 1243357
agaaguccucucgauaugu

SEQ ID NO: 1411551 - RNA, 19 nt, Artificial Sequence
  Description of Artificial Sequence: Synthetic oligonucleotide
  Antisense strand to SEQ ID NO: 1411550
acauaucgagaggacuucu

SEQ ID NO: 1411552 - RNA, 19 nt, Artificial Sequence
  Description of Artificial Sequence: Synthetic oligonucleotide
  Sense strand starting at position 964 of SEQ ID NO: 1243357
guccucucgauauguggaa

SEQ ID NO: 1411553 - RNA, 19 nt, Artificial Sequence
  Description of Artificial Sequence: Synthetic oligonucleotide
  Antisense strand to SEQ ID NO: 1411552
uuccacauaucgagaggac

SEQ ID NO: 1411554 - RNA, 19 nt, Artificial Sequence
  Description of Artificial Sequence: Synthetic oligonucleotide
  Sense strand starting at position 965 of SEQ ID NO: 1243357
uccucucgauauguggaau

SEQ ID NO: 1411555 - RNA, 19 nt, Artificial Sequence
  Description of Artificial Sequence: Synthetic oligonucleotide
  Antisense strand to SEQ ID NO: 1411554
auuccacauaucgagagga

SEQ ID NO: 1411556 - RNA, 19 nt, Artificial Sequence
  Description of Artificial Sequence: Synthetic oligonucleotide
  Sense strand starting at position 966 of SEQ ID NO: 1243357
ccucucgauauguggaaua

SEQ ID NO: 1411557 - RNA, 19 nt, Artificial Sequence
  Description of Artificial Sequence: Synthetic oligonucleotide
  Antisense strand to SEQ ID NO: 1411556
uauuccacauaucgagagg

SEQ ID NO: 1411558 - RNA, 19 nt, Artificial Sequence
  Description of Artificial Sequence: Synthetic oligonucleotide
  Sense strand starting at position 1033 of SEQ ID NO: 1243357
gugacacucucacugaagu

SEQ ID NO: 1411559 - RNA, 19 nt, Artificial Sequence
  Description of Artificial Sequence: Synthetic oligonucleotide
  Antisense strand to SEQ ID NO: 1411558
acuucagugagagugucac

SEQ ID NO: 1411560 - RNA, 19 nt, Artificial Sequence
  Description of Artificial Sequence: Synthetic oligonucleotide
  Sense strand starting at position 1112 of SEQ ID NO: 1243357
ugaauagacuuguuuacug

SEQ ID NO: 1411561 - RNA, 19 nt, Artificial Sequence
  Description of Artificial Sequence: Synthetic oligonucleotide
  Antisense strand to SEQ ID NO: 1411560
caguaaacaagucuauuca

SEQ ID NO: 1411562 - RNA, 19 nt, Artificial Sequence
  Description of Artificial Sequence: Synthetic oligonucleotide
  Sense strand starting at position 1122 of SEQ ID NO: 1243357
uguuuacuguuucugucua

SEQ ID NO: 1411563 - RNA, 19 nt, Artificial Sequence
  Description of Artificial Sequence: Synthetic oligonucleotide
  Antisense strand to SEQ ID NO: 1411562
uagacagaaacaguaaaca

SEQ ID NO: 1411564 - RNA, 19 nt, Artificial Sequence
  Description of Artificial Sequence: Synthetic oligonucleotide
  Sense strand starting at position 1197 of SEQ ID NO: 1243357
aucguaggcacguaguaaa

SEQ ID NO: 1411565 - RNA, 19 nt, Artificial Sequence
  Description of Artificial Sequence: Synthetic oligonucleotide
  Antisense strand to SEQ ID NO: 1411564
uuuacuacgugccuacgau

SEQ ID NO: 1411566 - RNA, 19 nt, Artificial Sequence
  Description of Artificial Sequence: Synthetic oligonucleotide
  Sense strand starting at position 1208 of SEQ ID NO: 1243357
guaguaaacacauguugga

SEQ ID NO: 1411567 - RNA, 19 nt, Artificial Sequence
  Description of Artificial Sequence: Synthetic oligonucleotide
  Antisense strand to SEQ ID NO: 1411566
uccaacauguguuuacuac

SEQ ID NO: 1411568 - RNA, 19 nt, Artificial Sequence
  Description of Artificial Sequence: Synthetic oligonucleotide
  Sense strand starting at position 1307 of SEQ ID NO: 1243357
ggcccagucuucuugcauu

SEQ ID NO: 1411569 - RNA, 19 nt, Artificial Sequence
  Description of Artificial Sequence: Synthetic oligonucleotide
  Antisense strand to SEQ ID NO: 1411568
aaugcaagaagacugggcc

SEQ ID NO: 1411570 - RNA, 19 nt, Artificial Sequence
  Description of Artificial Sequence: Synthetic oligonucleotide
  Sense strand starting at position 2783 of SEQ ID NO: 1243357
aaggauuccugaccuguaa

SEQ ID NO: 1411571 - RNA, 19 nt, Artificial Sequence
  Description of Artificial Sequence: Synthetic oligonucleotide
  Antisense strand to SEQ ID NO: 1411570
uuacaggucaggaauccuu

SEQ ID NO: 1411572 - RNA, 19 nt, Artificial Sequence
  Description of Artificial Sequence: Synthetic oligonucleotide
  Sense strand starting at position 2827 of SEQ ID NO: 1243357
gucugucuuguagaucuca

SEQ ID NO: 1411573 - RNA, 19 nt, Artificial Sequence
  Description of Artificial Sequence: Synthetic oligonucleotide
  Antisense strand to SEQ ID NO: 1411572
ugagaucuacaagacagac

SEQ ID NO: 1411574 - RNA, 19 nt, Artificial Sequence
  Description of Artificial Sequence: Synthetic oligonucleotide
  Sense strand starting at position 2847 of SEQ ID NO: 1243357
augcuaguuuccucagagu

SEQ ID NO: 1411575 - RNA, 19 nt, Artificial Sequence
  Description of Artificial Sequence: Synthetic oligonucleotide
  Antisense strand to SEQ ID NO: 1411574
acucugaggaaacuagcau

SEQ ID NO: 1411576 - RNA, 19 nt, Artificial Sequence
  Description of Artificial Sequence: Synthetic oligonucleotide
  Sense strand starting at position 2861 of SEQ ID NO: 1243357
agaguccuucuguaaccuu

SEQ ID NO: 1411577 - RNA, 19 nt, Artificial Sequence
  Description of Artificial Sequence: Synthetic oligonucleotide
  Antisense strand to SEQ ID NO: 1411576
aagguuacagaaggacucu

SEQ ID NO: 1411578 - RNA, 19 nt, Artificial Sequence
  Description of Artificial Sequence: Synthetic oligonucleotide
  Sense strand starting at position 2892 of SEQ ID NO: 1243357
cuacaacgcucuguguauu

SEQ ID NO: 1411579 - RNA, 19 nt, Artificial Sequence
  Description of Artificial Sequence: Synthetic oligonucleotide
  Antisense strand to SEQ ID NO: 1411578
aauacacagagcguuguag

SEQ ID NO: 1411580 - RNA, 19 nt, Artificial Sequence
  Description of Artificial Sequence: Synthetic oligonucleotide
  Sense strand starting at position 2900 of SEQ ID NO: 1243357
cucuguguauuucuugcau

SEQ ID NO: 1411581 - RNA, 19 nt, Artificial Sequence
  Description of Artificial Sequence: Synthetic oligonucleotide
  Antisense strand to SEQ ID NO: 1411580
augcaagaaauacacagag

SEQ ID NO: 1411582 - RNA, 19 nt, Artificial Sequence
  Description of Artificial Sequence: Synthetic oligonucleotide
  Sense strand starting at position 2922 of SEQ ID NO: 1243357
uguagucuguaauuuguau

SEQ ID NO: 1411583 - RNA, 19 nt, Artificial Sequence
  Description of Artificial Sequence: Synthetic oligonucleotide
  Antisense strand to SEQ ID NO: 1411582
auacaaauuacagacuaca

SEQ ID NO: 1411584 - RNA, 19 nt, Artificial Sequence
  Description of Artificial Sequence: Synthetic oligonucleotide
  Sense strand starting at position 2926 of SEQ ID NO: 1243357
gucuguaauuuguauuacu

SEQ ID NO: 1411585 - RNA, 19 nt, Artificial Sequence
  Description of Artificial Sequence: Synthetic oligonucleotide
  Antisense strand to SEQ ID NO: 1411584
aguaauacaaauuacagac

SEQ ID NO: 1411586 - RNA, 19 nt, Artificial Sequence
  Description of Artificial Sequence: Synthetic oligonucleotide
  Sense strand starting at position 2939 of SEQ ID NO: 1243357
auuacucucucauuagagu

SEQ ID NO: 1411587 - RNA, 19 nt, Artificial Sequence
  Description of Artificial Sequence: Synthetic oligonucleotide
  Antisense strand to SEQ ID NO: 1411586
acucuaaugagagaguaau

SEQ ID NO: 1411588 - RNA, 19 nt, Artificial Sequence
  Description of Artificial Sequence: Synthetic oligonucleotide
  Sense strand starting at position 3000 of SEQ ID NO: 1243357
uggcuccagucccuaauau

SEQ ID NO: 1411589 - RNA, 19 nt, Artificial Sequence
  Description of Artificial Sequence: Synthetic oligonucleotide
  Antisense strand to SEQ ID NO: 1411588
auauuagggacuggagcca

SEQ ID NO: 1411590 - RNA, 19 nt, Artificial Sequence
  Description of Artificial Sequence: Synthetic oligonucleotide
  Sense strand starting at position 3001 of SEQ ID NO: 1243357
ggcuccagucccuaauaua

SEQ ID NO: 1411591 - RNA, 19 nt, Artificial Sequence
  Description of Artificial Sequence: Synthetic oligonucleotide
  Antisense strand to SEQ ID NO: 1411590
uauauuagggacuggagcc

SEQ ID NO: 1411592 - RNA, 19 nt, Artificial Sequence
  Description of Artificial Sequence: Synthetic oligonucleotide
  Sense strand starting at position 3198 of SEQ ID NO: 1243357
gccacuacacucggguaau

SEQ ID NO: 1411593 - RNA, 19 nt, Artificial Sequence
  Description of Artificial Sequence: Synthetic oligonucleotide
  Antisense strand to SEQ ID NO: 1411592
auuacccgaguguaguggc

SEQ ID NO: 1411594 - RNA, 19 nt, Artificial Sequence
  Description of Artificial Sequence: Synthetic oligonucleotide
  Sense strand starting at position 3610 of SEQ ID NO: 1243357
cagucugacggcuaauaca

SEQ ID NO: 1411595 - RNA, 19 nt, Artificial Sequence
  Description of Artificial Sequence: Synthetic oligonucleotide
  Antisense strand to SEQ ID NO: 1411594
uguauuagccgucagacug

SEQ ID NO: 1411596 - RNA, 19 nt, Artificial Sequence
  Description of Artificial Sequence: Synthetic oligonucleotide
  Sense strand starting at position 3637 of SEQ ID NO: 1243357
uuggcauggugguuucuau

SEQ ID NO: 1411597 - RNA, 19 nt, Artificial Sequence
  Description of Artificial Sequence: Synthetic oligonucleotide
  Antisense strand to SEQ ID NO: 1411596
auagaaaccaccaugccaa

SEQ ID NO: 1411598 - RNA, 19 nt, Artificial Sequence
  Description of Artificial Sequence: Synthetic oligonucleotide
  Sense strand starting at position 3664 of SEQ ID NO: 1243357
uguaaauggccaugcaagu

SEQ ID NO: 1411599 - RNA, 19 nt, Artificial Sequence
  Description of Artificial Sequence: Synthetic oligonucleotide
  Antisense strand to SEQ ID NO: 1411598
acuugcauggccauuuaca

SEQ ID NO: 1411600 - RNA, 19 nt, Artificial Sequence
  Description of Artificial Sequence: Synthetic oligonucleotide
  Sense strand starting at position 3682 of SEQ ID NO: 1243357
uuuacaacucuuggagaau

SEQ ID NO: 1411601 - RNA, 19 nt, Artificial Sequence
  Description of Artificial Sequence: Synthetic oligonucleotide
  Antisense strand to SEQ ID NO: 1411600
auucuccaagaguuguaaa

SEQ ID NO: 1411602 - RNA, 19 nt, Artificial Sequence
  Description of Artificial Sequence: Synthetic oligonucleotide
  Sense strand starting at position 3683 of SEQ ID NO: 1243357
uuacaacucuuggagaaug

SEQ ID NO: 1411603 - RNA, 19 nt, Artificial Sequence
  Description of Artificial Sequence: Synthetic oligonucleotide
  Antisense strand to SEQ ID NO: 1411602
cauucuccaagaguuguaa

SEQ ID NO: 1411604 - RNA, 19 nt, Artificial Sequence
  Description of Artificial Sequence: Synthetic oligonucleotide
  Sense strand starting at position 3741 of SEQ ID NO: 1243357
gacugcuucugggagagaa

SEQ ID NO: 1411605 - RNA, 19 nt, Artificial Sequence
  Description of Artificial Sequence: Synthetic oligonucleotide
  Antisense strand to SEQ ID NO: 1411604
uucucucccagaagcaguc

SEQ ID NO: 1411606 - RNA, 19 nt, Artificial Sequence
  Description of Artificial Sequence: Synthetic oligonucleotide
  Sense strand starting at position 3796 of SEQ ID NO: 1243357
guguguagugcccaccaga

SEQ ID NO: 1411607 - RNA, 19 nt, Artificial Sequence
  Description of Artificial Sequence: Synthetic oligonucleotide
  Antisense strand to SEQ ID NO: 1411606
ucuggugggcacuacacac

SEQ ID NO: 1411608 - RNA, 19 nt, Artificial Sequence
  Description of Artificial Sequence: Synthetic oligonucleotide
  Sense strand starting at position 3849 of SEQ ID NO: 1243357
gacauaguuccagguuugu

SEQ ID NO: 1411609 - RNA, 19 nt, Artificial Sequence
  Description of Artificial Sequence: Synthetic oligonucleotide
  Antisense strand to SEQ ID NO: 1411608
acaaaccuggaacuauguc

SEQ ID NO: 1411610 - RNA, 19 nt, Artificial Sequence
  Description of Artificial Sequence: Synthetic oligonucleotide
  Sense strand starting at position 13 of SEQ ID NO: 1243358
cugugaagugucuggacca

SEQ ID NO: 1411611 - RNA, 19 nt, Artificial Sequence
  Description of Artificial Sequence: Synthetic oligonucleotide
  Antisense strand to SEQ ID NO: 1411610
ugguccagacacuucacag

SEQ ID NO: 1411612 - RNA, 19 nt, Artificial Sequence
  Description of Artificial Sequence: Synthetic oligonucleotide
  Sense strand starting at position 264 of SEQ ID NO: 1243358
ccagcugcuucuugacuau

SEQ ID NO: 1411613 - RNA, 19 nt, Artificial Sequence
  Description of Artificial Sequence: Synthetic oligonucleotide
  Antisense strand to SEQ ID NO: 1411612
auagucaagaagcagcugg

SEQ ID NO: 1411614 - RNA, 19 nt, Artificial Sequence
  Description of Artificial Sequence: Synthetic oligonucleotide
  Sense strand starting at position 277 of SEQ ID NO: 1243358
gacuaugugucccagacaa

SEQ ID NO: 1411615 - RNA, 19 nt, Artificial Sequence
  Description of Artificial Sequence: Synthetic oligonucleotide
  Antisense strand to SEQ ID NO: 1411614
uugucugggacacauaguc

SEQ ID NO: 1411616 - RNA, 19 nt, Artificial Sequence
  Description of Artificial Sequence: Synthetic oligonucleotide
  Sense strand starting at position 279 of SEQ ID NO: 1243358
cuaugugucccagacaagu

SEQ ID NO: 1411617 - RNA, 19 nt, Artificial Sequence
  Description of Artificial Sequence: Synthetic oligonucleotide
  Antisense strand to SEQ ID NO: 1411616
acuugucugggacacauag

SEQ ID NO: 1411618 - RNA, 19 nt, Artificial Sequence
  Description of Artificial Sequence: Synthetic oligonucleotide
  Sense strand starting at position 281 of SEQ ID NO: 1243358
augugucccagacaaguua

SEQ ID NO: 1411619 - RNA, 19 nt, Artificial Sequence
  Description of Artificial Sequence: Synthetic oligonucleotide
  Antisense strand to SEQ ID NO: 1411618
uaacuugucugggacacau

SEQ ID NO: 1411620 - RNA, 19 nt, Artificial Sequence
  Description of Artificial Sequence: Synthetic oligonucleotide
  Sense strand starting at position 397 of SEQ ID NO: 1243358
uguguccaguccucagaga

SEQ ID NO: 1411621 - RNA, 19 nt, Artificial Sequence
  Description of Artificial Sequence: Synthetic oligonucleotide
  Antisense strand to SEQ ID NO: 1411620
ucucugaggacuggacaca

SEQ ID NO: 1411622 - RNA, 19 nt, Artificial Sequence
  Description of Artificial Sequence: Synthetic oligonucleotide
  Sense strand starting at position 440 of SEQ ID NO: 1243358
gcagguguucccagggcga

SEQ ID NO: 1411623 - RNA, 19 nt, Artificial Sequence
  Description of Artificial Sequence: Synthetic oligonucleotide
  Antisense strand to SEQ ID NO: 1411622
ucgcccugggaacaccugc

SEQ ID NO: 1411624 - RNA, 19 nt, Artificial Sequence
  Description of Artificial Sequence: Synthetic oligonucleotide
  Sense strand starting at position 674 of SEQ ID NO: 1243358
ugcuaaucucuagguucca

SEQ ID NO: 1411625 - RNA, 19 nt, Artificial Sequence
  Description of Artificial Sequence: Synthetic oligonucleotide
  Antisense strand to SEQ ID NO: 1411624
uggaaccuagagauuagca

SEQ ID NO: 1411626 - RNA, 19 nt, Artificial Sequence
  Description of Artificial Sequence: Synthetic oligonucleotide
  Sense strand starting at position 931 of SEQ ID NO: 1243358
aguagugccuuuguagcua

SEQ ID NO: 1411627 - RNA, 19 nt, Artificial Sequence
  Description of Artificial Sequence: Synthetic oligonucleotide
  Antisense strand to SEQ ID NO: 1411626
uagcuacaaaggcacuacu

SEQ ID NO: 1411628 - RNA, 19 nt, Artificial Sequence
  Description of Artificial Sequence: Synthetic oligonucleotide
  Sense strand starting at position 935 of SEQ ID NO: 1243358
gugccuuuguagcuaagga

SEQ ID NO: 1411629 - RNA, 19 nt, Artificial Sequence
  Description of Artificial Sequence: Synthetic oligonucleotide
  Antisense strand to SEQ ID NO: 1411628
uccuuagcuacaaaggcac

SEQ ID NO: 1411630 - RNA, 19 nt, Artificial Sequence
  Description of Artificial Sequence: Synthetic oligonucleotide
  Sense strand starting at position 936 of SEQ ID NO: 1243358
ugccuuuguagcuaaggaa

SEQ ID NO: 1411631 - RNA, 19 nt, Artificial Sequence
  Description of Artificial Sequence: Synthetic oligonucleotide
  Antisense strand to SEQ ID NO: 1411630
uuccuuagcuacaaaggca

SEQ ID NO: 1411632 - RNA, 19 nt, Artificial Sequence
  Description of Artificial Sequence: Synthetic oligonucleotide
  Sense strand starting at position 952 of SEQ ID NO: 1243358
gaaugugguugccagcaau

SEQ ID NO: 1411633 - RNA, 19 nt, Artificial Sequence
  Description of Artificial Sequence: Synthetic oligonucleotide
  Antisense strand to SEQ ID NO: 1411632
auugcuggcaaccacauuc

SEQ ID NO: 1411634 - RNA, 19 nt, Artificial Sequence
  Description of Artificial Sequence: Synthetic oligonucleotide
  Sense strand starting at position 1142 of SEQ ID NO: 1243358
agaccuguauacucacaca

SEQ ID NO: 1411635 - RNA, 19 nt, Artificial Sequence
  Description of Artificial Sequence: Synthetic oligonucleotide
  Antisense strand to SEQ ID NO: 1411634
ugugugaguauacaggucu

SEQ ID NO: 1411636 - RNA, 19 nt, Artificial Sequence
  Description of Artificial Sequence: Synthetic oligonucleotide
  Sense strand starting at position 2422 of SEQ ID NO: 1243358
ggcugugucucaccuggau

SEQ ID NO: 1411637 - RNA, 19 nt, Artificial Sequence
  Description of Artificial Sequence: Synthetic oligonucleotide
  Antisense strand to SEQ ID NO: 1411636
auccaggugagacacagcc

SEQ ID NO: 1411638 - RNA, 19 nt, Artificial Sequence
  Description of Artificial Sequence: Synthetic oligonucleotide
  Sense strand starting at position 2699 of SEQ ID NO: 1243358
gacuuugcagggugacaaa

SEQ ID NO: 1411639 - RNA, 19 nt, Artificial Sequence
  Description of Artificial Sequence: Synthetic oligonucleotide
  Antisense strand to SEQ ID NO: 1411638
uuugucacccugcaaaguc

SEQ ID NO: 1411640 - RNA, 19 nt, Artificial Sequence
  Description of Artificial Sequence: Synthetic oligonucleotide
  Sense strand starting at position 2719 of SEQ ID NO: 1243358
ggauaugagucucgagggu

SEQ ID NO: 1411641 - RNA, 19 nt, Artificial Sequence
  Description of Artificial Sequence: Synthetic oligonucleotide
  Antisense strand to SEQ ID NO: 1411640
acccucgagacucauaucc

SEQ ID NO: 1411642 - RNA, 19 nt, Artificial Sequence
  Description of Artificial Sequence: Synthetic oligonucleotide
  Sense strand starting at position 2774 of SEQ ID NO: 1243358
cugaauuauuugggcucua

SEQ ID NO: 1411643 - RNA, 19 nt, Artificial Sequence
  Description of Artificial Sequence: Synthetic oligonucleotide
  Antisense strand to SEQ ID NO: 1411642
uagagcccaaauaauucag

SEQ ID NO: 1411644 - RNA, 19 nt, Artificial Sequence
  Description of Artificial Sequence: Synthetic oligonucleotide
  Sense strand starting at position 2940 of SEQ ID NO: 1243358
ugaaaucauuuaggccuaa

SEQ ID NO: 1411645 - RNA, 19 nt, Artificial Sequence
  Description of Artificial Sequence: Synthetic oligonucleotide
  Antisense strand to SEQ ID NO: 1411644
uuaggccuaaaugauuuca

SEQ ID NO: 1411646 - RNA, 19 nt, Artificial Sequence
  Description of Artificial Sequence: Synthetic oligonucleotide
  Sense strand starting at position 3061 of SEQ ID NO: 1243358
ggcccagggaugugagauu

SEQ ID NO: 1411647 - RNA, 19 nt, Artificial Sequence
  Description of Artificial Sequence: Synthetic oligonucleotide
  Antisense strand to SEQ ID NO: 1411646
aaucucacaucccugggcc

SEQ ID NO: 1411648 - RNA, 19 nt, Artificial Sequence
  Description of Artificial Sequence: Synthetic oligonucleotide
  Sense strand starting at position 3070 of SEQ ID NO: 1243358
augugagauucggagucca

SEQ ID NO: 1411649 - RNA, 19 nt, Artificial Sequence
  Description of Artificial Sequence: Synthetic oligonucleotide
  Antisense strand to SEQ ID NO: 1411648
uggacuccgaaucucacau

SEQ ID NO: 1411650 - RNA, 19 nt, Artificial Sequence
  Description of Artificial Sequence: Synthetic oligonucleotide
  Sense strand starting at position 3114 of SEQ ID NO: 1243358
cucugucuccaauauagga

SEQ ID NO: 1411651 - RNA, 19 nt, Artificial Sequence
  Description of Artificial Sequence: Synthetic oligonucleotide
  Antisense strand to SEQ ID NO: 1411650
uccuauauuggagacagag

SEQ ID NO: 1411652 - RNA, 19 nt, Artificial Sequence
  Description of Artificial Sequence: Synthetic oligonucleotide
  Sense strand starting at position 3452 of SEQ ID NO: 1243358
cccugcaauuccuggguaa

SEQ ID NO: 1411653 - RNA, 19 nt, Artificial Sequence
  Description of Artificial Sequence: Synthetic oligonucleotide
  Antisense strand to SEQ ID NO: 1411652
uuacccaggaauugcaggg

SEQ ID NO: 1411654 - RNA, 19 nt, Artificial Sequence
  Description of Artificial Sequence: Synthetic oligonucleotide
  Sense strand starting at position 3453 of SEQ ID NO: 1243358
ccugcaauuccuggguaag

SEQ ID NO: 1411655 - RNA, 19 nt, Artificial Sequence
  Description of Artificial Sequence: Synthetic oligonucleotide
  Antisense strand to SEQ ID NO: 1411654
cuuacccaggaauugcagg

SEQ ID NO: 1411656 - RNA, 19 nt, Artificial Sequence
  Description of Artificial Sequence: Synthetic oligonucleotide
  Sense strand starting at position 3454 of SEQ ID NO: 1243358
cugcaauuccuggguaagg

SEQ ID NO: 1411657 - RNA, 19 nt, Artificial Sequence
  Description of Artificial Sequence: Synthetic oligonucleotide
  Antisense strand to SEQ ID NO: 1411656
ccuuacccaggaauugcag

SEQ ID NO: 1411658 - RNA, 19 nt, Artificial Sequence
  Description of Artificial Sequence: Synthetic oligonucleotide
  Sense strand starting at position 3456 of SEQ ID NO: 1243358
gcaauuccuggguaaggcu

SEQ ID NO: 1411659 - RNA, 19 nt, Artificial Sequence
  Description of Artificial Sequence: Synthetic oligonucleotide
  Antisense strand to SEQ ID NO: 1411658
agccuuacccaggaauugc

SEQ ID NO: 1411660 - RNA, 19 nt, Artificial Sequence
  Description of Artificial Sequence: Synthetic oligonucleotide
  Sense strand starting at position 3584 of SEQ ID NO: 1243358
cuuggagucugugaagaug

SEQ ID NO: 1411661 - RNA, 19 nt, Artificial Sequence
  Description of Artificial Sequence: Synthetic oligonucleotide
  Antisense strand to SEQ ID NO: 1411660
caucuucacagacuccaag

SEQ ID NO: 1411662 - RNA, 19 nt, Artificial Sequence
  Description of Artificial Sequence: Synthetic oligonucleotide
  Sense strand starting at position 3870 of SEQ ID NO: 1243358
gcugauuccuacucccagu

SEQ ID NO: 1411663 - RNA, 19 nt, Artificial Sequence
  Description of Artificial Sequence: Synthetic oligonucleotide
  Antisense strand to SEQ ID NO: 1411662
acugggaguaggaaucagc

SEQ ID NO: 1411664 - RNA, 19 nt, Artificial Sequence
  Description of Artificial Sequence: Synthetic oligonucleotide
  Sense strand starting at position 124 of SEQ ID NO: 1243359
ccagaugccucaucugaag

SEQ ID NO: 1411665 - RNA, 19 nt, Artificial Sequence
  Description of Artificial Sequence: Synthetic oligonucleotide
  Antisense strand to SEQ ID NO: 1411664
cuucagaugaggcaucugg

SEQ ID NO: 1411666 - RNA, 19 nt, Artificial Sequence
  Description of Artificial Sequence: Synthetic oligonucleotide
  Sense strand starting at position 251 of SEQ ID NO: 1243359
ggccacaugggcugaauua

SEQ ID NO: 1411667 - RNA, 19 nt, Artificial Sequence
  Description of Artificial Sequence: Synthetic oligonucleotide
  Antisense strand to SEQ ID NO: 1411666
uaauucagcccauguggcc

SEQ ID NO: 1411668 - RNA, 19 nt, Artificial Sequence
  Description of Artificial Sequence: Synthetic oligonucleotide
  Sense strand starting at position 261 of SEQ ID NO: 1243359
gcugaauuagagggugcaa

SEQ ID NO: 1411669 - RNA, 19 nt, Artificial Sequence
  Description of Artificial Sequence: Synthetic oligonucleotide
  Antisense strand to SEQ ID NO: 1411668
uugcacccucuaauucagc

SEQ ID NO: 1411670 - RNA, 19 nt, Artificial Sequence
  Description of Artificial Sequence: Synthetic oligonucleotide
  Sense strand starting at position 263 of SEQ ID NO: 1243359
ugaauuagagggugcaaga

SEQ ID NO: 1411671 - RNA, 19 nt, Artificial Sequence
  Description of Artificial Sequence: Synthetic oligonucleotide
  Antisense strand to SEQ ID NO: 1411670
ucuugcacccucuaauuca

SEQ ID NO: 1411672 - RNA, 19 nt, Artificial Sequence
  Description of Artificial Sequence: Synthetic oligonucleotide
  Sense strand starting at position 972 of SEQ ID NO: 1243359
agcccaauucaguggagga

SEQ ID NO: 1411673 - RNA, 19 nt, Artificial Sequence
  Description of Artificial Sequence: Synthetic oligonucleotide
  Antisense strand to SEQ ID NO: 1411672
uccuccacugaauugggcu

SEQ ID NO: 1411674 - RNA, 19 nt, Artificial Sequence
  Description of Artificial Sequence: Synthetic oligonucleotide
  Sense strand starting at position 1231 of SEQ ID NO: 1243359
caguguucucagggucauu

SEQ ID NO: 1411675 - RNA, 19 nt, Artificial Sequence
  Description of Artificial Sequence: Synthetic oligonucleotide
  Antisense strand to SEQ ID NO: 1411674
aaugacccugagaacacug

SEQ ID NO: 1411676 - RNA, 19 nt, Artificial Sequence
  Description of Artificial Sequence: Synthetic oligonucleotide
  Sense strand starting at position 1301 of SEQ ID NO: 1243359
gcaagaaguucugccuauc

SEQ ID NO: 1411677 - RNA, 19 nt, Artificial Sequence
  Description of Artificial Sequence: Synthetic oligonucleotide
  Antisense strand to SEQ ID NO: 1411676
gauaggcagaacuucuugc

SEQ ID NO: 1411678 - RNA, 19 nt, Artificial Sequence
  Description of Artificial Sequence: Synthetic oligonucleotide
  Sense strand starting at position 1304 of SEQ ID NO: 1243359
agaaguucugccuaucaaa

SEQ ID NO: 1411679 - RNA, 19 nt, Artificial Sequence
  Description of Artificial Sequence: Synthetic oligonucleotide
  Antisense strand to SEQ ID NO: 1411678
uuugauaggcagaacuucu

SEQ ID NO: 1411680 - RNA, 19 nt, Artificial Sequence
  Description of Artificial Sequence: Synthetic oligonucleotide
  Sense strand starting at position 1624 of SEQ ID NO: 1243359
augccuguguccggacaaa

SEQ ID NO: 1411681 - RNA, 19 nt, Artificial Sequence
  Description of Artificial Sequence: Synthetic oligonucleotide
  Antisense strand to SEQ ID NO: 1411680
uuuguccggacacaggcau

SEQ ID NO: 1411682 - RNA, 19 nt, Artificial Sequence
  Description of Artificial Sequence: Synthetic oligonucleotide
  Sense strand starting at position 2130 of SEQ ID NO: 1243359
aggcuuccgucccaagaaa

SEQ ID NO: 1411683 - RNA, 19 nt, Artificial Sequence
  Description of Artificial Sequence: Synthetic oligonucleotide
  Antisense strand to SEQ ID NO: 1411682
uuucuugggacggaagccu

SEQ ID NO: 1411684 - RNA, 19 nt, Artificial Sequence
  Description of Artificial Sequence: Synthetic oligonucleotide
  Sense strand starting at position 2546 of SEQ ID NO: 1243359
agggcugagucaucacuaa

SEQ ID NO: 1411685 - RNA, 19 nt, Artificial Sequence
  Description of Artificial Sequence: Synthetic oligonucleotide
  Antisense strand to SEQ ID NO: 1411684
uuagugaugacucagcccu

SEQ ID NO: 1411686 - RNA, 19 nt, Artificial Sequence
  Description of Artificial Sequence: Synthetic oligonucleotide
  Sense strand starting at position 3531 of SEQ ID NO: 1243359
aggucuugaugccagaaga

SEQ ID NO: 1411687 - RNA, 19 nt, Artificial Sequence
  Description of Artificial Sequence: Synthetic oligonucleotide
  Antisense strand to SEQ ID NO: 1411686
ucuucuggcaucaagaccu

SEQ ID NO: 1411688 - RNA, 19 nt, Artificial Sequence
  Description of Artificial Sequence: Synthetic oligonucleotide
  Sense strand starting at position 3805 of SEQ ID NO: 1243359
gaaggugaaccaugcguuu

SEQ ID NO: 1411689 - RNA, 19 nt, Artificial Sequence
  Description of Artificial Sequence: Synthetic oligonucleotide
  Antisense strand to SEQ ID NO: 1411688
aaacgcaugguucaccuuc

SEQ ID NO: 1411690 - RNA, 19 nt, Artificial Sequence
  Description of Artificial Sequence: Synthetic oligonucleotide
  Sense strand starting at position 3807 of SEQ ID NO: 1243359
aggugaaccaugcguuugu

SEQ ID NO: 1411691 - RNA, 19 nt, Artificial Sequence
  Description of Artificial Sequence: Synthetic oligonucleotide
  Antisense strand to SEQ ID NO: 1411690
acaaacgcaugguucaccu

SEQ ID NO: 1411692 - RNA, 19 nt, Artificial Sequence
  Description of Artificial Sequence: Synthetic oligonucleotide
  Sense strand starting at position 3814 of SEQ ID NO: 1243359
ccaugcguuuguguccaaa

SEQ ID NO: 1411693 - RNA, 19 nt, Artificial Sequence
  Description of Artificial Sequence: Synthetic oligonucleotide
  Antisense strand to SEQ ID NO: 1411692
uuuggacacaaacgcaugg

SEQ ID NO: 1411694 - RNA, 19 nt, Artificial Sequence
  Description of Artificial Sequence: Synthetic oligonucleotide
  Sense strand starting at position 3816 of SEQ ID NO: 1243359
augcguuuguguccaaauc

SEQ ID NO: 1411695 - RNA, 19 nt, Artificial Sequence
  Description of Artificial Sequence: Synthetic oligonucleotide
  Antisense strand to SEQ ID NO: 1411694
gauuuggacacaaacgcau

SEQ ID NO: 1411696 - RNA, 19 nt, Artificial Sequence
  Description of Artificial Sequence: Synthetic oligonucleotide
  Sense strand starting at position 3817 of SEQ ID NO: 1243359
ugcguuuguguccaaauca

SEQ ID NO: 1411697 - RNA, 19 nt, Artificial Sequence
  Description of Artificial Sequence: Synthetic oligonucleotide
  Antisense strand to SEQ ID NO: 1411696
ugauuuggacacaaacgca

SEQ ID NO: 1411698 - RNA, 19 nt, Artificial Sequence
  Description of Artificial Sequence: Synthetic oligonucleotide
  Sense strand starting at position 133 of SEQ ID NO: 1243360
uaaauuagccucugugaga

SEQ ID NO: 1411699 - RNA, 19 nt, Artificial Sequence
  Description of Artificial Sequence: Synthetic oligonucleotide
  Antisense strand to SEQ ID NO: 1411698
ucucacagaggcuaauuua

SEQ ID NO: 1411700 - RNA, 19 nt, Artificial Sequence
  Description of Artificial Sequence: Synthetic oligonucleotide
  Sense strand starting at position 134 of SEQ ID NO: 1243360
aaauuagccucugugagac

SEQ ID NO: 1411701 - RNA, 19 nt, Artificial Sequence
  Description of Artificial Sequence: Synthetic oligonucleotide
  Antisense strand to SEQ ID NO: 1411700
gucucacagaggcuaauuu

SEQ ID NO: 1411702 - RNA, 19 nt, Artificial Sequence
  Description of Artificial Sequence: Synthetic oligonucleotide
  Sense strand starting at position 210 of SEQ ID NO: 1243360
ggcacauagugagcucuau

SEQ ID NO: 1411703 - RNA, 19 nt, Artificial Sequence
  Description of Artificial Sequence: Synthetic oligonucleotide
  Antisense strand to SEQ ID NO: 1411702
auagagcucacuaugugcc

SEQ ID NO: 1411704 - RNA, 19 nt, Artificial Sequence
  Description of Artificial Sequence: Synthetic oligonucleotide
  Sense strand starting at position 214 of SEQ ID NO: 1243360
cauagugagcucuauguaa

SEQ ID NO: 1411705 - RNA, 19 nt, Artificial Sequence
  Description of Artificial Sequence: Synthetic oligonucleotide
  Antisense strand to SEQ ID NO: 1411704
uuacauagagcucacuaug

SEQ ID NO: 1411706 - RNA, 19 nt, Artificial Sequence
  Description of Artificial Sequence: Synthetic oligonucleotide
  Sense strand starting at position 216 of SEQ ID NO: 1243360
uagugagcucuauguaaau

SEQ ID NO: 1411707 - RNA, 19 nt, Artificial Sequence
  Description of Artificial Sequence: Synthetic oligonucleotide
  Antisense strand to SEQ ID NO: 1411706
auuuacauagagcucacua

SEQ ID NO: 1411708 - RNA, 19 nt, Artificial Sequence
  Description of Artificial Sequence: Synthetic oligonucleotide
  Sense strand starting at position 306 of SEQ ID NO: 1243360
uuucucuuguucgaggauu

SEQ ID NO: 1411709 - RNA, 19 nt, Artificial Sequence
  Description of Artificial Sequence: Synthetic oligonucleotide
  Antisense strand to SEQ ID NO: 1411708
aauccucgaacaagagaaa

SEQ ID NO: 1411710 - RNA, 19 nt, Artificial Sequence
  Description of Artificial Sequence: Synthetic oligonucleotide
  Sense strand starting at position 358 of SEQ ID NO: 1243360
uuacuuccauaggaaaugu

SEQ ID NO: 1411711 - RNA, 19 nt, Artificial Sequence
  Description of Artificial Sequence: Synthetic oligonucleotide
  Antisense strand to SEQ ID NO: 1411710
acauuuccuauggaaguaa

SEQ ID NO: 1411712 - RNA, 19 nt, Artificial Sequence
  Description of Artificial Sequence: Synthetic oligonucleotide
  Sense strand starting at position 445 of SEQ ID NO: 1243360
ggaacucuucugcaacuca

SEQ ID NO: 1411713 - RNA, 19 nt, Artificial Sequence
  Description of Artificial Sequence: Synthetic oligonucleotide
  Antisense strand to SEQ ID NO: 1411712
ugaguugcagaagaguucc

SEQ ID NO: 1411714 - RNA, 19 nt, Artificial Sequence
  Description of Artificial Sequence: Synthetic oligonucleotide
  Sense strand starting at position 477 of SEQ ID NO: 1243360
cccaaucguuggcuccaaa

SEQ ID NO: 1411715 - RNA, 19 nt, Artificial Sequence
  Description of Artificial Sequence: Synthetic oligonucleotide
  Antisense strand to SEQ ID NO: 1411714
uuuggagccaacgauuggg

SEQ ID NO: 1411716 - RNA, 19 nt, Artificial Sequence
  Description of Artificial Sequence: Synthetic oligonucleotide
  Sense strand starting at position 539 of SEQ ID NO: 1243360
uaagguaaacauggucaua

SEQ ID NO: 1411717 - RNA, 19 nt, Artificial Sequence
  Description of Artificial Sequence: Synthetic oligonucleotide
  Antisense strand to SEQ ID NO: 1411716
uaugaccauguuuaccuua

SEQ ID NO: 1411718 - RNA, 19 nt, Artificial Sequence
  Description of Artificial Sequence: Synthetic oligonucleotide
  Sense strand starting at position 541 of SEQ ID NO: 1243360
agguaaacauggucauaga

SEQ ID NO: 1411719 - RNA, 19 nt, Artificial Sequence
  Description of Artificial Sequence: Synthetic oligonucleotide
  Antisense strand to SEQ ID NO: 1411718
ucuaugaccauguuuaccu

SEQ ID NO: 1411720 - RNA, 19 nt, Artificial Sequence
  Description of Artificial Sequence: Synthetic oligonucleotide
  Sense strand starting at position 551 of SEQ ID NO: 1243360
ggucauagaucucuccaua

SEQ ID NO: 1411721 - RNA, 19 nt, Artificial Sequence
  Description of Artificial Sequence: Synthetic oligonucleotide
  Antisense strand to SEQ ID NO: 1411720
uauggagagaucuaugacc

SEQ ID NO: 1411722 - RNA, 19 nt, Artificial Sequence
  Description of Artificial Sequence: Synthetic oligonucleotide
  Sense strand starting at position 807 of SEQ ID NO: 1243360
auucuaggcucugggugau

SEQ ID NO: 1411723 - RNA, 19 nt, Artificial Sequence
  Description of Artificial Sequence: Synthetic oligonucleotide
  Antisense strand to SEQ ID NO: 1411722
aucacccagagccuagaau

SEQ ID NO: 1411724 - RNA, 19 nt, Artificial Sequence
  Description of Artificial Sequence: Synthetic oligonucleotide
  Sense strand starting at position 817 of SEQ ID NO: 1243360
cugggugauuccuccauga

SEQ ID NO: 1411725 - RNA, 19 nt, Artificial Sequence
  Description of Artificial Sequence: Synthetic oligonucleotide
  Antisense strand to SEQ ID NO: 1411724
ucauggaggaaucacccag

SEQ ID NO: 1411726 - RNA, 19 nt, Artificial Sequence
  Description of Artificial Sequence: Synthetic oligonucleotide
  Sense strand starting at position 830 of SEQ ID NO: 1243360
ccaugaaggcuguauuggu

SEQ ID NO: 1411727 - RNA, 19 nt, Artificial Sequence
  Description of Artificial Sequence: Synthetic oligonucleotide
  Antisense strand to SEQ ID NO: 1411726
accaauacagccuucaugg

SEQ ID NO: 1411728 - RNA, 19 nt, Artificial Sequence
  Description of Artificial Sequence: Synthetic oligonucleotide
  Sense strand starting at position 834 of SEQ ID NO: 1243360
gaaggcuguauuggugaga

SEQ ID NO: 1411729 - RNA, 19 nt, Artificial Sequence
  Description of Artificial Sequence: Synthetic oligonucleotide
  Antisense strand to SEQ ID NO: 1411728
ucucaccaauacagccuuc

SEQ ID NO: 1411730 - RNA, 19 nt, Artificial Sequence
  Description of Artificial Sequence: Synthetic oligonucleotide
  Sense strand starting at position 1065 of SEQ ID NO: 1243360
caaugcugucaggacugaa

SEQ ID NO: 1411731 - RNA, 19 nt, Artificial Sequence
  Description of Artificial Sequence: Synthetic oligonucleotide
  Antisense strand to SEQ ID NO: 1411730
uucaguccugacagcauug

SEQ ID NO: 1411732 - RNA, 19 nt, Artificial Sequence
  Description of Artificial Sequence: Synthetic oligonucleotide
  Sense strand starting at position 1078 of SEQ ID NO: 1243360
acugaagaggucggaugua

SEQ ID NO: 1411733 - RNA, 19 nt, Artificial Sequence
  Description of Artificial Sequence: Synthetic oligonucleotide
  Antisense strand to SEQ ID NO: 1411732
uacauccgaccucuucagu

SEQ ID NO: 1411734 - RNA, 19 nt, Artificial Sequence
  Description of Artificial Sequence: Synthetic oligonucleotide
  Sense strand starting at position 1147 of SEQ ID NO: 1243360
uuucuuauacccugaagug

SEQ ID NO: 1411735 - RNA, 19 nt, Artificial Sequence
  Description of Artificial Sequence: Synthetic oligonucleotide
  Antisense strand to SEQ ID NO: 1411734
cacuucaggguauaagaaa

SEQ ID NO: 1411736 - RNA, 19 nt, Artificial Sequence
  Description of Artificial Sequence: Synthetic oligonucleotide
  Sense strand starting at position 1148 of SEQ ID NO: 1243360
uucuuauacccugaaguga

SEQ ID NO: 1411737 - RNA, 19 nt, Artificial Sequence
  Description of Artificial Sequence: Synthetic oligonucleotide
  Antisense strand to SEQ ID NO: 1411736
ucacuucaggguauaagaa

SEQ ID NO: 1411738 - RNA, 19 nt, Artificial Sequence
  Description of Artificial Sequence: Synthetic oligonucleotide
  Sense strand starting at position 1270 of SEQ ID NO: 1243360
aguguaguuucccaaggga

SEQ ID NO: 1411739 - RNA, 19 nt, Artificial Sequence
  Description of Artificial Sequence: Synthetic oligonucleotide
  Antisense strand to SEQ ID NO: 1411738
ucccuugggaaacuacacu

SEQ ID NO: 1411740 - RNA, 19 nt, Artificial Sequence
  Description of Artificial Sequence: Synthetic oligonucleotide
  Sense strand starting at position 1273 of SEQ ID NO: 1243360
guaguuucccaagggaaug

SEQ ID NO: 1411741 - RNA, 19 nt, Artificial Sequence
  Description of Artificial Sequence: Synthetic oligonucleotide
  Antisense strand to SEQ ID NO: 1411740
cauucccuugggaaacuac

SEQ ID NO: 1411742 - RNA, 19 nt, Artificial Sequence
  Description of Artificial Sequence: Synthetic oligonucleotide
  Sense strand starting at position 1341 of SEQ ID NO: 1243360
gccuguguucuugggagaa

SEQ ID NO: 1411743 - RNA, 19 nt, Artificial Sequence
  Description of Artificial Sequence: Synthetic oligonucleotide
  Antisense strand to SEQ ID NO: 1411742
uucucccaagaacacaggc

SEQ ID NO: 1411744 - RNA, 19 nt, Artificial Sequence
  Description of Artificial Sequence: Synthetic oligonucleotide
  Sense strand starting at position 1343 of SEQ ID NO: 1243360
cuguguucuugggagaaca

SEQ ID NO: 1411745 - RNA, 19 nt, Artificial Sequence
  Description of Artificial Sequence: Synthetic oligonucleotide
  Antisense strand to SEQ ID NO: 1411744
uguucucccaagaacacag

SEQ ID NO: 1411746 - RNA, 19 nt, Artificial Sequence
  Description of Artificial Sequence: Synthetic oligonucleotide
  Sense strand starting at position 1400 of SEQ ID NO: 1243360
agagguuucugggaggcua

SEQ ID NO: 1411747 - RNA, 19 nt, Artificial Sequence
  Description of Artificial Sequence: Synthetic oligonucleotide
  Antisense strand to SEQ ID NO: 1411746
uagccucccagaaaccucu

SEQ ID NO: 1411748 - RNA, 19 nt, Artificial Sequence
  Description of Artificial Sequence: Synthetic oligonucleotide
  Sense strand starting at position 1607 of SEQ ID NO: 1243360
ggcgagagcccggauuugu

SEQ ID NO: 1411749 - RNA, 19 nt, Artificial Sequence
  Description of Artificial Sequence: Synthetic oligonucleotide
  Antisense strand to SEQ ID NO: 1411748
acaaauccgggcucucgcc

SEQ ID NO: 1411750 - RNA, 19 nt, Artificial Sequence
  Description of Artificial Sequence: Synthetic oligonucleotide
  Sense strand starting at position 2662 of SEQ ID NO: 1243360
agagaacugucucaucucu

SEQ ID NO: 1411751 - RNA, 19 nt, Artificial Sequence
  Description of Artificial Sequence: Synthetic oligonucleotide
  Antisense strand to SEQ ID NO: 1411750
agagaugagacaguucucu

SEQ ID NO: 1411752 - RNA, 19 nt, Artificial Sequence
  Description of Artificial Sequence: Synthetic oligonucleotide
  Sense strand starting at position 2667 of SEQ ID NO: 1243360
acugucucaucucuuugau

SEQ ID NO: 1411753 - RNA, 19 nt, Artificial Sequence
  Description of Artificial Sequence: Synthetic oligonucleotide
  Antisense strand to SEQ ID NO: 1411752
aucaaagagaugagacagu

SEQ ID NO: 1411754 - RNA, 19 nt, Artificial Sequence
  Description of Artificial Sequence: Synthetic oligonucleotide
  Sense strand starting at position 2673 of SEQ ID NO: 1243360
ucaucucuuugaugaagcu

SEQ ID NO: 1411755 - RNA, 19 nt, Artificial Sequence
  Description of Artificial Sequence: Synthetic oligonucleotide
  Antisense strand to SEQ ID NO: 1411754
agcuucaucaaagagauga

SEQ ID NO: 1411756 - RNA, 19 nt, Artificial Sequence
  Description of Artificial Sequence: Synthetic oligonucleotide
  Sense strand starting at position 2739 of SEQ ID NO: 1243360
gcgagaugcacccaacuuu

SEQ ID NO: 1411757 - RNA, 19 nt, Artificial Sequence
  Description of Artificial Sequence: Synthetic oligonucleotide
  Antisense strand to SEQ ID NO: 1411756
aaaguugggugcaucucgc

SEQ ID NO: 1411758 - RNA, 19 nt, Artificial Sequence
  Description of Artificial Sequence: Synthetic oligonucleotide
  Sense strand starting at position 3098 of SEQ ID NO: 1243360
gggcuaucuugucccucaa

SEQ ID NO: 1411759 - RNA, 19 nt, Artificial Sequence
  Description of Artificial Sequence: Synthetic oligonucleotide
  Antisense strand to SEQ ID NO: 1411758
uugagggacaagauagccc

SEQ ID NO: 1411760 - RNA, 19 nt, Artificial Sequence
  Description of Artificial Sequence: Synthetic oligonucleotide
  Sense strand starting at position 3275 of SEQ ID NO: 1243360
ccuccuagccagugaacua

SEQ ID NO: 1411761 - RNA, 19 nt, Artificial Sequence
  Description of Artificial Sequence: Synthetic oligonucleotide
  Antisense strand to SEQ ID NO: 1411760
uaguucacuggcuaggagg

SEQ ID NO: 1411762 - RNA, 19 nt, Artificial Sequence
  Description of Artificial Sequence: Synthetic oligonucleotide
  Sense strand starting at position 3372 of SEQ ID NO: 1243360
gggacuaaucuuggcucca

SEQ ID NO: 1411763 - RNA, 19 nt, Artificial Sequence
  Description of Artificial Sequence: Synthetic oligonucleotide
  Antisense strand to SEQ ID NO: 1411762
uggagccaagauuaguccc

SEQ ID NO: 1411764 - RNA, 19 nt, Artificial Sequence
  Description of Artificial Sequence: Synthetic oligonucleotide
  Sense strand starting at position 3373 of SEQ ID NO: 1243360
ggacuaaucuuggcuccac

SEQ ID NO: 1411765 - RNA, 19 nt, Artificial Sequence
  Description of Artificial Sequence: Synthetic oligonucleotide
  Antisense strand to SEQ ID NO: 1411764
guggagccaagauuagucc

SEQ ID NO: 1411766 - RNA, 19 nt, Artificial Sequence
  Description of Artificial Sequence: Synthetic oligonucleotide
  Sense strand starting at position 3467 of SEQ ID NO: 1243360
gcuacagugugcuuugagu

SEQ ID NO: 1411767 - RNA, 19 nt, Artificial Sequence
  Description of Artificial Sequence: Synthetic oligonucleotide
  Antisense strand to SEQ ID NO: 1411766
acucaaagcacacuguagc

SEQ ID NO: 1411768 - RNA, 19 nt, Artificial Sequence
  Description of Artificial Sequence: Synthetic oligonucleotide
  Sense strand starting at position 3568 of SEQ ID NO: 1243360
acggagagccgguaucagu

SEQ ID NO: 1411769 - RNA, 19 nt, Artificial Sequence
  Description of Artificial Sequence: Synthetic oligonucleotide
  Antisense strand to SEQ ID NO: 1411768
acugauaccggcucuccgu

SEQ ID NO: 1411770 - RNA, 19 nt, Artificial Sequence
  Description of Artificial Sequence: Synthetic oligonucleotide
  Sense strand starting at position 3829 of SEQ ID NO: 1243360
ggcuggagcgaguguucuu

SEQ ID NO: 1411771 - RNA, 19 nt, Artificial Sequence
  Description of Artificial Sequence: Synthetic oligonucleotide
  Antisense strand to SEQ ID NO: 1411770
aagaacacucgcuccagcc

SEQ ID NO: 1411772 - RNA, 19 nt, Artificial Sequence
  Description of Artificial Sequence: Synthetic oligonucleotide
  Sense strand starting at position 3836 of SEQ ID NO: 1243360
gcgaguguucuucuccgga

SEQ ID NO: 1411773 - RNA, 19 nt, Artificial Sequence
  Description of Artificial Sequence: Synthetic oligonucleotide
  Antisense strand to SEQ ID NO: 1411772
uccggagaagaacacucgc

SEQ ID NO: 1411774 - RNA, 19 nt, Artificial Sequence
  Description of Artificial Sequence: Synthetic oligonucleotide
  Sense strand starting at position 3838 of SEQ ID NO: 1243360
gaguguucuucuccggaaa

SEQ ID NO: 1411775 - RNA, 19 nt, Artificial Sequence
  Description of Artificial Sequence: Synthetic oligonucleotide
  Antisense strand to SEQ ID NO: 1411774
uuuccggagaagaacacuc

SEQ ID NO: 1411776 - RNA, 19 nt, Artificial Sequence
  Description of Artificial Sequence: Synthetic oligonucleotide
  Sense strand starting at position 3964 of SEQ ID NO: 1243360
cugacugcccuucgaauua

SEQ ID NO: 1411777 - RNA, 19 nt, Artificial Sequence
  Description of Artificial Sequence: Synthetic oligonucleotide
  Antisense strand to SEQ ID NO: 1411776
uaauucgaagggcagucag

SEQ ID NO: 1411778 - RNA, 19 nt, Artificial Sequence
  Description of Artificial Sequence: Synthetic oligonucleotide
  Sense strand starting at position 1 of SEQ ID NO: 1243365
auguaaguguaaucagaca

SEQ ID NO: 1411779 - RNA, 19 nt, Artificial Sequence
  Description of Artificial Sequence: Synthetic oligonucleotide
  Antisense strand to SEQ ID NO: 1411778
ugucugauuacacuuacau

SEQ ID NO: 1411780 - RNA, 19 nt, Artificial Sequence
  Description of Artificial Sequence: Synthetic oligonucleotide
  Sense strand starting at position 6 of SEQ ID NO: 1243365
aguguaaucagacauuguc

SEQ ID NO: 1411781 - RNA, 19 nt, Artificial Sequence
  Description of Artificial Sequence: Synthetic oligonucleotide
  Antisense strand to SEQ ID NO: 1411780
gacaaugucugauuacacu

SEQ ID NO: 1411782 - RNA, 19 nt, Artificial Sequence
  Description of Artificial Sequence: Synthetic oligonucleotide
  Sense strand starting at position 9 of SEQ ID NO: 1243365
guaaucagacauugucauu

SEQ ID NO: 1411783 - RNA, 19 nt, Artificial Sequence
  Description of Artificial Sequence: Synthetic oligonucleotide
  Antisense strand to SEQ ID NO: 1411782
aaugacaaugucugauuac

SEQ ID NO: 1411784 - RNA, 19 nt, Artificial Sequence
  Description of Artificial Sequence: Synthetic oligonucleotide
  Sense strand starting at position 34 of SEQ ID NO: 1243365
caguucuuccagggaggga

SEQ ID NO: 1411785 - RNA, 19 nt, Artificial Sequence
  Description of Artificial Sequence: Synthetic oligonucleotide
  Antisense strand to SEQ ID NO: 1411784
ucccucccuggaagaacug

SEQ ID NO: 1411786 - RNA, 19 nt, Artificial Sequence
  Description of Artificial Sequence: Synthetic oligonucleotide
  Sense strand starting at position 76 of SEQ ID NO: 1243365
aagucuucggaguaacaau

SEQ ID NO: 1411787 - RNA, 19 nt, Artificial Sequence
  Description of Artificial Sequence: Synthetic oligonucleotide
  Antisense strand to SEQ ID NO: 1411786
auuguuacuccgaagacuu

SEQ ID NO: 1411788 - RNA, 19 nt, Artificial Sequence
  Description of Artificial Sequence: Synthetic oligonucleotide
  Sense strand starting at position 116 of SEQ ID NO: 1243365
ccugguuaacauggucuaa

SEQ ID NO: 1411789 - RNA, 19 nt, Artificial Sequence
  Description of Artificial Sequence: Synthetic oligonucleotide
  Antisense strand to SEQ ID NO: 1411788
uuagaccauguuaaccagg

SEQ ID NO: 1411790 - RNA, 19 nt, Artificial Sequence
  Description of Artificial Sequence: Synthetic oligonucleotide
  Sense strand starting at position 238 of SEQ ID NO: 1243365
acugaaauuuagggagcaa

SEQ ID NO: 1411791 - RNA, 19 nt, Artificial Sequence
  Description of Artificial Sequence: Synthetic oligonucleotide
  Antisense strand to SEQ ID NO: 1411790
uugcucccuaaauuucagu

SEQ ID NO: 1411792 - RNA, 19 nt, Artificial Sequence
  Description of Artificial Sequence: Synthetic oligonucleotide
  Sense strand starting at position 345 of SEQ ID NO: 1243365
uaaagaggcucuuucugua

SEQ ID NO: 1411793 - RNA, 19 nt, Artificial Sequence
  Description of Artificial Sequence: Synthetic oligonucleotide
  Antisense strand to SEQ ID NO: 1411792
uacagaaagagccucuuua

SEQ ID NO: 1411794 - RNA, 19 nt, Artificial Sequence
  Description of Artificial Sequence: Synthetic oligonucleotide
  Sense strand starting at position 727 of SEQ ID NO: 1243365
agagaaguguccucuaauc

SEQ ID NO: 1411795 - RNA, 19 nt, Artificial Sequence
  Description of Artificial Sequence: Synthetic oligonucleotide
  Antisense strand to SEQ ID NO: 1411794
gauuagaggacacuucucu

SEQ ID NO: 1411796 - RNA, 19 nt, Artificial Sequence
  Description of Artificial Sequence: Synthetic oligonucleotide
  Sense strand starting at position 729 of SEQ ID NO: 1243365
agaaguguccucuaauccu

SEQ ID NO: 1411797 - RNA, 19 nt, Artificial Sequence
  Description of Artificial Sequence: Synthetic oligonucleotide
  Antisense strand to SEQ ID NO: 1411796
aggauuagaggacacuucu

SEQ ID NO: 1411798 - RNA, 19 nt, Artificial Sequence
  Description of Artificial Sequence: Synthetic oligonucleotide
  Sense strand starting at position 809 of SEQ ID NO: 1243365
ugucauagguuaucaucau

SEQ ID NO: 1411799 - RNA, 19 nt, Artificial Sequence
  Description of Artificial Sequence: Synthetic oligonucleotide
  Antisense strand to SEQ ID NO: 1411798
augaugauaaccuaugaca

SEQ ID NO: 1411800 - RNA, 19 nt, Artificial Sequence
  Description of Artificial Sequence: Synthetic oligonucleotide
  Sense strand starting at position 892 of SEQ ID NO: 1243365
gucaaacucguuuaauccu

SEQ ID NO: 1411801 - RNA, 19 nt, Artificial Sequence
  Description of Artificial Sequence: Synthetic oligonucleotide
  Antisense strand to SEQ ID NO: 1411800
aggauuaaacgaguuugac

SEQ ID NO: 1411802 - RNA, 19 nt, Artificial Sequence
  Description of Artificial Sequence: Synthetic oligonucleotide
  Sense strand starting at position 899 of SEQ ID NO: 1243365
ucguuuaauccuuacaaga

SEQ ID NO: 1411803 - RNA, 19 nt, Artificial Sequence
  Description of Artificial Sequence: Synthetic oligonucleotide
  Antisense strand to SEQ ID NO: 1411802
ucuuguaaggauuaaacga

SEQ ID NO: 1411804 - RNA, 19 nt, Artificial Sequence
  Description of Artificial Sequence: Synthetic oligonucleotide
  Sense strand starting at position 918 of SEQ ID NO: 1243365
agccuauaugguggaaucu

SEQ ID NO: 1411805 - RNA, 19 nt, Artificial Sequence
  Description of Artificial Sequence: Synthetic oligonucleotide
  Antisense strand to SEQ ID NO: 1411804
agauuccaccauauaggcu

SEQ ID NO: 1411806 - RNA, 19 nt, Artificial Sequence
  Description of Artificial Sequence: Synthetic oligonucleotide
  Sense strand starting at position 946 of SEQ ID NO: 1243365
cugucuuuacggcaaggaa

SEQ ID NO: 1411807 - RNA, 19 nt, Artificial Sequence
  Description of Artificial Sequence: Synthetic oligonucleotide
  Antisense strand to SEQ ID NO: 1411806
uuccuugccguaaagacag

SEQ ID NO: 1411808 - RNA, 19 nt, Artificial Sequence
  Description of Artificial Sequence: Synthetic oligonucleotide
  Sense strand starting at position 1044 of SEQ ID NO: 1243365
caggaagugugguucgaaa

SEQ ID NO: 1411809 - RNA, 19 nt, Artificial Sequence
  Description of Artificial Sequence: Synthetic oligonucleotide
  Antisense strand to SEQ ID NO: 1411808
uuucgaaccacacuuccug

SEQ ID NO: 1411810 - RNA, 19 nt, Artificial Sequence
  Description of Artificial Sequence: Synthetic oligonucleotide
  Sense strand starting at position 1171 of SEQ ID NO: 1243365
ucuggugccugacuugaaa

SEQ ID NO: 1411811 - RNA, 19 nt, Artificial Sequence
  Description of Artificial Sequence: Synthetic oligonucleotide
  Antisense strand to SEQ ID NO: 1411810
uuucaagucaggcaccaga

SEQ ID NO: 1411812 - RNA, 19 nt, Artificial Sequence
  Description of Artificial Sequence: Synthetic oligonucleotide
  Sense strand starting at position 1173 of SEQ ID NO: 1243365
uggugccugacuugaaaua

SEQ ID NO: 1411813 - RNA, 19 nt, Artificial Sequence
  Description of Artificial Sequence: Synthetic oligonucleotide
  Antisense strand to SEQ ID NO: 1411812
uauuucaagucaggcacca

SEQ ID NO: 1411814 - RNA, 19 nt, Artificial Sequence
  Description of Artificial Sequence: Synthetic oligonucleotide
  Sense strand starting at position 1174 of SEQ ID NO: 1243365
ggugccugacuugaaauaa

SEQ ID NO: 1411815 - RNA, 19 nt, Artificial Sequence
  Description of Artificial Sequence: Synthetic oligonucleotide
  Antisense strand to SEQ ID NO: 1411814
uuauuucaagucaggcacc

SEQ ID NO: 1411816 - RNA, 19 nt, Artificial Sequence
  Description of Artificial Sequence: Synthetic oligonucleotide
  Sense strand starting at position 1185 of SEQ ID NO: 1243365
ugaaauaagugcuccacaa

SEQ ID NO: 1411817 - RNA, 19 nt, Artificial Sequence
  Description of Artificial Sequence: Synthetic oligonucleotide
  Antisense strand to SEQ ID NO: 1411816
uuguggagcacuuauuuca

SEQ ID NO: 1411818 - RNA, 19 nt, Artificial Sequence
  Description of Artificial Sequence: Synthetic oligonucleotide
  Sense strand starting at position 1227 of SEQ ID NO: 1243365
caaagaguucgguauaaug

SEQ ID NO: 1411819 - RNA, 19 nt, Artificial Sequence
  Description of Artificial Sequence: Synthetic oligonucleotide
  Antisense strand to SEQ ID NO: 1411818
cauuauaccgaacucuuug

SEQ ID NO: 1411820 - RNA, 19 nt, Artificial Sequence
  Description of Artificial Sequence: Synthetic oligonucleotide
  Sense strand starting at position 1230 of SEQ ID NO: 1243365
agaguucgguauaauggga

SEQ ID NO: 1411821 - RNA, 19 nt, Artificial Sequence
  Description of Artificial Sequence: Synthetic oligonucleotide
  Antisense strand to SEQ ID NO: 1411820
ucccauuauaccgaacucu

SEQ ID NO: 1411822 - RNA, 19 nt, Artificial Sequence
  Description of Artificial Sequence: Synthetic oligonucleotide
  Sense strand starting at position 1442 of SEQ ID NO: 1243365
ccuauaggugcccagucaa

SEQ ID NO: 1411823 - RNA, 19 nt, Artificial Sequence
  Description of Artificial Sequence: Synthetic oligonucleotide
  Antisense strand to SEQ ID NO: 1411822
uugacugggcaccuauagg

SEQ ID NO: 1411824 - RNA, 19 nt, Artificial Sequence
  Description of Artificial Sequence: Synthetic oligonucleotide
  Sense strand starting at position 1576 of SEQ ID NO: 1243365
gaaugaauggaucgguaag

SEQ ID NO: 1411825 - RNA, 19 nt, Artificial Sequence
  Description of Artificial Sequence: Synthetic oligonucleotide
  Antisense strand to SEQ ID NO: 1411824
cuuaccgauccauucauuc

SEQ ID NO: 1411826 - RNA, 19 nt, Artificial Sequence
  Description of Artificial Sequence: Synthetic oligonucleotide
  Sense strand starting at position 1690 of SEQ ID NO: 1243365
ucuaaagucagacggagaa

SEQ ID NO: 1411827 - RNA, 19 nt, Artificial Sequence
  Description of Artificial Sequence: Synthetic oligonucleotide
  Antisense strand to SEQ ID NO: 1411826
uucuccgucugacuuuaga

SEQ ID NO: 1411828 - RNA, 19 nt, Artificial Sequence
  Description of Artificial Sequence: Synthetic oligonucleotide
  Sense strand starting at position 1881 of SEQ ID NO: 1243365
gcucuucucccuuaggaaa

SEQ ID NO: 1411829 - RNA, 19 nt, Artificial Sequence
  Description of Artificial Sequence: Synthetic oligonucleotide
  Antisense strand to SEQ ID NO: 1411828
uuuccuaagggagaagagc

SEQ ID NO: 1411830 - RNA, 19 nt, Artificial Sequence
  Description of Artificial Sequence: Synthetic oligonucleotide
  Sense strand starting at position 2224 of SEQ ID NO: 1243365
aagaguuagggcgaguuua

SEQ ID NO: 1411831 - RNA, 19 nt, Artificial Sequence
  Description of Artificial Sequence: Synthetic oligonucleotide
  Antisense strand to SEQ ID NO: 1411830
uaaacucgcccuaacucuu

SEQ ID NO: 1411832 - RNA, 19 nt, Artificial Sequence
  Description of Artificial Sequence: Synthetic oligonucleotide
  Sense strand starting at position 2253 of SEQ ID NO: 1243365
gcagcugugagauaaaguc

SEQ ID NO: 1411833 - RNA, 19 nt, Artificial Sequence
  Description of Artificial Sequence: Synthetic oligonucleotide
  Antisense strand to SEQ ID NO: 1411832
gacuuuaucucacagcugc

SEQ ID NO: 1411834 - RNA, 19 nt, Artificial Sequence
  Description of Artificial Sequence: Synthetic oligonucleotide
  Sense strand starting at position 2579 of SEQ ID NO: 1243365
uugccauggcuugguauuu

SEQ ID NO: 1411835 - RNA, 19 nt, Artificial Sequence
  Description of Artificial Sequence: Synthetic oligonucleotide
  Antisense strand to SEQ ID NO: 1411834
aaauaccaagccauggcaa

SEQ ID NO: 1411836 - RNA, 19 nt, Artificial Sequence
  Description of Artificial Sequence: Synthetic oligonucleotide
  Sense strand starting at position 2599 of SEQ ID NO: 1243365
agggacuuuacacaucgua

SEQ ID NO: 1411837 - RNA, 19 nt, Artificial Sequence
  Description of Artificial Sequence: Synthetic oligonucleotide
  Antisense strand to SEQ ID NO: 1411836
uacgauguguaaagucccu

SEQ ID NO: 1411838 - RNA, 19 nt, Artificial Sequence
  Description of Artificial Sequence: Synthetic oligonucleotide
  Sense strand starting at position 3144 of SEQ ID NO: 1243365
gccuaauuacagugagaac

SEQ ID NO: 1411839 - RNA, 19 nt, Artificial Sequence
  Description of Artificial Sequence: Synthetic oligonucleotide
  Antisense strand to SEQ ID NO: 1411838
guucucacuguaauuaggc

SEQ ID NO: 1411840 - RNA, 19 nt, Artificial Sequence
  Description of Artificial Sequence: Synthetic oligonucleotide
  Sense strand starting at position 3287 of SEQ ID NO: 1243365
uaacgauuugccgguuucu

SEQ ID NO: 1411841 - RNA, 19 nt, Artificial Sequence
  Description of Artificial Sequence: Synthetic oligonucleotide
  Antisense strand to SEQ ID NO: 1411840
agaaaccggcaaaucguua

SEQ ID NO: 1411842 - RNA, 19 nt, Artificial Sequence
  Description of Artificial Sequence: Synthetic oligonucleotide
  Sense strand starting at position 3299 of SEQ ID NO: 1243365
gguuucuggccuuaacauc

SEQ ID NO: 1411843 - RNA, 19 nt, Artificial Sequence
  Description of Artificial Sequence: Synthetic oligonucleotide
  Antisense strand to SEQ ID NO: 1411842
gauguuaaggccagaaacc

SEQ ID NO: 1411844 - RNA, 19 nt, Artificial Sequence
  Description of Artificial Sequence: Synthetic oligonucleotide
  Sense strand starting at position 3306 of SEQ ID NO: 1243365
ggccuuaacaucugagagu

SEQ ID NO: 1411845 - RNA, 19 nt, Artificial Sequence
  Description of Artificial Sequence: Synthetic oligonucleotide
  Antisense strand to SEQ ID NO: 1411844
acucucagauguuaaggcc

SEQ ID NO: 1411846 - RNA, 19 nt, Artificial Sequence
  Description of Artificial Sequence: Synthetic oligonucleotide
  Sense strand starting at position 3330 of SEQ ID NO: 1243365
gccuccagucacugaaaua

SEQ ID NO: 1411847 - RNA, 19 nt, Artificial Sequence
  Description of Artificial Sequence: Synthetic oligonucleotide
  Antisense strand to SEQ ID NO: 1411846
uauuucagugacuggaggc

SEQ ID NO: 1411848 - RNA, 19 nt, Artificial Sequence
  Description of Artificial Sequence: Synthetic oligonucleotide
  Sense strand starting at position 3476 of SEQ ID NO: 1243365
gcagccaucgucgcuaauu

SEQ ID NO: 1411849 - RNA, 19 nt, Artificial Sequence
  Description of Artificial Sequence: Synthetic oligonucleotide
  Antisense strand to SEQ ID NO: 1411848
aauuagcgacgauggcugc

SEQ ID NO: 1411850 - RNA, 19 nt, Artificial Sequence
  Description of Artificial Sequence: Synthetic oligonucleotide
  Sense strand starting at position 3536 of SEQ ID NO: 1243365
uucguagucacuccgcaau

SEQ ID NO: 1411851 - RNA, 19 nt, Artificial Sequence
  Description of Artificial Sequence: Synthetic oligonucleotide
  Antisense strand to SEQ ID NO: 1411850
auugcggagugacuacgaa

SEQ ID NO: 1411852 - RNA, 19 nt, Artificial Sequence
  Description of Artificial Sequence: Synthetic oligonucleotide
  Sense strand starting at position 3870 of SEQ ID NO: 1243365
guguucuaggaguggaauu

SEQ ID NO: 1411853 - RNA, 19 nt, Artificial Sequence
  Description of Artificial Sequence: Synthetic oligonucleotide
  Antisense strand to SEQ ID NO: 1411852
aauuccacuccuagaacac

SEQ ID NO: 1411854 - RNA, 19 nt, Artificial Sequence
  Description of Artificial Sequence: Synthetic oligonucleotide
  Sense strand starting at position 3871 of SEQ ID NO: 1243365
uguucuaggaguggaauua

SEQ ID NO: 1411855 - RNA, 19 nt, Artificial Sequence
  Description of Artificial Sequence: Synthetic oligonucleotide
  Antisense strand to SEQ ID NO: 1411854
uaauuccacuccuagaaca

SEQ ID NO: 1411856 - RNA, 19 nt, Artificial Sequence
  Description of Artificial Sequence: Synthetic oligonucleotide
  Sense strand starting at position 3902 of SEQ ID NO: 1243365
acauuugauucugaauguu

SEQ ID NO: 1411857 - RNA, 19 nt, Artificial Sequence
  Description of Artificial Sequence: Synthetic oligonucleotide
  Antisense strand to SEQ ID NO: 1411856
aacauucagaaucaaaugu

SEQ ID NO: 1411858 - RNA, 19 nt, Artificial Sequence
  Description of Artificial Sequence: Synthetic oligonucleotide
  Sense strand starting at position 520 of SEQ ID NO: 1243366
caacaacuugcgcguucua

SEQ ID NO: 1411859 - RNA, 19 nt, Artificial Sequence
  Description of Artificial Sequence: Synthetic oligonucleotide
  Antisense strand to SEQ ID NO: 1411858
uagaacgcgcaaguuguug

SEQ ID NO: 1411860 - RNA, 19 nt, Artificial Sequence
  Description of Artificial Sequence: Synthetic oligonucleotide
  Sense strand starting at position 522 of SEQ ID NO: 1243366
acaacuugcgcguucuaca

SEQ ID NO: 1411861 - RNA, 19 nt, Artificial Sequence
  Description of Artificial Sequence: Synthetic oligonucleotide
  Antisense strand to SEQ ID NO: 1411860
uguagaacgcgcaaguugu

SEQ ID NO: 1411862 - RNA, 19 nt, Artificial Sequence
  Description of Artificial Sequence: Synthetic oligonucleotide
  Sense strand starting at position 523 of SEQ ID NO: 1243366
caacuugcgcguucuacau

SEQ ID NO: 1411863 - RNA, 19 nt, Artificial Sequence
  Description of Artificial Sequence: Synthetic oligonucleotide
  Antisense strand to SEQ ID NO: 1411862
auguagaacgcgcaaguug

SEQ ID NO: 1411864 - RNA, 19 nt, Artificial Sequence
  Description of Artificial Sequence: Synthetic oligonucleotide
  Sense strand starting at position 525 of SEQ ID NO: 1243366
acuugcgcguucuacauua

SEQ ID NO: 1411865 - RNA, 19 nt, Artificial Sequence
  Description of Artificial Sequence: Synthetic oligonucleotide
  Antisense strand to SEQ ID NO: 1411864
uaauguagaacgcgcaagu

SEQ ID NO: 1411866 - RNA, 19 nt, Artificial Sequence
  Description of Artificial Sequence: Synthetic oligonucleotide
  Sense strand starting at position 527 of SEQ ID NO: 1243366
uugcgcguucuacauuauu

SEQ ID NO: 1411867 - RNA, 19 nt, Artificial Sequence
  Description of Artificial Sequence: Synthetic oligonucleotide
  Antisense strand to SEQ ID NO: 1411866
aauaauguagaacgcgcaa

SEQ ID NO: 1411868 - RNA, 19 nt, Artificial Sequence
  Description of Artificial Sequence: Synthetic oligonucleotide
  Sense strand starting at position 546 of SEQ ID NO: 1243366
uggccaguuucuggacaau

SEQ ID NO: 1411869 - RNA, 19 nt, Artificial Sequence
  Description of Artificial Sequence: Synthetic oligonucleotide
  Antisense strand to SEQ ID NO: 1411868
auuguccagaaacuggcca

SEQ ID NO: 1411870 - RNA, 19 nt, Artificial Sequence
  Description of Artificial Sequence: Synthetic oligonucleotide
  Sense strand starting at position 549 of SEQ ID NO: 1243366
ccaguuucuggacaauuau

SEQ ID NO: 1411871 - RNA, 19 nt, Artificial Sequence
  Description of Artificial Sequence: Synthetic oligonucleotide
  Antisense strand to SEQ ID NO: 1411870
auaauuguccagaaacugg

SEQ ID NO: 1411872 - RNA, 19 nt, Artificial Sequence
  Description of Artificial Sequence: Synthetic oligonucleotide
  Sense strand starting at position 558 of SEQ ID NO: 1243366
ggacaauuauaacaauugu

SEQ ID NO: 1411873 - RNA, 19 nt, Artificial Sequence
  Description of Artificial Sequence: Synthetic oligonucleotide
  Antisense strand to SEQ ID NO: 1411872
acaauuguuauaauugucc

SEQ ID NO: 1411874 - RNA, 19 nt, Artificial Sequence
  Description of Artificial Sequence: Synthetic oligonucleotide
  Sense strand starting at position 680 of SEQ ID NO: 1243366
acaagcauuuauuaagaga

SEQ ID NO: 1411875 - RNA, 19 nt, Artificial Sequence
  Description of Artificial Sequence: Synthetic oligonucleotide
  Antisense strand to SEQ ID NO: 1411874
ucucuuaauaaaugcuugu

SEQ ID NO: 1411876 - RNA, 19 nt, Artificial Sequence
  Description of Artificial Sequence: Synthetic oligonucleotide
  Sense strand starting at position 1021 of SEQ ID NO: 1243366
uaaugaauguucugccuag

SEQ ID NO: 1411877 - RNA, 19 nt, Artificial Sequence
  Description of Artificial Sequence: Synthetic oligonucleotide
  Antisense strand to SEQ ID NO: 1411876
cuaggcagaacauucauua

SEQ ID NO: 1411878 - RNA, 19 nt, Artificial Sequence
  Description of Artificial Sequence: Synthetic oligonucleotide
  Sense strand starting at position 1022 of SEQ ID NO: 1243366
aaugaauguucugccuaga

SEQ ID NO: 1411879 - RNA, 19 nt, Artificial Sequence
  Description of Artificial Sequence: Synthetic oligonucleotide
  Antisense strand to SEQ ID NO: 1411878
ucuaggcagaacauucauu

SEQ ID NO: 1411880 - RNA, 19 nt, Artificial Sequence
  Description of Artificial Sequence: Synthetic oligonucleotide
  Sense strand starting at position 1025 of SEQ ID NO: 1243366
gaauguucugccuagaguc

SEQ ID NO: 1411881 - RNA, 19 nt, Artificial Sequence
  Description of Artificial Sequence: Synthetic oligonucleotide
  Antisense strand to SEQ ID NO: 1411880
gacucuaggcagaacauuc

SEQ ID NO: 1411882 - RNA, 19 nt, Artificial Sequence
  Description of Artificial Sequence: Synthetic oligonucleotide
  Sense strand starting at position 1033 of SEQ ID NO: 1243366
ugccuagagucagagcaau

SEQ ID NO: 1411883 - RNA, 19 nt, Artificial Sequence
  Description of Artificial Sequence: Synthetic oligonucleotide
  Antisense strand to SEQ ID NO: 1411882
auugcucugacucuaggca

SEQ ID NO: 1411884 - RNA, 19 nt, Artificial Sequence
  Description of Artificial Sequence: Synthetic oligonucleotide
  Sense strand starting at position 1039 of SEQ ID NO: 1243366
gagucagagcaaugccuua

SEQ ID NO: 1411885 - RNA, 19 nt, Artificial Sequence
  Description of Artificial Sequence: Synthetic oligonucleotide
  Antisense strand to SEQ ID NO: 1411884
uaaggcauugcucugacuc

SEQ ID NO: 1411886 - RNA, 19 nt, Artificial Sequence
  Description of Artificial Sequence: Synthetic oligonucleotide
  Sense strand starting at position 2210 of SEQ ID NO: 1243366
ggugacgaauccuaagaca

SEQ ID NO: 1411887 - RNA, 19 nt, Artificial Sequence
  Description of Artificial Sequence: Synthetic oligonucleotide
  Antisense strand to SEQ ID NO: 1411886
ugucuuaggauucgucacc

SEQ ID NO: 1411888 - RNA, 19 nt, Artificial Sequence
  Description of Artificial Sequence: Synthetic oligonucleotide
  Sense strand starting at position 2294 of SEQ ID NO: 1243366
cgggcagucagguguaaac

SEQ ID NO: 1411889 - RNA, 19 nt, Artificial Sequence
  Description of Artificial Sequence: Synthetic oligonucleotide
  Antisense strand to SEQ ID NO: 1411888
guuuacaccugacugcccg

SEQ ID NO: 1411890 - RNA, 19 nt, Artificial Sequence
  Description of Artificial Sequence: Synthetic oligonucleotide
  Sense strand starting at position 2719 of SEQ ID NO: 1243366
ggcggaucgucugagguga

SEQ ID NO: 1411891 - RNA, 19 nt, Artificial Sequence
  Description of Artificial Sequence: Synthetic oligonucleotide
  Antisense strand to SEQ ID NO: 1411890
ucaccucagacgauccgcc

SEQ ID NO: 1411892 - RNA, 19 nt, Artificial Sequence
  Description of Artificial Sequence: Synthetic oligonucleotide
  Sense strand starting at position 3487 of SEQ ID NO: 1243366
caggaugcuccuuaaacga

SEQ ID NO: 1411893 - RNA, 19 nt, Artificial Sequence
  Description of Artificial Sequence: Synthetic oligonucleotide
  Antisense strand to SEQ ID NO: 1411892
ucguuuaaggagcauccug

SEQ ID NO: 1411894 - RNA, 19 nt, Artificial Sequence
  Description of Artificial Sequence: Synthetic oligonucleotide
  Sense strand starting at position 3495 of SEQ ID NO: 1243366
uccuuaaacgagugucuaa

SEQ ID NO: 1411895 - RNA, 19 nt, Artificial Sequence
  Description of Artificial Sequence: Synthetic oligonucleotide
  Antisense strand to SEQ ID NO: 1411894
uuagacacucguuuaagga

SEQ ID NO: 1411896 - RNA, 19 nt, Artificial Sequence
  Description of Artificial Sequence: Synthetic oligonucleotide
  Sense strand starting at position 3572 of SEQ ID NO: 1243366
auauaucgcuugugcaaau

SEQ ID NO: 1411897 - RNA, 19 nt, Artificial Sequence
  Description of Artificial Sequence: Synthetic oligonucleotide
  Antisense strand to SEQ ID NO: 1411896
auuugcacaagcgauauau

SEQ ID NO: 1411898 - RNA, 19 nt, Artificial Sequence
  Description of Artificial Sequence: Synthetic oligonucleotide
  Sense strand starting at position 3573 of SEQ ID NO: 1243366
uauaucgcuugugcaaaua

SEQ ID NO: 1411899 - RNA, 19 nt, Artificial Sequence
  Description of Artificial Sequence: Synthetic oligonucleotide
  Antisense strand to SEQ ID NO: 1411898
uauuugcacaagcgauaua

SEQ ID NO: 1411900 - RNA, 19 nt, Artificial Sequence
  Description of Artificial Sequence: Synthetic oligonucleotide
  Sense strand starting at position 67 of SEQ ID NO: 1243367
acgcccaucuguuuaccua

SEQ ID NO: 1411901 - RNA, 19 nt, Artificial Sequence
  Description of Artificial Sequence: Synthetic oligonucleotide
  Antisense strand to SEQ ID NO: 1411900
uagguaaacagaugggcgu

SEQ ID NO: 1411902 - RNA, 19 nt, Artificial Sequence
  Description of Artificial Sequence: Synthetic oligonucleotide
  Sense strand starting at position 68 of SEQ ID NO: 1243367
cgcccaucuguuuaccuau

SEQ ID NO: 1411903 - RNA, 19 nt, Artificial Sequence
  Description of Artificial Sequence: Synthetic oligonucleotide
  Antisense strand to SEQ ID NO: 1411902
auagguaaacagaugggcg

SEQ ID NO: 1411904 - RNA, 19 nt, Artificial Sequence
  Description of Artificial Sequence: Synthetic oligonucleotide
  Sense strand starting at position 95 of SEQ ID NO: 1243367
gcgacuuucucacugcaau

SEQ ID NO: 1411905 - RNA, 19 nt, Artificial Sequence
  Description of Artificial Sequence: Synthetic oligonucleotide
  Antisense strand to SEQ ID NO: 1411904
auugcagugagaaagucgc

SEQ ID NO: 1411906 - RNA, 19 nt, Artificial Sequence
  Description of Artificial Sequence: Synthetic oligonucleotide
  Sense strand starting at position 96 of SEQ ID NO: 1243367
cgacuuucucacugcaaug

SEQ ID NO: 1411907 - RNA, 19 nt, Artificial Sequence
  Description of Artificial Sequence: Synthetic oligonucleotide
  Antisense strand to SEQ ID NO: 1411906
cauugcagugagaaagucg

SEQ ID NO: 1411908 - RNA, 19 nt, Artificial Sequence
  Description of Artificial Sequence: Synthetic oligonucleotide
  Sense strand starting at position 408 of SEQ ID NO: 1243367
gugagcugucauugugccu

SEQ ID NO: 1411909 - RNA, 19 nt, Artificial Sequence
  Description of Artificial Sequence: Synthetic oligonucleotide
  Antisense strand to SEQ ID NO: 1411908
aggcacaaugacagcucac

SEQ ID NO: 1411910 - RNA, 19 nt, Artificial Sequence
  Description of Artificial Sequence: Synthetic oligonucleotide
  Sense strand starting at position 554 of SEQ ID NO: 1243367
augccuaagccuugugaag

SEQ ID NO: 1411911 - RNA, 19 nt, Artificial Sequence
  Description of Artificial Sequence: Synthetic oligonucleotide
  Antisense strand to SEQ ID NO: 1411910
cuucacaaggcuuaggcau

SEQ ID NO: 1411912 - RNA, 19 nt, Artificial Sequence
  Description of Artificial Sequence: Synthetic oligonucleotide
  Sense strand starting at position 556 of SEQ ID NO: 1243367
gccuaagccuugugaaguc

SEQ ID NO: 1411913 - RNA, 19 nt, Artificial Sequence
  Description of Artificial Sequence: Synthetic oligonucleotide
  Antisense strand to SEQ ID NO: 1411912
gacuucacaaggcuuaggc

SEQ ID NO: 1411914 - RNA, 19 nt, Artificial Sequence
  Description of Artificial Sequence: Synthetic oligonucleotide
  Sense strand starting at position 593 of SEQ ID NO: 1243367
aagaauuaacugugugaga

SEQ ID NO: 1411915 - RNA, 19 nt, Artificial Sequence
  Description of Artificial Sequence: Synthetic oligonucleotide
  Antisense strand to SEQ ID NO: 1411914
ucucacacaguuaauucuu

SEQ ID NO: 1411916 - RNA, 19 nt, Artificial Sequence
  Description of Artificial Sequence: Synthetic oligonucleotide
  Sense strand starting at position 594 of SEQ ID NO: 1243367
agaauuaacugugugagau

SEQ ID NO: 1411917 - RNA, 19 nt, Artificial Sequence
  Description of Artificial Sequence: Synthetic oligonucleotide
  Antisense strand to SEQ ID NO: 1411916
aucucacacaguuaauucu

SEQ ID NO: 1411918 - RNA, 19 nt, Artificial Sequence
  Description of Artificial Sequence: Synthetic oligonucleotide
  Sense strand starting at position 595 of SEQ ID NO: 1243367
gaauuaacugugugagaug

SEQ ID NO: 1411919 - RNA, 19 nt, Artificial Sequence
  Description of Artificial Sequence: Synthetic oligonucleotide
  Antisense strand to SEQ ID NO: 1411918
caucucacacaguuaauuc

SEQ ID NO: 1411920 - RNA, 19 nt, Artificial Sequence
  Description of Artificial Sequence: Synthetic oligonucleotide
  Sense strand starting at position 600 of SEQ ID NO: 1243367
aacugugugagauggacuu

SEQ ID NO: 1411921 - RNA, 19 nt, Artificial Sequence
  Description of Artificial Sequence: Synthetic oligonucleotide
  Antisense strand to SEQ ID NO: 1411920
aaguccaucucacacaguu

SEQ ID NO: 1411922 - RNA, 19 nt, Artificial Sequence
  Description of Artificial Sequence: Synthetic oligonucleotide
  Sense strand starting at position 606 of SEQ ID NO: 1243367
gugagauggacuugguaua

SEQ ID NO: 1411923 - RNA, 19 nt, Artificial Sequence
  Description of Artificial Sequence: Synthetic oligonucleotide
  Antisense strand to SEQ ID NO: 1411922
uauaccaaguccaucucac

SEQ ID NO: 1411924 - RNA, 19 nt, Artificial Sequence
  Description of Artificial Sequence: Synthetic oligonucleotide
  Sense strand starting at position 1154 of SEQ ID NO: 1243367
aggucagaagcuugugacu

SEQ ID NO: 1411925 - RNA, 19 nt, Artificial Sequence
  Description of Artificial Sequence: Synthetic oligonucleotide
  Antisense strand to SEQ ID NO: 1411924
agucacaagcuucugaccu

SEQ ID NO: 1411926 - RNA, 19 nt, Artificial Sequence
  Description of Artificial Sequence: Synthetic oligonucleotide
  Sense strand starting at position 1156 of SEQ ID NO: 1243367
gucagaagcuugugacuag

SEQ ID NO: 1411927 - RNA, 19 nt, Artificial Sequence
  Description of Artificial Sequence: Synthetic oligonucleotide
  Antisense strand to SEQ ID NO: 1411926
cuagucacaagcuucugac

SEQ ID NO: 1411928 - RNA, 19 nt, Artificial Sequence
  Description of Artificial Sequence: Synthetic oligonucleotide
  Sense strand starting at position 1458 of SEQ ID NO: 1243367
aucucaagucagggugaua

SEQ ID NO: 1411929 - RNA, 19 nt, Artificial Sequence
  Description of Artificial Sequence: Synthetic oligonucleotide
  Antisense strand to SEQ ID NO: 1411928
uaucacccugacuugagau

SEQ ID NO: 1411930 - RNA, 19 nt, Artificial Sequence
  Description of Artificial Sequence: Synthetic oligonucleotide
  Sense strand starting at position 1490 of SEQ ID NO: 1243367
accggaaaucuagauguuu

SEQ ID NO: 1411931 - RNA, 19 nt, Artificial Sequence
  Description of Artificial Sequence: Synthetic oligonucleotide
  Antisense strand to SEQ ID NO: 1411930
aaacaucuagauuuccggu

SEQ ID NO: 1411932 - RNA, 19 nt, Artificial Sequence
  Description of Artificial Sequence: Synthetic oligonucleotide
  Sense strand starting at position 1492 of SEQ ID NO: 1243367
cggaaaucuagauguuucu

SEQ ID NO: 1411933 - RNA, 19 nt, Artificial Sequence
  Description of Artificial Sequence: Synthetic oligonucleotide
  Antisense strand to SEQ ID NO: 1411932
agaaacaucuagauuuccg

SEQ ID NO: 1411934 - RNA, 19 nt, Artificial Sequence
  Description of Artificial Sequence: Synthetic oligonucleotide
  Sense strand starting at position 2008 of SEQ ID NO: 1243367
agcucagauucuucgguua

SEQ ID NO: 1411935 - RNA, 19 nt, Artificial Sequence
  Description of Artificial Sequence: Synthetic oligonucleotide
  Antisense strand to SEQ ID NO: 1411934
uaaccgaagaaucugagcu

SEQ ID NO: 1411936 - RNA, 19 nt, Artificial Sequence
  Description of Artificial Sequence: Synthetic oligonucleotide
  Sense strand starting at position 2010 of SEQ ID NO: 1243367
cucagauucuucgguuaac

SEQ ID NO: 1411937 - RNA, 19 nt, Artificial Sequence
  Description of Artificial Sequence: Synthetic oligonucleotide
  Antisense strand to SEQ ID NO: 1411936
guuaaccgaagaaucugag

SEQ ID NO: 1411938 - RNA, 19 nt, Artificial Sequence
  Description of Artificial Sequence: Synthetic oligonucleotide
  Sense strand starting at position 2011 of SEQ ID NO: 1243367
ucagauucuucgguuaacu

SEQ ID NO: 1411939 - RNA, 19 nt, Artificial Sequence
  Description of Artificial Sequence: Synthetic oligonucleotide
  Antisense strand to SEQ ID NO: 1411938
aguuaaccgaagaaucuga

SEQ ID NO: 1411940 - RNA, 19 nt, Artificial Sequence
  Description of Artificial Sequence: Synthetic oligonucleotide
  Sense strand starting at position 2013 of SEQ ID NO: 1243367
agauucuucgguuaacugu

SEQ ID NO: 1411941 - RNA, 19 nt, Artificial Sequence
  Description of Artificial Sequence: Synthetic oligonucleotide
  Antisense strand to SEQ ID NO: 1411940
acaguuaaccgaagaaucu

SEQ ID NO: 1411942 - RNA, 19 nt, Artificial Sequence
  Description of Artificial Sequence: Synthetic oligonucleotide
  Sense strand starting at position 2823 of SEQ ID NO: 1243367
gcgagaugcuugguccugu

SEQ ID NO: 1411943 - RNA, 19 nt, Artificial Sequence
  Description of Artificial Sequence: Synthetic oligonucleotide
  Antisense strand to SEQ ID NO: 1411942
acaggaccaagcaucucgc

SEQ ID NO: 1411944 - RNA, 19 nt, Artificial Sequence
  Description of Artificial Sequence: Synthetic oligonucleotide
  Sense strand starting at position 3019 of SEQ ID NO: 1243367
uuaggugggccugauaaua

SEQ ID NO: 1411945 - RNA, 19 nt, Artificial Sequence
  Description of Artificial Sequence: Synthetic oligonucleotide
  Antisense strand to SEQ ID NO: 1411944
uauuaucaggcccaccuaa

SEQ ID NO: 1411946 - RNA, 19 nt, Artificial Sequence
  Description of Artificial Sequence: Synthetic oligonucleotide
  Sense strand starting at position 3046 of SEQ ID NO: 1243367
cagggauguugucauugaa

SEQ ID NO: 1411947 - RNA, 19 nt, Artificial Sequence
  Description of Artificial Sequence: Synthetic oligonucleotide
  Antisense strand to SEQ ID NO: 1411946
uucaaugacaacaucccug

SEQ ID NO: 1411948 - RNA, 19 nt, Artificial Sequence
  Description of Artificial Sequence: Synthetic oligonucleotide
  Sense strand starting at position 3068 of SEQ ID NO: 1243367
uugagaaaugcugagucau

SEQ ID NO: 1411949 - RNA, 19 nt, Artificial Sequence
  Description of Artificial Sequence: Synthetic oligonucleotide
  Antisense strand to SEQ ID NO: 1411948
augacucagcauuucucaa

SEQ ID NO: 1411950 - RNA, 19 nt, Artificial Sequence
  Description of Artificial Sequence: Synthetic oligonucleotide
  Sense strand starting at position 3070 of SEQ ID NO: 1243367
gagaaaugcugagucauua

SEQ ID NO: 1411951 - RNA, 19 nt, Artificial Sequence
  Description of Artificial Sequence: Synthetic oligonucleotide
  Antisense strand to SEQ ID NO: 1411950
uaaugacucagcauuucuc

SEQ ID NO: 1411952 - RNA, 19 nt, Artificial Sequence
  Description of Artificial Sequence: Synthetic oligonucleotide
  Sense strand starting at position 3690 of SEQ ID NO: 1243367
uugagucugggugacagau

SEQ ID NO: 1411953 - RNA, 19 nt, Artificial Sequence
  Description of Artificial Sequence: Synthetic oligonucleotide
  Antisense strand to SEQ ID NO: 1411952
aucugucacccagacucaa

SEQ ID NO: 1411954 - RNA, 19 nt, Artificial Sequence
  Description of Artificial Sequence: Synthetic oligonucleotide
  Sense strand starting at position 126 of SEQ ID NO: 1243368
acgcccaucuguuuaccua

SEQ ID NO: 1411955 - RNA, 19 nt, Artificial Sequence
  Description of Artificial Sequence: Synthetic oligonucleotide
  Antisense strand to SEQ ID NO: 1411954
uagguaaacagaugggcgu

SEQ ID NO: 1411956 - RNA, 19 nt, Artificial Sequence
  Description of Artificial Sequence: Synthetic oligonucleotide
  Sense strand starting at position 127 of SEQ ID NO: 1243368
cgcccaucuguuuaccuau

SEQ ID NO: 1411957 - RNA, 19 nt, Artificial Sequence
  Description of Artificial Sequence: Synthetic oligonucleotide
  Antisense strand to SEQ ID NO: 1411956
auagguaaacagaugggcg

SEQ ID NO: 1411958 - RNA, 19 nt, Artificial Sequence
  Description of Artificial Sequence: Synthetic oligonucleotide
  Sense strand starting at position 154 of SEQ ID NO: 1243368
gcgacuuucucacugcaau

SEQ ID NO: 1411959 - RNA, 19 nt, Artificial Sequence
  Description of Artificial Sequence: Synthetic oligonucleotide
  Antisense strand to SEQ ID NO: 1411958
auugcagugagaaagucgc

SEQ ID NO: 1411960 - RNA, 19 nt, Artificial Sequence
  Description of Artificial Sequence: Synthetic oligonucleotide
  Sense strand starting at position 155 of SEQ ID NO: 1243368
cgacuuucucacugcaaug

SEQ ID NO: 1411961 - RNA, 19 nt, Artificial Sequence
  Description of Artificial Sequence: Synthetic oligonucleotide
  Antisense strand to SEQ ID NO: 1411960
cauugcagugagaaagucg

SEQ ID NO: 1411962 - RNA, 19 nt, Artificial Sequence
  Description of Artificial Sequence: Synthetic oligonucleotide
  Sense strand starting at position 467 of SEQ ID NO: 1243368
gugagcugucauugugccu

SEQ ID NO: 1411963 - RNA, 19 nt, Artificial Sequence
  Description of Artificial Sequence: Synthetic oligonucleotide
  Antisense strand to SEQ ID NO: 1411962
aggcacaaugacagcucac

SEQ ID NO: 1411964 - RNA, 19 nt, Artificial Sequence
  Description of Artificial Sequence: Synthetic oligonucleotide
  Sense strand starting at position 613 of SEQ ID NO: 1243368
augccuaagccuugugaag

SEQ ID NO: 1411965 - RNA, 19 nt, Artificial Sequence
  Description of Artificial Sequence: Synthetic oligonucleotide
  Antisense strand to SEQ ID NO: 1411964
cuucacaaggcuuaggcau

SEQ ID NO: 1411966 - RNA, 19 nt, Artificial Sequence
  Description of Artificial Sequence: Synthetic oligonucleotide
  Sense strand starting at position 615 of SEQ ID NO: 1243368
gccuaagccuugugaaguc

SEQ ID NO: 1411967 - RNA, 19 nt, Artificial Sequence
  Description of Artificial Sequence: Synthetic oligonucleotide
  Antisense strand to SEQ ID NO: 1411966
gacuucacaaggcuuaggc

SEQ ID NO: 1411968 - RNA, 19 nt, Artificial Sequence
  Description of Artificial Sequence: Synthetic oligonucleotide
  Sense strand starting at position 652 of SEQ ID NO: 1243368
aagaauuaacugugugaga

SEQ ID NO: 1411969 - RNA, 19 nt, Artificial Sequence
  Description of Artificial Sequence: Synthetic oligonucleotide
  Antisense strand to SEQ ID NO: 1411968
ucucacacaguuaauucuu

SEQ ID NO: 1411970 - RNA, 19 nt, Artificial Sequence
  Description of Artificial Sequence: Synthetic oligonucleotide
  Sense strand starting at position 653 of SEQ ID NO: 1243368
agaauuaacugugugagau

SEQ ID NO: 1411971 - RNA, 19 nt, Artificial Sequence
  Description of Artificial Sequence: Synthetic oligonucleotide
  Antisense strand to SEQ ID NO: 1411970
aucucacacaguuaauucu

SEQ ID NO: 1411972 - RNA, 19 nt, Artificial Sequence
  Description of Artificial Sequence: Synthetic oligonucleotide
  Sense strand starting at position 654 of SEQ ID NO: 1243368
gaauuaacugugugagaug

SEQ ID NO: 1411973 - RNA, 19 nt, Artificial Sequence
  Description of Artificial Sequence: Synthetic oligonucleotide
  Antisense strand to SEQ ID NO: 1411972
caucucacacaguuaauuc

SEQ ID NO: 1411974 - RNA, 19 nt, Artificial Sequence
  Description of Artificial Sequence: Synthetic oligonucleotide
  Sense strand starting at position 659 of SEQ ID NO: 1243368
aacugugugagauggacuu

SEQ ID NO: 1411975 - RNA, 19 nt, Artificial Sequence
  Description of Artificial Sequence: Synthetic oligonucleotide
  Antisense strand to SEQ ID NO: 1411974
aaguccaucucacacaguu

SEQ ID NO: 1411976 - RNA, 19 nt, Artificial Sequence
  Description of Artificial Sequence: Synthetic oligonucleotide
  Sense strand starting at position 665 of SEQ ID NO: 1243368
gugagauggacuugguaua

SEQ ID NO: 1411977 - RNA, 19 nt, Artificial Sequence
  Description of Artificial Sequence: Synthetic oligonucleotide
  Antisense strand to SEQ ID NO: 1411976
uauaccaaguccaucucac

SEQ ID NO: 1411978 - RNA, 19 nt, Artificial Sequence
  Description of Artificial Sequence: Synthetic oligonucleotide
  Sense strand starting at position 1213 of SEQ ID NO: 1243368
aggucagaagcuugugacu

SEQ ID NO: 1411979 - RNA, 19 nt, Artificial Sequence
  Description of Artificial Sequence: Synthetic oligonucleotide
  Antisense strand to SEQ ID NO: 1411978
agucacaagcuucugaccu

SEQ ID NO: 1411980 - RNA, 19 nt, Artificial Sequence
  Description of Artificial Sequence: Synthetic oligonucleotide
  Sense strand starting at position 1215 of SEQ ID NO: 1243368
gucagaagcuugugacuag

SEQ ID NO: 1411981 - RNA, 19 nt, Artificial Sequence
  Description of Artificial Sequence: Synthetic oligonucleotide
  Antisense strand to SEQ ID NO: 1411980
cuagucacaagcuucugac

SEQ ID NO: 1411982 - RNA, 19 nt, Artificial Sequence
  Description of Artificial Sequence: Synthetic oligonucleotide
  Sense strand starting at position 1517 of SEQ ID NO: 1243368
aucucaagucagggugaua

SEQ ID NO: 1411983 - RNA, 19 nt, Artificial Sequence
  Description of Artificial Sequence: Synthetic oligonucleotide
  Antisense strand to SEQ ID NO: 1411982
uaucacccugacuugagau

SEQ ID NO: 1411984 - RNA, 19 nt, Artificial Sequence
  Description of Artificial Sequence: Synthetic oligonucleotide
  Sense strand starting at position 1549 of SEQ ID NO: 1243368
accggaaaucuagauguuu

SEQ ID NO: 1411985 - RNA, 19 nt, Artificial Sequence
  Description of Artificial Sequence: Synthetic oligonucleotide
  Antisense strand to SEQ ID NO: 1411984
aaacaucuagauuuccggu

SEQ ID NO: 1411986 - RNA, 19 nt, Artificial Sequence
  Description of Artificial Sequence: Synthetic oligonucleotide
  Sense strand starting at position 1551 of SEQ ID NO: 1243368
cggaaaucuagauguuucu

SEQ ID NO: 1411987 - RNA, 19 nt, Artificial Sequence
  Description of Artificial Sequence: Synthetic oligonucleotide
  Antisense strand to SEQ ID NO: 1411986
agaaacaucuagauuuccg

SEQ ID NO: 1411988 - RNA, 19 nt, Artificial Sequence
  Description of Artificial Sequence: Synthetic oligonucleotide
  Sense strand starting at position 2067 of SEQ ID NO: 1243368
agcucagauucuucgguua

SEQ ID NO: 1411989 - RNA, 19 nt, Artificial Sequence
  Description of Artificial Sequence: Synthetic oligonucleotide
  Antisense strand to SEQ ID NO: 1411988
uaaccgaagaaucugagcu

SEQ ID NO: 1411990 - RNA, 19 nt, Artificial Sequence
  Description of Artificial Sequence: Synthetic oligonucleotide
  Sense strand starting at position 2069 of SEQ ID NO: 1243368
cucagauucuucgguuaac

SEQ ID NO: 1411991 - RNA, 19 nt, Artificial Sequence
  Description of Artificial Sequence: Synthetic oligonucleotide
  Antisense strand to SEQ ID NO: 1411990
guuaaccgaagaaucugag

SEQ ID NO: 1411992 - RNA, 19 nt, Artificial Sequence
  Description of Artificial Sequence: Synthetic oligonucleotide
  Sense strand starting at position 2070 of SEQ ID NO: 1243368
ucagauucuucgguuaacu

SEQ ID NO: 1411993 - RNA, 19 nt, Artificial Sequence
  Description of Artificial Sequence: Synthetic oligonucleotide
  Antisense strand to SEQ ID NO: 1411992
aguuaaccgaagaaucuga

SEQ ID NO: 1411994 - RNA, 19 nt, Artificial Sequence
  Description of Artificial Sequence: Synthetic oligonucleotide
  Sense strand starting at position 2072 of SEQ ID NO: 1243368
agauucuucgguuaacugu

SEQ ID NO: 1411995 - RNA, 19 nt, Artificial Sequence
  Description of Artificial Sequence: Synthetic oligonucleotide
  Antisense strand to SEQ ID NO: 1411994
acaguuaaccgaagaaucu

SEQ ID NO: 1411996 - RNA, 19 nt, Artificial Sequence
  Description of Artificial Sequence: Synthetic oligonucleotide
  Sense strand starting at position 2882 of SEQ ID NO: 1243368
gcgagaugcuugguccugu

SEQ ID NO: 1411997 - RNA, 19 nt, Artificial Sequence
  Description of Artificial Sequence: Synthetic oligonucleotide
  Antisense strand to SEQ ID NO: 1411996
acaggaccaagcaucucgc

SEQ ID NO: 1411998 - RNA, 19 nt, Artificial Sequence
  Description of Artificial Sequence: Synthetic oligonucleotide
  Sense strand starting at position 3078 of SEQ ID NO: 1243368
uuaggugggccugauaaua

SEQ ID NO: 1411999 - RNA, 19 nt, Artificial Sequence
  Description of Artificial Sequence: Synthetic oligonucleotide
  Antisense strand to SEQ ID NO: 1411998
uauuaucaggcccaccuaa

SEQ ID NO: 1412000 - RNA, 19 nt, Artificial Sequence
  Description of Artificial Sequence: Synthetic oligonucleotide
  Sense strand starting at position 3105 of SEQ ID NO: 1243368
cagggauguugucauugaa

SEQ ID NO: 1412001 - RNA, 19 nt, Artificial Sequence
  Description of Artificial Sequence: Synthetic oligonucleotide
  Antisense strand to SEQ ID NO: 1412000
uucaaugacaacaucccug

SEQ ID NO: 1412002 - RNA, 19 nt, Artificial Sequence
  Description of Artificial Sequence: Synthetic oligonucleotide
  Sense strand starting at position 3127 of SEQ ID NO: 1243368
uugagaaaugcugagucau

SEQ ID NO: 1412003 - RNA, 19 nt, Artificial Sequence
  Description of Artificial Sequence: Synthetic oligonucleotide
  Antisense strand to SEQ ID NO: 1412002
augacucagcauuucucaa

SEQ ID NO: 1412004 - RNA, 19 nt, Artificial Sequence
  Description of Artificial Sequence: Synthetic oligonucleotide
  Sense strand starting at position 3129 of SEQ ID NO: 1243368
gagaaaugcugagucauua

SEQ ID NO: 1412005 - RNA, 19 nt, Artificial Sequence
  Description of Artificial Sequence: Synthetic oligonucleotide
  Antisense strand to SEQ ID NO: 1412004
uaaugacucagcauuucuc

SEQ ID NO: 1412006 - RNA, 19 nt, Artificial Sequence
  Description of Artificial Sequence: Synthetic oligonucleotide
  Sense strand starting at position 3749 of SEQ ID NO: 1243368
uugagucugggugacagau

SEQ ID NO: 1412007 - RNA, 19 nt, Artificial Sequence
  Description of Artificial Sequence: Synthetic oligonucleotide
  Antisense strand to SEQ ID NO: 1412006
aucugucacccagacucaa

SEQ ID NO: 1412008 - RNA, 19 nt, Artificial Sequence
  Description of Artificial Sequence: Synthetic oligonucleotide
  Sense strand starting at position 168 of SEQ ID NO: 1243369
cucugaucaccaugggaau

SEQ ID NO: 1412009 - RNA, 19 nt, Artificial Sequence
  Description of Artificial Sequence: Synthetic oligonucleotide
  Antisense strand to SEQ ID NO: 1412008
auucccauggugaucagag

SEQ ID NO: 1412010 - RNA, 19 nt, Artificial Sequence
  Description of Artificial Sequence: Synthetic oligonucleotide
  Sense strand starting at position 179 of SEQ ID NO: 1243369
augggaaucuuuggacuca

SEQ ID NO: 1412011 - RNA, 19 nt, Artificial Sequence
  Description of Artificial Sequence: Synthetic oligonucleotide
  Antisense strand to SEQ ID NO: 1412010
ugaguccaaagauucccau

SEQ ID NO: 1412012 - RNA, 19 nt, Artificial Sequence
  Description of Artificial Sequence: Synthetic oligonucleotide
  Sense strand starting at position 274 of SEQ ID NO: 1243369
guggcacugagcuaugagu

SEQ ID NO: 1412013 - RNA, 19 nt, Artificial Sequence
  Description of Artificial Sequence: Synthetic oligonucleotide
  Antisense strand to SEQ ID NO: 1412012
acucauagcucagugccac

SEQ ID NO: 1412014 - RNA, 19 nt, Artificial Sequence
  Description of Artificial Sequence: Synthetic oligonucleotide
  Sense strand starting at position 338 of SEQ ID NO: 1243369
gaguauagugcuggugacu

SEQ ID NO: 1412015 - RNA, 19 nt, Artificial Sequence
  Description of Artificial Sequence: Synthetic oligonucleotide
  Antisense strand to SEQ ID NO: 1412014
agucaccagcacuauacuc

SEQ ID NO: 1412016 - RNA, 19 nt, Artificial Sequence
  Description of Artificial Sequence: Synthetic oligonucleotide
  Sense strand starting at position 347 of SEQ ID NO: 1243369
gcuggugacuguguuucau

SEQ ID NO: 1412017 - RNA, 19 nt, Artificial Sequence
  Description of Artificial Sequence: Synthetic oligonucleotide
  Antisense strand to SEQ ID NO: 1412016
augaaacacagucaccagc

SEQ ID NO: 1412018 - RNA, 19 nt, Artificial Sequence
  Description of Artificial Sequence: Synthetic oligonucleotide
  Sense strand starting at position 349 of SEQ ID NO: 1243369
uggugacuguguuucauag

SEQ ID NO: 1412019 - RNA, 19 nt, Artificial Sequence
  Description of Artificial Sequence: Synthetic oligonucleotide
  Antisense strand to SEQ ID NO: 1412018
cuaugaaacacagucacca

SEQ ID NO: 1412020 - RNA, 19 nt, Artificial Sequence
  Description of Artificial Sequence: Synthetic oligonucleotide
  Sense strand starting at position 377 of SEQ ID NO: 1243369
agggcugucuaagaaauaa

SEQ ID NO: 1412021 - RNA, 19 nt, Artificial Sequence
  Description of Artificial Sequence: Synthetic oligonucleotide
  Antisense strand to SEQ ID NO: 1412020
uuauuucuuagacagcccu

SEQ ID NO: 1412022 - RNA, 19 nt, Artificial Sequence
  Description of Artificial Sequence: Synthetic oligonucleotide
  Sense strand starting at position 426 of SEQ ID NO: 1243369
cugucugucugagugggaa

SEQ ID NO: 1412023 - RNA, 19 nt, Artificial Sequence
  Description of Artificial Sequence: Synthetic oligonucleotide
  Antisense strand to SEQ ID NO: 1412022
uucccacucagacagacag

SEQ ID NO: 1412024 - RNA, 19 nt, Artificial Sequence
  Description of Artificial Sequence: Synthetic oligonucleotide
  Sense strand starting at position 844 of SEQ ID NO: 1243369
ccacguuaaccaggauguu

SEQ ID NO: 1412025 - RNA, 19 nt, Artificial Sequence
  Description of Artificial Sequence: Synthetic oligonucleotide
  Antisense strand to SEQ ID NO: 1412024
aacauccugguuaacgugg

SEQ ID NO: 1412026 - RNA, 19 nt, Artificial Sequence
  Description of Artificial Sequence: Synthetic oligonucleotide
  Sense strand starting at position 1181 of SEQ ID NO: 1243369
gggucuuuccugcacgaga

SEQ ID NO: 1412027 - RNA, 19 nt, Artificial Sequence
  Description of Artificial Sequence: Synthetic oligonucleotide
  Antisense strand to SEQ ID NO: 1412026
ucucgugcaggaaagaccc

SEQ ID NO: 1412028 - RNA, 19 nt, Artificial Sequence
  Description of Artificial Sequence: Synthetic oligonucleotide
  Sense strand starting at position 1183 of SEQ ID NO: 1243369
gucuuuccugcacgagaag

SEQ ID NO: 1412029 - RNA, 19 nt, Artificial Sequence
  Description of Artificial Sequence: Synthetic oligonucleotide
  Antisense strand to SEQ ID NO: 1412028
cuucucgugcaggaaagac

SEQ ID NO: 1412030 - RNA, 19 nt, Artificial Sequence
  Description of Artificial Sequence: Synthetic oligonucleotide
  Sense strand starting at position 2176 of SEQ ID NO: 1243369
uccucaguaucccagauau

SEQ ID NO: 1412031 - RNA, 19 nt, Artificial Sequence
  Description of Artificial Sequence: Synthetic oligonucleotide
  Antisense strand to SEQ ID NO: 1412030
auaucugggauacugagga

SEQ ID NO: 1412032 - RNA, 19 nt, Artificial Sequence
  Description of Artificial Sequence: Synthetic oligonucleotide
  Sense strand starting at position 2200 of SEQ ID NO: 1243369
ugggaacaccugugugcuu

SEQ ID NO: 1412033 - RNA, 19 nt, Artificial Sequence
  Description of Artificial Sequence: Synthetic oligonucleotide
  Antisense strand to SEQ ID NO: 1412032
aagcacacagguguuccca

SEQ ID NO: 1412034 - RNA, 19 nt, Artificial Sequence
  Description of Artificial Sequence: Synthetic oligonucleotide
  Sense strand starting at position 2222 of SEQ ID NO: 1243369
cacugcugacuucgugaau

SEQ ID NO: 1412035 - RNA, 19 nt, Artificial Sequence
  Description of Artificial Sequence: Synthetic oligonucleotide
  Antisense strand to SEQ ID NO: 1412034
auucacgaagucagcagug

SEQ ID NO: 1412036 - RNA, 19 nt, Artificial Sequence
  Description of Artificial Sequence: Synthetic oligonucleotide
  Sense strand starting at position 2223 of SEQ ID NO: 1243369
acugcugacuucgugaaug

SEQ ID NO: 1412037 - RNA, 19 nt, Artificial Sequence
  Description of Artificial Sequence: Synthetic oligonucleotide
  Antisense strand to SEQ ID NO: 1412036
cauucacgaagucagcagu

SEQ ID NO: 1412038 - RNA, 19 nt, Artificial Sequence
  Description of Artificial Sequence: Synthetic oligonucleotide
  Sense strand starting at position 2225 of SEQ ID NO: 1243369
ugcugacuucgugaaugaa

SEQ ID NO: 1412039 - RNA, 19 nt, Artificial Sequence
  Description of Artificial Sequence: Synthetic oligonucleotide
  Antisense strand to SEQ ID NO: 1412038
uucauucacgaagucagca

SEQ ID NO: 1412040 - RNA, 19 nt, Artificial Sequence
  Description of Artificial Sequence: Synthetic oligonucleotide
  Sense strand starting at position 2228 of SEQ ID NO: 1243369
ugacuucgugaaugaaaga

SEQ ID NO: 1412041 - RNA, 19 nt, Artificial Sequence
  Description of Artificial Sequence: Synthetic oligonucleotide
  Antisense strand to SEQ ID NO: 1412040
ucuuucauucacgaaguca

SEQ ID NO: 1412042 - RNA, 19 nt, Artificial Sequence
  Description of Artificial Sequence: Synthetic oligonucleotide
  Sense strand starting at position 2439 of SEQ ID NO: 1243369
ugaggcaguauuugcauau

SEQ ID NO: 1412043 - RNA, 19 nt, Artificial Sequence
  Description of Artificial Sequence: Synthetic oligonucleotide
  Antisense strand to SEQ ID NO: 1412042
auaugcaaauacugccuca

SEQ ID NO: 1412044 - RNA, 19 nt, Artificial Sequence
  Description of Artificial Sequence: Synthetic oligonucleotide
  Sense strand starting at position 2463 of SEQ ID NO: 1243369
gugcauauacucuauacuu

SEQ ID NO: 1412045 - RNA, 19 nt, Artificial Sequence
  Description of Artificial Sequence: Synthetic oligonucleotide
  Antisense strand to SEQ ID NO: 1412044
aaguauagaguauaugcac

SEQ ID NO: 1412046 - RNA, 19 nt, Artificial Sequence
  Description of Artificial Sequence: Synthetic oligonucleotide
  Sense strand starting at position 2576 of SEQ ID NO: 1243369
gcagaucacuuacuuagau

SEQ ID NO: 1412047 - RNA, 19 nt, Artificial Sequence
  Description of Artificial Sequence: Synthetic oligonucleotide
  Antisense strand to SEQ ID NO: 1412046
aucuaaguaagugaucugc

SEQ ID NO: 1412048 - RNA, 19 nt, Artificial Sequence
  Description of Artificial Sequence: Synthetic oligonucleotide
  Sense strand starting at position 2585 of SEQ ID NO: 1243369
uuacuuagaucaggagcuu

SEQ ID NO: 1412049 - RNA, 19 nt, Artificial Sequence
  Description of Artificial Sequence: Synthetic oligonucleotide
  Antisense strand to SEQ ID NO: 1412048
aagcuccugaucuaaguaa

SEQ ID NO: 1412050 - RNA, 19 nt, Artificial Sequence
  Description of Artificial Sequence: Synthetic oligonucleotide
  Sense strand starting at position 3616 of SEQ ID NO: 1243369
uauaauguaugcuagguaa

SEQ ID NO: 1412051 - RNA, 19 nt, Artificial Sequence
  Description of Artificial Sequence: Synthetic oligonucleotide
  Antisense strand to SEQ ID NO: 1412050
uuaccuagcauacauuaua

SEQ ID NO: 1412052 - RNA, 19 nt, Artificial Sequence
  Description of Artificial Sequence: Synthetic oligonucleotide
  Sense strand starting at position 3618 of SEQ ID NO: 1243369
uaauguaugcuagguaaau

SEQ ID NO: 1412053 - RNA, 19 nt, Artificial Sequence
  Description of Artificial Sequence: Synthetic oligonucleotide
  Antisense strand to SEQ ID NO: 1412052
auuuaccuagcauacauua

SEQ ID NO: 1412054 - RNA, 19 nt, Artificial Sequence
  Description of Artificial Sequence: Synthetic oligonucleotide
  Sense strand starting at position 3619 of SEQ ID NO: 1243369
aauguaugcuagguaaaua

SEQ ID NO: 1412055 - RNA, 19 nt, Artificial Sequence
  Description of Artificial Sequence: Synthetic oligonucleotide
  Antisense strand to SEQ ID NO: 1412054
uauuuaccuagcauacauu

SEQ ID NO: 1412056 - RNA, 19 nt, Artificial Sequence
  Description of Artificial Sequence: Synthetic oligonucleotide
  Sense strand starting at position 3674 of SEQ ID NO: 1243369
ucuguacauguccaauaga

SEQ ID NO: 1412057 - RNA, 19 nt, Artificial Sequence
  Description of Artificial Sequence: Synthetic oligonucleotide
  Antisense strand to SEQ ID NO: 1412056
ucuauuggacauguacaga

SEQ ID NO: 1412058 - RNA, 19 nt, Artificial Sequence
  Description of Artificial Sequence: Synthetic oligonucleotide
  Sense strand starting at position 3683 of SEQ ID NO: 1243369
guccaauagagaugugauu

SEQ ID NO: 1412059 - RNA, 19 nt, Artificial Sequence
  Description of Artificial Sequence: Synthetic oligonucleotide
  Antisense strand to SEQ ID NO: 1412058
aaucacaucucuauuggac

SEQ ID NO: 1412060 - RNA, 19 nt, Artificial Sequence
  Description of Artificial Sequence: Synthetic oligonucleotide
  Sense strand starting at position 3859 of SEQ ID NO: 1243369
ugcugugucaccugguuua

SEQ ID NO: 1412061 - RNA, 19 nt, Artificial Sequence
  Description of Artificial Sequence: Synthetic oligonucleotide
  Antisense strand to SEQ ID NO: 1412060
uaaaccaggugacacagca

SEQ ID NO: 1412062 - RNA, 19 nt, Artificial Sequence
  Description of Artificial Sequence: Synthetic oligonucleotide
  Sense strand starting at position 3871 of SEQ ID NO: 1243369
ugguuuauuccucauagca

SEQ ID NO: 1412063 - RNA, 19 nt, Artificial Sequence
  Description of Artificial Sequence: Synthetic oligonucleotide
  Antisense strand to SEQ ID NO: 1412062
ugcuaugaggaauaaacca

SEQ ID NO: 1412064 - RNA, 19 nt, Artificial Sequence
  Description of Artificial Sequence: Synthetic oligonucleotide
  Sense strand starting at position 3889 of SEQ ID NO: 1243369
aauccuaaaguggguauua

SEQ ID NO: 1412065 - RNA, 19 nt, Artificial Sequence
  Description of Artificial Sequence: Synthetic oligonucleotide
  Antisense strand to SEQ ID NO: 1412064
uaauacccacuuuaggauu

SEQ ID NO: 1412066 - RNA, 19 nt, Artificial Sequence
  Description of Artificial Sequence: Synthetic oligonucleotide
  Sense strand starting at position 3890 of SEQ ID NO: 1243369
auccuaaaguggguauuau

SEQ ID NO: 1412067 - RNA, 19 nt, Artificial Sequence
  Description of Artificial Sequence: Synthetic oligonucleotide
  Antisense strand to SEQ ID NO: 1412066
auaauacccacuuuaggau

SEQ ID NO: 1412068 - RNA, 19 nt, Artificial Sequence
  Description of Artificial Sequence: Synthetic oligonucleotide
  Sense strand starting at position 3891 of SEQ ID NO: 1243369
uccuaaaguggguauuauu

SEQ ID NO: 1412069 - RNA, 19 nt, Artificial Sequence
  Description of Artificial Sequence: Synthetic oligonucleotide
  Antisense strand to SEQ ID NO: 1412068
aauaauacccacuuuagga

SEQ ID NO: 1412070 - RNA, 19 nt, Artificial Sequence
  Description of Artificial Sequence: Synthetic oligonucleotide
  Sense strand starting at position 3943 of SEQ ID NO: 1243369
ccuagagaaguuuagccau

SEQ ID NO: 1412071 - RNA, 19 nt, Artificial Sequence
  Description of Artificial Sequence: Synthetic oligonucleotide
  Antisense strand to SEQ ID NO: 1412070
auggcuaaacuucucuagg

SEQ ID NO: 1412072 - RNA, 19 nt, Artificial Sequence
  Description of Artificial Sequence: Synthetic oligonucleotide
  Sense strand starting at position 3945 of SEQ ID NO: 1243369
uagagaaguuuagccauua

SEQ ID NO: 1412073 - RNA, 19 nt, Artificial Sequence
  Description of Artificial Sequence: Synthetic oligonucleotide
  Antisense strand to SEQ ID NO: 1412072
uaauggcuaaacuucucua

SEQ ID NO: 1412074 - RNA, 19 nt, Artificial Sequence
  Description of Artificial Sequence: Synthetic oligonucleotide
  Sense strand starting at position 3946 of SEQ ID NO: 1243369
agagaaguuuagccauuag

SEQ ID NO: 1412075 - RNA, 19 nt, Artificial Sequence
  Description of Artificial Sequence: Synthetic oligonucleotide
  Antisense strand to SEQ ID NO: 1412074
cuaauggcuaaacuucucu

SEQ ID NO: 1412076 - RNA, 19 nt, Artificial Sequence
  Description of Artificial Sequence: Synthetic oligonucleotide
  Sense strand starting at position 3955 of SEQ ID NO: 1243369
uagccauuagcccgucaca

SEQ ID NO: 1412077 - RNA, 19 nt, Artificial Sequence
  Description of Artificial Sequence: Synthetic oligonucleotide
  Antisense strand to SEQ ID NO: 1412076
ugugacgggcuaauggcua

SEQ ID NO: 1412078 - RNA, 19 nt, Artificial Sequence
  Description of Artificial Sequence: Synthetic oligonucleotide
  Sense strand starting at position 771 of SEQ ID NO: 1243370
caaagauucgcgggcacga

SEQ ID NO: 1412079 - RNA, 19 nt, Artificial Sequence
  Description of Artificial Sequence: Synthetic oligonucleotide
  Antisense strand to SEQ ID NO: 1412078
ucgugcccgcgaaucuuug

SEQ ID NO: 1412080 - RNA, 19 nt, Artificial Sequence
  Description of Artificial Sequence: Synthetic oligonucleotide
  Sense strand starting at position 811 of SEQ ID NO: 1243370
ggagcucuugagugcuuga

SEQ ID NO: 1412081 - RNA, 19 nt, Artificial Sequence
  Description of Artificial Sequence: Synthetic oligonucleotide
  Antisense strand to SEQ ID NO: 1412080
ucaagcacucaagagcucc

SEQ ID NO: 1412082 - RNA, 19 nt, Artificial Sequence
  Description of Artificial Sequence: Synthetic oligonucleotide
  Sense strand starting at position 928 of SEQ ID NO: 1243370
cgggucgucucgacuuaga

SEQ ID NO: 1412083 - RNA, 19 nt, Artificial Sequence
  Description of Artificial Sequence: Synthetic oligonucleotide
  Antisense strand to SEQ ID NO: 1412082
ucuaagucgagacgacccg

SEQ ID NO: 1412084 - RNA, 19 nt, Artificial Sequence
  Description of Artificial Sequence: Synthetic oligonucleotide
  Sense strand starting at position 1105 of SEQ ID NO: 1243370
gugucagugcuuuccucca

SEQ ID NO: 1412085 - RNA, 19 nt, Artificial Sequence
  Description of Artificial Sequence: Synthetic oligonucleotide
  Antisense strand to SEQ ID NO: 1412084
uggaggaaagcacugacac

SEQ ID NO: 1412086 - RNA, 19 nt, Artificial Sequence
  Description of Artificial Sequence: Synthetic oligonucleotide
  Sense strand starting at position 1125 of SEQ ID NO: 1243370
ccgcgacuccgagaaggau

SEQ ID NO: 1412087 - RNA, 19 nt, Artificial Sequence
  Description of Artificial Sequence: Synthetic oligonucleotide
  Antisense strand to SEQ ID NO: 1412086
auccuucucggagucgcgg

SEQ ID NO: 1412088 - RNA, 19 nt, Artificial Sequence
  Description of Artificial Sequence: Synthetic oligonucleotide
  Sense strand starting at position 1158 of SEQ ID NO: 1243370
cagcguuucccugccacau

SEQ ID NO: 1412089 - RNA, 19 nt, Artificial Sequence
  Description of Artificial Sequence: Synthetic oligonucleotide
  Antisense strand to SEQ ID NO: 1412088
auguggcagggaaacgcug

SEQ ID NO: 1412090 - RNA, 19 nt, Artificial Sequence
  Description of Artificial Sequence: Synthetic oligonucleotide
  Sense strand starting at position 1159 of SEQ ID NO: 1243370
agcguuucccugccacauu

SEQ ID NO: 1412091 - RNA, 19 nt, Artificial Sequence
  Description of Artificial Sequence: Synthetic oligonucleotide
  Antisense strand to SEQ ID NO: 1412090
aauguggcagggaaacgcu

SEQ ID NO: 1412092 - RNA, 19 nt, Artificial Sequence
  Description of Artificial Sequence: Synthetic oligonucleotide
  Sense strand starting at position 1223 of SEQ ID NO: 1243370
ggguaagaguccucugucu

SEQ ID NO: 1412093 - RNA, 19 nt, Artificial Sequence
  Description of Artificial Sequence: Synthetic oligonucleotide
  Antisense strand to SEQ ID NO: 1412092
agacagaggacucuuaccc

SEQ ID NO: 1412094 - RNA, 19 nt, Artificial Sequence
  Description of Artificial Sequence: Synthetic oligonucleotide
  Sense strand starting at position 1225 of SEQ ID NO: 1243370
guaagaguccucugucucu

SEQ ID NO: 1412095 - RNA, 19 nt, Artificial Sequence
  Description of Artificial Sequence: Synthetic oligonucleotide
  Antisense strand to SEQ ID NO: 1412094
agagacagaggacucuuac

SEQ ID NO: 1412096 - RNA, 19 nt, Artificial Sequence
  Description of Artificial Sequence: Synthetic oligonucleotide
  Sense strand starting at position 1514 of SEQ ID NO: 1243370
uccucccguccugaguaau

SEQ ID NO: 1412097 - RNA, 19 nt, Artificial Sequence
  Description of Artificial Sequence: Synthetic oligonucleotide
  Antisense strand to SEQ ID NO: 1412096
auuacucaggacgggagga

SEQ ID NO: 1412098 - RNA, 19 nt, Artificial Sequence
  Description of Artificial Sequence: Synthetic oligonucleotide
  Sense strand starting at position 1582 of SEQ ID NO: 1243370
ucgcucucccaggagagau

SEQ ID NO: 1412099 - RNA, 19 nt, Artificial Sequence
  Description of Artificial Sequence: Synthetic oligonucleotide
  Antisense strand to SEQ ID NO: 1412098
aucucuccugggagagcga

SEQ ID NO: 1412100 - RNA, 19 nt, Artificial Sequence
  Description of Artificial Sequence: Synthetic oligonucleotide
  Sense strand starting at position 1639 of SEQ ID NO: 1243370
ccaagagccuucuccauga

SEQ ID NO: 1412101 - RNA, 19 nt, Artificial Sequence
  Description of Artificial Sequence: Synthetic oligonucleotide
  Antisense strand to SEQ ID NO: 1412100
ucauggagaaggcucuugg

SEQ ID NO: 1412102 - RNA, 19 nt, Artificial Sequence
  Description of Artificial Sequence: Synthetic oligonucleotide
  Sense strand starting at position 2205 of SEQ ID NO: 1243370
ugggacuuauaguucuuua

SEQ ID NO: 1412103 - RNA, 19 nt, Artificial Sequence
  Description of Artificial Sequence: Synthetic oligonucleotide
  Antisense strand to SEQ ID NO: 1412102
uaaagaacuauaaguccca

SEQ ID NO: 1412104 - RNA, 19 nt, Artificial Sequence
  Description of Artificial Sequence: Synthetic oligonucleotide
  Sense strand starting at position 2208 of SEQ ID NO: 1243370
gacuuauaguucuuuaagg

SEQ ID NO: 1412105 - RNA, 19 nt, Artificial Sequence
  Description of Artificial Sequence: Synthetic oligonucleotide
  Antisense strand to SEQ ID NO: 1412104
ccuuaaagaacuauaaguc

SEQ ID NO: 1412106 - RNA, 19 nt, Artificial Sequence
  Description of Artificial Sequence: Synthetic oligonucleotide
  Sense strand starting at position 2210 of SEQ ID NO: 1243370
cuuauaguucuuuaaggac

SEQ ID NO: 1412107 - RNA, 19 nt, Artificial Sequence
  Description of Artificial Sequence: Synthetic oligonucleotide
  Antisense strand to SEQ ID NO: 1412106
guccuuaaagaacuauaag

SEQ ID NO: 1412108 - RNA, 19 nt, Artificial Sequence
  Description of Artificial Sequence: Synthetic oligonucleotide
  Sense strand starting at position 2482 of SEQ ID NO: 1243370
uuuccuaucugagaagaag

SEQ ID NO: 1412109 - RNA, 19 nt, Artificial Sequence
  Description of Artificial Sequence: Synthetic oligonucleotide
  Antisense strand to SEQ ID NO: 1412108
cuucuucucagauaggaaa

SEQ ID NO: 1412110 - RNA, 19 nt, Artificial Sequence
  Description of Artificial Sequence: Synthetic oligonucleotide
  Sense strand starting at position 2641 of SEQ ID NO: 1243370
gucucaaucuugucauaga

SEQ ID NO: 1412111 - RNA, 19 nt, Artificial Sequence
  Description of Artificial Sequence: Synthetic oligonucleotide
  Antisense strand to SEQ ID NO: 1412110
ucuaugacaagauugagac

SEQ ID NO: 1412112 - RNA, 19 nt, Artificial Sequence
  Description of Artificial Sequence: Synthetic oligonucleotide
  Sense strand starting at position 2644 of SEQ ID NO: 1243370
ucaaucuugucauagagga

SEQ ID NO: 1412113 - RNA, 19 nt, Artificial Sequence
  Description of Artificial Sequence: Synthetic oligonucleotide
  Antisense strand to SEQ ID NO: 1412112
uccucuaugacaagauuga

SEQ ID NO: 1412114 - RNA, 19 nt, Artificial Sequence
  Description of Artificial Sequence: Synthetic oligonucleotide
  Sense strand starting at position 2860 of SEQ ID NO: 1243370
cucuuaacuucuuuggaag

SEQ ID NO: 1412115 - RNA, 19 nt, Artificial Sequence
  Description of Artificial Sequence: Synthetic oligonucleotide
  Antisense strand to SEQ ID NO: 1412114
cuuccaaagaaguuaagag

SEQ ID NO: 1412116 - RNA, 19 nt, Artificial Sequence
  Description of Artificial Sequence: Synthetic oligonucleotide
  Sense strand starting at position 3039 of SEQ ID NO: 1243370
guucuacuugcauguuuau

SEQ ID NO: 1412117 - RNA, 19 nt, Artificial Sequence
  Description of Artificial Sequence: Synthetic oligonucleotide
  Antisense strand to SEQ ID NO: 1412116
auaaacaugcaaguagaac

SEQ ID NO: 1412118 - RNA, 19 nt, Artificial Sequence
  Description of Artificial Sequence: Synthetic oligonucleotide
  Sense strand starting at position 3060 of SEQ ID NO: 1243370
gcucgucuuccucauuaua

SEQ ID NO: 1412119 - RNA, 19 nt, Artificial Sequence
  Description of Artificial Sequence: Synthetic oligonucleotide
  Antisense strand to SEQ ID NO: 1412118
uauaaugaggaagacgagc

SEQ ID NO: 1412120 - RNA, 19 nt, Artificial Sequence
  Description of Artificial Sequence: Synthetic oligonucleotide
  Sense strand starting at position 3062 of SEQ ID NO: 1243370
ucgucuuccucauuauaag

SEQ ID NO: 1412121 - RNA, 19 nt, Artificial Sequence
  Description of Artificial Sequence: Synthetic oligonucleotide
  Antisense strand to SEQ ID NO: 1412120
cuuauaaugaggaagacga

SEQ ID NO: 1412122 - RNA, 19 nt, Artificial Sequence
  Description of Artificial Sequence: Synthetic oligonucleotide
  Sense strand starting at position 3063 of SEQ ID NO: 1243370
cgucuuccucauuauaaga

SEQ ID NO: 1412123 - RNA, 19 nt, Artificial Sequence
  Description of Artificial Sequence: Synthetic oligonucleotide
  Antisense strand to SEQ ID NO: 1412122
ucuuauaaugaggaagacg

SEQ ID NO: 1412124 - RNA, 19 nt, Artificial Sequence
  Description of Artificial Sequence: Synthetic oligonucleotide
  Sense strand starting at position 3094 of SEQ ID NO: 1243370
gggccaugucuauauuauu

SEQ ID NO: 1412125 - RNA, 19 nt, Artificial Sequence
  Description of Artificial Sequence: Synthetic oligonucleotide
  Antisense strand to SEQ ID NO: 1412124
aauaauauagacauggccc

SEQ ID NO: 1412126 - RNA, 19 nt, Artificial Sequence
  Description of Artificial Sequence: Synthetic oligonucleotide
  Sense strand starting at position 3152 of SEQ ID NO: 1243370
ggcacucacuagcuauuga

SEQ ID NO: 1412127 - RNA, 19 nt, Artificial Sequence
  Description of Artificial Sequence: Synthetic oligonucleotide
  Antisense strand to SEQ ID NO: 1412126
ucaauagcuagugagugcc

SEQ ID NO: 1412128 - RNA, 19 nt, Artificial Sequence
  Description of Artificial Sequence: Synthetic oligonucleotide
  Sense strand starting at position 3159 of SEQ ID NO: 1243370
acuagcuauugagauauaa

SEQ ID NO: 1412129 - RNA, 19 nt, Artificial Sequence
  Description of Artificial Sequence: Synthetic oligonucleotide
  Antisense strand to SEQ ID NO: 1412128
uuauaucucaauagcuagu

SEQ ID NO: 1412130 - RNA, 19 nt, Artificial Sequence
  Description of Artificial Sequence: Synthetic oligonucleotide
  Sense strand starting at position 3592 of SEQ ID NO: 1243370
ggcauuucucauugcugga

SEQ ID NO: 1412131 - RNA, 19 nt, Artificial Sequence
  Description of Artificial Sequence: Synthetic oligonucleotide
  Antisense strand to SEQ ID NO: 1412130
uccagcaaugagaaaugcc

SEQ ID NO: 1412132 - RNA, 19 nt, Artificial Sequence
  Description of Artificial Sequence: Synthetic oligonucleotide
  Sense strand starting at position 3680 of SEQ ID NO: 1243370
uuaccugaaugcuuugagu

SEQ ID NO: 1412133 - RNA, 19 nt, Artificial Sequence
  Description of Artificial Sequence: Synthetic oligonucleotide
  Antisense strand to SEQ ID NO: 1412132
acucaaagcauucagguaa

SEQ ID NO: 1412134 - RNA, 19 nt, Artificial Sequence
  Description of Artificial Sequence: Synthetic oligonucleotide
  Sense strand starting at position 3682 of SEQ ID NO: 1243370
accugaaugcuuugaguac

SEQ ID NO: 1412135 - RNA, 19 nt, Artificial Sequence
  Description of Artificial Sequence: Synthetic oligonucleotide
  Antisense strand to SEQ ID NO: 1412134
guacucaaagcauucaggu

SEQ ID NO: 1412136 - RNA, 19 nt, Artificial Sequence
  Description of Artificial Sequence: Synthetic oligonucleotide
  Sense strand starting at position 3686 of SEQ ID NO: 1243370
gaaugcuuugaguacccuu

SEQ ID NO: 1412137 - RNA, 19 nt, Artificial Sequence
  Description of Artificial Sequence: Synthetic oligonucleotide
  Antisense strand to SEQ ID NO: 1412136
aaggguacucaaagcauuc

SEQ ID NO: 1412138 - RNA, 19 nt, Artificial Sequence
  Description of Artificial Sequence: Synthetic oligonucleotide
  Sense strand starting at position 3708 of SEQ ID NO: 1243370
auccuaugaugcuagagau

SEQ ID NO: 1412139 - RNA, 19 nt, Artificial Sequence
  Description of Artificial Sequence: Synthetic oligonucleotide
  Antisense strand to SEQ ID NO: 1412138
aucucuagcaucauaggau

SEQ ID NO: 1412140 - RNA, 19 nt, Artificial Sequence
  Description of Artificial Sequence: Synthetic oligonucleotide
  Sense strand starting at position 3726 of SEQ ID NO: 1243370
uugauagacccaugccuau

SEQ ID NO: 1412141 - RNA, 19 nt, Artificial Sequence
  Description of Artificial Sequence: Synthetic oligonucleotide
  Antisense strand to SEQ ID NO: 1412140
auaggcaugggucuaucaa

SEQ ID NO: 1412142 - RNA, 19 nt, Artificial Sequence
  Description of Artificial Sequence: Synthetic oligonucleotide
  Sense strand starting at position 3749 of SEQ ID NO: 1243370
ccugucaguucucccugaa

SEQ ID NO: 1412143 - RNA, 19 nt, Artificial Sequence
  Description of Artificial Sequence: Synthetic oligonucleotide
  Antisense strand to SEQ ID NO: 1412142
uucagggagaacugacagg

SEQ ID NO: 1412144 - RNA, 19 nt, Artificial Sequence
  Description of Artificial Sequence: Synthetic oligonucleotide
  Sense strand starting at position 3762 of SEQ ID NO: 1243370
ccugaaaugucaucaguuc

SEQ ID NO: 1412145 - RNA, 19 nt, Artificial Sequence
  Description of Artificial Sequence: Synthetic oligonucleotide
  Antisense strand to SEQ ID NO: 1412144
gaacugaugacauuucagg

SEQ ID NO: 1412146 - RNA, 19 nt, Artificial Sequence
  Description of Artificial Sequence: Synthetic oligonucleotide
  Sense strand starting at position 3763 of SEQ ID NO: 1243370
cugaaaugucaucaguucu

SEQ ID NO: 1412147 - RNA, 19 nt, Artificial Sequence
  Description of Artificial Sequence: Synthetic oligonucleotide
  Antisense strand to SEQ ID NO: 1412146
agaacugaugacauuucag

SEQ ID NO: 1412148 - RNA, 19 nt, Artificial Sequence
  Description of Artificial Sequence: Synthetic oligonucleotide
  Sense strand starting at position 3813 of SEQ ID NO: 1243370
acucguuucugugccuaaa

SEQ ID NO: 1412149 - RNA, 19 nt, Artificial Sequence
  Description of Artificial Sequence: Synthetic oligonucleotide
  Antisense strand to SEQ ID NO: 1412148
uuuaggcacagaaacgagu

SEQ ID NO: 1412150 - RNA, 19 nt, Artificial Sequence
  Description of Artificial Sequence: Synthetic oligonucleotide
  Sense strand starting at position 3815 of SEQ ID NO: 1243370
ucguuucugugccuaaaug

SEQ ID NO: 1412151 - RNA, 19 nt, Artificial Sequence
  Description of Artificial Sequence: Synthetic oligonucleotide
  Antisense strand to SEQ ID NO: 1412150
cauuuaggcacagaaacga

SEQ ID NO: 1412152 - RNA, 19 nt, Artificial Sequence
  Description of Artificial Sequence: Synthetic oligonucleotide
  Sense strand starting at position 3858 of SEQ ID NO: 1243370
gaaagaucuucugcccugu

SEQ ID NO: 1412153 - RNA, 19 nt, Artificial Sequence
  Description of Artificial Sequence: Synthetic oligonucleotide
  Antisense strand to SEQ ID NO: 1412152
acagggcagaagaucuuuc

SEQ ID NO: 1412154 - RNA, 19 nt, Artificial Sequence
  Description of Artificial Sequence: Synthetic oligonucleotide
  Sense strand starting at position 3862 of SEQ ID NO: 1243370
gaucuucugcccugucagu

SEQ ID NO: 1412155 - RNA, 19 nt, Artificial Sequence
  Description of Artificial Sequence: Synthetic oligonucleotide
  Antisense strand to SEQ ID NO: 1412154
acugacagggcagaagauc

SEQ ID NO: 1412156 - RNA, 19 nt, Artificial Sequence
  Description of Artificial Sequence: Synthetic oligonucleotide
  Sense strand starting at position 3869 of SEQ ID NO: 1243370
ugcccugucaguuaugaag

SEQ ID NO: 1412157 - RNA, 19 nt, Artificial Sequence
  Description of Artificial Sequence: Synthetic oligonucleotide
  Antisense strand to SEQ ID NO: 1412156
cuucauaacugacagggca

SEQ ID NO: 1412158 - RNA, 19 nt, Artificial Sequence
  Description of Artificial Sequence: Synthetic oligonucleotide
  Sense strand starting at position 221 of SEQ ID NO: 1243371
cauguuggcugguuucgaa

SEQ ID NO: 1412159 - RNA, 19 nt, Artificial Sequence
  Description of Artificial Sequence: Synthetic oligonucleotide
  Antisense strand to SEQ ID NO: 1412158
uucgaaaccagccaacaug

SEQ ID NO: 1412160 - RNA, 19 nt, Artificial Sequence
  Description of Artificial Sequence: Synthetic oligonucleotide
  Sense strand starting at position 313 of SEQ ID NO: 1243371
agcugaagagacuguuuaa

SEQ ID NO: 1412161 - RNA, 19 nt, Artificial Sequence
  Description of Artificial Sequence: Synthetic oligonucleotide
  Antisense strand to SEQ ID NO: 1412160
uuaaacagucucuucagcu

SEQ ID NO: 1412162 - RNA, 19 nt, Artificial Sequence
  Description of Artificial Sequence: Synthetic oligonucleotide
  Sense strand starting at position 316 of SEQ ID NO: 1243371
ugaagagacuguuuaagua

SEQ ID NO: 1412163 - RNA, 19 nt, Artificial Sequence
  Description of Artificial Sequence: Synthetic oligonucleotide
  Antisense strand to SEQ ID NO: 1412162
uacuuaaacagucucuuca

SEQ ID NO: 1412164 - RNA, 19 nt, Artificial Sequence
  Description of Artificial Sequence: Synthetic oligonucleotide
  Sense strand starting at position 434 of SEQ ID NO: 1243371
ggguaacaucuuggcagaa

SEQ ID NO: 1412165 - RNA, 19 nt, Artificial Sequence
  Description of Artificial Sequence: Synthetic oligonucleotide
  Antisense strand to SEQ ID NO: 1412164
uucugccaagauguuaccc

SEQ ID NO: 1412166 - RNA, 19 nt, Artificial Sequence
  Description of Artificial Sequence: Synthetic oligonucleotide
  Sense strand starting at position 435 of SEQ ID NO: 1243371
gguaacaucuuggcagaaa

SEQ ID NO: 1412167 - RNA, 19 nt, Artificial Sequence
  Description of Artificial Sequence: Synthetic oligonucleotide
  Antisense strand to SEQ ID NO: 1412166
uuucugccaagauguuacc

SEQ ID NO: 1412168 - RNA, 19 nt, Artificial Sequence
  Description of Artificial Sequence: Synthetic oligonucleotide
  Sense strand starting at position 436 of SEQ ID NO: 1243371
guaacaucuuggcagaaag

SEQ ID NO: 1412169 - RNA, 19 nt, Artificial Sequence
  Description of Artificial Sequence: Synthetic oligonucleotide
  Antisense strand to SEQ ID NO: 1412168
cuuucugccaagauguuac

SEQ ID NO: 1412170 - RNA, 19 nt, Artificial Sequence
  Description of Artificial Sequence: Synthetic oligonucleotide
  Sense strand starting at position 438 of SEQ ID NO: 1243371
aacaucuuggcagaaaguu

SEQ ID NO: 1412171 - RNA, 19 nt, Artificial Sequence
  Description of Artificial Sequence: Synthetic oligonucleotide
  Antisense strand to SEQ ID NO: 1412170
aacuuucugccaagauguu

SEQ ID NO: 1412172 - RNA, 19 nt, Artificial Sequence
  Description of Artificial Sequence: Synthetic oligonucleotide
  Sense strand starting at position 651 of SEQ ID NO: 1243371
auguaaauuccgcacacau

SEQ ID NO: 1412173 - RNA, 19 nt, Artificial Sequence
  Description of Artificial Sequence: Synthetic oligonucleotide
  Antisense strand to SEQ ID NO: 1412172
augugugcggaauuuacau

SEQ ID NO: 1412174 - RNA, 19 nt, Artificial Sequence
  Description of Artificial Sequence: Synthetic oligonucleotide
  Sense strand starting at position 653 of SEQ ID NO: 1243371
guaaauuccgcacacaugu

SEQ ID NO: 1412175 - RNA, 19 nt, Artificial Sequence
  Description of Artificial Sequence: Synthetic oligonucleotide
  Antisense strand to SEQ ID NO: 1412174
acaugugugcggaauuuac

SEQ ID NO: 1412176 - RNA, 19 nt, Artificial Sequence
  Description of Artificial Sequence: Synthetic oligonucleotide
  Sense strand starting at position 669 of SEQ ID NO: 1243371
uguguagucacaugcgcau

SEQ ID NO: 1412177 - RNA, 19 nt, Artificial Sequence
  Description of Artificial Sequence: Synthetic oligonucleotide
  Antisense strand to SEQ ID NO: 1412176
augcgcaugugacuacaca

SEQ ID NO: 1412178 - RNA, 19 nt, Artificial Sequence
  Description of Artificial Sequence: Synthetic oligonucleotide
  Sense strand starting at position 737 of SEQ ID NO: 1243371
ccggcaguuucugcucuau

SEQ ID NO: 1412179 - RNA, 19 nt, Artificial Sequence
  Description of Artificial Sequence: Synthetic oligonucleotide
  Antisense strand to SEQ ID NO: 1412178
auagagcagaaacugccgg

SEQ ID NO: 1412180 - RNA, 19 nt, Artificial Sequence
  Description of Artificial Sequence: Synthetic oligonucleotide
  Sense strand starting at position 739 of SEQ ID NO: 1243371
ggcaguuucugcucuauuu

SEQ ID NO: 1412181 - RNA, 19 nt, Artificial Sequence
  Description of Artificial Sequence: Synthetic oligonucleotide
  Antisense strand to SEQ ID NO: 1412180
aaauagagcagaaacugcc

SEQ ID NO: 1412182 - RNA, 19 nt, Artificial Sequence
  Description of Artificial Sequence: Synthetic oligonucleotide
  Sense strand starting at position 899 of SEQ ID NO: 1243371
uggguucugagcugggaua

SEQ ID NO: 1412183 - RNA, 19 nt, Artificial Sequence
  Description of Artificial Sequence: Synthetic oligonucleotide
  Antisense strand to SEQ ID NO: 1412182
uaucccagcucagaaccca

SEQ ID NO: 1412184 - RNA, 19 nt, Artificial Sequence
  Description of Artificial Sequence: Synthetic oligonucleotide
  Sense strand starting at position 900 of SEQ ID NO: 1243371
ggguucugagcugggauaa

SEQ ID NO: 1412185 - RNA, 19 nt, Artificial Sequence
  Description of Artificial Sequence: Synthetic oligonucleotide
  Antisense strand to SEQ ID NO: 1412184
uuaucccagcucagaaccc

SEQ ID NO: 1412186 - RNA, 19 nt, Artificial Sequence
  Description of Artificial Sequence: Synthetic oligonucleotide
  Sense strand starting at position 901 of SEQ ID NO: 1243371
gguucugagcugggauaaa

SEQ ID NO: 1412187 - RNA, 19 nt, Artificial Sequence
  Description of Artificial Sequence: Synthetic oligonucleotide
  Antisense strand to SEQ ID NO: 1412186
uuuaucccagcucagaacc

SEQ ID NO: 1412188 - RNA, 19 nt, Artificial Sequence
  Description of Artificial Sequence: Synthetic oligonucleotide
  Sense strand starting at position 1032 of SEQ ID NO: 1243371
gggccuuugucccaagaag

SEQ ID NO: 1412189 - RNA, 19 nt, Artificial Sequence
  Description of Artificial Sequence: Synthetic oligonucleotide
  Antisense strand to SEQ ID NO: 1412188
cuucuugggacaaaggccc

SEQ ID NO: 1412190 - RNA, 19 nt, Artificial Sequence
  Description of Artificial Sequence: Synthetic oligonucleotide
  Sense strand starting at position 1091 of SEQ ID NO: 1243371
caggcuguccucugaagga

SEQ ID NO: 1412191 - RNA, 19 nt, Artificial Sequence
  Description of Artificial Sequence: Synthetic oligonucleotide
  Antisense strand to SEQ ID NO: 1412190
uccuucagaggacagccug

SEQ ID NO: 1412192 - RNA, 19 nt, Artificial Sequence
  Description of Artificial Sequence: Synthetic oligonucleotide
  Sense strand starting at position 1347 of SEQ ID NO: 1243371
gugccuuugcaccagaaag

SEQ ID NO: 1412193 - RNA, 19 nt, Artificial Sequence
  Description of Artificial Sequence: Synthetic oligonucleotide
  Antisense strand to SEQ ID NO: 1412192
cuuucuggugcaaaggcac

SEQ ID NO: 1412194 - RNA, 19 nt, Artificial Sequence
  Description of Artificial Sequence: Synthetic oligonucleotide
  Sense strand starting at position 1494 of SEQ ID NO: 1243371
acgugugcgccaggaagau

SEQ ID NO: 1412195 - RNA, 19 nt, Artificial Sequence
  Description of Artificial Sequence: Synthetic oligonucleotide
  Antisense strand to SEQ ID NO: 1412194
aucuuccuggcgcacacgu

SEQ ID NO: 1412196 - RNA, 19 nt, Artificial Sequence
  Description of Artificial Sequence: Synthetic oligonucleotide
  Sense strand starting at position 1573 of SEQ ID NO: 1243371
gugaguuccagggagacuu

SEQ ID NO: 1412197 - RNA, 19 nt, Artificial Sequence
  Description of Artificial Sequence: Synthetic oligonucleotide
  Antisense strand to SEQ ID NO: 1412196
aagucucccuggaacucac

SEQ ID NO: 1412198 - RNA, 19 nt, Artificial Sequence
  Description of Artificial Sequence: Synthetic oligonucleotide
  Sense strand starting at position 2020 of SEQ ID NO: 1243371
gggucaggcucauuagcau

SEQ ID NO: 1412199 - RNA, 19 nt, Artificial Sequence
  Description of Artificial Sequence: Synthetic oligonucleotide
  Antisense strand to SEQ ID NO: 1412198
augcuaaugagccugaccc

SEQ ID NO: 1412200 - RNA, 19 nt, Artificial Sequence
  Description of Artificial Sequence: Synthetic oligonucleotide
  Sense strand starting at position 2274 of SEQ ID NO: 1243371
aguucaaagcuguguggaa

SEQ ID NO: 1412201 - RNA, 19 nt, Artificial Sequence
  Description of Artificial Sequence: Synthetic oligonucleotide
  Antisense strand to SEQ ID NO: 1412200
uuccacacagcuuugaacu

SEQ ID NO: 1412202 - RNA, 19 nt, Artificial Sequence
  Description of Artificial Sequence: Synthetic oligonucleotide
  Sense strand starting at position 2275 of SEQ ID NO: 1243371
guucaaagcuguguggaaa

SEQ ID NO: 1412203 - RNA, 19 nt, Artificial Sequence
  Description of Artificial Sequence: Synthetic oligonucleotide
  Antisense strand to SEQ ID NO: 1412202
uuuccacacagcuuugaac

SEQ ID NO: 1412204 - RNA, 19 nt, Artificial Sequence
  Description of Artificial Sequence: Synthetic oligonucleotide
  Sense strand starting at position 2287 of SEQ ID NO: 1243371
guggaaaccgagcgagaau

SEQ ID NO: 1412205 - RNA, 19 nt, Artificial Sequence
  Description of Artificial Sequence: Synthetic oligonucleotide
  Antisense strand to SEQ ID NO: 1412204
auucucgcucgguuuccac

SEQ ID NO: 1412206 - RNA, 19 nt, Artificial Sequence
  Description of Artificial Sequence: Synthetic oligonucleotide
  Sense strand starting at position 2298 of SEQ ID NO: 1243371
gcgagaaucucuuccacag

SEQ ID NO: 1412207 - RNA, 19 nt, Artificial Sequence
  Description of Artificial Sequence: Synthetic oligonucleotide
  Antisense strand to SEQ ID NO: 1412206
cuguggaagagauucucgc

SEQ ID NO: 1412208 - RNA, 19 nt, Artificial Sequence
  Description of Artificial Sequence: Synthetic oligonucleotide
  Sense strand starting at position 2697 of SEQ ID NO: 1243371
cggugaaucacgugaauuc

SEQ ID NO: 1412209 - RNA, 19 nt, Artificial Sequence
  Description of Artificial Sequence: Synthetic oligonucleotide
  Antisense strand to SEQ ID NO: 1412208
gaauucacgugauucaccg

SEQ ID NO: 1412210 - RNA, 19 nt, Artificial Sequence
  Description of Artificial Sequence: Synthetic oligonucleotide
  Sense strand starting at position 2698 of SEQ ID NO: 1243371
ggugaaucacgugaauucu

SEQ ID NO: 1412211 - RNA, 19 nt, Artificial Sequence
  Description of Artificial Sequence: Synthetic oligonucleotide
  Antisense strand to SEQ ID NO: 1412210
agaauucacgugauucacc

SEQ ID NO: 1412212 - RNA, 19 nt, Artificial Sequence
  Description of Artificial Sequence: Synthetic oligonucleotide
  Sense strand starting at position 2704 of SEQ ID NO: 1243371
ucacgugaauucugcaaca

SEQ ID NO: 1412213 - RNA, 19 nt, Artificial Sequence
  Description of Artificial Sequence: Synthetic oligonucleotide
  Antisense strand to SEQ ID NO: 1412212
uguugcagaauucacguga

SEQ ID NO: 1412214 - RNA, 19 nt, Artificial Sequence
  Description of Artificial Sequence: Synthetic oligonucleotide
  Sense strand starting at position 2706 of SEQ ID NO: 1243371
acgugaauucugcaacagc

SEQ ID NO: 1412215 - RNA, 19 nt, Artificial Sequence
  Description of Artificial Sequence: Synthetic oligonucleotide
  Antisense strand to SEQ ID NO: 1412214
gcuguugcagaauucacgu

SEQ ID NO: 1412216 - RNA, 19 nt, Artificial Sequence
  Description of Artificial Sequence: Synthetic oligonucleotide
  Sense strand starting at position 2726 of SEQ ID NO: 1243371
gcacgugugaccugggcaa

SEQ ID NO: 1412217 - RNA, 19 nt, Artificial Sequence
  Description of Artificial Sequence: Synthetic oligonucleotide
  Antisense strand to SEQ ID NO: 1412216
uugcccaggucacacgugc

SEQ ID NO: 1412218 - RNA, 19 nt, Artificial Sequence
  Description of Artificial Sequence: Synthetic oligonucleotide
  Sense strand starting at position 2993 of SEQ ID NO: 1243371
ggguggugaguccauggaa

SEQ ID NO: 1412219 - RNA, 19 nt, Artificial Sequence
  Description of Artificial Sequence: Synthetic oligonucleotide
  Antisense strand to SEQ ID NO: 1412218
uuccauggacucaccaccc

SEQ ID NO: 1412220 - RNA, 19 nt, Artificial Sequence
  Description of Artificial Sequence: Synthetic oligonucleotide
  Sense strand starting at position 3074 of SEQ ID NO: 1243371
acacguccagggugugaaa

SEQ ID NO: 1412221 - RNA, 19 nt, Artificial Sequence
  Description of Artificial Sequence: Synthetic oligonucleotide
  Antisense strand to SEQ ID NO: 1412220
uuucacacccuggacgugu

SEQ ID NO: 1412222 - RNA, 19 nt, Artificial Sequence
  Description of Artificial Sequence: Synthetic oligonucleotide
  Sense strand starting at position 3347 of SEQ ID NO: 1243371
gaggauugcuuguugcagu

SEQ ID NO: 1412223 - RNA, 19 nt, Artificial Sequence
  Description of Artificial Sequence: Synthetic oligonucleotide
  Antisense strand to SEQ ID NO: 1412222
acugcaacaagcaauccuc

SEQ ID NO: 1412224 - RNA, 19 nt, Artificial Sequence
  Description of Artificial Sequence: Synthetic oligonucleotide
  Sense strand starting at position 3348 of SEQ ID NO: 1243371
aggauugcuuguugcagua

SEQ ID NO: 1412225 - RNA, 19 nt, Artificial Sequence
  Description of Artificial Sequence: Synthetic oligonucleotide
  Antisense strand to SEQ ID NO: 1412224
uacugcaacaagcaauccu

SEQ ID NO: 1412226 - RNA, 19 nt, Artificial Sequence
  Description of Artificial Sequence: Synthetic oligonucleotide
  Sense strand starting at position 3691 of SEQ ID NO: 1243371
uggaaagguuucuauuuau

SEQ ID NO: 1412227 - RNA, 19 nt, Artificial Sequence
  Description of Artificial Sequence: Synthetic oligonucleotide
  Antisense strand to SEQ ID NO: 1412226
auaaauagaaaccuuucca

SEQ ID NO: 1412228 - RNA, 19 nt, Artificial Sequence
  Description of Artificial Sequence: Synthetic oligonucleotide
  Sense strand starting at position 3743 of SEQ ID NO: 1243371
acagauaacgcuugcagau

SEQ ID NO: 1412229 - RNA, 19 nt, Artificial Sequence
  Description of Artificial Sequence: Synthetic oligonucleotide
  Antisense strand to SEQ ID NO: 1412228
aucugcaagcguuaucugu

SEQ ID NO: 1412230 - RNA, 19 nt, Artificial Sequence
  Description of Artificial Sequence: Synthetic oligonucleotide
  Sense strand starting at position 3856 of SEQ ID NO: 1243371
cagcuagagccugguguua

SEQ ID NO: 1412231 - RNA, 19 nt, Artificial Sequence
  Description of Artificial Sequence: Synthetic oligonucleotide
  Antisense strand to SEQ ID NO: 1412230
uaacaccaggcucuagcug

SEQ ID NO: 1412232 - RNA, 19 nt, Artificial Sequence
  Description of Artificial Sequence: Synthetic oligonucleotide
  Sense strand starting at position 3858 of SEQ ID NO: 1243371
gcuagagccugguguuacu

SEQ ID NO: 1412233 - RNA, 19 nt, Artificial Sequence
  Description of Artificial Sequence: Synthetic oligonucleotide
  Antisense strand to SEQ ID NO: 1412232
aguaacaccaggcucuagc

SEQ ID NO: 1412234 - RNA, 19 nt, Artificial Sequence
  Description of Artificial Sequence: Synthetic oligonucleotide
  Sense strand starting at position 3888 of SEQ ID NO: 1243371
uagcccucccgaggagaau

SEQ ID NO: 1412235 - RNA, 19 nt, Artificial Sequence
  Description of Artificial Sequence: Synthetic oligonucleotide
  Antisense strand to SEQ ID NO: 1412234
auucuccucgggagggcua

SEQ ID NO: 1412236 - RNA, 19 nt, Artificial Sequence
  Description of Artificial Sequence: Synthetic oligonucleotide
  Sense strand starting at position 3901 of SEQ ID NO: 1243371
gagaauggcugaucucauc

SEQ ID NO: 1412237 - RNA, 19 nt, Artificial Sequence
  Description of Artificial Sequence: Synthetic oligonucleotide
  Antisense strand to SEQ ID NO: 1412236
gaugagaucagccauucuc

SEQ ID NO: 1412238 - RNA, 19 nt, Artificial Sequence
  Description of Artificial Sequence: Synthetic oligonucleotide
  Sense strand starting at position 289 of SEQ ID NO: 1243372
ccagguucugacugggaaa

SEQ ID NO: 1412239 - RNA, 19 nt, Artificial Sequence
  Description of Artificial Sequence: Synthetic oligonucleotide
  Antisense strand to SEQ ID NO: 1412238
uuucccagucagaaccugg

SEQ ID NO: 1412240 - RNA, 19 nt, Artificial Sequence
  Description of Artificial Sequence: Synthetic oligonucleotide
  Sense strand starting at position 494 of SEQ ID NO: 1243372
gcucucuggccaguguuau

SEQ ID NO: 1412241 - RNA, 19 nt, Artificial Sequence
  Description of Artificial Sequence: Synthetic oligonucleotide
  Antisense strand to SEQ ID NO: 1412240
auaacacuggccagagagc

SEQ ID NO: 1412242 - RNA, 19 nt, Artificial Sequence
  Description of Artificial Sequence: Synthetic oligonucleotide
  Sense strand starting at position 495 of SEQ ID NO: 1243372
cucucuggccaguguuauc

SEQ ID NO: 1412243 - RNA, 19 nt, Artificial Sequence
  Description of Artificial Sequence: Synthetic oligonucleotide
  Antisense strand to SEQ ID NO: 1412242
gauaacacuggccagagag

SEQ ID NO: 1412244 - RNA, 19 nt, Artificial Sequence
  Description of Artificial Sequence: Synthetic oligonucleotide
  Sense strand starting at position 505 of SEQ ID NO: 1243372
aguguuaucucauccucca

SEQ ID NO: 1412245 - RNA, 19 nt, Artificial Sequence
  Description of Artificial Sequence: Synthetic oligonucleotide
  Antisense strand to SEQ ID NO: 1412244
uggaggaugagauaacacu

SEQ ID NO: 1412246 - RNA, 19 nt, Artificial Sequence
  Description of Artificial Sequence: Synthetic oligonucleotide
  Sense strand starting at position 553 of SEQ ID NO: 1243372
agaggaaacucgcuccaga

SEQ ID NO: 1412247 - RNA, 19 nt, Artificial Sequence
  Description of Artificial Sequence: Synthetic oligonucleotide
  Antisense strand to SEQ ID NO: 1412246
ucuggagcgaguuuccucu

SEQ ID NO: 1412248 - RNA, 19 nt, Artificial Sequence
  Description of Artificial Sequence: Synthetic oligonucleotide
  Sense strand starting at position 695 of SEQ ID NO: 1243372
gaaucacccgcuggucauu

SEQ ID NO: 1412249 - RNA, 19 nt, Artificial Sequence
  Description of Artificial Sequence: Synthetic oligonucleotide
  Antisense strand to SEQ ID NO: 1412248
aaugaccagcgggugauuc

SEQ ID NO: 1412250 - RNA, 19 nt, Artificial Sequence
  Description of Artificial Sequence: Synthetic oligonucleotide
  Sense strand starting at position 734 of SEQ ID NO: 1243372
uggccuguuuggccaaaca

SEQ ID NO: 1412251 - RNA, 19 nt, Artificial Sequence
  Description of Artificial Sequence: Synthetic oligonucleotide
  Antisense strand to SEQ ID NO: 1412250
uguuuggccaaacaggcca

SEQ ID NO: 1412252 - RNA, 19 nt, Artificial Sequence
  Description of Artificial Sequence: Synthetic oligonucleotide
  Sense strand starting at position 759 of SEQ ID NO: 1243372
cuuguagaugccggagaaa

SEQ ID NO: 1412253 - RNA, 19 nt, Artificial Sequence
  Description of Artificial Sequence: Synthetic oligonucleotide
  Antisense strand to SEQ ID NO: 1412252
uuucuccggcaucuacaag

SEQ ID NO: 1412254 - RNA, 19 nt, Artificial Sequence
  Description of Artificial Sequence: Synthetic oligonucleotide
  Sense strand starting at position 762 of SEQ ID NO: 1243372
guagaugccggagaaaguu

SEQ ID NO: 1412255 - RNA, 19 nt, Artificial Sequence
  Description of Artificial Sequence: Synthetic oligonucleotide
  Antisense strand to SEQ ID NO: 1412254
aacuuucuccggcaucuac

SEQ ID NO: 1412256 - RNA, 19 nt, Artificial Sequence
  Description of Artificial Sequence: Synthetic oligonucleotide
  Sense strand starting at position 772 of SEQ ID NO: 1243372
gagaaaguugguggcaauu

SEQ ID NO: 1412257 - RNA, 19 nt, Artificial Sequence
  Description of Artificial Sequence: Synthetic oligonucleotide
  Antisense strand to SEQ ID NO: 1412256
aauugccaccaacuuucuc

SEQ ID NO: 1412258 - RNA, 19 nt, Artificial Sequence
  Description of Artificial Sequence: Synthetic oligonucleotide
  Sense strand starting at position 782 of SEQ ID NO: 1243372
guggcaauuauaugugcca

SEQ ID NO: 1412259 - RNA, 19 nt, Artificial Sequence
  Description of Artificial Sequence: Synthetic oligonucleotide
  Antisense strand to SEQ ID NO: 1412258
uggcacauauaauugccac

SEQ ID NO: 1412260 - RNA, 19 nt, Artificial Sequence
  Description of Artificial Sequence: Synthetic oligonucleotide
  Sense strand starting at position 784 of SEQ ID NO: 1243372
ggcaauuauaugugccaga

SEQ ID NO: 1412261 - RNA, 19 nt, Artificial Sequence
  Description of Artificial Sequence: Synthetic oligonucleotide
  Antisense strand to SEQ ID NO: 1412260
ucuggcacauauaauugcc

SEQ ID NO: 1412262 - RNA, 19 nt, Artificial Sequence
  Description of Artificial Sequence: Synthetic oligonucleotide
  Sense strand starting at position 785 of SEQ ID NO: 1243372
gcaauuauaugugccagac

SEQ ID NO: 1412263 - RNA, 19 nt, Artificial Sequence
  Description of Artificial Sequence: Synthetic oligonucleotide
  Antisense strand to SEQ ID NO: 1412262
gucuggcacauauaauugc

SEQ ID NO: 1412264 - RNA, 19 nt, Artificial Sequence
  Description of Artificial Sequence: Synthetic oligonucleotide
  Sense strand starting at position 852 of SEQ ID NO: 1243372
cagggcaguugagcuauua

SEQ ID NO: 1412265 - RNA, 19 nt, Artificial Sequence
  Description of Artificial Sequence: Synthetic oligonucleotide
  Antisense strand to SEQ ID NO: 1412264
uaauagcucaacugcccug

SEQ ID NO: 1412266 - RNA, 19 nt, Artificial Sequence
  Description of Artificial Sequence: Synthetic oligonucleotide
  Sense strand starting at position 872 of SEQ ID NO: 1243372
uguucccucuuggcagaua

SEQ ID NO: 1412267 - RNA, 19 nt, Artificial Sequence
  Description of Artificial Sequence: Synthetic oligonucleotide
  Antisense strand to SEQ ID NO: 1412266
uaucugccaagagggaaca

SEQ ID NO: 1412268 - RNA, 19 nt, Artificial Sequence
  Description of Artificial Sequence: Synthetic oligonucleotide
  Sense strand starting at position 906 of SEQ ID NO: 1243372
cagagaaguuaaguccauu

SEQ ID NO: 1412269 - RNA, 19 nt, Artificial Sequence
  Description of Artificial Sequence: Synthetic oligonucleotide
  Antisense strand to SEQ ID NO: 1412268
aauggacuuaacuucucug

SEQ ID NO: 1412270 - RNA, 19 nt, Artificial Sequence
  Description of Artificial Sequence: Synthetic oligonucleotide
  Sense strand starting at position 912 of SEQ ID NO: 1243372
aguuaaguccauugcccaa

SEQ ID NO: 1412271 - RNA, 19 nt, Artificial Sequence
  Description of Artificial Sequence: Synthetic oligonucleotide
  Antisense strand to SEQ ID NO: 1412270
uugggcaauggacuuaacu

SEQ ID NO: 1412272 - RNA, 19 nt, Artificial Sequence
  Description of Artificial Sequence: Synthetic oligonucleotide
  Sense strand starting at position 2304 of SEQ ID NO: 1243372
ggaagagugcugcauacuc

SEQ ID NO: 1412273 - RNA, 19 nt, Artificial Sequence
  Description of Artificial Sequence: Synthetic oligonucleotide
  Antisense strand to SEQ ID NO: 1412272
gaguaugcagcacucuucc

SEQ ID NO: 1412274 - RNA, 19 nt, Artificial Sequence
  Description of Artificial Sequence: Synthetic oligonucleotide
  Sense strand starting at position 2312 of SEQ ID NO: 1243372
gcugcauacuccucgagag

SEQ ID NO: 1412275 - RNA, 19 nt, Artificial Sequence
  Description of Artificial Sequence: Synthetic oligonucleotide
  Antisense strand to SEQ ID NO: 1412274
cucucgaggaguaugcagc

SEQ ID NO: 1412276 - RNA, 19 nt, Artificial Sequence
  Description of Artificial Sequence: Synthetic oligonucleotide
  Sense strand starting at position 2414 of SEQ ID NO: 1243372
ggcaucagucguucgcgaa

SEQ ID NO: 1412277 - RNA, 19 nt, Artificial Sequence
  Description of Artificial Sequence: Synthetic oligonucleotide
  Antisense strand to SEQ ID NO: 1412276
uucgcgaacgacugaugcc

SEQ ID NO: 1412278 - RNA, 19 nt, Artificial Sequence
  Description of Artificial Sequence: Synthetic oligonucleotide
  Sense strand starting at position 2418 of SEQ ID NO: 1243372
ucagucguucgcgaauuca

SEQ ID NO: 1412279 - RNA, 19 nt, Artificial Sequence
  Description of Artificial Sequence: Synthetic oligonucleotide
  Antisense strand to SEQ ID NO: 1412278
ugaauucgcgaacgacuga

SEQ ID NO: 1412280 - RNA, 19 nt, Artificial Sequence
  Description of Artificial Sequence: Synthetic oligonucleotide
  Sense strand starting at position 2552 of SEQ ID NO: 1243372
cucucauuccucugcggga

SEQ ID NO: 1412281 - RNA, 19 nt, Artificial Sequence
  Description of Artificial Sequence: Synthetic oligonucleotide
  Antisense strand to SEQ ID NO: 1412280
ucccgcagaggaaugagag

SEQ ID NO: 1412282 - RNA, 19 nt, Artificial Sequence
  Description of Artificial Sequence: Synthetic oligonucleotide
  Sense strand starting at position 2553 of SEQ ID NO: 1243372
ucucauuccucugcgggau

SEQ ID NO: 1412283 - RNA, 19 nt, Artificial Sequence
  Description of Artificial Sequence: Synthetic oligonucleotide
  Antisense strand to SEQ ID NO: 1412282
aucccgcagaggaaugaga

SEQ ID NO: 1412284 - RNA, 19 nt, Artificial Sequence
  Description of Artificial Sequence: Synthetic oligonucleotide
  Sense strand starting at position 2625 of SEQ ID NO: 1243372
gcauaauuacccggugguu

SEQ ID NO: 1412285 - RNA, 19 nt, Artificial Sequence
  Description of Artificial Sequence: Synthetic oligonucleotide
  Antisense strand to SEQ ID NO: 1412284
aaccaccggguaauuaugc

SEQ ID NO: 1412286 - RNA, 19 nt, Artificial Sequence
  Description of Artificial Sequence: Synthetic oligonucleotide
  Sense strand starting at position 2693 of SEQ ID NO: 1243372
uaagaugacuccggaagaa

SEQ ID NO: 1412287 - RNA, 19 nt, Artificial Sequence
  Description of Artificial Sequence: Synthetic oligonucleotide
  Antisense strand to SEQ ID NO: 1412286
uucuuccggagucaucuua

SEQ ID NO: 1412288 - RNA, 19 nt, Artificial Sequence
  Description of Artificial Sequence: Synthetic oligonucleotide
  Sense strand starting at position 2805 of SEQ ID NO: 1243372
gccugucuaccugggaaga

SEQ ID NO: 1412289 - RNA, 19 nt, Artificial Sequence
  Description of Artificial Sequence: Synthetic oligonucleotide
  Antisense strand to SEQ ID NO: 1412288
ucuucccagguagacaggc

SEQ ID NO: 1412290 - RNA, 19 nt, Artificial Sequence
  Description of Artificial Sequence: Synthetic oligonucleotide
  Sense strand starting at position 2807 of SEQ ID NO: 1243372
cugucuaccugggaagaca

SEQ ID NO: 1412291 - RNA, 19 nt, Artificial Sequence
  Description of Artificial Sequence: Synthetic oligonucleotide
  Antisense strand to SEQ ID NO: 1412290
ugucuucccagguagacag

SEQ ID NO: 1412292 - RNA, 19 nt, Artificial Sequence
  Description of Artificial Sequence: Synthetic oligonucleotide
  Sense strand starting at position 2825 of SEQ ID NO: 1243372
agaggcuccaguuauugga

SEQ ID NO: 1412293 - RNA, 19 nt, Artificial Sequence
  Description of Artificial Sequence: Synthetic oligonucleotide
  Antisense strand to SEQ ID NO: 1412292
uccaauaacuggagccucu

SEQ ID NO: 1412294 - RNA, 19 nt, Artificial Sequence
  Description of Artificial Sequence: Synthetic oligonucleotide
  Sense strand starting at position 2829 of SEQ ID NO: 1243372
gcuccaguuauuggaguaa

SEQ ID NO: 1412295 - RNA, 19 nt, Artificial Sequence
  Description of Artificial Sequence: Synthetic oligonucleotide
  Antisense strand to SEQ ID NO: 1412294
uuacuccaauaacuggagc

SEQ ID NO: 1412296 - RNA, 19 nt, Artificial Sequence
  Description of Artificial Sequence: Synthetic oligonucleotide
  Sense strand starting at position 2833 of SEQ ID NO: 1243372
caguuauuggaguaaucuc

SEQ ID NO: 1412297 - RNA, 19 nt, Artificial Sequence
  Description of Artificial Sequence: Synthetic oligonucleotide
  Antisense strand to SEQ ID NO: 1412296
gagauuacuccaauaacug

SEQ ID NO: 1412298 - RNA, 19 nt, Artificial Sequence
  Description of Artificial Sequence: Synthetic oligonucleotide
  Sense strand starting at position 2840 of SEQ ID NO: 1243372
uggaguaaucuccacucau

SEQ ID NO: 1412299 - RNA, 19 nt, Artificial Sequence
  Description of Artificial Sequence: Synthetic oligonucleotide
  Antisense strand to SEQ ID NO: 1412298
augaguggagauuacucca

SEQ ID NO: 1412300 - RNA, 19 nt, Artificial Sequence
  Description of Artificial Sequence: Synthetic oligonucleotide
  Sense strand starting at position 3009 of SEQ ID NO: 1243372
gccuuauuugcuggaaacu

SEQ ID NO: 1412301 - RNA, 19 nt, Artificial Sequence
  Description of Artificial Sequence: Synthetic oligonucleotide
  Antisense strand to SEQ ID NO: 1412300
aguuuccagcaaauaaggc

SEQ ID NO: 1412302 - RNA, 19 nt, Artificial Sequence
  Description of Artificial Sequence: Synthetic oligonucleotide
  Sense strand starting at position 3043 of SEQ ID NO: 1243372
agcagaagccucuggaaga

SEQ ID NO: 1412303 - RNA, 19 nt, Artificial Sequence
  Description of Artificial Sequence: Synthetic oligonucleotide
  Antisense strand to SEQ ID NO: 1412302
ucuuccagaggcuucugcu

SEQ ID NO: 1412304 - RNA, 19 nt, Artificial Sequence
  Description of Artificial Sequence: Synthetic oligonucleotide
  Sense strand starting at position 3421 of SEQ ID NO: 1243372
agccuauaucuaugaaugu

SEQ ID NO: 1412305 - RNA, 19 nt, Artificial Sequence
  Description of Artificial Sequence: Synthetic oligonucleotide
  Antisense strand to SEQ ID NO: 1412304
acauucauagauauaggcu

SEQ ID NO: 1412306 - RNA, 19 nt, Artificial Sequence
  Description of Artificial Sequence: Synthetic oligonucleotide
  Sense strand starting at position 3430 of SEQ ID NO: 1243372
cuaugaaugugggcagauu

SEQ ID NO: 1412307 - RNA, 19 nt, Artificial Sequence
  Description of Artificial Sequence: Synthetic oligonucleotide
  Antisense strand to SEQ ID NO: 1412306
aaucugcccacauucauag

SEQ ID NO: 1412308 - RNA, 19 nt, Artificial Sequence
  Description of Artificial Sequence: Synthetic oligonucleotide
  Sense strand starting at position 3635 of SEQ ID NO: 1243372
gagauagggucucuuguug

SEQ ID NO: 1412309 - RNA, 19 nt, Artificial Sequence
  Description of Artificial Sequence: Synthetic oligonucleotide
  Antisense strand to SEQ ID NO: 1412308
caacaagagacccuaucuc

SEQ ID NO: 1412310 - RNA, 19 nt, Artificial Sequence
  Description of Artificial Sequence: Synthetic oligonucleotide
  Sense strand starting at position 3768 of SEQ ID NO: 1243372
uuugacauugugugaugaa

SEQ ID NO: 1412311 - RNA, 19 nt, Artificial Sequence
  Description of Artificial Sequence: Synthetic oligonucleotide
  Antisense strand to SEQ ID NO: 1412310
uucaucacacaaugucaaa

SEQ ID NO: 1412312 - RNA, 19 nt, Artificial Sequence
  Description of Artificial Sequence: Synthetic oligonucleotide
  Sense strand starting at position 3865 of SEQ ID NO: 1243372
ugcugaauacauggauguu

SEQ ID NO: 1412313 - RNA, 19 nt, Artificial Sequence
  Description of Artificial Sequence: Synthetic oligonucleotide
  Antisense strand to SEQ ID NO: 1412312
aacauccauguauucagca

SEQ ID NO: 1412314 - RNA, 19 nt, Artificial Sequence
  Description of Artificial Sequence: Synthetic oligonucleotide
  Sense strand starting at position 3871 of SEQ ID NO: 1243372
auacauggauguugaauga

SEQ ID NO: 1412315 - RNA, 19 nt, Artificial Sequence
  Description of Artificial Sequence: Synthetic oligonucleotide
  Antisense strand to SEQ ID NO: 1412314
ucauucaacauccauguau

SEQ ID NO: 1412316 - RNA, 19 nt, Artificial Sequence
  Description of Artificial Sequence: Synthetic oligonucleotide
  Sense strand starting at position 3892 of SEQ ID NO: 1243372
gaaugaucggacugcagaa

SEQ ID NO: 1412317 - RNA, 19 nt, Artificial Sequence
  Description of Artificial Sequence: Synthetic oligonucleotide
  Antisense strand to SEQ ID NO: 1412316
uucugcaguccgaucauuc

SEQ ID NO: 1412318 - RNA, 19 nt, Artificial Sequence
  Description of Artificial Sequence: Synthetic oligonucleotide
  Sense strand starting at position 78 of SEQ ID NO: 1243373
gaagauccauggugagaac

SEQ ID NO: 1412319 - RNA, 19 nt, Artificial Sequence
  Description of Artificial Sequence: Synthetic oligonucleotide
  Antisense strand to SEQ ID NO: 1412318
guucucaccauggaucuuc

SEQ ID NO: 1412320 - RNA, 19 nt, Artificial Sequence
  Description of Artificial Sequence: Synthetic oligonucleotide
  Sense strand starting at position 178 of SEQ ID NO: 1243373
gggcauggccugugaguuu

SEQ ID NO: 1412321 - RNA, 19 nt, Artificial Sequence
  Description of Artificial Sequence: Synthetic oligonucleotide
  Antisense strand to SEQ ID NO: 1412320
aaacucacaggccaugccc

SEQ ID NO: 1412322 - RNA, 19 nt, Artificial Sequence
  Description of Artificial Sequence: Synthetic oligonucleotide
  Sense strand starting at position 189 of SEQ ID NO: 1243373
gugaguuucugagcaggcu

SEQ ID NO: 1412323 - RNA, 19 nt, Artificial Sequence
  Description of Artificial Sequence: Synthetic oligonucleotide
  Antisense strand to SEQ ID NO: 1412322
agccugcucagaaacucac

SEQ ID NO: 1412324 - RNA, 19 nt, Artificial Sequence
  Description of Artificial Sequence: Synthetic oligonucleotide
  Sense strand starting at position 490 of SEQ ID NO: 1243373
gggugguugccuguacguu

SEQ ID NO: 1412325 - RNA, 19 nt, Artificial Sequence
  Description of Artificial Sequence: Synthetic oligonucleotide
  Antisense strand to SEQ ID NO: 1412324
aacguacaggcaaccaccc

SEQ ID NO: 1412326 - RNA, 19 nt, Artificial Sequence
  Description of Artificial Sequence: Synthetic oligonucleotide
  Sense strand starting at position 491 of SEQ ID NO: 1243373
ggugguugccuguacguua

SEQ ID NO: 1412327 - RNA, 19 nt, Artificial Sequence
  Description of Artificial Sequence: Synthetic oligonucleotide
  Antisense strand to SEQ ID NO: 1412326
uaacguacaggcaaccacc

SEQ ID NO: 1412328 - RNA, 19 nt, Artificial Sequence
  Description of Artificial Sequence: Synthetic oligonucleotide
  Sense strand starting at position 492 of SEQ ID NO: 1243373
gugguugccuguacguuau

SEQ ID NO: 1412329 - RNA, 19 nt, Artificial Sequence
  Description of Artificial Sequence: Synthetic oligonucleotide
  Antisense strand to SEQ ID NO: 1412328
auaacguacaggcaaccac

SEQ ID NO: 1412330 - RNA, 19 nt, Artificial Sequence
  Description of Artificial Sequence: Synthetic oligonucleotide
  Sense strand starting at position 504 of SEQ ID NO: 1243373
acguuaugguuucccaauu

SEQ ID NO: 1412331 - RNA, 19 nt, Artificial Sequence
  Description of Artificial Sequence: Synthetic oligonucleotide
  Antisense strand to SEQ ID NO: 1412330
aauugggaaaccauaacgu

SEQ ID NO: 1412332 - RNA, 19 nt, Artificial Sequence
  Description of Artificial Sequence: Synthetic oligonucleotide
  Sense strand starting at position 648 of SEQ ID NO: 1243373
uggguagaggccugucagu

SEQ ID NO: 1412333 - RNA, 19 nt, Artificial Sequence
  Description of Artificial Sequence: Synthetic oligonucleotide
  Antisense strand to SEQ ID NO: 1412332
acugacaggccucuaccca

SEQ ID NO: 1412334 - RNA, 19 nt, Artificial Sequence
  Description of Artificial Sequence: Synthetic oligonucleotide
  Sense strand starting at position 661 of SEQ ID NO: 1243373
gucaguucacgcugaguau

SEQ ID NO: 1412335 - RNA, 19 nt, Artificial Sequence
  Description of Artificial Sequence: Synthetic oligonucleotide
  Antisense strand to SEQ ID NO: 1412334
auacucagcgugaacugac

SEQ ID NO: 1412336 - RNA, 19 nt, Artificial Sequence
  Description of Artificial Sequence: Synthetic oligonucleotide
  Sense strand starting at position 670 of SEQ ID NO: 1243373
cgcugaguauaucccugau

SEQ ID NO: 1412337 - RNA, 19 nt, Artificial Sequence
  Description of Artificial Sequence: Synthetic oligonucleotide
  Antisense strand to SEQ ID NO: 1412336
aucagggauauacucagcg

SEQ ID NO: 1412338 - RNA, 19 nt, Artificial Sequence
  Description of Artificial Sequence: Synthetic oligonucleotide
  Sense strand starting at position 672 of SEQ ID NO: 1243373
cugaguauaucccugauca

SEQ ID NO: 1412339 - RNA, 19 nt, Artificial Sequence
  Description of Artificial Sequence: Synthetic oligonucleotide
  Antisense strand to SEQ ID NO: 1412338
ugaucagggauauacucag

SEQ ID NO: 1412340 - RNA, 19 nt, Artificial Sequence
  Description of Artificial Sequence: Synthetic oligonucleotide
  Sense strand starting at position 673 of SEQ ID NO: 1243373
ugaguauaucccugaucau

SEQ ID NO: 1412341 - RNA, 19 nt, Artificial Sequence
  Description of Artificial Sequence: Synthetic oligonucleotide
  Antisense strand to SEQ ID NO: 1412340
augaucagggauauacuca

SEQ ID NO: 1412342 - RNA, 19 nt, Artificial Sequence
  Description of Artificial Sequence: Synthetic oligonucleotide
  Sense strand starting at position 676 of SEQ ID NO: 1243373
guauaucccugaucaucag

SEQ ID NO: 1412343 - RNA, 19 nt, Artificial Sequence
  Description of Artificial Sequence: Synthetic oligonucleotide
  Antisense strand to SEQ ID NO: 1412342
cugaugaucagggauauac

SEQ ID NO: 1412344 - RNA, 19 nt, Artificial Sequence
  Description of Artificial Sequence: Synthetic oligonucleotide
  Sense strand starting at position 705 of SEQ ID NO: 1243373
aggcuucgggacugaguaa

SEQ ID NO: 1412345 - RNA, 19 nt, Artificial Sequence
  Description of Artificial Sequence: Synthetic oligonucleotide
  Antisense strand to SEQ ID NO: 1412344
uuacucagucccgaagccu

SEQ ID NO: 1412346 - RNA, 19 nt, Artificial Sequence
  Description of Artificial Sequence: Synthetic oligonucleotide
  Sense strand starting at position 999 of SEQ ID NO: 1243373
ggcgcgugccuguagugaa

SEQ ID NO: 1412347 - RNA, 19 nt, Artificial Sequence
  Description of Artificial Sequence: Synthetic oligonucleotide
  Antisense strand to SEQ ID NO: 1412346
uucacuacaggcacgcgcc

SEQ ID NO: 1412348 - RNA, 19 nt, Artificial Sequence
  Description of Artificial Sequence: Synthetic oligonucleotide
  Sense strand starting at position 1118 of SEQ ID NO: 1243373
aagacaguaucgucccaaa

SEQ ID NO: 1412349 - RNA, 19 nt, Artificial Sequence
  Description of Artificial Sequence: Synthetic oligonucleotide
  Antisense strand to SEQ ID NO: 1412348
uuugggacgauacugucuu

SEQ ID NO: 1412350 - RNA, 19 nt, Artificial Sequence
  Description of Artificial Sequence: Synthetic oligonucleotide
  Sense strand starting at position 1121 of SEQ ID NO: 1243373
acaguaucgucccaaagca

SEQ ID NO: 1412351 - RNA, 19 nt, Artificial Sequence
  Description of Artificial Sequence: Synthetic oligonucleotide
  Antisense strand to SEQ ID NO: 1412350
ugcuuugggacgauacugu

SEQ ID NO: 1412352 - RNA, 19 nt, Artificial Sequence
  Description of Artificial Sequence: Synthetic oligonucleotide
  Sense strand starting at position 1149 of SEQ ID NO: 1243373
cgcuuugacacaugauuga

SEQ ID NO: 1412353 - RNA, 19 nt, Artificial Sequence
  Description of Artificial Sequence: Synthetic oligonucleotide
  Antisense strand to SEQ ID NO: 1412352
ucaaucaugugucaaagcg

SEQ ID NO: 1412354 - RNA, 19 nt, Artificial Sequence
  Description of Artificial Sequence: Synthetic oligonucleotide
  Sense strand starting at position 1160 of SEQ ID NO: 1243373
augauugacgcuugaggca

SEQ ID NO: 1412355 - RNA, 19 nt, Artificial Sequence
  Description of Artificial Sequence: Synthetic oligonucleotide
  Antisense strand to SEQ ID NO: 1412354
ugccucaagcgucaaucau

SEQ ID NO: 1412356 - RNA, 19 nt, Artificial Sequence
  Description of Artificial Sequence: Synthetic oligonucleotide
  Sense strand starting at position 1383 of SEQ ID NO: 1243373
ugagacucccucuguacaa

SEQ ID NO: 1412357 - RNA, 19 nt, Artificial Sequence
  Description of Artificial Sequence: Synthetic oligonucleotide
  Antisense strand to SEQ ID NO: 1412356
uuguacagagggagucuca

SEQ ID NO: 1412358 - RNA, 19 nt, Artificial Sequence
  Description of Artificial Sequence: Synthetic oligonucleotide
  Sense strand starting at position 1557 of SEQ ID NO: 1243373
ugaugucacucacuaauga

SEQ ID NO: 1412359 - RNA, 19 nt, Artificial Sequence
  Description of Artificial Sequence: Synthetic oligonucleotide
  Antisense strand to SEQ ID NO: 1412358
ucauuagugagugacauca

SEQ ID NO: 1412360 - RNA, 19 nt, Artificial Sequence
  Description of Artificial Sequence: Synthetic oligonucleotide
  Sense strand starting at position 1561 of SEQ ID NO: 1243373
gucacucacuaaugagguu

SEQ ID NO: 1412361 - RNA, 19 nt, Artificial Sequence
  Description of Artificial Sequence: Synthetic oligonucleotide
  Antisense strand to SEQ ID NO: 1412360
aaccucauuagugagugac

SEQ ID NO: 1412362 - RNA, 19 nt, Artificial Sequence
  Description of Artificial Sequence: Synthetic oligonucleotide
  Sense strand starting at position 2106 of SEQ ID NO: 1243373
cgcagaaucgcccugucua

SEQ ID NO: 1412363 - RNA, 19 nt, Artificial Sequence
  Description of Artificial Sequence: Synthetic oligonucleotide
  Antisense strand to SEQ ID NO: 1412362
uagacagggcgauucugcg

SEQ ID NO: 1412364 - RNA, 19 nt, Artificial Sequence
  Description of Artificial Sequence: Synthetic oligonucleotide
  Sense strand starting at position 2107 of SEQ ID NO: 1243373
gcagaaucgcccugucuau

SEQ ID NO: 1412365 - RNA, 19 nt, Artificial Sequence
  Description of Artificial Sequence: Synthetic oligonucleotide
  Antisense strand to SEQ ID NO: 1412364
auagacagggcgauucugc

SEQ ID NO: 1412366 - RNA, 19 nt, Artificial Sequence
  Description of Artificial Sequence: Synthetic oligonucleotide
  Sense strand starting at position 2487 of SEQ ID NO: 1243373
agcagaucugugggcucua

SEQ ID NO: 1412367 - RNA, 19 nt, Artificial Sequence
  Description of Artificial Sequence: Synthetic oligonucleotide
  Antisense strand to SEQ ID NO: 1412366
uagagcccacagaucugcu

SEQ ID NO: 1412368 - RNA, 19 nt, Artificial Sequence
  Description of Artificial Sequence: Synthetic oligonucleotide
  Sense strand starting at position 2687 of SEQ ID NO: 1243373
ggaguucucccagggccua

SEQ ID NO: 1412369 - RNA, 19 nt, Artificial Sequence
  Description of Artificial Sequence: Synthetic oligonucleotide
  Antisense strand to SEQ ID NO: 1412368
uaggcccugggagaacucc

SEQ ID NO: 1412370 - RNA, 19 nt, Artificial Sequence
  Description of Artificial Sequence: Synthetic oligonucleotide
  Sense strand starting at position 2894 of SEQ ID NO: 1243373
uggucuugucuuuaccgua

SEQ ID NO: 1412371 - RNA, 19 nt, Artificial Sequence
  Description of Artificial Sequence: Synthetic oligonucleotide
  Antisense strand to SEQ ID NO: 1412370
uacgguaaagacaagacca

SEQ ID NO: 1412372 - RNA, 19 nt, Artificial Sequence
  Description of Artificial Sequence: Synthetic oligonucleotide
  Sense strand starting at position 2953 of SEQ ID NO: 1243373
cuuuguaauuguuuccaua

SEQ ID NO: 1412373 - RNA, 19 nt, Artificial Sequence
  Description of Artificial Sequence: Synthetic oligonucleotide
  Antisense strand to SEQ ID NO: 1412372
uauggaaacaauuacaaag

SEQ ID NO: 1412374 - RNA, 19 nt, Artificial Sequence
  Description of Artificial Sequence: Synthetic oligonucleotide
  Sense strand starting at position 2971 of SEQ ID NO: 1243373
agggcuuauuaccuucuaa

SEQ ID NO: 1412375 - RNA, 19 nt, Artificial Sequence
  Description of Artificial Sequence: Synthetic oligonucleotide
  Antisense strand to SEQ ID NO: 1412374
uuagaagguaauaagcccu

SEQ ID NO: 1412376 - RNA, 19 nt, Artificial Sequence
  Description of Artificial Sequence: Synthetic oligonucleotide
  Sense strand starting at position 3002 of SEQ ID NO: 1243373
uguauugugugcuuucuuu

SEQ ID NO: 1412377 - RNA, 19 nt, Artificial Sequence
  Description of Artificial Sequence: Synthetic oligonucleotide
  Antisense strand to SEQ ID NO: 1412376
aaagaaagcacacaauaca

SEQ ID NO: 1412378 - RNA, 19 nt, Artificial Sequence
  Description of Artificial Sequence: Synthetic oligonucleotide
  Sense strand starting at position 3006 of SEQ ID NO: 1243373
uugugugcuuucuuuauuu

SEQ ID NO: 1412379 - RNA, 19 nt, Artificial Sequence
  Description of Artificial Sequence: Synthetic oligonucleotide
  Antisense strand to SEQ ID NO: 1412378
aaauaaagaaagcacacaa

SEQ ID NO: 1412380 - RNA, 19 nt, Artificial Sequence
  Description of Artificial Sequence: Synthetic oligonucleotide
  Sense strand starting at position 3685 of SEQ ID NO: 1243373
gcaguuagaauauguuggu

SEQ ID NO: 1412381 - RNA, 19 nt, Artificial Sequence
  Description of Artificial Sequence: Synthetic oligonucleotide
  Antisense strand to SEQ ID NO: 1412380
accaacauauucuaacugc

SEQ ID NO: 1412382 - RNA, 19 nt, Artificial Sequence
  Description of Artificial Sequence: Synthetic oligonucleotide
  Sense strand starting at position 3689 of SEQ ID NO: 1243373
uuagaauauguuggugcua

SEQ ID NO: 1412383 - RNA, 19 nt, Artificial Sequence
  Description of Artificial Sequence: Synthetic oligonucleotide
  Antisense strand to SEQ ID NO: 1412382
uagcaccaacauauucuaa

SEQ ID NO: 1412384 - RNA, 19 nt, Artificial Sequence
  Description of Artificial Sequence: Synthetic oligonucleotide
  Sense strand starting at position 3701 of SEQ ID NO: 1243373
ggugcuacgucagucuuaa

SEQ ID NO: 1412385 - RNA, 19 nt, Artificial Sequence
  Description of Artificial Sequence: Synthetic oligonucleotide
  Antisense strand to SEQ ID NO: 1412384
uuaagacugacguagcacc

SEQ ID NO: 1412386 - RNA, 19 nt, Artificial Sequence
  Description of Artificial Sequence: Synthetic oligonucleotide
  Sense strand starting at position 3702 of SEQ ID NO: 1243373
gugcuacgucagucuuaau

SEQ ID NO: 1412387 - RNA, 19 nt, Artificial Sequence
  Description of Artificial Sequence: Synthetic oligonucleotide
  Antisense strand to SEQ ID NO: 1412386
auuaagacugacguagcac

SEQ ID NO: 1412388 - RNA, 19 nt, Artificial Sequence
  Description of Artificial Sequence: Synthetic oligonucleotide
  Sense strand starting at position 3713 of SEQ ID NO: 1243373
gucuuaauguuugcaugcu

SEQ ID NO: 1412389 - RNA, 19 nt, Artificial Sequence
  Description of Artificial Sequence: Synthetic oligonucleotide
  Antisense strand to SEQ ID NO: 1412388
agcaugcaaacauuaagac

SEQ ID NO: 1412390 - RNA, 19 nt, Artificial Sequence
  Description of Artificial Sequence: Synthetic oligonucleotide
  Sense strand starting at position 3743 of SEQ ID NO: 1243373
uacuguguugugggaguuu

SEQ ID NO: 1412391 - RNA, 19 nt, Artificial Sequence
  Description of Artificial Sequence: Synthetic oligonucleotide
  Antisense strand to SEQ ID NO: 1412390
aaacucccacaacacagua

SEQ ID NO: 1412392 - RNA, 19 nt, Artificial Sequence
  Description of Artificial Sequence: Synthetic oligonucleotide
  Sense strand starting at position 3752 of SEQ ID NO: 1243373
gugggaguuuggaguuuga

SEQ ID NO: 1412393 - RNA, 19 nt, Artificial Sequence
  Description of Artificial Sequence: Synthetic oligonucleotide
  Antisense strand to SEQ ID NO: 1412392
ucaaacuccaaacucccac

SEQ ID NO: 1412394 - RNA, 19 nt, Artificial Sequence
  Description of Artificial Sequence: Synthetic oligonucleotide
  Sense strand starting at position 3756 of SEQ ID NO: 1243373
gaguuuggaguuugaaacu

SEQ ID NO: 1412395 - RNA, 19 nt, Artificial Sequence
  Description of Artificial Sequence: Synthetic oligonucleotide
  Antisense strand to SEQ ID NO: 1412394
aguuucaaacuccaaacuc

SEQ ID NO: 1412396 - RNA, 19 nt, Artificial Sequence
  Description of Artificial Sequence: Synthetic oligonucleotide
  Sense strand starting at position 3765 of SEQ ID NO: 1243373
guuugaaacuacgggaaga

SEQ ID NO: 1412397 - RNA, 19 nt, Artificial Sequence
  Description of Artificial Sequence: Synthetic oligonucleotide
  Antisense strand to SEQ ID NO: 1412396
ucuucccguaguuucaaac

SEQ ID NO: 1412398 - RNA, 19 nt, Artificial Sequence
  Description of Artificial Sequence: Synthetic oligonucleotide
  Sense strand starting at position 5 of SEQ ID NO: 1243374
ugaaaucauuucugguaaa

SEQ ID NO: 1412399 - RNA, 19 nt, Artificial Sequence
  Description of Artificial Sequence: Synthetic oligonucleotide
  Antisense strand to SEQ ID NO: 1412398
uuuaccagaaaugauuuca

SEQ ID NO: 1412400 - RNA, 19 nt, Artificial Sequence
  Description of Artificial Sequence: Synthetic oligonucleotide
  Sense strand starting at position 49 of SEQ ID NO: 1243374
gcugauuuauaagaaagug

SEQ ID NO: 1412401 - RNA, 19 nt, Artificial Sequence
  Description of Artificial Sequence: Synthetic oligonucleotide
  Antisense strand to SEQ ID NO: 1412400
cacuuucuuauaaaucagc

SEQ ID NO: 1412402 - RNA, 19 nt, Artificial Sequence
  Description of Artificial Sequence: Synthetic oligonucleotide
  Sense strand starting at position 203 of SEQ ID NO: 1243374
guccaucacuucuuggaga

SEQ ID NO: 1412403 - RNA, 19 nt, Artificial Sequence
  Description of Artificial Sequence: Synthetic oligonucleotide
  Antisense strand to SEQ ID NO: 1412402
ucuccaagaagugauggac

SEQ ID NO: 1412404 - RNA, 19 nt, Artificial Sequence
  Description of Artificial Sequence: Synthetic oligonucleotide
  Sense strand starting at position 293 of SEQ ID NO: 1243374
uuugcauuccuuuggcauu

SEQ ID NO: 1412405 - RNA, 19 nt, Artificial Sequence
  Description of Artificial Sequence: Synthetic oligonucleotide
  Antisense strand to SEQ ID NO: 1412404
aaugccaaaggaaugcaaa

SEQ ID NO: 1412406 - RNA, 19 nt, Artificial Sequence
  Description of Artificial Sequence: Synthetic oligonucleotide
  Sense strand starting at position 295 of SEQ ID NO: 1243374
ugcauuccuuuggcauuua

SEQ ID NO: 1412407 - RNA, 19 nt, Artificial Sequence
  Description of Artificial Sequence: Synthetic oligonucleotide
  Antisense strand to SEQ ID NO: 1412406
uaaaugccaaaggaaugca

SEQ ID NO: 1412408 - RNA, 19 nt, Artificial Sequence
  Description of Artificial Sequence: Synthetic oligonucleotide
  Sense strand starting at position 447 of SEQ ID NO: 1243374
agccauaaucaccagugaa

SEQ ID NO: 1412409 - RNA, 19 nt, Artificial Sequence
  Description of Artificial Sequence: Synthetic oligonucleotide
  Antisense strand to SEQ ID NO: 1412408
uucacuggugauuauggcu

SEQ ID NO: 1412410 - RNA, 19 nt, Artificial Sequence
  Description of Artificial Sequence: Synthetic oligonucleotide
  Sense strand starting at position 647 of SEQ ID NO: 1243374
gaauaauccugguuauuga

SEQ ID NO: 1412411 - RNA, 19 nt, Artificial Sequence
  Description of Artificial Sequence: Synthetic oligonucleotide
  Antisense strand to SEQ ID NO: 1412410
ucaauaaccaggauuauuc

SEQ ID NO: 1412412 - RNA, 19 nt, Artificial Sequence
  Description of Artificial Sequence: Synthetic oligonucleotide
  Sense strand starting at position 661 of SEQ ID NO: 1243374
auugaaaccuaucuuguga

SEQ ID NO: 1412413 - RNA, 19 nt, Artificial Sequence
  Description of Artificial Sequence: Synthetic oligonucleotide
  Antisense strand to SEQ ID NO: 1412412
ucacaagauagguuucaau

SEQ ID NO: 1412414 - RNA, 19 nt, Artificial Sequence
  Description of Artificial Sequence: Synthetic oligonucleotide
  Sense strand starting at position 668 of SEQ ID NO: 1243374
ccuaucuugugauuugcca

SEQ ID NO: 1412415 - RNA, 19 nt, Artificial Sequence
  Description of Artificial Sequence: Synthetic oligonucleotide
  Antisense strand to SEQ ID NO: 1412414
uggcaaaucacaagauagg

SEQ ID NO: 1412416 - RNA, 19 nt, Artificial Sequence
  Description of Artificial Sequence: Synthetic oligonucleotide
  Sense strand starting at position 779 of SEQ ID NO: 1243374
ucuaguuggcaguaaaugu

SEQ ID NO: 1412417 - RNA, 19 nt, Artificial Sequence
  Description of Artificial Sequence: Synthetic oligonucleotide
  Antisense strand to SEQ ID NO: 1412416
acauuuacugccaacuaga

SEQ ID NO: 1412418 - RNA, 19 nt, Artificial Sequence
  Description of Artificial Sequence: Synthetic oligonucleotide
  Sense strand starting at position 806 of SEQ ID NO: 1243374
gugagccuccacuguuaaa

SEQ ID NO: 1412419 - RNA, 19 nt, Artificial Sequence
  Description of Artificial Sequence: Synthetic oligonucleotide
  Antisense strand to SEQ ID NO: 1412418
uuuaacaguggaggcucac

SEQ ID NO: 1412420 - RNA, 19 nt, Artificial Sequence
  Description of Artificial Sequence: Synthetic oligonucleotide
  Sense strand starting at position 822 of SEQ ID NO: 1243374
aaacaagguucguuaacca

SEQ ID NO: 1412421 - RNA, 19 nt, Artificial Sequence
  Description of Artificial Sequence: Synthetic oligonucleotide
  Antisense strand to SEQ ID NO: 1412420
ugguuaacgaaccuuguuu

SEQ ID NO: 1412422 - RNA, 19 nt, Artificial Sequence
  Description of Artificial Sequence: Synthetic oligonucleotide
  Sense strand starting at position 899 of SEQ ID NO: 1243374
auuguugagagccaaugau

SEQ ID NO: 1412423 - RNA, 19 nt, Artificial Sequence
  Description of Artificial Sequence: Synthetic oligonucleotide
  Antisense strand to SEQ ID NO: 1412422
aucauuggcucucaacaau

SEQ ID NO: 1412424 - RNA, 19 nt, Artificial Sequence
  Description of Artificial Sequence: Synthetic oligonucleotide
  Sense strand starting at position 908 of SEQ ID NO: 1243374
agccaaugauggguuaaau

SEQ ID NO: 1412425 - RNA, 19 nt, Artificial Sequence
  Description of Artificial Sequence: Synthetic oligonucleotide
  Antisense strand to SEQ ID NO: 1412424
auuuaacccaucauuggcu

SEQ ID NO: 1412426 - RNA, 19 nt, Artificial Sequence
  Description of Artificial Sequence: Synthetic oligonucleotide
  Sense strand starting at position 917 of SEQ ID NO: 1243374
uggguuaaauucccauaaa

SEQ ID NO: 1412427 - RNA, 19 nt, Artificial Sequence
  Description of Artificial Sequence: Synthetic oligonucleotide
  Antisense strand to SEQ ID NO: 1412426
uuuaugggaauuuaaccca

SEQ ID NO: 1412428 - RNA, 19 nt, Artificial Sequence
  Description of Artificial Sequence: Synthetic oligonucleotide
  Sense strand starting at position 950 of SEQ ID NO: 1243374
ggugguuugcccgagcaua

SEQ ID NO: 1412429 - RNA, 19 nt, Artificial Sequence
  Description of Artificial Sequence: Synthetic oligonucleotide
  Antisense strand to SEQ ID NO: 1412428
uaugcucgggcaaaccacc

SEQ ID NO: 1412430 - RNA, 19 nt, Artificial Sequence
  Description of Artificial Sequence: Synthetic oligonucleotide
  Sense strand starting at position 1030 of SEQ ID NO: 1243374
gccagaggugagugaguua

SEQ ID NO: 1412431 - RNA, 19 nt, Artificial Sequence
  Description of Artificial Sequence: Synthetic oligonucleotide
  Antisense strand to SEQ ID NO: 1412430
uaacucacucaccucuggc

SEQ ID NO: 1412432 - RNA, 19 nt, Artificial Sequence
  Description of Artificial Sequence: Synthetic oligonucleotide
  Sense strand starting at position 1102 of SEQ ID NO: 1243374
guucgcucucccucaaguu

SEQ ID NO: 1412433 - RNA, 19 nt, Artificial Sequence
  Description of Artificial Sequence: Synthetic oligonucleotide
  Antisense strand to SEQ ID NO: 1412432
aacuugagggagagcgaac

SEQ ID NO: 1412434 - RNA, 19 nt, Artificial Sequence
  Description of Artificial Sequence: Synthetic oligonucleotide
  Sense strand starting at position 1119 of SEQ ID NO: 1243374
uucuuagugucagcuuauc

SEQ ID NO: 1412435 - RNA, 19 nt, Artificial Sequence
  Description of Artificial Sequence: Synthetic oligonucleotide
  Antisense strand to SEQ ID NO: 1412434
gauaagcugacacuaagaa

SEQ ID NO: 1412436 - RNA, 19 nt, Artificial Sequence
  Description of Artificial Sequence: Synthetic oligonucleotide
  Sense strand starting at position 2117 of SEQ ID NO: 1243374
ugcagaaguuguccgauca

SEQ ID NO: 1412437 - RNA, 19 nt, Artificial Sequence
  Description of Artificial Sequence: Synthetic oligonucleotide
  Antisense strand to SEQ ID NO: 1412436
ugaucggacaacuucugca

SEQ ID NO: 1412438 - RNA, 19 nt, Artificial Sequence
  Description of Artificial Sequence: Synthetic oligonucleotide
  Sense strand starting at position 2118 of SEQ ID NO: 1243374
gcagaaguuguccgaucac

SEQ ID NO: 1412439 - RNA, 19 nt, Artificial Sequence
  Description of Artificial Sequence: Synthetic oligonucleotide
  Antisense strand to SEQ ID NO: 1412438
gugaucggacaacuucugc

SEQ ID NO: 1412440 - RNA, 19 nt, Artificial Sequence
  Description of Artificial Sequence: Synthetic oligonucleotide
  Sense strand starting at position 2230 of SEQ ID NO: 1243374
ugaccucuaccgugcaauu

SEQ ID NO: 1412441 - RNA, 19 nt, Artificial Sequence
  Description of Artificial Sequence: Synthetic oligonucleotide
  Antisense strand to SEQ ID NO: 1412440
aauugcacgguagagguca

SEQ ID NO: 1412442 - RNA, 19 nt, Artificial Sequence
  Description of Artificial Sequence: Synthetic oligonucleotide
  Sense strand starting at position 2401 of SEQ ID NO: 1243374
uguacuuaagcucaauagu

SEQ ID NO: 1412443 - RNA, 19 nt, Artificial Sequence
  Description of Artificial Sequence: Synthetic oligonucleotide
  Antisense strand to SEQ ID NO: 1412442
acuauugagcuuaaguaca

SEQ ID NO: 1412444 - RNA, 19 nt, Artificial Sequence
  Description of Artificial Sequence: Synthetic oligonucleotide
  Sense strand starting at position 2473 of SEQ ID NO: 1243374
accaacuaggugugauacu

SEQ ID NO: 1412445 - RNA, 19 nt, Artificial Sequence
  Description of Artificial Sequence: Synthetic oligonucleotide
  Antisense strand to SEQ ID NO: 1412444
aguaucacaccuaguuggu

SEQ ID NO: 1412446 - RNA, 19 nt, Artificial Sequence
  Description of Artificial Sequence: Synthetic oligonucleotide
  Sense strand starting at position 2482 of SEQ ID NO: 1243374
gugugauacuaugugguua

SEQ ID NO: 1412447 - RNA, 19 nt, Artificial Sequence
  Description of Artificial Sequence: Synthetic oligonucleotide
  Antisense strand to SEQ ID NO: 1412446
uaaccacauaguaucacac

SEQ ID NO: 1412448 - RNA, 19 nt, Artificial Sequence
  Description of Artificial Sequence: Synthetic oligonucleotide
  Sense strand starting at position 2483 of SEQ ID NO: 1243374
ugugauacuaugugguuaa

SEQ ID NO: 1412449 - RNA, 19 nt, Artificial Sequence
  Description of Artificial Sequence: Synthetic oligonucleotide
  Antisense strand to SEQ ID NO: 1412448
uuaaccacauaguaucaca

SEQ ID NO: 1412450 - RNA, 19 nt, Artificial Sequence
  Description of Artificial Sequence: Synthetic oligonucleotide
  Sense strand starting at position 2486 of SEQ ID NO: 1243374
gauacuaugugguuaagug

SEQ ID NO: 1412451 - RNA, 19 nt, Artificial Sequence
  Description of Artificial Sequence: Synthetic oligonucleotide
  Antisense strand to SEQ ID NO: 1412450
cacuuaaccacauaguauc

SEQ ID NO: 1412452 - RNA, 19 nt, Artificial Sequence
  Description of Artificial Sequence: Synthetic oligonucleotide
  Sense strand starting at position 2487 of SEQ ID NO: 1243374
auacuaugugguuaaguga

SEQ ID NO: 1412453 - RNA, 19 nt, Artificial Sequence
  Description of Artificial Sequence: Synthetic oligonucleotide
  Antisense strand to SEQ ID NO: 1412452
ucacuuaaccacauaguau

SEQ ID NO: 1412454 - RNA, 19 nt, Artificial Sequence
  Description of Artificial Sequence: Synthetic oligonucleotide
  Sense strand starting at position 2490 of SEQ ID NO: 1243374
cuaugugguuaagugacau

SEQ ID NO: 1412455 - RNA, 19 nt, Artificial Sequence
  Description of Artificial Sequence: Synthetic oligonucleotide
  Antisense strand to SEQ ID NO: 1412454
augucacuuaaccacauag

SEQ ID NO: 1412456 - RNA, 19 nt, Artificial Sequence
  Description of Artificial Sequence: Synthetic oligonucleotide
  Sense strand starting at position 2496 of SEQ ID NO: 1243374
gguuaagugacaugcagaa

SEQ ID NO: 1412457 - RNA, 19 nt, Artificial Sequence
  Description of Artificial Sequence: Synthetic oligonucleotide
  Antisense strand to SEQ ID NO: 1412456
uucugcaugucacuuaacc

SEQ ID NO: 1412458 - RNA, 19 nt, Artificial Sequence
  Description of Artificial Sequence: Synthetic oligonucleotide
  Sense strand starting at position 2640 of SEQ ID NO: 1243374
uuuguaaucucguuuacuu

SEQ ID NO: 1412459 - RNA, 19 nt, Artificial Sequence
  Description of Artificial Sequence: Synthetic oligonucleotide
  Antisense strand to SEQ ID NO: 1412458
aaguaaacgagauuacaaa

SEQ ID NO: 1412460 - RNA, 19 nt, Artificial Sequence
  Description of Artificial Sequence: Synthetic oligonucleotide
  Sense strand starting at position 2673 of SEQ ID NO: 1243374
agggaaccaugucuucuua

SEQ ID NO: 1412461 - RNA, 19 nt, Artificial Sequence
  Description of Artificial Sequence: Synthetic oligonucleotide
  Antisense strand to SEQ ID NO: 1412460
uaagaagacaugguucccu

SEQ ID NO: 1412462 - RNA, 19 nt, Artificial Sequence
  Description of Artificial Sequence: Synthetic oligonucleotide
  Sense strand starting at position 2675 of SEQ ID NO: 1243374
ggaaccaugucuucuuaaa

SEQ ID NO: 1412463 - RNA, 19 nt, Artificial Sequence
  Description of Artificial Sequence: Synthetic oligonucleotide
  Antisense strand to SEQ ID NO: 1412462
uuuaagaagacaugguucc

SEQ ID NO: 1412464 - RNA, 19 nt, Artificial Sequence
  Description of Artificial Sequence: Synthetic oligonucleotide
  Sense strand starting at position 2719 of SEQ ID NO: 1243374
caaggauauuugcagaaug

SEQ ID NO: 1412465 - RNA, 19 nt, Artificial Sequence
  Description of Artificial Sequence: Synthetic oligonucleotide
  Antisense strand to SEQ ID NO: 1412464
cauucugcaaauauccuug

SEQ ID NO: 1412466 - RNA, 19 nt, Artificial Sequence
  Description of Artificial Sequence: Synthetic oligonucleotide
  Sense strand starting at position 2743 of SEQ ID NO: 1243374
gucuuaggguucuucagag

SEQ ID NO: 1412467 - RNA, 19 nt, Artificial Sequence
  Description of Artificial Sequence: Synthetic oligonucleotide
  Antisense strand to SEQ ID NO: 1412466
cucugaagaacccuaagac

SEQ ID NO: 1412468 - RNA, 19 nt, Artificial Sequence
  Description of Artificial Sequence: Synthetic oligonucleotide
  Sense strand starting at position 2811 of SEQ ID NO: 1243374
agggacuggccacgagauu

SEQ ID NO: 1412469 - RNA, 19 nt, Artificial Sequence
  Description of Artificial Sequence: Synthetic oligonucleotide
  Antisense strand to SEQ ID NO: 1412468
aaucucguggccagucccu

SEQ ID NO: 1412470 - RNA, 19 nt, Artificial Sequence
  Description of Artificial Sequence: Synthetic oligonucleotide
  Sense strand starting at position 2812 of SEQ ID NO: 1243374
gggacuggccacgagauua

SEQ ID NO: 1412471 - RNA, 19 nt, Artificial Sequence
  Description of Artificial Sequence: Synthetic oligonucleotide
  Antisense strand to SEQ ID NO: 1412470
uaaucucguggccaguccc

SEQ ID NO: 1412472 - RNA, 19 nt, Artificial Sequence
  Description of Artificial Sequence: Synthetic oligonucleotide
  Sense strand starting at position 2922 of SEQ ID NO: 1243374
gacccagaaucagugguau

SEQ ID NO: 1412473 - RNA, 19 nt, Artificial Sequence
  Description of Artificial Sequence: Synthetic oligonucleotide
  Antisense strand to SEQ ID NO: 1412472
auaccacugauucuggguc

SEQ ID NO: 1412474 - RNA, 19 nt, Artificial Sequence
  Description of Artificial Sequence: Synthetic oligonucleotide
  Sense strand starting at position 2934 of SEQ ID NO: 1243374
gugguauaaaccugagauu

SEQ ID NO: 1412475 - RNA, 19 nt, Artificial Sequence
  Description of Artificial Sequence: Synthetic oligonucleotide
  Antisense strand to SEQ ID NO: 1412474
aaucucagguuuauaccac

SEQ ID NO: 1412476 - RNA, 19 nt, Artificial Sequence
  Description of Artificial Sequence: Synthetic oligonucleotide
  Sense strand starting at position 2937 of SEQ ID NO: 1243374
guauaaaccugagauugaa

SEQ ID NO: 1412477 - RNA, 19 nt, Artificial Sequence
  Description of Artificial Sequence: Synthetic oligonucleotide
  Antisense strand to SEQ ID NO: 1412476
uucaaucucagguuuauac

SEQ ID NO: 1412478 - RNA, 19 nt, Artificial Sequence
  Description of Artificial Sequence: Synthetic oligonucleotide
  Sense strand starting at position 295 of SEQ ID NO: 1243375
uuaagcaagugcuuuaaua

SEQ ID NO: 1412479 - RNA, 19 nt, Artificial Sequence
  Description of Artificial Sequence: Synthetic oligonucleotide
  Antisense strand to SEQ ID NO: 1412478
uauuaaagcacuugcuuaa

SEQ ID NO: 1412480 - RNA, 19 nt, Artificial Sequence
  Description of Artificial Sequence: Synthetic oligonucleotide
  Sense strand starting at position 305 of SEQ ID NO: 1243375
gcuuuaauaucucuaggcu

SEQ ID NO: 1412481 - RNA, 19 nt, Artificial Sequence
  Description of Artificial Sequence: Synthetic oligonucleotide
  Antisense strand to SEQ ID NO: 1412480
agccuagagauauuaaagc

SEQ ID NO: 1412482 - RNA, 19 nt, Artificial Sequence
  Description of Artificial Sequence: Synthetic oligonucleotide
  Sense strand starting at position 408 of SEQ ID NO: 1243375
cugacuggugccuaaguga

SEQ ID NO: 1412483 - RNA, 19 nt, Artificial Sequence
  Description of Artificial Sequence: Synthetic oligonucleotide
  Antisense strand to SEQ ID NO: 1412482
ucacuuaggcaccagucag

SEQ ID NO: 1412484 - RNA, 19 nt, Artificial Sequence
  Description of Artificial Sequence: Synthetic oligonucleotide
  Sense strand starting at position 434 of SEQ ID NO: 1243375
gaugguuuacgugauucuu

SEQ ID NO: 1412485 - RNA, 19 nt, Artificial Sequence
  Description of Artificial Sequence: Synthetic oligonucleotide
  Antisense strand to SEQ ID NO: 1412484
aagaaucacguaaaccauc

SEQ ID NO: 1412486 - RNA, 19 nt, Artificial Sequence
  Description of Artificial Sequence: Synthetic oligonucleotide
  Sense strand starting at position 600 of SEQ ID NO: 1243375
gcacuauuggcccagagac

SEQ ID NO: 1412487 - RNA, 19 nt, Artificial Sequence
  Description of Artificial Sequence: Synthetic oligonucleotide
  Antisense strand to SEQ ID NO: 1412486
gucucugggccaauagugc

SEQ ID NO: 1412488 - RNA, 19 nt, Artificial Sequence
  Description of Artificial Sequence: Synthetic oligonucleotide
  Sense strand starting at position 634 of SEQ ID NO: 1243375
aaaugaugccucggcuuga

SEQ ID NO: 1412489 - RNA, 19 nt, Artificial Sequence
  Description of Artificial Sequence: Synthetic oligonucleotide
  Antisense strand to SEQ ID NO: 1412488
ucaagccgaggcaucauuu

SEQ ID NO: 1412490 - RNA, 19 nt, Artificial Sequence
  Description of Artificial Sequence: Synthetic oligonucleotide
  Sense strand starting at position 731 of SEQ ID NO: 1243375
cccuuaugguugucucuua

SEQ ID NO: 1412491 - RNA, 19 nt, Artificial Sequence
  Description of Artificial Sequence: Synthetic oligonucleotide
  Antisense strand to SEQ ID NO: 1412490
uaagagacaaccauaaggg

SEQ ID NO: 1412492 - RNA, 19 nt, Artificial Sequence
  Description of Artificial Sequence: Synthetic oligonucleotide
  Sense strand starting at position 792 of SEQ ID NO: 1243375
gaaagaguugugcacuggu

SEQ ID NO: 1412493 - RNA, 19 nt, Artificial Sequence
  Description of Artificial Sequence: Synthetic oligonucleotide
  Antisense strand to SEQ ID NO: 1412492
accagugcacaacucuuuc

SEQ ID NO: 1412494 - RNA, 19 nt, Artificial Sequence
  Description of Artificial Sequence: Synthetic oligonucleotide
  Sense strand starting at position 1455 of SEQ ID NO: 1243375
gcagguuuccuggcugcua

SEQ ID NO: 1412495 - RNA, 19 nt, Artificial Sequence
  Description of Artificial Sequence: Synthetic oligonucleotide
  Antisense strand to SEQ ID NO: 1412494
uagcagccaggaaaccugc

SEQ ID NO: 1412496 - RNA, 19 nt, Artificial Sequence
  Description of Artificial Sequence: Synthetic oligonucleotide
  Sense strand starting at position 1516 of SEQ ID NO: 1243375
ccaugaguccucuaaggcu

SEQ ID NO: 1412497 - RNA, 19 nt, Artificial Sequence
  Description of Artificial Sequence: Synthetic oligonucleotide
  Antisense strand to SEQ ID NO: 1412496
agccuuagaggacucaugg

SEQ ID NO: 1412498 - RNA, 19 nt, Artificial Sequence
  Description of Artificial Sequence: Synthetic oligonucleotide
  Sense strand starting at position 1868 of SEQ ID NO: 1243375
guccgggaggagugucaua

SEQ ID NO: 1412499 - RNA, 19 nt, Artificial Sequence
  Description of Artificial Sequence: Synthetic oligonucleotide
  Antisense strand to SEQ ID NO: 1412498
uaugacacuccucccggac

SEQ ID NO: 1412500 - RNA, 19 nt, Artificial Sequence
  Description of Artificial Sequence: Synthetic oligonucleotide
  Sense strand starting at position 2002 of SEQ ID NO: 1243375
agcccauuggcuggugaaa

SEQ ID NO: 1412501 - RNA, 19 nt, Artificial Sequence
  Description of Artificial Sequence: Synthetic oligonucleotide
  Antisense strand to SEQ ID NO: 1412500
uuucaccagccaaugggcu

SEQ ID NO: 1412502 - RNA, 19 nt, Artificial Sequence
  Description of Artificial Sequence: Synthetic oligonucleotide
  Sense strand starting at position 2011 of SEQ ID NO: 1243375
gcuggugaaacaugguaua

SEQ ID NO: 1412503 - RNA, 19 nt, Artificial Sequence
  Description of Artificial Sequence: Synthetic oligonucleotide
  Antisense strand to SEQ ID NO: 1412502
uauaccauguuucaccagc

SEQ ID NO: 1412504 - RNA, 19 nt, Artificial Sequence
  Description of Artificial Sequence: Synthetic oligonucleotide
  Sense strand starting at position 2179 of SEQ ID NO: 1243375
cccguugaucucuggaauu

SEQ ID NO: 1412505 - RNA, 19 nt, Artificial Sequence
  Description of Artificial Sequence: Synthetic oligonucleotide
  Antisense strand to SEQ ID NO: 1412504
aauuccagagaucaacggg

SEQ ID NO: 1412506 - RNA, 19 nt, Artificial Sequence
  Description of Artificial Sequence: Synthetic oligonucleotide
  Sense strand starting at position 2390 of SEQ ID NO: 1243375
ugagcaaagcuguauccau

SEQ ID NO: 1412507 - RNA, 19 nt, Artificial Sequence
  Description of Artificial Sequence: Synthetic oligonucleotide
  Antisense strand to SEQ ID NO: 1412506
auggauacagcuuugcuca

SEQ ID NO: 1412508 - RNA, 19 nt, Artificial Sequence
  Description of Artificial Sequence: Synthetic oligonucleotide
  Sense strand starting at position 2739 of SEQ ID NO: 1243375
guguauucuccagugccuu

SEQ ID NO: 1412509 - RNA, 19 nt, Artificial Sequence
  Description of Artificial Sequence: Synthetic oligonucleotide
  Antisense strand to SEQ ID NO: 1412508
aaggcacuggagaauacac

SEQ ID NO: 1412510 - RNA, 19 nt, Artificial Sequence
  Description of Artificial Sequence: Synthetic oligonucleotide
  Sense strand starting at position 2793 of SEQ ID NO: 1243375
acugaugcauuucugugua

SEQ ID NO: 1412511 - RNA, 19 nt, Artificial Sequence
  Description of Artificial Sequence: Synthetic oligonucleotide
  Antisense strand to SEQ ID NO: 1412510
uacacagaaaugcaucagu

SEQ ID NO: 1412512 - RNA, 19 nt, Artificial Sequence
  Description of Artificial Sequence: Synthetic oligonucleotide
  Sense strand starting at position 2795 of SEQ ID NO: 1243375
ugaugcauuucuguguaga

SEQ ID NO: 1412513 - RNA, 19 nt, Artificial Sequence
  Description of Artificial Sequence: Synthetic oligonucleotide
  Antisense strand to SEQ ID NO: 1412512
ucuacacagaaaugcauca

SEQ ID NO: 1412514 - RNA, 19 nt, Artificial Sequence
  Description of Artificial Sequence: Synthetic oligonucleotide
  Sense strand starting at position 2796 of SEQ ID NO: 1243375
gaugcauuucuguguagau

SEQ ID NO: 1412515 - RNA, 19 nt, Artificial Sequence
  Description of Artificial Sequence: Synthetic oligonucleotide
  Antisense strand to SEQ ID NO: 1412514
aucuacacagaaaugcauc

SEQ ID NO: 1412516 - RNA, 19 nt, Artificial Sequence
  Description of Artificial Sequence: Synthetic oligonucleotide
  Sense strand starting at position 2797 of SEQ ID NO: 1243375
augcauuucuguguagaua

SEQ ID NO: 1412517 - RNA, 19 nt, Artificial Sequence
  Description of Artificial Sequence: Synthetic oligonucleotide
  Antisense strand to SEQ ID NO: 1412516
uaucuacacagaaaugcau

SEQ ID NO: 1412518 - RNA, 19 nt, Artificial Sequence
  Description of Artificial Sequence: Synthetic oligonucleotide
  Sense strand starting at position 2872 of SEQ ID NO: 1243375
uaaguucugggauaccagu

SEQ ID NO: 1412519 - RNA, 19 nt, Artificial Sequence
  Description of Artificial Sequence: Synthetic oligonucleotide
  Antisense strand to SEQ ID NO: 1412518
acugguaucccagaacuua

SEQ ID NO: 1412520 - RNA, 19 nt, Artificial Sequence
  Description of Artificial Sequence: Synthetic oligonucleotide
  Sense strand starting at position 3205 of SEQ ID NO: 1243375
gguggccaucaugaucaau

SEQ ID NO: 1412521 - RNA, 19 nt, Artificial Sequence
  Description of Artificial Sequence: Synthetic oligonucleotide
  Antisense strand to SEQ ID NO: 1412520
auugaucaugauggccacc

SEQ ID NO: 1412522 - RNA, 19 nt, Artificial Sequence
  Description of Artificial Sequence: Synthetic oligonucleotide
  Sense strand starting at position 3258 of SEQ ID NO: 1243375
ccauguacuuaucugaggu

SEQ ID NO: 1412523 - RNA, 19 nt, Artificial Sequence
  Description of Artificial Sequence: Synthetic oligonucleotide
  Antisense strand to SEQ ID NO: 1412522
accucagauaaguacaugg

SEQ ID NO: 1412524 - RNA, 19 nt, Artificial Sequence
  Description of Artificial Sequence: Synthetic oligonucleotide
  Sense strand starting at position 3274 of SEQ ID NO: 1243375
ggugaaauugcugggucuc

SEQ ID NO: 1412525 - RNA, 19 nt, Artificial Sequence
  Description of Artificial Sequence: Synthetic oligonucleotide
  Antisense strand to SEQ ID NO: 1412524
gagacccagcaauuucacc

SEQ ID NO: 1412526 - RNA, 19 nt, Artificial Sequence
  Description of Artificial Sequence: Synthetic oligonucleotide
  Sense strand starting at position 3275 of SEQ ID NO: 1243375
gugaaauugcugggucuca

SEQ ID NO: 1412527 - RNA, 19 nt, Artificial Sequence
  Description of Artificial Sequence: Synthetic oligonucleotide
  Antisense strand to SEQ ID NO: 1412526
ugagacccagcaauuucac

SEQ ID NO: 1412528 - RNA, 19 nt, Artificial Sequence
  Description of Artificial Sequence: Synthetic oligonucleotide
  Sense strand starting at position 3285 of SEQ ID NO: 1243375
ugggucucagaguauagau

SEQ ID NO: 1412529 - RNA, 19 nt, Artificial Sequence
  Description of Artificial Sequence: Synthetic oligonucleotide
  Antisense strand to SEQ ID NO: 1412528
aucuauacucugagaccca

SEQ ID NO: 1412530 - RNA, 19 nt, Artificial Sequence
  Description of Artificial Sequence: Synthetic oligonucleotide
  Sense strand starting at position 3316 of SEQ ID NO: 1243375
gcuagauuacgccaaauau

SEQ ID NO: 1412531 - RNA, 19 nt, Artificial Sequence
  Description of Artificial Sequence: Synthetic oligonucleotide
  Antisense strand to SEQ ID NO: 1412530
auauuuggcguaaucuagc

SEQ ID NO: 1412532 - RNA, 19 nt, Artificial Sequence
  Description of Artificial Sequence: Synthetic oligonucleotide
  Sense strand starting at position 3378 of SEQ ID NO: 1243375
augagaauuccaggugcuc

SEQ ID NO: 1412533 - RNA, 19 nt, Artificial Sequence
  Description of Artificial Sequence: Synthetic oligonucleotide
  Antisense strand to SEQ ID NO: 1412532
gagcaccuggaauucucau

SEQ ID NO: 1412534 - RNA, 19 nt, Artificial Sequence
  Description of Artificial Sequence: Synthetic oligonucleotide
  Sense strand starting at position 3412 of SEQ ID NO: 1243375
acuugauauggucauuauu

SEQ ID NO: 1412535 - RNA, 19 nt, Artificial Sequence
  Description of Artificial Sequence: Synthetic oligonucleotide
  Antisense strand to SEQ ID NO: 1412534
aauaaugaccauaucaagu

SEQ ID NO: 1412536 - RNA, 19 nt, Artificial Sequence
  Description of Artificial Sequence: Synthetic oligonucleotide
  Sense strand starting at position 3578 of SEQ ID NO: 1243375
augcuuggcuaauaaauuu

SEQ ID NO: 1412537 - RNA, 19 nt, Artificial Sequence
  Description of Artificial Sequence: Synthetic oligonucleotide
  Antisense strand to SEQ ID NO: 1412536
aaauuuauuagccaagcau

SEQ ID NO: 1412538 - RNA, 19 nt, Artificial Sequence
  Description of Artificial Sequence: Synthetic oligonucleotide
  Sense strand starting at position 3599 of SEQ ID NO: 1243375
uuuguuucuggagggauag

SEQ ID NO: 1412539 - RNA, 19 nt, Artificial Sequence
  Description of Artificial Sequence: Synthetic oligonucleotide
  Antisense strand to SEQ ID NO: 1412538
cuaucccuccagaaacaaa

SEQ ID NO: 1412540 - RNA, 19 nt, Artificial Sequence
  Description of Artificial Sequence: Synthetic oligonucleotide
  Sense strand starting at position 3600 of SEQ ID NO: 1243375
uuguuucuggagggauaga

SEQ ID NO: 1412541 - RNA, 19 nt, Artificial Sequence
  Description of Artificial Sequence: Synthetic oligonucleotide
  Antisense strand to SEQ ID NO: 1412540
ucuaucccuccagaaacaa

SEQ ID NO: 1412542 - RNA, 19 nt, Artificial Sequence
  Description of Artificial Sequence: Synthetic oligonucleotide
  Sense strand starting at position 3700 of SEQ ID NO: 1243375
ugagauuaccaaugugagc

SEQ ID NO: 1412543 - RNA, 19 nt, Artificial Sequence
  Description of Artificial Sequence: Synthetic oligonucleotide
  Antisense strand to SEQ ID NO: 1412542
gcucacauugguaaucuca

SEQ ID NO: 1412544 - RNA, 19 nt, Artificial Sequence
  Description of Artificial Sequence: Synthetic oligonucleotide
  Sense strand starting at position 3748 of SEQ ID NO: 1243375
aguguaccacugcauuaau

SEQ ID NO: 1412545 - RNA, 19 nt, Artificial Sequence
  Description of Artificial Sequence: Synthetic oligonucleotide
  Antisense strand to SEQ ID NO: 1412544
auuaaugcagugguacacu

SEQ ID NO: 1412546 - RNA, 19 nt, Artificial Sequence
  Description of Artificial Sequence: Synthetic oligonucleotide
  Sense strand starting at position 3771 of SEQ ID NO: 1243375
aguggucucucaucaaggu

SEQ ID NO: 1412547 - RNA, 19 nt, Artificial Sequence
  Description of Artificial Sequence: Synthetic oligonucleotide
  Antisense strand to SEQ ID NO: 1412546
accuugaugagagaccacu

SEQ ID NO: 1412548 - RNA, 19 nt, Artificial Sequence
  Description of Artificial Sequence: Synthetic oligonucleotide
  Sense strand starting at position 3772 of SEQ ID NO: 1243375
guggucucucaucaagguu

SEQ ID NO: 1412549 - RNA, 19 nt, Artificial Sequence
  Description of Artificial Sequence: Synthetic oligonucleotide
  Antisense strand to SEQ ID NO: 1412548
aaccuugaugagagaccac

SEQ ID NO: 1412550 - RNA, 19 nt, Artificial Sequence
  Description of Artificial Sequence: Synthetic oligonucleotide
  Sense strand starting at position 3870 of SEQ ID NO: 1243375
ugaagugucuguucaaggu

SEQ ID NO: 1412551 - RNA, 19 nt, Artificial Sequence
  Description of Artificial Sequence: Synthetic oligonucleotide
  Antisense strand to SEQ ID NO: 1412550
accuugaacagacacuuca

SEQ ID NO: 1412552 - RNA, 19 nt, Artificial Sequence
  Description of Artificial Sequence: Synthetic oligonucleotide
  Sense strand starting at position 3886 of SEQ ID NO: 1243375
ggucauugcucauuauuga

SEQ ID NO: 1412553 - RNA, 19 nt, Artificial Sequence
  Description of Artificial Sequence: Synthetic oligonucleotide
  Antisense strand to SEQ ID NO: 1412552
ucaauaaugagcaaugacc

SEQ ID NO: 1412554 - RNA, 19 nt, Artificial Sequence
  Description of Artificial Sequence: Synthetic oligonucleotide
  Sense strand starting at position 3887 of SEQ ID NO: 1243375
gucauugcucauuauugac

SEQ ID NO: 1412555 - RNA, 19 nt, Artificial Sequence
  Description of Artificial Sequence: Synthetic oligonucleotide
  Antisense strand to SEQ ID NO: 1412554
gucaauaaugagcaaugac

SEQ ID NO: 1412556 - RNA, 19 nt, Artificial Sequence
  Description of Artificial Sequence: Synthetic oligonucleotide
  Sense strand starting at position 3893 of SEQ ID NO: 1243375
gcucauuauugacuugauu

SEQ ID NO: 1412557 - RNA, 19 nt, Artificial Sequence
  Description of Artificial Sequence: Synthetic oligonucleotide
  Antisense strand to SEQ ID NO: 1412556
aaucaagucaauaaugagc

SEQ ID NO: 1412558 - RNA, 19 nt, Artificial Sequence
  Description of Artificial Sequence: Synthetic oligonucleotide
  Sense strand starting at position 44 of SEQ ID NO: 1243376
gguccagaacugugagcuu

SEQ ID NO: 1412559 - RNA, 19 nt, Artificial Sequence
  Description of Artificial Sequence: Synthetic oligonucleotide
  Antisense strand to SEQ ID NO: 1412558
aagcucacaguucuggacc

SEQ ID NO: 1412560 - RNA, 19 nt, Artificial Sequence
  Description of Artificial Sequence: Synthetic oligonucleotide
  Sense strand starting at position 65 of SEQ ID NO: 1243376
ggcaaagacuccuugguca

SEQ ID NO: 1412561 - RNA, 19 nt, Artificial Sequence
  Description of Artificial Sequence: Synthetic oligonucleotide
  Antisense strand to SEQ ID NO: 1412560
ugaccaaggagucuuugcc

SEQ ID NO: 1412562 - RNA, 19 nt, Artificial Sequence
  Description of Artificial Sequence: Synthetic oligonucleotide
  Sense strand starting at position 69 of SEQ ID NO: 1243376
aagacuccuuggucauagu

SEQ ID NO: 1412563 - RNA, 19 nt, Artificial Sequence
  Description of Artificial Sequence: Synthetic oligonucleotide
  Antisense strand to SEQ ID NO: 1412562
acuaugaccaaggagucuu

SEQ ID NO: 1412564 - RNA, 19 nt, Artificial Sequence
  Description of Artificial Sequence: Synthetic oligonucleotide
  Sense strand starting at position 70 of SEQ ID NO: 1243376
agacuccuuggucauagua

SEQ ID NO: 1412565 - RNA, 19 nt, Artificial Sequence
  Description of Artificial Sequence: Synthetic oligonucleotide
  Antisense strand to SEQ ID NO: 1412564
uacuaugaccaaggagucu

SEQ ID NO: 1412566 - RNA, 19 nt, Artificial Sequence
  Description of Artificial Sequence: Synthetic oligonucleotide
  Sense strand starting at position 72 of SEQ ID NO: 1243376
acuccuuggucauaguaaa

SEQ ID NO: 1412567 - RNA, 19 nt, Artificial Sequence
  Description of Artificial Sequence: Synthetic oligonucleotide
  Antisense strand to SEQ ID NO: 1412566
uuuacuaugaccaaggagu

SEQ ID NO: 1412568 - RNA, 19 nt, Artificial Sequence
  Description of Artificial Sequence: Synthetic oligonucleotide
  Sense strand starting at position 170 of SEQ ID NO: 1243376
ugagcucuugcagaaacaa

SEQ ID NO: 1412569 - RNA, 19 nt, Artificial Sequence
  Description of Artificial Sequence: Synthetic oligonucleotide
  Antisense strand to SEQ ID NO: 1412568
uuguuucugcaagagcuca

SEQ ID NO: 1412570 - RNA, 19 nt, Artificial Sequence
  Description of Artificial Sequence: Synthetic oligonucleotide
  Sense strand starting at position 199 of SEQ ID NO: 1243376
cucugagauucugacaaug

SEQ ID NO: 1412571 - RNA, 19 nt, Artificial Sequence
  Description of Artificial Sequence: Synthetic oligonucleotide
  Antisense strand to SEQ ID NO: 1412570
cauugucagaaucucagag

SEQ ID NO: 1412572 - RNA, 19 nt, Artificial Sequence
  Description of Artificial Sequence: Synthetic oligonucleotide
  Sense strand starting at position 201 of SEQ ID NO: 1243376
cugagauucugacaaugca

SEQ ID NO: 1412573 - RNA, 19 nt, Artificial Sequence
  Description of Artificial Sequence: Synthetic oligonucleotide
  Antisense strand to SEQ ID NO: 1412572
ugcauugucagaaucucag

SEQ ID NO: 1412574 - RNA, 19 nt, Artificial Sequence
  Description of Artificial Sequence: Synthetic oligonucleotide
  Sense strand starting at position 211 of SEQ ID NO: 1243376
gacaaugcaccucgugaua

SEQ ID NO: 1412575 - RNA, 19 nt, Artificial Sequence
  Description of Artificial Sequence: Synthetic oligonucleotide
  Antisense strand to SEQ ID NO: 1412574
uaucacgaggugcauuguc

SEQ ID NO: 1412576 - RNA, 19 nt, Artificial Sequence
  Description of Artificial Sequence: Synthetic oligonucleotide
  Sense strand starting at position 272 of SEQ ID NO: 1243376
auuacaagccuaggagaua

SEQ ID NO: 1412577 - RNA, 19 nt, Artificial Sequence
  Description of Artificial Sequence: Synthetic oligonucleotide
  Antisense strand to SEQ ID NO: 1412576
uaucuccuaggcuuguaau

SEQ ID NO: 1412578 - RNA, 19 nt, Artificial Sequence
  Description of Artificial Sequence: Synthetic oligonucleotide
  Sense strand starting at position 322 of SEQ ID NO: 1243376
cucccagaauggucgagaa

SEQ ID NO: 1412579 - RNA, 19 nt, Artificial Sequence
  Description of Artificial Sequence: Synthetic oligonucleotide
  Antisense strand to SEQ ID NO: 1412578
uucucgaccauucugggag

SEQ ID NO: 1412580 - RNA, 19 nt, Artificial Sequence
  Description of Artificial Sequence: Synthetic oligonucleotide
  Sense strand starting at position 334 of SEQ ID NO: 1243376
ucgagaacuuacucuuaaa

SEQ ID NO: 1412581 - RNA, 19 nt, Artificial Sequence
  Description of Artificial Sequence: Synthetic oligonucleotide
  Antisense strand to SEQ ID NO: 1412580
uuuaagaguaaguucucga

SEQ ID NO: 1412582 - RNA, 19 nt, Artificial Sequence
  Description of Artificial Sequence: Synthetic oligonucleotide
  Sense strand starting at position 538 of SEQ ID NO: 1243376
gguggauuaucucccagga

SEQ ID NO: 1412583 - RNA, 19 nt, Artificial Sequence
  Description of Artificial Sequence: Synthetic oligonucleotide
  Antisense strand to SEQ ID NO: 1412582
uccugggagauaauccacc

SEQ ID NO: 1412584 - RNA, 19 nt, Artificial Sequence
  Description of Artificial Sequence: Synthetic oligonucleotide
  Sense strand starting at position 540 of SEQ ID NO: 1243376
uggauuaucucccaggaaa

SEQ ID NO: 1412585 - RNA, 19 nt, Artificial Sequence
  Description of Artificial Sequence: Synthetic oligonucleotide
  Antisense strand to SEQ ID NO: 1412584
uuuccugggagauaaucca

SEQ ID NO: 1412586 - RNA, 19 nt, Artificial Sequence
  Description of Artificial Sequence: Synthetic oligonucleotide
  Sense strand starting at position 732 of SEQ ID NO: 1243376
ccgcucaaccuccagaaau

SEQ ID NO: 1412587 - RNA, 19 nt, Artificial Sequence
  Description of Artificial Sequence: Synthetic oligonucleotide
  Antisense strand to SEQ ID NO: 1412586
auuucuggagguugagcgg

SEQ ID NO: 1412588 - RNA, 19 nt, Artificial Sequence
  Description of Artificial Sequence: Synthetic oligonucleotide
  Sense strand starting at position 993 of SEQ ID NO: 1243376
gguagagucaagggacuaa

SEQ ID NO: 1412589 - RNA, 19 nt, Artificial Sequence
  Description of Artificial Sequence: Synthetic oligonucleotide
  Antisense strand to SEQ ID NO: 1412588
uuagucccuugacucuacc

SEQ ID NO: 1412590 - RNA, 19 nt, Artificial Sequence
  Description of Artificial Sequence: Synthetic oligonucleotide
  Sense strand starting at position 1245 of SEQ ID NO: 1243376
uggaauaugcaaggaucau

SEQ ID NO: 1412591 - RNA, 19 nt, Artificial Sequence
  Description of Artificial Sequence: Synthetic oligonucleotide
  Antisense strand to SEQ ID NO: 1412590
augauccuugcauauucca

SEQ ID NO: 1412592 - RNA, 19 nt, Artificial Sequence
  Description of Artificial Sequence: Synthetic oligonucleotide
  Sense strand starting at position 1251 of SEQ ID NO: 1243376
augcaaggaucaucgaaau

SEQ ID NO: 1412593 - RNA, 19 nt, Artificial Sequence
  Description of Artificial Sequence: Synthetic oligonucleotide
  Antisense strand to SEQ ID NO: 1412592
auuucgaugauccuugcau

SEQ ID NO: 1412594 - RNA, 19 nt, Artificial Sequence
  Description of Artificial Sequence: Synthetic oligonucleotide
  Sense strand starting at position 1468 of SEQ ID NO: 1243376
agacuaugccuguguggaa

SEQ ID NO: 1412595 - RNA, 19 nt, Artificial Sequence
  Description of Artificial Sequence: Synthetic oligonucleotide
  Antisense strand to SEQ ID NO: 1412594
uuccacacaggcauagucu

SEQ ID NO: 1412596 - RNA, 19 nt, Artificial Sequence
  Description of Artificial Sequence: Synthetic oligonucleotide
  Sense strand starting at position 1469 of SEQ ID NO: 1243376
gacuaugccuguguggaaa

SEQ ID NO: 1412597 - RNA, 19 nt, Artificial Sequence
  Description of Artificial Sequence: Synthetic oligonucleotide
  Antisense strand to SEQ ID NO: 1412596
uuuccacacaggcauaguc

SEQ ID NO: 1412598 - RNA, 19 nt, Artificial Sequence
  Description of Artificial Sequence: Synthetic oligonucleotide
  Sense strand starting at position 2154 of SEQ ID NO: 1243376
gcuggagacucaggguaaa

SEQ ID NO: 1412599 - RNA, 19 nt, Artificial Sequence
  Description of Artificial Sequence: Synthetic oligonucleotide
  Antisense strand to SEQ ID NO: 1412598
uuuacccugagucuccagc

SEQ ID NO: 1412600 - RNA, 19 nt, Artificial Sequence
  Description of Artificial Sequence: Synthetic oligonucleotide
  Sense strand starting at position 2232 of SEQ ID NO: 1243376
uccugagguucccacgagu

SEQ ID NO: 1412601 - RNA, 19 nt, Artificial Sequence
  Description of Artificial Sequence: Synthetic oligonucleotide
  Antisense strand to SEQ ID NO: 1412600
acucgugggaaccucagga

SEQ ID NO: 1412602 - RNA, 19 nt, Artificial Sequence
  Description of Artificial Sequence: Synthetic oligonucleotide
  Sense strand starting at position 2235 of SEQ ID NO: 1243376
ugagguucccacgagugau

SEQ ID NO: 1412603 - RNA, 19 nt, Artificial Sequence
  Description of Artificial Sequence: Synthetic oligonucleotide
  Antisense strand to SEQ ID NO: 1412602
aucacucgugggaaccuca

SEQ ID NO: 1412604 - RNA, 19 nt, Artificial Sequence
  Description of Artificial Sequence: Synthetic oligonucleotide
  Sense strand starting at position 2366 of SEQ ID NO: 1243376
ggcgacuucugagcccaga

SEQ ID NO: 1412605 - RNA, 19 nt, Artificial Sequence
  Description of Artificial Sequence: Synthetic oligonucleotide
  Antisense strand to SEQ ID NO: 1412604
ucugggcucagaagucgcc

SEQ ID NO: 1412606 - RNA, 19 nt, Artificial Sequence
  Description of Artificial Sequence: Synthetic oligonucleotide
  Sense strand starting at position 2422 of SEQ ID NO: 1243376
cagggaaaguguuccauaa

SEQ ID NO: 1412607 - RNA, 19 nt, Artificial Sequence
  Description of Artificial Sequence: Synthetic oligonucleotide
  Antisense strand to SEQ ID NO: 1412606
uuauggaacacuuucccug

SEQ ID NO: 1412608 - RNA, 19 nt, Artificial Sequence
  Description of Artificial Sequence: Synthetic oligonucleotide
  Sense strand starting at position 2424 of SEQ ID NO: 1243376
gggaaaguguuccauaagg

SEQ ID NO: 1412609 - RNA, 19 nt, Artificial Sequence
  Description of Artificial Sequence: Synthetic oligonucleotide
  Antisense strand to SEQ ID NO: 1412608
ccuuauggaacacuuuccc

SEQ ID NO: 1412610 - RNA, 19 nt, Artificial Sequence
  Description of Artificial Sequence: Synthetic oligonucleotide
  Sense strand starting at position 2665 of SEQ ID NO: 1243376
ugccuaauucuaggaaggu

SEQ ID NO: 1412611 - RNA, 19 nt, Artificial Sequence
  Description of Artificial Sequence: Synthetic oligonucleotide
  Antisense strand to SEQ ID NO: 1412610
accuuccuagaauuaggca

SEQ ID NO: 1412612 - RNA, 19 nt, Artificial Sequence
  Description of Artificial Sequence: Synthetic oligonucleotide
  Sense strand starting at position 2666 of SEQ ID NO: 1243376
gccuaauucuaggaagguc

SEQ ID NO: 1412613 - RNA, 19 nt, Artificial Sequence
  Description of Artificial Sequence: Synthetic oligonucleotide
  Antisense strand to SEQ ID NO: 1412612
gaccuuccuagaauuaggc

SEQ ID NO: 1412614 - RNA, 19 nt, Artificial Sequence
  Description of Artificial Sequence: Synthetic oligonucleotide
  Sense strand starting at position 2760 of SEQ ID NO: 1243376
gacgccguucucuaccaaa

SEQ ID NO: 1412615 - RNA, 19 nt, Artificial Sequence
  Description of Artificial Sequence: Synthetic oligonucleotide
  Antisense strand to SEQ ID NO: 1412614
uuugguagagaacggcguc

SEQ ID NO: 1412616 - RNA, 19 nt, Artificial Sequence
  Description of Artificial Sequence: Synthetic oligonucleotide
  Sense strand starting at position 2763 of SEQ ID NO: 1243376
gccguucucuaccaaagaa

SEQ ID NO: 1412617 - RNA, 19 nt, Artificial Sequence
  Description of Artificial Sequence: Synthetic oligonucleotide
  Antisense strand to SEQ ID NO: 1412616
uucuuugguagagaacggc

SEQ ID NO: 1412618 - RNA, 19 nt, Artificial Sequence
  Description of Artificial Sequence: Synthetic oligonucleotide
  Sense strand starting at position 2802 of SEQ ID NO: 1243376
agugauacgaucugaauua

SEQ ID NO: 1412619 - RNA, 19 nt, Artificial Sequence
  Description of Artificial Sequence: Synthetic oligonucleotide
  Antisense strand to SEQ ID NO: 1412618
uaauucagaucguaucacu

SEQ ID NO: 1412620 - RNA, 19 nt, Artificial Sequence
  Description of Artificial Sequence: Synthetic oligonucleotide
  Sense strand starting at position 2803 of SEQ ID NO: 1243376
gugauacgaucugaauuag

SEQ ID NO: 1412621 - RNA, 19 nt, Artificial Sequence
  Description of Artificial Sequence: Synthetic oligonucleotide
  Antisense strand to SEQ ID NO: 1412620
cuaauucagaucguaucac

SEQ ID NO: 1412622 - RNA, 19 nt, Artificial Sequence
  Description of Artificial Sequence: Synthetic oligonucleotide
  Sense strand starting at position 2864 of SEQ ID NO: 1243376
cuguaaucccaaggcauga

SEQ ID NO: 1412623 - RNA, 19 nt, Artificial Sequence
  Description of Artificial Sequence: Synthetic oligonucleotide
  Antisense strand to SEQ ID NO: 1412622
ucaugccuugggauuacag

SEQ ID NO: 1412624 - RNA, 19 nt, Artificial Sequence
  Description of Artificial Sequence: Synthetic oligonucleotide
  Sense strand starting at position 3146 of SEQ ID NO: 1243376
auggcucuuccugggauga

SEQ ID NO: 1412625 - RNA, 19 nt, Artificial Sequence
  Description of Artificial Sequence: Synthetic oligonucleotide
  Antisense strand to SEQ ID NO: 1412624
ucaucccaggaagagccau

SEQ ID NO: 1412626 - RNA, 19 nt, Artificial Sequence
  Description of Artificial Sequence: Synthetic oligonucleotide
  Sense strand starting at position 3148 of SEQ ID NO: 1243376
ggcucuuccugggaugaga

SEQ ID NO: 1412627 - RNA, 19 nt, Artificial Sequence
  Description of Artificial Sequence: Synthetic oligonucleotide
  Antisense strand to SEQ ID NO: 1412626
ucucaucccaggaagagcc

SEQ ID NO: 1412628 - RNA, 19 nt, Artificial Sequence
  Description of Artificial Sequence: Synthetic oligonucleotide
  Sense strand starting at position 3150 of SEQ ID NO: 1243376
cucuuccugggaugagaau

SEQ ID NO: 1412629 - RNA, 19 nt, Artificial Sequence
  Description of Artificial Sequence: Synthetic oligonucleotide
  Antisense strand to SEQ ID NO: 1412628
auucucaucccaggaagag

SEQ ID NO: 1412630 - RNA, 19 nt, Artificial Sequence
  Description of Artificial Sequence: Synthetic oligonucleotide
  Sense strand starting at position 3204 of SEQ ID NO: 1243376
ugguuaaggaguuauugca

SEQ ID NO: 1412631 - RNA, 19 nt, Artificial Sequence
  Description of Artificial Sequence: Synthetic oligonucleotide
  Antisense strand to SEQ ID NO: 1412630
ugcaauaacuccuuaacca

SEQ ID NO: 1412632 - RNA, 19 nt, Artificial Sequence
  Description of Artificial Sequence: Synthetic oligonucleotide
  Sense strand starting at position 3594 of SEQ ID NO: 1243376
ggugauggauugaguguga

SEQ ID NO: 1412633 - RNA, 19 nt, Artificial Sequence
  Description of Artificial Sequence: Synthetic oligonucleotide
  Antisense strand to SEQ ID NO: 1412632
ucacacucaauccaucacc

SEQ ID NO: 1412634 - RNA, 19 nt, Artificial Sequence
  Description of Artificial Sequence: Synthetic oligonucleotide
  Sense strand starting at position 3599 of SEQ ID NO: 1243376
uggauugagugugaacaca

SEQ ID NO: 1412635 - RNA, 19 nt, Artificial Sequence
  Description of Artificial Sequence: Synthetic oligonucleotide
  Antisense strand to SEQ ID NO: 1412634
uguguucacacucaaucca

SEQ ID NO: 1412636 - RNA, 19 nt, Artificial Sequence
  Description of Artificial Sequence: Synthetic oligonucleotide
  Sense strand starting at position 3937 of SEQ ID NO: 1243376
cccugcacauuguuaugaa

SEQ ID NO: 1412637 - RNA, 19 nt, Artificial Sequence
  Description of Artificial Sequence: Synthetic oligonucleotide
  Antisense strand to SEQ ID NO: 1412636
uucauaacaaugugcaggg

SEQ ID NO: 1412638 - RNA, 19 nt, Artificial Sequence
  Description of Artificial Sequence: Synthetic oligonucleotide
  Sense strand starting at position 19 of SEQ ID NO: 1243377
gcugcugucuuaccggaca

SEQ ID NO: 1412639 - RNA, 19 nt, Artificial Sequence
  Description of Artificial Sequence: Synthetic oligonucleotide
  Antisense strand to SEQ ID NO: 1412638
uguccgguaagacagcagc

SEQ ID NO: 1412640 - RNA, 19 nt, Artificial Sequence
  Description of Artificial Sequence: Synthetic oligonucleotide
  Sense strand starting at position 21 of SEQ ID NO: 1243377
ugcugucuuaccggacaca

SEQ ID NO: 1412641 - RNA, 19 nt, Artificial Sequence
  Description of Artificial Sequence: Synthetic oligonucleotide
  Antisense strand to SEQ ID NO: 1412640
uguguccgguaagacagca

SEQ ID NO: 1412642 - RNA, 19 nt, Artificial Sequence
  Description of Artificial Sequence: Synthetic oligonucleotide
  Sense strand starting at position 57 of SEQ ID NO: 1243377
ccguuucucucccuggaga

SEQ ID NO: 1412643 - RNA, 19 nt, Artificial Sequence
  Description of Artificial Sequence: Synthetic oligonucleotide
  Antisense strand to SEQ ID NO: 1412642
ucuccagggagagaaacgg

SEQ ID NO: 1412644 - RNA, 19 nt, Artificial Sequence
  Description of Artificial Sequence: Synthetic oligonucleotide
  Sense strand starting at position 59 of SEQ ID NO: 1243377
guuucucucccuggagagu

SEQ ID NO: 1412645 - RNA, 19 nt, Artificial Sequence
  Description of Artificial Sequence: Synthetic oligonucleotide
  Antisense strand to SEQ ID NO: 1412644
acucuccagggagagaaac

SEQ ID NO: 1412646 - RNA, 19 nt, Artificial Sequence
  Description of Artificial Sequence: Synthetic oligonucleotide
  Sense strand starting at position 60 of SEQ ID NO: 1243377
uuucucucccuggagaguu

SEQ ID NO: 1412647 - RNA, 19 nt, Artificial Sequence
  Description of Artificial Sequence: Synthetic oligonucleotide
  Antisense strand to SEQ ID NO: 1412646
aacucuccagggagagaaa

SEQ ID NO: 1412648 - RNA, 19 nt, Artificial Sequence
  Description of Artificial Sequence: Synthetic oligonucleotide
  Sense strand starting at position 70 of SEQ ID NO: 1243377
uggagaguuguggguggaa

SEQ ID NO: 1412649 - RNA, 19 nt, Artificial Sequence
  Description of Artificial Sequence: Synthetic oligonucleotide
  Antisense strand to SEQ ID NO: 1412648
uuccacccacaacucucca

SEQ ID NO: 1412650 - RNA, 19 nt, Artificial Sequence
  Description of Artificial Sequence: Synthetic oligonucleotide
  Sense strand starting at position 293 of SEQ ID NO: 1243377
uaggauucugcacagcaga

SEQ ID NO: 1412651 - RNA, 19 nt, Artificial Sequence
  Description of Artificial Sequence: Synthetic oligonucleotide
  Antisense strand to SEQ ID NO: 1412650
ucugcugugcagaauccua

SEQ ID NO: 1412652 - RNA, 19 nt, Artificial Sequence
  Description of Artificial Sequence: Synthetic oligonucleotide
  Sense strand starting at position 349 of SEQ ID NO: 1243377
gugcaaagauacuggguau

SEQ ID NO: 1412653 - RNA, 19 nt, Artificial Sequence
  Description of Artificial Sequence: Synthetic oligonucleotide
  Antisense strand to SEQ ID NO: 1412652
auacccaguaucuuugcac

SEQ ID NO: 1412654 - RNA, 19 nt, Artificial Sequence
  Description of Artificial Sequence: Synthetic oligonucleotide
  Sense strand starting at position 350 of SEQ ID NO: 1243377
ugcaaagauacuggguaua

SEQ ID NO: 1412655 - RNA, 19 nt, Artificial Sequence
  Description of Artificial Sequence: Synthetic oligonucleotide
  Antisense strand to SEQ ID NO: 1412654
uauacccaguaucuuugca

SEQ ID NO: 1412656 - RNA, 19 nt, Artificial Sequence
  Description of Artificial Sequence: Synthetic oligonucleotide
  Sense strand starting at position 594 of SEQ ID NO: 1243377
ccaggcaaguaauaacaaa

SEQ ID NO: 1412657 - RNA, 19 nt, Artificial Sequence
  Description of Artificial Sequence: Synthetic oligonucleotide
  Antisense strand to SEQ ID NO: 1412656
uuuguuauuacuugccugg

SEQ ID NO: 1412658 - RNA, 19 nt, Artificial Sequence
  Description of Artificial Sequence: Synthetic oligonucleotide
  Sense strand starting at position 876 of SEQ ID NO: 1243377
ggcugccauccaggugaaa

SEQ ID NO: 1412659 - RNA, 19 nt, Artificial Sequence
  Description of Artificial Sequence: Synthetic oligonucleotide
  Antisense strand to SEQ ID NO: 1412658
uuucaccuggauggcagcc

SEQ ID NO: 1412660 - RNA, 19 nt, Artificial Sequence
  Description of Artificial Sequence: Synthetic oligonucleotide
  Sense strand starting at position 1090 of SEQ ID NO: 1243377
gcgcgugaugcgccgguaa

SEQ ID NO: 1412661 - RNA, 19 nt, Artificial Sequence
  Description of Artificial Sequence: Synthetic oligonucleotide
  Antisense strand to SEQ ID NO: 1412660
uuaccggcgcaucacgcgc

SEQ ID NO: 1412662 - RNA, 19 nt, Artificial Sequence
  Description of Artificial Sequence: Synthetic oligonucleotide
  Sense strand starting at position 1102 of SEQ ID NO: 1243377
ccgguaaucggcgugcgaa

SEQ ID NO: 1412663 - RNA, 19 nt, Artificial Sequence
  Description of Artificial Sequence: Synthetic oligonucleotide
  Antisense strand to SEQ ID NO: 1412662
uucgcacgccgauuaccgg

SEQ ID NO: 1412664 - RNA, 19 nt, Artificial Sequence
  Description of Artificial Sequence: Synthetic oligonucleotide
  Sense strand starting at position 1103 of SEQ ID NO: 1243377
cgguaaucggcgugcgaac

SEQ ID NO: 1412665 - RNA, 19 nt, Artificial Sequence
  Description of Artificial Sequence: Synthetic oligonucleotide
  Antisense strand to SEQ ID NO: 1412664
guucgcacgccgauuaccg

SEQ ID NO: 1412666 - RNA, 19 nt, Artificial Sequence
  Description of Artificial Sequence: Synthetic oligonucleotide
  Sense strand starting at position 1287 of SEQ ID NO: 1243377
gugcuaccauccuacagaa

SEQ ID NO: 1412667 - RNA, 19 nt, Artificial Sequence
  Description of Artificial Sequence: Synthetic oligonucleotide
  Antisense strand to SEQ ID NO: 1412666
uucuguaggaugguagcac

SEQ ID NO: 1412668 - RNA, 19 nt, Artificial Sequence
  Description of Artificial Sequence: Synthetic oligonucleotide
  Sense strand starting at position 2677 of SEQ ID NO: 1243377
cggcccaguuccucggaaa

SEQ ID NO: 1412669 - RNA, 19 nt, Artificial Sequence
  Description of Artificial Sequence: Synthetic oligonucleotide
  Antisense strand to SEQ ID NO: 1412668
uuuccgaggaacugggccg

SEQ ID NO: 1412670 - RNA, 19 nt, Artificial Sequence
  Description of Artificial Sequence: Synthetic oligonucleotide
  Sense strand starting at position 2795 of SEQ ID NO: 1243377
uuugcaauggcuugcagau

SEQ ID NO: 1412671 - RNA, 19 nt, Artificial Sequence
  Description of Artificial Sequence: Synthetic oligonucleotide
  Antisense strand to SEQ ID NO: 1412670
aucugcaagccauugcaaa

SEQ ID NO: 1412672 - RNA, 19 nt, Artificial Sequence
  Description of Artificial Sequence: Synthetic oligonucleotide
  Sense strand starting at position 2906 of SEQ ID NO: 1243377
ggugcauucucagacguga

SEQ ID NO: 1412673 - RNA, 19 nt, Artificial Sequence
  Description of Artificial Sequence: Synthetic oligonucleotide
  Antisense strand to SEQ ID NO: 1412672
ucacgucugagaaugcacc

SEQ ID NO: 1412674 - RNA, 19 nt, Artificial Sequence
  Description of Artificial Sequence: Synthetic oligonucleotide
  Sense strand starting at position 2908 of SEQ ID NO: 1243377
ugcauucucagacgugaug

SEQ ID NO: 1412675 - RNA, 19 nt, Artificial Sequence
  Description of Artificial Sequence: Synthetic oligonucleotide
  Antisense strand to SEQ ID NO: 1412674
caucacgucugagaaugca

SEQ ID NO: 1412676 - RNA, 19 nt, Artificial Sequence
  Description of Artificial Sequence: Synthetic oligonucleotide
  Sense strand starting at position 2911 of SEQ ID NO: 1243377
auucucagacgugaugaau

SEQ ID NO: 1412677 - RNA, 19 nt, Artificial Sequence
  Description of Artificial Sequence: Synthetic oligonucleotide
  Antisense strand to SEQ ID NO: 1412676
auucaucacgucugagaau

SEQ ID NO: 1412678 - RNA, 19 nt, Artificial Sequence
  Description of Artificial Sequence: Synthetic oligonucleotide
  Sense strand starting at position 3083 of SEQ ID NO: 1243377
cuguaauuugcacacgugu

SEQ ID NO: 1412679 - RNA, 19 nt, Artificial Sequence
  Description of Artificial Sequence: Synthetic oligonucleotide
  Antisense strand to SEQ ID NO: 1412678
acacgugugcaaauuacag

SEQ ID NO: 1412680 - RNA, 19 nt, Artificial Sequence
  Description of Artificial Sequence: Synthetic oligonucleotide
  Sense strand starting at position 3085 of SEQ ID NO: 1243377
guaauuugcacacguguuu

SEQ ID NO: 1412681 - RNA, 19 nt, Artificial Sequence
  Description of Artificial Sequence: Synthetic oligonucleotide
  Antisense strand to SEQ ID NO: 1412680
aaacacgugugcaaauuac

SEQ ID NO: 1412682 - RNA, 19 nt, Artificial Sequence
  Description of Artificial Sequence: Synthetic oligonucleotide
  Sense strand starting at position 3091 of SEQ ID NO: 1243377
ugcacacguguuugugauu

SEQ ID NO: 1412683 - RNA, 19 nt, Artificial Sequence
  Description of Artificial Sequence: Synthetic oligonucleotide
  Antisense strand to SEQ ID NO: 1412682
aaucacaaacacgugugca

SEQ ID NO: 1412684 - RNA, 19 nt, Artificial Sequence
  Description of Artificial Sequence: Synthetic oligonucleotide
  Sense strand starting at position 3092 of SEQ ID NO: 1243377
gcacacguguuugugauuu

SEQ ID NO: 1412685 - RNA, 19 nt, Artificial Sequence
  Description of Artificial Sequence: Synthetic oligonucleotide
  Antisense strand to SEQ ID NO: 1412684
aaaucacaaacacgugugc

SEQ ID NO: 1412686 - RNA, 19 nt, Artificial Sequence
  Description of Artificial Sequence: Synthetic oligonucleotide
  Sense strand starting at position 3094 of SEQ ID NO: 1243377
acacguguuugugauuuag

SEQ ID NO: 1412687 - RNA, 19 nt, Artificial Sequence
  Description of Artificial Sequence: Synthetic oligonucleotide
  Antisense strand to SEQ ID NO: 1412686
cuaaaucacaaacacgugu

SEQ ID NO: 1412688 - RNA, 19 nt, Artificial Sequence
  Description of Artificial Sequence: Synthetic oligonucleotide
  Sense strand starting at position 3096 of SEQ ID NO: 1243377
acguguuugugauuuagug

SEQ ID NO: 1412689 - RNA, 19 nt, Artificial Sequence
  Description of Artificial Sequence: Synthetic oligonucleotide
  Antisense strand to SEQ ID NO: 1412688
cacuaaaucacaaacacgu

SEQ ID NO: 1412690 - RNA, 19 nt, Artificial Sequence
  Description of Artificial Sequence: Synthetic oligonucleotide
  Sense strand starting at position 3100 of SEQ ID NO: 1243377
guuugugauuuagugauuc

SEQ ID NO: 1412691 - RNA, 19 nt, Artificial Sequence
  Description of Artificial Sequence: Synthetic oligonucleotide
  Antisense strand to SEQ ID NO: 1412690
gaaucacuaaaucacaaac

SEQ ID NO: 1412692 - RNA, 19 nt, Artificial Sequence
  Description of Artificial Sequence: Synthetic oligonucleotide
  Sense strand starting at position 3108 of SEQ ID NO: 1243377
uuuagugauuccgauuguc

SEQ ID NO: 1412693 - RNA, 19 nt, Artificial Sequence
  Description of Artificial Sequence: Synthetic oligonucleotide
  Antisense strand to SEQ ID NO: 1412692
gacaaucggaaucacuaaa

SEQ ID NO: 1412694 - RNA, 19 nt, Artificial Sequence
  Description of Artificial Sequence: Synthetic oligonucleotide
  Sense strand starting at position 3150 of SEQ ID NO: 1243377
cuggcugcuccguguauuu

SEQ ID NO: 1412695 - RNA, 19 nt, Artificial Sequence
  Description of Artificial Sequence: Synthetic oligonucleotide
  Antisense strand to SEQ ID NO: 1412694
aaauacacggagcagccag

SEQ ID NO: 1412696 - RNA, 19 nt, Artificial Sequence
  Description of Artificial Sequence: Synthetic oligonucleotide
  Sense strand starting at position 3289 of SEQ ID NO: 1243377
gacggcuucucuccuggaa

SEQ ID NO: 1412697 - RNA, 19 nt, Artificial Sequence
  Description of Artificial Sequence: Synthetic oligonucleotide
  Antisense strand to SEQ ID NO: 1412696
uuccaggagagaagccguc

SEQ ID NO: 1412698 - RNA, 19 nt, Artificial Sequence
  Description of Artificial Sequence: Synthetic oligonucleotide
  Sense strand starting at position 3367 of SEQ ID NO: 1243377
gagccuagguccuuauuaa

SEQ ID NO: 1412699 - RNA, 19 nt, Artificial Sequence
  Description of Artificial Sequence: Synthetic oligonucleotide
  Antisense strand to SEQ ID NO: 1412698
uuaauaaggaccuaggcuc

SEQ ID NO: 1412700 - RNA, 19 nt, Artificial Sequence
  Description of Artificial Sequence: Synthetic oligonucleotide
  Sense strand starting at position 3368 of SEQ ID NO: 1243377
agccuagguccuuauuaac

SEQ ID NO: 1412701 - RNA, 19 nt, Artificial Sequence
  Description of Artificial Sequence: Synthetic oligonucleotide
  Antisense strand to SEQ ID NO: 1412700
guuaauaaggaccuaggcu

SEQ ID NO: 1412702 - RNA, 19 nt, Artificial Sequence
  Description of Artificial Sequence: Synthetic oligonucleotide
  Sense strand starting at position 3408 of SEQ ID NO: 1243377
ccagaaucagcccagcuua

SEQ ID NO: 1412703 - RNA, 19 nt, Artificial Sequence
  Description of Artificial Sequence: Synthetic oligonucleotide
  Antisense strand to SEQ ID NO: 1412702
uaagcugggcugauucugg

SEQ ID NO: 1412704 - RNA, 19 nt, Artificial Sequence
  Description of Artificial Sequence: Synthetic oligonucleotide
  Sense strand starting at position 3432 of SEQ ID NO: 1243377
ccaucagugcccugaaucu

SEQ ID NO: 1412705 - RNA, 19 nt, Artificial Sequence
  Description of Artificial Sequence: Synthetic oligonucleotide
  Antisense strand to SEQ ID NO: 1412704
agauucagggcacugaugg

SEQ ID NO: 1412706 - RNA, 19 nt, Artificial Sequence
  Description of Artificial Sequence: Synthetic oligonucleotide
  Sense strand starting at position 3563 of SEQ ID NO: 1243377
aggucaggugugugaucau

SEQ ID NO: 1412707 - RNA, 19 nt, Artificial Sequence
  Description of Artificial Sequence: Synthetic oligonucleotide
  Antisense strand to SEQ ID NO: 1412706
augaucacacaccugaccu

SEQ ID NO: 1412708 - RNA, 19 nt, Artificial Sequence
  Description of Artificial Sequence: Synthetic oligonucleotide
  Sense strand starting at position 3572 of SEQ ID NO: 1243377
gugugaucauucgagagau

SEQ ID NO: 1412709 - RNA, 19 nt, Artificial Sequence
  Description of Artificial Sequence: Synthetic oligonucleotide
  Antisense strand to SEQ ID NO: 1412708
aucucucgaaugaucacac

SEQ ID NO: 1412710 - RNA, 19 nt, Artificial Sequence
  Description of Artificial Sequence: Synthetic oligonucleotide
  Sense strand starting at position 3574 of SEQ ID NO: 1243377
gugaucauucgagagaugu

SEQ ID NO: 1412711 - RNA, 19 nt, Artificial Sequence
  Description of Artificial Sequence: Synthetic oligonucleotide
  Antisense strand to SEQ ID NO: 1412710
acaucucucgaaugaucac

SEQ ID NO: 1412712 - RNA, 19 nt, Artificial Sequence
  Description of Artificial Sequence: Synthetic oligonucleotide
  Sense strand starting at position 3585 of SEQ ID NO: 1243377
agagauguccacugaacau

SEQ ID NO: 1412713 - RNA, 19 nt, Artificial Sequence
  Description of Artificial Sequence: Synthetic oligonucleotide
  Antisense strand to SEQ ID NO: 1412712
auguucaguggacaucucu

SEQ ID NO: 1412714 - RNA, 19 nt, Artificial Sequence
  Description of Artificial Sequence: Synthetic oligonucleotide
  Sense strand starting at position 3622 of SEQ ID NO: 1243377
uguggagggugauggaaua

SEQ ID NO: 1412715 - RNA, 19 nt, Artificial Sequence
  Description of Artificial Sequence: Synthetic oligonucleotide
  Antisense strand to SEQ ID NO: 1412714
uauuccaucacccuccaca

SEQ ID NO: 1412716 - RNA, 19 nt, Artificial Sequence
  Description of Artificial Sequence: Synthetic oligonucleotide
  Sense strand starting at position 3712 of SEQ ID NO: 1243377
augguuucuuuaucuguga

SEQ ID NO: 1412717 - RNA, 19 nt, Artificial Sequence
  Description of Artificial Sequence: Synthetic oligonucleotide
  Antisense strand to SEQ ID NO: 1412716
ucacagauaaagaaaccau

SEQ ID NO: 1412718 - RNA, 19 nt, Artificial Sequence
  Description of Artificial Sequence: Synthetic oligonucleotide
  Sense strand starting at position 241 of SEQ ID NO: 1243378
aguacacuccucugggaga

SEQ ID NO: 1412719 - RNA, 19 nt, Artificial Sequence
  Description of Artificial Sequence: Synthetic oligonucleotide
  Antisense strand to SEQ ID NO: 1412718
ucucccagaggaguguacu

SEQ ID NO: 1412720 - RNA, 19 nt, Artificial Sequence
  Description of Artificial Sequence: Synthetic oligonucleotide
  Sense strand starting at position 242 of SEQ ID NO: 1243378
guacacuccucugggagaa

SEQ ID NO: 1412721 - RNA, 19 nt, Artificial Sequence
  Description of Artificial Sequence: Synthetic oligonucleotide
  Antisense strand to SEQ ID NO: 1412720
uucucccagaggaguguac

SEQ ID NO: 1412722 - RNA, 19 nt, Artificial Sequence
  Description of Artificial Sequence: Synthetic oligonucleotide
  Sense strand starting at position 268 of SEQ ID NO: 1243378
gcgccuguuugggaagguu

SEQ ID NO: 1412723 - RNA, 19 nt, Artificial Sequence
  Description of Artificial Sequence: Synthetic oligonucleotide
  Antisense strand to SEQ ID NO: 1412722
aaccuucccaaacaggcgc

SEQ ID NO: 1412724 - RNA, 19 nt, Artificial Sequence
  Description of Artificial Sequence: Synthetic oligonucleotide
  Sense strand starting at position 277 of SEQ ID NO: 1243378
ugggaagguugguaugcuu

SEQ ID NO: 1412725 - RNA, 19 nt, Artificial Sequence
  Description of Artificial Sequence: Synthetic oligonucleotide
  Antisense strand to SEQ ID NO: 1412724
aagcauaccaaccuuccca

SEQ ID NO: 1412726 - RNA, 19 nt, Artificial Sequence
  Description of Artificial Sequence: Synthetic oligonucleotide
  Sense strand starting at position 3353 of SEQ ID NO: 1243378
aggagcugguccguuacua

SEQ ID NO: 1412727 - RNA, 19 nt, Artificial Sequence
  Description of Artificial Sequence: Synthetic oligonucleotide
  Antisense strand to SEQ ID NO: 1412726
uaguaacggaccagcuccu

SEQ ID NO: 1412728 - RNA, 19 nt, Artificial Sequence
  Description of Artificial Sequence: Synthetic oligonucleotide
  Sense strand starting at position 3357 of SEQ ID NO: 1243378
gcugguccguuacuagaaa

SEQ ID NO: 1412729 - RNA, 19 nt, Artificial Sequence
  Description of Artificial Sequence: Synthetic oligonucleotide
  Antisense strand to SEQ ID NO: 1412728
uuucuaguaacggaccagc

SEQ ID NO: 1412730 - RNA, 19 nt, Artificial Sequence
  Description of Artificial Sequence: Synthetic oligonucleotide
  Sense strand starting at position 3546 of SEQ ID NO: 1243378
gcugcuuugcauugggaac

SEQ ID NO: 1412731 - RNA, 19 nt, Artificial Sequence
  Description of Artificial Sequence: Synthetic oligonucleotide
  Antisense strand to SEQ ID NO: 1412730
guucccaaugcaaagcagc

SEQ ID NO: 1412732 - RNA, 19 nt, Artificial Sequence
  Description of Artificial Sequence: Synthetic oligonucleotide
  Sense strand starting at position 3547 of SEQ ID NO: 1243378
cugcuuugcauugggaaca

SEQ ID NO: 1412733 - RNA, 19 nt, Artificial Sequence
  Description of Artificial Sequence: Synthetic oligonucleotide
  Antisense strand to SEQ ID NO: 1412732
uguucccaaugcaaagcag

SEQ ID NO: 1412734 - RNA, 19 nt, Artificial Sequence
  Description of Artificial Sequence: Synthetic oligonucleotide
  Sense strand starting at position 3548 of SEQ ID NO: 1243378
ugcuuugcauugggaacaa

SEQ ID NO: 1412735 - RNA, 19 nt, Artificial Sequence
  Description of Artificial Sequence: Synthetic oligonucleotide
  Antisense strand to SEQ ID NO: 1412734
uuguucccaaugcaaagca

SEQ ID NO: 1412736 - RNA, 19 nt, Artificial Sequence
  Description of Artificial Sequence: Synthetic oligonucleotide
  Sense strand starting at position 232 of SEQ ID NO: 1243379
cgggacuccuagcaucuaa

SEQ ID NO: 1412737 - RNA, 19 nt, Artificial Sequence
  Description of Artificial Sequence: Synthetic oligonucleotide
  Antisense strand to SEQ ID NO: 1412736
uuagaugcuaggagucccg

SEQ ID NO: 1412738 - RNA, 19 nt, Artificial Sequence
  Description of Artificial Sequence: Synthetic oligonucleotide
  Sense strand starting at position 373 of SEQ ID NO: 1243379
gcugacagagauuagcuaa

SEQ ID NO: 1412739 - RNA, 19 nt, Artificial Sequence
  Description of Artificial Sequence: Synthetic oligonucleotide
  Antisense strand to SEQ ID NO: 1412738
uuagcuaaucucugucagc

SEQ ID NO: 1412740 - RNA, 19 nt, Artificial Sequence
  Description of Artificial Sequence: Synthetic oligonucleotide
  Sense strand starting at position 509 of SEQ ID NO: 1243379
uccguccucucucaugaau

SEQ ID NO: 1412741 - RNA, 19 nt, Artificial Sequence
  Description of Artificial Sequence: Synthetic oligonucleotide
  Antisense strand to SEQ ID NO: 1412740
auucaugagagaggacgga

SEQ ID NO: 1412742 - RNA, 19 nt, Artificial Sequence
  Description of Artificial Sequence: Synthetic oligonucleotide
  Sense strand starting at position 511 of SEQ ID NO: 1243379
cguccucucucaugaauga

SEQ ID NO: 1412743 - RNA, 19 nt, Artificial Sequence
  Description of Artificial Sequence: Synthetic oligonucleotide
  Antisense strand to SEQ ID NO: 1412742
ucauucaugagagaggacg

SEQ ID NO: 1412744 - RNA, 19 nt, Artificial Sequence
  Description of Artificial Sequence: Synthetic oligonucleotide
  Sense strand starting at position 512 of SEQ ID NO: 1243379
guccucucucaugaaugaa

SEQ ID NO: 1412745 - RNA, 19 nt, Artificial Sequence
  Description of Artificial Sequence: Synthetic oligonucleotide
  Antisense strand to SEQ ID NO: 1412744
uucauucaugagagaggac

SEQ ID NO: 1412746 - RNA, 19 nt, Artificial Sequence
  Description of Artificial Sequence: Synthetic oligonucleotide
  Sense strand starting at position 515 of SEQ ID NO: 1243379
cucucucaugaaugaaagu

SEQ ID NO: 1412747 - RNA, 19 nt, Artificial Sequence
  Description of Artificial Sequence: Synthetic oligonucleotide
  Antisense strand to SEQ ID NO: 1412746
acuuucauucaugagagag

SEQ ID NO: 1412748 - RNA, 19 nt, Artificial Sequence
  Description of Artificial Sequence: Synthetic oligonucleotide
  Sense strand starting at position 641 of SEQ ID NO: 1243379
gcuuccuacucuuccgaau

SEQ ID NO: 1412749 - RNA, 19 nt, Artificial Sequence
  Description of Artificial Sequence: Synthetic oligonucleotide
  Antisense strand to SEQ ID NO: 1412748
auucggaagaguaggaagc

SEQ ID NO: 1412750 - RNA, 19 nt, Artificial Sequence
  Description of Artificial Sequence: Synthetic oligonucleotide
  Sense strand starting at position 653 of SEQ ID NO: 1243379
uccgaauuagcucagagcu

SEQ ID NO: 1412751 - RNA, 19 nt, Artificial Sequence
  Description of Artificial Sequence: Synthetic oligonucleotide
  Antisense strand to SEQ ID NO: 1412750
agcucugagcuaauucgga

SEQ ID NO: 1412752 - RNA, 19 nt, Artificial Sequence
  Description of Artificial Sequence: Synthetic oligonucleotide
  Sense strand starting at position 755 of SEQ ID NO: 1243379
cguggaguucacuaggucu

SEQ ID NO: 1412753 - RNA, 19 nt, Artificial Sequence
  Description of Artificial Sequence: Synthetic oligonucleotide
  Antisense strand to SEQ ID NO: 1412752
agaccuagugaacuccacg

SEQ ID NO: 1412754 - RNA, 19 nt, Artificial Sequence
  Description of Artificial Sequence: Synthetic oligonucleotide
  Sense strand starting at position 757 of SEQ ID NO: 1243379
uggaguucacuaggucuga

SEQ ID NO: 1412755 - RNA, 19 nt, Artificial Sequence
  Description of Artificial Sequence: Synthetic oligonucleotide
  Antisense strand to SEQ ID NO: 1412754
ucagaccuagugaacucca

SEQ ID NO: 1412756 - RNA, 19 nt, Artificial Sequence
  Description of Artificial Sequence: Synthetic oligonucleotide
  Sense strand starting at position 854 of SEQ ID NO: 1243379
ggcccauaaccuggaggaa

SEQ ID NO: 1412757 - RNA, 19 nt, Artificial Sequence
  Description of Artificial Sequence: Synthetic oligonucleotide
  Antisense strand to SEQ ID NO: 1412756
uuccuccagguuaugggcc

SEQ ID NO: 1412758 - RNA, 19 nt, Artificial Sequence
  Description of Artificial Sequence: Synthetic oligonucleotide
  Sense strand starting at position 914 of SEQ ID NO: 1243379
uccuaagauuuccauggca

SEQ ID NO: 1412759 - RNA, 19 nt, Artificial Sequence
  Description of Artificial Sequence: Synthetic oligonucleotide
  Antisense strand to SEQ ID NO: 1412758
ugccauggaaaucuuagga

SEQ ID NO: 1412760 - RNA, 19 nt, Artificial Sequence
  Description of Artificial Sequence: Synthetic oligonucleotide
  Sense strand starting at position 1027 of SEQ ID NO: 1243379
uguucucagcccuaggagu

SEQ ID NO: 1412761 - RNA, 19 nt, Artificial Sequence
  Description of Artificial Sequence: Synthetic oligonucleotide
  Antisense strand to SEQ ID NO: 1412760
acuccuagggcugagaaca

SEQ ID NO: 1412762 - RNA, 19 nt, Artificial Sequence
  Description of Artificial Sequence: Synthetic oligonucleotide
  Sense strand starting at position 1213 of SEQ ID NO: 1243379
cuaccuugaugguggugaa

SEQ ID NO: 1412763 - RNA, 19 nt, Artificial Sequence
  Description of Artificial Sequence: Synthetic oligonucleotide
  Antisense strand to SEQ ID NO: 1412762
uucaccaccaucaagguag

SEQ ID NO: 1412764 - RNA, 19 nt, Artificial Sequence
  Description of Artificial Sequence: Synthetic oligonucleotide
  Sense strand starting at position 1485 of SEQ ID NO: 1243379
uggcgguaguccucggaca

SEQ ID NO: 1412765 - RNA, 19 nt, Artificial Sequence
  Description of Artificial Sequence: Synthetic oligonucleotide
  Antisense strand to SEQ ID NO: 1412764
uguccgaggacuaccgcca

SEQ ID NO: 1412766 - RNA, 19 nt, Artificial Sequence
  Description of Artificial Sequence: Synthetic oligonucleotide
  Sense strand starting at position 2765 of SEQ ID NO: 1243379
uccucuguucugugcuaca

SEQ ID NO: 1412767 - RNA, 19 nt, Artificial Sequence
  Description of Artificial Sequence: Synthetic oligonucleotide
  Antisense strand to SEQ ID NO: 1412766
uguagcacagaacagagga

SEQ ID NO: 1412768 - RNA, 19 nt, Artificial Sequence
  Description of Artificial Sequence: Synthetic oligonucleotide
  Sense strand starting at position 2791 of SEQ ID NO: 1243379
ucucgcauugcccagaagu

SEQ ID NO: 1412769 - RNA, 19 nt, Artificial Sequence
  Description of Artificial Sequence: Synthetic oligonucleotide
  Antisense strand to SEQ ID NO: 1412768
acuucugggcaaugcgaga

SEQ ID NO: 1412770 - RNA, 19 nt, Artificial Sequence
  Description of Artificial Sequence: Synthetic oligonucleotide
  Sense strand starting at position 2935 of SEQ ID NO: 1243379
ggcccaaguuuguugaaac

SEQ ID NO: 1412771 - RNA, 19 nt, Artificial Sequence
  Description of Artificial Sequence: Synthetic oligonucleotide
  Antisense strand to SEQ ID NO: 1412770
guuucaacaaacuugggcc

SEQ ID NO: 1412772 - RNA, 19 nt, Artificial Sequence
  Description of Artificial Sequence: Synthetic oligonucleotide
  Sense strand starting at position 3017 of SEQ ID NO: 1243379
gcuggcaucuuagaaauag

SEQ ID NO: 1412773 - RNA, 19 nt, Artificial Sequence
  Description of Artificial Sequence: Synthetic oligonucleotide
  Antisense strand to SEQ ID NO: 1412772
cuauuucuaagaugccagc

SEQ ID NO: 1412774 - RNA, 19 nt, Artificial Sequence
  Description of Artificial Sequence: Synthetic oligonucleotide
  Sense strand starting at position 3314 of SEQ ID NO: 1243379
gagcgagaaugucuggaaa

SEQ ID NO: 1412775 - RNA, 19 nt, Artificial Sequence
  Description of Artificial Sequence: Synthetic oligonucleotide
  Antisense strand to SEQ ID NO: 1412774
uuuccagacauucucgcuc

SEQ ID NO: 1412776 - RNA, 19 nt, Artificial Sequence
  Description of Artificial Sequence: Synthetic oligonucleotide
  Sense strand starting at position 3352 of SEQ ID NO: 1243379
gguggaucucccugaguua

SEQ ID NO: 1412777 - RNA, 19 nt, Artificial Sequence
  Description of Artificial Sequence: Synthetic oligonucleotide
  Antisense strand to SEQ ID NO: 1412776
uaacucagggagauccacc

SEQ ID NO: 1412778 - RNA, 19 nt, Artificial Sequence
  Description of Artificial Sequence: Synthetic oligonucleotide
  Sense strand starting at position 3353 of SEQ ID NO: 1243379
guggaucucccugaguuau

SEQ ID NO: 1412779 - RNA, 19 nt, Artificial Sequence
  Description of Artificial Sequence: Synthetic oligonucleotide
  Antisense strand to SEQ ID NO: 1412778
auaacucagggagauccac

SEQ ID NO: 1412780 - RNA, 19 nt, Artificial Sequence
  Description of Artificial Sequence: Synthetic oligonucleotide
  Sense strand starting at position 3355 of SEQ ID NO: 1243379
ggaucucccugaguuaucu

SEQ ID NO: 1412781 - RNA, 19 nt, Artificial Sequence
  Description of Artificial Sequence: Synthetic oligonucleotide
  Antisense strand to SEQ ID NO: 1412780
agauaacucagggagaucc

SEQ ID NO: 1412782 - RNA, 19 nt, Artificial Sequence
  Description of Artificial Sequence: Synthetic oligonucleotide
  Sense strand starting at position 3359 of SEQ ID NO: 1243379
cucccugaguuaucuaggu

SEQ ID NO: 1412783 - RNA, 19 nt, Artificial Sequence
  Description of Artificial Sequence: Synthetic oligonucleotide
  Antisense strand to SEQ ID NO: 1412782
accuagauaacucagggag

SEQ ID NO: 1412784 - RNA, 19 nt, Artificial Sequence
  Description of Artificial Sequence: Synthetic oligonucleotide
  Sense strand starting at position 3364 of SEQ ID NO: 1243379
ugaguuaucuagguggcca

SEQ ID NO: 1412785 - RNA, 19 nt, Artificial Sequence
  Description of Artificial Sequence: Synthetic oligonucleotide
  Antisense strand to SEQ ID NO: 1412784
uggccaccuagauaacuca

SEQ ID NO: 1412786 - RNA, 19 nt, Artificial Sequence
  Description of Artificial Sequence: Synthetic oligonucleotide
  Sense strand starting at position 3365 of SEQ ID NO: 1243379
gaguuaucuagguggccac

SEQ ID NO: 1412787 - RNA, 19 nt, Artificial Sequence
  Description of Artificial Sequence: Synthetic oligonucleotide
  Antisense strand to SEQ ID NO: 1412786
guggccaccuagauaacuc

SEQ ID NO: 1412788 - RNA, 19 nt, Artificial Sequence
  Description of Artificial Sequence: Synthetic oligonucleotide
  Sense strand starting at position 3402 of SEQ ID NO: 1243379
uuuacuuacuguuuacuga

SEQ ID NO: 1412789 - RNA, 19 nt, Artificial Sequence
  Description of Artificial Sequence: Synthetic oligonucleotide
  Antisense strand to SEQ ID NO: 1412788
ucaguaaacaguaaguaaa

SEQ ID NO: 1412790 - RNA, 19 nt, Artificial Sequence
  Description of Artificial Sequence: Synthetic oligonucleotide
  Sense strand starting at position 3469 of SEQ ID NO: 1243379
gacagcuaacuucguaagu

SEQ ID NO: 1412791 - RNA, 19 nt, Artificial Sequence
  Description of Artificial Sequence: Synthetic oligonucleotide
  Antisense strand to SEQ ID NO: 1412790
acuuacgaaguuagcuguc

SEQ ID NO: 1412792 - RNA, 19 nt, Artificial Sequence
  Description of Artificial Sequence: Synthetic oligonucleotide
  Sense strand starting at position 3471 of SEQ ID NO: 1243379
cagcuaacuucguaagucu

SEQ ID NO: 1412793 - RNA, 19 nt, Artificial Sequence
  Description of Artificial Sequence: Synthetic oligonucleotide
  Antisense strand to SEQ ID NO: 1412792
agacuuacgaaguuagcug

SEQ ID NO: 1412794 - RNA, 19 nt, Artificial Sequence
  Description of Artificial Sequence: Synthetic oligonucleotide
  Sense strand starting at position 3478 of SEQ ID NO: 1243379
cuucguaagucucaucuuu

SEQ ID NO: 1412795 - RNA, 19 nt, Artificial Sequence
  Description of Artificial Sequence: Synthetic oligonucleotide
  Antisense strand to SEQ ID NO: 1412794
aaagaugagacuuacgaag

SEQ ID NO: 1412796 - RNA, 19 nt, Artificial Sequence
  Description of Artificial Sequence: Synthetic oligonucleotide
  Sense strand starting at position 3480 of SEQ ID NO: 1243379
ucguaagucucaucuuuau

SEQ ID NO: 1412797 - RNA, 19 nt, Artificial Sequence
  Description of Artificial Sequence: Synthetic oligonucleotide
  Antisense strand to SEQ ID NO: 1412796
auaaagaugagacuuacga

SEQ ID NO: 1412798 - RNA, 19 nt, Artificial Sequence
  Description of Artificial Sequence: Synthetic oligonucleotide
  Sense strand starting at position 3523 of SEQ ID NO: 1243379
ggagguaacuguucugccu

SEQ ID NO: 1412799 - RNA, 19 nt, Artificial Sequence
  Description of Artificial Sequence: Synthetic oligonucleotide
  Antisense strand to SEQ ID NO: 1412798
aggcagaacaguuaccucc

SEQ ID NO: 1412800 - RNA, 19 nt, Artificial Sequence
  Description of Artificial Sequence: Synthetic oligonucleotide
  Sense strand starting at position 3536 of SEQ ID NO: 1243379
cugccuuuguccucacuga

SEQ ID NO: 1412801 - RNA, 19 nt, Artificial Sequence
  Description of Artificial Sequence: Synthetic oligonucleotide
  Antisense strand to SEQ ID NO: 1412800
ucagugaggacaaaggcag

SEQ ID NO: 1412802 - RNA, 19 nt, Artificial Sequence
  Description of Artificial Sequence: Synthetic oligonucleotide
  Sense strand starting at position 3537 of SEQ ID NO: 1243379
ugccuuuguccucacugaa

SEQ ID NO: 1412803 - RNA, 19 nt, Artificial Sequence
  Description of Artificial Sequence: Synthetic oligonucleotide
  Antisense strand to SEQ ID NO: 1412802
uucagugaggacaaaggca

SEQ ID NO: 1412804 - RNA, 19 nt, Artificial Sequence
  Description of Artificial Sequence: Synthetic oligonucleotide
  Sense strand starting at position 3630 of SEQ ID NO: 1243379
ugccucaacccauggaaua

SEQ ID NO: 1412805 - RNA, 19 nt, Artificial Sequence
  Description of Artificial Sequence: Synthetic oligonucleotide
  Antisense strand to SEQ ID NO: 1412804
uauuccauggguugaggca

SEQ ID NO: 1412806 - RNA, 19 nt, Artificial Sequence
  Description of Artificial Sequence: Synthetic oligonucleotide
  Sense strand starting at position 3731 of SEQ ID NO: 1243379
ugguuugguucuguaucca

SEQ ID NO: 1412807 - RNA, 19 nt, Artificial Sequence
  Description of Artificial Sequence: Synthetic oligonucleotide
  Antisense strand to SEQ ID NO: 1412806
uggauacagaaccaaacca

SEQ ID NO: 1412808 - RNA, 19 nt, Artificial Sequence
  Description of Artificial Sequence: Synthetic oligonucleotide
  Sense strand starting at position 3770 of SEQ ID NO: 1243379
auuguaaucccacaggucu

SEQ ID NO: 1412809 - RNA, 19 nt, Artificial Sequence
  Description of Artificial Sequence: Synthetic oligonucleotide
  Antisense strand to SEQ ID NO: 1412808
agaccugugggauuacaau

SEQ ID NO: 1412810 - RNA, 19 nt, Artificial Sequence
  Description of Artificial Sequence: Synthetic oligonucleotide
  Sense strand starting at position 3850 of SEQ ID NO: 1243379
gauagugaauuccacgaga

SEQ ID NO: 1412811 - RNA, 19 nt, Artificial Sequence
  Description of Artificial Sequence: Synthetic oligonucleotide
  Antisense strand to SEQ ID NO: 1412810
ucucguggaauucacuauc

SEQ ID NO: 1412812 - RNA, 19 nt, Artificial Sequence
  Description of Artificial Sequence: Synthetic oligonucleotide
  Sense strand starting at position 3852 of SEQ ID NO: 1243379
uagugaauuccacgagauc

SEQ ID NO: 1412813 - RNA, 19 nt, Artificial Sequence
  Description of Artificial Sequence: Synthetic oligonucleotide
  Antisense strand to SEQ ID NO: 1412812
gaucucguggaauucacua

SEQ ID NO: 1412814 - RNA, 19 nt, Artificial Sequence
  Description of Artificial Sequence: Synthetic oligonucleotide
  Sense strand starting at position 3949 of SEQ ID NO: 1243379
ccaugauugugaguuugcu

SEQ ID NO: 1412815 - RNA, 19 nt, Artificial Sequence
  Description of Artificial Sequence: Synthetic oligonucleotide
  Antisense strand to SEQ ID NO: 1412814
agcaaacucacaaucaugg

SEQ ID NO: 1412816 - RNA, 19 nt, Artificial Sequence
  Description of Artificial Sequence: Synthetic oligonucleotide
  Sense strand starting at position 83 of SEQ ID NO: 1243380
ccgagugguucucuccuua

SEQ ID NO: 1412817 - RNA, 19 nt, Artificial Sequence
  Description of Artificial Sequence: Synthetic oligonucleotide
  Antisense strand to SEQ ID NO: 1412816
uaaggagagaaccacucgg

SEQ ID NO: 1412818 - RNA, 19 nt, Artificial Sequence
  Description of Artificial Sequence: Synthetic oligonucleotide
  Sense strand starting at position 87 of SEQ ID NO: 1243380
gugguucucuccuuauuau

SEQ ID NO: 1412819 - RNA, 19 nt, Artificial Sequence
  Description of Artificial Sequence: Synthetic oligonucleotide
  Antisense strand to SEQ ID NO: 1412818
auaauaaggagagaaccac

SEQ ID NO: 1412820 - RNA, 19 nt, Artificial Sequence
  Description of Artificial Sequence: Synthetic oligonucleotide
  Sense strand starting at position 88 of SEQ ID NO: 1243380
ugguucucuccuuauuauu

SEQ ID NO: 1412821 - RNA, 19 nt, Artificial Sequence
  Description of Artificial Sequence: Synthetic oligonucleotide
  Antisense strand to SEQ ID NO: 1412820
aauaauaaggagagaacca

SEQ ID NO: 1412822 - RNA, 19 nt, Artificial Sequence
  Description of Artificial Sequence: Synthetic oligonucleotide
  Sense strand starting at position 201 of SEQ ID NO: 1243380
gguucaagguucgagcaau

SEQ ID NO: 1412823 - RNA, 19 nt, Artificial Sequence
  Description of Artificial Sequence: Synthetic oligonucleotide
  Antisense strand to SEQ ID NO: 1412822
auugcucgaaccuugaacc

SEQ ID NO: 1412824 - RNA, 19 nt, Artificial Sequence
  Description of Artificial Sequence: Synthetic oligonucleotide
  Sense strand starting at position 410 of SEQ ID NO: 1243380
agccgagugguucauucuu

SEQ ID NO: 1412825 - RNA, 19 nt, Artificial Sequence
  Description of Artificial Sequence: Synthetic oligonucleotide
  Antisense strand to SEQ ID NO: 1412824
aagaaugaaccacucggcu

SEQ ID NO: 1412826 - RNA, 19 nt, Artificial Sequence
  Description of Artificial Sequence: Synthetic oligonucleotide
  Sense strand starting at position 412 of SEQ ID NO: 1243380
ccgagugguucauucuugu

SEQ ID NO: 1412827 - RNA, 19 nt, Artificial Sequence
  Description of Artificial Sequence: Synthetic oligonucleotide
  Antisense strand to SEQ ID NO: 1412826
acaagaaugaaccacucgg

SEQ ID NO: 1412828 - RNA, 19 nt, Artificial Sequence
  Description of Artificial Sequence: Synthetic oligonucleotide
  Sense strand starting at position 416 of SEQ ID NO: 1243380
gugguucauucuugugaug

SEQ ID NO: 1412829 - RNA, 19 nt, Artificial Sequence
  Description of Artificial Sequence: Synthetic oligonucleotide
  Antisense strand to SEQ ID NO: 1412828
caucacaagaaugaaccac

SEQ ID NO: 1412830 - RNA, 19 nt, Artificial Sequence
  Description of Artificial Sequence: Synthetic oligonucleotide
  Sense strand starting at position 421 of SEQ ID NO: 1243380
ucauucuugugaugaaacu

SEQ ID NO: 1412831 - RNA, 19 nt, Artificial Sequence
  Description of Artificial Sequence: Synthetic oligonucleotide
  Antisense strand to SEQ ID NO: 1412830
aguuucaucacaagaauga

SEQ ID NO: 1412832 - RNA, 19 nt, Artificial Sequence
  Description of Artificial Sequence: Synthetic oligonucleotide
  Sense strand starting at position 492 of SEQ ID NO: 1243380
gcggguucucccugccuga

SEQ ID NO: 1412833 - RNA, 19 nt, Artificial Sequence
  Description of Artificial Sequence: Synthetic oligonucleotide
  Antisense strand to SEQ ID NO: 1412832
ucaggcagggagaacccgc

SEQ ID NO: 1412834 - RNA, 19 nt, Artificial Sequence
  Description of Artificial Sequence: Synthetic oligonucleotide
  Sense strand starting at position 505 of SEQ ID NO: 1243380
gccugacccuucugcaauu

SEQ ID NO: 1412835 - RNA, 19 nt, Artificial Sequence
  Description of Artificial Sequence: Synthetic oligonucleotide
  Antisense strand to SEQ ID NO: 1412834
aauugcagaagggucaggc

SEQ ID NO: 1412836 - RNA, 19 nt, Artificial Sequence
  Description of Artificial Sequence: Synthetic oligonucleotide
  Sense strand starting at position 743 of SEQ ID NO: 1243380
ccaaauaacugggaggaca

SEQ ID NO: 1412837 - RNA, 19 nt, Artificial Sequence
  Description of Artificial Sequence: Synthetic oligonucleotide
  Antisense strand to SEQ ID NO: 1412836
uguccucccaguuauuugg

SEQ ID NO: 1412838 - RNA, 19 nt, Artificial Sequence
  Description of Artificial Sequence: Synthetic oligonucleotide
  Sense strand starting at position 754 of SEQ ID NO: 1243380
ggaggacaggugugaacua

SEQ ID NO: 1412839 - RNA, 19 nt, Artificial Sequence
  Description of Artificial Sequence: Synthetic oligonucleotide
  Antisense strand to SEQ ID NO: 1412838
uaguucacaccuguccucc

SEQ ID NO: 1412840 - RNA, 19 nt, Artificial Sequence
  Description of Artificial Sequence: Synthetic oligonucleotide
  Sense strand starting at position 782 of SEQ ID NO: 1243380
gcagcaccuccguuguuua

SEQ ID NO: 1412841 - RNA, 19 nt, Artificial Sequence
  Description of Artificial Sequence: Synthetic oligonucleotide
  Antisense strand to SEQ ID NO: 1412840
uaaacaacggaggugcugc

SEQ ID NO: 1412842 - RNA, 19 nt, Artificial Sequence
  Description of Artificial Sequence: Synthetic oligonucleotide
  Sense strand starting at position 783 of SEQ ID NO: 1243380
cagcaccuccguuguuuaa

SEQ ID NO: 1412843 - RNA, 19 nt, Artificial Sequence
  Description of Artificial Sequence: Synthetic oligonucleotide
  Antisense strand to SEQ ID NO: 1412842
uuaaacaacggaggugcug

SEQ ID NO: 1412844 - RNA, 19 nt, Artificial Sequence
  Description of Artificial Sequence: Synthetic oligonucleotide
  Sense strand starting at position 815 of SEQ ID NO: 1243380
uccagcuccacgugguaaa

SEQ ID NO: 1412845 - RNA, 19 nt, Artificial Sequence
  Description of Artificial Sequence: Synthetic oligonucleotide
  Antisense strand to SEQ ID NO: 1412844
uuuaccacguggagcugga

SEQ ID NO: 1412846 - RNA, 19 nt, Artificial Sequence
  Description of Artificial Sequence: Synthetic oligonucleotide
  Sense strand starting at position 910 of SEQ ID NO: 1243380
gccacacuaggcuguuaua

SEQ ID NO: 1412847 - RNA, 19 nt, Artificial Sequence
  Description of Artificial Sequence: Synthetic oligonucleotide
  Antisense strand to SEQ ID NO: 1412846
uauaacagccuaguguggc

SEQ ID NO: 1412848 - RNA, 19 nt, Artificial Sequence
  Description of Artificial Sequence: Synthetic oligonucleotide
  Sense strand starting at position 1098 of SEQ ID NO: 1243380
aggagaaccucaggugaga

SEQ ID NO: 1412849 - RNA, 19 nt, Artificial Sequence
  Description of Artificial Sequence: Synthetic oligonucleotide
  Antisense strand to SEQ ID NO: 1412848
ucucaccugagguucuccu

SEQ ID NO: 1412850 - RNA, 19 nt, Artificial Sequence
  Description of Artificial Sequence: Synthetic oligonucleotide
  Sense strand starting at position 1155 of SEQ ID NO: 1243380
gcacuuaucacucgggaac

SEQ ID NO: 1412851 - RNA, 19 nt, Artificial Sequence
  Description of Artificial Sequence: Synthetic oligonucleotide
  Antisense strand to SEQ ID NO: 1412850
guucccgagugauaagugc

SEQ ID NO: 1412852 - RNA, 19 nt, Artificial Sequence
  Description of Artificial Sequence: Synthetic oligonucleotide
  Sense strand starting at position 1296 of SEQ ID NO: 1243380
ccgguagggucuuacagua

SEQ ID NO: 1412853 - RNA, 19 nt, Artificial Sequence
  Description of Artificial Sequence: Synthetic oligonucleotide
  Antisense strand to SEQ ID NO: 1412852
uacuguaagacccuaccgg

SEQ ID NO: 1412854 - RNA, 19 nt, Artificial Sequence
  Description of Artificial Sequence: Synthetic oligonucleotide
  Sense strand starting at position 2190 of SEQ ID NO: 1243380
ccgagugcugcuccuguca

SEQ ID NO: 1412855 - RNA, 19 nt, Artificial Sequence
  Description of Artificial Sequence: Synthetic oligonucleotide
  Antisense strand to SEQ ID NO: 1412854
ugacaggagcagcacucgg

SEQ ID NO: 1412856 - RNA, 19 nt, Artificial Sequence
  Description of Artificial Sequence: Synthetic oligonucleotide
  Sense strand starting at position 2192 of SEQ ID NO: 1243380
gagugcugcuccugucauu

SEQ ID NO: 1412857 - RNA, 19 nt, Artificial Sequence
  Description of Artificial Sequence: Synthetic oligonucleotide
  Antisense strand to SEQ ID NO: 1412856
aaugacaggagcagcacuc

SEQ ID NO: 1412858 - RNA, 19 nt, Artificial Sequence
  Description of Artificial Sequence: Synthetic oligonucleotide
  Sense strand starting at position 2203 of SEQ ID NO: 1243380
cugucauuguggccaugga

SEQ ID NO: 1412859 - RNA, 19 nt, Artificial Sequence
  Description of Artificial Sequence: Synthetic oligonucleotide
  Antisense strand to SEQ ID NO: 1412858
uccauggccacaaugacag

SEQ ID NO: 1412860 - RNA, 19 nt, Artificial Sequence
  Description of Artificial Sequence: Synthetic oligonucleotide
  Sense strand starting at position 3009 of SEQ ID NO: 1243380
cuuggaaugucgggucaga

SEQ ID NO: 1412861 - RNA, 19 nt, Artificial Sequence
  Description of Artificial Sequence: Synthetic oligonucleotide
  Antisense strand to SEQ ID NO: 1412860
ucugacccgacauuccaag

SEQ ID NO: 1412862 - RNA, 19 nt, Artificial Sequence
  Description of Artificial Sequence: Synthetic oligonucleotide
  Sense strand starting at position 3193 of SEQ ID NO: 1243380
aagcguuucugugcucaau

SEQ ID NO: 1412863 - RNA, 19 nt, Artificial Sequence
  Description of Artificial Sequence: Synthetic oligonucleotide
  Antisense strand to SEQ ID NO: 1412862
auugagcacagaaacgcuu

SEQ ID NO: 1412864 - RNA, 19 nt, Artificial Sequence
  Description of Artificial Sequence: Synthetic oligonucleotide
  Sense strand starting at position 3206 of SEQ ID NO: 1243380
cucaaugggucgcccuaau

SEQ ID NO: 1412865 - RNA, 19 nt, Artificial Sequence
  Description of Artificial Sequence: Synthetic oligonucleotide
  Antisense strand to SEQ ID NO: 1412864
auuagggcgacccauugag

SEQ ID NO: 1412866 - RNA, 19 nt, Artificial Sequence
  Description of Artificial Sequence: Synthetic oligonucleotide
  Sense strand starting at position 3251 of SEQ ID NO: 1243380
cggcugugugcucagggau

SEQ ID NO: 1412867 - RNA, 19 nt, Artificial Sequence
  Description of Artificial Sequence: Synthetic oligonucleotide
  Antisense strand to SEQ ID NO: 1412866
aucccugagcacacagccg

SEQ ID NO: 1412868 - RNA, 19 nt, Artificial Sequence
  Description of Artificial Sequence: Synthetic oligonucleotide
  Sense strand starting at position 3252 of SEQ ID NO: 1243380
ggcugugugcucagggaua

SEQ ID NO: 1412869 - RNA, 19 nt, Artificial Sequence
  Description of Artificial Sequence: Synthetic oligonucleotide
  Antisense strand to SEQ ID NO: 1412868
uaucccugagcacacagcc

SEQ ID NO: 1412870 - RNA, 19 nt, Artificial Sequence
  Description of Artificial Sequence: Synthetic oligonucleotide
  Sense strand starting at position 3257 of SEQ ID NO: 1243380
ugugcucagggauaccaaa

SEQ ID NO: 1412871 - RNA, 19 nt, Artificial Sequence
  Description of Artificial Sequence: Synthetic oligonucleotide
  Antisense strand to SEQ ID NO: 1412870
uuugguaucccugagcaca

SEQ ID NO: 1412872 - RNA, 19 nt, Artificial Sequence
  Description of Artificial Sequence: Synthetic oligonucleotide
  Sense strand starting at position 3300 of SEQ ID NO: 1243380
aaguccuauguuugcugaa

SEQ ID NO: 1412873 - RNA, 19 nt, Artificial Sequence
  Description of Artificial Sequence: Synthetic oligonucleotide
  Antisense strand to SEQ ID NO: 1412872
uucagcaaacauaggacuu

SEQ ID NO: 1412874 - RNA, 19 nt, Artificial Sequence
  Description of Artificial Sequence: Synthetic oligonucleotide
  Sense strand starting at position 3301 of SEQ ID NO: 1243380
aguccuauguuugcugaaa

SEQ ID NO: 1412875 - RNA, 19 nt, Artificial Sequence
  Description of Artificial Sequence: Synthetic oligonucleotide
  Antisense strand to SEQ ID NO: 1412874
uuucagcaaacauaggacu

SEQ ID NO: 1412876 - RNA, 19 nt, Artificial Sequence
  Description of Artificial Sequence: Synthetic oligonucleotide
  Sense strand starting at position 3302 of SEQ ID NO: 1243380
guccuauguuugcugaaac

SEQ ID NO: 1412877 - RNA, 19 nt, Artificial Sequence
  Description of Artificial Sequence: Synthetic oligonucleotide
  Antisense strand to SEQ ID NO: 1412876
guuucagcaaacauaggac

SEQ ID NO: 1412878 - RNA, 19 nt, Artificial Sequence
  Description of Artificial Sequence: Synthetic oligonucleotide
  Sense strand starting at position 3303 of SEQ ID NO: 1243380
uccuauguuugcugaaaca

SEQ ID NO: 1412879 - RNA, 19 nt, Artificial Sequence
  Description of Artificial Sequence: Synthetic oligonucleotide
  Antisense strand to SEQ ID NO: 1412878
uguuucagcaaacauagga

SEQ ID NO: 1412880 - RNA, 19 nt, Artificial Sequence
  Description of Artificial Sequence: Synthetic oligonucleotide
  Sense strand starting at position 3313 of SEQ ID NO: 1243380
gcugaaacaucguugggcu

SEQ ID NO: 1412881 - RNA, 19 nt, Artificial Sequence
  Description of Artificial Sequence: Synthetic oligonucleotide
  Antisense strand to SEQ ID NO: 1412880
agcccaacgauguuucagc

SEQ ID NO: 1412882 - RNA, 19 nt, Artificial Sequence
  Description of Artificial Sequence: Synthetic oligonucleotide
  Sense strand starting at position 3663 of SEQ ID NO: 1243380
uuuaguuagaagugugaaa

SEQ ID NO: 1412883 - RNA, 19 nt, Artificial Sequence
  Description of Artificial Sequence: Synthetic oligonucleotide
  Antisense strand to SEQ ID NO: 1412882
uuucacacuucuaacuaaa

SEQ ID NO: 1412884 - RNA, 19 nt, Artificial Sequence
  Description of Artificial Sequence: Synthetic oligonucleotide
  Sense strand starting at position 3695 of SEQ ID NO: 1243380
ccgugucaucaucaugaag

SEQ ID NO: 1412885 - RNA, 19 nt, Artificial Sequence
  Description of Artificial Sequence: Synthetic oligonucleotide
  Antisense strand to SEQ ID NO: 1412884
cuucaugaugaugacacgg

SEQ ID NO: 1412886 - RNA, 19 nt, Artificial Sequence
  Description of Artificial Sequence: Synthetic oligonucleotide
  Sense strand starting at position 3697 of SEQ ID NO: 1243380
gugucaucaucaugaagga

SEQ ID NO: 1412887 - RNA, 19 nt, Artificial Sequence
  Description of Artificial Sequence: Synthetic oligonucleotide
  Antisense strand to SEQ ID NO: 1412886
uccuucaugaugaugacac

SEQ ID NO: 1412888 - RNA, 19 nt, Artificial Sequence
  Description of Artificial Sequence: Synthetic oligonucleotide
  Sense strand starting at position 43 of SEQ ID NO: 1243381
gugacagacagguagcauu

SEQ ID NO: 1412889 - RNA, 19 nt, Artificial Sequence
  Description of Artificial Sequence: Synthetic oligonucleotide
  Antisense strand to SEQ ID NO: 1412888
aaugcuaccugucugucac

SEQ ID NO: 1412890 - RNA, 19 nt, Artificial Sequence
  Description of Artificial Sequence: Synthetic oligonucleotide
  Sense strand starting at position 74 of SEQ ID NO: 1243381
acccaagggugaugcuauu

SEQ ID NO: 1412891 - RNA, 19 nt, Artificial Sequence
  Description of Artificial Sequence: Synthetic oligonucleotide
  Antisense strand to SEQ ID NO: 1412890
aauagcaucacccuugggu

SEQ ID NO: 1412892 - RNA, 19 nt, Artificial Sequence
  Description of Artificial Sequence: Synthetic oligonucleotide
  Sense strand starting at position 80 of SEQ ID NO: 1243381
gggugaugcuauuccugca

SEQ ID NO: 1412893 - RNA, 19 nt, Artificial Sequence
  Description of Artificial Sequence: Synthetic oligonucleotide
  Antisense strand to SEQ ID NO: 1412892
ugcaggaauagcaucaccc

SEQ ID NO: 1412894 - RNA, 19 nt, Artificial Sequence
  Description of Artificial Sequence: Synthetic oligonucleotide
  Sense strand starting at position 85 of SEQ ID NO: 1243381
augcuauuccugcaggguu

SEQ ID NO: 1412895 - RNA, 19 nt, Artificial Sequence
  Description of Artificial Sequence: Synthetic oligonucleotide
  Antisense strand to SEQ ID NO: 1412894
aacccugcaggaauagcau

SEQ ID NO: 1412896 - RNA, 19 nt, Artificial Sequence
  Description of Artificial Sequence: Synthetic oligonucleotide
  Sense strand starting at position 154 of SEQ ID NO: 1243381
gugggagguuccaaaguug

SEQ ID NO: 1412897 - RNA, 19 nt, Artificial Sequence
  Description of Artificial Sequence: Synthetic oligonucleotide
  Antisense strand to SEQ ID NO: 1412896
caacuuuggaaccucccac

SEQ ID NO: 1412898 - RNA, 19 nt, Artificial Sequence
  Description of Artificial Sequence: Synthetic oligonucleotide
  Sense strand starting at position 184 of SEQ ID NO: 1243381
ccaagucuuucuuccaagu

SEQ ID NO: 1412899 - RNA, 19 nt, Artificial Sequence
  Description of Artificial Sequence: Synthetic oligonucleotide
  Antisense strand to SEQ ID NO: 1412898
acuuggaagaaagacuugg

SEQ ID NO: 1412900 - RNA, 19 nt, Artificial Sequence
  Description of Artificial Sequence: Synthetic oligonucleotide
  Sense strand starting at position 241 of SEQ ID NO: 1243381
acaagcgugucagugugaa

SEQ ID NO: 1412901 - RNA, 19 nt, Artificial Sequence
  Description of Artificial Sequence: Synthetic oligonucleotide
  Antisense strand to SEQ ID NO: 1412900
uucacacugacacgcuugu

SEQ ID NO: 1412902 - RNA, 19 nt, Artificial Sequence
  Description of Artificial Sequence: Synthetic oligonucleotide
  Sense strand starting at position 326 of SEQ ID NO: 1243381
ccgagugguucucuccuua

SEQ ID NO: 1412903 - RNA, 19 nt, Artificial Sequence
  Description of Artificial Sequence: Synthetic oligonucleotide
  Antisense strand to SEQ ID NO: 1412902
uaaggagagaaccacucgg

SEQ ID NO: 1412904 - RNA, 19 nt, Artificial Sequence
  Description of Artificial Sequence: Synthetic oligonucleotide
  Sense strand starting at position 330 of SEQ ID NO: 1243381
gugguucucuccuuauuau

SEQ ID NO: 1412905 - RNA, 19 nt, Artificial Sequence
  Description of Artificial Sequence: Synthetic oligonucleotide
  Antisense strand to SEQ ID NO: 1412904
auaauaaggagagaaccac

SEQ ID NO: 1412906 - RNA, 19 nt, Artificial Sequence
  Description of Artificial Sequence: Synthetic oligonucleotide
  Sense strand starting at position 331 of SEQ ID NO: 1243381
ugguucucuccuuauuauu

SEQ ID NO: 1412907 - RNA, 19 nt, Artificial Sequence
  Description of Artificial Sequence: Synthetic oligonucleotide
  Antisense strand to SEQ ID NO: 1412906
aauaauaaggagagaacca

SEQ ID NO: 1412908 - RNA, 19 nt, Artificial Sequence
  Description of Artificial Sequence: Synthetic oligonucleotide
  Sense strand starting at position 444 of SEQ ID NO: 1243381
gguucaagguucgagcaau

SEQ ID NO: 1412909 - RNA, 19 nt, Artificial Sequence
  Description of Artificial Sequence: Synthetic oligonucleotide
  Antisense strand to SEQ ID NO: 1412908
auugcucgaaccuugaacc

SEQ ID NO: 1412910 - RNA, 19 nt, Artificial Sequence
  Description of Artificial Sequence: Synthetic oligonucleotide
  Sense strand starting at position 653 of SEQ ID NO: 1243381
agccgagugguucauucuu

SEQ ID NO: 1412911 - RNA, 19 nt, Artificial Sequence
  Description of Artificial Sequence: Synthetic oligonucleotide
  Antisense strand to SEQ ID NO: 1412910
aagaaugaaccacucggcu

SEQ ID NO: 1412912 - RNA, 19 nt, Artificial Sequence
  Description of Artificial Sequence: Synthetic oligonucleotide
  Sense strand starting at position 655 of SEQ ID NO: 1243381
ccgagugguucauucuugu

SEQ ID NO: 1412913 - RNA, 19 nt, Artificial Sequence
  Description of Artificial Sequence: Synthetic oligonucleotide
  Antisense strand to SEQ ID NO: 1412912
acaagaaugaaccacucgg

SEQ ID NO: 1412914 - RNA, 19 nt, Artificial Sequence
  Description of Artificial Sequence: Synthetic oligonucleotide
  Sense strand starting at position 664 of SEQ ID NO: 1243381
ucauucuugugaugaaacu

SEQ ID NO: 1412915 - RNA, 19 nt, Artificial Sequence
  Description of Artificial Sequence: Synthetic oligonucleotide
  Antisense strand to SEQ ID NO: 1412914
aguuucaucacaagaauga

SEQ ID NO: 1412916 - RNA, 19 nt, Artificial Sequence
  Description of Artificial Sequence: Synthetic oligonucleotide
  Sense strand starting at position 735 of SEQ ID NO: 1243381
gcggguucucccugccuga

SEQ ID NO: 1412917 - RNA, 19 nt, Artificial Sequence
  Description of Artificial Sequence: Synthetic oligonucleotide
  Antisense strand to SEQ ID NO: 1412916
ucaggcagggagaacccgc

SEQ ID NO: 1412918 - RNA, 19 nt, Artificial Sequence
  Description of Artificial Sequence: Synthetic oligonucleotide
  Sense strand starting at position 986 of SEQ ID NO: 1243381
ccaaauaacugggaggaca

SEQ ID NO: 1412919 - RNA, 19 nt, Artificial Sequence
  Description of Artificial Sequence: Synthetic oligonucleotide
  Antisense strand to SEQ ID NO: 1412918
uguccucccaguuauuugg

SEQ ID NO: 1412920 - RNA, 19 nt, Artificial Sequence
  Description of Artificial Sequence: Synthetic oligonucleotide
  Sense strand starting at position 997 of SEQ ID NO: 1243381
ggaggacaggugugaacua

SEQ ID NO: 1412921 - RNA, 19 nt, Artificial Sequence
  Description of Artificial Sequence: Synthetic oligonucleotide
  Antisense strand to SEQ ID NO: 1412920
uaguucacaccuguccucc

SEQ ID NO: 1412922 - RNA, 19 nt, Artificial Sequence
  Description of Artificial Sequence: Synthetic oligonucleotide
  Sense strand starting at position 1025 of SEQ ID NO: 1243381
gcagcaccuccguuguuua

SEQ ID NO: 1412923 - RNA, 19 nt, Artificial Sequence
  Description of Artificial Sequence: Synthetic oligonucleotide
  Antisense strand to SEQ ID NO: 1412922
uaaacaacggaggugcugc

SEQ ID NO: 1412924 - RNA, 19 nt, Artificial Sequence
  Description of Artificial Sequence: Synthetic oligonucleotide
  Sense strand starting at position 1026 of SEQ ID NO: 1243381
cagcaccuccguuguuuaa

SEQ ID NO: 1412925 - RNA, 19 nt, Artificial Sequence
  Description of Artificial Sequence: Synthetic oligonucleotide
  Antisense strand to SEQ ID NO: 1412924
uuaaacaacggaggugcug

SEQ ID NO: 1412926 - RNA, 19 nt, Artificial Sequence
  Description of Artificial Sequence: Synthetic oligonucleotide
  Sense strand starting at position 1058 of SEQ ID NO: 1243381
uccagcuccacgugguaaa

SEQ ID NO: 1412927 - RNA, 19 nt, Artificial Sequence
  Description of Artificial Sequence: Synthetic oligonucleotide
  Antisense strand to SEQ ID NO: 1412926
uuuaccacguggagcugga

SEQ ID NO: 1412928 - RNA, 19 nt, Artificial Sequence
  Description of Artificial Sequence: Synthetic oligonucleotide
  Sense strand starting at position 1153 of SEQ ID NO: 1243381
gccacacuaggcuguuaua

SEQ ID NO: 1412929 - RNA, 19 nt, Artificial Sequence
  Description of Artificial Sequence: Synthetic oligonucleotide
  Antisense strand to SEQ ID NO: 1412928
uauaacagccuaguguggc

SEQ ID NO: 1412930 - RNA, 19 nt, Artificial Sequence
  Description of Artificial Sequence: Synthetic oligonucleotide
  Sense strand starting at position 1341 of SEQ ID NO: 1243381
aggagaaccucaggugaga

SEQ ID NO: 1412931 - RNA, 19 nt, Artificial Sequence
  Description of Artificial Sequence: Synthetic oligonucleotide
  Antisense strand to SEQ ID NO: 1412930
ucucaccugagguucuccu

SEQ ID NO: 1412932 - RNA, 19 nt, Artificial Sequence
  Description of Artificial Sequence: Synthetic oligonucleotide
  Sense strand starting at position 1398 of SEQ ID NO: 1243381
gcacuuaucacucgggaac

SEQ ID NO: 1412933 - RNA, 19 nt, Artificial Sequence
  Description of Artificial Sequence: Synthetic oligonucleotide
  Antisense strand to SEQ ID NO: 1412932
guucccgagugauaagugc

SEQ ID NO: 1412934 - RNA, 19 nt, Artificial Sequence
  Description of Artificial Sequence: Synthetic oligonucleotide
  Sense strand starting at position 1539 of SEQ ID NO: 1243381
ccgguagggucuuacagua

SEQ ID NO: 1412935 - RNA, 19 nt, Artificial Sequence
  Description of Artificial Sequence: Synthetic oligonucleotide
  Antisense strand to SEQ ID NO: 1412934
uacuguaagacccuaccgg

SEQ ID NO: 1412936 - RNA, 19 nt, Artificial Sequence
  Description of Artificial Sequence: Synthetic oligonucleotide
  Sense strand starting at position 2433 of SEQ ID NO: 1243381
ccgagugcugcuccuguca

SEQ ID NO: 1412937 - RNA, 19 nt, Artificial Sequence
  Description of Artificial Sequence: Synthetic oligonucleotide
  Antisense strand to SEQ ID NO: 1412936
ugacaggagcagcacucgg

SEQ ID NO: 1412938 - RNA, 19 nt, Artificial Sequence
  Description of Artificial Sequence: Synthetic oligonucleotide
  Sense strand starting at position 2446 of SEQ ID NO: 1243381
cugucauuguggccaugga

SEQ ID NO: 1412939 - RNA, 19 nt, Artificial Sequence
  Description of Artificial Sequence: Synthetic oligonucleotide
  Antisense strand to SEQ ID NO: 1412938
uccauggccacaaugacag

SEQ ID NO: 1412940 - RNA, 19 nt, Artificial Sequence
  Description of Artificial Sequence: Synthetic oligonucleotide
  Sense strand starting at position 3252 of SEQ ID NO: 1243381
cuuggaaugucgggucaga

SEQ ID NO: 1412941 - RNA, 19 nt, Artificial Sequence
  Description of Artificial Sequence: Synthetic oligonucleotide
  Antisense strand to SEQ ID NO: 1412940
ucugacccgacauuccaag

SEQ ID NO: 1412942 - RNA, 19 nt, Artificial Sequence
  Description of Artificial Sequence: Synthetic oligonucleotide
  Sense strand starting at position 3436 of SEQ ID NO: 1243381
aagcguuucugugcucaau

SEQ ID NO: 1412943 - RNA, 19 nt, Artificial Sequence
  Description of Artificial Sequence: Synthetic oligonucleotide
  Antisense strand to SEQ ID NO: 1412942
auugagcacagaaacgcuu

SEQ ID NO: 1412944 - RNA, 19 nt, Artificial Sequence
  Description of Artificial Sequence: Synthetic oligonucleotide
  Sense strand starting at position 3449 of SEQ ID NO: 1243381
cucaaugggucgcccuaau

SEQ ID NO: 1412945 - RNA, 19 nt, Artificial Sequence
  Description of Artificial Sequence: Synthetic oligonucleotide
  Antisense strand to SEQ ID NO: 1412944
auuagggcgacccauugag

SEQ ID NO: 1412946 - RNA, 19 nt, Artificial Sequence
  Description of Artificial Sequence: Synthetic oligonucleotide
  Sense strand starting at position 3494 of SEQ ID NO: 1243381
cggcugugugcucagggau

SEQ ID NO: 1412947 - RNA, 19 nt, Artificial Sequence
  Description of Artificial Sequence: Synthetic oligonucleotide
  Antisense strand to SEQ ID NO: 1412946
aucccugagcacacagccg

SEQ ID NO: 1412948 - RNA, 19 nt, Artificial Sequence
  Description of Artificial Sequence: Synthetic oligonucleotide
  Sense strand starting at position 3495 of SEQ ID NO: 1243381
ggcugugugcucagggaua

SEQ ID NO: 1412949 - RNA, 19 nt, Artificial Sequence
  Description of Artificial Sequence: Synthetic oligonucleotide
  Antisense strand to SEQ ID NO: 1412948
uaucccugagcacacagcc

SEQ ID NO: 1412950 - RNA, 19 nt, Artificial Sequence
  Description of Artificial Sequence: Synthetic oligonucleotide
  Sense strand starting at position 3500 of SEQ ID NO: 1243381
ugugcucagggauaccaaa

SEQ ID NO: 1412951 - RNA, 19 nt, Artificial Sequence
  Description of Artificial Sequence: Synthetic oligonucleotide
  Antisense strand to SEQ ID NO: 1412950
uuugguaucccugagcaca

SEQ ID NO: 1412952 - RNA, 19 nt, Artificial Sequence
  Description of Artificial Sequence: Synthetic oligonucleotide
  Sense strand starting at position 3543 of SEQ ID NO: 1243381
aaguccuauguuugcugaa

SEQ ID NO: 1412953 - RNA, 19 nt, Artificial Sequence
  Description of Artificial Sequence: Synthetic oligonucleotide
  Antisense strand to SEQ ID NO: 1412952
uucagcaaacauaggacuu

SEQ ID NO: 1412954 - RNA, 19 nt, Artificial Sequence
  Description of Artificial Sequence: Synthetic oligonucleotide
  Sense strand starting at position 3544 of SEQ ID NO: 1243381
aguccuauguuugcugaaa

SEQ ID NO: 1412955 - RNA, 19 nt, Artificial Sequence
  Description of Artificial Sequence: Synthetic oligonucleotide
  Antisense strand to SEQ ID NO: 1412954
uuucagcaaacauaggacu

SEQ ID NO: 1412956 - RNA, 19 nt, Artificial Sequence
  Description of Artificial Sequence: Synthetic oligonucleotide
  Sense strand starting at position 3545 of SEQ ID NO: 1243381
guccuauguuugcugaaac

SEQ ID NO: 1412957 - RNA, 19 nt, Artificial Sequence
  Description of Artificial Sequence: Synthetic oligonucleotide
  Antisense strand to SEQ ID NO: 1412956
guuucagcaaacauaggac

SEQ ID NO: 1412958 - RNA, 19 nt, Artificial Sequence
  Description of Artificial Sequence: Synthetic oligonucleotide
  Sense strand starting at position 3546 of SEQ ID NO: 1243381
uccuauguuugcugaaaca

SEQ ID NO: 1412959 - RNA, 19 nt, Artificial Sequence
  Description of Artificial Sequence: Synthetic oligonucleotide
  Antisense strand to SEQ ID NO: 1412958
uguuucagcaaacauagga

SEQ ID NO: 1412960 - RNA, 19 nt, Artificial Sequence
  Description of Artificial Sequence: Synthetic oligonucleotide
  Sense strand starting at position 3556 of SEQ ID NO: 1243381
gcugaaacaucguugggcu

SEQ ID NO: 1412961 - RNA, 19 nt, Artificial Sequence
  Description of Artificial Sequence: Synthetic oligonucleotide
  Antisense strand to SEQ ID NO: 1412960
agcccaacgauguuucagc

SEQ ID NO: 1412962 - RNA, 19 nt, Artificial Sequence
  Description of Artificial Sequence: Synthetic oligonucleotide
  Sense strand starting at position 3906 of SEQ ID NO: 1243381
uuuaguuagaagugugaaa

SEQ ID NO: 1412963 - RNA, 19 nt, Artificial Sequence
  Description of Artificial Sequence: Synthetic oligonucleotide
  Antisense strand to SEQ ID NO: 1412962
uuucacacuucuaacuaaa

SEQ ID NO: 1412964 - RNA, 19 nt, Artificial Sequence
  Description of Artificial Sequence: Synthetic oligonucleotide
  Sense strand starting at position 3938 of SEQ ID NO: 1243381
ccgugucaucaucaugaag

SEQ ID NO: 1412965 - RNA, 19 nt, Artificial Sequence
  Description of Artificial Sequence: Synthetic oligonucleotide
  Antisense strand to SEQ ID NO: 1412964
cuucaugaugaugacacgg

SEQ ID NO: 1412966 - RNA, 19 nt, Artificial Sequence
  Description of Artificial Sequence: Synthetic oligonucleotide
  Sense strand starting at position 3940 of SEQ ID NO: 1243381
gugucaucaucaugaagga

SEQ ID NO: 1412967 - RNA, 19 nt, Artificial Sequence
  Description of Artificial Sequence: Synthetic oligonucleotide
  Antisense strand to SEQ ID NO: 1412966
uccuucaugaugaugacac

SEQ ID NO: 1412968 - RNA, 19 nt, Artificial Sequence
  Description of Artificial Sequence: Synthetic oligonucleotide
  Sense strand starting at position 23 of SEQ ID NO: 1243382
ccgagugguucucuccuua

SEQ ID NO: 1412969 - RNA, 19 nt, Artificial Sequence
  Description of Artificial Sequence: Synthetic oligonucleotide
  Antisense strand to SEQ ID NO: 1412968
uaaggagagaaccacucgg

SEQ ID NO: 1412970 - RNA, 19 nt, Artificial Sequence
  Description of Artificial Sequence: Synthetic oligonucleotide
  Sense strand starting at position 27 of SEQ ID NO: 1243382
gugguucucuccuuauuau

SEQ ID NO: 1412971 - RNA, 19 nt, Artificial Sequence
  Description of Artificial Sequence: Synthetic oligonucleotide
  Antisense strand to SEQ ID NO: 1412970
auaauaaggagagaaccac

SEQ ID NO: 1412972 - RNA, 19 nt, Artificial Sequence
  Description of Artificial Sequence: Synthetic oligonucleotide
  Sense strand starting at position 28 of SEQ ID NO: 1243382
ugguucucuccuuauuauu

SEQ ID NO: 1412973 - RNA, 19 nt, Artificial Sequence
  Description of Artificial Sequence: Synthetic oligonucleotide
  Antisense strand to SEQ ID NO: 1412972
aauaauaaggagagaacca

SEQ ID NO: 1412974 - RNA, 19 nt, Artificial Sequence
  Description of Artificial Sequence: Synthetic oligonucleotide
  Sense strand starting at position 141 of SEQ ID NO: 1243382
gguucaagguucgagcaau

SEQ ID NO: 1412975 - RNA, 19 nt, Artificial Sequence
  Description of Artificial Sequence: Synthetic oligonucleotide
  Antisense strand to SEQ ID NO: 1412974
auugcucgaaccuugaacc

SEQ ID NO: 1412976 - RNA, 19 nt, Artificial Sequence
  Description of Artificial Sequence: Synthetic oligonucleotide
  Sense strand starting at position 350 of SEQ ID NO: 1243382
agccgagugguucauucuu

SEQ ID NO: 1412977 - RNA, 19 nt, Artificial Sequence
  Description of Artificial Sequence: Synthetic oligonucleotide
  Antisense strand to SEQ ID NO: 1412976
aagaaugaaccacucggcu

SEQ ID NO: 1412978 - RNA, 19 nt, Artificial Sequence
  Description of Artificial Sequence: Synthetic oligonucleotide
  Sense strand starting at position 352 of SEQ ID NO: 1243382
ccgagugguucauucuugu

SEQ ID NO: 1412979 - RNA, 19 nt, Artificial Sequence
  Description of Artificial Sequence: Synthetic oligonucleotide
  Antisense strand to SEQ ID NO: 1412978
acaagaaugaaccacucgg

SEQ ID NO: 1412980 - RNA, 19 nt, Artificial Sequence
  Description of Artificial Sequence: Synthetic oligonucleotide
  Sense strand starting at position 356 of SEQ ID NO: 1243382
gugguucauucuugugaug

SEQ ID NO: 1412981 - RNA, 19 nt, Artificial Sequence
  Description of Artificial Sequence: Synthetic oligonucleotide
  Antisense strand to SEQ ID NO: 1412980
caucacaagaaugaaccac

SEQ ID NO: 1412982 - RNA, 19 nt, Artificial Sequence
  Description of Artificial Sequence: Synthetic oligonucleotide
  Sense strand starting at position 361 of SEQ ID NO: 1243382
ucauucuugugaugaaacu

SEQ ID NO: 1412983 - RNA, 19 nt, Artificial Sequence
  Description of Artificial Sequence: Synthetic oligonucleotide
  Antisense strand to SEQ ID NO: 1412982
aguuucaucacaagaauga

SEQ ID NO: 1412984 - RNA, 19 nt, Artificial Sequence
  Description of Artificial Sequence: Synthetic oligonucleotide
  Sense strand starting at position 432 of SEQ ID NO: 1243382
gcggguucucccugccuga

SEQ ID NO: 1412985 - RNA, 19 nt, Artificial Sequence
  Description of Artificial Sequence: Synthetic oligonucleotide
  Antisense strand to SEQ ID NO: 1412984
ucaggcagggagaacccgc

SEQ ID NO: 1412986 - RNA, 19 nt, Artificial Sequence
  Description of Artificial Sequence: Synthetic oligonucleotide
  Sense strand starting at position 445 of SEQ ID NO: 1243382
gccugacccuucugcaauu

SEQ ID NO: 1412987 - RNA, 19 nt, Artificial Sequence
  Description of Artificial Sequence: Synthetic oligonucleotide
  Antisense strand to SEQ ID NO: 1412986
aauugcagaagggucaggc

SEQ ID NO: 1412988 - RNA, 19 nt, Artificial Sequence
  Description of Artificial Sequence: Synthetic oligonucleotide
  Sense strand starting at position 683 of SEQ ID NO: 1243382
ccaaauaacugggaggaca

SEQ ID NO: 1412989 - RNA, 19 nt, Artificial Sequence
  Description of Artificial Sequence: Synthetic oligonucleotide
  Antisense strand to SEQ ID NO: 1412988
uguccucccaguuauuugg

SEQ ID NO: 1412990 - RNA, 19 nt, Artificial Sequence
  Description of Artificial Sequence: Synthetic oligonucleotide
  Sense strand starting at position 694 of SEQ ID NO: 1243382
ggaggacaggugugaacua

SEQ ID NO: 1412991 - RNA, 19 nt, Artificial Sequence
  Description of Artificial Sequence: Synthetic oligonucleotide
  Antisense strand to SEQ ID NO: 1412990
uaguucacaccuguccucc

SEQ ID NO: 1412992 - RNA, 19 nt, Artificial Sequence
  Description of Artificial Sequence: Synthetic oligonucleotide
  Sense strand starting at position 722 of SEQ ID NO: 1243382
gcagcaccuccguuguuua

SEQ ID NO: 1412993 - RNA, 19 nt, Artificial Sequence
  Description of Artificial Sequence: Synthetic oligonucleotide
  Antisense strand to SEQ ID NO: 1412992
uaaacaacggaggugcugc

SEQ ID NO: 1412994 - RNA, 19 nt, Artificial Sequence
  Description of Artificial Sequence: Synthetic oligonucleotide
  Sense strand starting at position 723 of SEQ ID NO: 1243382
cagcaccuccguuguuuaa

SEQ ID NO: 1412995 - RNA, 19 nt, Artificial Sequence
  Description of Artificial Sequence: Synthetic oligonucleotide
  Antisense strand to SEQ ID NO: 1412994
uuaaacaacggaggugcug

SEQ ID NO: 1412996 - RNA, 19 nt, Artificial Sequence
  Description of Artificial Sequence: Synthetic oligonucleotide
  Sense strand starting at position 755 of SEQ ID NO: 1243382
uccagcuccacgugguaaa

SEQ ID NO: 1412997 - RNA, 19 nt, Artificial Sequence
  Description of Artificial Sequence: Synthetic oligonucleotide
  Antisense strand to SEQ ID NO: 1412996
uuuaccacguggagcugga

SEQ ID NO: 1412998 - RNA, 19 nt, Artificial Sequence
  Description of Artificial Sequence: Synthetic oligonucleotide
  Sense strand starting at position 850 of SEQ ID NO: 1243382
gccacacuaggcuguuaua

SEQ ID NO: 1412999 - RNA, 19 nt, Artificial Sequence
  Description of Artificial Sequence: Synthetic oligonucleotide
  Antisense strand to SEQ ID NO: 1412998
uauaacagccuaguguggc

SEQ ID NO: 1413000 - RNA, 19 nt, Artificial Sequence
  Description of Artificial Sequence: Synthetic oligonucleotide
  Sense strand starting at position 1038 of SEQ ID NO: 1243382
aggagaaccucaggugaga

SEQ ID NO: 1413001 - RNA, 19 nt, Artificial Sequence
  Description of Artificial Sequence: Synthetic oligonucleotide
  Antisense strand to SEQ ID NO: 1413000
ucucaccugagguucuccu

SEQ ID NO: 1413002 - RNA, 19 nt, Artificial Sequence
  Description of Artificial Sequence: Synthetic oligonucleotide
  Sense strand starting at position 1095 of SEQ ID NO: 1243382
gcacuuaucacucgggaac

SEQ ID NO: 1413003 - RNA, 19 nt, Artificial Sequence
  Description of Artificial Sequence: Synthetic oligonucleotide
  Antisense strand to SEQ ID NO: 1413002
guucccgagugauaagugc

SEQ ID NO: 1413004 - RNA, 19 nt, Artificial Sequence
  Description of Artificial Sequence: Synthetic oligonucleotide
  Sense strand starting at position 1236 of SEQ ID NO: 1243382
ccgguagggucuuacagua

SEQ ID NO: 1413005 - RNA, 19 nt, Artificial Sequence
  Description of Artificial Sequence: Synthetic oligonucleotide
  Antisense strand to SEQ ID NO: 1413004
uacuguaagacccuaccgg

SEQ ID NO: 1413006 - RNA, 19 nt, Artificial Sequence
  Description of Artificial Sequence: Synthetic oligonucleotide
  Sense strand starting at position 2130 of SEQ ID NO: 1243382
ccgagugcugcuccuguca

SEQ ID NO: 1413007 - RNA, 19 nt, Artificial Sequence
  Description of Artificial Sequence: Synthetic oligonucleotide
  Antisense strand to SEQ ID NO: 1413006
ugacaggagcagcacucgg

SEQ ID NO: 1413008 - RNA, 19 nt, Artificial Sequence
  Description of Artificial Sequence: Synthetic oligonucleotide
  Sense strand starting at position 2132 of SEQ ID NO: 1243382
gagugcugcuccugucauu

SEQ ID NO: 1413009 - RNA, 19 nt, Artificial Sequence
  Description of Artificial Sequence: Synthetic oligonucleotide
  Antisense strand to SEQ ID NO: 1413008
aaugacaggagcagcacuc

SEQ ID NO: 1413010 - RNA, 19 nt, Artificial Sequence
  Description of Artificial Sequence: Synthetic oligonucleotide
  Sense strand starting at position 2143 of SEQ ID NO: 1243382
cugucauuguggccaugga

SEQ ID NO: 1413011 - RNA, 19 nt, Artificial Sequence
  Description of Artificial Sequence: Synthetic oligonucleotide
  Antisense strand to SEQ ID NO: 1413010
uccauggccacaaugacag

SEQ ID NO: 1413012 - RNA, 19 nt, Artificial Sequence
  Description of Artificial Sequence: Synthetic oligonucleotide
  Sense strand starting at position 2949 of SEQ ID NO: 1243382
cuuggaaugucgggucaga

SEQ ID NO: 1413013 - RNA, 19 nt, Artificial Sequence
  Description of Artificial Sequence: Synthetic oligonucleotide
  Antisense strand to SEQ ID NO: 1413012
ucugacccgacauuccaag

SEQ ID NO: 1413014 - RNA, 19 nt, Artificial Sequence
  Description of Artificial Sequence: Synthetic oligonucleotide
  Sense strand starting at position 3133 of SEQ ID NO: 1243382
aagcguuucugugcucaau

SEQ ID NO: 1413015 - RNA, 19 nt, Artificial Sequence
  Description of Artificial Sequence: Synthetic oligonucleotide
  Antisense strand to SEQ ID NO: 1413014
auugagcacagaaacgcuu

SEQ ID NO: 1413016 - RNA, 19 nt, Artificial Sequence
  Description of Artificial Sequence: Synthetic oligonucleotide
  Sense strand starting at position 3146 of SEQ ID NO: 1243382
cucaaugggucgcccuaau

SEQ ID NO: 1413017 - RNA, 19 nt, Artificial Sequence
  Description of Artificial Sequence: Synthetic oligonucleotide
  Antisense strand to SEQ ID NO: 1413016
auuagggcgacccauugag

SEQ ID NO: 1413018 - RNA, 19 nt, Artificial Sequence
  Description of Artificial Sequence: Synthetic oligonucleotide
  Sense strand starting at position 3191 of SEQ ID NO: 1243382
cggcugugugcucagggau

SEQ ID NO: 1413019 - RNA, 19 nt, Artificial Sequence
  Description of Artificial Sequence: Synthetic oligonucleotide
  Antisense strand to SEQ ID NO: 1413018
aucccugagcacacagccg

SEQ ID NO: 1413020 - RNA, 19 nt, Artificial Sequence
  Description of Artificial Sequence: Synthetic oligonucleotide
  Sense strand starting at position 3192 of SEQ ID NO: 1243382
ggcugugugcucagggaua

SEQ ID NO: 1413021 - RNA, 19 nt, Artificial Sequence
  Description of Artificial Sequence: Synthetic oligonucleotide
  Antisense strand to SEQ ID NO: 1413020
uaucccugagcacacagcc

SEQ ID NO: 1413022 - RNA, 19 nt, Artificial Sequence
  Description of Artificial Sequence: Synthetic oligonucleotide
  Sense strand starting at position 3197 of SEQ ID NO: 1243382
ugugcucagggauaccaaa

SEQ ID NO: 1413023 - RNA, 19 nt, Artificial Sequence
  Description of Artificial Sequence: Synthetic oligonucleotide
  Antisense strand to SEQ ID NO: 1413022
uuugguaucccugagcaca

SEQ ID NO: 1413024 - RNA, 19 nt, Artificial Sequence
  Description of Artificial Sequence: Synthetic oligonucleotide
  Sense strand starting at position 3240 of SEQ ID NO: 1243382
aaguccuauguuugcugaa

SEQ ID NO: 1413025 - RNA, 19 nt, Artificial Sequence
  Description of Artificial Sequence: Synthetic oligonucleotide
  Antisense strand to SEQ ID NO: 1413024
uucagcaaacauaggacuu

SEQ ID NO: 1413026 - RNA, 19 nt, Artificial Sequence
  Description of Artificial Sequence: Synthetic oligonucleotide
  Sense strand starting at position 3241 of SEQ ID NO: 1243382
aguccuauguuugcugaaa

SEQ ID NO: 1413027 - RNA, 19 nt, Artificial Sequence
  Description of Artificial Sequence: Synthetic oligonucleotide
  Antisense strand to SEQ ID NO: 1413026
uuucagcaaacauaggacu

SEQ ID NO: 1413028 - RNA, 19 nt, Artificial Sequence
  Description of Artificial Sequence: Synthetic oligonucleotide
  Sense strand starting at position 3242 of SEQ ID NO: 1243382
guccuauguuugcugaaac

SEQ ID NO: 1413029 - RNA, 19 nt, Artificial Sequence
  Description of Artificial Sequence: Synthetic oligonucleotide
  Antisense strand to SEQ ID NO: 1413028
guuucagcaaacauaggac

SEQ ID NO: 1413030 - RNA, 19 nt, Artificial Sequence
  Description of Artificial Sequence: Synthetic oligonucleotide
  Sense strand starting at position 3243 of SEQ ID NO: 1243382
uccuauguuugcugaaaca

SEQ ID NO: 1413031 - RNA, 19 nt, Artificial Sequence
  Description of Artificial Sequence: Synthetic oligonucleotide
  Antisense strand to SEQ ID NO: 1413030
uguuucagcaaacauagga

SEQ ID NO: 1413032 - RNA, 19 nt, Artificial Sequence
  Description of Artificial Sequence: Synthetic oligonucleotide
  Sense strand starting at position 3253 of SEQ ID NO: 1243382
gcugaaacaucguugggcu

SEQ ID NO: 1413033 - RNA, 19 nt, Artificial Sequence
  Description of Artificial Sequence: Synthetic oligonucleotide
  Antisense strand to SEQ ID NO: 1413032
agcccaacgauguuucagc

SEQ ID NO: 1413034 - RNA, 19 nt, Artificial Sequence
  Description of Artificial Sequence: Synthetic oligonucleotide
  Sense strand starting at position 3603 of SEQ ID NO: 1243382
uuuaguuagaagugugaaa

SEQ ID NO: 1413035 - RNA, 19 nt, Artificial Sequence
  Description of Artificial Sequence: Synthetic oligonucleotide
  Antisense strand to SEQ ID NO: 1413034
uuucacacuucuaacuaaa

SEQ ID NO: 1413036 - RNA, 19 nt, Artificial Sequence
  Description of Artificial Sequence: Synthetic oligonucleotide
  Sense strand starting at position 3635 of SEQ ID NO: 1243382
ccgugucaucaucaugaag

SEQ ID NO: 1413037 - RNA, 19 nt, Artificial Sequence
  Description of Artificial Sequence: Synthetic oligonucleotide
  Antisense strand to SEQ ID NO: 1413036
cuucaugaugaugacacgg

SEQ ID NO: 1413038 - RNA, 19 nt, Artificial Sequence
  Description of Artificial Sequence: Synthetic oligonucleotide
  Sense strand starting at position 3637 of SEQ ID NO: 1243382
gugucaucaucaugaagga

SEQ ID NO: 1413039 - RNA, 19 nt, Artificial Sequence
  Description of Artificial Sequence: Synthetic oligonucleotide
  Antisense strand to SEQ ID NO: 1413038
uccuucaugaugaugacac

SEQ ID NO: 1413040 - RNA, 19 nt, Artificial Sequence
  Description of Artificial Sequence: Synthetic oligonucleotide
  Sense strand starting at position 3977 of SEQ ID NO: 1243382
guguaauucuaacuacuug

SEQ ID NO: 1413041 - RNA, 19 nt, Artificial Sequence
  Description of Artificial Sequence: Synthetic oligonucleotide
  Antisense strand to SEQ ID NO: 1413040
caaguaguuagaauuacac

SEQ ID NO: 1413042 - RNA, 19 nt, Artificial Sequence
  Description of Artificial Sequence: Synthetic oligonucleotide
  Sense strand starting at position 31 of SEQ ID NO: 1243383
aaaguaauagucugagcaa

SEQ ID NO: 1413043 - RNA, 19 nt, Artificial Sequence
  Description of Artificial Sequence: Synthetic oligonucleotide
  Antisense strand to SEQ ID NO: 1413042
uugcucagacuauuacuuu

SEQ ID NO: 1413044 - RNA, 19 nt, Artificial Sequence
  Description of Artificial Sequence: Synthetic oligonucleotide
  Sense strand starting at position 32 of SEQ ID NO: 1243383
aaguaauagucugagcaau

SEQ ID NO: 1413045 - RNA, 19 nt, Artificial Sequence
  Description of Artificial Sequence: Synthetic oligonucleotide
  Antisense strand to SEQ ID NO: 1413044
auugcucagacuauuacuu

SEQ ID NO: 1413046 - RNA, 19 nt, Artificial Sequence
  Description of Artificial Sequence: Synthetic oligonucleotide
  Sense strand starting at position 34 of SEQ ID NO: 1243383
guaauagucugagcaauag

SEQ ID NO: 1413047 - RNA, 19 nt, Artificial Sequence
  Description of Artificial Sequence: Synthetic oligonucleotide
  Antisense strand to SEQ ID NO: 1413046
cuauugcucagacuauuac

SEQ ID NO: 1413048 - RNA, 19 nt, Artificial Sequence
  Description of Artificial Sequence: Synthetic oligonucleotide
  Sense strand starting at position 38 of SEQ ID NO: 1243383
uagucugagcaauagguca

SEQ ID NO: 1413049 - RNA, 19 nt, Artificial Sequence
  Description of Artificial Sequence: Synthetic oligonucleotide
  Antisense strand to SEQ ID NO: 1413048
ugaccuauugcucagacua

SEQ ID NO: 1413050 - RNA, 19 nt, Artificial Sequence
  Description of Artificial Sequence: Synthetic oligonucleotide
  Sense strand starting at position 40 of SEQ ID NO: 1243383
gucugagcaauaggucaaa

SEQ ID NO: 1413051 - RNA, 19 nt, Artificial Sequence
  Description of Artificial Sequence: Synthetic oligonucleotide
  Antisense strand to SEQ ID NO: 1413050
uuugaccuauugcucagac

SEQ ID NO: 1413052 - RNA, 19 nt, Artificial Sequence
  Description of Artificial Sequence: Synthetic oligonucleotide
  Sense strand starting at position 51 of SEQ ID NO: 1243383
aggucaaagcuuuagguaa

SEQ ID NO: 1413053 - RNA, 19 nt, Artificial Sequence
  Description of Artificial Sequence: Synthetic oligonucleotide
  Antisense strand to SEQ ID NO: 1413052
uuaccuaaagcuuugaccu

SEQ ID NO: 1413054 - RNA, 19 nt, Artificial Sequence
  Description of Artificial Sequence: Synthetic oligonucleotide
  Sense strand starting at position 58 of SEQ ID NO: 1243383
agcuuuagguaacaucaaa

SEQ ID NO: 1413055 - RNA, 19 nt, Artificial Sequence
  Description of Artificial Sequence: Synthetic oligonucleotide
  Antisense strand to SEQ ID NO: 1413054
uuugauguuaccuaaagcu

SEQ ID NO: 1413056 - RNA, 19 nt, Artificial Sequence
  Description of Artificial Sequence: Synthetic oligonucleotide
  Sense strand starting at position 732 of SEQ ID NO: 1243383
gagaguggcuccuuguaga

SEQ ID NO: 1413057 - RNA, 19 nt, Artificial Sequence
  Description of Artificial Sequence: Synthetic oligonucleotide
  Antisense strand to SEQ ID NO: 1413056
ucuacaaggagccacucuc

SEQ ID NO: 1413058 - RNA, 19 nt, Artificial Sequence
  Description of Artificial Sequence: Synthetic oligonucleotide
  Sense strand starting at position 1284 of SEQ ID NO: 1243383
gugcucaaugacuguauca

SEQ ID NO: 1413059 - RNA, 19 nt, Artificial Sequence
  Description of Artificial Sequence: Synthetic oligonucleotide
  Antisense strand to SEQ ID NO: 1413058
ugauacagucauugagcac

SEQ ID NO: 1413060 - RNA, 19 nt, Artificial Sequence
  Description of Artificial Sequence: Synthetic oligonucleotide
  Sense strand starting at position 1286 of SEQ ID NO: 1243383
gcucaaugacuguaucaau

SEQ ID NO: 1413061 - RNA, 19 nt, Artificial Sequence
  Description of Artificial Sequence: Synthetic oligonucleotide
  Antisense strand to SEQ ID NO: 1413060
auugauacagucauugagc

SEQ ID NO: 1413062 - RNA, 19 nt, Artificial Sequence
  Description of Artificial Sequence: Synthetic oligonucleotide
  Sense strand starting at position 1414 of SEQ ID NO: 1243383
uggaauuccuggugacgga

SEQ ID NO: 1413063 - RNA, 19 nt, Artificial Sequence
  Description of Artificial Sequence: Synthetic oligonucleotide
  Antisense strand to SEQ ID NO: 1413062
uccgucaccaggaauucca

SEQ ID NO: 1413064 - RNA, 19 nt, Artificial Sequence
  Description of Artificial Sequence: Synthetic oligonucleotide
  Sense strand starting at position 1441 of SEQ ID NO: 1243383
acaggcguggacuguaaau

SEQ ID NO: 1413065 - RNA, 19 nt, Artificial Sequence
  Description of Artificial Sequence: Synthetic oligonucleotide
  Antisense strand to SEQ ID NO: 1413064
auuuacaguccacgccugu

SEQ ID NO: 1413066 - RNA, 19 nt, Artificial Sequence
  Description of Artificial Sequence: Synthetic oligonucleotide
  Sense strand starting at position 1443 of SEQ ID NO: 1243383
aggcguggacuguaaauua

SEQ ID NO: 1413067 - RNA, 19 nt, Artificial Sequence
  Description of Artificial Sequence: Synthetic oligonucleotide
  Antisense strand to SEQ ID NO: 1413066
uaauuuacaguccacgccu

SEQ ID NO: 1413068 - RNA, 19 nt, Artificial Sequence
  Description of Artificial Sequence: Synthetic oligonucleotide
  Sense strand starting at position 1469 of SEQ ID NO: 1243383
gccggaaaccguuacugga

SEQ ID NO: 1413069 - RNA, 19 nt, Artificial Sequence
  Description of Artificial Sequence: Synthetic oligonucleotide
  Antisense strand to SEQ ID NO: 1413068
uccaguaacgguuuccggc

SEQ ID NO: 1413070 - RNA, 19 nt, Artificial Sequence
  Description of Artificial Sequence: Synthetic oligonucleotide
  Sense strand starting at position 1471 of SEQ ID NO: 1243383
cggaaaccguuacuggauu

SEQ ID NO: 1413071 - RNA, 19 nt, Artificial Sequence
  Description of Artificial Sequence: Synthetic oligonucleotide
  Antisense strand to SEQ ID NO: 1413070
aauccaguaacgguuuccg

SEQ ID NO: 1413072 - RNA, 19 nt, Artificial Sequence
  Description of Artificial Sequence: Synthetic oligonucleotide
  Sense strand starting at position 2223 of SEQ ID NO: 1243383
gggccuggcgggugaauaa

SEQ ID NO: 1413073 - RNA, 19 nt, Artificial Sequence
  Description of Artificial Sequence: Synthetic oligonucleotide
  Antisense strand to SEQ ID NO: 1413072
uuauucacccgccaggccc

SEQ ID NO: 1413074 - RNA, 19 nt, Artificial Sequence
  Description of Artificial Sequence: Synthetic oligonucleotide
  Sense strand starting at position 2842 of SEQ ID NO: 1243383
gccuuaggucuagagcuga

SEQ ID NO: 1413075 - RNA, 19 nt, Artificial Sequence
  Description of Artificial Sequence: Synthetic oligonucleotide
  Antisense strand to SEQ ID NO: 1413074
ucagcucuagaccuaaggc

SEQ ID NO: 1413076 - RNA, 19 nt, Artificial Sequence
  Description of Artificial Sequence: Synthetic oligonucleotide
  Sense strand starting at position 2870 of SEQ ID NO: 1243383
cuggaaagcuuguugagua

SEQ ID NO: 1413077 - RNA, 19 nt, Artificial Sequence
  Description of Artificial Sequence: Synthetic oligonucleotide
  Antisense strand to SEQ ID NO: 1413076
uacucaacaagcuuuccag

SEQ ID NO: 1413078 - RNA, 19 nt, Artificial Sequence
  Description of Artificial Sequence: Synthetic oligonucleotide
  Sense strand starting at position 2874 of SEQ ID NO: 1243383
aaagcuuguugaguaggaa

SEQ ID NO: 1413079 - RNA, 19 nt, Artificial Sequence
  Description of Artificial Sequence: Synthetic oligonucleotide
  Antisense strand to SEQ ID NO: 1413078
uuccuacucaacaagcuuu

SEQ ID NO: 1413080 - RNA, 19 nt, Artificial Sequence
  Description of Artificial Sequence: Synthetic oligonucleotide
  Sense strand starting at position 2875 of SEQ ID NO: 1243383
aagcuuguugaguaggaaa

SEQ ID NO: 1413081 - RNA, 19 nt, Artificial Sequence
  Description of Artificial Sequence: Synthetic oligonucleotide
  Antisense strand to SEQ ID NO: 1413080
uuuccuacucaacaagcuu

SEQ ID NO: 1413082 - RNA, 19 nt, Artificial Sequence
  Description of Artificial Sequence: Synthetic oligonucleotide
  Sense strand starting at position 2898 of SEQ ID NO: 1243383
aagacuagauggucuguca

SEQ ID NO: 1413083 - RNA, 19 nt, Artificial Sequence
  Description of Artificial Sequence: Synthetic oligonucleotide
  Antisense strand to SEQ ID NO: 1413082
ugacagaccaucuagucuu

SEQ ID NO: 1413084 - RNA, 19 nt, Artificial Sequence
  Description of Artificial Sequence: Synthetic oligonucleotide
  Sense strand starting at position 2905 of SEQ ID NO: 1243383
gauggucugucacagaggu

SEQ ID NO: 1413085 - RNA, 19 nt, Artificial Sequence
  Description of Artificial Sequence: Synthetic oligonucleotide
  Antisense strand to SEQ ID NO: 1413084
accucugugacagaccauc

SEQ ID NO: 1413086 - RNA, 19 nt, Artificial Sequence
  Description of Artificial Sequence: Synthetic oligonucleotide
  Sense strand starting at position 2967 of SEQ ID NO: 1243383
gcaaauucguaacagugaa

SEQ ID NO: 1413087 - RNA, 19 nt, Artificial Sequence
  Description of Artificial Sequence: Synthetic oligonucleotide
  Antisense strand to SEQ ID NO: 1413086
uucacuguuacgaauuugc

SEQ ID NO: 1413088 - RNA, 19 nt, Artificial Sequence
  Description of Artificial Sequence: Synthetic oligonucleotide
  Sense strand starting at position 3028 of SEQ ID NO: 1243383
gucgaacacccauguaaua

SEQ ID NO: 1413089 - RNA, 19 nt, Artificial Sequence
  Description of Artificial Sequence: Synthetic oligonucleotide
  Antisense strand to SEQ ID NO: 1413088
uauuacauggguguucgac

SEQ ID NO: 1413090 - RNA, 19 nt, Artificial Sequence
  Description of Artificial Sequence: Synthetic oligonucleotide
  Sense strand starting at position 3113 of SEQ ID NO: 1243383
aaaguaaccugccuaggau

SEQ ID NO: 1413091 - RNA, 19 nt, Artificial Sequence
  Description of Artificial Sequence: Synthetic oligonucleotide
  Antisense strand to SEQ ID NO: 1413090
auccuaggcagguuacuuu

SEQ ID NO: 1413092 - RNA, 19 nt, Artificial Sequence
  Description of Artificial Sequence: Synthetic oligonucleotide
  Sense strand starting at position 3114 of SEQ ID NO: 1243383
aaguaaccugccuaggauu

SEQ ID NO: 1413093 - RNA, 19 nt, Artificial Sequence
  Description of Artificial Sequence: Synthetic oligonucleotide
  Antisense strand to SEQ ID NO: 1413092
aauccuaggcagguuacuu

SEQ ID NO: 1413094 - RNA, 19 nt, Artificial Sequence
  Description of Artificial Sequence: Synthetic oligonucleotide
  Sense strand starting at position 3128 of SEQ ID NO: 1243383
ggauuacagcucugaaguu

SEQ ID NO: 1413095 - RNA, 19 nt, Artificial Sequence
  Description of Artificial Sequence: Synthetic oligonucleotide
  Antisense strand to SEQ ID NO: 1413094
aacuucagagcuguaaucc

SEQ ID NO: 1413096 - RNA, 19 nt, Artificial Sequence
  Description of Artificial Sequence: Synthetic oligonucleotide
  Sense strand starting at position 3129 of SEQ ID NO: 1243383
gauuacagcucugaaguua

SEQ ID NO: 1413097 - RNA, 19 nt, Artificial Sequence
  Description of Artificial Sequence: Synthetic oligonucleotide
  Antisense strand to SEQ ID NO: 1413096
uaacuucagagcuguaauc

SEQ ID NO: 1413098 - RNA, 19 nt, Artificial Sequence
  Description of Artificial Sequence: Synthetic oligonucleotide
  Sense strand starting at position 3233 of SEQ ID NO: 1243383
gcguguaauccucccucuu

SEQ ID NO: 1413099 - RNA, 19 nt, Artificial Sequence
  Description of Artificial Sequence: Synthetic oligonucleotide
  Antisense strand to SEQ ID NO: 1413098
aagagggaggauuacacgc

SEQ ID NO: 1413100 - RNA, 19 nt, Artificial Sequence
  Description of Artificial Sequence: Synthetic oligonucleotide
  Sense strand starting at position 3282 of SEQ ID NO: 1243383
uucaguuaucgugguuauc

SEQ ID NO: 1413101 - RNA, 19 nt, Artificial Sequence
  Description of Artificial Sequence: Synthetic oligonucleotide
  Antisense strand to SEQ ID NO: 1413100
gauaaccacgauaacugaa

SEQ ID NO: 1413102 - RNA, 19 nt, Artificial Sequence
  Description of Artificial Sequence: Synthetic oligonucleotide
  Sense strand starting at position 3353 of SEQ ID NO: 1243383
gggagguguucuguugguu

SEQ ID NO: 1413103 - RNA, 19 nt, Artificial Sequence
  Description of Artificial Sequence: Synthetic oligonucleotide
  Antisense strand to SEQ ID NO: 1413102
aaccaacagaacaccuccc

SEQ ID NO: 1413104 - RNA, 19 nt, Artificial Sequence
  Description of Artificial Sequence: Synthetic oligonucleotide
  Sense strand starting at position 3361 of SEQ ID NO: 1243383
uucuguugguuuguggaga

SEQ ID NO: 1413105 - RNA, 19 nt, Artificial Sequence
  Description of Artificial Sequence: Synthetic oligonucleotide
  Antisense strand to SEQ ID NO: 1413104
ucuccacaaaccaacagaa

SEQ ID NO: 1413106 - RNA, 19 nt, Artificial Sequence
  Description of Artificial Sequence: Synthetic oligonucleotide
  Sense strand starting at position 3364 of SEQ ID NO: 1243383
uguugguuuguggagagga

SEQ ID NO: 1413107 - RNA, 19 nt, Artificial Sequence
  Description of Artificial Sequence: Synthetic oligonucleotide
  Antisense strand to SEQ ID NO: 1413106
uccucuccacaaaccaaca

SEQ ID NO: 1413108 - RNA, 19 nt, Artificial Sequence
  Description of Artificial Sequence: Synthetic oligonucleotide
  Sense strand starting at position 3482 of SEQ ID NO: 1243383
gccguuuccuccuccacua

SEQ ID NO: 1413109 - RNA, 19 nt, Artificial Sequence
  Description of Artificial Sequence: Synthetic oligonucleotide
  Antisense strand to SEQ ID NO: 1413108
uaguggaggaggaaacggc

SEQ ID NO: 1413110 - RNA, 19 nt, Artificial Sequence
  Description of Artificial Sequence: Synthetic oligonucleotide
  Sense strand starting at position 3505 of SEQ ID NO: 1243383
uucuuucccugauugaaag

SEQ ID NO: 1413111 - RNA, 19 nt, Artificial Sequence
  Description of Artificial Sequence: Synthetic oligonucleotide
  Antisense strand to SEQ ID NO: 1413110
cuuucaaucagggaaagaa

SEQ ID NO: 1413112 - RNA, 19 nt, Artificial Sequence
  Description of Artificial Sequence: Synthetic oligonucleotide
  Sense strand starting at position 3506 of SEQ ID NO: 1243383
ucuuucccugauugaaaga

SEQ ID NO: 1413113 - RNA, 19 nt, Artificial Sequence
  Description of Artificial Sequence: Synthetic oligonucleotide
  Antisense strand to SEQ ID NO: 1413112
ucuuucaaucagggaaaga

SEQ ID NO: 1413114 - RNA, 19 nt, Artificial Sequence
  Description of Artificial Sequence: Synthetic oligonucleotide
  Sense strand starting at position 3888 of SEQ ID NO: 1243383
ucggucacuuccuagaaca

SEQ ID NO: 1413115 - RNA, 19 nt, Artificial Sequence
  Description of Artificial Sequence: Synthetic oligonucleotide
  Antisense strand to SEQ ID NO: 1413114
uguucuaggaagugaccga

SEQ ID NO: 1413116 - RNA, 19 nt, Artificial Sequence
  Description of Artificial Sequence: Synthetic oligonucleotide
  Sense strand starting at position 3932 of SEQ ID NO: 1243383
uggguuggucacgggacaa

SEQ ID NO: 1413117 - RNA, 19 nt, Artificial Sequence
  Description of Artificial Sequence: Synthetic oligonucleotide
  Antisense strand to SEQ ID NO: 1413116
uugucccgugaccaaccca

SEQ ID NO: 1413118 - RNA, 19 nt, Artificial Sequence
  Description of Artificial Sequence: Synthetic oligonucleotide
  Sense strand starting at position 3982 of SEQ ID NO: 1243383
auguguuugggaggaguuu

SEQ ID NO: 1413119 - RNA, 19 nt, Artificial Sequence
  Description of Artificial Sequence: Synthetic oligonucleotide
  Antisense strand to SEQ ID NO: 1413118
aaacuccucccaaacacau

SEQ ID NO: 1413120 - RNA, 19 nt, Artificial Sequence
  Description of Artificial Sequence: Synthetic oligonucleotide
  Sense strand starting at position 3983 of SEQ ID NO: 1243383
uguguuugggaggaguuua

SEQ ID NO: 1413121 - RNA, 19 nt, Artificial Sequence
  Description of Artificial Sequence: Synthetic oligonucleotide
  Antisense strand to SEQ ID NO: 1413120
uaaacuccucccaaacaca

SEQ ID NO: 1413122 - RNA, 19 nt, Artificial Sequence
  Description of Artificial Sequence: Synthetic oligonucleotide
  Sense strand starting at position 292 of SEQ ID NO: 1243384
uggagagaaucagaucacu

SEQ ID NO: 1413123 - RNA, 19 nt, Artificial Sequence
  Description of Artificial Sequence: Synthetic oligonucleotide
  Antisense strand to SEQ ID NO: 1413122
agugaucugauucucucca

SEQ ID NO: 1413124 - RNA, 19 nt, Artificial Sequence
  Description of Artificial Sequence: Synthetic oligonucleotide
  Sense strand starting at position 379 of SEQ ID NO: 1243384
ugaggagcucuggauucua

SEQ ID NO: 1413125 - RNA, 19 nt, Artificial Sequence
  Description of Artificial Sequence: Synthetic oligonucleotide
  Antisense strand to SEQ ID NO: 1413124
uagaauccagagcuccuca

SEQ ID NO: 1413126 - RNA, 19 nt, Artificial Sequence
  Description of Artificial Sequence: Synthetic oligonucleotide
  Sense strand starting at position 495 of SEQ ID NO: 1243384
cugcacuuaucuccaggaa

SEQ ID NO: 1413127 - RNA, 19 nt, Artificial Sequence
  Description of Artificial Sequence: Synthetic oligonucleotide
  Antisense strand to SEQ ID NO: 1413126
uuccuggagauaagugcag

SEQ ID NO: 1413128 - RNA, 19 nt, Artificial Sequence
  Description of Artificial Sequence: Synthetic oligonucleotide
  Sense strand starting at position 496 of SEQ ID NO: 1243384
ugcacuuaucuccaggaau

SEQ ID NO: 1413129 - RNA, 19 nt, Artificial Sequence
  Description of Artificial Sequence: Synthetic oligonucleotide
  Antisense strand to SEQ ID NO: 1413128
auuccuggagauaagugca

SEQ ID NO: 1413130 - RNA, 19 nt, Artificial Sequence
  Description of Artificial Sequence: Synthetic oligonucleotide
  Sense strand starting at position 689 of SEQ ID NO: 1243384
gguuucuccagagggagua

SEQ ID NO: 1413131 - RNA, 19 nt, Artificial Sequence
  Description of Artificial Sequence: Synthetic oligonucleotide
  Antisense strand to SEQ ID NO: 1413130
uacucccucuggagaaacc

SEQ ID NO: 1413132 - RNA, 19 nt, Artificial Sequence
  Description of Artificial Sequence: Synthetic oligonucleotide
  Sense strand starting at position 729 of SEQ ID NO: 1243384
cugucaccugugugggaua

SEQ ID NO: 1413133 - RNA, 19 nt, Artificial Sequence
  Description of Artificial Sequence: Synthetic oligonucleotide
  Antisense strand to SEQ ID NO: 1413132
uaucccacacaggugacag

SEQ ID NO: 1413134 - RNA, 19 nt, Artificial Sequence
  Description of Artificial Sequence: Synthetic oligonucleotide
  Sense strand starting at position 1037 of SEQ ID NO: 1243384
uccagcucuccagggaaga

SEQ ID NO: 1413135 - RNA, 19 nt, Artificial Sequence
  Description of Artificial Sequence: Synthetic oligonucleotide
  Antisense strand to SEQ ID NO: 1413134
ucuucccuggagagcugga

SEQ ID NO: 1413136 - RNA, 19 nt, Artificial Sequence
  Description of Artificial Sequence: Synthetic oligonucleotide
  Sense strand starting at position 1038 of SEQ ID NO: 1243384
ccagcucuccagggaagaa

SEQ ID NO: 1413137 - RNA, 19 nt, Artificial Sequence
  Description of Artificial Sequence: Synthetic oligonucleotide
  Antisense strand to SEQ ID NO: 1413136
uucuucccuggagagcugg

SEQ ID NO: 1413138 - RNA, 19 nt, Artificial Sequence
  Description of Artificial Sequence: Synthetic oligonucleotide
  Sense strand starting at position 1072 of SEQ ID NO: 1243384
uuucguaaaggguaaauaa

SEQ ID NO: 1413139 - RNA, 19 nt, Artificial Sequence
  Description of Artificial Sequence: Synthetic oligonucleotide
  Antisense strand to SEQ ID NO: 1413138
uuauuuacccuuuacgaaa

SEQ ID NO: 1413140 - RNA, 19 nt, Artificial Sequence
  Description of Artificial Sequence: Synthetic oligonucleotide
  Sense strand starting at position 1082 of SEQ ID NO: 1243384
gguaaauaaucacuuaagc

SEQ ID NO: 1413141 - RNA, 19 nt, Artificial Sequence
  Description of Artificial Sequence: Synthetic oligonucleotide
  Antisense strand to SEQ ID NO: 1413140
gcuuaagugauuauuuacc

SEQ ID NO: 1413142 - RNA, 19 nt, Artificial Sequence
  Description of Artificial Sequence: Synthetic oligonucleotide
  Sense strand starting at position 1122 of SEQ ID NO: 1243384
aguaucuuucuagggcuua

SEQ ID NO: 1413143 - RNA, 19 nt, Artificial Sequence
  Description of Artificial Sequence: Synthetic oligonucleotide
  Antisense strand to SEQ ID NO: 1413142
uaagcccuagaaagauacu

SEQ ID NO: 1413144 - RNA, 19 nt, Artificial Sequence
  Description of Artificial Sequence: Synthetic oligonucleotide
  Sense strand starting at position 1123 of SEQ ID NO: 1243384
guaucuuucuagggcuuaa

SEQ ID NO: 1413145 - RNA, 19 nt, Artificial Sequence
  Description of Artificial Sequence: Synthetic oligonucleotide
  Antisense strand to SEQ ID NO: 1413144
uuaagcccuagaaagauac

SEQ ID NO: 1413146 - RNA, 19 nt, Artificial Sequence
  Description of Artificial Sequence: Synthetic oligonucleotide
  Sense strand starting at position 1141 of SEQ ID NO: 1243384
auuguugguucugguugau

SEQ ID NO: 1413147 - RNA, 19 nt, Artificial Sequence
  Description of Artificial Sequence: Synthetic oligonucleotide
  Antisense strand to SEQ ID NO: 1413146
aucaaccagaaccaacaau

SEQ ID NO: 1413148 - RNA, 19 nt, Artificial Sequence
  Description of Artificial Sequence: Synthetic oligonucleotide
  Sense strand starting at position 1147 of SEQ ID NO: 1243384
gguucugguugaugguuaa

SEQ ID NO: 1413149 - RNA, 19 nt, Artificial Sequence
  Description of Artificial Sequence: Synthetic oligonucleotide
  Antisense strand to SEQ ID NO: 1413148
uuaaccaucaaccagaacc

SEQ ID NO: 1413150 - RNA, 19 nt, Artificial Sequence
  Description of Artificial Sequence: Synthetic oligonucleotide
  Sense strand starting at position 1150 of SEQ ID NO: 1243384
ucugguugaugguuaagaa

SEQ ID NO: 1413151 - RNA, 19 nt, Artificial Sequence
  Description of Artificial Sequence: Synthetic oligonucleotide
  Antisense strand to SEQ ID NO: 1413150
uucuuaaccaucaaccaga

SEQ ID NO: 1413152 - RNA, 19 nt, Artificial Sequence
  Description of Artificial Sequence: Synthetic oligonucleotide
  Sense strand starting at position 1151 of SEQ ID NO: 1243384
cugguugaugguuaagaau

SEQ ID NO: 1413153 - RNA, 19 nt, Artificial Sequence
  Description of Artificial Sequence: Synthetic oligonucleotide
  Antisense strand to SEQ ID NO: 1413152
auucuuaaccaucaaccag

SEQ ID NO: 1413154 - RNA, 19 nt, Artificial Sequence
  Description of Artificial Sequence: Synthetic oligonucleotide
  Sense strand starting at position 1154 of SEQ ID NO: 1243384
guugaugguuaagaauaga

SEQ ID NO: 1413155 - RNA, 19 nt, Artificial Sequence
  Description of Artificial Sequence: Synthetic oligonucleotide
  Antisense strand to SEQ ID NO: 1413154
ucuauucuuaaccaucaac

SEQ ID NO: 1413156 - RNA, 19 nt, Artificial Sequence
  Description of Artificial Sequence: Synthetic oligonucleotide
  Sense strand starting at position 1229 of SEQ ID NO: 1243384
ccaggaauuuagugucagu

SEQ ID NO: 1413157 - RNA, 19 nt, Artificial Sequence
  Description of Artificial Sequence: Synthetic oligonucleotide
  Antisense strand to SEQ ID NO: 1413156
acugacacuaaauuccugg

SEQ ID NO: 1413158 - RNA, 19 nt, Artificial Sequence
  Description of Artificial Sequence: Synthetic oligonucleotide
  Sense strand starting at position 2453 of SEQ ID NO: 1243384
gagguuugccgcugggaac

SEQ ID NO: 1413159 - RNA, 19 nt, Artificial Sequence
  Description of Artificial Sequence: Synthetic oligonucleotide
  Antisense strand to SEQ ID NO: 1413158
guucccagcggcaaaccuc

SEQ ID NO: 1413160 - RNA, 19 nt, Artificial Sequence
  Description of Artificial Sequence: Synthetic oligonucleotide
  Sense strand starting at position 2602 of SEQ ID NO: 1243384
guaugaagcccuuaauaaa

SEQ ID NO: 1413161 - RNA, 19 nt, Artificial Sequence
  Description of Artificial Sequence: Synthetic oligonucleotide
  Antisense strand to SEQ ID NO: 1413160
uuuauuaagggcuucauac

SEQ ID NO: 1413162 - RNA, 19 nt, Artificial Sequence
  Description of Artificial Sequence: Synthetic oligonucleotide
  Sense strand starting at position 2721 of SEQ ID NO: 1243384
gggcguguuugugucuuca

SEQ ID NO: 1413163 - RNA, 19 nt, Artificial Sequence
  Description of Artificial Sequence: Synthetic oligonucleotide
  Antisense strand to SEQ ID NO: 1413162
ugaagacacaaacacgccc

SEQ ID NO: 1413164 - RNA, 19 nt, Artificial Sequence
  Description of Artificial Sequence: Synthetic oligonucleotide
  Sense strand starting at position 2761 of SEQ ID NO: 1243384
uggguguuugccugaggga

SEQ ID NO: 1413165 - RNA, 19 nt, Artificial Sequence
  Description of Artificial Sequence: Synthetic oligonucleotide
  Antisense strand to SEQ ID NO: 1413164
ucccucaggcaaacaccca

SEQ ID NO: 1413166 - RNA, 19 nt, Artificial Sequence
  Description of Artificial Sequence: Synthetic oligonucleotide
  Sense strand starting at position 2762 of SEQ ID NO: 1243384
ggguguuugccugagggac

SEQ ID NO: 1413167 - RNA, 19 nt, Artificial Sequence
  Description of Artificial Sequence: Synthetic oligonucleotide
  Antisense strand to SEQ ID NO: 1413166
gucccucaggcaaacaccc

SEQ ID NO: 1413168 - RNA, 19 nt, Artificial Sequence
  Description of Artificial Sequence: Synthetic oligonucleotide
  Sense strand starting at position 2821 of SEQ ID NO: 1243384
auaguugugccagaucuga

SEQ ID NO: 1413169 - RNA, 19 nt, Artificial Sequence
  Description of Artificial Sequence: Synthetic oligonucleotide
  Antisense strand to SEQ ID NO: 1413168
ucagaucuggcacaacuau

SEQ ID NO: 1413170 - RNA, 19 nt, Artificial Sequence
  Description of Artificial Sequence: Synthetic oligonucleotide
  Sense strand starting at position 2835 of SEQ ID NO: 1243384
ucugaauaagugggcaaga

SEQ ID NO: 1413171 - RNA, 19 nt, Artificial Sequence
  Description of Artificial Sequence: Synthetic oligonucleotide
  Antisense strand to SEQ ID NO: 1413170
ucuugcccacuuauucaga

SEQ ID NO: 1413172 - RNA, 19 nt, Artificial Sequence
  Description of Artificial Sequence: Synthetic oligonucleotide
  Sense strand starting at position 2836 of SEQ ID NO: 1243384
cugaauaagugggcaagaa

SEQ ID NO: 1413173 - RNA, 19 nt, Artificial Sequence
  Description of Artificial Sequence: Synthetic oligonucleotide
  Antisense strand to SEQ ID NO: 1413172
uucuugcccacuuauucag

SEQ ID NO: 1413174 - RNA, 19 nt, Artificial Sequence
  Description of Artificial Sequence: Synthetic oligonucleotide
  Sense strand starting at position 3719 of SEQ ID NO: 1243384
gacgaauugugccuaaagu

SEQ ID NO: 1413175 - RNA, 19 nt, Artificial Sequence
  Description of Artificial Sequence: Synthetic oligonucleotide
  Antisense strand to SEQ ID NO: 1413174
acuuuaggcacaauucguc

SEQ ID NO: 1413176 - RNA, 19 nt, Artificial Sequence
  Description of Artificial Sequence: Synthetic oligonucleotide
  Sense strand starting at position 3720 of SEQ ID NO: 1243384
acgaauugugccuaaaguu

SEQ ID NO: 1413177 - RNA, 19 nt, Artificial Sequence
  Description of Artificial Sequence: Synthetic oligonucleotide
  Antisense strand to SEQ ID NO: 1413176
aacuuuaggcacaauucgu

SEQ ID NO: 1413178 - RNA, 19 nt, Artificial Sequence
  Description of Artificial Sequence: Synthetic oligonucleotide
  Sense strand starting at position 3728 of SEQ ID NO: 1243384
ugccuaaaguuuguuuguu

SEQ ID NO: 1413179 - RNA, 19 nt, Artificial Sequence
  Description of Artificial Sequence: Synthetic oligonucleotide
  Antisense strand to SEQ ID NO: 1413178
aacaaacaaacuuuaggca

SEQ ID NO: 1413180 - RNA, 19 nt, Artificial Sequence
  Description of Artificial Sequence: Synthetic oligonucleotide
  Sense strand starting at position 3729 of SEQ ID NO: 1243384
gccuaaaguuuguuuguuu

SEQ ID NO: 1413181 - RNA, 19 nt, Artificial Sequence
  Description of Artificial Sequence: Synthetic oligonucleotide
  Antisense strand to SEQ ID NO: 1413180
aaacaaacaaacuuuaggc

SEQ ID NO: 1413182 - RNA, 19 nt, Artificial Sequence
  Description of Artificial Sequence: Synthetic oligonucleotide
  Sense strand starting at position 3759 of SEQ ID NO: 1243384
ggcagagucgcgcucuguu

SEQ ID NO: 1413183 - RNA, 19 nt, Artificial Sequence
  Description of Artificial Sequence: Synthetic oligonucleotide
  Antisense strand to SEQ ID NO: 1413182
aacagagcgcgacucugcc

SEQ ID NO: 1413184 - RNA, 19 nt, Artificial Sequence
  Description of Artificial Sequence: Synthetic oligonucleotide
  Sense strand starting at position 1473 of SEQ ID NO: 1243385
cuuagauuccagcagugac

SEQ ID NO: 1413185 - RNA, 19 nt, Artificial Sequence
  Description of Artificial Sequence: Synthetic oligonucleotide
  Antisense strand to SEQ ID NO: 1413184
gucacugcuggaaucuaag

SEQ ID NO: 1413186 - RNA, 19 nt, Artificial Sequence
  Description of Artificial Sequence: Synthetic oligonucleotide
  Sense strand starting at position 2088 of SEQ ID NO: 1243385
gccauuuccugcccucaga

SEQ ID NO: 1413187 - RNA, 19 nt, Artificial Sequence
  Description of Artificial Sequence: Synthetic oligonucleotide
  Antisense strand to SEQ ID NO: 1413186
ucugagggcaggaaauggc

SEQ ID NO: 1413188 - RNA, 19 nt, Artificial Sequence
  Description of Artificial Sequence: Synthetic oligonucleotide
  Sense strand starting at position 2270 of SEQ ID NO: 1243385
ugcauaugcuaggaucuua

SEQ ID NO: 1413189 - RNA, 19 nt, Artificial Sequence
  Description of Artificial Sequence: Synthetic oligonucleotide
  Antisense strand to SEQ ID NO: 1413188
uaagauccuagcauaugca

SEQ ID NO: 1413190 - RNA, 19 nt, Artificial Sequence
  Description of Artificial Sequence: Synthetic oligonucleotide
  Sense strand starting at position 2281 of SEQ ID NO: 1243385
ggaucuuauuucugcaaac

SEQ ID NO: 1413191 - RNA, 19 nt, Artificial Sequence
  Description of Artificial Sequence: Synthetic oligonucleotide
  Antisense strand to SEQ ID NO: 1413190
guuugcagaaauaagaucc

SEQ ID NO: 1413192 - RNA, 19 nt, Artificial Sequence
  Description of Artificial Sequence: Synthetic oligonucleotide
  Sense strand starting at position 2291 of SEQ ID NO: 1243385
ucugcaaacuaguaaagau

SEQ ID NO: 1413193 - RNA, 19 nt, Artificial Sequence
  Description of Artificial Sequence: Synthetic oligonucleotide
  Antisense strand to SEQ ID NO: 1413192
aucuuuacuaguuugcaga

SEQ ID NO: 1413194 - RNA, 19 nt, Artificial Sequence
  Description of Artificial Sequence: Synthetic oligonucleotide
  Sense strand starting at position 2299 of SEQ ID NO: 1243385
cuaguaaagaugugggaau

SEQ ID NO: 1413195 - RNA, 19 nt, Artificial Sequence
  Description of Artificial Sequence: Synthetic oligonucleotide
  Antisense strand to SEQ ID NO: 1413194
auucccacaucuuuacuag

SEQ ID NO: 1413196 - RNA, 19 nt, Artificial Sequence
  Description of Artificial Sequence: Synthetic oligonucleotide
  Sense strand starting at position 2301 of SEQ ID NO: 1243385
aguaaagaugugggaaucu

SEQ ID NO: 1413197 - RNA, 19 nt, Artificial Sequence
  Description of Artificial Sequence: Synthetic oligonucleotide
  Antisense strand to SEQ ID NO: 1413196
agauucccacaucuuuacu

SEQ ID NO: 1413198 - RNA, 19 nt, Artificial Sequence
  Description of Artificial Sequence: Synthetic oligonucleotide
  Sense strand starting at position 2652 of SEQ ID NO: 1243385
ucaccuaauugucuuugga

SEQ ID NO: 1413199 - RNA, 19 nt, Artificial Sequence
  Description of Artificial Sequence: Synthetic oligonucleotide
  Antisense strand to SEQ ID NO: 1413198
uccaaagacaauuagguga

SEQ ID NO: 1413200 - RNA, 19 nt, Artificial Sequence
  Description of Artificial Sequence: Synthetic oligonucleotide
  Sense strand starting at position 2654 of SEQ ID NO: 1243385
accuaauugucuuuggaua

SEQ ID NO: 1413201 - RNA, 19 nt, Artificial Sequence
  Description of Artificial Sequence: Synthetic oligonucleotide
  Antisense strand to SEQ ID NO: 1413200
uauccaaagacaauuaggu

SEQ ID NO: 1413202 - RNA, 19 nt, Artificial Sequence
  Description of Artificial Sequence: Synthetic oligonucleotide
  Sense strand starting at position 2655 of SEQ ID NO: 1243385
ccuaauugucuuuggauag

SEQ ID NO: 1413203 - RNA, 19 nt, Artificial Sequence
  Description of Artificial Sequence: Synthetic oligonucleotide
  Antisense strand to SEQ ID NO: 1413202
cuauccaaagacaauuagg

SEQ ID NO: 1413204 - RNA, 19 nt, Artificial Sequence
  Description of Artificial Sequence: Synthetic oligonucleotide
  Sense strand starting at position 2659 of SEQ ID NO: 1243385
auugucuuuggauagguga

SEQ ID NO: 1413205 - RNA, 19 nt, Artificial Sequence
  Description of Artificial Sequence: Synthetic oligonucleotide
  Antisense strand to SEQ ID NO: 1413204
ucaccuauccaaagacaau

SEQ ID NO: 1413206 - RNA, 19 nt, Artificial Sequence
  Description of Artificial Sequence: Synthetic oligonucleotide
  Sense strand starting at position 2661 of SEQ ID NO: 1243385
ugucuuuggauaggugaga

SEQ ID NO: 1413207 - RNA, 19 nt, Artificial Sequence
  Description of Artificial Sequence: Synthetic oligonucleotide
  Antisense strand to SEQ ID NO: 1413206
ucucaccuauccaaagaca

SEQ ID NO: 1413208 - RNA, 19 nt, Artificial Sequence
  Description of Artificial Sequence: Synthetic oligonucleotide
  Sense strand starting at position 2712 of SEQ ID NO: 1243385
guucccauuuccugacuuu

SEQ ID NO: 1413209 - RNA, 19 nt, Artificial Sequence
  Description of Artificial Sequence: Synthetic oligonucleotide
  Antisense strand to SEQ ID NO: 1413208
aaagucaggaaaugggaac

SEQ ID NO: 1413210 - RNA, 19 nt, Artificial Sequence
  Description of Artificial Sequence: Synthetic oligonucleotide
  Sense strand starting at position 2749 of SEQ ID NO: 1243385
ugacucucgguuuguguau

SEQ ID NO: 1413211 - RNA, 19 nt, Artificial Sequence
  Description of Artificial Sequence: Synthetic oligonucleotide
  Antisense strand to SEQ ID NO: 1413210
auacacaaaccgagaguca

SEQ ID NO: 1413212 - RNA, 19 nt, Artificial Sequence
  Description of Artificial Sequence: Synthetic oligonucleotide
  Sense strand starting at position 2816 of SEQ ID NO: 1243385
gauacauuaugcuggcagu

SEQ ID NO: 1413213 - RNA, 19 nt, Artificial Sequence
  Description of Artificial Sequence: Synthetic oligonucleotide
  Antisense strand to SEQ ID NO: 1413212
acugccagcauaauguauc

SEQ ID NO: 1413214 - RNA, 19 nt, Artificial Sequence
  Description of Artificial Sequence: Synthetic oligonucleotide
  Sense strand starting at position 2960 of SEQ ID NO: 1243385
gagcaacaugugcacaaua

SEQ ID NO: 1413215 - RNA, 19 nt, Artificial Sequence
  Description of Artificial Sequence: Synthetic oligonucleotide
  Antisense strand to SEQ ID NO: 1413214
uauugugcacauguugcuc

SEQ ID NO: 1413216 - RNA, 19 nt, Artificial Sequence
  Description of Artificial Sequence: Synthetic oligonucleotide
  Sense strand starting at position 2962 of SEQ ID NO: 1243385
gcaacaugugcacaauaga

SEQ ID NO: 1413217 - RNA, 19 nt, Artificial Sequence
  Description of Artificial Sequence: Synthetic oligonucleotide
  Antisense strand to SEQ ID NO: 1413216
ucuauugugcacauguugc

SEQ ID NO: 1413218 - RNA, 19 nt, Artificial Sequence
  Description of Artificial Sequence: Synthetic oligonucleotide
  Sense strand starting at position 3013 of SEQ ID NO: 1243385
ucuacaagcugaugaguuu

SEQ ID NO: 1413219 - RNA, 19 nt, Artificial Sequence
  Description of Artificial Sequence: Synthetic oligonucleotide
  Antisense strand to SEQ ID NO: 1413218
aaacucaucagcuuguaga

SEQ ID NO: 1413220 - RNA, 19 nt, Artificial Sequence
  Description of Artificial Sequence: Synthetic oligonucleotide
  Sense strand starting at position 3019 of SEQ ID NO: 1243385
agcugaugaguuugucuga

SEQ ID NO: 1413221 - RNA, 19 nt, Artificial Sequence
  Description of Artificial Sequence: Synthetic oligonucleotide
  Antisense strand to SEQ ID NO: 1413220
ucagacaaacucaucagcu

SEQ ID NO: 1413222 - RNA, 19 nt, Artificial Sequence
  Description of Artificial Sequence: Synthetic oligonucleotide
  Sense strand starting at position 3024 of SEQ ID NO: 1243385
augaguuugucugacccaa

SEQ ID NO: 1413223 - RNA, 19 nt, Artificial Sequence
  Description of Artificial Sequence: Synthetic oligonucleotide
  Antisense strand to SEQ ID NO: 1413222
uugggucagacaaacucau

SEQ ID NO: 1413224 - RNA, 19 nt, Artificial Sequence
  Description of Artificial Sequence: Synthetic oligonucleotide
  Sense strand starting at position 3026 of SEQ ID NO: 1243385
gaguuugucugacccaaag

SEQ ID NO: 1413225 - RNA, 19 nt, Artificial Sequence
  Description of Artificial Sequence: Synthetic oligonucleotide
  Antisense strand to SEQ ID NO: 1413224
cuuugggucagacaaacuc

SEQ ID NO: 1413226 - RNA, 19 nt, Artificial Sequence
  Description of Artificial Sequence: Synthetic oligonucleotide
  Sense strand starting at position 3045 of SEQ ID NO: 1243385
acaugagacuccuggguga

SEQ ID NO: 1413227 - RNA, 19 nt, Artificial Sequence
  Description of Artificial Sequence: Synthetic oligonucleotide
  Antisense strand to SEQ ID NO: 1413226
ucacccaggagucucaugu

SEQ ID NO: 1413228 - RNA, 19 nt, Artificial Sequence
  Description of Artificial Sequence: Synthetic oligonucleotide
  Sense strand starting at position 3047 of SEQ ID NO: 1243385
augagacuccugggugaga

SEQ ID NO: 1413229 - RNA, 19 nt, Artificial Sequence
  Description of Artificial Sequence: Synthetic oligonucleotide
  Antisense strand to SEQ ID NO: 1413228
ucucacccaggagucucau

SEQ ID NO: 1413230 - RNA, 19 nt, Artificial Sequence
  Description of Artificial Sequence: Synthetic oligonucleotide
  Sense strand starting at position 3093 of SEQ ID NO: 1243385
gcaacagcagcgugauguu

SEQ ID NO: 1413231 - RNA, 19 nt, Artificial Sequence
  Description of Artificial Sequence: Synthetic oligonucleotide
  Antisense strand to SEQ ID NO: 1413230
aacaucacgcugcuguugc

SEQ ID NO: 1413232 - RNA, 19 nt, Artificial Sequence
  Description of Artificial Sequence: Synthetic oligonucleotide
  Sense strand starting at position 3100 of SEQ ID NO: 1243385
cagcgugauguuugcauca

SEQ ID NO: 1413233 - RNA, 19 nt, Artificial Sequence
  Description of Artificial Sequence: Synthetic oligonucleotide
  Antisense strand to SEQ ID NO: 1413232
ugaugcaaacaucacgcug

SEQ ID NO: 1413234 - RNA, 19 nt, Artificial Sequence
  Description of Artificial Sequence: Synthetic oligonucleotide
  Sense strand starting at position 3199 of SEQ ID NO: 1243385
gccauagagcucugagcuu

SEQ ID NO: 1413235 - RNA, 19 nt, Artificial Sequence
  Description of Artificial Sequence: Synthetic oligonucleotide
  Antisense strand to SEQ ID NO: 1413234
aagcucagagcucuauggc

SEQ ID NO: 1413236 - RNA, 19 nt, Artificial Sequence
  Description of Artificial Sequence: Synthetic oligonucleotide
  Sense strand starting at position 3205 of SEQ ID NO: 1243385
gagcucugagcuugagaga

SEQ ID NO: 1413237 - RNA, 19 nt, Artificial Sequence
  Description of Artificial Sequence: Synthetic oligonucleotide
  Antisense strand to SEQ ID NO: 1413236
ucucucaagcucagagcuc

SEQ ID NO: 1413238 - RNA, 19 nt, Artificial Sequence
  Description of Artificial Sequence: Synthetic oligonucleotide
  Sense strand starting at position 3206 of SEQ ID NO: 1243385
agcucugagcuugagagau

SEQ ID NO: 1413239 - RNA, 19 nt, Artificial Sequence
  Description of Artificial Sequence: Synthetic oligonucleotide
  Antisense strand to SEQ ID NO: 1413238
aucucucaagcucagagcu

SEQ ID NO: 1413240 - RNA, 19 nt, Artificial Sequence
  Description of Artificial Sequence: Synthetic oligonucleotide
  Sense strand starting at position 3287 of SEQ ID NO: 1243385
gggugugcucacugcaaac

SEQ ID NO: 1413241 - RNA, 19 nt, Artificial Sequence
  Description of Artificial Sequence: Synthetic oligonucleotide
  Antisense strand to SEQ ID NO: 1413240
guuugcagugagcacaccc

SEQ ID NO: 1413242 - RNA, 19 nt, Artificial Sequence
  Description of Artificial Sequence: Synthetic oligonucleotide
  Sense strand starting at position 3319 of SEQ ID NO: 1243385
auggcuugaguacaaagua

SEQ ID NO: 1413243 - RNA, 19 nt, Artificial Sequence
  Description of Artificial Sequence: Synthetic oligonucleotide
  Antisense strand to SEQ ID NO: 1413242
uacuuuguacucaagccau

SEQ ID NO: 1413244 - RNA, 19 nt, Artificial Sequence
  Description of Artificial Sequence: Synthetic oligonucleotide
  Sense strand starting at position 3650 of SEQ ID NO: 1243385
ucaugaagugacugcaaga

SEQ ID NO: 1413245 - RNA, 19 nt, Artificial Sequence
  Description of Artificial Sequence: Synthetic oligonucleotide
  Antisense strand to SEQ ID NO: 1413244
ucuugcagucacuucauga

SEQ ID NO: 1413246 - RNA, 19 nt, Artificial Sequence
  Description of Artificial Sequence: Synthetic oligonucleotide
  Sense strand starting at position 3677 of SEQ ID NO: 1243385
agauaauguuaagugcaca

SEQ ID NO: 1413247 - RNA, 19 nt, Artificial Sequence
  Description of Artificial Sequence: Synthetic oligonucleotide
  Antisense strand to SEQ ID NO: 1413246
ugugcacuuaacauuaucu

SEQ ID NO: 1413248 - RNA, 19 nt, Artificial Sequence
  Description of Artificial Sequence: Synthetic oligonucleotide
  Sense strand starting at position 3775 of SEQ ID NO: 1243385
cucuguugcuuuguauaaa

SEQ ID NO: 1413249 - RNA, 19 nt, Artificial Sequence
  Description of Artificial Sequence: Synthetic oligonucleotide
  Antisense strand to SEQ ID NO: 1413248
uuuauacaaagcaacagag

SEQ ID NO: 1413250 - RNA, 19 nt, Artificial Sequence
  Description of Artificial Sequence: Synthetic oligonucleotide
  Sense strand starting at position 3776 of SEQ ID NO: 1243385
ucuguugcuuuguauaaau

SEQ ID NO: 1413251 - RNA, 19 nt, Artificial Sequence
  Description of Artificial Sequence: Synthetic oligonucleotide
  Antisense strand to SEQ ID NO: 1413250
auuuauacaaagcaacaga

SEQ ID NO: 1413252 - RNA, 19 nt, Artificial Sequence
  Description of Artificial Sequence: Synthetic oligonucleotide
  Sense strand starting at position 3783 of SEQ ID NO: 1243385
cuuuguauaaauggcgaua

SEQ ID NO: 1413253 - RNA, 19 nt, Artificial Sequence
  Description of Artificial Sequence: Synthetic oligonucleotide
  Antisense strand to SEQ ID NO: 1413252
uaucgccauuuauacaaag

SEQ ID NO: 1413254 - RNA, 19 nt, Artificial Sequence
  Description of Artificial Sequence: Synthetic oligonucleotide
  Sense strand starting at position 3785 of SEQ ID NO: 1243385
uuguauaaauggcgauaau

SEQ ID NO: 1413255 - RNA, 19 nt, Artificial Sequence
  Description of Artificial Sequence: Synthetic oligonucleotide
  Antisense strand to SEQ ID NO: 1413254
auuaucgccauuuauacaa

SEQ ID NO: 1413256 - RNA, 19 nt, Artificial Sequence
  Description of Artificial Sequence: Synthetic oligonucleotide
  Sense strand starting at position 3786 of SEQ ID NO: 1243385
uguauaaauggcgauaauu

SEQ ID NO: 1413257 - RNA, 19 nt, Artificial Sequence
  Description of Artificial Sequence: Synthetic oligonucleotide
  Antisense strand to SEQ ID NO: 1413256
aauuaucgccauuuauaca

SEQ ID NO: 1413258 - RNA, 19 nt, Artificial Sequence
  Description of Artificial Sequence: Synthetic oligonucleotide
  Sense strand starting at position 3794 of SEQ ID NO: 1243385
uggcgauaauuaugguaau

SEQ ID NO: 1413259 - RNA, 19 nt, Artificial Sequence
  Description of Artificial Sequence: Synthetic oligonucleotide
  Antisense strand to SEQ ID NO: 1413258
auuaccauaauuaucgcca

SEQ ID NO: 1413260 - RNA, 19 nt, Artificial Sequence
  Description of Artificial Sequence: Synthetic oligonucleotide
  Sense strand starting at position 3795 of SEQ ID NO: 1243385
ggcgauaauuaugguaaua

SEQ ID NO: 1413261 - RNA, 19 nt, Artificial Sequence
  Description of Artificial Sequence: Synthetic oligonucleotide
  Antisense strand to SEQ ID NO: 1413260
uauuaccauaauuaucgcc

SEQ ID NO: 1413262 - RNA, 19 nt, Artificial Sequence
  Description of Artificial Sequence: Synthetic oligonucleotide
  Sense strand starting at position 3805 of SEQ ID NO: 1243385
augguaauaccacauaguu

SEQ ID NO: 1413263 - RNA, 19 nt, Artificial Sequence
  Description of Artificial Sequence: Synthetic oligonucleotide
  Antisense strand to SEQ ID NO: 1413262
aacuaugugguauuaccau

SEQ ID NO: 1413264 - RNA, 19 nt, Artificial Sequence
  Description of Artificial Sequence: Synthetic oligonucleotide
  Sense strand starting at position 1742 of SEQ ID NO: 1243386
cuuagauuccagcagugac

SEQ ID NO: 1413265 - RNA, 19 nt, Artificial Sequence
  Description of Artificial Sequence: Synthetic oligonucleotide
  Antisense strand to SEQ ID NO: 1413264
gucacugcuggaaucuaag

SEQ ID NO: 1413266 - RNA, 19 nt, Artificial Sequence
  Description of Artificial Sequence: Synthetic oligonucleotide
  Sense strand starting at position 2357 of SEQ ID NO: 1243386
gccauuuccugcccucaga

SEQ ID NO: 1413267 - RNA, 19 nt, Artificial Sequence
  Description of Artificial Sequence: Synthetic oligonucleotide
  Antisense strand to SEQ ID NO: 1413266
ucugagggcaggaaauggc

SEQ ID NO: 1413268 - RNA, 19 nt, Artificial Sequence
  Description of Artificial Sequence: Synthetic oligonucleotide
  Sense strand starting at position 2539 of SEQ ID NO: 1243386
ugcauaugcuaggaucuua

SEQ ID NO: 1413269 - RNA, 19 nt, Artificial Sequence
  Description of Artificial Sequence: Synthetic oligonucleotide
  Antisense strand to SEQ ID NO: 1413268
uaagauccuagcauaugca

SEQ ID NO: 1413270 - RNA, 19 nt, Artificial Sequence
  Description of Artificial Sequence: Synthetic oligonucleotide
  Sense strand starting at position 2550 of SEQ ID NO: 1243386
ggaucuuauuucugcaaac

SEQ ID NO: 1413271 - RNA, 19 nt, Artificial Sequence
  Description of Artificial Sequence: Synthetic oligonucleotide
  Antisense strand to SEQ ID NO: 1413270
guuugcagaaauaagaucc

SEQ ID NO: 1413272 - RNA, 19 nt, Artificial Sequence
  Description of Artificial Sequence: Synthetic oligonucleotide
  Sense strand starting at position 2560 of SEQ ID NO: 1243386
ucugcaaacuaguaaagau

SEQ ID NO: 1413273 - RNA, 19 nt, Artificial Sequence
  Description of Artificial Sequence: Synthetic oligonucleotide
  Antisense strand to SEQ ID NO: 1413272
aucuuuacuaguuugcaga

SEQ ID NO: 1413274 - RNA, 19 nt, Artificial Sequence
  Description of Artificial Sequence: Synthetic oligonucleotide
  Sense strand starting at position 2568 of SEQ ID NO: 1243386
cuaguaaagaugugggaau

SEQ ID NO: 1413275 - RNA, 19 nt, Artificial Sequence
  Description of Artificial Sequence: Synthetic oligonucleotide
  Antisense strand to SEQ ID NO: 1413274
auucccacaucuuuacuag

SEQ ID NO: 1413276 - RNA, 19 nt, Artificial Sequence
  Description of Artificial Sequence: Synthetic oligonucleotide
  Sense strand starting at position 2570 of SEQ ID NO: 1243386
aguaaagaugugggaaucu

SEQ ID NO: 1413277 - RNA, 19 nt, Artificial Sequence
  Description of Artificial Sequence: Synthetic oligonucleotide
  Antisense strand to SEQ ID NO: 1413276
agauucccacaucuuuacu

SEQ ID NO: 1413278 - RNA, 19 nt, Artificial Sequence
  Description of Artificial Sequence: Synthetic oligonucleotide
  Sense strand starting at position 2605 of SEQ ID NO: 1243386
ggcggaguuuagugcaaug

SEQ ID NO: 1413279 - RNA, 19 nt, Artificial Sequence
  Description of Artificial Sequence: Synthetic oligonucleotide
  Antisense strand to SEQ ID NO: 1413278
cauugcacuaaacuccgcc

SEQ ID NO: 1413280 - RNA, 19 nt, Artificial Sequence
  Description of Artificial Sequence: Synthetic oligonucleotide
  Sense strand starting at position 2921 of SEQ ID NO: 1243386
ucaccuaauugucuuugga

SEQ ID NO: 1413281 - RNA, 19 nt, Artificial Sequence
  Description of Artificial Sequence: Synthetic oligonucleotide
  Antisense strand to SEQ ID NO: 1413280
uccaaagacaauuagguga

SEQ ID NO: 1413282 - RNA, 19 nt, Artificial Sequence
  Description of Artificial Sequence: Synthetic oligonucleotide
  Sense strand starting at position 2923 of SEQ ID NO: 1243386
accuaauugucuuuggaua

SEQ ID NO: 1413283 - RNA, 19 nt, Artificial Sequence
  Description of Artificial Sequence: Synthetic oligonucleotide
  Antisense strand to SEQ ID NO: 1413282
uauccaaagacaauuaggu

SEQ ID NO: 1413284 - RNA, 19 nt, Artificial Sequence
  Description of Artificial Sequence: Synthetic oligonucleotide
  Sense strand starting at position 2924 of SEQ ID NO: 1243386
ccuaauugucuuuggauag

SEQ ID NO: 1413285 - RNA, 19 nt, Artificial Sequence
  Description of Artificial Sequence: Synthetic oligonucleotide
  Antisense strand to SEQ ID NO: 1413284
cuauccaaagacaauuagg

SEQ ID NO: 1413286 - RNA, 19 nt, Artificial Sequence
  Description of Artificial Sequence: Synthetic oligonucleotide
  Sense strand starting at position 2928 of SEQ ID NO: 1243386
auugucuuuggauagguga

SEQ ID NO: 1413287 - RNA, 19 nt, Artificial Sequence
  Description of Artificial Sequence: Synthetic oligonucleotide
  Antisense strand to SEQ ID NO: 1413286
ucaccuauccaaagacaau

SEQ ID NO: 1413288 - RNA, 19 nt, Artificial Sequence
  Description of Artificial Sequence: Synthetic oligonucleotide
  Sense strand starting at position 2930 of SEQ ID NO: 1243386
ugucuuuggauaggugaga

SEQ ID NO: 1413289 - RNA, 19 nt, Artificial Sequence
  Description of Artificial Sequence: Synthetic oligonucleotide
  Antisense strand to SEQ ID NO: 1413288
ucucaccuauccaaagaca

SEQ ID NO: 1413290 - RNA, 19 nt, Artificial Sequence
  Description of Artificial Sequence: Synthetic oligonucleotide
  Sense strand starting at position 2981 of SEQ ID NO: 1243386
guucccauuuccugacuuu

SEQ ID NO: 1413291 - RNA, 19 nt, Artificial Sequence
  Description of Artificial Sequence: Synthetic oligonucleotide
  Antisense strand to SEQ ID NO: 1413290
aaagucaggaaaugggaac

SEQ ID NO: 1413292 - RNA, 19 nt, Artificial Sequence
  Description of Artificial Sequence: Synthetic oligonucleotide
  Sense strand starting at position 3018 of SEQ ID NO: 1243386
ugacucucgguuuguguau

SEQ ID NO: 1413293 - RNA, 19 nt, Artificial Sequence
  Description of Artificial Sequence: Synthetic oligonucleotide
  Antisense strand to SEQ ID NO: 1413292
auacacaaaccgagaguca

SEQ ID NO: 1413294 - RNA, 19 nt, Artificial Sequence
  Description of Artificial Sequence: Synthetic oligonucleotide
  Sense strand starting at position 3085 of SEQ ID NO: 1243386
gauacauuaugcuggcagu

SEQ ID NO: 1413295 - RNA, 19 nt, Artificial Sequence
  Description of Artificial Sequence: Synthetic oligonucleotide
  Antisense strand to SEQ ID NO: 1413294
acugccagcauaauguauc

SEQ ID NO: 1413296 - RNA, 19 nt, Artificial Sequence
  Description of Artificial Sequence: Synthetic oligonucleotide
  Sense strand starting at position 3229 of SEQ ID NO: 1243386
gagcaacaugugcacaaua

SEQ ID NO: 1413297 - RNA, 19 nt, Artificial Sequence
  Description of Artificial Sequence: Synthetic oligonucleotide
  Antisense strand to SEQ ID NO: 1413296
uauugugcacauguugcuc

SEQ ID NO: 1413298 - RNA, 19 nt, Artificial Sequence
  Description of Artificial Sequence: Synthetic oligonucleotide
  Sense strand starting at position 3231 of SEQ ID NO: 1243386
gcaacaugugcacaauaga

SEQ ID NO: 1413299 - RNA, 19 nt, Artificial Sequence
  Description of Artificial Sequence: Synthetic oligonucleotide
  Antisense strand to SEQ ID NO: 1413298
ucuauugugcacauguugc

SEQ ID NO: 1413300 - RNA, 19 nt, Artificial Sequence
  Description of Artificial Sequence: Synthetic oligonucleotide
  Sense strand starting at position 3282 of SEQ ID NO: 1243386
ucuacaagcugaugaguuu

SEQ ID NO: 1413301 - RNA, 19 nt, Artificial Sequence
  Description of Artificial Sequence: Synthetic oligonucleotide
  Antisense strand to SEQ ID NO: 1413300
aaacucaucagcuuguaga

SEQ ID NO: 1413302 - RNA, 19 nt, Artificial Sequence
  Description of Artificial Sequence: Synthetic oligonucleotide
  Sense strand starting at position 3288 of SEQ ID NO: 1243386
agcugaugaguuugucuga

SEQ ID NO: 1413303 - RNA, 19 nt, Artificial Sequence
  Description of Artificial Sequence: Synthetic oligonucleotide
  Antisense strand to SEQ ID NO: 1413302
ucagacaaacucaucagcu

SEQ ID NO: 1413304 - RNA, 19 nt, Artificial Sequence
  Description of Artificial Sequence: Synthetic oligonucleotide
  Sense strand starting at position 3293 of SEQ ID NO: 1243386
augaguuugucugacccaa

SEQ ID NO: 1413305 - RNA, 19 nt, Artificial Sequence
  Description of Artificial Sequence: Synthetic oligonucleotide
  Antisense strand to SEQ ID NO: 1413304
uugggucagacaaacucau

SEQ ID NO: 1413306 - RNA, 19 nt, Artificial Sequence
  Description of Artificial Sequence: Synthetic oligonucleotide
  Sense strand starting at position 3295 of SEQ ID NO: 1243386
gaguuugucugacccaaag

SEQ ID NO: 1413307 - RNA, 19 nt, Artificial Sequence
  Description of Artificial Sequence: Synthetic oligonucleotide
  Antisense strand to SEQ ID NO: 1413306
cuuugggucagacaaacuc

SEQ ID NO: 1413308 - RNA, 19 nt, Artificial Sequence
  Description of Artificial Sequence: Synthetic oligonucleotide
  Sense strand starting at position 3314 of SEQ ID NO: 1243386
acaugagacuccuggguga

SEQ ID NO: 1413309 - RNA, 19 nt, Artificial Sequence
  Description of Artificial Sequence: Synthetic oligonucleotide
  Antisense strand to SEQ ID NO: 1413308
ucacccaggagucucaugu

SEQ ID NO: 1413310 - RNA, 19 nt, Artificial Sequence
  Description of Artificial Sequence: Synthetic oligonucleotide
  Sense strand starting at position 3316 of SEQ ID NO: 1243386
augagacuccugggugaga

SEQ ID NO: 1413311 - RNA, 19 nt, Artificial Sequence
  Description of Artificial Sequence: Synthetic oligonucleotide
  Antisense strand to SEQ ID NO: 1413310
ucucacccaggagucucau

SEQ ID NO: 1413312 - RNA, 19 nt, Artificial Sequence
  Description of Artificial Sequence: Synthetic oligonucleotide
  Sense strand starting at position 3362 of SEQ ID NO: 1243386
gcaacagcagcgugauguu

SEQ ID NO: 1413313 - RNA, 19 nt, Artificial Sequence
  Description of Artificial Sequence: Synthetic oligonucleotide
  Antisense strand to SEQ ID NO: 1413312
aacaucacgcugcuguugc

SEQ ID NO: 1413314 - RNA, 19 nt, Artificial Sequence
  Description of Artificial Sequence: Synthetic oligonucleotide
  Sense strand starting at position 3369 of SEQ ID NO: 1243386
cagcgugauguuugcauca

SEQ ID NO: 1413315 - RNA, 19 nt, Artificial Sequence
  Description of Artificial Sequence: Synthetic oligonucleotide
  Antisense strand to SEQ ID NO: 1413314
ugaugcaaacaucacgcug

SEQ ID NO: 1413316 - RNA, 19 nt, Artificial Sequence
  Description of Artificial Sequence: Synthetic oligonucleotide
  Sense strand starting at position 3371 of SEQ ID NO: 1243386
gcgugauguuugcaucagu

SEQ ID NO: 1413317 - RNA, 19 nt, Artificial Sequence
  Description of Artificial Sequence: Synthetic oligonucleotide
  Antisense strand to SEQ ID NO: 1413316
acugaugcaaacaucacgc

SEQ ID NO: 1413318 - RNA, 19 nt, Artificial Sequence
  Description of Artificial Sequence: Synthetic oligonucleotide
  Sense strand starting at position 3468 of SEQ ID NO: 1243386
gccauagagcucugagcuu

SEQ ID NO: 1413319 - RNA, 19 nt, Artificial Sequence
  Description of Artificial Sequence: Synthetic oligonucleotide
  Antisense strand to SEQ ID NO: 1413318
aagcucagagcucuauggc

SEQ ID NO: 1413320 - RNA, 19 nt, Artificial Sequence
  Description of Artificial Sequence: Synthetic oligonucleotide
  Sense strand starting at position 3474 of SEQ ID NO: 1243386
gagcucugagcuugagaga

SEQ ID NO: 1413321 - RNA, 19 nt, Artificial Sequence
  Description of Artificial Sequence: Synthetic oligonucleotide
  Antisense strand to SEQ ID NO: 1413320
ucucucaagcucagagcuc

SEQ ID NO: 1413322 - RNA, 19 nt, Artificial Sequence
  Description of Artificial Sequence: Synthetic oligonucleotide
  Sense strand starting at position 3475 of SEQ ID NO: 1243386
agcucugagcuugagagau

SEQ ID NO: 1413323 - RNA, 19 nt, Artificial Sequence
  Description of Artificial Sequence: Synthetic oligonucleotide
  Antisense strand to SEQ ID NO: 1413322
aucucucaagcucagagcu

SEQ ID NO: 1413324 - RNA, 19 nt, Artificial Sequence
  Description of Artificial Sequence: Synthetic oligonucleotide
  Sense strand starting at position 3556 of SEQ ID NO: 1243386
gggugugcucacugcaaac

SEQ ID NO: 1413325 - RNA, 19 nt, Artificial Sequence
  Description of Artificial Sequence: Synthetic oligonucleotide
  Antisense strand to SEQ ID NO: 1413324
guuugcagugagcacaccc

SEQ ID NO: 1413326 - RNA, 19 nt, Artificial Sequence
  Description of Artificial Sequence: Synthetic oligonucleotide
  Sense strand starting at position 3588 of SEQ ID NO: 1243386
auggcuugaguacaaagua

SEQ ID NO: 1413327 - RNA, 19 nt, Artificial Sequence
  Description of Artificial Sequence: Synthetic oligonucleotide
  Antisense strand to SEQ ID NO: 1413326
uacuuuguacucaagccau

SEQ ID NO: 1413328 - RNA, 19 nt, Artificial Sequence
  Description of Artificial Sequence: Synthetic oligonucleotide
  Sense strand starting at position 3919 of SEQ ID NO: 1243386
ucaugaagugacugcaaga

SEQ ID NO: 1413329 - RNA, 19 nt, Artificial Sequence
  Description of Artificial Sequence: Synthetic oligonucleotide
  Antisense strand to SEQ ID NO: 1413328
ucuugcagucacuucauga

SEQ ID NO: 1413330 - RNA, 19 nt, Artificial Sequence
  Description of Artificial Sequence: Synthetic oligonucleotide
  Sense strand starting at position 3946 of SEQ ID NO: 1243386
agauaauguuaagugcaca

SEQ ID NO: 1413331 - RNA, 19 nt, Artificial Sequence
  Description of Artificial Sequence: Synthetic oligonucleotide
  Antisense strand to SEQ ID NO: 1413330
ugugcacuuaacauuaucu

SEQ ID NO: 1413332 - RNA, 19 nt, Artificial Sequence
  Description of Artificial Sequence: Synthetic oligonucleotide
  Sense strand starting at position 1 of SEQ ID NO: 1243387
guuugaagaccuugcccua

SEQ ID NO: 1413333 - RNA, 19 nt, Artificial Sequence
  Description of Artificial Sequence: Synthetic oligonucleotide
  Antisense strand to SEQ ID NO: 1413332
uagggcaaggucuucaaac

SEQ ID NO: 1413334 - RNA, 19 nt, Artificial Sequence
  Description of Artificial Sequence: Synthetic oligonucleotide
  Sense strand starting at position 66 of SEQ ID NO: 1243387
uccucauuggccuggagua

SEQ ID NO: 1413335 - RNA, 19 nt, Artificial Sequence
  Description of Artificial Sequence: Synthetic oligonucleotide
  Antisense strand to SEQ ID NO: 1413334
uacuccaggccaaugagga

SEQ ID NO: 1413336 - RNA, 19 nt, Artificial Sequence
  Description of Artificial Sequence: Synthetic oligonucleotide
  Sense strand starting at position 68 of SEQ ID NO: 1243387
cucauuggccuggaguaga

SEQ ID NO: 1413337 - RNA, 19 nt, Artificial Sequence
  Description of Artificial Sequence: Synthetic oligonucleotide
  Antisense strand to SEQ ID NO: 1413336
ucuacuccaggccaaugag

SEQ ID NO: 1413338 - RNA, 19 nt, Artificial Sequence
  Description of Artificial Sequence: Synthetic oligonucleotide
  Sense strand starting at position 175 of SEQ ID NO: 1243387
gccucaguuucuuuauaag

SEQ ID NO: 1413339 - RNA, 19 nt, Artificial Sequence
  Description of Artificial Sequence: Synthetic oligonucleotide
  Antisense strand to SEQ ID NO: 1413338
cuuauaaagaaacugaggc

SEQ ID NO: 1413340 - RNA, 19 nt, Artificial Sequence
  Description of Artificial Sequence: Synthetic oligonucleotide
  Sense strand starting at position 185 of SEQ ID NO: 1243387
cuuuauaagcuguagauau

SEQ ID NO: 1413341 - RNA, 19 nt, Artificial Sequence
  Description of Artificial Sequence: Synthetic oligonucleotide
  Antisense strand to SEQ ID NO: 1413340
auaucuacagcuuauaaag

SEQ ID NO: 1413342 - RNA, 19 nt, Artificial Sequence
  Description of Artificial Sequence: Synthetic oligonucleotide
  Sense strand starting at position 187 of SEQ ID NO: 1243387
uuauaagcuguagauauca

SEQ ID NO: 1413343 - RNA, 19 nt, Artificial Sequence
  Description of Artificial Sequence: Synthetic oligonucleotide
  Antisense strand to SEQ ID NO: 1413342
ugauaucuacagcuuauaa

SEQ ID NO: 1413344 - RNA, 19 nt, Artificial Sequence
  Description of Artificial Sequence: Synthetic oligonucleotide
  Sense strand starting at position 298 of SEQ ID NO: 1243387
guccuacagguguaaucau

SEQ ID NO: 1413345 - RNA, 19 nt, Artificial Sequence
  Description of Artificial Sequence: Synthetic oligonucleotide
  Antisense strand to SEQ ID NO: 1413344
augauuacaccuguaggac

SEQ ID NO: 1413346 - RNA, 19 nt, Artificial Sequence
  Description of Artificial Sequence: Synthetic oligonucleotide
  Sense strand starting at position 351 of SEQ ID NO: 1243387
agaaaugguugagaaauga

SEQ ID NO: 1413347 - RNA, 19 nt, Artificial Sequence
  Description of Artificial Sequence: Synthetic oligonucleotide
  Antisense strand to SEQ ID NO: 1413346
ucauuucucaaccauuucu

SEQ ID NO: 1413348 - RNA, 19 nt, Artificial Sequence
  Description of Artificial Sequence: Synthetic oligonucleotide
  Sense strand starting at position 424 of SEQ ID NO: 1243387
gucccaaaguugugaacaa

SEQ ID NO: 1413349 - RNA, 19 nt, Artificial Sequence
  Description of Artificial Sequence: Synthetic oligonucleotide
  Antisense strand to SEQ ID NO: 1413348
uuguucacaacuuugggac

SEQ ID NO: 1413350 - RNA, 19 nt, Artificial Sequence
  Description of Artificial Sequence: Synthetic oligonucleotide
  Sense strand starting at position 807 of SEQ ID NO: 1243387
gugucuaccaugugccaaa

SEQ ID NO: 1413351 - RNA, 19 nt, Artificial Sequence
  Description of Artificial Sequence: Synthetic oligonucleotide
  Antisense strand to SEQ ID NO: 1413350
uuuggcacaugguagacac

SEQ ID NO: 1413352 - RNA, 19 nt, Artificial Sequence
  Description of Artificial Sequence: Synthetic oligonucleotide
  Sense strand starting at position 867 of SEQ ID NO: 1243387
ucacaucaguccuaagaga

SEQ ID NO: 1413353 - RNA, 19 nt, Artificial Sequence
  Description of Artificial Sequence: Synthetic oligonucleotide
  Antisense strand to SEQ ID NO: 1413352
ucucuuaggacugauguga

SEQ ID NO: 1413354 - RNA, 19 nt, Artificial Sequence
  Description of Artificial Sequence: Synthetic oligonucleotide
  Sense strand starting at position 880 of SEQ ID NO: 1243387
aagagaugauucguguuau

SEQ ID NO: 1413355 - RNA, 19 nt, Artificial Sequence
  Description of Artificial Sequence: Synthetic oligonucleotide
  Antisense strand to SEQ ID NO: 1413354
auaacacgaaucaucucuu

SEQ ID NO: 1413356 - RNA, 19 nt, Artificial Sequence
  Description of Artificial Sequence: Synthetic oligonucleotide
  Sense strand starting at position 884 of SEQ ID NO: 1243387
gaugauucguguuauuacu

SEQ ID NO: 1413357 - RNA, 19 nt, Artificial Sequence
  Description of Artificial Sequence: Synthetic oligonucleotide
  Antisense strand to SEQ ID NO: 1413356
aguaauaacacgaaucauc

SEQ ID NO: 1413358 - RNA, 19 nt, Artificial Sequence
  Description of Artificial Sequence: Synthetic oligonucleotide
  Sense strand starting at position 891 of SEQ ID NO: 1243387
cguguuauuacuuguucca

SEQ ID NO: 1413359 - RNA, 19 nt, Artificial Sequence
  Description of Artificial Sequence: Synthetic oligonucleotide
  Antisense strand to SEQ ID NO: 1413358
uggaacaaguaauaacacg

SEQ ID NO: 1413360 - RNA, 19 nt, Artificial Sequence
  Description of Artificial Sequence: Synthetic oligonucleotide
  Sense strand starting at position 893 of SEQ ID NO: 1243387
uguuauuacuuguuccauc

SEQ ID NO: 1413361 - RNA, 19 nt, Artificial Sequence
  Description of Artificial Sequence: Synthetic oligonucleotide
  Antisense strand to SEQ ID NO: 1413360
gauggaacaaguaauaaca

SEQ ID NO: 1413362 - RNA, 19 nt, Artificial Sequence
  Description of Artificial Sequence: Synthetic oligonucleotide
  Sense strand starting at position 894 of SEQ ID NO: 1243387
guuauuacuuguuccaucu

SEQ ID NO: 1413363 - RNA, 19 nt, Artificial Sequence
  Description of Artificial Sequence: Synthetic oligonucleotide
  Antisense strand to SEQ ID NO: 1413362
agauggaacaaguaauaac

SEQ ID NO: 1413364 - RNA, 19 nt, Artificial Sequence
  Description of Artificial Sequence: Synthetic oligonucleotide
  Sense strand starting at position 901 of SEQ ID NO: 1243387
cuuguuccaucuuauagac

SEQ ID NO: 1413365 - RNA, 19 nt, Artificial Sequence
  Description of Artificial Sequence: Synthetic oligonucleotide
  Antisense strand to SEQ ID NO: 1413364
gucuauaagauggaacaag

SEQ ID NO: 1413366 - RNA, 19 nt, Artificial Sequence
  Description of Artificial Sequence: Synthetic oligonucleotide
  Sense strand starting at position 1002 of SEQ ID NO: 1243387
ugucuucaccugggugaag

SEQ ID NO: 1413367 - RNA, 19 nt, Artificial Sequence
  Description of Artificial Sequence: Synthetic oligonucleotide
  Antisense strand to SEQ ID NO: 1413366
cuucacccaggugaagaca

SEQ ID NO: 1413368 - RNA, 19 nt, Artificial Sequence
  Description of Artificial Sequence: Synthetic oligonucleotide
  Sense strand starting at position 1003 of SEQ ID NO: 1243387
gucuucaccugggugaagu

SEQ ID NO: 1413369 - RNA, 19 nt, Artificial Sequence
  Description of Artificial Sequence: Synthetic oligonucleotide
  Antisense strand to SEQ ID NO: 1413368
acuucacccaggugaagac

SEQ ID NO: 1413370 - RNA, 19 nt, Artificial Sequence
  Description of Artificial Sequence: Synthetic oligonucleotide
  Sense strand starting at position 2300 of SEQ ID NO: 1243387
aguaguagauaccucuaaa

SEQ ID NO: 1413371 - RNA, 19 nt, Artificial Sequence
  Description of Artificial Sequence: Synthetic oligonucleotide
  Antisense strand to SEQ ID NO: 1413370
uuuagagguaucuacuacu

SEQ ID NO: 1413372 - RNA, 19 nt, Artificial Sequence
  Description of Artificial Sequence: Synthetic oligonucleotide
  Sense strand starting at position 2333 of SEQ ID NO: 1243387
ccuaguucucgggaaccau

SEQ ID NO: 1413373 - RNA, 19 nt, Artificial Sequence
  Description of Artificial Sequence: Synthetic oligonucleotide
  Antisense strand to SEQ ID NO: 1413372
augguucccgagaacuagg

SEQ ID NO: 1413374 - RNA, 19 nt, Artificial Sequence
  Description of Artificial Sequence: Synthetic oligonucleotide
  Sense strand starting at position 2444 of SEQ ID NO: 1243387
gcgcgauggauggaggauu

SEQ ID NO: 1413375 - RNA, 19 nt, Artificial Sequence
  Description of Artificial Sequence: Synthetic oligonucleotide
  Antisense strand to SEQ ID NO: 1413374
aauccuccauccaucgcgc

SEQ ID NO: 1413376 - RNA, 19 nt, Artificial Sequence
  Description of Artificial Sequence: Synthetic oligonucleotide
  Sense strand starting at position 2547 of SEQ ID NO: 1243387
uuguaaacuccugagccuu

SEQ ID NO: 1413377 - RNA, 19 nt, Artificial Sequence
  Description of Artificial Sequence: Synthetic oligonucleotide
  Antisense strand to SEQ ID NO: 1413376
aaggcucaggaguuuacaa

SEQ ID NO: 1413378 - RNA, 19 nt, Artificial Sequence
  Description of Artificial Sequence: Synthetic oligonucleotide
  Sense strand starting at position 2816 of SEQ ID NO: 1243387
uaguauaguucugugcaaa

SEQ ID NO: 1413379 - RNA, 19 nt, Artificial Sequence
  Description of Artificial Sequence: Synthetic oligonucleotide
  Antisense strand to SEQ ID NO: 1413378
uuugcacagaacuauacua

SEQ ID NO: 1413380 - RNA, 19 nt, Artificial Sequence
  Description of Artificial Sequence: Synthetic oligonucleotide
  Sense strand starting at position 2817 of SEQ ID NO: 1243387
aguauaguucugugcaaau

SEQ ID NO: 1413381 - RNA, 19 nt, Artificial Sequence
  Description of Artificial Sequence: Synthetic oligonucleotide
  Antisense strand to SEQ ID NO: 1413380
auuugcacagaacuauacu

SEQ ID NO: 1413382 - RNA, 19 nt, Artificial Sequence
  Description of Artificial Sequence: Synthetic oligonucleotide
  Sense strand starting at position 2925 of SEQ ID NO: 1243387
aacgccuuguuagaaacua

SEQ ID NO: 1413383 - RNA, 19 nt, Artificial Sequence
  Description of Artificial Sequence: Synthetic oligonucleotide
  Antisense strand to SEQ ID NO: 1413382
uaguuucuaacaaggcguu

SEQ ID NO: 1413384 - RNA, 19 nt, Artificial Sequence
  Description of Artificial Sequence: Synthetic oligonucleotide
  Sense strand starting at position 2998 of SEQ ID NO: 1243387
ggugccucguguuucagaa

SEQ ID NO: 1413385 - RNA, 19 nt, Artificial Sequence
  Description of Artificial Sequence: Synthetic oligonucleotide
  Antisense strand to SEQ ID NO: 1413384
uucugaaacacgaggcacc

SEQ ID NO: 1413386 - RNA, 19 nt, Artificial Sequence
  Description of Artificial Sequence: Synthetic oligonucleotide
  Sense strand starting at position 3094 of SEQ ID NO: 1243387
cauguaugugccuggcauu

SEQ ID NO: 1413387 - RNA, 19 nt, Artificial Sequence
  Description of Artificial Sequence: Synthetic oligonucleotide
  Antisense strand to SEQ ID NO: 1413386
aaugccaggcacauacaug

SEQ ID NO: 1413388 - RNA, 19 nt, Artificial Sequence
  Description of Artificial Sequence: Synthetic oligonucleotide
  Sense strand starting at position 3095 of SEQ ID NO: 1243387
auguaugugccuggcauuu

SEQ ID NO: 1413389 - RNA, 19 nt, Artificial Sequence
  Description of Artificial Sequence: Synthetic oligonucleotide
  Antisense strand to SEQ ID NO: 1413388
aaaugccaggcacauacau

SEQ ID NO: 1413390 - RNA, 19 nt, Artificial Sequence
  Description of Artificial Sequence: Synthetic oligonucleotide
  Sense strand starting at position 3153 of SEQ ID NO: 1243387
cguggagcuuaucuagaga

SEQ ID NO: 1413391 - RNA, 19 nt, Artificial Sequence
  Description of Artificial Sequence: Synthetic oligonucleotide
  Antisense strand to SEQ ID NO: 1413390
ucucuagauaagcuccacg

SEQ ID NO: 1413392 - RNA, 19 nt, Artificial Sequence
  Description of Artificial Sequence: Synthetic oligonucleotide
  Sense strand starting at position 3156 of SEQ ID NO: 1243387
ggagcuuaucuagagagug

SEQ ID NO: 1413393 - RNA, 19 nt, Artificial Sequence
  Description of Artificial Sequence: Synthetic oligonucleotide
  Antisense strand to SEQ ID NO: 1413392
cacucucuagauaagcucc

SEQ ID NO: 1413394 - RNA, 19 nt, Artificial Sequence
  Description of Artificial Sequence: Synthetic oligonucleotide
  Sense strand starting at position 3158 of SEQ ID NO: 1243387
agcuuaucuagagagugau

SEQ ID NO: 1413395 - RNA, 19 nt, Artificial Sequence
  Description of Artificial Sequence: Synthetic oligonucleotide
  Antisense strand to SEQ ID NO: 1413394
aucacucucuagauaagcu

SEQ ID NO: 1413396 - RNA, 19 nt, Artificial Sequence
  Description of Artificial Sequence: Synthetic oligonucleotide
  Sense strand starting at position 3164 of SEQ ID NO: 1243387
ucuagagagugauacgcau

SEQ ID NO: 1413397 - RNA, 19 nt, Artificial Sequence
  Description of Artificial Sequence: Synthetic oligonucleotide
  Antisense strand to SEQ ID NO: 1413396
augcguaucacucucuaga

SEQ ID NO: 1413398 - RNA, 19 nt, Artificial Sequence
  Description of Artificial Sequence: Synthetic oligonucleotide
  Sense strand starting at position 3168 of SEQ ID NO: 1243387
gagagugauacgcauugua

SEQ ID NO: 1413399 - RNA, 19 nt, Artificial Sequence
  Description of Artificial Sequence: Synthetic oligonucleotide
  Antisense strand to SEQ ID NO: 1413398
uacaaugcguaucacucuc

SEQ ID NO: 1413400 - RNA, 19 nt, Artificial Sequence
  Description of Artificial Sequence: Synthetic oligonucleotide
  Sense strand starting at position 3171 of SEQ ID NO: 1243387
agugauacgcauuguaaau

SEQ ID NO: 1413401 - RNA, 19 nt, Artificial Sequence
  Description of Artificial Sequence: Synthetic oligonucleotide
  Antisense strand to SEQ ID NO: 1413400
auuuacaaugcguaucacu

SEQ ID NO: 1413402 - RNA, 19 nt, Artificial Sequence
  Description of Artificial Sequence: Synthetic oligonucleotide
  Sense strand starting at position 3243 of SEQ ID NO: 1243387
gcaucuaucugccaaagga

SEQ ID NO: 1413403 - RNA, 19 nt, Artificial Sequence
  Description of Artificial Sequence: Synthetic oligonucleotide
  Antisense strand to SEQ ID NO: 1413402
uccuuuggcagauagaugc

SEQ ID NO: 1413404 - RNA, 19 nt, Artificial Sequence
  Description of Artificial Sequence: Synthetic oligonucleotide
  Sense strand starting at position 3257 of SEQ ID NO: 1243387
aaggacuuguauccaugua

SEQ ID NO: 1413405 - RNA, 19 nt, Artificial Sequence
  Description of Artificial Sequence: Synthetic oligonucleotide
  Antisense strand to SEQ ID NO: 1413404
uacauggauacaaguccuu

SEQ ID NO: 1413406 - RNA, 19 nt, Artificial Sequence
  Description of Artificial Sequence: Synthetic oligonucleotide
  Sense strand starting at position 3623 of SEQ ID NO: 1243387
agagaugaguuaucgcuau

SEQ ID NO: 1413407 - RNA, 19 nt, Artificial Sequence
  Description of Artificial Sequence: Synthetic oligonucleotide
  Antisense strand to SEQ ID NO: 1413406
auagcgauaacucaucucu

SEQ ID NO: 1413408 - RNA, 19 nt, Artificial Sequence
  Description of Artificial Sequence: Synthetic oligonucleotide
  Sense strand starting at position 3627 of SEQ ID NO: 1243387
augaguuaucgcuauguug

SEQ ID NO: 1413409 - RNA, 19 nt, Artificial Sequence
  Description of Artificial Sequence: Synthetic oligonucleotide
  Antisense strand to SEQ ID NO: 1413408
caacauagcgauaacucau

SEQ ID NO: 1413410 - RNA, 19 nt, Artificial Sequence
  Description of Artificial Sequence: Synthetic oligonucleotide
  Sense strand starting at position 3629 of SEQ ID NO: 1243387
gaguuaucgcuauguuguc

SEQ ID NO: 1413411 - RNA, 19 nt, Artificial Sequence
  Description of Artificial Sequence: Synthetic oligonucleotide
  Antisense strand to SEQ ID NO: 1413410
gacaacauagcgauaacuc

SEQ ID NO: 1413412 - RNA, 19 nt, Artificial Sequence
  Description of Artificial Sequence: Synthetic oligonucleotide
  Sense strand starting at position 47 of SEQ ID NO: 1243388
gaacaaagaguaugcguuu

SEQ ID NO: 1413413 - RNA, 19 nt, Artificial Sequence
  Description of Artificial Sequence: Synthetic oligonucleotide
  Antisense strand to SEQ ID NO: 1413412
aaacgcauacucuuuguuc

SEQ ID NO: 1413414 - RNA, 19 nt, Artificial Sequence
  Description of Artificial Sequence: Synthetic oligonucleotide
  Sense strand starting at position 50 of SEQ ID NO: 1243388
caaagaguaugcguuugua

SEQ ID NO: 1413415 - RNA, 19 nt, Artificial Sequence
  Description of Artificial Sequence: Synthetic oligonucleotide
  Antisense strand to SEQ ID NO: 1413414
uacaaacgcauacucuuug

SEQ ID NO: 1413416 - RNA, 19 nt, Artificial Sequence
  Description of Artificial Sequence: Synthetic oligonucleotide
  Sense strand starting at position 53 of SEQ ID NO: 1243388
agaguaugcguuuguacug

SEQ ID NO: 1413417 - RNA, 19 nt, Artificial Sequence
  Description of Artificial Sequence: Synthetic oligonucleotide
  Antisense strand to SEQ ID NO: 1413416
caguacaaacgcauacucu

SEQ ID NO: 1413418 - RNA, 19 nt, Artificial Sequence
  Description of Artificial Sequence: Synthetic oligonucleotide
  Sense strand starting at position 74 of SEQ ID NO: 1243388
agaagaagcgucugguaag

SEQ ID NO: 1413419 - RNA, 19 nt, Artificial Sequence
  Description of Artificial Sequence: Synthetic oligonucleotide
  Antisense strand to SEQ ID NO: 1413418
cuuaccagacgcuucuucu

SEQ ID NO: 1413420 - RNA, 19 nt, Artificial Sequence
  Description of Artificial Sequence: Synthetic oligonucleotide
  Sense strand starting at position 121 of SEQ ID NO: 1243388
ccagaaaugggcuggguaa

SEQ ID NO: 1413421 - RNA, 19 nt, Artificial Sequence
  Description of Artificial Sequence: Synthetic oligonucleotide
  Antisense strand to SEQ ID NO: 1413420
uuacccagcccauuucugg

SEQ ID NO: 1413422 - RNA, 19 nt, Artificial Sequence
  Description of Artificial Sequence: Synthetic oligonucleotide
  Sense strand starting at position 461 of SEQ ID NO: 1243388
gagaauuucuguugaauga

SEQ ID NO: 1413423 - RNA, 19 nt, Artificial Sequence
  Description of Artificial Sequence: Synthetic oligonucleotide
  Antisense strand to SEQ ID NO: 1413422
ucauucaacagaaauucuc

SEQ ID NO: 1413424 - RNA, 19 nt, Artificial Sequence
  Description of Artificial Sequence: Synthetic oligonucleotide
  Sense strand starting at position 537 of SEQ ID NO: 1243388
ugaagaaugcaguguguuc

SEQ ID NO: 1413425 - RNA, 19 nt, Artificial Sequence
  Description of Artificial Sequence: Synthetic oligonucleotide
  Antisense strand to SEQ ID NO: 1413424
gaacacacugcauucuuca

SEQ ID NO: 1413426 - RNA, 19 nt, Artificial Sequence
  Description of Artificial Sequence: Synthetic oligonucleotide
  Sense strand starting at position 598 of SEQ ID NO: 1243388
auuaaagagucuuacugaa

SEQ ID NO: 1413427 - RNA, 19 nt, Artificial Sequence
  Description of Artificial Sequence: Synthetic oligonucleotide
  Antisense strand to SEQ ID NO: 1413426
uucaguaagacucuuuaau

SEQ ID NO: 1413428 - RNA, 19 nt, Artificial Sequence
  Description of Artificial Sequence: Synthetic oligonucleotide
  Sense strand starting at position 600 of SEQ ID NO: 1243388
uaaagagucuuacugaaug

SEQ ID NO: 1413429 - RNA, 19 nt, Artificial Sequence
  Description of Artificial Sequence: Synthetic oligonucleotide
  Antisense strand to SEQ ID NO: 1413428
cauucaguaagacucuuua

SEQ ID NO: 1413430 - RNA, 19 nt, Artificial Sequence
  Description of Artificial Sequence: Synthetic oligonucleotide
  Sense strand starting at position 683 of SEQ ID NO: 1243388
ccgacugauuccguguuca

SEQ ID NO: 1413431 - RNA, 19 nt, Artificial Sequence
  Description of Artificial Sequence: Synthetic oligonucleotide
  Antisense strand to SEQ ID NO: 1413430
ugaacacggaaucagucgg

SEQ ID NO: 1413432 - RNA, 19 nt, Artificial Sequence
  Description of Artificial Sequence: Synthetic oligonucleotide
  Sense strand starting at position 687 of SEQ ID NO: 1243388
cugauuccguguucaggua

SEQ ID NO: 1413433 - RNA, 19 nt, Artificial Sequence
  Description of Artificial Sequence: Synthetic oligonucleotide
  Antisense strand to SEQ ID NO: 1413432
uaccugaacacggaaucag

SEQ ID NO: 1413434 - RNA, 19 nt, Artificial Sequence
  Description of Artificial Sequence: Synthetic oligonucleotide
  Sense strand starting at position 1078 of SEQ ID NO: 1243388
aucugagcagcucaauaaa

SEQ ID NO: 1413435 - RNA, 19 nt, Artificial Sequence
  Description of Artificial Sequence: Synthetic oligonucleotide
  Antisense strand to SEQ ID NO: 1413434
uuuauugagcugcucagau

SEQ ID NO: 1413436 - RNA, 19 nt, Artificial Sequence
  Description of Artificial Sequence: Synthetic oligonucleotide
  Sense strand starting at position 1241 of SEQ ID NO: 1243388
ucugucguccgguuugaca

SEQ ID NO: 1413437 - RNA, 19 nt, Artificial Sequence
  Description of Artificial Sequence: Synthetic oligonucleotide
  Antisense strand to SEQ ID NO: 1413436
ugucaaaccggacgacaga

SEQ ID NO: 1413438 - RNA, 19 nt, Artificial Sequence
  Description of Artificial Sequence: Synthetic oligonucleotide
  Sense strand starting at position 1243 of SEQ ID NO: 1243388
ugucguccgguuugacaaa

SEQ ID NO: 1413439 - RNA, 19 nt, Artificial Sequence
  Description of Artificial Sequence: Synthetic oligonucleotide
  Antisense strand to SEQ ID NO: 1413438
uuugucaaaccggacgaca

SEQ ID NO: 1413440 - RNA, 19 nt, Artificial Sequence
  Description of Artificial Sequence: Synthetic oligonucleotide
  Sense strand starting at position 2067 of SEQ ID NO: 1243388
gcgggagucgggugacaaa

SEQ ID NO: 1413441 - RNA, 19 nt, Artificial Sequence
  Description of Artificial Sequence: Synthetic oligonucleotide
  Antisense strand to SEQ ID NO: 1413440
uuugucacccgacucccgc

SEQ ID NO: 1413442 - RNA, 19 nt, Artificial Sequence
  Description of Artificial Sequence: Synthetic oligonucleotide
  Sense strand starting at position 2083 of SEQ ID NO: 1243388
aaagcuauugccgagaggu

SEQ ID NO: 1413443 - RNA, 19 nt, Artificial Sequence
  Description of Artificial Sequence: Synthetic oligonucleotide
  Antisense strand to SEQ ID NO: 1413442
accucucggcaauagcuuu

SEQ ID NO: 1413444 - RNA, 19 nt, Artificial Sequence
  Description of Artificial Sequence: Synthetic oligonucleotide
  Sense strand starting at position 2085 of SEQ ID NO: 1243388
agcuauugccgagagguuu

SEQ ID NO: 1413445 - RNA, 19 nt, Artificial Sequence
  Description of Artificial Sequence: Synthetic oligonucleotide
  Antisense strand to SEQ ID NO: 1413444
aaaccucucggcaauagcu

SEQ ID NO: 1413446 - RNA, 19 nt, Artificial Sequence
  Description of Artificial Sequence: Synthetic oligonucleotide
  Sense strand starting at position 2104 of SEQ ID NO: 1243388
caggaacugucaguccuaa

SEQ ID NO: 1413447 - RNA, 19 nt, Artificial Sequence
  Description of Artificial Sequence: Synthetic oligonucleotide
  Antisense strand to SEQ ID NO: 1413446
uuaggacugacaguuccug

SEQ ID NO: 1413448 - RNA, 19 nt, Artificial Sequence
  Description of Artificial Sequence: Synthetic oligonucleotide
  Sense strand starting at position 2209 of SEQ ID NO: 1243388
ccgcguugaccggaaagua

SEQ ID NO: 1413449 - RNA, 19 nt, Artificial Sequence
  Description of Artificial Sequence: Synthetic oligonucleotide
  Antisense strand to SEQ ID NO: 1413448
uacuuuccggucaacgcgg

SEQ ID NO: 1413450 - RNA, 19 nt, Artificial Sequence
  Description of Artificial Sequence: Synthetic oligonucleotide
  Sense strand starting at position 2221 of SEQ ID NO: 1243388
gaaaguagguccgugucau

SEQ ID NO: 1413451 - RNA, 19 nt, Artificial Sequence
  Description of Artificial Sequence: Synthetic oligonucleotide
  Antisense strand to SEQ ID NO: 1413450
augacacggaccuacuuuc

SEQ ID NO: 1413452 - RNA, 19 nt, Artificial Sequence
  Description of Artificial Sequence: Synthetic oligonucleotide
  Sense strand starting at position 2222 of SEQ ID NO: 1243388
aaaguagguccgugucauc

SEQ ID NO: 1413453 - RNA, 19 nt, Artificial Sequence
  Description of Artificial Sequence: Synthetic oligonucleotide
  Antisense strand to SEQ ID NO: 1413452
gaugacacggaccuacuuu

SEQ ID NO: 1413454 - RNA, 19 nt, Artificial Sequence
  Description of Artificial Sequence: Synthetic oligonucleotide
  Sense strand starting at position 2305 of SEQ ID NO: 1243388
caggauuaggccugucaag

SEQ ID NO: 1413455 - RNA, 19 nt, Artificial Sequence
  Description of Artificial Sequence: Synthetic oligonucleotide
  Antisense strand to SEQ ID NO: 1413454
cuugacaggccuaauccug

SEQ ID NO: 1413456 - RNA, 19 nt, Artificial Sequence
  Description of Artificial Sequence: Synthetic oligonucleotide
  Sense strand starting at position 2650 of SEQ ID NO: 1243388
uguggaagcuccgugaucu

SEQ ID NO: 1413457 - RNA, 19 nt, Artificial Sequence
  Description of Artificial Sequence: Synthetic oligonucleotide
  Antisense strand to SEQ ID NO: 1413456
agaucacggagcuuccaca

SEQ ID NO: 1413458 - RNA, 19 nt, Artificial Sequence
  Description of Artificial Sequence: Synthetic oligonucleotide
  Sense strand starting at position 2651 of SEQ ID NO: 1243388
guggaagcuccgugaucuc

SEQ ID NO: 1413459 - RNA, 19 nt, Artificial Sequence
  Description of Artificial Sequence: Synthetic oligonucleotide
  Antisense strand to SEQ ID NO: 1413458
gagaucacggagcuuccac

SEQ ID NO: 1413460 - RNA, 19 nt, Artificial Sequence
  Description of Artificial Sequence: Synthetic oligonucleotide
  Sense strand starting at position 2705 of SEQ ID NO: 1243388
aaguuaacuuuguugagca

SEQ ID NO: 1413461 - RNA, 19 nt, Artificial Sequence
  Description of Artificial Sequence: Synthetic oligonucleotide
  Antisense strand to SEQ ID NO: 1413460
ugcucaacaaaguuaacuu

SEQ ID NO: 1413462 - RNA, 19 nt, Artificial Sequence
  Description of Artificial Sequence: Synthetic oligonucleotide
  Sense strand starting at position 2904 of SEQ ID NO: 1243388
gcgcucucaguguucagaa

SEQ ID NO: 1413463 - RNA, 19 nt, Artificial Sequence
  Description of Artificial Sequence: Synthetic oligonucleotide
  Antisense strand to SEQ ID NO: 1413462
uucugaacacugagagcgc

SEQ ID NO: 1413464 - RNA, 19 nt, Artificial Sequence
  Description of Artificial Sequence: Synthetic oligonucleotide
  Sense strand starting at position 2927 of SEQ ID NO: 1243388
guaaguugcgcgggacaga

SEQ ID NO: 1413465 - RNA, 19 nt, Artificial Sequence
  Description of Artificial Sequence: Synthetic oligonucleotide
  Antisense strand to SEQ ID NO: 1413464
ucugucccgcgcaacuuac

SEQ ID NO: 1413466 - RNA, 19 nt, Artificial Sequence
  Description of Artificial Sequence: Synthetic oligonucleotide
  Sense strand starting at position 2960 of SEQ ID NO: 1243388
ggacgauccguucgccaga

SEQ ID NO: 1413467 - RNA, 19 nt, Artificial Sequence
  Description of Artificial Sequence: Synthetic oligonucleotide
  Antisense strand to SEQ ID NO: 1413466
ucuggcgaacggaucgucc

SEQ ID NO: 1413468 - RNA, 19 nt, Artificial Sequence
  Description of Artificial Sequence: Synthetic oligonucleotide
  Sense strand starting at position 2961 of SEQ ID NO: 1243388
gacgauccguucgccagau

SEQ ID NO: 1413469 - RNA, 19 nt, Artificial Sequence
  Description of Artificial Sequence: Synthetic oligonucleotide
  Antisense strand to SEQ ID NO: 1413468
aucuggcgaacggaucguc

SEQ ID NO: 1413470 - RNA, 19 nt, Artificial Sequence
  Description of Artificial Sequence: Synthetic oligonucleotide
  Sense strand starting at position 2963 of SEQ ID NO: 1243388
cgauccguucgccagauca

SEQ ID NO: 1413471 - RNA, 19 nt, Artificial Sequence
  Description of Artificial Sequence: Synthetic oligonucleotide
  Antisense strand to SEQ ID NO: 1413470
ugaucuggcgaacggaucg

SEQ ID NO: 1413472 - RNA, 19 nt, Artificial Sequence
  Description of Artificial Sequence: Synthetic oligonucleotide
  Sense strand starting at position 3009 of SEQ ID NO: 1243388
agccgcauuuaucuucuaa

SEQ ID NO: 1413473 - RNA, 19 nt, Artificial Sequence
  Description of Artificial Sequence: Synthetic oligonucleotide
  Antisense strand to SEQ ID NO: 1413472
uuagaagauaaaugcggcu

SEQ ID NO: 1413474 - RNA, 19 nt, Artificial Sequence
  Description of Artificial Sequence: Synthetic oligonucleotide
  Sense strand starting at position 3013 of SEQ ID NO: 1243388
gcauuuaucuucuaagaga

SEQ ID NO: 1413475 - RNA, 19 nt, Artificial Sequence
  Description of Artificial Sequence: Synthetic oligonucleotide
  Antisense strand to SEQ ID NO: 1413474
ucucuuagaagauaaaugc

SEQ ID NO: 1413476 - RNA, 19 nt, Artificial Sequence
  Description of Artificial Sequence: Synthetic oligonucleotide
  Sense strand starting at position 3032 of SEQ ID NO: 1243388
ccucgaguccgauaccaaa

SEQ ID NO: 1413477 - RNA, 19 nt, Artificial Sequence
  Description of Artificial Sequence: Synthetic oligonucleotide
  Antisense strand to SEQ ID NO: 1413476
uuugguaucggacucgagg

SEQ ID NO: 1413478 - RNA, 19 nt, Artificial Sequence
  Description of Artificial Sequence: Synthetic oligonucleotide
  Sense strand starting at position 3081 of SEQ ID NO: 1243388
gcagcacaacucugacaga

SEQ ID NO: 1413479 - RNA, 19 nt, Artificial Sequence
  Description of Artificial Sequence: Synthetic oligonucleotide
  Antisense strand to SEQ ID NO: 1413478
ucugucagaguugugcugc

SEQ ID NO: 1413480 - RNA, 19 nt, Artificial Sequence
  Description of Artificial Sequence: Synthetic oligonucleotide
  Sense strand starting at position 3084 of SEQ ID NO: 1243388
gcacaacucugacagauua

SEQ ID NO: 1413481 - RNA, 19 nt, Artificial Sequence
  Description of Artificial Sequence: Synthetic oligonucleotide
  Antisense strand to SEQ ID NO: 1413480
uaaucugucagaguugugc

SEQ ID NO: 1413482 - RNA, 19 nt, Artificial Sequence
  Description of Artificial Sequence: Synthetic oligonucleotide
  Sense strand starting at position 3479 of SEQ ID NO: 1243388
acuacaaaguaaggauauu

SEQ ID NO: 1413483 - RNA, 19 nt, Artificial Sequence
  Description of Artificial Sequence: Synthetic oligonucleotide
  Antisense strand to SEQ ID NO: 1413482
aauauccuuacuuuguagu

SEQ ID NO: 1413484 - RNA, 19 nt, Artificial Sequence
  Description of Artificial Sequence: Synthetic oligonucleotide
  Sense strand starting at position 3491 of SEQ ID NO: 1243388
ggauauuacugagauugau

SEQ ID NO: 1413485 - RNA, 19 nt, Artificial Sequence
  Description of Artificial Sequence: Synthetic oligonucleotide
  Antisense strand to SEQ ID NO: 1413484
aucaaucucaguaauaucc

SEQ ID NO: 1413486 - RNA, 19 nt, Artificial Sequence
  Description of Artificial Sequence: Synthetic oligonucleotide
  Sense strand starting at position 3699 of SEQ ID NO: 1243388
gucugaauacguuauugag

SEQ ID NO: 1413487 - RNA, 19 nt, Artificial Sequence
  Description of Artificial Sequence: Synthetic oligonucleotide
  Antisense strand to SEQ ID NO: 1413486
cucaauaacguauucagac

SEQ ID NO: 1413488 - RNA, 19 nt, Artificial Sequence
  Description of Artificial Sequence: Synthetic oligonucleotide
  Sense strand starting at position 3701 of SEQ ID NO: 1243388
cugaauacguuauugagag

SEQ ID NO: 1413489 - RNA, 19 nt, Artificial Sequence
  Description of Artificial Sequence: Synthetic oligonucleotide
  Antisense strand to SEQ ID NO: 1413488
cucucaauaacguauucag

SEQ ID NO: 1413490 - RNA, 19 nt, Artificial Sequence
  Description of Artificial Sequence: Synthetic oligonucleotide
  Sense strand starting at position 3741 of SEQ ID NO: 1243388
ccgaaaugauccuuccacu

SEQ ID NO: 1413491 - RNA, 19 nt, Artificial Sequence
  Description of Artificial Sequence: Synthetic oligonucleotide
  Antisense strand to SEQ ID NO: 1413490
aguggaaggaucauuucgg

SEQ ID NO: 1413492 - RNA, 19 nt, Artificial Sequence
  Description of Artificial Sequence: Synthetic oligonucleotide
  Sense strand starting at position 74 of SEQ ID NO: 1243389
uggagauaauauuacacua

SEQ ID NO: 1413493 - RNA, 19 nt, Artificial Sequence
  Description of Artificial Sequence: Synthetic oligonucleotide
  Antisense strand to SEQ ID NO: 1413492
uaguguaauauuaucucca

SEQ ID NO: 1413494 - RNA, 19 nt, Artificial Sequence
  Description of Artificial Sequence: Synthetic oligonucleotide
  Sense strand starting at position 94 of SEQ ID NO: 1243389
uguuaaauggaaugugagu

SEQ ID NO: 1413495 - RNA, 19 nt, Artificial Sequence
  Description of Artificial Sequence: Synthetic oligonucleotide
  Antisense strand to SEQ ID NO: 1413494
acucacauuccauuuaaca

SEQ ID NO: 1413496 - RNA, 19 nt, Artificial Sequence
  Description of Artificial Sequence: Synthetic oligonucleotide
  Sense strand starting at position 96 of SEQ ID NO: 1243389
uuaaauggaaugugaguau

SEQ ID NO: 1413497 - RNA, 19 nt, Artificial Sequence
  Description of Artificial Sequence: Synthetic oligonucleotide
  Antisense strand to SEQ ID NO: 1413496
auacucacauuccauuuaa

SEQ ID NO: 1413498 - RNA, 19 nt, Artificial Sequence
  Description of Artificial Sequence: Synthetic oligonucleotide
  Sense strand starting at position 99 of SEQ ID NO: 1243389
aauggaaugugaguaucca

SEQ ID NO: 1413499 - RNA, 19 nt, Artificial Sequence
  Description of Artificial Sequence: Synthetic oligonucleotide
  Antisense strand to SEQ ID NO: 1413498
uggauacucacauuccauu

SEQ ID NO: 1413500 - RNA, 19 nt, Artificial Sequence
  Description of Artificial Sequence: Synthetic oligonucleotide
  Sense strand starting at position 107 of SEQ ID NO: 1243389
gugaguauccaacagaccu

SEQ ID NO: 1413501 - RNA, 19 nt, Artificial Sequence
  Description of Artificial Sequence: Synthetic oligonucleotide
  Antisense strand to SEQ ID NO: 1413500
aggucuguuggauacucac

SEQ ID NO: 1413502 - RNA, 19 nt, Artificial Sequence
  Description of Artificial Sequence: Synthetic oligonucleotide
  Sense strand starting at position 677 of SEQ ID NO: 1243389
uuuaguaccuguuugaugu

SEQ ID NO: 1413503 - RNA, 19 nt, Artificial Sequence
  Description of Artificial Sequence: Synthetic oligonucleotide
  Antisense strand to SEQ ID NO: 1413502
acaucaaacagguacuaaa

SEQ ID NO: 1413504 - RNA, 19 nt, Artificial Sequence
  Description of Artificial Sequence: Synthetic oligonucleotide
  Sense strand starting at position 683 of SEQ ID NO: 1243389
accuguuugauguguucua

SEQ ID NO: 1413505 - RNA, 19 nt, Artificial Sequence
  Description of Artificial Sequence: Synthetic oligonucleotide
  Antisense strand to SEQ ID NO: 1413504
uagaacacaucaaacaggu

SEQ ID NO: 1413506 - RNA, 19 nt, Artificial Sequence
  Description of Artificial Sequence: Synthetic oligonucleotide
  Sense strand starting at position 684 of SEQ ID NO: 1243389
ccuguuugauguguucuau

SEQ ID NO: 1413507 - RNA, 19 nt, Artificial Sequence
  Description of Artificial Sequence: Synthetic oligonucleotide
  Antisense strand to SEQ ID NO: 1413506
auagaacacaucaaacagg

SEQ ID NO: 1413508 - RNA, 19 nt, Artificial Sequence
  Description of Artificial Sequence: Synthetic oligonucleotide
  Sense strand starting at position 690 of SEQ ID NO: 1243389
ugauguguucuauaauccu

SEQ ID NO: 1413509 - RNA, 19 nt, Artificial Sequence
  Description of Artificial Sequence: Synthetic oligonucleotide
  Antisense strand to SEQ ID NO: 1413508
aggauuauagaacacauca

SEQ ID NO: 1413510 - RNA, 19 nt, Artificial Sequence
  Description of Artificial Sequence: Synthetic oligonucleotide
  Sense strand starting at position 775 of SEQ ID NO: 1243389
cggauauagccaugcagaa

SEQ ID NO: 1413511 - RNA, 19 nt, Artificial Sequence
  Description of Artificial Sequence: Synthetic oligonucleotide
  Antisense strand to SEQ ID NO: 1413510
uucugcauggcuauauccg

SEQ ID NO: 1413512 - RNA, 19 nt, Artificial Sequence
  Description of Artificial Sequence: Synthetic oligonucleotide
  Sense strand starting at position 795 of SEQ ID NO: 1243389
ggauucccgaccuaaaugu

SEQ ID NO: 1413513 - RNA, 19 nt, Artificial Sequence
  Description of Artificial Sequence: Synthetic oligonucleotide
  Antisense strand to SEQ ID NO: 1413512
acauuuaggucgggaaucc

SEQ ID NO: 1413514 - RNA, 19 nt, Artificial Sequence
  Description of Artificial Sequence: Synthetic oligonucleotide
  Sense strand starting at position 994 of SEQ ID NO: 1243389
gccucaguucuguuguugu

SEQ ID NO: 1413515 - RNA, 19 nt, Artificial Sequence
  Description of Artificial Sequence: Synthetic oligonucleotide
  Antisense strand to SEQ ID NO: 1413514
acaacaacagaacugaggc

SEQ ID NO: 1413516 - RNA, 19 nt, Artificial Sequence
  Description of Artificial Sequence: Synthetic oligonucleotide
  Sense strand starting at position 1005 of SEQ ID NO: 1243389
guuguuguacuauaaucaa

SEQ ID NO: 1413517 - RNA, 19 nt, Artificial Sequence
  Description of Artificial Sequence: Synthetic oligonucleotide
  Antisense strand to SEQ ID NO: 1413516
uugauuauaguacaacaac

SEQ ID NO: 1413518 - RNA, 19 nt, Artificial Sequence
  Description of Artificial Sequence: Synthetic oligonucleotide
  Sense strand starting at position 1054 of SEQ ID NO: 1243389
ucccaugcuucucuagagu

SEQ ID NO: 1413519 - RNA, 19 nt, Artificial Sequence
  Description of Artificial Sequence: Synthetic oligonucleotide
  Antisense strand to SEQ ID NO: 1413518
acucuagagaagcauggga

SEQ ID NO: 1413520 - RNA, 19 nt, Artificial Sequence
  Description of Artificial Sequence: Synthetic oligonucleotide
  Sense strand starting at position 1057 of SEQ ID NO: 1243389
caugcuucucuagagugaa

SEQ ID NO: 1413521 - RNA, 19 nt, Artificial Sequence
  Description of Artificial Sequence: Synthetic oligonucleotide
  Antisense strand to SEQ ID NO: 1413520
uucacucuagagaagcaug

SEQ ID NO: 1413522 - RNA, 19 nt, Artificial Sequence
  Description of Artificial Sequence: Synthetic oligonucleotide
  Sense strand starting at position 1252 of SEQ ID NO: 1243389
gcguauuauuuacuccagu

SEQ ID NO: 1413523 - RNA, 19 nt, Artificial Sequence
  Description of Artificial Sequence: Synthetic oligonucleotide
  Antisense strand to SEQ ID NO: 1413522
acuggaguaaauaauacgc

SEQ ID NO: 1413524 - RNA, 19 nt, Artificial Sequence
  Description of Artificial Sequence: Synthetic oligonucleotide
  Sense strand starting at position 1253 of SEQ ID NO: 1243389
cguauuauuuacuccaguu

SEQ ID NO: 1413525 - RNA, 19 nt, Artificial Sequence
  Description of Artificial Sequence: Synthetic oligonucleotide
  Antisense strand to SEQ ID NO: 1413524
aacuggaguaaauaauacg

SEQ ID NO: 1413526 - RNA, 19 nt, Artificial Sequence
  Description of Artificial Sequence: Synthetic oligonucleotide
  Sense strand starting at position 1373 of SEQ ID NO: 1243389
uugugaauuccggagggac

SEQ ID NO: 1413527 - RNA, 19 nt, Artificial Sequence
  Description of Artificial Sequence: Synthetic oligonucleotide
  Antisense strand to SEQ ID NO: 1413526
gucccuccggaauucacaa

SEQ ID NO: 1413528 - RNA, 19 nt, Artificial Sequence
  Description of Artificial Sequence: Synthetic oligonucleotide
  Sense strand starting at position 1375 of SEQ ID NO: 1243389
gugaauuccggagggacau

SEQ ID NO: 1413529 - RNA, 19 nt, Artificial Sequence
  Description of Artificial Sequence: Synthetic oligonucleotide
  Antisense strand to SEQ ID NO: 1413528
augucccuccggaauucac

SEQ ID NO: 1413530 - RNA, 19 nt, Artificial Sequence
  Description of Artificial Sequence: Synthetic oligonucleotide
  Sense strand starting at position 1519 of SEQ ID NO: 1243389
uccagaaccucagaaaggu

SEQ ID NO: 1413531 - RNA, 19 nt, Artificial Sequence
  Description of Artificial Sequence: Synthetic oligonucleotide
  Antisense strand to SEQ ID NO: 1413530
accuuucugagguucugga

SEQ ID NO: 1413532 - RNA, 19 nt, Artificial Sequence
  Description of Artificial Sequence: Synthetic oligonucleotide
  Sense strand starting at position 1669 of SEQ ID NO: 1243389
auaccugcgccuugagaca

SEQ ID NO: 1413533 - RNA, 19 nt, Artificial Sequence
  Description of Artificial Sequence: Synthetic oligonucleotide
  Antisense strand to SEQ ID NO: 1413532
ugucucaaggcgcagguau

SEQ ID NO: 1413534 - RNA, 19 nt, Artificial Sequence
  Description of Artificial Sequence: Synthetic oligonucleotide
  Sense strand starting at position 2001 of SEQ ID NO: 1243389
ugccacuagcccugagaua

SEQ ID NO: 1413535 - RNA, 19 nt, Artificial Sequence
  Description of Artificial Sequence: Synthetic oligonucleotide
  Antisense strand to SEQ ID NO: 1413534
uaucucagggcuaguggca

SEQ ID NO: 1413536 - RNA, 19 nt, Artificial Sequence
  Description of Artificial Sequence: Synthetic oligonucleotide
  Sense strand starting at position 2174 of SEQ ID NO: 1243389
cugggaagcucgucaucca

SEQ ID NO: 1413537 - RNA, 19 nt, Artificial Sequence
  Description of Artificial Sequence: Synthetic oligonucleotide
  Antisense strand to SEQ ID NO: 1413536
uggaugacgagcuucccag

SEQ ID NO: 1413538 - RNA, 19 nt, Artificial Sequence
  Description of Artificial Sequence: Synthetic oligonucleotide
  Sense strand starting at position 2175 of SEQ ID NO: 1243389
ugggaagcucgucauccaa

SEQ ID NO: 1413539 - RNA, 19 nt, Artificial Sequence
  Description of Artificial Sequence: Synthetic oligonucleotide
  Antisense strand to SEQ ID NO: 1413538
uuggaugacgagcuuccca

SEQ ID NO: 1413540 - RNA, 19 nt, Artificial Sequence
  Description of Artificial Sequence: Synthetic oligonucleotide
  Sense strand starting at position 2751 of SEQ ID NO: 1243389
cgccuucgcggccuuuaaa

SEQ ID NO: 1413541 - RNA, 19 nt, Artificial Sequence
  Description of Artificial Sequence: Synthetic oligonucleotide
  Antisense strand to SEQ ID NO: 1413540
uuuaaaggccgcgaaggcg

SEQ ID NO: 1413542 - RNA, 19 nt, Artificial Sequence
  Description of Artificial Sequence: Synthetic oligonucleotide
  Sense strand starting at position 2987 of SEQ ID NO: 1243389
ccgucuucucgcgagagac

SEQ ID NO: 1413543 - RNA, 19 nt, Artificial Sequence
  Description of Artificial Sequence: Synthetic oligonucleotide
  Antisense strand to SEQ ID NO: 1413542
gucucucgcgagaagacgg

SEQ ID NO: 1413544 - RNA, 19 nt, Artificial Sequence
  Description of Artificial Sequence: Synthetic oligonucleotide
  Sense strand starting at position 2988 of SEQ ID NO: 1243389
cgucuucucgcgagagaca

SEQ ID NO: 1413545 - RNA, 19 nt, Artificial Sequence
  Description of Artificial Sequence: Synthetic oligonucleotide
  Antisense strand to SEQ ID NO: 1413544
ugucucucgcgagaagacg

SEQ ID NO: 1413546 - RNA, 19 nt, Artificial Sequence
  Description of Artificial Sequence: Synthetic oligonucleotide
  Sense strand starting at position 3302 of SEQ ID NO: 1243389
cgaggaugguuuccugaua

SEQ ID NO: 1413547 - RNA, 19 nt, Artificial Sequence
  Description of Artificial Sequence: Synthetic oligonucleotide
  Antisense strand to SEQ ID NO: 1413546
uaucaggaaaccauccucg

SEQ ID NO: 1413548 - RNA, 19 nt, Artificial Sequence
  Description of Artificial Sequence: Synthetic oligonucleotide
  Sense strand starting at position 3303 of SEQ ID NO: 1243389
gaggaugguuuccugauag

SEQ ID NO: 1413549 - RNA, 19 nt, Artificial Sequence
  Description of Artificial Sequence: Synthetic oligonucleotide
  Antisense strand to SEQ ID NO: 1413548
cuaucaggaaaccauccuc

SEQ ID NO: 1413550 - RNA, 19 nt, Artificial Sequence
  Description of Artificial Sequence: Synthetic oligonucleotide
  Sense strand starting at position 3345 of SEQ ID NO: 1243389
uucgcaaacuuucuagauu

SEQ ID NO: 1413551 - RNA, 19 nt, Artificial Sequence
  Description of Artificial Sequence: Synthetic oligonucleotide
  Antisense strand to SEQ ID NO: 1413550
aaucuagaaaguuugcgaa

SEQ ID NO: 1413552 - RNA, 19 nt, Artificial Sequence
  Description of Artificial Sequence: Synthetic oligonucleotide
  Sense strand starting at position 3372 of SEQ ID NO: 1243389
cuuugagaaucugauaccu

SEQ ID NO: 1413553 - RNA, 19 nt, Artificial Sequence
  Description of Artificial Sequence: Synthetic oligonucleotide
  Antisense strand to SEQ ID NO: 1413552
agguaucagauucucaaag

SEQ ID NO: 1413554 - RNA, 19 nt, Artificial Sequence
  Description of Artificial Sequence: Synthetic oligonucleotide
  Sense strand starting at position 3374 of SEQ ID NO: 1243389
uugagaaucugauaccuuu

SEQ ID NO: 1413555 - RNA, 19 nt, Artificial Sequence
  Description of Artificial Sequence: Synthetic oligonucleotide
  Antisense strand to SEQ ID NO: 1413554
aaagguaucagauucucaa

SEQ ID NO: 1413556 - RNA, 19 nt, Artificial Sequence
  Description of Artificial Sequence: Synthetic oligonucleotide
  Sense strand starting at position 3677 of SEQ ID NO: 1243389
agaggauuguuggucccau

SEQ ID NO: 1413557 - RNA, 19 nt, Artificial Sequence
  Description of Artificial Sequence: Synthetic oligonucleotide
  Antisense strand to SEQ ID NO: 1413556
augggaccaacaauccucu

SEQ ID NO: 1413558 - RNA, 19 nt, Artificial Sequence
  Description of Artificial Sequence: Synthetic oligonucleotide
  Sense strand starting at position 3678 of SEQ ID NO: 1243389
gaggauuguuggucccauu

SEQ ID NO: 1413559 - RNA, 19 nt, Artificial Sequence
  Description of Artificial Sequence: Synthetic oligonucleotide
  Antisense strand to SEQ ID NO: 1413558
aaugggaccaacaauccuc

SEQ ID NO: 1413560 - RNA, 19 nt, Artificial Sequence
  Description of Artificial Sequence: Synthetic oligonucleotide
  Sense strand starting at position 3702 of SEQ ID NO: 1243389
gaugaaguuuggguugaaa

SEQ ID NO: 1413561 - RNA, 19 nt, Artificial Sequence
  Description of Artificial Sequence: Synthetic oligonucleotide
  Antisense strand to SEQ ID NO: 1413560
uuucaacccaaacuucauc

SEQ ID NO: 1413562 - RNA, 19 nt, Artificial Sequence
  Description of Artificial Sequence: Synthetic oligonucleotide
  Sense strand starting at position 3704 of SEQ ID NO: 1243389
ugaaguuuggguugaaaga

SEQ ID NO: 1413563 - RNA, 19 nt, Artificial Sequence
  Description of Artificial Sequence: Synthetic oligonucleotide
  Antisense strand to SEQ ID NO: 1413562
ucuuucaacccaaacuuca

SEQ ID NO: 1413564 - RNA, 19 nt, Artificial Sequence
  Description of Artificial Sequence: Synthetic oligonucleotide
  Sense strand starting at position 3726 of SEQ ID NO: 1243389
guggaugaugcccaucuuu

SEQ ID NO: 1413565 - RNA, 19 nt, Artificial Sequence
  Description of Artificial Sequence: Synthetic oligonucleotide
  Antisense strand to SEQ ID NO: 1413564
aaagaugggcaucauccac

SEQ ID NO: 1413566 - RNA, 19 nt, Artificial Sequence
  Description of Artificial Sequence: Synthetic oligonucleotide
  Sense strand starting at position 3833 of SEQ ID NO: 1243389
augugaccuugagcaauua

SEQ ID NO: 1413567 - RNA, 19 nt, Artificial Sequence
  Description of Artificial Sequence: Synthetic oligonucleotide
  Antisense strand to SEQ ID NO: 1413566
uaauugcucaaggucacau

SEQ ID NO: 1413568 - RNA, 19 nt, Artificial Sequence
  Description of Artificial Sequence: Synthetic oligonucleotide
  Sense strand starting at position 3871 of SEQ ID NO: 1243389
caguuuccucuguaaagug

SEQ ID NO: 1413569 - RNA, 19 nt, Artificial Sequence
  Description of Artificial Sequence: Synthetic oligonucleotide
  Antisense strand to SEQ ID NO: 1413568
cacuuuacagaggaaacug

SEQ ID NO: 1413570 - RNA, 19 nt, Artificial Sequence
  Description of Artificial Sequence: Synthetic oligonucleotide
  Sense strand starting at position 3888 of SEQ ID NO: 1243389
ugaggauagaauugcugau

SEQ ID NO: 1413571 - RNA, 19 nt, Artificial Sequence
  Description of Artificial Sequence: Synthetic oligonucleotide
  Antisense strand to SEQ ID NO: 1413570
aucagcaauucuauccuca

SEQ ID NO: 1413572 - RNA, 19 nt, Artificial Sequence
  Description of Artificial Sequence: Synthetic oligonucleotide
  Sense strand starting at position 64 of SEQ ID NO: 1243390
gggaguggugagcgagaau

SEQ ID NO: 1413573 - RNA, 19 nt, Artificial Sequence
  Description of Artificial Sequence: Synthetic oligonucleotide
  Antisense strand to SEQ ID NO: 1413572
auucucgcucaccacuccc

SEQ ID NO: 1413574 - RNA, 19 nt, Artificial Sequence
  Description of Artificial Sequence: Synthetic oligonucleotide
  Sense strand starting at position 67 of SEQ ID NO: 1243390
aguggugagcgagaauauc

SEQ ID NO: 1413575 - RNA, 19 nt, Artificial Sequence
  Description of Artificial Sequence: Synthetic oligonucleotide
  Antisense strand to SEQ ID NO: 1413574
gauauucucgcucaccacu

SEQ ID NO: 1413576 - RNA, 19 nt, Artificial Sequence
  Description of Artificial Sequence: Synthetic oligonucleotide
  Sense strand starting at position 75 of SEQ ID NO: 1243390
gcgagaauaucugccgcca

SEQ ID NO: 1413577 - RNA, 19 nt, Artificial Sequence
  Description of Artificial Sequence: Synthetic oligonucleotide
  Antisense strand to SEQ ID NO: 1413576
uggcggcagauauucucgc

SEQ ID NO: 1413578 - RNA, 19 nt, Artificial Sequence
  Description of Artificial Sequence: Synthetic oligonucleotide
  Sense strand starting at position 110 of SEQ ID NO: 1243390
gcaugauagggagggaagu

SEQ ID NO: 1413579 - RNA, 19 nt, Artificial Sequence
  Description of Artificial Sequence: Synthetic oligonucleotide
  Antisense strand to SEQ ID NO: 1413578
acuucccucccuaucaugc

SEQ ID NO: 1413580 - RNA, 19 nt, Artificial Sequence
  Description of Artificial Sequence: Synthetic oligonucleotide
  Sense strand starting at position 269 of SEQ ID NO: 1243390
gccaccuuguggguuagaa

SEQ ID NO: 1413581 - RNA, 19 nt, Artificial Sequence
  Description of Artificial Sequence: Synthetic oligonucleotide
  Antisense strand to SEQ ID NO: 1413580
uucuaacccacaagguggc

SEQ ID NO: 1413582 - RNA, 19 nt, Artificial Sequence
  Description of Artificial Sequence: Synthetic oligonucleotide
  Sense strand starting at position 553 of SEQ ID NO: 1243390
ugcagaacauuccagauga

SEQ ID NO: 1413583 - RNA, 19 nt, Artificial Sequence
  Description of Artificial Sequence: Synthetic oligonucleotide
  Antisense strand to SEQ ID NO: 1413582
ucaucuggaauguucugca

SEQ ID NO: 1413584 - RNA, 19 nt, Artificial Sequence
  Description of Artificial Sequence: Synthetic oligonucleotide
  Sense strand starting at position 767 of SEQ ID NO: 1243390
cuggaauacucagcacuca

SEQ ID NO: 1413585 - RNA, 19 nt, Artificial Sequence
  Description of Artificial Sequence: Synthetic oligonucleotide
  Antisense strand to SEQ ID NO: 1413584
ugagugcugaguauuccag

SEQ ID NO: 1413586 - RNA, 19 nt, Artificial Sequence
  Description of Artificial Sequence: Synthetic oligonucleotide
  Sense strand starting at position 1389 of SEQ ID NO: 1243390
cgccaacucuauuuccgau

SEQ ID NO: 1413587 - RNA, 19 nt, Artificial Sequence
  Description of Artificial Sequence: Synthetic oligonucleotide
  Antisense strand to SEQ ID NO: 1413586
aucggaaauagaguuggcg

SEQ ID NO: 1413588 - RNA, 19 nt, Artificial Sequence
  Description of Artificial Sequence: Synthetic oligonucleotide
  Sense strand starting at position 1496 of SEQ ID NO: 1243390
ccaguucucuuacccgagu

SEQ ID NO: 1413589 - RNA, 19 nt, Artificial Sequence
  Description of Artificial Sequence: Synthetic oligonucleotide
  Antisense strand to SEQ ID NO: 1413588
acucggguaagagaacugg

SEQ ID NO: 1413590 - RNA, 19 nt, Artificial Sequence
  Description of Artificial Sequence: Synthetic oligonucleotide
  Sense strand starting at position 1724 of SEQ ID NO: 1243390
ccgcaacugugcugcuauu

SEQ ID NO: 1413591 - RNA, 19 nt, Artificial Sequence
  Description of Artificial Sequence: Synthetic oligonucleotide
  Antisense strand to SEQ ID NO: 1413590
aauagcagcacaguugcgg

SEQ ID NO: 1413592 - RNA, 19 nt, Artificial Sequence
  Description of Artificial Sequence: Synthetic oligonucleotide
  Sense strand starting at position 1923 of SEQ ID NO: 1243390
cuaccugcuuguccugaga

SEQ ID NO: 1413593 - RNA, 19 nt, Artificial Sequence
  Description of Artificial Sequence: Synthetic oligonucleotide
  Antisense strand to SEQ ID NO: 1413592
ucucaggacaagcagguag

SEQ ID NO: 1413594 - RNA, 19 nt, Artificial Sequence
  Description of Artificial Sequence: Synthetic oligonucleotide
  Sense strand starting at position 1925 of SEQ ID NO: 1243390
accugcuuguccugagaac

SEQ ID NO: 1413595 - RNA, 19 nt, Artificial Sequence
  Description of Artificial Sequence: Synthetic oligonucleotide
  Antisense strand to SEQ ID NO: 1413594
guucucaggacaagcaggu

SEQ ID NO: 1413596 - RNA, 19 nt, Artificial Sequence
  Description of Artificial Sequence: Synthetic oligonucleotide
  Sense strand starting at position 1926 of SEQ ID NO: 1243390
ccugcuuguccugagaaca

SEQ ID NO: 1413597 - RNA, 19 nt, Artificial Sequence
  Description of Artificial Sequence: Synthetic oligonucleotide
  Antisense strand to SEQ ID NO: 1413596
uguucucaggacaagcagg

SEQ ID NO: 1413598 - RNA, 19 nt, Artificial Sequence
  Description of Artificial Sequence: Synthetic oligonucleotide
  Sense strand starting at position 1985 of SEQ ID NO: 1243390
cauggugacugccaagaga

SEQ ID NO: 1413599 - RNA, 19 nt, Artificial Sequence
  Description of Artificial Sequence: Synthetic oligonucleotide
  Antisense strand to SEQ ID NO: 1413598
ucucuuggcagucaccaug

SEQ ID NO: 1413600 - RNA, 19 nt, Artificial Sequence
  Description of Artificial Sequence: Synthetic oligonucleotide
  Sense strand starting at position 2012 of SEQ ID NO: 1243390
gcuccucgccucuauuuau

SEQ ID NO: 1413601 - RNA, 19 nt, Artificial Sequence
  Description of Artificial Sequence: Synthetic oligonucleotide
  Antisense strand to SEQ ID NO: 1413600
auaaauagaggcgaggagc

SEQ ID NO: 1413602 - RNA, 19 nt, Artificial Sequence
  Description of Artificial Sequence: Synthetic oligonucleotide
  Sense strand starting at position 2312 of SEQ ID NO: 1243390
gaagcugagucuucccaga

SEQ ID NO: 1413603 - RNA, 19 nt, Artificial Sequence
  Description of Artificial Sequence: Synthetic oligonucleotide
  Antisense strand to SEQ ID NO: 1413602
ucugggaagacucagcuuc

SEQ ID NO: 1413604 - RNA, 19 nt, Artificial Sequence
  Description of Artificial Sequence: Synthetic oligonucleotide
  Sense strand starting at position 2314 of SEQ ID NO: 1243390
agcugagucuucccagaac

SEQ ID NO: 1413605 - RNA, 19 nt, Artificial Sequence
  Description of Artificial Sequence: Synthetic oligonucleotide
  Antisense strand to SEQ ID NO: 1413604
guucugggaagacucagcu

SEQ ID NO: 1413606 - RNA, 19 nt, Artificial Sequence
  Description of Artificial Sequence: Synthetic oligonucleotide
  Sense strand starting at position 2335 of SEQ ID NO: 1243390
gcaauaacuugaccugaag

SEQ ID NO: 1413607 - RNA, 19 nt, Artificial Sequence
  Description of Artificial Sequence: Synthetic oligonucleotide
  Antisense strand to SEQ ID NO: 1413606
cuucaggucaaguuauugc

SEQ ID NO: 1413608 - RNA, 19 nt, Artificial Sequence
  Description of Artificial Sequence: Synthetic oligonucleotide
  Sense strand starting at position 2347 of SEQ ID NO: 1243390
ccugaagucucggcagguu

SEQ ID NO: 1413609 - RNA, 19 nt, Artificial Sequence
  Description of Artificial Sequence: Synthetic oligonucleotide
  Antisense strand to SEQ ID NO: 1413608
aaccugccgagacuucagg

SEQ ID NO: 1413610 - RNA, 19 nt, Artificial Sequence
  Description of Artificial Sequence: Synthetic oligonucleotide
  Sense strand starting at position 2435 of SEQ ID NO: 1243390
gccacugauccacaugcua

SEQ ID NO: 1413611 - RNA, 19 nt, Artificial Sequence
  Description of Artificial Sequence: Synthetic oligonucleotide
  Antisense strand to SEQ ID NO: 1413610
uagcauguggaucaguggc

SEQ ID NO: 1413612 - RNA, 19 nt, Artificial Sequence
  Description of Artificial Sequence: Synthetic oligonucleotide
  Sense strand starting at position 2450 of SEQ ID NO: 1243390
gcuagagaguggucagcua

SEQ ID NO: 1413613 - RNA, 19 nt, Artificial Sequence
  Description of Artificial Sequence: Synthetic oligonucleotide
  Antisense strand to SEQ ID NO: 1413612
uagcugaccacucucuagc

SEQ ID NO: 1413614 - RNA, 19 nt, Artificial Sequence
  Description of Artificial Sequence: Synthetic oligonucleotide
  Sense strand starting at position 2660 of SEQ ID NO: 1243390
ucagucaccucugcaaagu

SEQ ID NO: 1413615 - RNA, 19 nt, Artificial Sequence
  Description of Artificial Sequence: Synthetic oligonucleotide
  Antisense strand to SEQ ID NO: 1413614
acuuugcagaggugacuga

SEQ ID NO: 1413616 - RNA, 19 nt, Artificial Sequence
  Description of Artificial Sequence: Synthetic oligonucleotide
  Sense strand starting at position 2825 of SEQ ID NO: 1243390
gccaccaugcuguacuaau

SEQ ID NO: 1413617 - RNA, 19 nt, Artificial Sequence
  Description of Artificial Sequence: Synthetic oligonucleotide
  Antisense strand to SEQ ID NO: 1413616
auuaguacagcaugguggc

SEQ ID NO: 1413618 - RNA, 19 nt, Artificial Sequence
  Description of Artificial Sequence: Synthetic oligonucleotide
  Sense strand starting at position 2869 of SEQ ID NO: 1243390
cagagagccaguuguaaga

SEQ ID NO: 1413619 - RNA, 19 nt, Artificial Sequence
  Description of Artificial Sequence: Synthetic oligonucleotide
  Antisense strand to SEQ ID NO: 1413618
ucuuacaacuggcucucug

SEQ ID NO: 1413620 - RNA, 19 nt, Artificial Sequence
  Description of Artificial Sequence: Synthetic oligonucleotide
  Sense strand starting at position 3370 of SEQ ID NO: 1243390
ggaguagugacacgaucau

SEQ ID NO: 1413621 - RNA, 19 nt, Artificial Sequence
  Description of Artificial Sequence: Synthetic oligonucleotide
  Antisense strand to SEQ ID NO: 1413620
augaucgugucacuacucc

SEQ ID NO: 1413622 - RNA, 19 nt, Artificial Sequence
  Description of Artificial Sequence: Synthetic oligonucleotide
  Sense strand starting at position 3613 of SEQ ID NO: 1243390
aagacaaggucuugggacu

SEQ ID NO: 1413623 - RNA, 19 nt, Artificial Sequence
  Description of Artificial Sequence: Synthetic oligonucleotide
  Antisense strand to SEQ ID NO: 1413622
agucccaagaccuugucuu

SEQ ID NO: 1413624 - RNA, 19 nt, Artificial Sequence
  Description of Artificial Sequence: Synthetic oligonucleotide
  Sense strand starting at position 3614 of SEQ ID NO: 1243390
agacaaggucuugggacuu

SEQ ID NO: 1413625 - RNA, 19 nt, Artificial Sequence
  Description of Artificial Sequence: Synthetic oligonucleotide
  Antisense strand to SEQ ID NO: 1413624
aagucccaagaccuugucu

SEQ ID NO: 1413626 - RNA, 19 nt, Artificial Sequence
  Description of Artificial Sequence: Synthetic oligonucleotide
  Sense strand starting at position 3815 of SEQ ID NO: 1243390
ccgggaucccaagguacaa

SEQ ID NO: 1413627 - RNA, 19 nt, Artificial Sequence
  Description of Artificial Sequence: Synthetic oligonucleotide
  Antisense strand to SEQ ID NO: 1413626
uuguaccuugggaucccgg

SEQ ID NO: 1413628 - RNA, 19 nt, Artificial Sequence
  Description of Artificial Sequence: Synthetic oligonucleotide
  Sense strand starting at position 3896 of SEQ ID NO: 1243390
aagguauacuccugugaag

SEQ ID NO: 1413629 - RNA, 19 nt, Artificial Sequence
  Description of Artificial Sequence: Synthetic oligonucleotide
  Antisense strand to SEQ ID NO: 1413628
cuucacaggaguauaccuu

SEQ ID NO: 1413630 - RNA, 19 nt, Artificial Sequence
  Description of Artificial Sequence: Synthetic oligonucleotide
  Sense strand starting at position 3898 of SEQ ID NO: 1243390
gguauacuccugugaagaa

SEQ ID NO: 1413631 - RNA, 19 nt, Artificial Sequence
  Description of Artificial Sequence: Synthetic oligonucleotide
  Antisense strand to SEQ ID NO: 1413630
uucuucacaggaguauacc

SEQ ID NO: 1413632 - RNA, 19 nt, Artificial Sequence
  Description of Artificial Sequence: Synthetic oligonucleotide
  Sense strand starting at position 3899 of SEQ ID NO: 1243390
guauacuccugugaagaaa

SEQ ID NO: 1413633 - RNA, 19 nt, Artificial Sequence
  Description of Artificial Sequence: Synthetic oligonucleotide
  Antisense strand to SEQ ID NO: 1413632
uuucuucacaggaguauac

SEQ ID NO: 1413634 - RNA, 19 nt, Artificial Sequence
  Description of Artificial Sequence: Synthetic oligonucleotide
  Sense strand starting at position 3944 of SEQ ID NO: 1243390
ccugguuucucuggaaucu

SEQ ID NO: 1413635 - RNA, 19 nt, Artificial Sequence
  Description of Artificial Sequence: Synthetic oligonucleotide
  Antisense strand to SEQ ID NO: 1413634
agauuccagagaaaccagg

SEQ ID NO: 1413636 - RNA, 19 nt, Artificial Sequence
  Description of Artificial Sequence: Synthetic oligonucleotide
  Sense strand starting at position 48 of SEQ ID NO: 1243391
gugcuaagcaaaggauauu

SEQ ID NO: 1413637 - RNA, 19 nt, Artificial Sequence
  Description of Artificial Sequence: Synthetic oligonucleotide
  Antisense strand to SEQ ID NO: 1413636
aauauccuuugcuuagcac

SEQ ID NO: 1413638 - RNA, 19 nt, Artificial Sequence
  Description of Artificial Sequence: Synthetic oligonucleotide
  Sense strand starting at position 73 of SEQ ID NO: 1243391
caauguuucggagaacuuu

SEQ ID NO: 1413639 - RNA, 19 nt, Artificial Sequence
  Description of Artificial Sequence: Synthetic oligonucleotide
  Antisense strand to SEQ ID NO: 1413638
aaaguucuccgaaacauug

SEQ ID NO: 1413640 - RNA, 19 nt, Artificial Sequence
  Description of Artificial Sequence: Synthetic oligonucleotide
  Sense strand starting at position 238 of SEQ ID NO: 1243391
ggccauagacaguggauau

SEQ ID NO: 1413641 - RNA, 19 nt, Artificial Sequence
  Description of Artificial Sequence: Synthetic oligonucleotide
  Antisense strand to SEQ ID NO: 1413640
auauccacugucuauggcc

SEQ ID NO: 1413642 - RNA, 19 nt, Artificial Sequence
  Description of Artificial Sequence: Synthetic oligonucleotide
  Sense strand starting at position 329 of SEQ ID NO: 1243391
aaauuauccgagugguaag

SEQ ID NO: 1413643 - RNA, 19 nt, Artificial Sequence
  Description of Artificial Sequence: Synthetic oligonucleotide
  Antisense strand to SEQ ID NO: 1413642
cuuaccacucggauaauuu

SEQ ID NO: 1413644 - RNA, 19 nt, Artificial Sequence
  Description of Artificial Sequence: Synthetic oligonucleotide
  Sense strand starting at position 343 of SEQ ID NO: 1243391
guaagcuaacaaugaagua

SEQ ID NO: 1413645 - RNA, 19 nt, Artificial Sequence
  Description of Artificial Sequence: Synthetic oligonucleotide
  Antisense strand to SEQ ID NO: 1413644
uacuucauuguuagcuuac

SEQ ID NO: 1413646 - RNA, 19 nt, Artificial Sequence
  Description of Artificial Sequence: Synthetic oligonucleotide
  Sense strand starting at position 431 of SEQ ID NO: 1243391
ggagacaaggguugucgaa

SEQ ID NO: 1413647 - RNA, 19 nt, Artificial Sequence
  Description of Artificial Sequence: Synthetic oligonucleotide
  Antisense strand to SEQ ID NO: 1413646
uucgacaacccuugucucc

SEQ ID NO: 1413648 - RNA, 19 nt, Artificial Sequence
  Description of Artificial Sequence: Synthetic oligonucleotide
  Sense strand starting at position 564 of SEQ ID NO: 1243391
acgcacuuaggaugaaaga

SEQ ID NO: 1413649 - RNA, 19 nt, Artificial Sequence
  Description of Artificial Sequence: Synthetic oligonucleotide
  Antisense strand to SEQ ID NO: 1413648
ucuuucauccuaagugcgu

SEQ ID NO: 1413650 - RNA, 19 nt, Artificial Sequence
  Description of Artificial Sequence: Synthetic oligonucleotide
  Sense strand starting at position 593 of SEQ ID NO: 1243391
cucugaaauucugauccag

SEQ ID NO: 1413651 - RNA, 19 nt, Artificial Sequence
  Description of Artificial Sequence: Synthetic oligonucleotide
  Antisense strand to SEQ ID NO: 1413650
cuggaucagaauuucagag

SEQ ID NO: 1413652 - RNA, 19 nt, Artificial Sequence
  Description of Artificial Sequence: Synthetic oligonucleotide
  Sense strand starting at position 599 of SEQ ID NO: 1243391
aauucugauccagauucgu

SEQ ID NO: 1413653 - RNA, 19 nt, Artificial Sequence
  Description of Artificial Sequence: Synthetic oligonucleotide
  Antisense strand to SEQ ID NO: 1413652
acgaaucuggaucagaauu

SEQ ID NO: 1413654 - RNA, 19 nt, Artificial Sequence
  Description of Artificial Sequence: Synthetic oligonucleotide
  Sense strand starting at position 604 of SEQ ID NO: 1243391
ugauccagauucguccuaa

SEQ ID NO: 1413655 - RNA, 19 nt, Artificial Sequence
  Description of Artificial Sequence: Synthetic oligonucleotide
  Antisense strand to SEQ ID NO: 1413654
uuaggacgaaucuggauca

SEQ ID NO: 1413656 - RNA, 19 nt, Artificial Sequence
  Description of Artificial Sequence: Synthetic oligonucleotide
  Sense strand starting at position 605 of SEQ ID NO: 1243391
gauccagauucguccuaac

SEQ ID NO: 1413657 - RNA, 19 nt, Artificial Sequence
  Description of Artificial Sequence: Synthetic oligonucleotide
  Antisense strand to SEQ ID NO: 1413656
guuaggacgaaucuggauc

SEQ ID NO: 1413658 - RNA, 19 nt, Artificial Sequence
  Description of Artificial Sequence: Synthetic oligonucleotide
  Sense strand starting at position 649 of SEQ ID NO: 1243391
agaagagcugugugccaaa

SEQ ID NO: 1413659 - RNA, 19 nt, Artificial Sequence
  Description of Artificial Sequence: Synthetic oligonucleotide
  Antisense strand to SEQ ID NO: 1413658
uuuggcacacagcucuucu

SEQ ID NO: 1413660 - RNA, 19 nt, Artificial Sequence
  Description of Artificial Sequence: Synthetic oligonucleotide
  Sense strand starting at position 694 of SEQ ID NO: 1243391
uauauaugagucuggcguu

SEQ ID NO: 1413661 - RNA, 19 nt, Artificial Sequence
  Description of Artificial Sequence: Synthetic oligonucleotide
  Antisense strand to SEQ ID NO: 1413660
aacgccagacucauauaua

SEQ ID NO: 1413662 - RNA, 19 nt, Artificial Sequence
  Description of Artificial Sequence: Synthetic oligonucleotide
  Sense strand starting at position 753 of SEQ ID NO: 1243391
acacgaauucucgggagac

SEQ ID NO: 1413663 - RNA, 19 nt, Artificial Sequence
  Description of Artificial Sequence: Synthetic oligonucleotide
  Antisense strand to SEQ ID NO: 1413662
gucucccgagaauucgugu

SEQ ID NO: 1413664 - RNA, 19 nt, Artificial Sequence
  Description of Artificial Sequence: Synthetic oligonucleotide
  Sense strand starting at position 755 of SEQ ID NO: 1243391
acgaauucucgggagacgu

SEQ ID NO: 1413665 - RNA, 19 nt, Artificial Sequence
  Description of Artificial Sequence: Synthetic oligonucleotide
  Antisense strand to SEQ ID NO: 1413664
acgucucccgagaauucgu

SEQ ID NO: 1413666 - RNA, 19 nt, Artificial Sequence
  Description of Artificial Sequence: Synthetic oligonucleotide
  Sense strand starting at position 1255 of SEQ ID NO: 1243391
cugcgaacgccguugucau

SEQ ID NO: 1413667 - RNA, 19 nt, Artificial Sequence
  Description of Artificial Sequence: Synthetic oligonucleotide
  Antisense strand to SEQ ID NO: 1413666
augacaacggcguucgcag

SEQ ID NO: 1413668 - RNA, 19 nt, Artificial Sequence
  Description of Artificial Sequence: Synthetic oligonucleotide
  Sense strand starting at position 2397 of SEQ ID NO: 1243391
ggacgugauaccggugaag

SEQ ID NO: 1413669 - RNA, 19 nt, Artificial Sequence
  Description of Artificial Sequence: Synthetic oligonucleotide
  Antisense strand to SEQ ID NO: 1413668
cuucaccgguaucacgucc

SEQ ID NO: 1413670 - RNA, 19 nt, Artificial Sequence
  Description of Artificial Sequence: Synthetic oligonucleotide
  Sense strand starting at position 2487 of SEQ ID NO: 1243391
uccuguuaauguuucuaag

SEQ ID NO: 1413671 - RNA, 19 nt, Artificial Sequence
  Description of Artificial Sequence: Synthetic oligonucleotide
  Antisense strand to SEQ ID NO: 1413670
cuuagaaacauuaacagga

SEQ ID NO: 1413672 - RNA, 19 nt, Artificial Sequence
  Description of Artificial Sequence: Synthetic oligonucleotide
  Sense strand starting at position 2498 of SEQ ID NO: 1243391
uuucuaagcccgugauucu

SEQ ID NO: 1413673 - RNA, 19 nt, Artificial Sequence
  Description of Artificial Sequence: Synthetic oligonucleotide
  Antisense strand to SEQ ID NO: 1413672
agaaucacgggcuuagaaa

SEQ ID NO: 1413674 - RNA, 19 nt, Artificial Sequence
  Description of Artificial Sequence: Synthetic oligonucleotide
  Sense strand starting at position 2507 of SEQ ID NO: 1243391
ccgugauucugggccugau

SEQ ID NO: 1413675 - RNA, 19 nt, Artificial Sequence
  Description of Artificial Sequence: Synthetic oligonucleotide
  Antisense strand to SEQ ID NO: 1413674
aucaggcccagaaucacgg

SEQ ID NO: 1413676 - RNA, 19 nt, Artificial Sequence
  Description of Artificial Sequence: Synthetic oligonucleotide
  Sense strand starting at position 2510 of SEQ ID NO: 1243391
ugauucugggccugauaau

SEQ ID NO: 1413677 - RNA, 19 nt, Artificial Sequence
  Description of Artificial Sequence: Synthetic oligonucleotide
  Antisense strand to SEQ ID NO: 1413676
auuaucaggcccagaauca

SEQ ID NO: 1413678 - RNA, 19 nt, Artificial Sequence
  Description of Artificial Sequence: Synthetic oligonucleotide
  Sense strand starting at position 2511 of SEQ ID NO: 1243391
gauucugggccugauaauc

SEQ ID NO: 1413679 - RNA, 19 nt, Artificial Sequence
  Description of Artificial Sequence: Synthetic oligonucleotide
  Antisense strand to SEQ ID NO: 1413678
gauuaucaggcccagaauc

SEQ ID NO: 1413680 - RNA, 19 nt, Artificial Sequence
  Description of Artificial Sequence: Synthetic oligonucleotide
  Sense strand starting at position 2672 of SEQ ID NO: 1243391
cgcgguaccacguaaugaa

SEQ ID NO: 1413681 - RNA, 19 nt, Artificial Sequence
  Description of Artificial Sequence: Synthetic oligonucleotide
  Antisense strand to SEQ ID NO: 1413680
uucauuacgugguaccgcg

SEQ ID NO: 1413682 - RNA, 19 nt, Artificial Sequence
  Description of Artificial Sequence: Synthetic oligonucleotide
  Sense strand starting at position 2893 of SEQ ID NO: 1243391
cgugguuucgcacuuguca

SEQ ID NO: 1413683 - RNA, 19 nt, Artificial Sequence
  Description of Artificial Sequence: Synthetic oligonucleotide
  Antisense strand to SEQ ID NO: 1413682
ugacaagugcgaaaccacg

SEQ ID NO: 1413684 - RNA, 19 nt, Artificial Sequence
  Description of Artificial Sequence: Synthetic oligonucleotide
  Sense strand starting at position 3167 of SEQ ID NO: 1243391
gcccguauccggcuuuaag

SEQ ID NO: 1413685 - RNA, 19 nt, Artificial Sequence
  Description of Artificial Sequence: Synthetic oligonucleotide
  Antisense strand to SEQ ID NO: 1413684
cuuaaagccggauacgggc

SEQ ID NO: 1413686 - RNA, 19 nt, Artificial Sequence
  Description of Artificial Sequence: Synthetic oligonucleotide
  Sense strand starting at position 3170 of SEQ ID NO: 1243391
cguauccggcuuuaagauu

SEQ ID NO: 1413687 - RNA, 19 nt, Artificial Sequence
  Description of Artificial Sequence: Synthetic oligonucleotide
  Antisense strand to SEQ ID NO: 1413686
aaucuuaaagccggauacg

SEQ ID NO: 1413688 - RNA, 19 nt, Artificial Sequence
  Description of Artificial Sequence: Synthetic oligonucleotide
  Sense strand starting at position 3211 of SEQ ID NO: 1243391
ggauguacuuaucucagau

SEQ ID NO: 1413689 - RNA, 19 nt, Artificial Sequence
  Description of Artificial Sequence: Synthetic oligonucleotide
  Antisense strand to SEQ ID NO: 1413688
aucugagauaaguacaucc

SEQ ID NO: 1413690 - RNA, 19 nt, Artificial Sequence
  Description of Artificial Sequence: Synthetic oligonucleotide
  Sense strand starting at position 3274 of SEQ ID NO: 1243391
aggagcucugaucgcagau

SEQ ID NO: 1413691 - RNA, 19 nt, Artificial Sequence
  Description of Artificial Sequence: Synthetic oligonucleotide
  Antisense strand to SEQ ID NO: 1413690
aucugcgaucagagcuccu

SEQ ID NO: 1413692 - RNA, 19 nt, Artificial Sequence
  Description of Artificial Sequence: Synthetic oligonucleotide
  Sense strand starting at position 3286 of SEQ ID NO: 1243391
cgcagauuggagugucuga

SEQ ID NO: 1413693 - RNA, 19 nt, Artificial Sequence
  Description of Artificial Sequence: Synthetic oligonucleotide
  Antisense strand to SEQ ID NO: 1413692
ucagacacuccaaucugcg

SEQ ID NO: 1413694 - RNA, 19 nt, Artificial Sequence
  Description of Artificial Sequence: Synthetic oligonucleotide
  Sense strand starting at position 3299 of SEQ ID NO: 1243391
gucugaacucugcaucuau

SEQ ID NO: 1413695 - RNA, 19 nt, Artificial Sequence
  Description of Artificial Sequence: Synthetic oligonucleotide
  Antisense strand to SEQ ID NO: 1413694
auagaugcagaguucagac

SEQ ID NO: 1413696 - RNA, 19 nt, Artificial Sequence
  Description of Artificial Sequence: Synthetic oligonucleotide
  Sense strand starting at position 3342 of SEQ ID NO: 1243391
gcaacucuggaguggcaua

SEQ ID NO: 1413697 - RNA, 19 nt, Artificial Sequence
  Description of Artificial Sequence: Synthetic oligonucleotide
  Antisense strand to SEQ ID NO: 1413696
uaugccacuccagaguugc

SEQ ID NO: 1413698 - RNA, 19 nt, Artificial Sequence
  Description of Artificial Sequence: Synthetic oligonucleotide
  Sense strand starting at position 3347 of SEQ ID NO: 1243391
ucuggaguggcauaguaaa

SEQ ID NO: 1413699 - RNA, 19 nt, Artificial Sequence
  Description of Artificial Sequence: Synthetic oligonucleotide
  Antisense strand to SEQ ID NO: 1413698
uuuacuaugccacuccaga

SEQ ID NO: 1413700 - RNA, 19 nt, Artificial Sequence
  Description of Artificial Sequence: Synthetic oligonucleotide
  Sense strand starting at position 3355 of SEQ ID NO: 1243391
ggcauaguaaaguggcaaa

SEQ ID NO: 1413701 - RNA, 19 nt, Artificial Sequence
  Description of Artificial Sequence: Synthetic oligonucleotide
  Antisense strand to SEQ ID NO: 1413700
uuugccacuuuacuaugcc

SEQ ID NO: 1413702 - RNA, 19 nt, Artificial Sequence
  Description of Artificial Sequence: Synthetic oligonucleotide
  Sense strand starting at position 3378 of SEQ ID NO: 1243391
uugccuuucugguuaaaga

SEQ ID NO: 1413703 - RNA, 19 nt, Artificial Sequence
  Description of Artificial Sequence: Synthetic oligonucleotide
  Antisense strand to SEQ ID NO: 1413702
ucuuuaaccagaaaggcaa

SEQ ID NO: 1413704 - RNA, 19 nt, Artificial Sequence
  Description of Artificial Sequence: Synthetic oligonucleotide
  Sense strand starting at position 3379 of SEQ ID NO: 1243391
ugccuuucugguuaaagac

SEQ ID NO: 1413705 - RNA, 19 nt, Artificial Sequence
  Description of Artificial Sequence: Synthetic oligonucleotide
  Antisense strand to SEQ ID NO: 1413704
gucuuuaaccagaaaggca

SEQ ID NO: 1413706 - RNA, 19 nt, Artificial Sequence
  Description of Artificial Sequence: Synthetic oligonucleotide
  Sense strand starting at position 3473 of SEQ ID NO: 1243391
acauuuaaugcccgugaau

SEQ ID NO: 1413707 - RNA, 19 nt, Artificial Sequence
  Description of Artificial Sequence: Synthetic oligonucleotide
  Antisense strand to SEQ ID NO: 1413706
auucacgggcauuaaaugu

SEQ ID NO: 1413708 - RNA, 19 nt, Artificial Sequence
  Description of Artificial Sequence: Synthetic oligonucleotide
  Sense strand starting at position 3476 of SEQ ID NO: 1243391
uuuaaugcccgugaauagu

SEQ ID NO: 1413709 - RNA, 19 nt, Artificial Sequence
  Description of Artificial Sequence: Synthetic oligonucleotide
  Antisense strand to SEQ ID NO: 1413708
acuauucacgggcauuaaa

SEQ ID NO: 1413710 - RNA, 19 nt, Artificial Sequence
  Description of Artificial Sequence: Synthetic oligonucleotide
  Sense strand starting at position 3579 of SEQ ID NO: 1243391
agaaauuucucuucguguc

SEQ ID NO: 1413711 - RNA, 19 nt, Artificial Sequence
  Description of Artificial Sequence: Synthetic oligonucleotide
  Antisense strand to SEQ ID NO: 1413710
gacacgaagagaaauuucu

SEQ ID NO: 1413712 - RNA, 19 nt, Artificial Sequence
  Description of Artificial Sequence: Synthetic oligonucleotide
  Sense strand starting at position 3580 of SEQ ID NO: 1243391
gaaauuucucuucgugucu

SEQ ID NO: 1413713 - RNA, 19 nt, Artificial Sequence
  Description of Artificial Sequence: Synthetic oligonucleotide
  Antisense strand to SEQ ID NO: 1413712
agacacgaagagaaauuuc

SEQ ID NO: 1413714 - RNA, 19 nt, Artificial Sequence
  Description of Artificial Sequence: Synthetic oligonucleotide
  Sense strand starting at position 3660 of SEQ ID NO: 1243391
gcacgaucuccacgcacua

SEQ ID NO: 1413715 - RNA, 19 nt, Artificial Sequence
  Description of Artificial Sequence: Synthetic oligonucleotide
  Antisense strand to SEQ ID NO: 1413714
uagugcguggagaucgugc

SEQ ID NO: 1413716 - RNA, 19 nt, Artificial Sequence
  Description of Artificial Sequence: Synthetic oligonucleotide
  Sense strand starting at position 2040 of SEQ ID NO: 1243392
gcgggaucaccggguaaac

SEQ ID NO: 1413717 - RNA, 19 nt, Artificial Sequence
  Description of Artificial Sequence: Synthetic oligonucleotide
  Antisense strand to SEQ ID NO: 1413716
guuuacccggugaucccgc

SEQ ID NO: 1413718 - RNA, 19 nt, Artificial Sequence
  Description of Artificial Sequence: Synthetic oligonucleotide
  Sense strand starting at position 2049 of SEQ ID NO: 1243392
ccggguaaacacgauuagu

SEQ ID NO: 1413719 - RNA, 19 nt, Artificial Sequence
  Description of Artificial Sequence: Synthetic oligonucleotide
  Antisense strand to SEQ ID NO: 1413718
acuaaucguguuuacccgg

SEQ ID NO: 1413720 - RNA, 19 nt, Artificial Sequence
  Description of Artificial Sequence: Synthetic oligonucleotide
  Sense strand starting at position 2052 of SEQ ID NO: 1243392
gguaaacacgauuagucau

SEQ ID NO: 1413721 - RNA, 19 nt, Artificial Sequence
  Description of Artificial Sequence: Synthetic oligonucleotide
  Antisense strand to SEQ ID NO: 1413720
augacuaaucguguuuacc

SEQ ID NO: 1413722 - RNA, 19 nt, Artificial Sequence
  Description of Artificial Sequence: Synthetic oligonucleotide
  Sense strand starting at position 2055 of SEQ ID NO: 1243392
aaacacgauuagucauguu

SEQ ID NO: 1413723 - RNA, 19 nt, Artificial Sequence
  Description of Artificial Sequence: Synthetic oligonucleotide
  Antisense strand to SEQ ID NO: 1413722
aacaugacuaaucguguuu

SEQ ID NO: 1413724 - RNA, 19 nt, Artificial Sequence
  Description of Artificial Sequence: Synthetic oligonucleotide
  Sense strand starting at position 2058 of SEQ ID NO: 1243392
cacgauuagucauguuuag

SEQ ID NO: 1413725 - RNA, 19 nt, Artificial Sequence
  Description of Artificial Sequence: Synthetic oligonucleotide
  Antisense strand to SEQ ID NO: 1413724
cuaaacaugacuaaucgug

SEQ ID NO: 1413726 - RNA, 19 nt, Artificial Sequence
  Description of Artificial Sequence: Synthetic oligonucleotide
  Sense strand starting at position 2083 of SEQ ID NO: 1243392
cgggaaucacguuaagcaa

SEQ ID NO: 1413727 - RNA, 19 nt, Artificial Sequence
  Description of Artificial Sequence: Synthetic oligonucleotide
  Antisense strand to SEQ ID NO: 1413726
uugcuuaacgugauucccg

SEQ ID NO: 1413728 - RNA, 19 nt, Artificial Sequence
  Description of Artificial Sequence: Synthetic oligonucleotide
  Sense strand starting at position 2413 of SEQ ID NO: 1243392
cuguccgccugggaugaau

SEQ ID NO: 1413729 - RNA, 19 nt, Artificial Sequence
  Description of Artificial Sequence: Synthetic oligonucleotide
  Antisense strand to SEQ ID NO: 1413728
auucaucccaggcggacag

SEQ ID NO: 1413730 - RNA, 19 nt, Artificial Sequence
  Description of Artificial Sequence: Synthetic oligonucleotide
  Sense strand starting at position 2988 of SEQ ID NO: 1243392
acguguguaccucguauau

SEQ ID NO: 1413731 - RNA, 19 nt, Artificial Sequence
  Description of Artificial Sequence: Synthetic oligonucleotide
  Antisense strand to SEQ ID NO: 1413730
auauacgagguacacacgu

SEQ ID NO: 1413732 - RNA, 19 nt, Artificial Sequence
  Description of Artificial Sequence: Synthetic oligonucleotide
  Sense strand starting at position 2990 of SEQ ID NO: 1243392
guguguaccucguauauug

SEQ ID NO: 1413733 - RNA, 19 nt, Artificial Sequence
  Description of Artificial Sequence: Synthetic oligonucleotide
  Antisense strand to SEQ ID NO: 1413732
caauauacgagguacacac

SEQ ID NO: 1413734 - RNA, 19 nt, Artificial Sequence
  Description of Artificial Sequence: Synthetic oligonucleotide
  Sense strand starting at position 3020 of SEQ ID NO: 1243392
uucugcauguuugaaauca

SEQ ID NO: 1413735 - RNA, 19 nt, Artificial Sequence
  Description of Artificial Sequence: Synthetic oligonucleotide
  Antisense strand to SEQ ID NO: 1413734
ugauuucaaacaugcagaa

SEQ ID NO: 1413736 - RNA, 19 nt, Artificial Sequence
  Description of Artificial Sequence: Synthetic oligonucleotide
  Sense strand starting at position 3377 of SEQ ID NO: 1243392
ggaggaaguccggauguuu

SEQ ID NO: 1413737 - RNA, 19 nt, Artificial Sequence
  Description of Artificial Sequence: Synthetic oligonucleotide
  Antisense strand to SEQ ID NO: 1413736
aaacauccggacuuccucc

SEQ ID NO: 1413738 - RNA, 19 nt, Artificial Sequence
  Description of Artificial Sequence: Synthetic oligonucleotide
  Sense strand starting at position 3668 of SEQ ID NO: 1243392
gccacugaaaucugguaga

SEQ ID NO: 1413739 - RNA, 19 nt, Artificial Sequence
  Description of Artificial Sequence: Synthetic oligonucleotide
  Antisense strand to SEQ ID NO: 1413738
ucuaccagauuucaguggc

SEQ ID NO: 1413740 - RNA, 19 nt, Artificial Sequence
  Description of Artificial Sequence: Synthetic oligonucleotide
  Sense strand starting at position 3671 of SEQ ID NO: 1243392
acugaaaucugguagacaa

SEQ ID NO: 1413741 - RNA, 19 nt, Artificial Sequence
  Description of Artificial Sequence: Synthetic oligonucleotide
  Antisense strand to SEQ ID NO: 1413740
uugucuaccagauuucagu

SEQ ID NO: 1413742 - RNA, 19 nt, Artificial Sequence
  Description of Artificial Sequence: Synthetic oligonucleotide
  Sense strand starting at position 3853 of SEQ ID NO: 1243392
ggauccaucucagggagau

SEQ ID NO: 1413743 - RNA, 19 nt, Artificial Sequence
  Description of Artificial Sequence: Synthetic oligonucleotide
  Antisense strand to SEQ ID NO: 1413742
aucucccugagauggaucc

SEQ ID NO: 1413744 - RNA, 19 nt, Artificial Sequence
  Description of Artificial Sequence: Synthetic oligonucleotide
  Sense strand starting at position 3893 of SEQ ID NO: 1243392
acgcuuaggcuauguuuaa

SEQ ID NO: 1413745 - RNA, 19 nt, Artificial Sequence
  Description of Artificial Sequence: Synthetic oligonucleotide
  Antisense strand to SEQ ID NO: 1413744
uuaaacauagccuaagcgu

SEQ ID NO: 1413746 - RNA, 19 nt, Artificial Sequence
  Description of Artificial Sequence: Synthetic oligonucleotide
  Sense strand starting at position 3894 of SEQ ID NO: 1243392
cgcuuaggcuauguuuaaa

SEQ ID NO: 1413747 - RNA, 19 nt, Artificial Sequence
  Description of Artificial Sequence: Synthetic oligonucleotide
  Antisense strand to SEQ ID NO: 1413746
uuuaaacauagccuaagcg

SEQ ID NO: 1413748 - RNA, 19 nt, Artificial Sequence
  Description of Artificial Sequence: Synthetic oligonucleotide
  Sense strand starting at position 3905 of SEQ ID NO: 1243392
uguuuaaauaugugcagga

SEQ ID NO: 1413749 - RNA, 19 nt, Artificial Sequence
  Description of Artificial Sequence: Synthetic oligonucleotide
  Antisense strand to SEQ ID NO: 1413748
uccugcacauauuuaaaca

SEQ ID NO: 1413750 - RNA, 19 nt, Artificial Sequence
  Description of Artificial Sequence: Synthetic oligonucleotide
  Sense strand starting at position 3906 of SEQ ID NO: 1243392
guuuaaauaugugcaggau

SEQ ID NO: 1413751 - RNA, 19 nt, Artificial Sequence
  Description of Artificial Sequence: Synthetic oligonucleotide
  Antisense strand to SEQ ID NO: 1413750
auccugcacauauuuaaac

SEQ ID NO: 1413752 - RNA, 19 nt, Artificial Sequence
  Description of Artificial Sequence: Synthetic oligonucleotide
  Sense strand starting at position 3909 of SEQ ID NO: 1243392
uaaauaugugcaggaucca

SEQ ID NO: 1413753 - RNA, 19 nt, Artificial Sequence
  Description of Artificial Sequence: Synthetic oligonucleotide
  Antisense strand to SEQ ID NO: 1413752
uggauccugcacauauuua

SEQ ID NO: 1413754 - RNA, 19 nt, Artificial Sequence
  Description of Artificial Sequence: Synthetic oligonucleotide
  Sense strand starting at position 3959 of SEQ ID NO: 1243392
acauuuggcuucugucuaa

SEQ ID NO: 1413755 - RNA, 19 nt, Artificial Sequence
  Description of Artificial Sequence: Synthetic oligonucleotide
  Antisense strand to SEQ ID NO: 1413754
uuagacagaagccaaaugu

SEQ ID NO: 1413756 - RNA, 19 nt, Artificial Sequence
  Description of Artificial Sequence: Synthetic oligonucleotide
  Sense strand starting at position 3962 of SEQ ID NO: 1243392
uuuggcuucugucuaagga

SEQ ID NO: 1413757 - RNA, 19 nt, Artificial Sequence
  Description of Artificial Sequence: Synthetic oligonucleotide
  Antisense strand to SEQ ID NO: 1413756
uccuuagacagaagccaaa

SEQ ID NO: 1413758 - RNA, 19 nt, Artificial Sequence
  Description of Artificial Sequence: Synthetic oligonucleotide
  Sense strand starting at position 3966 of SEQ ID NO: 1243392
gcuucugucuaaggaguaa

SEQ ID NO: 1413759 - RNA, 19 nt, Artificial Sequence
  Description of Artificial Sequence: Synthetic oligonucleotide
  Antisense strand to SEQ ID NO: 1413758
uuacuccuuagacagaagc

SEQ ID NO: 1413760 - RNA, 19 nt, Artificial Sequence
  Description of Artificial Sequence: Synthetic oligonucleotide
  Sense strand starting at position 593 of SEQ ID NO: 1243393
accuguuuccucugucgua

SEQ ID NO: 1413761 - RNA, 19 nt, Artificial Sequence
  Description of Artificial Sequence: Synthetic oligonucleotide
  Antisense strand to SEQ ID NO: 1413760
uacgacagaggaaacaggu

SEQ ID NO: 1413762 - RNA, 19 nt, Artificial Sequence
  Description of Artificial Sequence: Synthetic oligonucleotide
  Sense strand starting at position 594 of SEQ ID NO: 1243393
ccuguuuccucugucguaa

SEQ ID NO: 1413763 - RNA, 19 nt, Artificial Sequence
  Description of Artificial Sequence: Synthetic oligonucleotide
  Antisense strand to SEQ ID NO: 1413762
uuacgacagaggaaacagg

SEQ ID NO: 1413764 - RNA, 19 nt, Artificial Sequence
  Description of Artificial Sequence: Synthetic oligonucleotide
  Sense strand starting at position 867 of SEQ ID NO: 1243393
ugggucuugcucuggaaau

SEQ ID NO: 1413765 - RNA, 19 nt, Artificial Sequence
  Description of Artificial Sequence: Synthetic oligonucleotide
  Antisense strand to SEQ ID NO: 1413764
auuuccagagcaagaccca

SEQ ID NO: 1413766 - RNA, 19 nt, Artificial Sequence
  Description of Artificial Sequence: Synthetic oligonucleotide
  Sense strand starting at position 868 of SEQ ID NO: 1243393
gggucuugcucuggaaauc

SEQ ID NO: 1413767 - RNA, 19 nt, Artificial Sequence
  Description of Artificial Sequence: Synthetic oligonucleotide
  Antisense strand to SEQ ID NO: 1413766
gauuuccagagcaagaccc

SEQ ID NO: 1413768 - RNA, 19 nt, Artificial Sequence
  Description of Artificial Sequence: Synthetic oligonucleotide
  Sense strand starting at position 869 of SEQ ID NO: 1243393
ggucuugcucuggaaauca

SEQ ID NO: 1413769 - RNA, 19 nt, Artificial Sequence
  Description of Artificial Sequence: Synthetic oligonucleotide
  Antisense strand to SEQ ID NO: 1413768
ugauuuccagagcaagacc

SEQ ID NO: 1413770 - RNA, 19 nt, Artificial Sequence
  Description of Artificial Sequence: Synthetic oligonucleotide
  Sense strand starting at position 1260 of SEQ ID NO: 1243393
agucuuggguuucagggaa

SEQ ID NO: 1413771 - RNA, 19 nt, Artificial Sequence
  Description of Artificial Sequence: Synthetic oligonucleotide
  Antisense strand to SEQ ID NO: 1413770
uucccugaaacccaagacu

SEQ ID NO: 1413772 - RNA, 19 nt, Artificial Sequence
  Description of Artificial Sequence: Synthetic oligonucleotide
  Sense strand starting at position 2409 of SEQ ID NO: 1243393
gguccguggucgugggauu

SEQ ID NO: 1413773 - RNA, 19 nt, Artificial Sequence
  Description of Artificial Sequence: Synthetic oligonucleotide
  Antisense strand to SEQ ID NO: 1413772
aaucccacgaccacggacc

SEQ ID NO: 1413774 - RNA, 19 nt, Artificial Sequence
  Description of Artificial Sequence: Synthetic oligonucleotide
  Sense strand starting at position 2410 of SEQ ID NO: 1243393
guccguggucgugggauuu

SEQ ID NO: 1413775 - RNA, 19 nt, Artificial Sequence
  Description of Artificial Sequence: Synthetic oligonucleotide
  Antisense strand to SEQ ID NO: 1413774
aaaucccacgaccacggac

SEQ ID NO: 1413776 - RNA, 19 nt, Artificial Sequence
  Description of Artificial Sequence: Synthetic oligonucleotide
  Sense strand starting at position 2463 of SEQ ID NO: 1243393
auuuguggauccuacacau

SEQ ID NO: 1413777 - RNA, 19 nt, Artificial Sequence
  Description of Artificial Sequence: Synthetic oligonucleotide
  Antisense strand to SEQ ID NO: 1413776
auguguaggauccacaaau

SEQ ID NO: 1413778 - RNA, 19 nt, Artificial Sequence
  Description of Artificial Sequence: Synthetic oligonucleotide
  Sense strand starting at position 2668 of SEQ ID NO: 1243393
cugcauuccugagaagcuc

SEQ ID NO: 1413779 - RNA, 19 nt, Artificial Sequence
  Description of Artificial Sequence: Synthetic oligonucleotide
  Antisense strand to SEQ ID NO: 1413778
gagcuucucaggaaugcag

SEQ ID NO: 1413780 - RNA, 19 nt, Artificial Sequence
  Description of Artificial Sequence: Synthetic oligonucleotide
  Sense strand starting at position 3028 of SEQ ID NO: 1243393
gcguuucaguguuuccaca

SEQ ID NO: 1413781 - RNA, 19 nt, Artificial Sequence
  Description of Artificial Sequence: Synthetic oligonucleotide
  Antisense strand to SEQ ID NO: 1413780
uguggaaacacugaaacgc

SEQ ID NO: 1413782 - RNA, 19 nt, Artificial Sequence
  Description of Artificial Sequence: Synthetic oligonucleotide
  Sense strand starting at position 3060 of SEQ ID NO: 1243393
gcgcguguuauguuuacca

SEQ ID NO: 1413783 - RNA, 19 nt, Artificial Sequence
  Description of Artificial Sequence: Synthetic oligonucleotide
  Antisense strand to SEQ ID NO: 1413782
ugguaaacauaacacgcgc

SEQ ID NO: 1413784 - RNA, 19 nt, Artificial Sequence
  Description of Artificial Sequence: Synthetic oligonucleotide
  Sense strand starting at position 3062 of SEQ ID NO: 1243393
gcguguuauguuuaccauc

SEQ ID NO: 1413785 - RNA, 19 nt, Artificial Sequence
  Description of Artificial Sequence: Synthetic oligonucleotide
  Antisense strand to SEQ ID NO: 1413784
gaugguaaacauaacacgc

SEQ ID NO: 1413786 - RNA, 19 nt, Artificial Sequence
  Description of Artificial Sequence: Synthetic oligonucleotide
  Sense strand starting at position 3064 of SEQ ID NO: 1243393
guguuauguuuaccaucga

SEQ ID NO: 1413787 - RNA, 19 nt, Artificial Sequence
  Description of Artificial Sequence: Synthetic oligonucleotide
  Antisense strand to SEQ ID NO: 1413786
ucgaugguaaacauaacac

SEQ ID NO: 1413788 - RNA, 19 nt, Artificial Sequence
  Description of Artificial Sequence: Synthetic oligonucleotide
  Sense strand starting at position 3068 of SEQ ID NO: 1243393
uauguuuaccaucgagcaa

SEQ ID NO: 1413789 - RNA, 19 nt, Artificial Sequence
  Description of Artificial Sequence: Synthetic oligonucleotide
  Antisense strand to SEQ ID NO: 1413788
uugcucgaugguaaacaua

SEQ ID NO: 1413790 - RNA, 19 nt, Artificial Sequence
  Description of Artificial Sequence: Synthetic oligonucleotide
  Sense strand starting at position 3274 of SEQ ID NO: 1243393
guggcuucccaaggcagau

SEQ ID NO: 1413791 - RNA, 19 nt, Artificial Sequence
  Description of Artificial Sequence: Synthetic oligonucleotide
  Antisense strand to SEQ ID NO: 1413790
aucugccuugggaagccac

SEQ ID NO: 1413792 - RNA, 19 nt, Artificial Sequence
  Description of Artificial Sequence: Synthetic oligonucleotide
  Sense strand starting at position 3283 of SEQ ID NO: 1243393
caaggcagauccucugaga

SEQ ID NO: 1413793 - RNA, 19 nt, Artificial Sequence
  Description of Artificial Sequence: Synthetic oligonucleotide
  Antisense strand to SEQ ID NO: 1413792
ucucagaggaucugccuug

SEQ ID NO: 1413794 - RNA, 19 nt, Artificial Sequence
  Description of Artificial Sequence: Synthetic oligonucleotide
  Sense strand starting at position 3479 of SEQ ID NO: 1243393
gucccacuguucuggaauc

SEQ ID NO: 1413795 - RNA, 19 nt, Artificial Sequence
  Description of Artificial Sequence: Synthetic oligonucleotide
  Antisense strand to SEQ ID NO: 1413794
gauuccagaacagugggac

SEQ ID NO: 1413796 - RNA, 19 nt, Artificial Sequence
  Description of Artificial Sequence: Synthetic oligonucleotide
  Sense strand starting at position 3480 of SEQ ID NO: 1243393
ucccacuguucuggaauca

SEQ ID NO: 1413797 - RNA, 19 nt, Artificial Sequence
  Description of Artificial Sequence: Synthetic oligonucleotide
  Antisense strand to SEQ ID NO: 1413796
ugauuccagaacaguggga

SEQ ID NO: 1413798 - RNA, 19 nt, Artificial Sequence
  Description of Artificial Sequence: Synthetic oligonucleotide
  Sense strand starting at position 3712 of SEQ ID NO: 1243393
cccugaguucugggcagga

SEQ ID NO: 1413799 - RNA, 19 nt, Artificial Sequence
  Description of Artificial Sequence: Synthetic oligonucleotide
  Antisense strand to SEQ ID NO: 1413798
uccugcccagaacucaggg

SEQ ID NO: 1413800 - RNA, 19 nt, Artificial Sequence
  Description of Artificial Sequence: Synthetic oligonucleotide
  Sense strand starting at position 3714 of SEQ ID NO: 1243393
cugaguucugggcaggagu

SEQ ID NO: 1413801 - RNA, 19 nt, Artificial Sequence
  Description of Artificial Sequence: Synthetic oligonucleotide
  Antisense strand to SEQ ID NO: 1413800
acuccugcccagaacucag

SEQ ID NO: 1413802 - RNA, 19 nt, Artificial Sequence
  Description of Artificial Sequence: Synthetic oligonucleotide
  Sense strand starting at position 7 of SEQ ID NO: 1243394
cucagaagcuuggcuuuau

SEQ ID NO: 1413803 - RNA, 19 nt, Artificial Sequence
  Description of Artificial Sequence: Synthetic oligonucleotide
  Antisense strand to SEQ ID NO: 1413802
auaaagccaagcuucugag

SEQ ID NO: 1413804 - RNA, 19 nt, Artificial Sequence
  Description of Artificial Sequence: Synthetic oligonucleotide
  Sense strand starting at position 15 of SEQ ID NO: 1243394
cuuggcuuuaucugggauu

SEQ ID NO: 1413805 - RNA, 19 nt, Artificial Sequence
  Description of Artificial Sequence: Synthetic oligonucleotide
  Antisense strand to SEQ ID NO: 1413804
aaucccagauaaagccaag

SEQ ID NO: 1413806 - RNA, 19 nt, Artificial Sequence
  Description of Artificial Sequence: Synthetic oligonucleotide
  Sense strand starting at position 16 of SEQ ID NO: 1243394
uuggcuuuaucugggauuu

SEQ ID NO: 1413807 - RNA, 19 nt, Artificial Sequence
  Description of Artificial Sequence: Synthetic oligonucleotide
  Antisense strand to SEQ ID NO: 1413806
aaaucccagauaaagccaa

SEQ ID NO: 1413808 - RNA, 19 nt, Artificial Sequence
  Description of Artificial Sequence: Synthetic oligonucleotide
  Sense strand starting at position 511 of SEQ ID NO: 1243394
uccugagucccacgacuaa

SEQ ID NO: 1413809 - RNA, 19 nt, Artificial Sequence
  Description of Artificial Sequence: Synthetic oligonucleotide
  Antisense strand to SEQ ID NO: 1413808
uuagucgugggacucagga

SEQ ID NO: 1413810 - RNA, 19 nt, Artificial Sequence
  Description of Artificial Sequence: Synthetic oligonucleotide
  Sense strand starting at position 797 of SEQ ID NO: 1243394
gaguguguuacuggccaga

SEQ ID NO: 1413811 - RNA, 19 nt, Artificial Sequence
  Description of Artificial Sequence: Synthetic oligonucleotide
  Antisense strand to SEQ ID NO: 1413810
ucuggccaguaacacacuc

SEQ ID NO: 1413812 - RNA, 19 nt, Artificial Sequence
  Description of Artificial Sequence: Synthetic oligonucleotide
  Sense strand starting at position 839 of SEQ ID NO: 1243394
cccggaggcuuugacugaa

SEQ ID NO: 1413813 - RNA, 19 nt, Artificial Sequence
  Description of Artificial Sequence: Synthetic oligonucleotide
  Antisense strand to SEQ ID NO: 1413812
uucagucaaagccuccggg

SEQ ID NO: 1413814 - RNA, 19 nt, Artificial Sequence
  Description of Artificial Sequence: Synthetic oligonucleotide
  Sense strand starting at position 938 of SEQ ID NO: 1243394
ccuuuacgcagcuguaaag

SEQ ID NO: 1413815 - RNA, 19 nt, Artificial Sequence
  Description of Artificial Sequence: Synthetic oligonucleotide
  Antisense strand to SEQ ID NO: 1413814
cuuuacagcugcguaaagg

SEQ ID NO: 1413816 - RNA, 19 nt, Artificial Sequence
  Description of Artificial Sequence: Synthetic oligonucleotide
  Sense strand starting at position 981 of SEQ ID NO: 1243394
gauggaugcaguuggcaaa

SEQ ID NO: 1413817 - RNA, 19 nt, Artificial Sequence
  Description of Artificial Sequence: Synthetic oligonucleotide
  Antisense strand to SEQ ID NO: 1413816
uuugccaacugcauccauc

SEQ ID NO: 1413818 - RNA, 19 nt, Artificial Sequence
  Description of Artificial Sequence: Synthetic oligonucleotide
  Sense strand starting at position 1013 of SEQ ID NO: 1243394
ggcuaacuugagcaagcaa

SEQ ID NO: 1413819 - RNA, 19 nt, Artificial Sequence
  Description of Artificial Sequence: Synthetic oligonucleotide
  Antisense strand to SEQ ID NO: 1413818
uugcuugcucaaguuagcc

SEQ ID NO: 1413820 - RNA, 19 nt, Artificial Sequence
  Description of Artificial Sequence: Synthetic oligonucleotide
  Sense strand starting at position 1162 of SEQ ID NO: 1243394
gugggaaguuugguccagu

SEQ ID NO: 1413821 - RNA, 19 nt, Artificial Sequence
  Description of Artificial Sequence: Synthetic oligonucleotide
  Antisense strand to SEQ ID NO: 1413820
acuggaccaaacuucccac

SEQ ID NO: 1413822 - RNA, 19 nt, Artificial Sequence
  Description of Artificial Sequence: Synthetic oligonucleotide
  Sense strand starting at position 1163 of SEQ ID NO: 1243394
ugggaaguuugguccaguc

SEQ ID NO: 1413823 - RNA, 19 nt, Artificial Sequence
  Description of Artificial Sequence: Synthetic oligonucleotide
  Antisense strand to SEQ ID NO: 1413822
gacuggaccaaacuuccca

SEQ ID NO: 1413824 - RNA, 19 nt, Artificial Sequence
  Description of Artificial Sequence: Synthetic oligonucleotide
  Sense strand starting at position 1165 of SEQ ID NO: 1243394
ggaaguuugguccagucac

SEQ ID NO: 1413825 - RNA, 19 nt, Artificial Sequence
  Description of Artificial Sequence: Synthetic oligonucleotide
  Antisense strand to SEQ ID NO: 1413824
gugacuggaccaaacuucc

SEQ ID NO: 1413826 - RNA, 19 nt, Artificial Sequence
  Description of Artificial Sequence: Synthetic oligonucleotide
  Sense strand starting at position 1497 of SEQ ID NO: 1243394
ggguuagcgguacgaacua

SEQ ID NO: 1413827 - RNA, 19 nt, Artificial Sequence
  Description of Artificial Sequence: Synthetic oligonucleotide
  Antisense strand to SEQ ID NO: 1413826
uaguucguaccgcuaaccc

SEQ ID NO: 1413828 - RNA, 19 nt, Artificial Sequence
  Description of Artificial Sequence: Synthetic oligonucleotide
  Sense strand starting at position 2283 of SEQ ID NO: 1243394
gauugugggcuuuguaguu

SEQ ID NO: 1413829 - RNA, 19 nt, Artificial Sequence
  Description of Artificial Sequence: Synthetic oligonucleotide
  Antisense strand to SEQ ID NO: 1413828
aacuacaaagcccacaauc

SEQ ID NO: 1413830 - RNA, 19 nt, Artificial Sequence
  Description of Artificial Sequence: Synthetic oligonucleotide
  Sense strand starting at position 2289 of SEQ ID NO: 1243394
gggcuuuguaguuucgcua

SEQ ID NO: 1413831 - RNA, 19 nt, Artificial Sequence
  Description of Artificial Sequence: Synthetic oligonucleotide
  Antisense strand to SEQ ID NO: 1413830
uagcgaaacuacaaagccc

SEQ ID NO: 1413832 - RNA, 19 nt, Artificial Sequence
  Description of Artificial Sequence: Synthetic oligonucleotide
  Sense strand starting at position 2708 of SEQ ID NO: 1243394
ucuauugguuccucaucca

SEQ ID NO: 1413833 - RNA, 19 nt, Artificial Sequence
  Description of Artificial Sequence: Synthetic oligonucleotide
  Antisense strand to SEQ ID NO: 1413832
uggaugaggaaccaauaga

SEQ ID NO: 1413834 - RNA, 19 nt, Artificial Sequence
  Description of Artificial Sequence: Synthetic oligonucleotide
  Sense strand starting at position 2971 of SEQ ID NO: 1243394
uguuuaaacgcagauugcu

SEQ ID NO: 1413835 - RNA, 19 nt, Artificial Sequence
  Description of Artificial Sequence: Synthetic oligonucleotide
  Antisense strand to SEQ ID NO: 1413834
agcaaucugcguuuaaaca

SEQ ID NO: 1413836 - RNA, 19 nt, Artificial Sequence
  Description of Artificial Sequence: Synthetic oligonucleotide
  Sense strand starting at position 3078 of SEQ ID NO: 1243394
gccgguuacuaccuugaua

SEQ ID NO: 1413837 - RNA, 19 nt, Artificial Sequence
  Description of Artificial Sequence: Synthetic oligonucleotide
  Antisense strand to SEQ ID NO: 1413836
uaucaagguaguaaccggc

SEQ ID NO: 1413838 - RNA, 19 nt, Artificial Sequence
  Description of Artificial Sequence: Synthetic oligonucleotide
  Sense strand starting at position 3080 of SEQ ID NO: 1243394
cgguuacuaccuugauaac

SEQ ID NO: 1413839 - RNA, 19 nt, Artificial Sequence
  Description of Artificial Sequence: Synthetic oligonucleotide
  Antisense strand to SEQ ID NO: 1413838
guuaucaagguaguaaccg

SEQ ID NO: 1413840 - RNA, 19 nt, Artificial Sequence
  Description of Artificial Sequence: Synthetic oligonucleotide
  Sense strand starting at position 3098 of SEQ ID NO: 1243394
ccugauaaccucugcuguu

SEQ ID NO: 1413841 - RNA, 19 nt, Artificial Sequence
  Description of Artificial Sequence: Synthetic oligonucleotide
  Antisense strand to SEQ ID NO: 1413840
aacagcagagguuaucagg

SEQ ID NO: 1413842 - RNA, 19 nt, Artificial Sequence
  Description of Artificial Sequence: Synthetic oligonucleotide
  Sense strand starting at position 3117 of SEQ ID NO: 1243394
gguguuugcugcuaacaca

SEQ ID NO: 1413843 - RNA, 19 nt, Artificial Sequence
  Description of Artificial Sequence: Synthetic oligonucleotide
  Antisense strand to SEQ ID NO: 1413842
uguguuagcagcaaacacc

SEQ ID NO: 1413844 - RNA, 19 nt, Artificial Sequence
  Description of Artificial Sequence: Synthetic oligonucleotide
  Sense strand starting at position 3156 of SEQ ID NO: 1243394
uggcccuugugugggauaa

SEQ ID NO: 1413845 - RNA, 19 nt, Artificial Sequence
  Description of Artificial Sequence: Synthetic oligonucleotide
  Antisense strand to SEQ ID NO: 1413844
uuaucccacacaagggcca

SEQ ID NO: 1413846 - RNA, 19 nt, Artificial Sequence
  Description of Artificial Sequence: Synthetic oligonucleotide
  Sense strand starting at position 3157 of SEQ ID NO: 1243394
ggcccuugugugggauaau

SEQ ID NO: 1413847 - RNA, 19 nt, Artificial Sequence
  Description of Artificial Sequence: Synthetic oligonucleotide
  Antisense strand to SEQ ID NO: 1413846
auuaucccacacaagggcc

SEQ ID NO: 1413848 - RNA, 19 nt, Artificial Sequence
  Description of Artificial Sequence: Synthetic oligonucleotide
  Sense strand starting at position 3158 of SEQ ID NO: 1243394
gcccuugugugggauaauu

SEQ ID NO: 1413849 - RNA, 19 nt, Artificial Sequence
  Description of Artificial Sequence: Synthetic oligonucleotide
  Antisense strand to SEQ ID NO: 1413848
aauuaucccacacaagggc

SEQ ID NO: 1413850 - RNA, 19 nt, Artificial Sequence
  Description of Artificial Sequence: Synthetic oligonucleotide
  Sense strand starting at position 3160 of SEQ ID NO: 1243394
ccuugugugggauaauuaa

SEQ ID NO: 1413851 - RNA, 19 nt, Artificial Sequence
  Description of Artificial Sequence: Synthetic oligonucleotide
  Antisense strand to SEQ ID NO: 1413850
uuaauuaucccacacaagg

SEQ ID NO: 1413852 - RNA, 19 nt, Artificial Sequence
  Description of Artificial Sequence: Synthetic oligonucleotide
  Sense strand starting at position 3176 of SEQ ID NO: 1243394
uaauaauggcccugaagag

SEQ ID NO: 1413853 - RNA, 19 nt, Artificial Sequence
  Description of Artificial Sequence: Synthetic oligonucleotide
  Antisense strand to SEQ ID NO: 1413852
cucuucagggccauuauua

SEQ ID NO: 1413854 - RNA, 19 nt, Artificial Sequence
  Description of Artificial Sequence: Synthetic oligonucleotide
  Sense strand starting at position 80 of SEQ ID NO: 1243395
ccauguacuuguccuguga

SEQ ID NO: 1413855 - RNA, 19 nt, Artificial Sequence
  Description of Artificial Sequence: Synthetic oligonucleotide
  Antisense strand to SEQ ID NO: 1413854
ucacaggacaaguacaugg

SEQ ID NO: 1413856 - RNA, 19 nt, Artificial Sequence
  Description of Artificial Sequence: Synthetic oligonucleotide
  Sense strand starting at position 82 of SEQ ID NO: 1243395
auguacuuguccugugaag

SEQ ID NO: 1413857 - RNA, 19 nt, Artificial Sequence
  Description of Artificial Sequence: Synthetic oligonucleotide
  Antisense strand to SEQ ID NO: 1413856
cuucacaggacaaguacau

SEQ ID NO: 1413858 - RNA, 19 nt, Artificial Sequence
  Description of Artificial Sequence: Synthetic oligonucleotide
  Sense strand starting at position 84 of SEQ ID NO: 1243395
guacuuguccugugaagag

SEQ ID NO: 1413859 - RNA, 19 nt, Artificial Sequence
  Description of Artificial Sequence: Synthetic oligonucleotide
  Antisense strand to SEQ ID NO: 1413858
cucuucacaggacaaguac

SEQ ID NO: 1413860 - RNA, 19 nt, Artificial Sequence
  Description of Artificial Sequence: Synthetic oligonucleotide
  Sense strand starting at position 99 of SEQ ID NO: 1243395
agaguugagugcugugcuu

SEQ ID NO: 1413861 - RNA, 19 nt, Artificial Sequence
  Description of Artificial Sequence: Synthetic oligonucleotide
  Antisense strand to SEQ ID NO: 1413860
aagcacagcacucaacucu

SEQ ID NO: 1413862 - RNA, 19 nt, Artificial Sequence
  Description of Artificial Sequence: Synthetic oligonucleotide
  Sense strand starting at position 228 of SEQ ID NO: 1243395
ucacgugcuuggccucaau

SEQ ID NO: 1413863 - RNA, 19 nt, Artificial Sequence
  Description of Artificial Sequence: Synthetic oligonucleotide
  Antisense strand to SEQ ID NO: 1413862
auugaggccaagcacguga

SEQ ID NO: 1413864 - RNA, 19 nt, Artificial Sequence
  Description of Artificial Sequence: Synthetic oligonucleotide
  Sense strand starting at position 331 of SEQ ID NO: 1243395
ccaggagccggucagagau

SEQ ID NO: 1413865 - RNA, 19 nt, Artificial Sequence
  Description of Artificial Sequence: Synthetic oligonucleotide
  Antisense strand to SEQ ID NO: 1413864
aucucugaccggcuccugg

SEQ ID NO: 1413866 - RNA, 19 nt, Artificial Sequence
  Description of Artificial Sequence: Synthetic oligonucleotide
  Sense strand starting at position 411 of SEQ ID NO: 1243395
uuuccugcuugccaguaaa

SEQ ID NO: 1413867 - RNA, 19 nt, Artificial Sequence
  Description of Artificial Sequence: Synthetic oligonucleotide
  Antisense strand to SEQ ID NO: 1413866
uuuacuggcaagcaggaaa

SEQ ID NO: 1413868 - RNA, 19 nt, Artificial Sequence
  Description of Artificial Sequence: Synthetic oligonucleotide
  Sense strand starting at position 423 of SEQ ID NO: 1243395
caguaaagccuucgauaaa

SEQ ID NO: 1413869 - RNA, 19 nt, Artificial Sequence
  Description of Artificial Sequence: Synthetic oligonucleotide
  Antisense strand to SEQ ID NO: 1413868
uuuaucgaaggcuuuacug

SEQ ID NO: 1413870 - RNA, 19 nt, Artificial Sequence
  Description of Artificial Sequence: Synthetic oligonucleotide
  Sense strand starting at position 424 of SEQ ID NO: 1243395
aguaaagccuucgauaaac

SEQ ID NO: 1413871 - RNA, 19 nt, Artificial Sequence
  Description of Artificial Sequence: Synthetic oligonucleotide
  Antisense strand to SEQ ID NO: 1413870
guuuaucgaaggcuuuacu

SEQ ID NO: 1413872 - RNA, 19 nt, Artificial Sequence
  Description of Artificial Sequence: Synthetic oligonucleotide
  Sense strand starting at position 432 of SEQ ID NO: 1243395
cuucgauaaacgcuugugu

SEQ ID NO: 1413873 - RNA, 19 nt, Artificial Sequence
  Description of Artificial Sequence: Synthetic oligonucleotide
  Antisense strand to SEQ ID NO: 1413872
acacaagcguuuaucgaag

SEQ ID NO: 1413874 - RNA, 19 nt, Artificial Sequence
  Description of Artificial Sequence: Synthetic oligonucleotide
  Sense strand starting at position 452 of SEQ ID NO: 1243395
gggagucggugauucagaa

SEQ ID NO: 1413875 - RNA, 19 nt, Artificial Sequence
  Description of Artificial Sequence: Synthetic oligonucleotide
  Antisense strand to SEQ ID NO: 1413874
uucugaaucaccgacuccc

SEQ ID NO: 1413876 - RNA, 19 nt, Artificial Sequence
  Description of Artificial Sequence: Synthetic oligonucleotide
  Sense strand starting at position 456 of SEQ ID NO: 1243395
gucggugauucagaauuau

SEQ ID NO: 1413877 - RNA, 19 nt, Artificial Sequence
  Description of Artificial Sequence: Synthetic oligonucleotide
  Antisense strand to SEQ ID NO: 1413876
auaauucugaaucaccgac

SEQ ID NO: 1413878 - RNA, 19 nt, Artificial Sequence
  Description of Artificial Sequence: Synthetic oligonucleotide
  Sense strand starting at position 1041 of SEQ ID NO: 1243395
gcgcucuggcuagaaucaa

SEQ ID NO: 1413879 - RNA, 19 nt, Artificial Sequence
  Description of Artificial Sequence: Synthetic oligonucleotide
  Antisense strand to SEQ ID NO: 1413878
uugauucuagccagagcgc

SEQ ID NO: 1413880 - RNA, 19 nt, Artificial Sequence
  Description of Artificial Sequence: Synthetic oligonucleotide
  Sense strand starting at position 1060 of SEQ ID NO: 1243395
gaaacuagguuucucaguu

SEQ ID NO: 1413881 - RNA, 19 nt, Artificial Sequence
  Description of Artificial Sequence: Synthetic oligonucleotide
  Antisense strand to SEQ ID NO: 1413880
aacugagaaaccuaguuuc

SEQ ID NO: 1413882 - RNA, 19 nt, Artificial Sequence
  Description of Artificial Sequence: Synthetic oligonucleotide
  Sense strand starting at position 1064 of SEQ ID NO: 1243395
cuagguuucucaguuguca

SEQ ID NO: 1413883 - RNA, 19 nt, Artificial Sequence
  Description of Artificial Sequence: Synthetic oligonucleotide
  Antisense strand to SEQ ID NO: 1413882
ugacaacugagaaaccuag

SEQ ID NO: 1413884 - RNA, 19 nt, Artificial Sequence
  Description of Artificial Sequence: Synthetic oligonucleotide
  Sense strand starting at position 1066 of SEQ ID NO: 1243395
agguuucucaguugucaaa

SEQ ID NO: 1413885 - RNA, 19 nt, Artificial Sequence
  Description of Artificial Sequence: Synthetic oligonucleotide
  Antisense strand to SEQ ID NO: 1413884
uuugacaacugagaaaccu

SEQ ID NO: 1413886 - RNA, 19 nt, Artificial Sequence
  Description of Artificial Sequence: Synthetic oligonucleotide
  Sense strand starting at position 1114 of SEQ ID NO: 1243395
ggaguacuggcugagccua

SEQ ID NO: 1413887 - RNA, 19 nt, Artificial Sequence
  Description of Artificial Sequence: Synthetic oligonucleotide
  Antisense strand to SEQ ID NO: 1413886
uaggcucagccaguacucc

SEQ ID NO: 1413888 - RNA, 19 nt, Artificial Sequence
  Description of Artificial Sequence: Synthetic oligonucleotide
  Sense strand starting at position 1163 of SEQ ID NO: 1243395
uuuccaaaucuuuggagag

SEQ ID NO: 1413889 - RNA, 19 nt, Artificial Sequence
  Description of Artificial Sequence: Synthetic oligonucleotide
  Antisense strand to SEQ ID NO: 1413888
cucuccaaagauuuggaaa

SEQ ID NO: 1413890 - RNA, 19 nt, Artificial Sequence
  Description of Artificial Sequence: Synthetic oligonucleotide
  Sense strand starting at position 1164 of SEQ ID NO: 1243395
uuccaaaucuuuggagagu

SEQ ID NO: 1413891 - RNA, 19 nt, Artificial Sequence
  Description of Artificial Sequence: Synthetic oligonucleotide
  Antisense strand to SEQ ID NO: 1413890
acucuccaaagauuuggaa

SEQ ID NO: 1413892 - RNA, 19 nt, Artificial Sequence
  Description of Artificial Sequence: Synthetic oligonucleotide
  Sense strand starting at position 2502 of SEQ ID NO: 1243395
uccucagguaucgggaaga

SEQ ID NO: 1413893 - RNA, 19 nt, Artificial Sequence
  Description of Artificial Sequence: Synthetic oligonucleotide
  Antisense strand to SEQ ID NO: 1413892
ucuucccgauaccugagga

SEQ ID NO: 1413894 - RNA, 19 nt, Artificial Sequence
  Description of Artificial Sequence: Synthetic oligonucleotide
  Sense strand starting at position 2545 of SEQ ID NO: 1243395
agcagagaagcaugugaca

SEQ ID NO: 1413895 - RNA, 19 nt, Artificial Sequence
  Description of Artificial Sequence: Synthetic oligonucleotide
  Antisense strand to SEQ ID NO: 1413894
ugucacaugcuucucugcu

SEQ ID NO: 1413896 - RNA, 19 nt, Artificial Sequence
  Description of Artificial Sequence: Synthetic oligonucleotide
  Sense strand starting at position 2934 of SEQ ID NO: 1243395
aggcguucuugucugugaa

SEQ ID NO: 1413897 - RNA, 19 nt, Artificial Sequence
  Description of Artificial Sequence: Synthetic oligonucleotide
  Antisense strand to SEQ ID NO: 1413896
uucacagacaagaacgccu

SEQ ID NO: 1413898 - RNA, 19 nt, Artificial Sequence
  Description of Artificial Sequence: Synthetic oligonucleotide
  Sense strand starting at position 2935 of SEQ ID NO: 1243395
ggcguucuugucugugaag

SEQ ID NO: 1413899 - RNA, 19 nt, Artificial Sequence
  Description of Artificial Sequence: Synthetic oligonucleotide
  Antisense strand to SEQ ID NO: 1413898
cuucacagacaagaacgcc

SEQ ID NO: 1413900 - RNA, 19 nt, Artificial Sequence
  Description of Artificial Sequence: Synthetic oligonucleotide
  Sense strand starting at position 8 of SEQ ID NO: 1243396
uggaauaguccugguagca

SEQ ID NO: 1413901 - RNA, 19 nt, Artificial Sequence
  Description of Artificial Sequence: Synthetic oligonucleotide
  Antisense strand to SEQ ID NO: 1413900
ugcuaccaggacuauucca

SEQ ID NO: 1413902 - RNA, 19 nt, Artificial Sequence
  Description of Artificial Sequence: Synthetic oligonucleotide
  Sense strand starting at position 183 of SEQ ID NO: 1243396
augaaagccugcucugcaa

SEQ ID NO: 1413903 - RNA, 19 nt, Artificial Sequence
  Description of Artificial Sequence: Synthetic oligonucleotide
  Antisense strand to SEQ ID NO: 1413902
uugcagagcaggcuuucau

SEQ ID NO: 1413904 - RNA, 19 nt, Artificial Sequence
  Description of Artificial Sequence: Synthetic oligonucleotide
  Sense strand starting at position 274 of SEQ ID NO: 1243396
gugugacuuuggucuaauu

SEQ ID NO: 1413905 - RNA, 19 nt, Artificial Sequence
  Description of Artificial Sequence: Synthetic oligonucleotide
  Antisense strand to SEQ ID NO: 1413904
aauuagaccaaagucacac

SEQ ID NO: 1413906 - RNA, 19 nt, Artificial Sequence
  Description of Artificial Sequence: Synthetic oligonucleotide
  Sense strand starting at position 276 of SEQ ID NO: 1243396
gugacuuuggucuaauuac

SEQ ID NO: 1413907 - RNA, 19 nt, Artificial Sequence
  Description of Artificial Sequence: Synthetic oligonucleotide
  Antisense strand to SEQ ID NO: 1413906
guaauuagaccaaagucac

SEQ ID NO: 1413908 - RNA, 19 nt, Artificial Sequence
  Description of Artificial Sequence: Synthetic oligonucleotide
  Sense strand starting at position 307 of SEQ ID NO: 1243396
agcuuaguguccuuaucua

SEQ ID NO: 1413909 - RNA, 19 nt, Artificial Sequence
  Description of Artificial Sequence: Synthetic oligonucleotide
  Antisense strand to SEQ ID NO: 1413908
uagauaaggacacuaagcu

SEQ ID NO: 1413910 - RNA, 19 nt, Artificial Sequence
  Description of Artificial Sequence: Synthetic oligonucleotide
  Sense strand starting at position 385 of SEQ ID NO: 1243396
gauaaccagucucauagga

SEQ ID NO: 1413911 - RNA, 19 nt, Artificial Sequence
  Description of Artificial Sequence: Synthetic oligonucleotide
  Antisense strand to SEQ ID NO: 1413910
uccuaugagacugguuauc

SEQ ID NO: 1413912 - RNA, 19 nt, Artificial Sequence
  Description of Artificial Sequence: Synthetic oligonucleotide
  Sense strand starting at position 421 of SEQ ID NO: 1243396
augagugaauaugcauaaa

SEQ ID NO: 1413913 - RNA, 19 nt, Artificial Sequence
  Description of Artificial Sequence: Synthetic oligonucleotide
  Antisense strand to SEQ ID NO: 1413912
uuuaugcauauucacucau

SEQ ID NO: 1413914 - RNA, 19 nt, Artificial Sequence
  Description of Artificial Sequence: Synthetic oligonucleotide
  Sense strand starting at position 473 of SEQ ID NO: 1243396
uuccucaugccugagugua

SEQ ID NO: 1413915 - RNA, 19 nt, Artificial Sequence
  Description of Artificial Sequence: Synthetic oligonucleotide
  Antisense strand to SEQ ID NO: 1413914
uacacucaggcaugaggaa

SEQ ID NO: 1413916 - RNA, 19 nt, Artificial Sequence
  Description of Artificial Sequence: Synthetic oligonucleotide
  Sense strand starting at position 475 of SEQ ID NO: 1243396
ccucaugccugaguguaua

SEQ ID NO: 1413917 - RNA, 19 nt, Artificial Sequence
  Description of Artificial Sequence: Synthetic oligonucleotide
  Antisense strand to SEQ ID NO: 1413916
uauacacucaggcaugagg

SEQ ID NO: 1413918 - RNA, 19 nt, Artificial Sequence
  Description of Artificial Sequence: Synthetic oligonucleotide
  Sense strand starting at position 592 of SEQ ID NO: 1243396
gcggucacuugccuccaaa

SEQ ID NO: 1413919 - RNA, 19 nt, Artificial Sequence
  Description of Artificial Sequence: Synthetic oligonucleotide
  Antisense strand to SEQ ID NO: 1413918
uuuggaggcaagugaccgc

SEQ ID NO: 1413920 - RNA, 19 nt, Artificial Sequence
  Description of Artificial Sequence: Synthetic oligonucleotide
  Sense strand starting at position 616 of SEQ ID NO: 1243396
ucuucucgucugucuguaa

SEQ ID NO: 1413921 - RNA, 19 nt, Artificial Sequence
  Description of Artificial Sequence: Synthetic oligonucleotide
  Antisense strand to SEQ ID NO: 1413920
uuacagacagacgagaaga

SEQ ID NO: 1413922 - RNA, 19 nt, Artificial Sequence
  Description of Artificial Sequence: Synthetic oligonucleotide
  Sense strand starting at position 711 of SEQ ID NO: 1243396
agcagagaccugugucaac

SEQ ID NO: 1413923 - RNA, 19 nt, Artificial Sequence
  Description of Artificial Sequence: Synthetic oligonucleotide
  Antisense strand to SEQ ID NO: 1413922
guugacacaggucucugcu

SEQ ID NO: 1413924 - RNA, 19 nt, Artificial Sequence
  Description of Artificial Sequence: Synthetic oligonucleotide
  Sense strand starting at position 714 of SEQ ID NO: 1243396
agagaccugugucaaccua

SEQ ID NO: 1413925 - RNA, 19 nt, Artificial Sequence
  Description of Artificial Sequence: Synthetic oligonucleotide
  Antisense strand to SEQ ID NO: 1413924
uagguugacacaggucucu

SEQ ID NO: 1413926 - RNA, 19 nt, Artificial Sequence
  Description of Artificial Sequence: Synthetic oligonucleotide
  Sense strand starting at position 862 of SEQ ID NO: 1243396
cccaccaguucccuguaaa

SEQ ID NO: 1413927 - RNA, 19 nt, Artificial Sequence
  Description of Artificial Sequence: Synthetic oligonucleotide
  Antisense strand to SEQ ID NO: 1413926
uuuacagggaacugguggg

SEQ ID NO: 1413928 - RNA, 19 nt, Artificial Sequence
  Description of Artificial Sequence: Synthetic oligonucleotide
  Sense strand starting at position 863 of SEQ ID NO: 1243396
ccaccaguucccuguaaag

SEQ ID NO: 1413929 - RNA, 19 nt, Artificial Sequence
  Description of Artificial Sequence: Synthetic oligonucleotide
  Antisense strand to SEQ ID NO: 1413928
cuuuacagggaacuggugg

SEQ ID NO: 1413930 - RNA, 19 nt, Artificial Sequence
  Description of Artificial Sequence: Synthetic oligonucleotide
  Sense strand starting at position 875 of SEQ ID NO: 1243396
uguaaaggcucagugcauu

SEQ ID NO: 1413931 - RNA, 19 nt, Artificial Sequence
  Description of Artificial Sequence: Synthetic oligonucleotide
  Antisense strand to SEQ ID NO: 1413930
aaugcacugagccuuuaca

SEQ ID NO: 1413932 - RNA, 19 nt, Artificial Sequence
  Description of Artificial Sequence: Synthetic oligonucleotide
  Sense strand starting at position 911 of SEQ ID NO: 1243396
ccgguacccuuauuaacau

SEQ ID NO: 1413933 - RNA, 19 nt, Artificial Sequence
  Description of Artificial Sequence: Synthetic oligonucleotide
  Antisense strand to SEQ ID NO: 1413932
auguuaauaaggguaccgg

SEQ ID NO: 1413934 - RNA, 19 nt, Artificial Sequence
  Description of Artificial Sequence: Synthetic oligonucleotide
  Sense strand starting at position 912 of SEQ ID NO: 1243396
cgguacccuuauuaacaua

SEQ ID NO: 1413935 - RNA, 19 nt, Artificial Sequence
  Description of Artificial Sequence: Synthetic oligonucleotide
  Antisense strand to SEQ ID NO: 1413934
uauguuaauaaggguaccg

SEQ ID NO: 1413936 - RNA, 19 nt, Artificial Sequence
  Description of Artificial Sequence: Synthetic oligonucleotide
  Sense strand starting at position 1022 of SEQ ID NO: 1243396
ugaaaccauucucaucgaa

SEQ ID NO: 1413937 - RNA, 19 nt, Artificial Sequence
  Description of Artificial Sequence: Synthetic oligonucleotide
  Antisense strand to SEQ ID NO: 1413936
uucgaugagaaugguuuca

SEQ ID NO: 1413938 - RNA, 19 nt, Artificial Sequence
  Description of Artificial Sequence: Synthetic oligonucleotide
  Sense strand starting at position 1320 of SEQ ID NO: 1243396
cucccugucucggagagau

SEQ ID NO: 1413939 - RNA, 19 nt, Artificial Sequence
  Description of Artificial Sequence: Synthetic oligonucleotide
  Antisense strand to SEQ ID NO: 1413938
aucucuccgagacagggag

SEQ ID NO: 1413940 - RNA, 19 nt, Artificial Sequence
  Description of Artificial Sequence: Synthetic oligonucleotide
  Sense strand starting at position 1496 of SEQ ID NO: 1243396
ccaugcuucucuuuggcaa

SEQ ID NO: 1413941 - RNA, 19 nt, Artificial Sequence
  Description of Artificial Sequence: Synthetic oligonucleotide
  Antisense strand to SEQ ID NO: 1413940
uugccaaagagaagcaugg

SEQ ID NO: 1413942 - RNA, 19 nt, Artificial Sequence
  Description of Artificial Sequence: Synthetic oligonucleotide
  Sense strand starting at position 1543 of SEQ ID NO: 1243396
gguuucuccugauauccac

SEQ ID NO: 1413943 - RNA, 19 nt, Artificial Sequence
  Description of Artificial Sequence: Synthetic oligonucleotide
  Antisense strand to SEQ ID NO: 1413942
guggauaucaggagaaacc

SEQ ID NO: 1413944 - RNA, 19 nt, Artificial Sequence
  Description of Artificial Sequence: Synthetic oligonucleotide
  Sense strand starting at position 1707 of SEQ ID NO: 1243396
acaucaggcgccugaagau

SEQ ID NO: 1413945 - RNA, 19 nt, Artificial Sequence
  Description of Artificial Sequence: Synthetic oligonucleotide
  Antisense strand to SEQ ID NO: 1413944
aucuucaggcgccugaugu

SEQ ID NO: 1413946 - RNA, 19 nt, Artificial Sequence
  Description of Artificial Sequence: Synthetic oligonucleotide
  Sense strand starting at position 2460 of SEQ ID NO: 1243396
gaucccuuuccaggagaca

SEQ ID NO: 1413947 - RNA, 19 nt, Artificial Sequence
  Description of Artificial Sequence: Synthetic oligonucleotide
  Antisense strand to SEQ ID NO: 1413946
ugucuccuggaaagggauc

SEQ ID NO: 1413948 - RNA, 19 nt, Artificial Sequence
  Description of Artificial Sequence: Synthetic oligonucleotide
  Sense strand starting at position 2562 of SEQ ID NO: 1243396
gcaggaggcucuuuggaca

SEQ ID NO: 1413949 - RNA, 19 nt, Artificial Sequence
  Description of Artificial Sequence: Synthetic oligonucleotide
  Antisense strand to SEQ ID NO: 1413948
uguccaaagagccuccugc

SEQ ID NO: 1413950 - RNA, 19 nt, Artificial Sequence
  Description of Artificial Sequence: Synthetic oligonucleotide
  Sense strand starting at position 2567 of SEQ ID NO: 1243396
aggcucuuuggacacuaua

SEQ ID NO: 1413951 - RNA, 19 nt, Artificial Sequence
  Description of Artificial Sequence: Synthetic oligonucleotide
  Antisense strand to SEQ ID NO: 1413950
uauaguguccaaagagccu

SEQ ID NO: 1413952 - RNA, 19 nt, Artificial Sequence
  Description of Artificial Sequence: Synthetic oligonucleotide
  Sense strand starting at position 2770 of SEQ ID NO: 1243396
ugcagauggcucugacugu

SEQ ID NO: 1413953 - RNA, 19 nt, Artificial Sequence
  Description of Artificial Sequence: Synthetic oligonucleotide
  Antisense strand to SEQ ID NO: 1413952
acagucagagccaucugca

SEQ ID NO: 1413954 - RNA, 19 nt, Artificial Sequence
  Description of Artificial Sequence: Synthetic oligonucleotide
  Sense strand starting at position 2774 of SEQ ID NO: 1243396
gauggcucugacuguugaa

SEQ ID NO: 1413955 - RNA, 19 nt, Artificial Sequence
  Description of Artificial Sequence: Synthetic oligonucleotide
  Antisense strand to SEQ ID NO: 1413954
uucaacagucagagccauc

SEQ ID NO: 1413956 - RNA, 19 nt, Artificial Sequence
  Description of Artificial Sequence: Synthetic oligonucleotide
  Sense strand starting at position 2944 of SEQ ID NO: 1243396
ggucuugacucucaaucga

SEQ ID NO: 1413957 - RNA, 19 nt, Artificial Sequence
  Description of Artificial Sequence: Synthetic oligonucleotide
  Antisense strand to SEQ ID NO: 1413956
ucgauugagagucaagacc

SEQ ID NO: 1413958 - RNA, 19 nt, Artificial Sequence
  Description of Artificial Sequence: Synthetic oligonucleotide
  Sense strand starting at position 3019 of SEQ ID NO: 1243396
ggcauucucuugccaggua

SEQ ID NO: 1413959 - RNA, 19 nt, Artificial Sequence
  Description of Artificial Sequence: Synthetic oligonucleotide
  Antisense strand to SEQ ID NO: 1413958
uaccuggcaagagaaugcc

SEQ ID NO: 1413960 - RNA, 19 nt, Artificial Sequence
  Description of Artificial Sequence: Synthetic oligonucleotide
  Sense strand starting at position 3054 of SEQ ID NO: 1243396
gugccaaaucugugucuga

SEQ ID NO: 1413961 - RNA, 19 nt, Artificial Sequence
  Description of Artificial Sequence: Synthetic oligonucleotide
  Antisense strand to SEQ ID NO: 1413960
ucagacacagauuuggcac

SEQ ID NO: 1413962 - RNA, 19 nt, Artificial Sequence
  Description of Artificial Sequence: Synthetic oligonucleotide
  Sense strand starting at position 3055 of SEQ ID NO: 1243396
ugccaaaucugugucugau

SEQ ID NO: 1413963 - RNA, 19 nt, Artificial Sequence
  Description of Artificial Sequence: Synthetic oligonucleotide
  Antisense strand to SEQ ID NO: 1413962
aucagacacagauuuggca

SEQ ID NO: 1413964 - RNA, 19 nt, Artificial Sequence
  Description of Artificial Sequence: Synthetic oligonucleotide
  Sense strand starting at position 3057 of SEQ ID NO: 1243396
ccaaaucugugucugauaa

SEQ ID NO: 1413965 - RNA, 19 nt, Artificial Sequence
  Description of Artificial Sequence: Synthetic oligonucleotide
  Antisense strand to SEQ ID NO: 1413964
uuaucagacacagauuugg

SEQ ID NO: 1413966 - RNA, 19 nt, Artificial Sequence
  Description of Artificial Sequence: Synthetic oligonucleotide
  Sense strand starting at position 3195 of SEQ ID NO: 1243396
caaccugaucugugagugu

SEQ ID NO: 1413967 - RNA, 19 nt, Artificial Sequence
  Description of Artificial Sequence: Synthetic oligonucleotide
  Antisense strand to SEQ ID NO: 1413966
acacucacagaucagguug

SEQ ID NO: 1413968 - RNA, 19 nt, Artificial Sequence
  Description of Artificial Sequence: Synthetic oligonucleotide
  Sense strand starting at position 3204 of SEQ ID NO: 1243396
cugugaguguugucuccca

SEQ ID NO: 1413969 - RNA, 19 nt, Artificial Sequence
  Description of Artificial Sequence: Synthetic oligonucleotide
  Antisense strand to SEQ ID NO: 1413968
ugggagacaacacucacag

SEQ ID NO: 1413970 - RNA, 19 nt, Artificial Sequence
  Description of Artificial Sequence: Synthetic oligonucleotide
  Sense strand starting at position 3748 of SEQ ID NO: 1243396
gagccaugaguagauccau

SEQ ID NO: 1413971 - RNA, 19 nt, Artificial Sequence
  Description of Artificial Sequence: Synthetic oligonucleotide
  Antisense strand to SEQ ID NO: 1413970
auggaucuacucauggcuc

SEQ ID NO: 1413972 - RNA, 19 nt, Artificial Sequence
  Description of Artificial Sequence: Synthetic oligonucleotide
  Sense strand starting at position 3754 of SEQ ID NO: 1243396
ugaguagauccaugacuac

SEQ ID NO: 1413973 - RNA, 19 nt, Artificial Sequence
  Description of Artificial Sequence: Synthetic oligonucleotide
  Antisense strand to SEQ ID NO: 1413972
guagucauggaucuacuca

SEQ ID NO: 1413974 - RNA, 19 nt, Artificial Sequence
  Description of Artificial Sequence: Synthetic oligonucleotide
  Sense strand starting at position 3838 of SEQ ID NO: 1243396
uguguucucccucagagau

SEQ ID NO: 1413975 - RNA, 19 nt, Artificial Sequence
  Description of Artificial Sequence: Synthetic oligonucleotide
  Antisense strand to SEQ ID NO: 1413974
aucucugagggagaacaca

SEQ ID NO: 1413976 - RNA, 19 nt, Artificial Sequence
  Description of Artificial Sequence: Synthetic oligonucleotide
  Sense strand starting at position 3929 of SEQ ID NO: 1243396
gcacguucugggcauccaa

SEQ ID NO: 1413977 - RNA, 19 nt, Artificial Sequence
  Description of Artificial Sequence: Synthetic oligonucleotide
  Antisense strand to SEQ ID NO: 1413976
uuggaugcccagaacgugc

SEQ ID NO: 1413978 - RNA, 19 nt, Artificial Sequence
  Description of Artificial Sequence: Synthetic oligonucleotide
  Sense strand starting at position 3940 of SEQ ID NO: 1243396
gcauccaacguguugcauu

SEQ ID NO: 1413979 - RNA, 19 nt, Artificial Sequence
  Description of Artificial Sequence: Synthetic oligonucleotide
  Antisense strand to SEQ ID NO: 1413978
aaugcaacacguuggaugc

SEQ ID NO: 1413980 - RNA, 19 nt, Artificial Sequence
  Description of Artificial Sequence: Synthetic oligonucleotide
  Sense strand starting at position 170 of SEQ ID NO: 1243397
acaugugucccacagccaa

SEQ ID NO: 1413981 - RNA, 19 nt, Artificial Sequence
  Description of Artificial Sequence: Synthetic oligonucleotide
  Antisense strand to SEQ ID NO: 1413980
uuggcugugggacacaugu

SEQ ID NO: 1413982 - RNA, 19 nt, Artificial Sequence
  Description of Artificial Sequence: Synthetic oligonucleotide
  Sense strand starting at position 237 of SEQ ID NO: 1243397
aauaaagcaggguguuaua

SEQ ID NO: 1413983 - RNA, 19 nt, Artificial Sequence
  Description of Artificial Sequence: Synthetic oligonucleotide
  Antisense strand to SEQ ID NO: 1413982
uauaacacccugcuuuauu

SEQ ID NO: 1413984 - RNA, 19 nt, Artificial Sequence
  Description of Artificial Sequence: Synthetic oligonucleotide
  Sense strand starting at position 247 of SEQ ID NO: 1243397
gguguuauaaccggacuga

SEQ ID NO: 1413985 - RNA, 19 nt, Artificial Sequence
  Description of Artificial Sequence: Synthetic oligonucleotide
  Antisense strand to SEQ ID NO: 1413984
ucaguccgguuauaacacc

SEQ ID NO: 1413986 - RNA, 19 nt, Artificial Sequence
  Description of Artificial Sequence: Synthetic oligonucleotide
  Sense strand starting at position 248 of SEQ ID NO: 1243397
guguuauaaccggacugag

SEQ ID NO: 1413987 - RNA, 19 nt, Artificial Sequence
  Description of Artificial Sequence: Synthetic oligonucleotide
  Antisense strand to SEQ ID NO: 1413986
cucaguccgguuauaacac

SEQ ID NO: 1413988 - RNA, 19 nt, Artificial Sequence
  Description of Artificial Sequence: Synthetic oligonucleotide
  Sense strand starting at position 416 of SEQ ID NO: 1243397
gcugaaauguccucauuuc

SEQ ID NO: 1413989 - RNA, 19 nt, Artificial Sequence
  Description of Artificial Sequence: Synthetic oligonucleotide
  Antisense strand to SEQ ID NO: 1413988
gaaaugaggacauuucagc

SEQ ID NO: 1413990 - RNA, 19 nt, Artificial Sequence
  Description of Artificial Sequence: Synthetic oligonucleotide
  Sense strand starting at position 514 of SEQ ID NO: 1243397
gcucuauggcugugggaag

SEQ ID NO: 1413991 - RNA, 19 nt, Artificial Sequence
  Description of Artificial Sequence: Synthetic oligonucleotide
  Antisense strand to SEQ ID NO: 1413990
cuucccacagccauagagc

SEQ ID NO: 1413992 - RNA, 19 nt, Artificial Sequence
  Description of Artificial Sequence: Synthetic oligonucleotide
  Sense strand starting at position 549 of SEQ ID NO: 1243397
gguacuugucuccauagga

SEQ ID NO: 1413993 - RNA, 19 nt, Artificial Sequence
  Description of Artificial Sequence: Synthetic oligonucleotide
  Antisense strand to SEQ ID NO: 1413992
uccuauggagacaaguacc

SEQ ID NO: 1413994 - RNA, 19 nt, Artificial Sequence
  Description of Artificial Sequence: Synthetic oligonucleotide
  Sense strand starting at position 619 of SEQ ID NO: 1243397
aggagaaaguaaguuuauu

SEQ ID NO: 1413995 - RNA, 19 nt, Artificial Sequence
  Description of Artificial Sequence: Synthetic oligonucleotide
  Antisense strand to SEQ ID NO: 1413994
aauaaacuuacuuucuccu

SEQ ID NO: 1413996 - RNA, 19 nt, Artificial Sequence
  Description of Artificial Sequence: Synthetic oligonucleotide
  Sense strand starting at position 644 of SEQ ID NO: 1243397
ugcauuacaucacugaguu

SEQ ID NO: 1413997 - RNA, 19 nt, Artificial Sequence
  Description of Artificial Sequence: Synthetic oligonucleotide
  Antisense strand to SEQ ID NO: 1413996
aacucagugauguaaugca

SEQ ID NO: 1413998 - RNA, 19 nt, Artificial Sequence
  Description of Artificial Sequence: Synthetic oligonucleotide
  Sense strand starting at position 645 of SEQ ID NO: 1243397
gcauuacaucacugaguuc

SEQ ID NO: 1413999 - RNA, 19 nt, Artificial Sequence
  Description of Artificial Sequence: Synthetic oligonucleotide
  Antisense strand to SEQ ID NO: 1413998
gaacucagugauguaaugc

SEQ ID NO: 1414000 - RNA, 19 nt, Artificial Sequence
  Description of Artificial Sequence: Synthetic oligonucleotide
  Sense strand starting at position 729 of SEQ ID NO: 1243397
gcgauaacuguguaaguaa

SEQ ID NO: 1414001 - RNA, 19 nt, Artificial Sequence
  Description of Artificial Sequence: Synthetic oligonucleotide
  Antisense strand to SEQ ID NO: 1414000
uuacuuacacaguuaucgc

SEQ ID NO: 1414002 - RNA, 19 nt, Artificial Sequence
  Description of Artificial Sequence: Synthetic oligonucleotide
  Sense strand starting at position 782 of SEQ ID NO: 1243397
ggacuugugcuguggagag

SEQ ID NO: 1414003 - RNA, 19 nt, Artificial Sequence
  Description of Artificial Sequence: Synthetic oligonucleotide
  Antisense strand to SEQ ID NO: 1414002
cucuccacagcacaagucc

SEQ ID NO: 1414004 - RNA, 19 nt, Artificial Sequence
  Description of Artificial Sequence: Synthetic oligonucleotide
  Sense strand starting at position 784 of SEQ ID NO: 1243397
acuugugcuguggagagua

SEQ ID NO: 1414005 - RNA, 19 nt, Artificial Sequence
  Description of Artificial Sequence: Synthetic oligonucleotide
  Antisense strand to SEQ ID NO: 1414004
uacucuccacagcacaagu

SEQ ID NO: 1414006 - RNA, 19 nt, Artificial Sequence
  Description of Artificial Sequence: Synthetic oligonucleotide
  Sense strand starting at position 846 of SEQ ID NO: 1243397
cugugugaccuggauauau

SEQ ID NO: 1414007 - RNA, 19 nt, Artificial Sequence
  Description of Artificial Sequence: Synthetic oligonucleotide
  Antisense strand to SEQ ID NO: 1414006
auauauccaggucacacag

SEQ ID NO: 1414008 - RNA, 19 nt, Artificial Sequence
  Description of Artificial Sequence: Synthetic oligonucleotide
  Sense strand starting at position 848 of SEQ ID NO: 1243397
gugugaccuggauauauca

SEQ ID NO: 1414009 - RNA, 19 nt, Artificial Sequence
  Description of Artificial Sequence: Synthetic oligonucleotide
  Antisense strand to SEQ ID NO: 1414008
ugauauauccaggucacac

SEQ ID NO: 1414010 - RNA, 19 nt, Artificial Sequence
  Description of Artificial Sequence: Synthetic oligonucleotide
  Sense strand starting at position 855 of SEQ ID NO: 1243397
cuggauauaucacuggcuu

SEQ ID NO: 1414011 - RNA, 19 nt, Artificial Sequence
  Description of Artificial Sequence: Synthetic oligonucleotide
  Antisense strand to SEQ ID NO: 1414010
aagccagugauauauccag

SEQ ID NO: 1414012 - RNA, 19 nt, Artificial Sequence
  Description of Artificial Sequence: Synthetic oligonucleotide
  Sense strand starting at position 856 of SEQ ID NO: 1243397
uggauauaucacuggcuuc

SEQ ID NO: 1414013 - RNA, 19 nt, Artificial Sequence
  Description of Artificial Sequence: Synthetic oligonucleotide
  Antisense strand to SEQ ID NO: 1414012
gaagccagugauauaucca

SEQ ID NO: 1414014 - RNA, 19 nt, Artificial Sequence
  Description of Artificial Sequence: Synthetic oligonucleotide
  Sense strand starting at position 925 of SEQ ID NO: 1243397
gaaggaucugucugagguc

SEQ ID NO: 1414015 - RNA, 19 nt, Artificial Sequence
  Description of Artificial Sequence: Synthetic oligonucleotide
  Antisense strand to SEQ ID NO: 1414014
gaccucagacagauccuuc

SEQ ID NO: 1414016 - RNA, 19 nt, Artificial Sequence
  Description of Artificial Sequence: Synthetic oligonucleotide
  Sense strand starting at position 2095 of SEQ ID NO: 1243397
acggaaaucugguugccaa

SEQ ID NO: 1414017 - RNA, 19 nt, Artificial Sequence
  Description of Artificial Sequence: Synthetic oligonucleotide
  Antisense strand to SEQ ID NO: 1414016
uuggcaaccagauuuccgu

SEQ ID NO: 1414018 - RNA, 19 nt, Artificial Sequence
  Description of Artificial Sequence: Synthetic oligonucleotide
  Sense strand starting at position 2096 of SEQ ID NO: 1243397
cggaaaucugguugccaaa

SEQ ID NO: 1414019 - RNA, 19 nt, Artificial Sequence
  Description of Artificial Sequence: Synthetic oligonucleotide
  Antisense strand to SEQ ID NO: 1414018
uuuggcaaccagauuuccg

SEQ ID NO: 1414020 - RNA, 19 nt, Artificial Sequence
  Description of Artificial Sequence: Synthetic oligonucleotide
  Sense strand starting at position 2123 of SEQ ID NO: 1243397
gaauacgucauuuguacgu

SEQ ID NO: 1414021 - RNA, 19 nt, Artificial Sequence
  Description of Artificial Sequence: Synthetic oligonucleotide
  Antisense strand to SEQ ID NO: 1414020
acguacaaaugacguauuc

SEQ ID NO: 1414022 - RNA, 19 nt, Artificial Sequence
  Description of Artificial Sequence: Synthetic oligonucleotide
  Sense strand starting at position 2127 of SEQ ID NO: 1243397
acgucauuuguacguaauc

SEQ ID NO: 1414023 - RNA, 19 nt, Artificial Sequence
  Description of Artificial Sequence: Synthetic oligonucleotide
  Antisense strand to SEQ ID NO: 1414022
gauuacguacaaaugacgu

SEQ ID NO: 1414024 - RNA, 19 nt, Artificial Sequence
  Description of Artificial Sequence: Synthetic oligonucleotide
  Sense strand starting at position 2132 of SEQ ID NO: 1243397
auuuguacguaauccgaga

SEQ ID NO: 1414025 - RNA, 19 nt, Artificial Sequence
  Description of Artificial Sequence: Synthetic oligonucleotide
  Antisense strand to SEQ ID NO: 1414024
ucucggauuacguacaaau

SEQ ID NO: 1414026 - RNA, 19 nt, Artificial Sequence
  Description of Artificial Sequence: Synthetic oligonucleotide
  Sense strand starting at position 2503 of SEQ ID NO: 1243397
gggaaauaauaggauccga

SEQ ID NO: 1414027 - RNA, 19 nt, Artificial Sequence
  Description of Artificial Sequence: Synthetic oligonucleotide
  Antisense strand to SEQ ID NO: 1414026
ucggauccuauuauuuccc

SEQ ID NO: 1414028 - RNA, 19 nt, Artificial Sequence
  Description of Artificial Sequence: Synthetic oligonucleotide
  Sense strand starting at position 2519 of SEQ ID NO: 1243397
cgagucgucagcgucagaa

SEQ ID NO: 1414029 - RNA, 19 nt, Artificial Sequence
  Description of Artificial Sequence: Synthetic oligonucleotide
  Antisense strand to SEQ ID NO: 1414028
uucugacgcugacgacucg

SEQ ID NO: 1414030 - RNA, 19 nt, Artificial Sequence
  Description of Artificial Sequence: Synthetic oligonucleotide
  Sense strand starting at position 2595 of SEQ ID NO: 1243397
agaaaucucuucuuccgca

SEQ ID NO: 1414031 - RNA, 19 nt, Artificial Sequence
  Description of Artificial Sequence: Synthetic oligonucleotide
  Antisense strand to SEQ ID NO: 1414030
ugcggaagaagagauuucu

SEQ ID NO: 1414032 - RNA, 19 nt, Artificial Sequence
  Description of Artificial Sequence: Synthetic oligonucleotide
  Sense strand starting at position 2718 of SEQ ID NO: 1243397
ggcagcucaggcuaagaaa

SEQ ID NO: 1414033 - RNA, 19 nt, Artificial Sequence
  Description of Artificial Sequence: Synthetic oligonucleotide
  Antisense strand to SEQ ID NO: 1414032
uuucuuagccugagcugcc

SEQ ID NO: 1414034 - RNA, 19 nt, Artificial Sequence
  Description of Artificial Sequence: Synthetic oligonucleotide
  Sense strand starting at position 2836 of SEQ ID NO: 1243397
gggaguuccuagcccagua

SEQ ID NO: 1414035 - RNA, 19 nt, Artificial Sequence
  Description of Artificial Sequence: Synthetic oligonucleotide
  Antisense strand to SEQ ID NO: 1414034
uacugggcuaggaacuccc

SEQ ID NO: 1414036 - RNA, 19 nt, Artificial Sequence
  Description of Artificial Sequence: Synthetic oligonucleotide
  Sense strand starting at position 2957 of SEQ ID NO: 1243397
aggcuuucugacugugaca

SEQ ID NO: 1414037 - RNA, 19 nt, Artificial Sequence
  Description of Artificial Sequence: Synthetic oligonucleotide
  Antisense strand to SEQ ID NO: 1414036
ugucacagucagaaagccu

SEQ ID NO: 1414038 - RNA, 19 nt, Artificial Sequence
  Description of Artificial Sequence: Synthetic oligonucleotide
  Sense strand starting at position 2986 of SEQ ID NO: 1243397
ccuggcuaucuagauauuc

SEQ ID NO: 1414039 - RNA, 19 nt, Artificial Sequence
  Description of Artificial Sequence: Synthetic oligonucleotide
  Antisense strand to SEQ ID NO: 1414038
gaauaucuagauagccagg

SEQ ID NO: 1414040 - RNA, 19 nt, Artificial Sequence
  Description of Artificial Sequence: Synthetic oligonucleotide
  Sense strand starting at position 3201 of SEQ ID NO: 1243397
cuguucuagggcuggagau

SEQ ID NO: 1414041 - RNA, 19 nt, Artificial Sequence
  Description of Artificial Sequence: Synthetic oligonucleotide
  Antisense strand to SEQ ID NO: 1414040
aucuccagcccuagaacag

SEQ ID NO: 1414042 - RNA, 19 nt, Artificial Sequence
  Description of Artificial Sequence: Synthetic oligonucleotide
  Sense strand starting at position 3202 of SEQ ID NO: 1243397
uguucuagggcuggagaua

SEQ ID NO: 1414043 - RNA, 19 nt, Artificial Sequence
  Description of Artificial Sequence: Synthetic oligonucleotide
  Antisense strand to SEQ ID NO: 1414042
uaucuccagcccuagaaca

SEQ ID NO: 1414044 - RNA, 19 nt, Artificial Sequence
  Description of Artificial Sequence: Synthetic oligonucleotide
  Sense strand starting at position 3246 of SEQ ID NO: 1243397
ccugcacucguggaacuua

SEQ ID NO: 1414045 - RNA, 19 nt, Artificial Sequence
  Description of Artificial Sequence: Synthetic oligonucleotide
  Antisense strand to SEQ ID NO: 1414044
uaaguuccacgagugcagg

SEQ ID NO: 1414046 - RNA, 19 nt, Artificial Sequence
  Description of Artificial Sequence: Synthetic oligonucleotide
  Sense strand starting at position 3305 of SEQ ID NO: 1243397
cagcauagccgggaaugaa

SEQ ID NO: 1414047 - RNA, 19 nt, Artificial Sequence
  Description of Artificial Sequence: Synthetic oligonucleotide
  Antisense strand to SEQ ID NO: 1414046
uucauucccggcuaugcug

SEQ ID NO: 1414048 - RNA, 19 nt, Artificial Sequence
  Description of Artificial Sequence: Synthetic oligonucleotide
  Sense strand starting at position 3346 of SEQ ID NO: 1243397
ggcucuguccaggaagcuu

SEQ ID NO: 1414049 - RNA, 19 nt, Artificial Sequence
  Description of Artificial Sequence: Synthetic oligonucleotide
  Antisense strand to SEQ ID NO: 1414048
aagcuuccuggacagagcc

SEQ ID NO: 1414050 - RNA, 19 nt, Artificial Sequence
  Description of Artificial Sequence: Synthetic oligonucleotide
  Sense strand starting at position 3360 of SEQ ID NO: 1243397
agcuucugugaagguacaa

SEQ ID NO: 1414051 - RNA, 19 nt, Artificial Sequence
  Description of Artificial Sequence: Synthetic oligonucleotide
  Antisense strand to SEQ ID NO: 1414050
uuguaccuucacagaagcu

SEQ ID NO: 1414052 - RNA, 19 nt, Artificial Sequence
  Description of Artificial Sequence: Synthetic oligonucleotide
  Sense strand starting at position 3424 of SEQ ID NO: 1243397
ccuagauuccugggacuga

SEQ ID NO: 1414053 - RNA, 19 nt, Artificial Sequence
  Description of Artificial Sequence: Synthetic oligonucleotide
  Antisense strand to SEQ ID NO: 1414052
ucagucccaggaaucuagg

SEQ ID NO: 1414054 - RNA, 19 nt, Artificial Sequence
  Description of Artificial Sequence: Synthetic oligonucleotide
  Sense strand starting at position 3435 of SEQ ID NO: 1243397
gggacugaguugcuaugga

SEQ ID NO: 1414055 - RNA, 19 nt, Artificial Sequence
  Description of Artificial Sequence: Synthetic oligonucleotide
  Antisense strand to SEQ ID NO: 1414054
uccauagcaacucaguccc

SEQ ID NO: 1414056 - RNA, 19 nt, Artificial Sequence
  Description of Artificial Sequence: Synthetic oligonucleotide
  Sense strand starting at position 3594 of SEQ ID NO: 1243397
gugugauucuaugugagga

SEQ ID NO: 1414057 - RNA, 19 nt, Artificial Sequence
  Description of Artificial Sequence: Synthetic oligonucleotide
  Antisense strand to SEQ ID NO: 1414056
uccucacauagaaucacac

SEQ ID NO: 1414058 - RNA, 19 nt, Artificial Sequence
  Description of Artificial Sequence: Synthetic oligonucleotide
  Sense strand starting at position 3595 of SEQ ID NO: 1243397
ugugauucuaugugaggag

SEQ ID NO: 1414059 - RNA, 19 nt, Artificial Sequence
  Description of Artificial Sequence: Synthetic oligonucleotide
  Antisense strand to SEQ ID NO: 1414058
cuccucacauagaaucaca

SEQ ID NO: 1414060 - RNA, 19 nt, Artificial Sequence
  Description of Artificial Sequence: Synthetic oligonucleotide
  Sense strand starting at position 20 of SEQ ID NO: 1243398
gcugaaauguccucauuuc

SEQ ID NO: 1414061 - RNA, 19 nt, Artificial Sequence
  Description of Artificial Sequence: Synthetic oligonucleotide
  Antisense strand to SEQ ID NO: 1414060
gaaaugaggacauuucagc

SEQ ID NO: 1414062 - RNA, 19 nt, Artificial Sequence
  Description of Artificial Sequence: Synthetic oligonucleotide
  Sense strand starting at position 118 of SEQ ID NO: 1243398
gcucuauggcugugggaag

SEQ ID NO: 1414063 - RNA, 19 nt, Artificial Sequence
  Description of Artificial Sequence: Synthetic oligonucleotide
  Antisense strand to SEQ ID NO: 1414062
cuucccacagccauagagc

SEQ ID NO: 1414064 - RNA, 19 nt, Artificial Sequence
  Description of Artificial Sequence: Synthetic oligonucleotide
  Sense strand starting at position 153 of SEQ ID NO: 1243398
gguacuugucuccauagga

SEQ ID NO: 1414065 - RNA, 19 nt, Artificial Sequence
  Description of Artificial Sequence: Synthetic oligonucleotide
  Antisense strand to SEQ ID NO: 1414064
uccuauggagacaaguacc

SEQ ID NO: 1414066 - RNA, 19 nt, Artificial Sequence
  Description of Artificial Sequence: Synthetic oligonucleotide
  Sense strand starting at position 223 of SEQ ID NO: 1243398
aggagaaaguaaguuuauu

SEQ ID NO: 1414067 - RNA, 19 nt, Artificial Sequence
  Description of Artificial Sequence: Synthetic oligonucleotide
  Antisense strand to SEQ ID NO: 1414066
aauaaacuuacuuucuccu

SEQ ID NO: 1414068 - RNA, 19 nt, Artificial Sequence
  Description of Artificial Sequence: Synthetic oligonucleotide
  Sense strand starting at position 248 of SEQ ID NO: 1243398
ugcauuacaucacugaguu

SEQ ID NO: 1414069 - RNA, 19 nt, Artificial Sequence
  Description of Artificial Sequence: Synthetic oligonucleotide
  Antisense strand to SEQ ID NO: 1414068
aacucagugauguaaugca

SEQ ID NO: 1414070 - RNA, 19 nt, Artificial Sequence
  Description of Artificial Sequence: Synthetic oligonucleotide
  Sense strand starting at position 249 of SEQ ID NO: 1243398
gcauuacaucacugaguuc

SEQ ID NO: 1414071 - RNA, 19 nt, Artificial Sequence
  Description of Artificial Sequence: Synthetic oligonucleotide
  Antisense strand to SEQ ID NO: 1414070
gaacucagugauguaaugc

SEQ ID NO: 1414072 - RNA, 19 nt, Artificial Sequence
  Description of Artificial Sequence: Synthetic oligonucleotide
  Sense strand starting at position 333 of SEQ ID NO: 1243398
gcgauaacuguguaaguaa

SEQ ID NO: 1414073 - RNA, 19 nt, Artificial Sequence
  Description of Artificial Sequence: Synthetic oligonucleotide
  Antisense strand to SEQ ID NO: 1414072
uuacuuacacaguuaucgc

SEQ ID NO: 1414074 - RNA, 19 nt, Artificial Sequence
  Description of Artificial Sequence: Synthetic oligonucleotide
  Sense strand starting at position 386 of SEQ ID NO: 1243398
ggacuugugcuguggagag

SEQ ID NO: 1414075 - RNA, 19 nt, Artificial Sequence
  Description of Artificial Sequence: Synthetic oligonucleotide
  Antisense strand to SEQ ID NO: 1414074
cucuccacagcacaagucc

SEQ ID NO: 1414076 - RNA, 19 nt, Artificial Sequence
  Description of Artificial Sequence: Synthetic oligonucleotide
  Sense strand starting at position 388 of SEQ ID NO: 1243398
acuugugcuguggagagua

SEQ ID NO: 1414077 - RNA, 19 nt, Artificial Sequence
  Description of Artificial Sequence: Synthetic oligonucleotide
  Antisense strand to SEQ ID NO: 1414076
uacucuccacagcacaagu

SEQ ID NO: 1414078 - RNA, 19 nt, Artificial Sequence
  Description of Artificial Sequence: Synthetic oligonucleotide
  Sense strand starting at position 450 of SEQ ID NO: 1243398
cugugugaccuggauauau

SEQ ID NO: 1414079 - RNA, 19 nt, Artificial Sequence
  Description of Artificial Sequence: Synthetic oligonucleotide
  Antisense strand to SEQ ID NO: 1414078
auauauccaggucacacag

SEQ ID NO: 1414080 - RNA, 19 nt, Artificial Sequence
  Description of Artificial Sequence: Synthetic oligonucleotide
  Sense strand starting at position 452 of SEQ ID NO: 1243398
gugugaccuggauauauca

SEQ ID NO: 1414081 - RNA, 19 nt, Artificial Sequence
  Description of Artificial Sequence: Synthetic oligonucleotide
  Antisense strand to SEQ ID NO: 1414080
ugauauauccaggucacac

SEQ ID NO: 1414082 - RNA, 19 nt, Artificial Sequence
  Description of Artificial Sequence: Synthetic oligonucleotide
  Sense strand starting at position 459 of SEQ ID NO: 1243398
cuggauauaucacuggcuu

SEQ ID NO: 1414083 - RNA, 19 nt, Artificial Sequence
  Description of Artificial Sequence: Synthetic oligonucleotide
  Antisense strand to SEQ ID NO: 1414082
aagccagugauauauccag

SEQ ID NO: 1414084 - RNA, 19 nt, Artificial Sequence
  Description of Artificial Sequence: Synthetic oligonucleotide
  Sense strand starting at position 460 of SEQ ID NO: 1243398
uggauauaucacuggcuuc

SEQ ID NO: 1414085 - RNA, 19 nt, Artificial Sequence
  Description of Artificial Sequence: Synthetic oligonucleotide
  Antisense strand to SEQ ID NO: 1414084
gaagccagugauauaucca

SEQ ID NO: 1414086 - RNA, 19 nt, Artificial Sequence
  Description of Artificial Sequence: Synthetic oligonucleotide
  Sense strand starting at position 529 of SEQ ID NO: 1243398
gaaggaucugucugagguc

SEQ ID NO: 1414087 - RNA, 19 nt, Artificial Sequence
  Description of Artificial Sequence: Synthetic oligonucleotide
  Antisense strand to SEQ ID NO: 1414086
gaccucagacagauccuuc

SEQ ID NO: 1414088 - RNA, 19 nt, Artificial Sequence
  Description of Artificial Sequence: Synthetic oligonucleotide
  Sense strand starting at position 1699 of SEQ ID NO: 1243398
acggaaaucugguugccaa

SEQ ID NO: 1414089 - RNA, 19 nt, Artificial Sequence
  Description of Artificial Sequence: Synthetic oligonucleotide
  Antisense strand to SEQ ID NO: 1414088
uuggcaaccagauuuccgu

SEQ ID NO: 1414090 - RNA, 19 nt, Artificial Sequence
  Description of Artificial Sequence: Synthetic oligonucleotide
  Sense strand starting at position 1700 of SEQ ID NO: 1243398
cggaaaucugguugccaaa

SEQ ID NO: 1414091 - RNA, 19 nt, Artificial Sequence
  Description of Artificial Sequence: Synthetic oligonucleotide
  Antisense strand to SEQ ID NO: 1414090
uuuggcaaccagauuuccg

SEQ ID NO: 1414092 - RNA, 19 nt, Artificial Sequence
  Description of Artificial Sequence: Synthetic oligonucleotide
  Sense strand starting at position 1727 of SEQ ID NO: 1243398
gaauacgucauuuguacgu

SEQ ID NO: 1414093 - RNA, 19 nt, Artificial Sequence
  Description of Artificial Sequence: Synthetic oligonucleotide
  Antisense strand to SEQ ID NO: 1414092
acguacaaaugacguauuc

SEQ ID NO: 1414094 - RNA, 19 nt, Artificial Sequence
  Description of Artificial Sequence: Synthetic oligonucleotide
  Sense strand starting at position 1731 of SEQ ID NO: 1243398
acgucauuuguacguaauc

SEQ ID NO: 1414095 - RNA, 19 nt, Artificial Sequence
  Description of Artificial Sequence: Synthetic oligonucleotide
  Antisense strand to SEQ ID NO: 1414094
gauuacguacaaaugacgu

SEQ ID NO: 1414096 - RNA, 19 nt, Artificial Sequence
  Description of Artificial Sequence: Synthetic oligonucleotide
  Sense strand starting at position 1736 of SEQ ID NO: 1243398
auuuguacguaauccgaga

SEQ ID NO: 1414097 - RNA, 19 nt, Artificial Sequence
  Description of Artificial Sequence: Synthetic oligonucleotide
  Antisense strand to SEQ ID NO: 1414096
ucucggauuacguacaaau

SEQ ID NO: 1414098 - RNA, 19 nt, Artificial Sequence
  Description of Artificial Sequence: Synthetic oligonucleotide
  Sense strand starting at position 1738 of SEQ ID NO: 1243398
uuguacguaauccgagaca

SEQ ID NO: 1414099 - RNA, 19 nt, Artificial Sequence
  Description of Artificial Sequence: Synthetic oligonucleotide
  Antisense strand to SEQ ID NO: 1414098
ugucucggauuacguacaa

SEQ ID NO: 1414100 - RNA, 19 nt, Artificial Sequence
  Description of Artificial Sequence: Synthetic oligonucleotide
  Sense strand starting at position 2107 of SEQ ID NO: 1243398
gggaaauaauaggauccga

SEQ ID NO: 1414101 - RNA, 19 nt, Artificial Sequence
  Description of Artificial Sequence: Synthetic oligonucleotide
  Antisense strand to SEQ ID NO: 1414100
ucggauccuauuauuuccc

SEQ ID NO: 1414102 - RNA, 19 nt, Artificial Sequence
  Description of Artificial Sequence: Synthetic oligonucleotide
  Sense strand starting at position 2123 of SEQ ID NO: 1243398
cgagucgucagcgucagaa

SEQ ID NO: 1414103 - RNA, 19 nt, Artificial Sequence
  Description of Artificial Sequence: Synthetic oligonucleotide
  Antisense strand to SEQ ID NO: 1414102
uucugacgcugacgacucg

SEQ ID NO: 1414104 - RNA, 19 nt, Artificial Sequence
  Description of Artificial Sequence: Synthetic oligonucleotide
  Sense strand starting at position 2199 of SEQ ID NO: 1243398
agaaaucucuucuuccgca

SEQ ID NO: 1414105 - RNA, 19 nt, Artificial Sequence
  Description of Artificial Sequence: Synthetic oligonucleotide
  Antisense strand to SEQ ID NO: 1414104
ugcggaagaagagauuucu

SEQ ID NO: 1414106 - RNA, 19 nt, Artificial Sequence
  Description of Artificial Sequence: Synthetic oligonucleotide
  Sense strand starting at position 2322 of SEQ ID NO: 1243398
ggcagcucaggcuaagaaa

SEQ ID NO: 1414107 - RNA, 19 nt, Artificial Sequence
  Description of Artificial Sequence: Synthetic oligonucleotide
  Antisense strand to SEQ ID NO: 1414106
uuucuuagccugagcugcc

SEQ ID NO: 1414108 - RNA, 19 nt, Artificial Sequence
  Description of Artificial Sequence: Synthetic oligonucleotide
  Sense strand starting at position 2440 of SEQ ID NO: 1243398
gggaguuccuagcccagua

SEQ ID NO: 1414109 - RNA, 19 nt, Artificial Sequence
  Description of Artificial Sequence: Synthetic oligonucleotide
  Antisense strand to SEQ ID NO: 1414108
uacugggcuaggaacuccc

SEQ ID NO: 1414110 - RNA, 19 nt, Artificial Sequence
  Description of Artificial Sequence: Synthetic oligonucleotide
  Sense strand starting at position 2561 of SEQ ID NO: 1243398
aggcuuucugacugugaca

SEQ ID NO: 1414111 - RNA, 19 nt, Artificial Sequence
  Description of Artificial Sequence: Synthetic oligonucleotide
  Antisense strand to SEQ ID NO: 1414110
ugucacagucagaaagccu

SEQ ID NO: 1414112 - RNA, 19 nt, Artificial Sequence
  Description of Artificial Sequence: Synthetic oligonucleotide
  Sense strand starting at position 2590 of SEQ ID NO: 1243398
ccuggcuaucuagauauuc

SEQ ID NO: 1414113 - RNA, 19 nt, Artificial Sequence
  Description of Artificial Sequence: Synthetic oligonucleotide
  Antisense strand to SEQ ID NO: 1414112
gaauaucuagauagccagg

SEQ ID NO: 1414114 - RNA, 19 nt, Artificial Sequence
  Description of Artificial Sequence: Synthetic oligonucleotide
  Sense strand starting at position 2805 of SEQ ID NO: 1243398
cuguucuagggcuggagau

SEQ ID NO: 1414115 - RNA, 19 nt, Artificial Sequence
  Description of Artificial Sequence: Synthetic oligonucleotide
  Antisense strand to SEQ ID NO: 1414114
aucuccagcccuagaacag

SEQ ID NO: 1414116 - RNA, 19 nt, Artificial Sequence
  Description of Artificial Sequence: Synthetic oligonucleotide
  Sense strand starting at position 2806 of SEQ ID NO: 1243398
uguucuagggcuggagaua

SEQ ID NO: 1414117 - RNA, 19 nt, Artificial Sequence
  Description of Artificial Sequence: Synthetic oligonucleotide
  Antisense strand to SEQ ID NO: 1414116
uaucuccagcccuagaaca

SEQ ID NO: 1414118 - RNA, 19 nt, Artificial Sequence
  Description of Artificial Sequence: Synthetic oligonucleotide
  Sense strand starting at position 2850 of SEQ ID NO: 1243398
ccugcacucguggaacuua

SEQ ID NO: 1414119 - RNA, 19 nt, Artificial Sequence
  Description of Artificial Sequence: Synthetic oligonucleotide
  Antisense strand to SEQ ID NO: 1414118
uaaguuccacgagugcagg

SEQ ID NO: 1414120 - RNA, 19 nt, Artificial Sequence
  Description of Artificial Sequence: Synthetic oligonucleotide
  Sense strand starting at position 2909 of SEQ ID NO: 1243398
cagcauagccgggaaugaa

SEQ ID NO: 1414121 - RNA, 19 nt, Artificial Sequence
  Description of Artificial Sequence: Synthetic oligonucleotide
  Antisense strand to SEQ ID NO: 1414120
uucauucccggcuaugcug

SEQ ID NO: 1414122 - RNA, 19 nt, Artificial Sequence
  Description of Artificial Sequence: Synthetic oligonucleotide
  Sense strand starting at position 2950 of SEQ ID NO: 1243398
ggcucuguccaggaagcuu

SEQ ID NO: 1414123 - RNA, 19 nt, Artificial Sequence
  Description of Artificial Sequence: Synthetic oligonucleotide
  Antisense strand to SEQ ID NO: 1414122
aagcuuccuggacagagcc

SEQ ID NO: 1414124 - RNA, 19 nt, Artificial Sequence
  Description of Artificial Sequence: Synthetic oligonucleotide
  Sense strand starting at position 2964 of SEQ ID NO: 1243398
agcuucugugaagguacaa

SEQ ID NO: 1414125 - RNA, 19 nt, Artificial Sequence
  Description of Artificial Sequence: Synthetic oligonucleotide
  Antisense strand to SEQ ID NO: 1414124
uuguaccuucacagaagcu

SEQ ID NO: 1414126 - RNA, 19 nt, Artificial Sequence
  Description of Artificial Sequence: Synthetic oligonucleotide
  Sense strand starting at position 3028 of SEQ ID NO: 1243398
ccuagauuccugggacuga

SEQ ID NO: 1414127 - RNA, 19 nt, Artificial Sequence
  Description of Artificial Sequence: Synthetic oligonucleotide
  Antisense strand to SEQ ID NO: 1414126
ucagucccaggaaucuagg

SEQ ID NO: 1414128 - RNA, 19 nt, Artificial Sequence
  Description of Artificial Sequence: Synthetic oligonucleotide
  Sense strand starting at position 3039 of SEQ ID NO: 1243398
gggacugaguugcuaugga

SEQ ID NO: 1414129 - RNA, 19 nt, Artificial Sequence
  Description of Artificial Sequence: Synthetic oligonucleotide
  Antisense strand to SEQ ID NO: 1414128
uccauagcaacucaguccc

SEQ ID NO: 1414130 - RNA, 19 nt, Artificial Sequence
  Description of Artificial Sequence: Synthetic oligonucleotide
  Sense strand starting at position 3074 of SEQ ID NO: 1243398
ccugucucuaaguguggau

SEQ ID NO: 1414131 - RNA, 19 nt, Artificial Sequence
  Description of Artificial Sequence: Synthetic oligonucleotide
  Antisense strand to SEQ ID NO: 1414130
auccacacuuagagacagg

SEQ ID NO: 1414132 - RNA, 19 nt, Artificial Sequence
  Description of Artificial Sequence: Synthetic oligonucleotide
  Sense strand starting at position 3198 of SEQ ID NO: 1243398
gugugauucuaugugagga

SEQ ID NO: 1414133 - RNA, 19 nt, Artificial Sequence
  Description of Artificial Sequence: Synthetic oligonucleotide
  Antisense strand to SEQ ID NO: 1414132
uccucacauagaaucacac

SEQ ID NO: 1414134 - RNA, 19 nt, Artificial Sequence
  Description of Artificial Sequence: Synthetic oligonucleotide
  Sense strand starting at position 3199 of SEQ ID NO: 1243398
ugugauucuaugugaggag

SEQ ID NO: 1414135 - RNA, 19 nt, Artificial Sequence
  Description of Artificial Sequence: Synthetic oligonucleotide
  Antisense strand to SEQ ID NO: 1414134
cuccucacauagaaucaca

SEQ ID NO: 1414136 - RNA, 19 nt, Artificial Sequence
  Description of Artificial Sequence: Synthetic oligonucleotide
  Sense strand starting at position 3825 of SEQ ID NO: 1243398
cucauaguccugcauggga

SEQ ID NO: 1414137 - RNA, 19 nt, Artificial Sequence
  Description of Artificial Sequence: Synthetic oligonucleotide
  Antisense strand to SEQ ID NO: 1414136
ucccaugcaggacuaugag

SEQ ID NO: 1414138 - RNA, 19 nt, Artificial Sequence
  Description of Artificial Sequence: Synthetic oligonucleotide
  Sense strand starting at position 3857 of SEQ ID NO: 1243398
auuacuucucucugggacu

SEQ ID NO: 1414139 - RNA, 19 nt, Artificial Sequence
  Description of Artificial Sequence: Synthetic oligonucleotide
  Antisense strand to SEQ ID NO: 1414138
agucccagagagaaguaau

SEQ ID NO: 1414140 - RNA, 19 nt, Artificial Sequence
  Description of Artificial Sequence: Synthetic oligonucleotide
  Sense strand starting at position 127 of SEQ ID NO: 1243399
gagacaagguucuucuaug

SEQ ID NO: 1414141 - RNA, 19 nt, Artificial Sequence
  Description of Artificial Sequence: Synthetic oligonucleotide
  Antisense strand to SEQ ID NO: 1414140
cauagaagaaccuugucuc

SEQ ID NO: 1414142 - RNA, 19 nt, Artificial Sequence
  Description of Artificial Sequence: Synthetic oligonucleotide
  Sense strand starting at position 128 of SEQ ID NO: 1243399
agacaagguucuucuaugu

SEQ ID NO: 1414143 - RNA, 19 nt, Artificial Sequence
  Description of Artificial Sequence: Synthetic oligonucleotide
  Antisense strand to SEQ ID NO: 1414142
acauagaagaaccuugucu

SEQ ID NO: 1414144 - RNA, 19 nt, Artificial Sequence
  Description of Artificial Sequence: Synthetic oligonucleotide
  Sense strand starting at position 147 of SEQ ID NO: 1243399
ugcucagggugcucucaaa

SEQ ID NO: 1414145 - RNA, 19 nt, Artificial Sequence
  Description of Artificial Sequence: Synthetic oligonucleotide
  Antisense strand to SEQ ID NO: 1414144
uuugagagcacccugagca

SEQ ID NO: 1414146 - RNA, 19 nt, Artificial Sequence
  Description of Artificial Sequence: Synthetic oligonucleotide
  Sense strand starting at position 317 of SEQ ID NO: 1243399
gccggugugucuuucagag

SEQ ID NO: 1414147 - RNA, 19 nt, Artificial Sequence
  Description of Artificial Sequence: Synthetic oligonucleotide
  Antisense strand to SEQ ID NO: 1414146
cucugaaagacacaccggc

SEQ ID NO: 1414148 - RNA, 19 nt, Artificial Sequence
  Description of Artificial Sequence: Synthetic oligonucleotide
  Sense strand starting at position 319 of SEQ ID NO: 1243399
cggugugucuuucagaguc

SEQ ID NO: 1414149 - RNA, 19 nt, Artificial Sequence
  Description of Artificial Sequence: Synthetic oligonucleotide
  Antisense strand to SEQ ID NO: 1414148
gacucugaaagacacaccg

SEQ ID NO: 1414150 - RNA, 19 nt, Artificial Sequence
  Description of Artificial Sequence: Synthetic oligonucleotide
  Sense strand starting at position 495 of SEQ ID NO: 1243399
gugacacuucuccagguca

SEQ ID NO: 1414151 - RNA, 19 nt, Artificial Sequence
  Description of Artificial Sequence: Synthetic oligonucleotide
  Antisense strand to SEQ ID NO: 1414150
ugaccuggagaagugucac

SEQ ID NO: 1414152 - RNA, 19 nt, Artificial Sequence
  Description of Artificial Sequence: Synthetic oligonucleotide
  Sense strand starting at position 786 of SEQ ID NO: 1243399
cgggagguguccuggauca

SEQ ID NO: 1414153 - RNA, 19 nt, Artificial Sequence
  Description of Artificial Sequence: Synthetic oligonucleotide
  Antisense strand to SEQ ID NO: 1414152
ugauccaggacaccucccg

SEQ ID NO: 1414154 - RNA, 19 nt, Artificial Sequence
  Description of Artificial Sequence: Synthetic oligonucleotide
  Sense strand starting at position 1755 of SEQ ID NO: 1243399
aggccaggguugucugaaa

SEQ ID NO: 1414155 - RNA, 19 nt, Artificial Sequence
  Description of Artificial Sequence: Synthetic oligonucleotide
  Antisense strand to SEQ ID NO: 1414154
uuucagacaacccuggccu

SEQ ID NO: 1414156 - RNA, 19 nt, Artificial Sequence
  Description of Artificial Sequence: Synthetic oligonucleotide
  Sense strand starting at position 1760 of SEQ ID NO: 1243399
aggguugucugaaauggga

SEQ ID NO: 1414157 - RNA, 19 nt, Artificial Sequence
  Description of Artificial Sequence: Synthetic oligonucleotide
  Antisense strand to SEQ ID NO: 1414156
ucccauuucagacaacccu

SEQ ID NO: 1414158 - RNA, 19 nt, Artificial Sequence
  Description of Artificial Sequence: Synthetic oligonucleotide
  Sense strand starting at position 1814 of SEQ ID NO: 1243399
cagcuucuggaauguuaga

SEQ ID NO: 1414159 - RNA, 19 nt, Artificial Sequence
  Description of Artificial Sequence: Synthetic oligonucleotide
  Antisense strand to SEQ ID NO: 1414158
ucuaacauuccagaagcug

SEQ ID NO: 1414160 - RNA, 19 nt, Artificial Sequence
  Description of Artificial Sequence: Synthetic oligonucleotide
  Sense strand starting at position 2137 of SEQ ID NO: 1243399
gacugaguuugcuguguag

SEQ ID NO: 1414161 - RNA, 19 nt, Artificial Sequence
  Description of Artificial Sequence: Synthetic oligonucleotide
  Antisense strand to SEQ ID NO: 1414160
cuacacagcaaacucaguc

SEQ ID NO: 1414162 - RNA, 19 nt, Artificial Sequence
  Description of Artificial Sequence: Synthetic oligonucleotide
  Sense strand starting at position 2139 of SEQ ID NO: 1243399
cugaguuugcuguguagaa

SEQ ID NO: 1414163 - RNA, 19 nt, Artificial Sequence
  Description of Artificial Sequence: Synthetic oligonucleotide
  Antisense strand to SEQ ID NO: 1414162
uucuacacagcaaacucag

SEQ ID NO: 1414164 - RNA, 19 nt, Artificial Sequence
  Description of Artificial Sequence: Synthetic oligonucleotide
  Sense strand starting at position 2140 of SEQ ID NO: 1243399
ugaguuugcuguguagaaa

SEQ ID NO: 1414165 - RNA, 19 nt, Artificial Sequence
  Description of Artificial Sequence: Synthetic oligonucleotide
  Antisense strand to SEQ ID NO: 1414164
uuucuacacagcaaacuca

SEQ ID NO: 1414166 - RNA, 19 nt, Artificial Sequence
  Description of Artificial Sequence: Synthetic oligonucleotide
  Sense strand starting at position 2584 of SEQ ID NO: 1243399
gucccauugcccugggagu

SEQ ID NO: 1414167 - RNA, 19 nt, Artificial Sequence
  Description of Artificial Sequence: Synthetic oligonucleotide
  Antisense strand to SEQ ID NO: 1414166
acucccagggcaaugggac

SEQ ID NO: 1414168 - RNA, 19 nt, Artificial Sequence
  Description of Artificial Sequence: Synthetic oligonucleotide
  Sense strand starting at position 2634 of SEQ ID NO: 1243399
agagaacauugauagaaga

SEQ ID NO: 1414169 - RNA, 19 nt, Artificial Sequence
  Description of Artificial Sequence: Synthetic oligonucleotide
  Antisense strand to SEQ ID NO: 1414168
ucuucuaucaauguucucu

SEQ ID NO: 1414170 - RNA, 19 nt, Artificial Sequence
  Description of Artificial Sequence: Synthetic oligonucleotide
  Sense strand starting at position 2791 of SEQ ID NO: 1243399
cguucuuuauccucacuuu

SEQ ID NO: 1414171 - RNA, 19 nt, Artificial Sequence
  Description of Artificial Sequence: Synthetic oligonucleotide
  Antisense strand to SEQ ID NO: 1414170
aaagugaggauaaagaacg

SEQ ID NO: 1414172 - RNA, 19 nt, Artificial Sequence
  Description of Artificial Sequence: Synthetic oligonucleotide
  Sense strand starting at position 2861 of SEQ ID NO: 1243399
aggugaaucucccaagacu

SEQ ID NO: 1414173 - RNA, 19 nt, Artificial Sequence
  Description of Artificial Sequence: Synthetic oligonucleotide
  Antisense strand to SEQ ID NO: 1414172
agucuugggagauucaccu

SEQ ID NO: 1414174 - RNA, 19 nt, Artificial Sequence
  Description of Artificial Sequence: Synthetic oligonucleotide
  Sense strand starting at position 2881 of SEQ ID NO: 1243399
ccaagaaaugcgugaguuc

SEQ ID NO: 1414175 - RNA, 19 nt, Artificial Sequence
  Description of Artificial Sequence: Synthetic oligonucleotide
  Antisense strand to SEQ ID NO: 1414174
gaacucacgcauuucuugg

SEQ ID NO: 1414176 - RNA, 19 nt, Artificial Sequence
  Description of Artificial Sequence: Synthetic oligonucleotide
  Sense strand starting at position 2884 of SEQ ID NO: 1243399
agaaaugcgugaguucaga

SEQ ID NO: 1414177 - RNA, 19 nt, Artificial Sequence
  Description of Artificial Sequence: Synthetic oligonucleotide
  Antisense strand to SEQ ID NO: 1414176
ucugaacucacgcauuucu

SEQ ID NO: 1414178 - RNA, 19 nt, Artificial Sequence
  Description of Artificial Sequence: Synthetic oligonucleotide
  Sense strand starting at position 2958 of SEQ ID NO: 1243399
aggagaggcuucucauaug

SEQ ID NO: 1414179 - RNA, 19 nt, Artificial Sequence
  Description of Artificial Sequence: Synthetic oligonucleotide
  Antisense strand to SEQ ID NO: 1414178
cauaugagaagccucuccu

SEQ ID NO: 1414180 - RNA, 19 nt, Artificial Sequence
  Description of Artificial Sequence: Synthetic oligonucleotide
  Sense strand starting at position 2961 of SEQ ID NO: 1243399
agaggcuucucauaugcua

SEQ ID NO: 1414181 - RNA, 19 nt, Artificial Sequence
  Description of Artificial Sequence: Synthetic oligonucleotide
  Antisense strand to SEQ ID NO: 1414180
uagcauaugagaagccucu

SEQ ID NO: 1414182 - RNA, 19 nt, Artificial Sequence
  Description of Artificial Sequence: Synthetic oligonucleotide
  Sense strand starting at position 3003 of SEQ ID NO: 1243399
cucugugcccaugaggaau

SEQ ID NO: 1414183 - RNA, 19 nt, Artificial Sequence
  Description of Artificial Sequence: Synthetic oligonucleotide
  Antisense strand to SEQ ID NO: 1414182
auuccucaugggcacagag

SEQ ID NO: 1414184 - RNA, 19 nt, Artificial Sequence
  Description of Artificial Sequence: Synthetic oligonucleotide
  Sense strand starting at position 3077 of SEQ ID NO: 1243399
ucaggagguucccuugacu

SEQ ID NO: 1414185 - RNA, 19 nt, Artificial Sequence
  Description of Artificial Sequence: Synthetic oligonucleotide
  Antisense strand to SEQ ID NO: 1414184
agucaagggaaccuccuga

SEQ ID NO: 1414186 - RNA, 19 nt, Artificial Sequence
  Description of Artificial Sequence: Synthetic oligonucleotide
  Sense strand starting at position 3083 of SEQ ID NO: 1243399
gguucccuugacuaagacu

SEQ ID NO: 1414187 - RNA, 19 nt, Artificial Sequence
  Description of Artificial Sequence: Synthetic oligonucleotide
  Antisense strand to SEQ ID NO: 1414186
agucuuagucaagggaacc

SEQ ID NO: 1414188 - RNA, 19 nt, Artificial Sequence
  Description of Artificial Sequence: Synthetic oligonucleotide
  Sense strand starting at position 3091 of SEQ ID NO: 1243399
ugacuaagacuuuguauug

SEQ ID NO: 1414189 - RNA, 19 nt, Artificial Sequence
  Description of Artificial Sequence: Synthetic oligonucleotide
  Antisense strand to SEQ ID NO: 1414188
caauacaaagucuuaguca

SEQ ID NO: 1414190 - RNA, 19 nt, Artificial Sequence
  Description of Artificial Sequence: Synthetic oligonucleotide
  Sense strand starting at position 3103 of SEQ ID NO: 1243399
uguauugcacucuaguaac

SEQ ID NO: 1414191 - RNA, 19 nt, Artificial Sequence
  Description of Artificial Sequence: Synthetic oligonucleotide
  Antisense strand to SEQ ID NO: 1414190
guuacuagagugcaauaca

SEQ ID NO: 1414192 - RNA, 19 nt, Artificial Sequence
  Description of Artificial Sequence: Synthetic oligonucleotide
  Sense strand starting at position 3167 of SEQ ID NO: 1243399
gugagauuaauagaguggu

SEQ ID NO: 1414193 - RNA, 19 nt, Artificial Sequence
  Description of Artificial Sequence: Synthetic oligonucleotide
  Antisense strand to SEQ ID NO: 1414192
accacucuauuaaucucac

SEQ ID NO: 1414194 - RNA, 19 nt, Artificial Sequence
  Description of Artificial Sequence: Synthetic oligonucleotide
  Sense strand starting at position 3171 of SEQ ID NO: 1243399
gauuaauagagugguagca

SEQ ID NO: 1414195 - RNA, 19 nt, Artificial Sequence
  Description of Artificial Sequence: Synthetic oligonucleotide
  Antisense strand to SEQ ID NO: 1414194
ugcuaccacucuauuaauc

SEQ ID NO: 1414196 - RNA, 19 nt, Artificial Sequence
  Description of Artificial Sequence: Synthetic oligonucleotide
  Sense strand starting at position 3173 of SEQ ID NO: 1243399
uuaauagagugguagcaag

SEQ ID NO: 1414197 - RNA, 19 nt, Artificial Sequence
  Description of Artificial Sequence: Synthetic oligonucleotide
  Antisense strand to SEQ ID NO: 1414196
cuugcuaccacucuauuaa

SEQ ID NO: 1414198 - RNA, 19 nt, Artificial Sequence
  Description of Artificial Sequence: Synthetic oligonucleotide
  Sense strand starting at position 3243 of SEQ ID NO: 1243399
gaaauagcugcaugcgcua

SEQ ID NO: 1414199 - RNA, 19 nt, Artificial Sequence
  Description of Artificial Sequence: Synthetic oligonucleotide
  Antisense strand to SEQ ID NO: 1414198
uagcgcaugcagcuauuuc

SEQ ID NO: 1414200 - RNA, 19 nt, Artificial Sequence
  Description of Artificial Sequence: Synthetic oligonucleotide
  Sense strand starting at position 3321 of SEQ ID NO: 1243399
acaacauggcgcuguauuu

SEQ ID NO: 1414201 - RNA, 19 nt, Artificial Sequence
  Description of Artificial Sequence: Synthetic oligonucleotide
  Antisense strand to SEQ ID NO: 1414200
aaauacagcgccauguugu

SEQ ID NO: 1414202 - RNA, 19 nt, Artificial Sequence
  Description of Artificial Sequence: Synthetic oligonucleotide
  Sense strand starting at position 3354 of SEQ ID NO: 1243399
cuaggaucucauuguauga

SEQ ID NO: 1414203 - RNA, 19 nt, Artificial Sequence
  Description of Artificial Sequence: Synthetic oligonucleotide
  Antisense strand to SEQ ID NO: 1414202
ucauacaaugagauccuag

SEQ ID NO: 1414204 - RNA, 19 nt, Artificial Sequence
  Description of Artificial Sequence: Synthetic oligonucleotide
  Sense strand starting at position 3359 of SEQ ID NO: 1243399
aucucauuguaugaucagu

SEQ ID NO: 1414205 - RNA, 19 nt, Artificial Sequence
  Description of Artificial Sequence: Synthetic oligonucleotide
  Antisense strand to SEQ ID NO: 1414204
acugaucauacaaugagau

SEQ ID NO: 1414206 - RNA, 19 nt, Artificial Sequence
  Description of Artificial Sequence: Synthetic oligonucleotide
  Sense strand starting at position 3361 of SEQ ID NO: 1243399
cucauuguaugaucaguaa

SEQ ID NO: 1414207 - RNA, 19 nt, Artificial Sequence
  Description of Artificial Sequence: Synthetic oligonucleotide
  Antisense strand to SEQ ID NO: 1414206
uuacugaucauacaaugag

SEQ ID NO: 1414208 - RNA, 19 nt, Artificial Sequence
  Description of Artificial Sequence: Synthetic oligonucleotide
  Sense strand starting at position 3364 of SEQ ID NO: 1243399
auuguaugaucaguaacau

SEQ ID NO: 1414209 - RNA, 19 nt, Artificial Sequence
  Description of Artificial Sequence: Synthetic oligonucleotide
  Antisense strand to SEQ ID NO: 1414208
auguuacugaucauacaau

SEQ ID NO: 1414210 - RNA, 19 nt, Artificial Sequence
  Description of Artificial Sequence: Synthetic oligonucleotide
  Sense strand starting at position 3365 of SEQ ID NO: 1243399
uuguaugaucaguaacaua

SEQ ID NO: 1414211 - RNA, 19 nt, Artificial Sequence
  Description of Artificial Sequence: Synthetic oligonucleotide
  Antisense strand to SEQ ID NO: 1414210
uauguuacugaucauacaa

SEQ ID NO: 1414212 - RNA, 19 nt, Artificial Sequence
  Description of Artificial Sequence: Synthetic oligonucleotide
  Sense strand starting at position 3613 of SEQ ID NO: 1243399
aggaaaucugccuacauuc

SEQ ID NO: 1414213 - RNA, 19 nt, Artificial Sequence
  Description of Artificial Sequence: Synthetic oligonucleotide
  Antisense strand to SEQ ID NO: 1414212
gaauguaggcagauuuccu

SEQ ID NO: 1414214 - RNA, 19 nt, Artificial Sequence
  Description of Artificial Sequence: Synthetic oligonucleotide
  Sense strand starting at position 69 of SEQ ID NO: 1243400
uucuuaggucuacacugaa

SEQ ID NO: 1414215 - RNA, 19 nt, Artificial Sequence
  Description of Artificial Sequence: Synthetic oligonucleotide
  Antisense strand to SEQ ID NO: 1414214
uucaguguagaccuaagaa

SEQ ID NO: 1414216 - RNA, 19 nt, Artificial Sequence
  Description of Artificial Sequence: Synthetic oligonucleotide
  Sense strand starting at position 82 of SEQ ID NO: 1243400
acugaagagucuuacguuc

SEQ ID NO: 1414217 - RNA, 19 nt, Artificial Sequence
  Description of Artificial Sequence: Synthetic oligonucleotide
  Antisense strand to SEQ ID NO: 1414216
gaacguaagacucuucagu

SEQ ID NO: 1414218 - RNA, 19 nt, Artificial Sequence
  Description of Artificial Sequence: Synthetic oligonucleotide
  Sense strand starting at position 84 of SEQ ID NO: 1243400
ugaagagucuuacguucuu

SEQ ID NO: 1414219 - RNA, 19 nt, Artificial Sequence
  Description of Artificial Sequence: Synthetic oligonucleotide
  Antisense strand to SEQ ID NO: 1414218
aagaacguaagacucuuca

SEQ ID NO: 1414220 - RNA, 19 nt, Artificial Sequence
  Description of Artificial Sequence: Synthetic oligonucleotide
  Sense strand starting at position 89 of SEQ ID NO: 1243400
agucuuacguucuugguca

SEQ ID NO: 1414221 - RNA, 19 nt, Artificial Sequence
  Description of Artificial Sequence: Synthetic oligonucleotide
  Antisense strand to SEQ ID NO: 1414220
ugaccaagaacguaagacu

SEQ ID NO: 1414222 - RNA, 19 nt, Artificial Sequence
  Description of Artificial Sequence: Synthetic oligonucleotide
  Sense strand starting at position 94 of SEQ ID NO: 1243400
uacguucuuggucaucaga

SEQ ID NO: 1414223 - RNA, 19 nt, Artificial Sequence
  Description of Artificial Sequence: Synthetic oligonucleotide
  Antisense strand to SEQ ID NO: 1414222
ucugaugaccaagaacgua

SEQ ID NO: 1414224 - RNA, 19 nt, Artificial Sequence
  Description of Artificial Sequence: Synthetic oligonucleotide
  Sense strand starting at position 97 of SEQ ID NO: 1243400
guucuuggucaucagagca

SEQ ID NO: 1414225 - RNA, 19 nt, Artificial Sequence
  Description of Artificial Sequence: Synthetic oligonucleotide
  Antisense strand to SEQ ID NO: 1414224
ugcucugaugaccaagaac

SEQ ID NO: 1414226 - RNA, 19 nt, Artificial Sequence
  Description of Artificial Sequence: Synthetic oligonucleotide
  Sense strand starting at position 166 of SEQ ID NO: 1243400
aggcgacuuucccagaaga

SEQ ID NO: 1414227 - RNA, 19 nt, Artificial Sequence
  Description of Artificial Sequence: Synthetic oligonucleotide
  Antisense strand to SEQ ID NO: 1414226
ucuucugggaaagucgccu

SEQ ID NO: 1414228 - RNA, 19 nt, Artificial Sequence
  Description of Artificial Sequence: Synthetic oligonucleotide
  Sense strand starting at position 168 of SEQ ID NO: 1243400
gcgacuuucccagaagaac

SEQ ID NO: 1414229 - RNA, 19 nt, Artificial Sequence
  Description of Artificial Sequence: Synthetic oligonucleotide
  Antisense strand to SEQ ID NO: 1414228
guucuucugggaaagucgc

SEQ ID NO: 1414230 - RNA, 19 nt, Artificial Sequence
  Description of Artificial Sequence: Synthetic oligonucleotide
  Sense strand starting at position 387 of SEQ ID NO: 1243400
agugcacuggagugauaau

SEQ ID NO: 1414231 - RNA, 19 nt, Artificial Sequence
  Description of Artificial Sequence: Synthetic oligonucleotide
  Antisense strand to SEQ ID NO: 1414230
auuaucacuccagugcacu

SEQ ID NO: 1414232 - RNA, 19 nt, Artificial Sequence
  Description of Artificial Sequence: Synthetic oligonucleotide
  Sense strand starting at position 388 of SEQ ID NO: 1243400
gugcacuggagugauaaua

SEQ ID NO: 1414233 - RNA, 19 nt, Artificial Sequence
  Description of Artificial Sequence: Synthetic oligonucleotide
  Antisense strand to SEQ ID NO: 1414232
uauuaucacuccagugcac

SEQ ID NO: 1414234 - RNA, 19 nt, Artificial Sequence
  Description of Artificial Sequence: Synthetic oligonucleotide
  Sense strand starting at position 843 of SEQ ID NO: 1243400
gagacaagguucuucuaug

SEQ ID NO: 1414235 - RNA, 19 nt, Artificial Sequence
  Description of Artificial Sequence: Synthetic oligonucleotide
  Antisense strand to SEQ ID NO: 1414234
cauagaagaaccuugucuc

SEQ ID NO: 1414236 - RNA, 19 nt, Artificial Sequence
  Description of Artificial Sequence: Synthetic oligonucleotide
  Sense strand starting at position 844 of SEQ ID NO: 1243400
agacaagguucuucuaugu

SEQ ID NO: 1414237 - RNA, 19 nt, Artificial Sequence
  Description of Artificial Sequence: Synthetic oligonucleotide
  Antisense strand to SEQ ID NO: 1414236
acauagaagaaccuugucu

SEQ ID NO: 1414238 - RNA, 19 nt, Artificial Sequence
  Description of Artificial Sequence: Synthetic oligonucleotide
  Sense strand starting at position 863 of SEQ ID NO: 1243400
ugcucagggugcucucaaa

SEQ ID NO: 1414239 - RNA, 19 nt, Artificial Sequence
  Description of Artificial Sequence: Synthetic oligonucleotide
  Antisense strand to SEQ ID NO: 1414238
uuugagagcacccugagca

SEQ ID NO: 1414240 - RNA, 19 nt, Artificial Sequence
  Description of Artificial Sequence: Synthetic oligonucleotide
  Sense strand starting at position 1033 of SEQ ID NO: 1243400
gccggugugucuuucagag

SEQ ID NO: 1414241 - RNA, 19 nt, Artificial Sequence
  Description of Artificial Sequence: Synthetic oligonucleotide
  Antisense strand to SEQ ID NO: 1414240
cucugaaagacacaccggc

SEQ ID NO: 1414242 - RNA, 19 nt, Artificial Sequence
  Description of Artificial Sequence: Synthetic oligonucleotide
  Sense strand starting at position 1035 of SEQ ID NO: 1243400
cggugugucuuucagaguc

SEQ ID NO: 1414243 - RNA, 19 nt, Artificial Sequence
  Description of Artificial Sequence: Synthetic oligonucleotide
  Antisense strand to SEQ ID NO: 1414242
gacucugaaagacacaccg

SEQ ID NO: 1414244 - RNA, 19 nt, Artificial Sequence
  Description of Artificial Sequence: Synthetic oligonucleotide
  Sense strand starting at position 1211 of SEQ ID NO: 1243400
gugacacuucuccagguca

SEQ ID NO: 1414245 - RNA, 19 nt, Artificial Sequence
  Description of Artificial Sequence: Synthetic oligonucleotide
  Antisense strand to SEQ ID NO: 1414244
ugaccuggagaagugucac

SEQ ID NO: 1414246 - RNA, 19 nt, Artificial Sequence
  Description of Artificial Sequence: Synthetic oligonucleotide
  Sense strand starting at position 1502 of SEQ ID NO: 1243400
cgggagguguccuggauca

SEQ ID NO: 1414247 - RNA, 19 nt, Artificial Sequence
  Description of Artificial Sequence: Synthetic oligonucleotide
  Antisense strand to SEQ ID NO: 1414246
ugauccaggacaccucccg

SEQ ID NO: 1414248 - RNA, 19 nt, Artificial Sequence
  Description of Artificial Sequence: Synthetic oligonucleotide
  Sense strand starting at position 2471 of SEQ ID NO: 1243400
aggccaggguugucugaaa

SEQ ID NO: 1414249 - RNA, 19 nt, Artificial Sequence
  Description of Artificial Sequence: Synthetic oligonucleotide
  Antisense strand to SEQ ID NO: 1414248
uuucagacaacccuggccu

SEQ ID NO: 1414250 - RNA, 19 nt, Artificial Sequence
  Description of Artificial Sequence: Synthetic oligonucleotide
  Sense strand starting at position 2476 of SEQ ID NO: 1243400
aggguugucugaaauggga

SEQ ID NO: 1414251 - RNA, 19 nt, Artificial Sequence
  Description of Artificial Sequence: Synthetic oligonucleotide
  Antisense strand to SEQ ID NO: 1414250
ucccauuucagacaacccu

SEQ ID NO: 1414252 - RNA, 19 nt, Artificial Sequence
  Description of Artificial Sequence: Synthetic oligonucleotide
  Sense strand starting at position 2530 of SEQ ID NO: 1243400
cagcuucuggaauguuaga

SEQ ID NO: 1414253 - RNA, 19 nt, Artificial Sequence
  Description of Artificial Sequence: Synthetic oligonucleotide
  Antisense strand to SEQ ID NO: 1414252
ucuaacauuccagaagcug

SEQ ID NO: 1414254 - RNA, 19 nt, Artificial Sequence
  Description of Artificial Sequence: Synthetic oligonucleotide
  Sense strand starting at position 2853 of SEQ ID NO: 1243400
gacugaguuugcuguguag

SEQ ID NO: 1414255 - RNA, 19 nt, Artificial Sequence
  Description of Artificial Sequence: Synthetic oligonucleotide
  Antisense strand to SEQ ID NO: 1414254
cuacacagcaaacucaguc

SEQ ID NO: 1414256 - RNA, 19 nt, Artificial Sequence
  Description of Artificial Sequence: Synthetic oligonucleotide
  Sense strand starting at position 2855 of SEQ ID NO: 1243400
cugaguuugcuguguagaa

SEQ ID NO: 1414257 - RNA, 19 nt, Artificial Sequence
  Description of Artificial Sequence: Synthetic oligonucleotide
  Antisense strand to SEQ ID NO: 1414256
uucuacacagcaaacucag

SEQ ID NO: 1414258 - RNA, 19 nt, Artificial Sequence
  Description of Artificial Sequence: Synthetic oligonucleotide
  Sense strand starting at position 2856 of SEQ ID NO: 1243400
ugaguuugcuguguagaaa

SEQ ID NO: 1414259 - RNA, 19 nt, Artificial Sequence
  Description of Artificial Sequence: Synthetic oligonucleotide
  Antisense strand to SEQ ID NO: 1414258
uuucuacacagcaaacuca

SEQ ID NO: 1414260 - RNA, 19 nt, Artificial Sequence
  Description of Artificial Sequence: Synthetic oligonucleotide
  Sense strand starting at position 3300 of SEQ ID NO: 1243400
gucccauugcccugggagu

SEQ ID NO: 1414261 - RNA, 19 nt, Artificial Sequence
  Description of Artificial Sequence: Synthetic oligonucleotide
  Antisense strand to SEQ ID NO: 1414260
acucccagggcaaugggac

SEQ ID NO: 1414262 - RNA, 19 nt, Artificial Sequence
  Description of Artificial Sequence: Synthetic oligonucleotide
  Sense strand starting at position 3350 of SEQ ID NO: 1243400
agagaacauugauagaaga

SEQ ID NO: 1414263 - RNA, 19 nt, Artificial Sequence
  Description of Artificial Sequence: Synthetic oligonucleotide
  Antisense strand to SEQ ID NO: 1414262
ucuucuaucaauguucucu

SEQ ID NO: 1414264 - RNA, 19 nt, Artificial Sequence
  Description of Artificial Sequence: Synthetic oligonucleotide
  Sense strand starting at position 3507 of SEQ ID NO: 1243400
cguucuuuauccucacuuu

SEQ ID NO: 1414265 - RNA, 19 nt, Artificial Sequence
  Description of Artificial Sequence: Synthetic oligonucleotide
  Antisense strand to SEQ ID NO: 1414264
aaagugaggauaaagaacg

SEQ ID NO: 1414266 - RNA, 19 nt, Artificial Sequence
  Description of Artificial Sequence: Synthetic oligonucleotide
  Sense strand starting at position 3577 of SEQ ID NO: 1243400
aggugaaucucccaagacu

SEQ ID NO: 1414267 - RNA, 19 nt, Artificial Sequence
  Description of Artificial Sequence: Synthetic oligonucleotide
  Antisense strand to SEQ ID NO: 1414266
agucuugggagauucaccu

SEQ ID NO: 1414268 - RNA, 19 nt, Artificial Sequence
  Description of Artificial Sequence: Synthetic oligonucleotide
  Sense strand starting at position 3597 of SEQ ID NO: 1243400
ccaagaaaugcgugaguuc

SEQ ID NO: 1414269 - RNA, 19 nt, Artificial Sequence
  Description of Artificial Sequence: Synthetic oligonucleotide
  Antisense strand to SEQ ID NO: 1414268
gaacucacgcauuucuugg

SEQ ID NO: 1414270 - RNA, 19 nt, Artificial Sequence
  Description of Artificial Sequence: Synthetic oligonucleotide
  Sense strand starting at position 3600 of SEQ ID NO: 1243400
agaaaugcgugaguucaga

SEQ ID NO: 1414271 - RNA, 19 nt, Artificial Sequence
  Description of Artificial Sequence: Synthetic oligonucleotide
  Antisense strand to SEQ ID NO: 1414270
ucugaacucacgcauuucu

SEQ ID NO: 1414272 - RNA, 19 nt, Artificial Sequence
  Description of Artificial Sequence: Synthetic oligonucleotide
  Sense strand starting at position 3674 of SEQ ID NO: 1243400
aggagaggcuucucauaug

SEQ ID NO: 1414273 - RNA, 19 nt, Artificial Sequence
  Description of Artificial Sequence: Synthetic oligonucleotide
  Antisense strand to SEQ ID NO: 1414272
cauaugagaagccucuccu

SEQ ID NO: 1414274 - RNA, 19 nt, Artificial Sequence
  Description of Artificial Sequence: Synthetic oligonucleotide
  Sense strand starting at position 3677 of SEQ ID NO: 1243400
agaggcuucucauaugcua

SEQ ID NO: 1414275 - RNA, 19 nt, Artificial Sequence
  Description of Artificial Sequence: Synthetic oligonucleotide
  Antisense strand to SEQ ID NO: 1414274
uagcauaugagaagccucu

SEQ ID NO: 1414276 - RNA, 19 nt, Artificial Sequence
  Description of Artificial Sequence: Synthetic oligonucleotide
  Sense strand starting at position 3719 of SEQ ID NO: 1243400
cucugugcccaugaggaau

SEQ ID NO: 1414277 - RNA, 19 nt, Artificial Sequence
  Description of Artificial Sequence: Synthetic oligonucleotide
  Antisense strand to SEQ ID NO: 1414276
auuccucaugggcacagag

SEQ ID NO: 1414278 - RNA, 19 nt, Artificial Sequence
  Description of Artificial Sequence: Synthetic oligonucleotide
  Sense strand starting at position 3793 of SEQ ID NO: 1243400
ucaggagguucccuugacu

SEQ ID NO: 1414279 - RNA, 19 nt, Artificial Sequence
  Description of Artificial Sequence: Synthetic oligonucleotide
  Antisense strand to SEQ ID NO: 1414278
agucaagggaaccuccuga

SEQ ID NO: 1414280 - RNA, 19 nt, Artificial Sequence
  Description of Artificial Sequence: Synthetic oligonucleotide
  Sense strand starting at position 3799 of SEQ ID NO: 1243400
gguucccuugacuaagacu

SEQ ID NO: 1414281 - RNA, 19 nt, Artificial Sequence
  Description of Artificial Sequence: Synthetic oligonucleotide
  Antisense strand to SEQ ID NO: 1414280
agucuuagucaagggaacc

SEQ ID NO: 1414282 - RNA, 19 nt, Artificial Sequence
  Description of Artificial Sequence: Synthetic oligonucleotide
  Sense strand starting at position 3807 of SEQ ID NO: 1243400
ugacuaagacuuuguauug

SEQ ID NO: 1414283 - RNA, 19 nt, Artificial Sequence
  Description of Artificial Sequence: Synthetic oligonucleotide
  Antisense strand to SEQ ID NO: 1414282
caauacaaagucuuaguca

SEQ ID NO: 1414284 - RNA, 19 nt, Artificial Sequence
  Description of Artificial Sequence: Synthetic oligonucleotide
  Sense strand starting at position 3819 of SEQ ID NO: 1243400
uguauugcacucuaguaac

SEQ ID NO: 1414285 - RNA, 19 nt, Artificial Sequence
  Description of Artificial Sequence: Synthetic oligonucleotide
  Antisense strand to SEQ ID NO: 1414284
guuacuagagugcaauaca

SEQ ID NO: 1414286 - RNA, 19 nt, Artificial Sequence
  Description of Artificial Sequence: Synthetic oligonucleotide
  Sense strand starting at position 3883 of SEQ ID NO: 1243400
gugagauuaauagaguggu

SEQ ID NO: 1414287 - RNA, 19 nt, Artificial Sequence
  Description of Artificial Sequence: Synthetic oligonucleotide
  Antisense strand to SEQ ID NO: 1414286
accacucuauuaaucucac

SEQ ID NO: 1414288 - RNA, 19 nt, Artificial Sequence
  Description of Artificial Sequence: Synthetic oligonucleotide
  Sense strand starting at position 3887 of SEQ ID NO: 1243400
gauuaauagagugguagca

SEQ ID NO: 1414289 - RNA, 19 nt, Artificial Sequence
  Description of Artificial Sequence: Synthetic oligonucleotide
  Antisense strand to SEQ ID NO: 1414288
ugcuaccacucuauuaauc

SEQ ID NO: 1414290 - RNA, 19 nt, Artificial Sequence
  Description of Artificial Sequence: Synthetic oligonucleotide
  Sense strand starting at position 3889 of SEQ ID NO: 1243400
uuaauagagugguagcaag

SEQ ID NO: 1414291 - RNA, 19 nt, Artificial Sequence
  Description of Artificial Sequence: Synthetic oligonucleotide
  Antisense strand to SEQ ID NO: 1414290
cuugcuaccacucuauuaa

SEQ ID NO: 1414292 - RNA, 19 nt, Artificial Sequence
  Description of Artificial Sequence: Synthetic oligonucleotide
  Sense strand starting at position 3959 of SEQ ID NO: 1243400
gaaauagcugcaugcgcua

SEQ ID NO: 1414293 - RNA, 19 nt, Artificial Sequence
  Description of Artificial Sequence: Synthetic oligonucleotide
  Antisense strand to SEQ ID NO: 1414292
uagcgcaugcagcuauuuc

SEQ ID NO: 1414294 - RNA, 19 nt, Artificial Sequence
  Description of Artificial Sequence: Synthetic oligonucleotide
  Sense strand starting at position 39 of SEQ ID NO: 1243401
cuaggaagcuguuugcaaa

SEQ ID NO: 1414295 - RNA, 19 nt, Artificial Sequence
  Description of Artificial Sequence: Synthetic oligonucleotide
  Antisense strand to SEQ ID NO: 1414294
uuugcaaacagcuuccuag

SEQ ID NO: 1414296 - RNA, 19 nt, Artificial Sequence
  Description of Artificial Sequence: Synthetic oligonucleotide
  Sense strand starting at position 40 of SEQ ID NO: 1243401
uaggaagcuguuugcaaau

SEQ ID NO: 1414297 - RNA, 19 nt, Artificial Sequence
  Description of Artificial Sequence: Synthetic oligonucleotide
  Antisense strand to SEQ ID NO: 1414296
auuugcaaacagcuuccua

SEQ ID NO: 1414298 - RNA, 19 nt, Artificial Sequence
  Description of Artificial Sequence: Synthetic oligonucleotide
  Sense strand starting at position 51 of SEQ ID NO: 1243401
uugcaaaucuagucugcaa

SEQ ID NO: 1414299 - RNA, 19 nt, Artificial Sequence
  Description of Artificial Sequence: Synthetic oligonucleotide
  Antisense strand to SEQ ID NO: 1414298
uugcagacuagauuugcaa

SEQ ID NO: 1414300 - RNA, 19 nt, Artificial Sequence
  Description of Artificial Sequence: Synthetic oligonucleotide
  Sense strand starting at position 53 of SEQ ID NO: 1243401
gcaaaucuagucugcaaau

SEQ ID NO: 1414301 - RNA, 19 nt, Artificial Sequence
  Description of Artificial Sequence: Synthetic oligonucleotide
  Antisense strand to SEQ ID NO: 1414300
auuugcagacuagauuugc

SEQ ID NO: 1414302 - RNA, 19 nt, Artificial Sequence
  Description of Artificial Sequence: Synthetic oligonucleotide
  Sense strand starting at position 371 of SEQ ID NO: 1243401
aggucacccuguuuguuua

SEQ ID NO: 1414303 - RNA, 19 nt, Artificial Sequence
  Description of Artificial Sequence: Synthetic oligonucleotide
  Antisense strand to SEQ ID NO: 1414302
uaaacaaacagggugaccu

SEQ ID NO: 1414304 - RNA, 19 nt, Artificial Sequence
  Description of Artificial Sequence: Synthetic oligonucleotide
  Sense strand starting at position 372 of SEQ ID NO: 1243401
ggucacccuguuuguuuaa

SEQ ID NO: 1414305 - RNA, 19 nt, Artificial Sequence
  Description of Artificial Sequence: Synthetic oligonucleotide
  Antisense strand to SEQ ID NO: 1414304
uuaaacaaacagggugacc

SEQ ID NO: 1414306 - RNA, 19 nt, Artificial Sequence
  Description of Artificial Sequence: Synthetic oligonucleotide
  Sense strand starting at position 373 of SEQ ID NO: 1243401
gucacccuguuuguuuaaa

SEQ ID NO: 1414307 - RNA, 19 nt, Artificial Sequence
  Description of Artificial Sequence: Synthetic oligonucleotide
  Antisense strand to SEQ ID NO: 1414306
uuuaaacaaacagggugac

SEQ ID NO: 1414308 - RNA, 19 nt, Artificial Sequence
  Description of Artificial Sequence: Synthetic oligonucleotide
  Sense strand starting at position 374 of SEQ ID NO: 1243401
ucacccuguuuguuuaaau

SEQ ID NO: 1414309 - RNA, 19 nt, Artificial Sequence
  Description of Artificial Sequence: Synthetic oligonucleotide
  Antisense strand to SEQ ID NO: 1414308
auuuaaacaaacaggguga

SEQ ID NO: 1414310 - RNA, 19 nt, Artificial Sequence
  Description of Artificial Sequence: Synthetic oligonucleotide
  Sense strand starting at position 409 of SEQ ID NO: 1243401
ccagguuacuuacagauga

SEQ ID NO: 1414311 - RNA, 19 nt, Artificial Sequence
  Description of Artificial Sequence: Synthetic oligonucleotide
  Antisense strand to SEQ ID NO: 1414310
ucaucuguaaguaaccugg

SEQ ID NO: 1414312 - RNA, 19 nt, Artificial Sequence
  Description of Artificial Sequence: Synthetic oligonucleotide
  Sense strand starting at position 617 of SEQ ID NO: 1243401
acacacuacuugggagaau

SEQ ID NO: 1414313 - RNA, 19 nt, Artificial Sequence
  Description of Artificial Sequence: Synthetic oligonucleotide
  Antisense strand to SEQ ID NO: 1414312
auucucccaaguagugugu

SEQ ID NO: 1414314 - RNA, 19 nt, Artificial Sequence
  Description of Artificial Sequence: Synthetic oligonucleotide
  Sense strand starting at position 628 of SEQ ID NO: 1243401
gggagaauaugcccagugu

SEQ ID NO: 1414315 - RNA, 19 nt, Artificial Sequence
  Description of Artificial Sequence: Synthetic oligonucleotide
  Antisense strand to SEQ ID NO: 1414314
acacugggcauauucuccc

SEQ ID NO: 1414316 - RNA, 19 nt, Artificial Sequence
  Description of Artificial Sequence: Synthetic oligonucleotide
  Sense strand starting at position 700 of SEQ ID NO: 1243401
ggagucauuugugacucgu

SEQ ID NO: 1414317 - RNA, 19 nt, Artificial Sequence
  Description of Artificial Sequence: Synthetic oligonucleotide
  Antisense strand to SEQ ID NO: 1414316
acgagucacaaaugacucc

SEQ ID NO: 1414318 - RNA, 19 nt, Artificial Sequence
  Description of Artificial Sequence: Synthetic oligonucleotide
  Sense strand starting at position 702 of SEQ ID NO: 1243401
agucauuugugacucguua

SEQ ID NO: 1414319 - RNA, 19 nt, Artificial Sequence
  Description of Artificial Sequence: Synthetic oligonucleotide
  Antisense strand to SEQ ID NO: 1414318
uaacgagucacaaaugacu

SEQ ID NO: 1414320 - RNA, 19 nt, Artificial Sequence
  Description of Artificial Sequence: Synthetic oligonucleotide
  Sense strand starting at position 704 of SEQ ID NO: 1243401
ucauuugugacucguuaag

SEQ ID NO: 1414321 - RNA, 19 nt, Artificial Sequence
  Description of Artificial Sequence: Synthetic oligonucleotide
  Antisense strand to SEQ ID NO: 1414320
cuuaacgagucacaaauga

SEQ ID NO: 1414322 - RNA, 19 nt, Artificial Sequence
  Description of Artificial Sequence: Synthetic oligonucleotide
  Sense strand starting at position 711 of SEQ ID NO: 1243401
ugacucguuaagggaauga

SEQ ID NO: 1414323 - RNA, 19 nt, Artificial Sequence
  Description of Artificial Sequence: Synthetic oligonucleotide
  Antisense strand to SEQ ID NO: 1414322
ucauucccuuaacgaguca

SEQ ID NO: 1414324 - RNA, 19 nt, Artificial Sequence
  Description of Artificial Sequence: Synthetic oligonucleotide
  Sense strand starting at position 745 of SEQ ID NO: 1243401
agguaacauuuccauuguu

SEQ ID NO: 1414325 - RNA, 19 nt, Artificial Sequence
  Description of Artificial Sequence: Synthetic oligonucleotide
  Antisense strand to SEQ ID NO: 1414324
aacaauggaaauguuaccu

SEQ ID NO: 1414326 - RNA, 19 nt, Artificial Sequence
  Description of Artificial Sequence: Synthetic oligonucleotide
  Sense strand starting at position 753 of SEQ ID NO: 1243401
uuuccauuguucuuauugu

SEQ ID NO: 1414327 - RNA, 19 nt, Artificial Sequence
  Description of Artificial Sequence: Synthetic oligonucleotide
  Antisense strand to SEQ ID NO: 1414326
acaauaagaacaauggaaa

SEQ ID NO: 1414328 - RNA, 19 nt, Artificial Sequence
  Description of Artificial Sequence: Synthetic oligonucleotide
  Sense strand starting at position 763 of SEQ ID NO: 1243401
ucuuauuguacgcaguaga

SEQ ID NO: 1414329 - RNA, 19 nt, Artificial Sequence
  Description of Artificial Sequence: Synthetic oligonucleotide
  Antisense strand to SEQ ID NO: 1414328
ucuacugcguacaauaaga

SEQ ID NO: 1414330 - RNA, 19 nt, Artificial Sequence
  Description of Artificial Sequence: Synthetic oligonucleotide
  Sense strand starting at position 766 of SEQ ID NO: 1243401
uauuguacgcaguagagaa

SEQ ID NO: 1414331 - RNA, 19 nt, Artificial Sequence
  Description of Artificial Sequence: Synthetic oligonucleotide
  Antisense strand to SEQ ID NO: 1414330
uucucuacugcguacaaua

SEQ ID NO: 1414332 - RNA, 19 nt, Artificial Sequence
  Description of Artificial Sequence: Synthetic oligonucleotide
  Sense strand starting at position 778 of SEQ ID NO: 1243401
uagagaagguuuccacagu

SEQ ID NO: 1414333 - RNA, 19 nt, Artificial Sequence
  Description of Artificial Sequence: Synthetic oligonucleotide
  Antisense strand to SEQ ID NO: 1414332
acuguggaaaccuucucua

SEQ ID NO: 1414334 - RNA, 19 nt, Artificial Sequence
  Description of Artificial Sequence: Synthetic oligonucleotide
  Sense strand starting at position 864 of SEQ ID NO: 1243401
acagguauauaguccucua

SEQ ID NO: 1414335 - RNA, 19 nt, Artificial Sequence
  Description of Artificial Sequence: Synthetic oligonucleotide
  Antisense strand to SEQ ID NO: 1414334
uagaggacuauauaccugu

SEQ ID NO: 1414336 - RNA, 19 nt, Artificial Sequence
  Description of Artificial Sequence: Synthetic oligonucleotide
  Sense strand starting at position 867 of SEQ ID NO: 1243401
gguauauaguccucuaugg

SEQ ID NO: 1414337 - RNA, 19 nt, Artificial Sequence
  Description of Artificial Sequence: Synthetic oligonucleotide
  Antisense strand to SEQ ID NO: 1414336
ccauagaggacuauauacc

SEQ ID NO: 1414338 - RNA, 19 nt, Artificial Sequence
  Description of Artificial Sequence: Synthetic oligonucleotide
  Sense strand starting at position 965 of SEQ ID NO: 1243401
gcaugaauuugcugaagau

SEQ ID NO: 1414339 - RNA, 19 nt, Artificial Sequence
  Description of Artificial Sequence: Synthetic oligonucleotide
  Antisense strand to SEQ ID NO: 1414338
aucuucagcaaauucaugc

SEQ ID NO: 1414340 - RNA, 19 nt, Artificial Sequence
  Description of Artificial Sequence: Synthetic oligonucleotide
  Sense strand starting at position 1261 of SEQ ID NO: 1243401
cgacccuaguccucuaaau

SEQ ID NO: 1414341 - RNA, 19 nt, Artificial Sequence
  Description of Artificial Sequence: Synthetic oligonucleotide
  Antisense strand to SEQ ID NO: 1414340
auuuagaggacuagggucg

SEQ ID NO: 1414342 - RNA, 19 nt, Artificial Sequence
  Description of Artificial Sequence: Synthetic oligonucleotide
  Sense strand starting at position 1334 of SEQ ID NO: 1243401
uccugcaacuucucgcaau

SEQ ID NO: 1414343 - RNA, 19 nt, Artificial Sequence
  Description of Artificial Sequence: Synthetic oligonucleotide
  Antisense strand to SEQ ID NO: 1414342
auugcgagaaguugcagga

SEQ ID NO: 1414344 - RNA, 19 nt, Artificial Sequence
  Description of Artificial Sequence: Synthetic oligonucleotide
  Sense strand starting at position 2135 of SEQ ID NO: 1243401
augcauggguccguugaca

SEQ ID NO: 1414345 - RNA, 19 nt, Artificial Sequence
  Description of Artificial Sequence: Synthetic oligonucleotide
  Antisense strand to SEQ ID NO: 1414344
ugucaacggacccaugcau

SEQ ID NO: 1414346 - RNA, 19 nt, Artificial Sequence
  Description of Artificial Sequence: Synthetic oligonucleotide
  Sense strand starting at position 2443 of SEQ ID NO: 1243401
gcuggucucgagugaucug

SEQ ID NO: 1414347 - RNA, 19 nt, Artificial Sequence
  Description of Artificial Sequence: Synthetic oligonucleotide
  Antisense strand to SEQ ID NO: 1414346
cagaucacucgagaccagc

SEQ ID NO: 1414348 - RNA, 19 nt, Artificial Sequence
  Description of Artificial Sequence: Synthetic oligonucleotide
  Sense strand starting at position 2513 of SEQ ID NO: 1243401
ugaaauuagauagguguga

SEQ ID NO: 1414349 - RNA, 19 nt, Artificial Sequence
  Description of Artificial Sequence: Synthetic oligonucleotide
  Antisense strand to SEQ ID NO: 1414348
ucacaccuaucuaauuuca

SEQ ID NO: 1414350 - RNA, 19 nt, Artificial Sequence
  Description of Artificial Sequence: Synthetic oligonucleotide
  Sense strand starting at position 2514 of SEQ ID NO: 1243401
gaaauuagauaggugugau

SEQ ID NO: 1414351 - RNA, 19 nt, Artificial Sequence
  Description of Artificial Sequence: Synthetic oligonucleotide
  Antisense strand to SEQ ID NO: 1414350
aucacaccuaucuaauuuc

SEQ ID NO: 1414352 - RNA, 19 nt, Artificial Sequence
  Description of Artificial Sequence: Synthetic oligonucleotide
  Sense strand starting at position 2537 of SEQ ID NO: 1243401
ccaugacuuugugaauaua

SEQ ID NO: 1414353 - RNA, 19 nt, Artificial Sequence
  Description of Artificial Sequence: Synthetic oligonucleotide
  Antisense strand to SEQ ID NO: 1414352
uauauucacaaagucaugg

SEQ ID NO: 1414354 - RNA, 19 nt, Artificial Sequence
  Description of Artificial Sequence: Synthetic oligonucleotide
  Sense strand starting at position 2630 of SEQ ID NO: 1243401
ccagcacuuugagagaauu

SEQ ID NO: 1414355 - RNA, 19 nt, Artificial Sequence
  Description of Artificial Sequence: Synthetic oligonucleotide
  Antisense strand to SEQ ID NO: 1414354
aauucucucaaagugcugg

SEQ ID NO: 1414356 - RNA, 19 nt, Artificial Sequence
  Description of Artificial Sequence: Synthetic oligonucleotide
  Sense strand starting at position 2654 of SEQ ID NO: 1243401
ggaggauccuuugagggca

SEQ ID NO: 1414357 - RNA, 19 nt, Artificial Sequence
  Description of Artificial Sequence: Synthetic oligonucleotide
  Antisense strand to SEQ ID NO: 1414356
ugcccucaaaggauccucc

SEQ ID NO: 1414358 - RNA, 19 nt, Artificial Sequence
  Description of Artificial Sequence: Synthetic oligonucleotide
  Sense strand starting at position 2670 of SEQ ID NO: 1243401
gcaggaguuccagauuagc

SEQ ID NO: 1414359 - RNA, 19 nt, Artificial Sequence
  Description of Artificial Sequence: Synthetic oligonucleotide
  Antisense strand to SEQ ID NO: 1414358
gcuaaucuggaacuccugc

SEQ ID NO: 1414360 - RNA, 19 nt, Artificial Sequence
  Description of Artificial Sequence: Synthetic oligonucleotide
  Sense strand starting at position 2679 of SEQ ID NO: 1243401
ccagauuagccuggacaaa

SEQ ID NO: 1414361 - RNA, 19 nt, Artificial Sequence
  Description of Artificial Sequence: Synthetic oligonucleotide
  Antisense strand to SEQ ID NO: 1414360
uuuguccaggcuaaucugg

SEQ ID NO: 1414362 - RNA, 19 nt, Artificial Sequence
  Description of Artificial Sequence: Synthetic oligonucleotide
  Sense strand starting at position 3617 of SEQ ID NO: 1243401
aggaguuuaagacgagucu

SEQ ID NO: 1414363 - RNA, 19 nt, Artificial Sequence
  Description of Artificial Sequence: Synthetic oligonucleotide
  Antisense strand to SEQ ID NO: 1414362
agacucgucuuaaacuccu

SEQ ID NO: 1414364 - RNA, 19 nt, Artificial Sequence
  Description of Artificial Sequence: Synthetic oligonucleotide
  Sense strand starting at position 3915 of SEQ ID NO: 1243401
auucuaucauuugggaauc

SEQ ID NO: 1414365 - RNA, 19 nt, Artificial Sequence
  Description of Artificial Sequence: Synthetic oligonucleotide
  Antisense strand to SEQ ID NO: 1414364
gauucccaaaugauagaau

SEQ ID NO: 1414366 - RNA, 19 nt, Artificial Sequence
  Description of Artificial Sequence: Synthetic oligonucleotide
  Sense strand starting at position 3916 of SEQ ID NO: 1243401
uucuaucauuugggaaucu

SEQ ID NO: 1414367 - RNA, 19 nt, Artificial Sequence
  Description of Artificial Sequence: Synthetic oligonucleotide
  Antisense strand to SEQ ID NO: 1414366
agauucccaaaugauagaa

SEQ ID NO: 1414368 - RNA, 19 nt, Artificial Sequence
  Description of Artificial Sequence: Synthetic oligonucleotide
  Sense strand starting at position 3917 of SEQ ID NO: 1243401
ucuaucauuugggaaucuu

SEQ ID NO: 1414369 - RNA, 19 nt, Artificial Sequence
  Description of Artificial Sequence: Synthetic oligonucleotide
  Antisense strand to SEQ ID NO: 1414368
aagauucccaaaugauaga

SEQ ID NO: 1414370 - RNA, 19 nt, Artificial Sequence
  Description of Artificial Sequence: Synthetic oligonucleotide
  Sense strand starting at position 3926 of SEQ ID NO: 1243401
ugggaaucuuaagaucagu

SEQ ID NO: 1414371 - RNA, 19 nt, Artificial Sequence
  Description of Artificial Sequence: Synthetic oligonucleotide
  Antisense strand to SEQ ID NO: 1414370
acugaucuuaagauuccca

SEQ ID NO: 1414372 - RNA, 19 nt, Artificial Sequence
  Description of Artificial Sequence: Synthetic oligonucleotide
  Sense strand starting at position 3943 of SEQ ID NO: 1243401
guucuaccacuuuguggau

SEQ ID NO: 1414373 - RNA, 19 nt, Artificial Sequence
  Description of Artificial Sequence: Synthetic oligonucleotide
  Antisense strand to SEQ ID NO: 1414372
auccacaaagugguagaac

SEQ ID NO: 1414374 - RNA, 19 nt, Artificial Sequence
  Description of Artificial Sequence: Synthetic oligonucleotide
  Sense strand starting at position 9 of SEQ ID NO: 1243402
gugggacacucuuucuauu

SEQ ID NO: 1414375 - RNA, 19 nt, Artificial Sequence
  Description of Artificial Sequence: Synthetic oligonucleotide
  Antisense strand to SEQ ID NO: 1414374
aauagaaagagugucccac

SEQ ID NO: 1414376 - RNA, 19 nt, Artificial Sequence
  Description of Artificial Sequence: Synthetic oligonucleotide
  Sense strand starting at position 200 of SEQ ID NO: 1243402
agagacuuaucuggaacuu

SEQ ID NO: 1414377 - RNA, 19 nt, Artificial Sequence
  Description of Artificial Sequence: Synthetic oligonucleotide
  Antisense strand to SEQ ID NO: 1414376
aaguuccagauaagucucu

SEQ ID NO: 1414378 - RNA, 19 nt, Artificial Sequence
  Description of Artificial Sequence: Synthetic oligonucleotide
  Sense strand starting at position 260 of SEQ ID NO: 1243402
ugagauugcgggugugaac

SEQ ID NO: 1414379 - RNA, 19 nt, Artificial Sequence
  Description of Artificial Sequence: Synthetic oligonucleotide
  Antisense strand to SEQ ID NO: 1414378
guucacacccgcaaucuca

SEQ ID NO: 1414380 - RNA, 19 nt, Artificial Sequence
  Description of Artificial Sequence: Synthetic oligonucleotide
  Sense strand starting at position 836 of SEQ ID NO: 1243402
gagagauguccuggaucag

SEQ ID NO: 1414381 - RNA, 19 nt, Artificial Sequence
  Description of Artificial Sequence: Synthetic oligonucleotide
  Antisense strand to SEQ ID NO: 1414380
cugauccaggacaucucuc

SEQ ID NO: 1414382 - RNA, 19 nt, Artificial Sequence
  Description of Artificial Sequence: Synthetic oligonucleotide
  Sense strand starting at position 1239 of SEQ ID NO: 1243402
cgcccuuugucucaccauu

SEQ ID NO: 1414383 - RNA, 19 nt, Artificial Sequence
  Description of Artificial Sequence: Synthetic oligonucleotide
  Antisense strand to SEQ ID NO: 1414382
aauggugagacaaagggcg

SEQ ID NO: 1414384 - RNA, 19 nt, Artificial Sequence
  Description of Artificial Sequence: Synthetic oligonucleotide
  Sense strand starting at position 1560 of SEQ ID NO: 1243402
gaccaaucugggcagcauu

SEQ ID NO: 1414385 - RNA, 19 nt, Artificial Sequence
  Description of Artificial Sequence: Synthetic oligonucleotide
  Antisense strand to SEQ ID NO: 1414384
aaugcugcccagauugguc

SEQ ID NO: 1414386 - RNA, 19 nt, Artificial Sequence
  Description of Artificial Sequence: Synthetic oligonucleotide
  Sense strand starting at position 1903 of SEQ ID NO: 1243402
gggccauuccgguguguca

SEQ ID NO: 1414387 - RNA, 19 nt, Artificial Sequence
  Description of Artificial Sequence: Synthetic oligonucleotide
  Antisense strand to SEQ ID NO: 1414386
ugacacaccggaauggccc

SEQ ID NO: 1414388 - RNA, 19 nt, Artificial Sequence
  Description of Artificial Sequence: Synthetic oligonucleotide
  Sense strand starting at position 2019 of SEQ ID NO: 1243402
gaggguuucuuaggucagu

SEQ ID NO: 1414389 - RNA, 19 nt, Artificial Sequence
  Description of Artificial Sequence: Synthetic oligonucleotide
  Antisense strand to SEQ ID NO: 1414388
acugaccuaagaaacccuc

SEQ ID NO: 1414390 - RNA, 19 nt, Artificial Sequence
  Description of Artificial Sequence: Synthetic oligonucleotide
  Sense strand starting at position 2178 of SEQ ID NO: 1243402
cuggguuugguguguagaa

SEQ ID NO: 1414391 - RNA, 19 nt, Artificial Sequence
  Description of Artificial Sequence: Synthetic oligonucleotide
  Antisense strand to SEQ ID NO: 1414390
uucuacacaccaaacccag

SEQ ID NO: 1414392 - RNA, 19 nt, Artificial Sequence
  Description of Artificial Sequence: Synthetic oligonucleotide
  Sense strand starting at position 2179 of SEQ ID NO: 1243402
uggguuugguguguagaaa

SEQ ID NO: 1414393 - RNA, 19 nt, Artificial Sequence
  Description of Artificial Sequence: Synthetic oligonucleotide
  Antisense strand to SEQ ID NO: 1414392
uuucuacacaccaaaccca

SEQ ID NO: 1414394 - RNA, 19 nt, Artificial Sequence
  Description of Artificial Sequence: Synthetic oligonucleotide
  Sense strand starting at position 2484 of SEQ ID NO: 1243402
aggccagucuggagugaug

SEQ ID NO: 1414395 - RNA, 19 nt, Artificial Sequence
  Description of Artificial Sequence: Synthetic oligonucleotide
  Antisense strand to SEQ ID NO: 1414394
caucacuccagacuggccu

SEQ ID NO: 1414396 - RNA, 19 nt, Artificial Sequence
  Description of Artificial Sequence: Synthetic oligonucleotide
  Sense strand starting at position 2684 of SEQ ID NO: 1243402
uuuccauggguuugaagga

SEQ ID NO: 1414397 - RNA, 19 nt, Artificial Sequence
  Description of Artificial Sequence: Synthetic oligonucleotide
  Antisense strand to SEQ ID NO: 1414396
uccuucaaacccauggaaa

SEQ ID NO: 1414398 - RNA, 19 nt, Artificial Sequence
  Description of Artificial Sequence: Synthetic oligonucleotide
  Sense strand starting at position 2785 of SEQ ID NO: 1243402
cguucuuuguccucacuau

SEQ ID NO: 1414399 - RNA, 19 nt, Artificial Sequence
  Description of Artificial Sequence: Synthetic oligonucleotide
  Antisense strand to SEQ ID NO: 1414398
auagugaggacaaagaacg

SEQ ID NO: 1414400 - RNA, 19 nt, Artificial Sequence
  Description of Artificial Sequence: Synthetic oligonucleotide
  Sense strand starting at position 2786 of SEQ ID NO: 1243402
guucuuuguccucacuauu

SEQ ID NO: 1414401 - RNA, 19 nt, Artificial Sequence
  Description of Artificial Sequence: Synthetic oligonucleotide
  Antisense strand to SEQ ID NO: 1414400
aauagugaggacaaagaac

SEQ ID NO: 1414402 - RNA, 19 nt, Artificial Sequence
  Description of Artificial Sequence: Synthetic oligonucleotide
  Sense strand starting at position 3063 of SEQ ID NO: 1243402
ggcccucuugacugagacu

SEQ ID NO: 1414403 - RNA, 19 nt, Artificial Sequence
  Description of Artificial Sequence: Synthetic oligonucleotide
  Antisense strand to SEQ ID NO: 1414402
agucucagucaagagggcc

SEQ ID NO: 1414404 - RNA, 19 nt, Artificial Sequence
  Description of Artificial Sequence: Synthetic oligonucleotide
  Sense strand starting at position 3083 of SEQ ID NO: 1243402
uguauugcacucuagugaa

SEQ ID NO: 1414405 - RNA, 19 nt, Artificial Sequence
  Description of Artificial Sequence: Synthetic oligonucleotide
  Antisense strand to SEQ ID NO: 1414404
uucacuagagugcaauaca

SEQ ID NO: 1414406 - RNA, 19 nt, Artificial Sequence
  Description of Artificial Sequence: Synthetic oligonucleotide
  Sense strand starting at position 3147 of SEQ ID NO: 1243402
gugagauuaauagagugcu

SEQ ID NO: 1414407 - RNA, 19 nt, Artificial Sequence
  Description of Artificial Sequence: Synthetic oligonucleotide
  Antisense strand to SEQ ID NO: 1414406
agcacucuauuaaucucac

SEQ ID NO: 1414408 - RNA, 19 nt, Artificial Sequence
  Description of Artificial Sequence: Synthetic oligonucleotide
  Sense strand starting at position 3153 of SEQ ID NO: 1243402
uuaauagagugcuagcaag

SEQ ID NO: 1414409 - RNA, 19 nt, Artificial Sequence
  Description of Artificial Sequence: Synthetic oligonucleotide
  Antisense strand to SEQ ID NO: 1414408
cuugcuagcacucuauuaa

SEQ ID NO: 1414410 - RNA, 19 nt, Artificial Sequence
  Description of Artificial Sequence: Synthetic oligonucleotide
  Sense strand starting at position 3159 of SEQ ID NO: 1243402
gagugcuagcaagacaaca

SEQ ID NO: 1414411 - RNA, 19 nt, Artificial Sequence
  Description of Artificial Sequence: Synthetic oligonucleotide
  Antisense strand to SEQ ID NO: 1414410
uguugucuugcuagcacuc

SEQ ID NO: 1414412 - RNA, 19 nt, Artificial Sequence
  Description of Artificial Sequence: Synthetic oligonucleotide
  Sense strand starting at position 3301 of SEQ ID NO: 1243402
gcaacauggcgcuguauuu

SEQ ID NO: 1414413 - RNA, 19 nt, Artificial Sequence
  Description of Artificial Sequence: Synthetic oligonucleotide
  Antisense strand to SEQ ID NO: 1414412
aaauacagcgccauguugc

SEQ ID NO: 1414414 - RNA, 19 nt, Artificial Sequence
  Description of Artificial Sequence: Synthetic oligonucleotide
  Sense strand starting at position 3334 of SEQ ID NO: 1243402
cuaggaucucacuguacaa

SEQ ID NO: 1414415 - RNA, 19 nt, Artificial Sequence
  Description of Artificial Sequence: Synthetic oligonucleotide
  Antisense strand to SEQ ID NO: 1414414
uuguacagugagauccuag

SEQ ID NO: 1414416 - RNA, 19 nt, Artificial Sequence
  Description of Artificial Sequence: Synthetic oligonucleotide
  Sense strand starting at position 3344 of SEQ ID NO: 1243402
acuguacaaucaguaacau

SEQ ID NO: 1414417 - RNA, 19 nt, Artificial Sequence
  Description of Artificial Sequence: Synthetic oligonucleotide
  Antisense strand to SEQ ID NO: 1414416
auguuacugauuguacagu

SEQ ID NO: 1414418 - RNA, 19 nt, Artificial Sequence
  Description of Artificial Sequence: Synthetic oligonucleotide
  Sense strand starting at position 3593 of SEQ ID NO: 1243402
aggaaaucugccuacguuc

SEQ ID NO: 1414419 - RNA, 19 nt, Artificial Sequence
  Description of Artificial Sequence: Synthetic oligonucleotide
  Antisense strand to SEQ ID NO: 1414418
gaacguaggcagauuuccu

SEQ ID NO: 1414420 - RNA, 19 nt, Artificial Sequence
  Description of Artificial Sequence: Synthetic oligonucleotide
  Sense strand starting at position 599 of SEQ ID NO: 1243403
gugggacacucuuucuauu

SEQ ID NO: 1414421 - RNA, 19 nt, Artificial Sequence
  Description of Artificial Sequence: Synthetic oligonucleotide
  Antisense strand to SEQ ID NO: 1414420
aauagaaagagugucccac

SEQ ID NO: 1414422 - RNA, 19 nt, Artificial Sequence
  Description of Artificial Sequence: Synthetic oligonucleotide
  Sense strand starting at position 790 of SEQ ID NO: 1243403
agagacuuaucuggaacuu

SEQ ID NO: 1414423 - RNA, 19 nt, Artificial Sequence
  Description of Artificial Sequence: Synthetic oligonucleotide
  Antisense strand to SEQ ID NO: 1414422
aaguuccagauaagucucu

SEQ ID NO: 1414424 - RNA, 19 nt, Artificial Sequence
  Description of Artificial Sequence: Synthetic oligonucleotide
  Sense strand starting at position 850 of SEQ ID NO: 1243403
ugagauugcgggugugaac

SEQ ID NO: 1414425 - RNA, 19 nt, Artificial Sequence
  Description of Artificial Sequence: Synthetic oligonucleotide
  Antisense strand to SEQ ID NO: 1414424
guucacacccgcaaucuca

SEQ ID NO: 1414426 - RNA, 19 nt, Artificial Sequence
  Description of Artificial Sequence: Synthetic oligonucleotide
  Sense strand starting at position 1426 of SEQ ID NO: 1243403
gagagauguccuggaucag

SEQ ID NO: 1414427 - RNA, 19 nt, Artificial Sequence
  Description of Artificial Sequence: Synthetic oligonucleotide
  Antisense strand to SEQ ID NO: 1414426
cugauccaggacaucucuc

SEQ ID NO: 1414428 - RNA, 19 nt, Artificial Sequence
  Description of Artificial Sequence: Synthetic oligonucleotide
  Sense strand starting at position 1829 of SEQ ID NO: 1243403
cgcccuuugucucaccauu

SEQ ID NO: 1414429 - RNA, 19 nt, Artificial Sequence
  Description of Artificial Sequence: Synthetic oligonucleotide
  Antisense strand to SEQ ID NO: 1414428
aauggugagacaaagggcg

SEQ ID NO: 1414430 - RNA, 19 nt, Artificial Sequence
  Description of Artificial Sequence: Synthetic oligonucleotide
  Sense strand starting at position 2150 of SEQ ID NO: 1243403
gaccaaucugggcagcauu

SEQ ID NO: 1414431 - RNA, 19 nt, Artificial Sequence
  Description of Artificial Sequence: Synthetic oligonucleotide
  Antisense strand to SEQ ID NO: 1414430
aaugcugcccagauugguc

SEQ ID NO: 1414432 - RNA, 19 nt, Artificial Sequence
  Description of Artificial Sequence: Synthetic oligonucleotide
  Sense strand starting at position 2493 of SEQ ID NO: 1243403
gggccauuccgguguguca

SEQ ID NO: 1414433 - RNA, 19 nt, Artificial Sequence
  Description of Artificial Sequence: Synthetic oligonucleotide
  Antisense strand to SEQ ID NO: 1414432
ugacacaccggaauggccc

SEQ ID NO: 1414434 - RNA, 19 nt, Artificial Sequence
  Description of Artificial Sequence: Synthetic oligonucleotide
  Sense strand starting at position 2609 of SEQ ID NO: 1243403
gaggguuucuuaggucagu

SEQ ID NO: 1414435 - RNA, 19 nt, Artificial Sequence
  Description of Artificial Sequence: Synthetic oligonucleotide
  Antisense strand to SEQ ID NO: 1414434
acugaccuaagaaacccuc

SEQ ID NO: 1414436 - RNA, 19 nt, Artificial Sequence
  Description of Artificial Sequence: Synthetic oligonucleotide
  Sense strand starting at position 2768 of SEQ ID NO: 1243403
cuggguuugguguguagaa

SEQ ID NO: 1414437 - RNA, 19 nt, Artificial Sequence
  Description of Artificial Sequence: Synthetic oligonucleotide
  Antisense strand to SEQ ID NO: 1414436
uucuacacaccaaacccag

SEQ ID NO: 1414438 - RNA, 19 nt, Artificial Sequence
  Description of Artificial Sequence: Synthetic oligonucleotide
  Sense strand starting at position 2769 of SEQ ID NO: 1243403
uggguuugguguguagaaa

SEQ ID NO: 1414439 - RNA, 19 nt, Artificial Sequence
  Description of Artificial Sequence: Synthetic oligonucleotide
  Antisense strand to SEQ ID NO: 1414438
uuucuacacaccaaaccca

SEQ ID NO: 1414440 - RNA, 19 nt, Artificial Sequence
  Description of Artificial Sequence: Synthetic oligonucleotide
  Sense strand starting at position 3074 of SEQ ID NO: 1243403
aggccagucuggagugaug

SEQ ID NO: 1414441 - RNA, 19 nt, Artificial Sequence
  Description of Artificial Sequence: Synthetic oligonucleotide
  Antisense strand to SEQ ID NO: 1414440
caucacuccagacuggccu

SEQ ID NO: 1414442 - RNA, 19 nt, Artificial Sequence
  Description of Artificial Sequence: Synthetic oligonucleotide
  Sense strand starting at position 3274 of SEQ ID NO: 1243403
uuuccauggguuugaagga

SEQ ID NO: 1414443 - RNA, 19 nt, Artificial Sequence
  Description of Artificial Sequence: Synthetic oligonucleotide
  Antisense strand to SEQ ID NO: 1414442
uccuucaaacccauggaaa

SEQ ID NO: 1414444 - RNA, 19 nt, Artificial Sequence
  Description of Artificial Sequence: Synthetic oligonucleotide
  Sense strand starting at position 3375 of SEQ ID NO: 1243403
cguucuuuguccucacuau

SEQ ID NO: 1414445 - RNA, 19 nt, Artificial Sequence
  Description of Artificial Sequence: Synthetic oligonucleotide
  Antisense strand to SEQ ID NO: 1414444
auagugaggacaaagaacg

SEQ ID NO: 1414446 - RNA, 19 nt, Artificial Sequence
  Description of Artificial Sequence: Synthetic oligonucleotide
  Sense strand starting at position 3376 of SEQ ID NO: 1243403
guucuuuguccucacuauu

SEQ ID NO: 1414447 - RNA, 19 nt, Artificial Sequence
  Description of Artificial Sequence: Synthetic oligonucleotide
  Antisense strand to SEQ ID NO: 1414446
aauagugaggacaaagaac

SEQ ID NO: 1414448 - RNA, 19 nt, Artificial Sequence
  Description of Artificial Sequence: Synthetic oligonucleotide
  Sense strand starting at position 3653 of SEQ ID NO: 1243403
ggcccucuugacugagacu

SEQ ID NO: 1414449 - RNA, 19 nt, Artificial Sequence
  Description of Artificial Sequence: Synthetic oligonucleotide
  Antisense strand to SEQ ID NO: 1414448
agucucagucaagagggcc

SEQ ID NO: 1414450 - RNA, 19 nt, Artificial Sequence
  Description of Artificial Sequence: Synthetic oligonucleotide
  Sense strand starting at position 3673 of SEQ ID NO: 1243403
uguauugcacucuagugaa

SEQ ID NO: 1414451 - RNA, 19 nt, Artificial Sequence
  Description of Artificial Sequence: Synthetic oligonucleotide
  Antisense strand to SEQ ID NO: 1414450
uucacuagagugcaauaca

SEQ ID NO: 1414452 - RNA, 19 nt, Artificial Sequence
  Description of Artificial Sequence: Synthetic oligonucleotide
  Sense strand starting at position 3737 of SEQ ID NO: 1243403
gugagauuaauagagugcu

SEQ ID NO: 1414453 - RNA, 19 nt, Artificial Sequence
  Description of Artificial Sequence: Synthetic oligonucleotide
  Antisense strand to SEQ ID NO: 1414452
agcacucuauuaaucucac

SEQ ID NO: 1414454 - RNA, 19 nt, Artificial Sequence
  Description of Artificial Sequence: Synthetic oligonucleotide
  Sense strand starting at position 3743 of SEQ ID NO: 1243403
uuaauagagugcuagcaag

SEQ ID NO: 1414455 - RNA, 19 nt, Artificial Sequence
  Description of Artificial Sequence: Synthetic oligonucleotide
  Antisense strand to SEQ ID NO: 1414454
cuugcuagcacucuauuaa

SEQ ID NO: 1414456 - RNA, 19 nt, Artificial Sequence
  Description of Artificial Sequence: Synthetic oligonucleotide
  Sense strand starting at position 3749 of SEQ ID NO: 1243403
gagugcuagcaagacaaca

SEQ ID NO: 1414457 - RNA, 19 nt, Artificial Sequence
  Description of Artificial Sequence: Synthetic oligonucleotide
  Antisense strand to SEQ ID NO: 1414456
uguugucuugcuagcacuc

SEQ ID NO: 1414458 - RNA, 19 nt, Artificial Sequence
  Description of Artificial Sequence: Synthetic oligonucleotide
  Sense strand starting at position 3891 of SEQ ID NO: 1243403
gcaacauggcgcuguauuu

SEQ ID NO: 1414459 - RNA, 19 nt, Artificial Sequence
  Description of Artificial Sequence: Synthetic oligonucleotide
  Antisense strand to SEQ ID NO: 1414458
aaauacagcgccauguugc

SEQ ID NO: 1414460 - RNA, 19 nt, Artificial Sequence
  Description of Artificial Sequence: Synthetic oligonucleotide
  Sense strand starting at position 3924 of SEQ ID NO: 1243403
cuaggaucucacuguacaa

SEQ ID NO: 1414461 - RNA, 19 nt, Artificial Sequence
  Description of Artificial Sequence: Synthetic oligonucleotide
  Antisense strand to SEQ ID NO: 1414460
uuguacagugagauccuag

SEQ ID NO: 1414462 - RNA, 19 nt, Artificial Sequence
  Description of Artificial Sequence: Synthetic oligonucleotide
  Sense strand starting at position 3934 of SEQ ID NO: 1243403
acuguacaaucaguaacau

SEQ ID NO: 1414463 - RNA, 19 nt, Artificial Sequence
  Description of Artificial Sequence: Synthetic oligonucleotide
  Antisense strand to SEQ ID NO: 1414462
auguuacugauuguacagu

SEQ ID NO: 1414464 - RNA, 19 nt, Artificial Sequence
  Description of Artificial Sequence: Synthetic oligonucleotide
  Sense strand starting at position 15 of SEQ ID NO: 1243408
gccgauuugaugggcuaga

SEQ ID NO: 1414465 - RNA, 19 nt, Artificial Sequence
  Description of Artificial Sequence: Synthetic oligonucleotide
  Antisense strand to SEQ ID NO: 1414464
ucuagcccaucaaaucggc

SEQ ID NO: 1414466 - RNA, 19 nt, Artificial Sequence
  Description of Artificial Sequence: Synthetic oligonucleotide
  Sense strand starting at position 71 of SEQ ID NO: 1243408
uggugaaguuagucauaac

SEQ ID NO: 1414467 - RNA, 19 nt, Artificial Sequence
  Description of Artificial Sequence: Synthetic oligonucleotide
  Antisense strand to SEQ ID NO: 1414466
guuaugacuaacuucacca

SEQ ID NO: 1414468 - RNA, 19 nt, Artificial Sequence
  Description of Artificial Sequence: Synthetic oligonucleotide
  Sense strand starting at position 72 of SEQ ID NO: 1243408
ggugaaguuagucauaacu

SEQ ID NO: 1414469 - RNA, 19 nt, Artificial Sequence
  Description of Artificial Sequence: Synthetic oligonucleotide
  Antisense strand to SEQ ID NO: 1414468
aguuaugacuaacuucacc

SEQ ID NO: 1414470 - RNA, 19 nt, Artificial Sequence
  Description of Artificial Sequence: Synthetic oligonucleotide
  Sense strand starting at position 106 of SEQ ID NO: 1243408
uugaaagguugauacuaaa

SEQ ID NO: 1414471 - RNA, 19 nt, Artificial Sequence
  Description of Artificial Sequence: Synthetic oligonucleotide
  Antisense strand to SEQ ID NO: 1414470
uuuaguaucaaccuuucaa

SEQ ID NO: 1414472 - RNA, 19 nt, Artificial Sequence
  Description of Artificial Sequence: Synthetic oligonucleotide
  Sense strand starting at position 249 of SEQ ID NO: 1243408
agagcucucugcucuugaa

SEQ ID NO: 1414473 - RNA, 19 nt, Artificial Sequence
  Description of Artificial Sequence: Synthetic oligonucleotide
  Antisense strand to SEQ ID NO: 1414472
uucaagagcagagagcucu

SEQ ID NO: 1414474 - RNA, 19 nt, Artificial Sequence
  Description of Artificial Sequence: Synthetic oligonucleotide
  Sense strand starting at position 253 of SEQ ID NO: 1243408
cucucugcucuugaaguua

SEQ ID NO: 1414475 - RNA, 19 nt, Artificial Sequence
  Description of Artificial Sequence: Synthetic oligonucleotide
  Antisense strand to SEQ ID NO: 1414474
uaacuucaagagcagagag

SEQ ID NO: 1414476 - RNA, 19 nt, Artificial Sequence
  Description of Artificial Sequence: Synthetic oligonucleotide
  Sense strand starting at position 416 of SEQ ID NO: 1243408
cuuugaugucuguaugggu

SEQ ID NO: 1414477 - RNA, 19 nt, Artificial Sequence
  Description of Artificial Sequence: Synthetic oligonucleotide
  Antisense strand to SEQ ID NO: 1414476
acccauacagacaucaaag

SEQ ID NO: 1414478 - RNA, 19 nt, Artificial Sequence
  Description of Artificial Sequence: Synthetic oligonucleotide
  Sense strand starting at position 451 of SEQ ID NO: 1243408
agucuaauguguuuguuaa

SEQ ID NO: 1414479 - RNA, 19 nt, Artificial Sequence
  Description of Artificial Sequence: Synthetic oligonucleotide
  Antisense strand to SEQ ID NO: 1414478
uuaacaaacacauuagacu

SEQ ID NO: 1414480 - RNA, 19 nt, Artificial Sequence
  Description of Artificial Sequence: Synthetic oligonucleotide
  Sense strand starting at position 463 of SEQ ID NO: 1243408
uuguuaauacagugguuua

SEQ ID NO: 1414481 - RNA, 19 nt, Artificial Sequence
  Description of Artificial Sequence: Synthetic oligonucleotide
  Antisense strand to SEQ ID NO: 1414480
uaaaccacuguauuaacaa

SEQ ID NO: 1414482 - RNA, 19 nt, Artificial Sequence
  Description of Artificial Sequence: Synthetic oligonucleotide
  Sense strand starting at position 466 of SEQ ID NO: 1243408
uuaauacagugguuuaaag

SEQ ID NO: 1414483 - RNA, 19 nt, Artificial Sequence
  Description of Artificial Sequence: Synthetic oligonucleotide
  Antisense strand to SEQ ID NO: 1414482
cuuuaaaccacuguauuaa

SEQ ID NO: 1414484 - RNA, 19 nt, Artificial Sequence
  Description of Artificial Sequence: Synthetic oligonucleotide
  Sense strand starting at position 477 of SEQ ID NO: 1243408
guuuaaagagugugcagaa

SEQ ID NO: 1414485 - RNA, 19 nt, Artificial Sequence
  Description of Artificial Sequence: Synthetic oligonucleotide
  Antisense strand to SEQ ID NO: 1414484
uucugcacacucuuuaaac

SEQ ID NO: 1414486 - RNA, 19 nt, Artificial Sequence
  Description of Artificial Sequence: Synthetic oligonucleotide
  Sense strand starting at position 478 of SEQ ID NO: 1243408
uuuaaagagugugcagaaa

SEQ ID NO: 1414487 - RNA, 19 nt, Artificial Sequence
  Description of Artificial Sequence: Synthetic oligonucleotide
  Antisense strand to SEQ ID NO: 1414486
uuucugcacacucuuuaaa

SEQ ID NO: 1414488 - RNA, 19 nt, Artificial Sequence
  Description of Artificial Sequence: Synthetic oligonucleotide
  Sense strand starting at position 498 of SEQ ID NO: 1243408
ggguguucgagauagauaa

SEQ ID NO: 1414489 - RNA, 19 nt, Artificial Sequence
  Description of Artificial Sequence: Synthetic oligonucleotide
  Antisense strand to SEQ ID NO: 1414488
uuaucuaucucgaacaccc

SEQ ID NO: 1414490 - RNA, 19 nt, Artificial Sequence
  Description of Artificial Sequence: Synthetic oligonucleotide
  Sense strand starting at position 538 of SEQ ID NO: 1243408
acaguuaaagcauacugau

SEQ ID NO: 1414491 - RNA, 19 nt, Artificial Sequence
  Description of Artificial Sequence: Synthetic oligonucleotide
  Antisense strand to SEQ ID NO: 1414490
aucaguaugcuuuaacugu

SEQ ID NO: 1414492 - RNA, 19 nt, Artificial Sequence
  Description of Artificial Sequence: Synthetic oligonucleotide
  Sense strand starting at position 547 of SEQ ID NO: 1243408
gcauacugauagguacaca

SEQ ID NO: 1414493 - RNA, 19 nt, Artificial Sequence
  Description of Artificial Sequence: Synthetic oligonucleotide
  Antisense strand to SEQ ID NO: 1414492
uguguaccuaucaguaugc

SEQ ID NO: 1414494 - RNA, 19 nt, Artificial Sequence
  Description of Artificial Sequence: Synthetic oligonucleotide
  Sense strand starting at position 561 of SEQ ID NO: 1243408
acacaugggcuuuguuuaa

SEQ ID NO: 1414495 - RNA, 19 nt, Artificial Sequence
  Description of Artificial Sequence: Synthetic oligonucleotide
  Antisense strand to SEQ ID NO: 1414494
uuaaacaaagcccaugugu

SEQ ID NO: 1414496 - RNA, 19 nt, Artificial Sequence
  Description of Artificial Sequence: Synthetic oligonucleotide
  Sense strand starting at position 629 of SEQ ID NO: 1243408
augcuaguggcauacaaau

SEQ ID NO: 1414497 - RNA, 19 nt, Artificial Sequence
  Description of Artificial Sequence: Synthetic oligonucleotide
  Antisense strand to SEQ ID NO: 1414496
auuuguaugccacuagcau

SEQ ID NO: 1414498 - RNA, 19 nt, Artificial Sequence
  Description of Artificial Sequence: Synthetic oligonucleotide
  Sense strand starting at position 648 of SEQ ID NO: 1243408
gcaugacugccuugggaga

SEQ ID NO: 1414499 - RNA, 19 nt, Artificial Sequence
  Description of Artificial Sequence: Synthetic oligonucleotide
  Antisense strand to SEQ ID NO: 1414498
ucucccaaggcagucaugc

SEQ ID NO: 1414500 - RNA, 19 nt, Artificial Sequence
  Description of Artificial Sequence: Synthetic oligonucleotide
  Sense strand starting at position 649 of SEQ ID NO: 1243408
caugacugccuugggagau

SEQ ID NO: 1414501 - RNA, 19 nt, Artificial Sequence
  Description of Artificial Sequence: Synthetic oligonucleotide
  Antisense strand to SEQ ID NO: 1414500
aucucccaaggcagucaug

SEQ ID NO: 1414502 - RNA, 19 nt, Artificial Sequence
  Description of Artificial Sequence: Synthetic oligonucleotide
  Sense strand starting at position 740 of SEQ ID NO: 1243408
cgcaaugucagcucacgau

SEQ ID NO: 1414503 - RNA, 19 nt, Artificial Sequence
  Description of Artificial Sequence: Synthetic oligonucleotide
  Antisense strand to SEQ ID NO: 1414502
aucgugagcugacauugcg

SEQ ID NO: 1414504 - RNA, 19 nt, Artificial Sequence
  Description of Artificial Sequence: Synthetic oligonucleotide
  Sense strand starting at position 1529 of SEQ ID NO: 1243408
guucgauuaggagguuuaa

SEQ ID NO: 1414505 - RNA, 19 nt, Artificial Sequence
  Description of Artificial Sequence: Synthetic oligonucleotide
  Antisense strand to SEQ ID NO: 1414504
uuaaaccuccuaaucgaac

SEQ ID NO: 1414506 - RNA, 19 nt, Artificial Sequence
  Description of Artificial Sequence: Synthetic oligonucleotide
  Sense strand starting at position 1565 of SEQ ID NO: 1243408
auauguguuaggugugaaa

SEQ ID NO: 1414507 - RNA, 19 nt, Artificial Sequence
  Description of Artificial Sequence: Synthetic oligonucleotide
  Antisense strand to SEQ ID NO: 1414506
uuucacaccuaacacauau

SEQ ID NO: 1414508 - RNA, 19 nt, Artificial Sequence
  Description of Artificial Sequence: Synthetic oligonucleotide
  Sense strand starting at position 1567 of SEQ ID NO: 1243408
auguguuaggugugaaaug

SEQ ID NO: 1414509 - RNA, 19 nt, Artificial Sequence
  Description of Artificial Sequence: Synthetic oligonucleotide
  Antisense strand to SEQ ID NO: 1414508
cauuucacaccuaacacau

SEQ ID NO: 1414510 - RNA, 19 nt, Artificial Sequence
  Description of Artificial Sequence: Synthetic oligonucleotide
  Sense strand starting at position 1732 of SEQ ID NO: 1243408
aaaguuaaucucggugaua

SEQ ID NO: 1414511 - RNA, 19 nt, Artificial Sequence
  Description of Artificial Sequence: Synthetic oligonucleotide
  Antisense strand to SEQ ID NO: 1414510
uaucaccgagauuaacuuu

SEQ ID NO: 1414512 - RNA, 19 nt, Artificial Sequence
  Description of Artificial Sequence: Synthetic oligonucleotide
  Sense strand starting at position 1733 of SEQ ID NO: 1243408
aaguuaaucucggugauaa

SEQ ID NO: 1414513 - RNA, 19 nt, Artificial Sequence
  Description of Artificial Sequence: Synthetic oligonucleotide
  Antisense strand to SEQ ID NO: 1414512
uuaucaccgagauuaacuu

SEQ ID NO: 1414514 - RNA, 19 nt, Artificial Sequence
  Description of Artificial Sequence: Synthetic oligonucleotide
  Sense strand starting at position 1734 of SEQ ID NO: 1243408
aguuaaucucggugauaag

SEQ ID NO: 1414515 - RNA, 19 nt, Artificial Sequence
  Description of Artificial Sequence: Synthetic oligonucleotide
  Antisense strand to SEQ ID NO: 1414514
cuuaucaccgagauuaacu

SEQ ID NO: 1414516 - RNA, 19 nt, Artificial Sequence
  Description of Artificial Sequence: Synthetic oligonucleotide
  Sense strand starting at position 1735 of SEQ ID NO: 1243408
guuaaucucggugauaaga

SEQ ID NO: 1414517 - RNA, 19 nt, Artificial Sequence
  Description of Artificial Sequence: Synthetic oligonucleotide
  Antisense strand to SEQ ID NO: 1414516
ucuuaucaccgagauuaac

SEQ ID NO: 1414518 - RNA, 19 nt, Artificial Sequence
  Description of Artificial Sequence: Synthetic oligonucleotide
  Sense strand starting at position 1745 of SEQ ID NO: 1243408
gugauaagaauaugccugu

SEQ ID NO: 1414519 - RNA, 19 nt, Artificial Sequence
  Description of Artificial Sequence: Synthetic oligonucleotide
  Antisense strand to SEQ ID NO: 1414518
acaggcauauucuuaucac

SEQ ID NO: 1414520 - RNA, 19 nt, Artificial Sequence
  Description of Artificial Sequence: Synthetic oligonucleotide
  Sense strand starting at position 1748 of SEQ ID NO: 1243408
auaagaauaugccuguuaa

SEQ ID NO: 1414521 - RNA, 19 nt, Artificial Sequence
  Description of Artificial Sequence: Synthetic oligonucleotide
  Antisense strand to SEQ ID NO: 1414520
uuaacaggcauauucuuau

SEQ ID NO: 1414522 - RNA, 19 nt, Artificial Sequence
  Description of Artificial Sequence: Synthetic oligonucleotide
  Sense strand starting at position 3421 of SEQ ID NO: 1243408
gcaugucugccuccugcaa

SEQ ID NO: 1414523 - RNA, 19 nt, Artificial Sequence
  Description of Artificial Sequence: Synthetic oligonucleotide
  Antisense strand to SEQ ID NO: 1414522
uugcaggaggcagacaugc

SEQ ID NO: 1414524 - RNA, 19 nt, Artificial Sequence
  Description of Artificial Sequence: Synthetic oligonucleotide
  Sense strand starting at position 3478 of SEQ ID NO: 1243408
ugccuagauacugggcuaa

SEQ ID NO: 1414525 - RNA, 19 nt, Artificial Sequence
  Description of Artificial Sequence: Synthetic oligonucleotide
  Antisense strand to SEQ ID NO: 1414524
uuagcccaguaucuaggca

SEQ ID NO: 1414526 - RNA, 19 nt, Artificial Sequence
  Description of Artificial Sequence: Synthetic oligonucleotide
  Sense strand starting at position 3505 of SEQ ID NO: 1243408
agcugauauugugcaauuu

SEQ ID NO: 1414527 - RNA, 19 nt, Artificial Sequence
  Description of Artificial Sequence: Synthetic oligonucleotide
  Antisense strand to SEQ ID NO: 1414526
aaauugcacaauaucagcu

SEQ ID NO: 1414528 - RNA, 19 nt, Artificial Sequence
  Description of Artificial Sequence: Synthetic oligonucleotide
  Sense strand starting at position 3568 of SEQ ID NO: 1243408
guggguacucucuagaccu

SEQ ID NO: 1414529 - RNA, 19 nt, Artificial Sequence
  Description of Artificial Sequence: Synthetic oligonucleotide
  Antisense strand to SEQ ID NO: 1414528
aggucuagagaguacccac

SEQ ID NO: 1414530 - RNA, 19 nt, Artificial Sequence
  Description of Artificial Sequence: Synthetic oligonucleotide
  Sense strand starting at position 3578 of SEQ ID NO: 1243408
ucuagaccuguuugcucau

SEQ ID NO: 1414531 - RNA, 19 nt, Artificial Sequence
  Description of Artificial Sequence: Synthetic oligonucleotide
  Antisense strand to SEQ ID NO: 1414530
augagcaaacaggucuaga

SEQ ID NO: 1414532 - RNA, 19 nt, Artificial Sequence
  Description of Artificial Sequence: Synthetic oligonucleotide
  Sense strand starting at position 3584 of SEQ ID NO: 1243408
ccuguuugcucauugggaa

SEQ ID NO: 1414533 - RNA, 19 nt, Artificial Sequence
  Description of Artificial Sequence: Synthetic oligonucleotide
  Antisense strand to SEQ ID NO: 1414532
uucccaaugagcaaacagg

SEQ ID NO: 1414534 - RNA, 19 nt, Artificial Sequence
  Description of Artificial Sequence: Synthetic oligonucleotide
  Sense strand starting at position 3585 of SEQ ID NO: 1243408
cuguuugcucauugggaac

SEQ ID NO: 1414535 - RNA, 19 nt, Artificial Sequence
  Description of Artificial Sequence: Synthetic oligonucleotide
  Antisense strand to SEQ ID NO: 1414534
guucccaaugagcaaacag

SEQ ID NO: 1414536 - RNA, 19 nt, Artificial Sequence
  Description of Artificial Sequence: Synthetic oligonucleotide
  Sense strand starting at position 3623 of SEQ ID NO: 1243408
guuuaauauucugucagua

SEQ ID NO: 1414537 - RNA, 19 nt, Artificial Sequence
  Description of Artificial Sequence: Synthetic oligonucleotide
  Antisense strand to SEQ ID NO: 1414536
uacugacagaauauuaaac

SEQ ID NO: 1414538 - RNA, 19 nt, Artificial Sequence
  Description of Artificial Sequence: Synthetic oligonucleotide
  Sense strand starting at position 3628 of SEQ ID NO: 1243408
auauucugucaguaaccua

SEQ ID NO: 1414539 - RNA, 19 nt, Artificial Sequence
  Description of Artificial Sequence: Synthetic oligonucleotide
  Antisense strand to SEQ ID NO: 1414538
uagguuacugacagaauau

SEQ ID NO: 1414540 - RNA, 19 nt, Artificial Sequence
  Description of Artificial Sequence: Synthetic oligonucleotide
  Sense strand starting at position 3913 of SEQ ID NO: 1243408
gguguacucuuccuccuaa

SEQ ID NO: 1414541 - RNA, 19 nt, Artificial Sequence
  Description of Artificial Sequence: Synthetic oligonucleotide
  Antisense strand to SEQ ID NO: 1414540
uuaggaggaagaguacacc

SEQ ID NO: 1414542 - RNA, 19 nt, Artificial Sequence
  Description of Artificial Sequence: Synthetic oligonucleotide
  Sense strand starting at position 3914 of SEQ ID NO: 1243408
guguacucuuccuccuaau

SEQ ID NO: 1414543 - RNA, 19 nt, Artificial Sequence
  Description of Artificial Sequence: Synthetic oligonucleotide
  Antisense strand to SEQ ID NO: 1414542
auuaggaggaagaguacac

SEQ ID NO: 1414544 - RNA, 19 nt, Artificial Sequence
  Description of Artificial Sequence: Synthetic oligonucleotide
  Sense strand starting at position 107 of SEQ ID NO: 1243409
ucccgaacccucgcguauu

SEQ ID NO: 1414545 - RNA, 19 nt, Artificial Sequence
  Description of Artificial Sequence: Synthetic oligonucleotide
  Antisense strand to SEQ ID NO: 1414544
aauacgcgaggguucggga

SEQ ID NO: 1414546 - RNA, 19 nt, Artificial Sequence
  Description of Artificial Sequence: Synthetic oligonucleotide
  Sense strand starting at position 108 of SEQ ID NO: 1243409
cccgaacccucgcguauuu

SEQ ID NO: 1414547 - RNA, 19 nt, Artificial Sequence
  Description of Artificial Sequence: Synthetic oligonucleotide
  Antisense strand to SEQ ID NO: 1414546
aaauacgcgaggguucggg

SEQ ID NO: 1414548 - RNA, 19 nt, Artificial Sequence
  Description of Artificial Sequence: Synthetic oligonucleotide
  Sense strand starting at position 117 of SEQ ID NO: 1243409
ucgcguauuuaguaauuau

SEQ ID NO: 1414549 - RNA, 19 nt, Artificial Sequence
  Description of Artificial Sequence: Synthetic oligonucleotide
  Antisense strand to SEQ ID NO: 1414548
auaauuacuaaauacgcga

SEQ ID NO: 1414550 - RNA, 19 nt, Artificial Sequence
  Description of Artificial Sequence: Synthetic oligonucleotide
  Sense strand starting at position 147 of SEQ ID NO: 1243409
gccguuuagugagcaucua

SEQ ID NO: 1414551 - RNA, 19 nt, Artificial Sequence
  Description of Artificial Sequence: Synthetic oligonucleotide
  Antisense strand to SEQ ID NO: 1414550
uagaugcucacuaaacggc

SEQ ID NO: 1414552 - RNA, 19 nt, Artificial Sequence
  Description of Artificial Sequence: Synthetic oligonucleotide
  Sense strand starting at position 168 of SEQ ID NO: 1243409
augcccagacauuguguua

SEQ ID NO: 1414553 - RNA, 19 nt, Artificial Sequence
  Description of Artificial Sequence: Synthetic oligonucleotide
  Antisense strand to SEQ ID NO: 1414552
uaacacaaugucugggcau

SEQ ID NO: 1414554 - RNA, 19 nt, Artificial Sequence
  Description of Artificial Sequence: Synthetic oligonucleotide
  Sense strand starting at position 171 of SEQ ID NO: 1243409
cccagacauuguguuaaac

SEQ ID NO: 1414555 - RNA, 19 nt, Artificial Sequence
  Description of Artificial Sequence: Synthetic oligonucleotide
  Antisense strand to SEQ ID NO: 1414554
guuuaacacaaugucuggg

SEQ ID NO: 1414556 - RNA, 19 nt, Artificial Sequence
  Description of Artificial Sequence: Synthetic oligonucleotide
  Sense strand starting at position 173 of SEQ ID NO: 1243409
cagacauuguguuaaacag

SEQ ID NO: 1414557 - RNA, 19 nt, Artificial Sequence
  Description of Artificial Sequence: Synthetic oligonucleotide
  Antisense strand to SEQ ID NO: 1414556
cuguuuaacacaaugucug

SEQ ID NO: 1414558 - RNA, 19 nt, Artificial Sequence
  Description of Artificial Sequence: Synthetic oligonucleotide
  Sense strand starting at position 239 of SEQ ID NO: 1243409
gaucgccauuguucuuauu

SEQ ID NO: 1414559 - RNA, 19 nt, Artificial Sequence
  Description of Artificial Sequence: Synthetic oligonucleotide
  Antisense strand to SEQ ID NO: 1414558
aauaagaacaauggcgauc

SEQ ID NO: 1414560 - RNA, 19 nt, Artificial Sequence
  Description of Artificial Sequence: Synthetic oligonucleotide
  Sense strand starting at position 241 of SEQ ID NO: 1243409
ucgccauuguucuuauucu

SEQ ID NO: 1414561 - RNA, 19 nt, Artificial Sequence
  Description of Artificial Sequence: Synthetic oligonucleotide
  Antisense strand to SEQ ID NO: 1414560
agaauaagaacaauggcga

SEQ ID NO: 1414562 - RNA, 19 nt, Artificial Sequence
  Description of Artificial Sequence: Synthetic oligonucleotide
  Sense strand starting at position 296 of SEQ ID NO: 1243409
ugaagugacuuguccggga

SEQ ID NO: 1414563 - RNA, 19 nt, Artificial Sequence
  Description of Artificial Sequence: Synthetic oligonucleotide
  Antisense strand to SEQ ID NO: 1414562
ucccggacaagucacuuca

SEQ ID NO: 1414564 - RNA, 19 nt, Artificial Sequence
  Description of Artificial Sequence: Synthetic oligonucleotide
  Sense strand starting at position 300 of SEQ ID NO: 1243409
gugacuuguccgggaucac

SEQ ID NO: 1414565 - RNA, 19 nt, Artificial Sequence
  Description of Artificial Sequence: Synthetic oligonucleotide
  Antisense strand to SEQ ID NO: 1414564
gugaucccggacaagucac

SEQ ID NO: 1414566 - RNA, 19 nt, Artificial Sequence
  Description of Artificial Sequence: Synthetic oligonucleotide
  Sense strand starting at position 301 of SEQ ID NO: 1243409
ugacuuguccgggaucaca

SEQ ID NO: 1414567 - RNA, 19 nt, Artificial Sequence
  Description of Artificial Sequence: Synthetic oligonucleotide
  Antisense strand to SEQ ID NO: 1414566
ugugaucccggacaaguca

SEQ ID NO: 1414568 - RNA, 19 nt, Artificial Sequence
  Description of Artificial Sequence: Synthetic oligonucleotide
  Sense strand starting at position 312 of SEQ ID NO: 1243409
ggaucacauggcugacaaa

SEQ ID NO: 1414569 - RNA, 19 nt, Artificial Sequence
  Description of Artificial Sequence: Synthetic oligonucleotide
  Antisense strand to SEQ ID NO: 1414568
uuugucagccaugugaucc

SEQ ID NO: 1414570 - RNA, 19 nt, Artificial Sequence
  Description of Artificial Sequence: Synthetic oligonucleotide
  Sense strand starting at position 641 of SEQ ID NO: 1243409
guggguacccgagggauga

SEQ ID NO: 1414571 - RNA, 19 nt, Artificial Sequence
  Description of Artificial Sequence: Synthetic oligonucleotide
  Antisense strand to SEQ ID NO: 1414570
ucaucccucggguacccac

SEQ ID NO: 1414572 - RNA, 19 nt, Artificial Sequence
  Description of Artificial Sequence: Synthetic oligonucleotide
  Sense strand starting at position 666 of SEQ ID NO: 1243409
ccacgugacugauuauuaa

SEQ ID NO: 1414573 - RNA, 19 nt, Artificial Sequence
  Description of Artificial Sequence: Synthetic oligonucleotide
  Antisense strand to SEQ ID NO: 1414572
uuaauaaucagucacgugg

SEQ ID NO: 1414574 - RNA, 19 nt, Artificial Sequence
  Description of Artificial Sequence: Synthetic oligonucleotide
  Sense strand starting at position 669 of SEQ ID NO: 1243409
cgugacugauuauuaauau

SEQ ID NO: 1414575 - RNA, 19 nt, Artificial Sequence
  Description of Artificial Sequence: Synthetic oligonucleotide
  Antisense strand to SEQ ID NO: 1414574
auauuaauaaucagucacg

SEQ ID NO: 1414576 - RNA, 19 nt, Artificial Sequence
  Description of Artificial Sequence: Synthetic oligonucleotide
  Sense strand starting at position 670 of SEQ ID NO: 1243409
gugacugauuauuaauauc

SEQ ID NO: 1414577 - RNA, 19 nt, Artificial Sequence
  Description of Artificial Sequence: Synthetic oligonucleotide
  Antisense strand to SEQ ID NO: 1414576
gauauuaauaaucagucac

SEQ ID NO: 1414578 - RNA, 19 nt, Artificial Sequence
  Description of Artificial Sequence: Synthetic oligonucleotide
  Sense strand starting at position 693 of SEQ ID NO: 1243409
guaaguguuugggcugaaa

SEQ ID NO: 1414579 - RNA, 19 nt, Artificial Sequence
  Description of Artificial Sequence: Synthetic oligonucleotide
  Antisense strand to SEQ ID NO: 1414578
uuucagcccaaacacuuac

SEQ ID NO: 1414580 - RNA, 19 nt, Artificial Sequence
  Description of Artificial Sequence: Synthetic oligonucleotide
  Sense strand starting at position 719 of SEQ ID NO: 1243409
accguugaccucugagguu

SEQ ID NO: 1414581 - RNA, 19 nt, Artificial Sequence
  Description of Artificial Sequence: Synthetic oligonucleotide
  Antisense strand to SEQ ID NO: 1414580
aaccucagaggucaacggu

SEQ ID NO: 1414582 - RNA, 19 nt, Artificial Sequence
  Description of Artificial Sequence: Synthetic oligonucleotide
  Sense strand starting at position 728 of SEQ ID NO: 1243409
cucugagguuccgucaaac

SEQ ID NO: 1414583 - RNA, 19 nt, Artificial Sequence
  Description of Artificial Sequence: Synthetic oligonucleotide
  Antisense strand to SEQ ID NO: 1414582
guuugacggaaccucagag

SEQ ID NO: 1414584 - RNA, 19 nt, Artificial Sequence
  Description of Artificial Sequence: Synthetic oligonucleotide
  Sense strand starting at position 762 of SEQ ID NO: 1243409
ccaccaguuccgggagaca

SEQ ID NO: 1414585 - RNA, 19 nt, Artificial Sequence
  Description of Artificial Sequence: Synthetic oligonucleotide
  Antisense strand to SEQ ID NO: 1414584
ugucucccggaacuggugg

SEQ ID NO: 1414586 - RNA, 19 nt, Artificial Sequence
  Description of Artificial Sequence: Synthetic oligonucleotide
  Sense strand starting at position 826 of SEQ ID NO: 1243409
agcccuguguuuccaagaa

SEQ ID NO: 1414587 - RNA, 19 nt, Artificial Sequence
  Description of Artificial Sequence: Synthetic oligonucleotide
  Antisense strand to SEQ ID NO: 1414586
uucuuggaaacacagggcu

SEQ ID NO: 1414588 - RNA, 19 nt, Artificial Sequence
  Description of Artificial Sequence: Synthetic oligonucleotide
  Sense strand starting at position 830 of SEQ ID NO: 1243409
cuguguuuccaagaaacga

SEQ ID NO: 1414589 - RNA, 19 nt, Artificial Sequence
  Description of Artificial Sequence: Synthetic oligonucleotide
  Antisense strand to SEQ ID NO: 1414588
ucguuucuuggaaacacag

SEQ ID NO: 1414590 - RNA, 19 nt, Artificial Sequence
  Description of Artificial Sequence: Synthetic oligonucleotide
  Sense strand starting at position 1450 of SEQ ID NO: 1243409
gcggaaagggacugaaauu

SEQ ID NO: 1414591 - RNA, 19 nt, Artificial Sequence
  Description of Artificial Sequence: Synthetic oligonucleotide
  Antisense strand to SEQ ID NO: 1414590
aauuucagucccuuuccgc

SEQ ID NO: 1414592 - RNA, 19 nt, Artificial Sequence
  Description of Artificial Sequence: Synthetic oligonucleotide
  Sense strand starting at position 2402 of SEQ ID NO: 1243409
ugcucuagcugcuaucaca

SEQ ID NO: 1414593 - RNA, 19 nt, Artificial Sequence
  Description of Artificial Sequence: Synthetic oligonucleotide
  Antisense strand to SEQ ID NO: 1414592
ugugauagcagcuagagca

SEQ ID NO: 1414594 - RNA, 19 nt, Artificial Sequence
  Description of Artificial Sequence: Synthetic oligonucleotide
  Sense strand starting at position 2441 of SEQ ID NO: 1243409
aggaucuggugggaagaaa

SEQ ID NO: 1414595 - RNA, 19 nt, Artificial Sequence
  Description of Artificial Sequence: Synthetic oligonucleotide
  Antisense strand to SEQ ID NO: 1414594
uuucuucccaccagauccu

SEQ ID NO: 1414596 - RNA, 19 nt, Artificial Sequence
  Description of Artificial Sequence: Synthetic oligonucleotide
  Sense strand starting at position 2522 of SEQ ID NO: 1243409
ggaguguugguuucggugu

SEQ ID NO: 1414597 - RNA, 19 nt, Artificial Sequence
  Description of Artificial Sequence: Synthetic oligonucleotide
  Antisense strand to SEQ ID NO: 1414596
acaccgaaaccaacacucc

SEQ ID NO: 1414598 - RNA, 19 nt, Artificial Sequence
  Description of Artificial Sequence: Synthetic oligonucleotide
  Sense strand starting at position 2618 of SEQ ID NO: 1243409
gcgccuagucuggaaugga

SEQ ID NO: 1414599 - RNA, 19 nt, Artificial Sequence
  Description of Artificial Sequence: Synthetic oligonucleotide
  Antisense strand to SEQ ID NO: 1414598
uccauuccagacuaggcgc

SEQ ID NO: 1414600 - RNA, 19 nt, Artificial Sequence
  Description of Artificial Sequence: Synthetic oligonucleotide
  Sense strand starting at position 2767 of SEQ ID NO: 1243409
gcuggaaguucagaugacu

SEQ ID NO: 1414601 - RNA, 19 nt, Artificial Sequence
  Description of Artificial Sequence: Synthetic oligonucleotide
  Antisense strand to SEQ ID NO: 1414600
agucaucugaacuuccagc

SEQ ID NO: 1414602 - RNA, 19 nt, Artificial Sequence
  Description of Artificial Sequence: Synthetic oligonucleotide
  Sense strand starting at position 2776 of SEQ ID NO: 1243409
ucagaugacuccuagguuu

SEQ ID NO: 1414603 - RNA, 19 nt, Artificial Sequence
  Description of Artificial Sequence: Synthetic oligonucleotide
  Antisense strand to SEQ ID NO: 1414602
aaaccuaggagucaucuga

SEQ ID NO: 1414604 - RNA, 19 nt, Artificial Sequence
  Description of Artificial Sequence: Synthetic oligonucleotide
  Sense strand starting at position 2788 of SEQ ID NO: 1243409
uagguuucugucuagagca

SEQ ID NO: 1414605 - RNA, 19 nt, Artificial Sequence
  Description of Artificial Sequence: Synthetic oligonucleotide
  Antisense strand to SEQ ID NO: 1414604
ugcucuagacagaaaccua

SEQ ID NO: 1414606 - RNA, 19 nt, Artificial Sequence
  Description of Artificial Sequence: Synthetic oligonucleotide
  Sense strand starting at position 2790 of SEQ ID NO: 1243409
gguuucugucuagagcacu

SEQ ID NO: 1414607 - RNA, 19 nt, Artificial Sequence
  Description of Artificial Sequence: Synthetic oligonucleotide
  Antisense strand to SEQ ID NO: 1414606
agugcucuagacagaaacc

SEQ ID NO: 1414608 - RNA, 19 nt, Artificial Sequence
  Description of Artificial Sequence: Synthetic oligonucleotide
  Sense strand starting at position 2796 of SEQ ID NO: 1243409
ugucuagagcacugagaug

SEQ ID NO: 1414609 - RNA, 19 nt, Artificial Sequence
  Description of Artificial Sequence: Synthetic oligonucleotide
  Antisense strand to SEQ ID NO: 1414608
caucucagugcucuagaca

SEQ ID NO: 1414610 - RNA, 19 nt, Artificial Sequence
  Description of Artificial Sequence: Synthetic oligonucleotide
  Sense strand starting at position 2807 of SEQ ID NO: 1243409
cugagaugucugcacugac

SEQ ID NO: 1414611 - RNA, 19 nt, Artificial Sequence
  Description of Artificial Sequence: Synthetic oligonucleotide
  Antisense strand to SEQ ID NO: 1414610
gucagugcagacaucucag

SEQ ID NO: 1414612 - RNA, 19 nt, Artificial Sequence
  Description of Artificial Sequence: Synthetic oligonucleotide
  Sense strand starting at position 2810 of SEQ ID NO: 1243409
agaugucugcacugacauu

SEQ ID NO: 1414613 - RNA, 19 nt, Artificial Sequence
  Description of Artificial Sequence: Synthetic oligonucleotide
  Antisense strand to SEQ ID NO: 1414612
aaugucagugcagacaucu

SEQ ID NO: 1414614 - RNA, 19 nt, Artificial Sequence
  Description of Artificial Sequence: Synthetic oligonucleotide
  Sense strand starting at position 3016 of SEQ ID NO: 1243409
gcuacucacuguguuccaa

SEQ ID NO: 1414615 - RNA, 19 nt, Artificial Sequence
  Description of Artificial Sequence: Synthetic oligonucleotide
  Antisense strand to SEQ ID NO: 1414614
uuggaacacagugaguagc

SEQ ID NO: 1414616 - RNA, 19 nt, Artificial Sequence
  Description of Artificial Sequence: Synthetic oligonucleotide
  Sense strand starting at position 3203 of SEQ ID NO: 1243409
guuacugcuuccuuuagca

SEQ ID NO: 1414617 - RNA, 19 nt, Artificial Sequence
  Description of Artificial Sequence: Synthetic oligonucleotide
  Antisense strand to SEQ ID NO: 1414616
ugcuaaaggaagcaguaac

SEQ ID NO: 1414618 - RNA, 19 nt, Artificial Sequence
  Description of Artificial Sequence: Synthetic oligonucleotide
  Sense strand starting at position 3222 of SEQ ID NO: 1243409
gcaaacucugccugcaaca

SEQ ID NO: 1414619 - RNA, 19 nt, Artificial Sequence
  Description of Artificial Sequence: Synthetic oligonucleotide
  Antisense strand to SEQ ID NO: 1414618
uguugcaggcagaguuugc

SEQ ID NO: 1414620 - RNA, 19 nt, Artificial Sequence
  Description of Artificial Sequence: Synthetic oligonucleotide
  Sense strand starting at position 3307 of SEQ ID NO: 1243409
cugaccucuccgugccaau

SEQ ID NO: 1414621 - RNA, 19 nt, Artificial Sequence
  Description of Artificial Sequence: Synthetic oligonucleotide
  Antisense strand to SEQ ID NO: 1414620
auuggcacggagaggucag

SEQ ID NO: 1414622 - RNA, 19 nt, Artificial Sequence
  Description of Artificial Sequence: Synthetic oligonucleotide
  Sense strand starting at position 3783 of SEQ ID NO: 1243409
uuuggucugcgugucaaca

SEQ ID NO: 1414623 - RNA, 19 nt, Artificial Sequence
  Description of Artificial Sequence: Synthetic oligonucleotide
  Antisense strand to SEQ ID NO: 1414622
uguugacacgcagaccaaa

SEQ ID NO: 1414624 - RNA, 19 nt, Artificial Sequence
  Description of Artificial Sequence: Synthetic oligonucleotide
  Sense strand starting at position 17 of SEQ ID NO: 1243410
ugccucuugacucgugcaa

SEQ ID NO: 1414625 - RNA, 19 nt, Artificial Sequence
  Description of Artificial Sequence: Synthetic oligonucleotide
  Antisense strand to SEQ ID NO: 1414624
uugcacgagucaagaggca

SEQ ID NO: 1414626 - RNA, 19 nt, Artificial Sequence
  Description of Artificial Sequence: Synthetic oligonucleotide
  Sense strand starting at position 19 of SEQ ID NO: 1243410
ccucuugacucgugcaaag

SEQ ID NO: 1414627 - RNA, 19 nt, Artificial Sequence
  Description of Artificial Sequence: Synthetic oligonucleotide
  Antisense strand to SEQ ID NO: 1414626
cuuugcacgagucaagagg

SEQ ID NO: 1414628 - RNA, 19 nt, Artificial Sequence
  Description of Artificial Sequence: Synthetic oligonucleotide
  Sense strand starting at position 21 of SEQ ID NO: 1243410
ucuugacucgugcaaagua

SEQ ID NO: 1414629 - RNA, 19 nt, Artificial Sequence
  Description of Artificial Sequence: Synthetic oligonucleotide
  Antisense strand to SEQ ID NO: 1414628
uacuuugcacgagucaaga

SEQ ID NO: 1414630 - RNA, 19 nt, Artificial Sequence
  Description of Artificial Sequence: Synthetic oligonucleotide
  Sense strand starting at position 128 of SEQ ID NO: 1243410
gugcuauagucagagugga

SEQ ID NO: 1414631 - RNA, 19 nt, Artificial Sequence
  Description of Artificial Sequence: Synthetic oligonucleotide
  Antisense strand to SEQ ID NO: 1414630
uccacucugacuauagcac

SEQ ID NO: 1414632 - RNA, 19 nt, Artificial Sequence
  Description of Artificial Sequence: Synthetic oligonucleotide
  Sense strand starting at position 218 of SEQ ID NO: 1243410
aguuuaacaccuuguucua

SEQ ID NO: 1414633 - RNA, 19 nt, Artificial Sequence
  Description of Artificial Sequence: Synthetic oligonucleotide
  Antisense strand to SEQ ID NO: 1414632
uagaacaagguguuaaacu

SEQ ID NO: 1414634 - RNA, 19 nt, Artificial Sequence
  Description of Artificial Sequence: Synthetic oligonucleotide
  Sense strand starting at position 255 of SEQ ID NO: 1243410
cugggucaucgccauauga

SEQ ID NO: 1414635 - RNA, 19 nt, Artificial Sequence
  Description of Artificial Sequence: Synthetic oligonucleotide
  Antisense strand to SEQ ID NO: 1414634
ucauauggcgaugacccag

SEQ ID NO: 1414636 - RNA, 19 nt, Artificial Sequence
  Description of Artificial Sequence: Synthetic oligonucleotide
  Sense strand starting at position 257 of SEQ ID NO: 1243410
gggucaucgccauaugaga

SEQ ID NO: 1414637 - RNA, 19 nt, Artificial Sequence
  Description of Artificial Sequence: Synthetic oligonucleotide
  Antisense strand to SEQ ID NO: 1414636
ucucauauggcgaugaccc

SEQ ID NO: 1414638 - RNA, 19 nt, Artificial Sequence
  Description of Artificial Sequence: Synthetic oligonucleotide
  Sense strand starting at position 264 of SEQ ID NO: 1243410
cgccauaugagaugcuuaa

SEQ ID NO: 1414639 - RNA, 19 nt, Artificial Sequence
  Description of Artificial Sequence: Synthetic oligonucleotide
  Antisense strand to SEQ ID NO: 1414638
uuaagcaucucauauggcg

SEQ ID NO: 1414640 - RNA, 19 nt, Artificial Sequence
  Description of Artificial Sequence: Synthetic oligonucleotide
  Sense strand starting at position 271 of SEQ ID NO: 1243410
ugagaugcuuaacauaucu

SEQ ID NO: 1414641 - RNA, 19 nt, Artificial Sequence
  Description of Artificial Sequence: Synthetic oligonucleotide
  Antisense strand to SEQ ID NO: 1414640
agauauguuaagcaucuca

SEQ ID NO: 1414642 - RNA, 19 nt, Artificial Sequence
  Description of Artificial Sequence: Synthetic oligonucleotide
  Sense strand starting at position 354 of SEQ ID NO: 1243410
cuuaauuucucugugcuga

SEQ ID NO: 1414643 - RNA, 19 nt, Artificial Sequence
  Description of Artificial Sequence: Synthetic oligonucleotide
  Antisense strand to SEQ ID NO: 1414642
ucagcacagagaaauuaag

SEQ ID NO: 1414644 - RNA, 19 nt, Artificial Sequence
  Description of Artificial Sequence: Synthetic oligonucleotide
  Sense strand starting at position 355 of SEQ ID NO: 1243410
uuaauuucucugugcugaa

SEQ ID NO: 1414645 - RNA, 19 nt, Artificial Sequence
  Description of Artificial Sequence: Synthetic oligonucleotide
  Antisense strand to SEQ ID NO: 1414644
uucagcacagagaaauuaa

SEQ ID NO: 1414646 - RNA, 19 nt, Artificial Sequence
  Description of Artificial Sequence: Synthetic oligonucleotide
  Sense strand starting at position 493 of SEQ ID NO: 1243410
ggcggucgcccaaguguuu

SEQ ID NO: 1414647 - RNA, 19 nt, Artificial Sequence
  Description of Artificial Sequence: Synthetic oligonucleotide
  Antisense strand to SEQ ID NO: 1414646
aaacacuugggcgaccgcc

SEQ ID NO: 1414648 - RNA, 19 nt, Artificial Sequence
  Description of Artificial Sequence: Synthetic oligonucleotide
  Sense strand starting at position 502 of SEQ ID NO: 1243410
ccaaguguuuguugggcga

SEQ ID NO: 1414649 - RNA, 19 nt, Artificial Sequence
  Description of Artificial Sequence: Synthetic oligonucleotide
  Antisense strand to SEQ ID NO: 1414648
ucgcccaacaaacacuugg

SEQ ID NO: 1414650 - RNA, 19 nt, Artificial Sequence
  Description of Artificial Sequence: Synthetic oligonucleotide
  Sense strand starting at position 504 of SEQ ID NO: 1243410
aaguguuuguugggcgacu

SEQ ID NO: 1414651 - RNA, 19 nt, Artificial Sequence
  Description of Artificial Sequence: Synthetic oligonucleotide
  Antisense strand to SEQ ID NO: 1414650
agucgcccaacaaacacuu

SEQ ID NO: 1414652 - RNA, 19 nt, Artificial Sequence
  Description of Artificial Sequence: Synthetic oligonucleotide
  Sense strand starting at position 505 of SEQ ID NO: 1243410
aguguuuguugggcgacua

SEQ ID NO: 1414653 - RNA, 19 nt, Artificial Sequence
  Description of Artificial Sequence: Synthetic oligonucleotide
  Antisense strand to SEQ ID NO: 1414652
uagucgcccaacaaacacu

SEQ ID NO: 1414654 - RNA, 19 nt, Artificial Sequence
  Description of Artificial Sequence: Synthetic oligonucleotide
  Sense strand starting at position 561 of SEQ ID NO: 1243410
uggacaguaaugugaccuu

SEQ ID NO: 1414655 - RNA, 19 nt, Artificial Sequence
  Description of Artificial Sequence: Synthetic oligonucleotide
  Antisense strand to SEQ ID NO: 1414654
aaggucacauuacugucca

SEQ ID NO: 1414656 - RNA, 19 nt, Artificial Sequence
  Description of Artificial Sequence: Synthetic oligonucleotide
  Sense strand starting at position 930 of SEQ ID NO: 1243410
ucccuucuugcagaggaga

SEQ ID NO: 1414657 - RNA, 19 nt, Artificial Sequence
  Description of Artificial Sequence: Synthetic oligonucleotide
  Antisense strand to SEQ ID NO: 1414656
ucuccucugcaagaaggga

SEQ ID NO: 1414658 - RNA, 19 nt, Artificial Sequence
  Description of Artificial Sequence: Synthetic oligonucleotide
  Sense strand starting at position 932 of SEQ ID NO: 1243410
ccuucuugcagaggagaaa

SEQ ID NO: 1414659 - RNA, 19 nt, Artificial Sequence
  Description of Artificial Sequence: Synthetic oligonucleotide
  Antisense strand to SEQ ID NO: 1414658
uuucuccucugcaagaagg

SEQ ID NO: 1414660 - RNA, 19 nt, Artificial Sequence
  Description of Artificial Sequence: Synthetic oligonucleotide
  Sense strand starting at position 1055 of SEQ ID NO: 1243410
acguuucuucaaggugaag

SEQ ID NO: 1414661 - RNA, 19 nt, Artificial Sequence
  Description of Artificial Sequence: Synthetic oligonucleotide
  Antisense strand to SEQ ID NO: 1414660
cuucaccuugaagaaacgu

SEQ ID NO: 1414662 - RNA, 19 nt, Artificial Sequence
  Description of Artificial Sequence: Synthetic oligonucleotide
  Sense strand starting at position 1423 of SEQ ID NO: 1243410
gcgcguugcagaguacaca

SEQ ID NO: 1414663 - RNA, 19 nt, Artificial Sequence
  Description of Artificial Sequence: Synthetic oligonucleotide
  Antisense strand to SEQ ID NO: 1414662
uguguacucugcaacgcgc

SEQ ID NO: 1414664 - RNA, 19 nt, Artificial Sequence
  Description of Artificial Sequence: Synthetic oligonucleotide
  Sense strand starting at position 1545 of SEQ ID NO: 1243410
gcaaguuugugggagccua

SEQ ID NO: 1414665 - RNA, 19 nt, Artificial Sequence
  Description of Artificial Sequence: Synthetic oligonucleotide
  Antisense strand to SEQ ID NO: 1414664
uaggcucccacaaacuugc

SEQ ID NO: 1414666 - RNA, 19 nt, Artificial Sequence
  Description of Artificial Sequence: Synthetic oligonucleotide
  Sense strand starting at position 2692 of SEQ ID NO: 1243410
cucagagauucgaggugga

SEQ ID NO: 1414667 - RNA, 19 nt, Artificial Sequence
  Description of Artificial Sequence: Synthetic oligonucleotide
  Antisense strand to SEQ ID NO: 1414666
uccaccucgaaucucugag

SEQ ID NO: 1414668 - RNA, 19 nt, Artificial Sequence
  Description of Artificial Sequence: Synthetic oligonucleotide
  Sense strand starting at position 2695 of SEQ ID NO: 1243410
agagauucgagguggaaca

SEQ ID NO: 1414669 - RNA, 19 nt, Artificial Sequence
  Description of Artificial Sequence: Synthetic oligonucleotide
  Antisense strand to SEQ ID NO: 1414668
uguuccaccucgaaucucu

SEQ ID NO: 1414670 - RNA, 19 nt, Artificial Sequence
  Description of Artificial Sequence: Synthetic oligonucleotide
  Sense strand starting at position 2696 of SEQ ID NO: 1243410
gagauucgagguggaacau

SEQ ID NO: 1414671 - RNA, 19 nt, Artificial Sequence
  Description of Artificial Sequence: Synthetic oligonucleotide
  Antisense strand to SEQ ID NO: 1414670
auguuccaccucgaaucuc

SEQ ID NO: 1414672 - RNA, 19 nt, Artificial Sequence
  Description of Artificial Sequence: Synthetic oligonucleotide
  Sense strand starting at position 3213 of SEQ ID NO: 1243410
agggcugauuugugggaau

SEQ ID NO: 1414673 - RNA, 19 nt, Artificial Sequence
  Description of Artificial Sequence: Synthetic oligonucleotide
  Antisense strand to SEQ ID NO: 1414672
auucccacaaaucagcccu

SEQ ID NO: 1414674 - RNA, 19 nt, Artificial Sequence
  Description of Artificial Sequence: Synthetic oligonucleotide
  Sense strand starting at position 3216 of SEQ ID NO: 1243410
gcugauuugugggaauaaa

SEQ ID NO: 1414675 - RNA, 19 nt, Artificial Sequence
  Description of Artificial Sequence: Synthetic oligonucleotide
  Antisense strand to SEQ ID NO: 1414674
uuuauucccacaaaucagc

SEQ ID NO: 1414676 - RNA, 19 nt, Artificial Sequence
  Description of Artificial Sequence: Synthetic oligonucleotide
  Sense strand starting at position 3358 of SEQ ID NO: 1243410
aacgcauauugagugcuua

SEQ ID NO: 1414677 - RNA, 19 nt, Artificial Sequence
  Description of Artificial Sequence: Synthetic oligonucleotide
  Antisense strand to SEQ ID NO: 1414676
uaagcacucaauaugcguu

SEQ ID NO: 1414678 - RNA, 19 nt, Artificial Sequence
  Description of Artificial Sequence: Synthetic oligonucleotide
  Sense strand starting at position 3359 of SEQ ID NO: 1243410
acgcauauugagugcuuau

SEQ ID NO: 1414679 - RNA, 19 nt, Artificial Sequence
  Description of Artificial Sequence: Synthetic oligonucleotide
  Antisense strand to SEQ ID NO: 1414678
auaagcacucaauaugcgu

SEQ ID NO: 1414680 - RNA, 19 nt, Artificial Sequence
  Description of Artificial Sequence: Synthetic oligonucleotide
  Sense strand starting at position 3362 of SEQ ID NO: 1243410
cauauugagugcuuaugau

SEQ ID NO: 1414681 - RNA, 19 nt, Artificial Sequence
  Description of Artificial Sequence: Synthetic oligonucleotide
  Antisense strand to SEQ ID NO: 1414680
aucauaagcacucaauaug

SEQ ID NO: 1414682 - RNA, 19 nt, Artificial Sequence
  Description of Artificial Sequence: Synthetic oligonucleotide
  Sense strand starting at position 3368 of SEQ ID NO: 1243410
gagugcuuaugauucugca

SEQ ID NO: 1414683 - RNA, 19 nt, Artificial Sequence
  Description of Artificial Sequence: Synthetic oligonucleotide
  Antisense strand to SEQ ID NO: 1414682
ugcagaaucauaagcacuc

SEQ ID NO: 1414684 - RNA, 19 nt, Artificial Sequence
  Description of Artificial Sequence: Synthetic oligonucleotide
  Sense strand starting at position 3372 of SEQ ID NO: 1243410
gcuuaugauucugcaggca

SEQ ID NO: 1414685 - RNA, 19 nt, Artificial Sequence
  Description of Artificial Sequence: Synthetic oligonucleotide
  Antisense strand to SEQ ID NO: 1414684
ugccugcagaaucauaagc

SEQ ID NO: 1414686 - RNA, 19 nt, Artificial Sequence
  Description of Artificial Sequence: Synthetic oligonucleotide
  Sense strand starting at position 3436 of SEQ ID NO: 1243410
guaccuugaucacuccuau

SEQ ID NO: 1414687 - RNA, 19 nt, Artificial Sequence
  Description of Artificial Sequence: Synthetic oligonucleotide
  Antisense strand to SEQ ID NO: 1414686
auaggagugaucaagguac

SEQ ID NO: 1414688 - RNA, 19 nt, Artificial Sequence
  Description of Artificial Sequence: Synthetic oligonucleotide
  Sense strand starting at position 3478 of SEQ ID NO: 1243410
guaggcacucaguaauugu

SEQ ID NO: 1414689 - RNA, 19 nt, Artificial Sequence
  Description of Artificial Sequence: Synthetic oligonucleotide
  Antisense strand to SEQ ID NO: 1414688
acaauuacugagugccuac

SEQ ID NO: 1414690 - RNA, 19 nt, Artificial Sequence
  Description of Artificial Sequence: Synthetic oligonucleotide
  Sense strand starting at position 3512 of SEQ ID NO: 1243410
cacucugcuuccugaggga

SEQ ID NO: 1414691 - RNA, 19 nt, Artificial Sequence
  Description of Artificial Sequence: Synthetic oligonucleotide
  Antisense strand to SEQ ID NO: 1414690
ucccucaggaagcagagug

SEQ ID NO: 1414692 - RNA, 19 nt, Artificial Sequence
  Description of Artificial Sequence: Synthetic oligonucleotide
  Sense strand starting at position 3532 of SEQ ID NO: 1243410
gugcuaugauuaucuccaa

SEQ ID NO: 1414693 - RNA, 19 nt, Artificial Sequence
  Description of Artificial Sequence: Synthetic oligonucleotide
  Antisense strand to SEQ ID NO: 1414692
uuggagauaaucauagcac

SEQ ID NO: 1414694 - RNA, 19 nt, Artificial Sequence
  Description of Artificial Sequence: Synthetic oligonucleotide
  Sense strand starting at position 3670 of SEQ ID NO: 1243410
accacuuugugguauuuau

SEQ ID NO: 1414695 - RNA, 19 nt, Artificial Sequence
  Description of Artificial Sequence: Synthetic oligonucleotide
  Antisense strand to SEQ ID NO: 1414694
auaaauaccacaaaguggu

SEQ ID NO: 1414696 - RNA, 19 nt, Artificial Sequence
  Description of Artificial Sequence: Synthetic oligonucleotide
  Sense strand starting at position 3798 of SEQ ID NO: 1243410
cgaggaauuugcuaggugu

SEQ ID NO: 1414697 - RNA, 19 nt, Artificial Sequence
  Description of Artificial Sequence: Synthetic oligonucleotide
  Antisense strand to SEQ ID NO: 1414696
acaccuagcaaauuccucg

SEQ ID NO: 1414698 - RNA, 19 nt, Artificial Sequence
  Description of Artificial Sequence: Synthetic oligonucleotide
  Sense strand starting at position 3805 of SEQ ID NO: 1243410
uuugcuagguguucccaua

SEQ ID NO: 1414699 - RNA, 19 nt, Artificial Sequence
  Description of Artificial Sequence: Synthetic oligonucleotide
  Antisense strand to SEQ ID NO: 1414698
uaugggaacaccuagcaaa

SEQ ID NO: 1414700 - RNA, 19 nt, Artificial Sequence
  Description of Artificial Sequence: Synthetic oligonucleotide
  Sense strand starting at position 12 of SEQ ID NO: 1243411
acgggaagcauauguucuu

SEQ ID NO: 1414701 - RNA, 19 nt, Artificial Sequence
  Description of Artificial Sequence: Synthetic oligonucleotide
  Antisense strand to SEQ ID NO: 1414700
aagaacauaugcuucccgu

SEQ ID NO: 1414702 - RNA, 19 nt, Artificial Sequence
  Description of Artificial Sequence: Synthetic oligonucleotide
  Sense strand starting at position 15 of SEQ ID NO: 1243411
ggaagcauauguucuuuga

SEQ ID NO: 1414703 - RNA, 19 nt, Artificial Sequence
  Description of Artificial Sequence: Synthetic oligonucleotide
  Antisense strand to SEQ ID NO: 1414702
ucaaagaacauaugcuucc

SEQ ID NO: 1414704 - RNA, 19 nt, Artificial Sequence
  Description of Artificial Sequence: Synthetic oligonucleotide
  Sense strand starting at position 18 of SEQ ID NO: 1243411
agcauauguucuuugagga

SEQ ID NO: 1414705 - RNA, 19 nt, Artificial Sequence
  Description of Artificial Sequence: Synthetic oligonucleotide
  Antisense strand to SEQ ID NO: 1414704
uccucaaagaacauaugcu

SEQ ID NO: 1414706 - RNA, 19 nt, Artificial Sequence
  Description of Artificial Sequence: Synthetic oligonucleotide
  Sense strand starting at position 77 of SEQ ID NO: 1243411
aguagugagaacuguauua

SEQ ID NO: 1414707 - RNA, 19 nt, Artificial Sequence
  Description of Artificial Sequence: Synthetic oligonucleotide
  Antisense strand to SEQ ID NO: 1414706
uaauacaguucucacuacu

SEQ ID NO: 1414708 - RNA, 19 nt, Artificial Sequence
  Description of Artificial Sequence: Synthetic oligonucleotide
  Sense strand starting at position 203 of SEQ ID NO: 1243411
gccugaaccuagugaagga

SEQ ID NO: 1414709 - RNA, 19 nt, Artificial Sequence
  Description of Artificial Sequence: Synthetic oligonucleotide
  Antisense strand to SEQ ID NO: 1414708
uccuucacuagguucaggc

SEQ ID NO: 1414710 - RNA, 19 nt, Artificial Sequence
  Description of Artificial Sequence: Synthetic oligonucleotide
  Sense strand starting at position 262 of SEQ ID NO: 1243411
acggucaacaacugugaaa

SEQ ID NO: 1414711 - RNA, 19 nt, Artificial Sequence
  Description of Artificial Sequence: Synthetic oligonucleotide
  Antisense strand to SEQ ID NO: 1414710
uuucacaguuguugaccgu

SEQ ID NO: 1414712 - RNA, 19 nt, Artificial Sequence
  Description of Artificial Sequence: Synthetic oligonucleotide
  Sense strand starting at position 288 of SEQ ID NO: 1243411
agcagugaagugugugaga

SEQ ID NO: 1414713 - RNA, 19 nt, Artificial Sequence
  Description of Artificial Sequence: Synthetic oligonucleotide
  Antisense strand to SEQ ID NO: 1414712
ucucacacacuucacugcu

SEQ ID NO: 1414714 - RNA, 19 nt, Artificial Sequence
  Description of Artificial Sequence: Synthetic oligonucleotide
  Sense strand starting at position 290 of SEQ ID NO: 1243411
cagugaagugugugagaaa

SEQ ID NO: 1414715 - RNA, 19 nt, Artificial Sequence
  Description of Artificial Sequence: Synthetic oligonucleotide
  Antisense strand to SEQ ID NO: 1414714
uuucucacacacuucacug

SEQ ID NO: 1414716 - RNA, 19 nt, Artificial Sequence
  Description of Artificial Sequence: Synthetic oligonucleotide
  Sense strand starting at position 466 of SEQ ID NO: 1243411
ugagcaucgucuuccuacu

SEQ ID NO: 1414717 - RNA, 19 nt, Artificial Sequence
  Description of Artificial Sequence: Synthetic oligonucleotide
  Antisense strand to SEQ ID NO: 1414716
aguaggaagacgaugcuca

SEQ ID NO: 1414718 - RNA, 19 nt, Artificial Sequence
  Description of Artificial Sequence: Synthetic oligonucleotide
  Sense strand starting at position 849 of SEQ ID NO: 1243411
aucacaaggcuuugguaaa

SEQ ID NO: 1414719 - RNA, 19 nt, Artificial Sequence
  Description of Artificial Sequence: Synthetic oligonucleotide
  Antisense strand to SEQ ID NO: 1414718
uuuaccaaagccuugugau

SEQ ID NO: 1414720 - RNA, 19 nt, Artificial Sequence
  Description of Artificial Sequence: Synthetic oligonucleotide
  Sense strand starting at position 850 of SEQ ID NO: 1243411
ucacaaggcuuugguaaau

SEQ ID NO: 1414721 - RNA, 19 nt, Artificial Sequence
  Description of Artificial Sequence: Synthetic oligonucleotide
  Antisense strand to SEQ ID NO: 1414720
auuuaccaaagccuuguga

SEQ ID NO: 1414722 - RNA, 19 nt, Artificial Sequence
  Description of Artificial Sequence: Synthetic oligonucleotide
  Sense strand starting at position 1051 of SEQ ID NO: 1243411
gcaagaacuuuaguccaac

SEQ ID NO: 1414723 - RNA, 19 nt, Artificial Sequence
  Description of Artificial Sequence: Synthetic oligonucleotide
  Antisense strand to SEQ ID NO: 1414722
guuggacuaaaguucuugc

SEQ ID NO: 1414724 - RNA, 19 nt, Artificial Sequence
  Description of Artificial Sequence: Synthetic oligonucleotide
  Sense strand starting at position 1091 of SEQ ID NO: 1243411
agacuugauucccauccga

SEQ ID NO: 1414725 - RNA, 19 nt, Artificial Sequence
  Description of Artificial Sequence: Synthetic oligonucleotide
  Antisense strand to SEQ ID NO: 1414724
ucggaugggaaucaagucu

SEQ ID NO: 1414726 - RNA, 19 nt, Artificial Sequence
  Description of Artificial Sequence: Synthetic oligonucleotide
  Sense strand starting at position 1167 of SEQ ID NO: 1243411
auuagagucucgcuauaca

SEQ ID NO: 1414727 - RNA, 19 nt, Artificial Sequence
  Description of Artificial Sequence: Synthetic oligonucleotide
  Antisense strand to SEQ ID NO: 1414726
uguauagcgagacucuaau

SEQ ID NO: 1414728 - RNA, 19 nt, Artificial Sequence
  Description of Artificial Sequence: Synthetic oligonucleotide
  Sense strand starting at position 1460 of SEQ ID NO: 1243411
gugacagagcaagguucua

SEQ ID NO: 1414729 - RNA, 19 nt, Artificial Sequence
  Description of Artificial Sequence: Synthetic oligonucleotide
  Antisense strand to SEQ ID NO: 1414728
uagaaccuugcucugucac

SEQ ID NO: 1414730 - RNA, 19 nt, Artificial Sequence
  Description of Artificial Sequence: Synthetic oligonucleotide
  Sense strand starting at position 1465 of SEQ ID NO: 1243411
agagcaagguucuaucuca

SEQ ID NO: 1414731 - RNA, 19 nt, Artificial Sequence
  Description of Artificial Sequence: Synthetic oligonucleotide
  Antisense strand to SEQ ID NO: 1414730
ugagauagaaccuugcucu

SEQ ID NO: 1414732 - RNA, 19 nt, Artificial Sequence
  Description of Artificial Sequence: Synthetic oligonucleotide
  Sense strand starting at position 1676 of SEQ ID NO: 1243411
cucagucggauccgcaaua

SEQ ID NO: 1414733 - RNA, 19 nt, Artificial Sequence
  Description of Artificial Sequence: Synthetic oligonucleotide
  Antisense strand to SEQ ID NO: 1414732
uauugcggauccgacugag

SEQ ID NO: 1414734 - RNA, 19 nt, Artificial Sequence
  Description of Artificial Sequence: Synthetic oligonucleotide
  Sense strand starting at position 1844 of SEQ ID NO: 1243411
cgucguggucgucuggaaa

SEQ ID NO: 1414735 - RNA, 19 nt, Artificial Sequence
  Description of Artificial Sequence: Synthetic oligonucleotide
  Antisense strand to SEQ ID NO: 1414734
uuuccagacgaccacgacg

SEQ ID NO: 1414736 - RNA, 19 nt, Artificial Sequence
  Description of Artificial Sequence: Synthetic oligonucleotide
  Sense strand starting at position 2114 of SEQ ID NO: 1243411
ucccuugagucccaauagu

SEQ ID NO: 1414737 - RNA, 19 nt, Artificial Sequence
  Description of Artificial Sequence: Synthetic oligonucleotide
  Antisense strand to SEQ ID NO: 1414736
acuauugggacucaaggga

SEQ ID NO: 1414738 - RNA, 19 nt, Artificial Sequence
  Description of Artificial Sequence: Synthetic oligonucleotide
  Sense strand starting at position 2152 of SEQ ID NO: 1243411
guucgaaucccacaucuac

SEQ ID NO: 1414739 - RNA, 19 nt, Artificial Sequence
  Description of Artificial Sequence: Synthetic oligonucleotide
  Antisense strand to SEQ ID NO: 1414738
guagaugugggauucgaac

SEQ ID NO: 1414740 - RNA, 19 nt, Artificial Sequence
  Description of Artificial Sequence: Synthetic oligonucleotide
  Sense strand starting at position 2175 of SEQ ID NO: 1243411
ccaauuuccucagaguugu

SEQ ID NO: 1414741 - RNA, 19 nt, Artificial Sequence
  Description of Artificial Sequence: Synthetic oligonucleotide
  Antisense strand to SEQ ID NO: 1414740
acaacucugaggaaauugg

SEQ ID NO: 1414742 - RNA, 19 nt, Artificial Sequence
  Description of Artificial Sequence: Synthetic oligonucleotide
  Sense strand starting at position 2181 of SEQ ID NO: 1243411
uccucagaguuguauuaaa

SEQ ID NO: 1414743 - RNA, 19 nt, Artificial Sequence
  Description of Artificial Sequence: Synthetic oligonucleotide
  Antisense strand to SEQ ID NO: 1414742
uuuaauacaacucugagga

SEQ ID NO: 1414744 - RNA, 19 nt, Artificial Sequence
  Description of Artificial Sequence: Synthetic oligonucleotide
  Sense strand starting at position 2242 of SEQ ID NO: 1243411
agaccuguauuggucagua

SEQ ID NO: 1414745 - RNA, 19 nt, Artificial Sequence
  Description of Artificial Sequence: Synthetic oligonucleotide
  Antisense strand to SEQ ID NO: 1414744
uacugaccaauacaggucu

SEQ ID NO: 1414746 - RNA, 19 nt, Artificial Sequence
  Description of Artificial Sequence: Synthetic oligonucleotide
  Sense strand starting at position 2246 of SEQ ID NO: 1243411
cuguauuggucaguaggua

SEQ ID NO: 1414747 - RNA, 19 nt, Artificial Sequence
  Description of Artificial Sequence: Synthetic oligonucleotide
  Antisense strand to SEQ ID NO: 1414746
uaccuacugaccaauacag

SEQ ID NO: 1414748 - RNA, 19 nt, Artificial Sequence
  Description of Artificial Sequence: Synthetic oligonucleotide
  Sense strand starting at position 2247 of SEQ ID NO: 1243411
uguauuggucaguagguau

SEQ ID NO: 1414749 - RNA, 19 nt, Artificial Sequence
  Description of Artificial Sequence: Synthetic oligonucleotide
  Antisense strand to SEQ ID NO: 1414748
auaccuacugaccaauaca

SEQ ID NO: 1414750 - RNA, 19 nt, Artificial Sequence
  Description of Artificial Sequence: Synthetic oligonucleotide
  Sense strand starting at position 2290 of SEQ ID NO: 1243411
agaagcgggcuuuacaaau

SEQ ID NO: 1414751 - RNA, 19 nt, Artificial Sequence
  Description of Artificial Sequence: Synthetic oligonucleotide
  Antisense strand to SEQ ID NO: 1414750
auuuguaaagcccgcuucu

SEQ ID NO: 1414752 - RNA, 19 nt, Artificial Sequence
  Description of Artificial Sequence: Synthetic oligonucleotide
  Sense strand starting at position 2440 of SEQ ID NO: 1243411
ucuccaauucggugagucu

SEQ ID NO: 1414753 - RNA, 19 nt, Artificial Sequence
  Description of Artificial Sequence: Synthetic oligonucleotide
  Antisense strand to SEQ ID NO: 1414752
agacucaccgaauuggaga

SEQ ID NO: 1414754 - RNA, 19 nt, Artificial Sequence
  Description of Artificial Sequence: Synthetic oligonucleotide
  Sense strand starting at position 2545 of SEQ ID NO: 1243411
ucaugaaccuuaccguuau

SEQ ID NO: 1414755 - RNA, 19 nt, Artificial Sequence
  Description of Artificial Sequence: Synthetic oligonucleotide
  Antisense strand to SEQ ID NO: 1414754
auaacgguaagguucauga

SEQ ID NO: 1414756 - RNA, 19 nt, Artificial Sequence
  Description of Artificial Sequence: Synthetic oligonucleotide
  Sense strand starting at position 2557 of SEQ ID NO: 1243411
ccguuauccuaacauagua

SEQ ID NO: 1414757 - RNA, 19 nt, Artificial Sequence
  Description of Artificial Sequence: Synthetic oligonucleotide
  Antisense strand to SEQ ID NO: 1414756
uacuauguuaggauaacgg

SEQ ID NO: 1414758 - RNA, 19 nt, Artificial Sequence
  Description of Artificial Sequence: Synthetic oligonucleotide
  Sense strand starting at position 2655 of SEQ ID NO: 1243411
ccgaguugcugauucagua

SEQ ID NO: 1414759 - RNA, 19 nt, Artificial Sequence
  Description of Artificial Sequence: Synthetic oligonucleotide
  Antisense strand to SEQ ID NO: 1414758
uacugaaucagcaacucgg

SEQ ID NO: 1414760 - RNA, 19 nt, Artificial Sequence
  Description of Artificial Sequence: Synthetic oligonucleotide
  Sense strand starting at position 2678 of SEQ ID NO: 1243411
ugggauguggcccaagagu

SEQ ID NO: 1414761 - RNA, 19 nt, Artificial Sequence
  Description of Artificial Sequence: Synthetic oligonucleotide
  Antisense strand to SEQ ID NO: 1414760
acucuugggccacauccca

SEQ ID NO: 1414762 - RNA, 19 nt, Artificial Sequence
  Description of Artificial Sequence: Synthetic oligonucleotide
  Sense strand starting at position 2746 of SEQ ID NO: 1243411
ugagaaccguugcuuuaaa

SEQ ID NO: 1414763 - RNA, 19 nt, Artificial Sequence
  Description of Artificial Sequence: Synthetic oligonucleotide
  Antisense strand to SEQ ID NO: 1414762
uuuaaagcaacgguucuca

SEQ ID NO: 1414764 - RNA, 19 nt, Artificial Sequence
  Description of Artificial Sequence: Synthetic oligonucleotide
  Sense strand starting at position 2747 of SEQ ID NO: 1243411
gagaaccguugcuuuaaag

SEQ ID NO: 1414765 - RNA, 19 nt, Artificial Sequence
  Description of Artificial Sequence: Synthetic oligonucleotide
  Antisense strand to SEQ ID NO: 1414764
cuuuaaagcaacgguucuc

SEQ ID NO: 1414766 - RNA, 19 nt, Artificial Sequence
  Description of Artificial Sequence: Synthetic oligonucleotide
  Sense strand starting at position 2785 of SEQ ID NO: 1243411
agcugucaucuaugucuuu

SEQ ID NO: 1414767 - RNA, 19 nt, Artificial Sequence
  Description of Artificial Sequence: Synthetic oligonucleotide
  Antisense strand to SEQ ID NO: 1414766
aaagacauagaugacagcu

SEQ ID NO: 1414768 - RNA, 19 nt, Artificial Sequence
  Description of Artificial Sequence: Synthetic oligonucleotide
  Sense strand starting at position 2786 of SEQ ID NO: 1243411
gcugucaucuaugucuuua

SEQ ID NO: 1414769 - RNA, 19 nt, Artificial Sequence
  Description of Artificial Sequence: Synthetic oligonucleotide
  Antisense strand to SEQ ID NO: 1414768
uaaagacauagaugacagc

SEQ ID NO: 1414770 - RNA, 19 nt, Artificial Sequence
  Description of Artificial Sequence: Synthetic oligonucleotide
  Sense strand starting at position 2788 of SEQ ID NO: 1243411
ugucaucuaugucuuuauu

SEQ ID NO: 1414771 - RNA, 19 nt, Artificial Sequence
  Description of Artificial Sequence: Synthetic oligonucleotide
  Antisense strand to SEQ ID NO: 1414770
aauaaagacauagaugaca

SEQ ID NO: 1414772 - RNA, 19 nt, Artificial Sequence
  Description of Artificial Sequence: Synthetic oligonucleotide
  Sense strand starting at position 3250 of SEQ ID NO: 1243411
gucggauucuucucaugag

SEQ ID NO: 1414773 - RNA, 19 nt, Artificial Sequence
  Description of Artificial Sequence: Synthetic oligonucleotide
  Antisense strand to SEQ ID NO: 1414772
cucaugagaagaauccgac

SEQ ID NO: 1414774 - RNA, 19 nt, Artificial Sequence
  Description of Artificial Sequence: Synthetic oligonucleotide
  Sense strand starting at position 3254 of SEQ ID NO: 1243411
gauucuucucaugaggcca

SEQ ID NO: 1414775 - RNA, 19 nt, Artificial Sequence
  Description of Artificial Sequence: Synthetic oligonucleotide
  Antisense strand to SEQ ID NO: 1414774
uggccucaugagaagaauc

SEQ ID NO: 1414776 - RNA, 19 nt, Artificial Sequence
  Description of Artificial Sequence: Synthetic oligonucleotide
  Sense strand starting at position 3316 of SEQ ID NO: 1243411
ggacccaugugauuauagu

SEQ ID NO: 1414777 - RNA, 19 nt, Artificial Sequence
  Description of Artificial Sequence: Synthetic oligonucleotide
  Antisense strand to SEQ ID NO: 1414776
acuauaaucacaugggucc

SEQ ID NO: 1414778 - RNA, 19 nt, Artificial Sequence
  Description of Artificial Sequence: Synthetic oligonucleotide
  Sense strand starting at position 3464 of SEQ ID NO: 1243411
uucccaggcugagaugauu

SEQ ID NO: 1414779 - RNA, 19 nt, Artificial Sequence
  Description of Artificial Sequence: Synthetic oligonucleotide
  Antisense strand to SEQ ID NO: 1414778
aaucaucucagccugggaa

SEQ ID NO: 1414780 - RNA, 19 nt, Artificial Sequence
  Description of Artificial Sequence: Synthetic oligonucleotide
  Sense strand starting at position 198 of SEQ ID NO: 1243412
auauguguacuccaccaca

SEQ ID NO: 1414781 - RNA, 19 nt, Artificial Sequence
  Description of Artificial Sequence: Synthetic oligonucleotide
  Antisense strand to SEQ ID NO: 1414780
ugugguggaguacacauau

SEQ ID NO: 1414782 - RNA, 19 nt, Artificial Sequence
  Description of Artificial Sequence: Synthetic oligonucleotide
  Sense strand starting at position 228 of SEQ ID NO: 1243412
auuagagagucuucuauaa

SEQ ID NO: 1414783 - RNA, 19 nt, Artificial Sequence
  Description of Artificial Sequence: Synthetic oligonucleotide
  Antisense strand to SEQ ID NO: 1414782
uuauagaagacucucuaau

SEQ ID NO: 1414784 - RNA, 19 nt, Artificial Sequence
  Description of Artificial Sequence: Synthetic oligonucleotide
  Sense strand starting at position 302 of SEQ ID NO: 1243412
auuuaaacguguucucagu

SEQ ID NO: 1414785 - RNA, 19 nt, Artificial Sequence
  Description of Artificial Sequence: Synthetic oligonucleotide
  Antisense strand to SEQ ID NO: 1414784
acugagaacacguuuaaau

SEQ ID NO: 1414786 - RNA, 19 nt, Artificial Sequence
  Description of Artificial Sequence: Synthetic oligonucleotide
  Sense strand starting at position 638 of SEQ ID NO: 1243412
aagaguugccguuagaaga

SEQ ID NO: 1414787 - RNA, 19 nt, Artificial Sequence
  Description of Artificial Sequence: Synthetic oligonucleotide
  Antisense strand to SEQ ID NO: 1414786
ucuucuaacggcaacucuu

SEQ ID NO: 1414788 - RNA, 19 nt, Artificial Sequence
  Description of Artificial Sequence: Synthetic oligonucleotide
  Sense strand starting at position 713 of SEQ ID NO: 1243412
gagacaauguagcauauuu

SEQ ID NO: 1414789 - RNA, 19 nt, Artificial Sequence
  Description of Artificial Sequence: Synthetic oligonucleotide
  Antisense strand to SEQ ID NO: 1414788
aaauaugcuacauugucuc

SEQ ID NO: 1414790 - RNA, 19 nt, Artificial Sequence
  Description of Artificial Sequence: Synthetic oligonucleotide
  Sense strand starting at position 770 of SEQ ID NO: 1243412
gccacuuacuagucugaca

SEQ ID NO: 1414791 - RNA, 19 nt, Artificial Sequence
  Description of Artificial Sequence: Synthetic oligonucleotide
  Antisense strand to SEQ ID NO: 1414790
ugucagacuaguaaguggc

SEQ ID NO: 1414792 - RNA, 19 nt, Artificial Sequence
  Description of Artificial Sequence: Synthetic oligonucleotide
  Sense strand starting at position 879 of SEQ ID NO: 1243412
uuaaaugauguguauguca

SEQ ID NO: 1414793 - RNA, 19 nt, Artificial Sequence
  Description of Artificial Sequence: Synthetic oligonucleotide
  Antisense strand to SEQ ID NO: 1414792
ugacauacacaucauuuaa

SEQ ID NO: 1414794 - RNA, 19 nt, Artificial Sequence
  Description of Artificial Sequence: Synthetic oligonucleotide
  Sense strand starting at position 881 of SEQ ID NO: 1243412
aaaugauguguaugucaac

SEQ ID NO: 1414795 - RNA, 19 nt, Artificial Sequence
  Description of Artificial Sequence: Synthetic oligonucleotide
  Antisense strand to SEQ ID NO: 1414794
guugacauacacaucauuu

SEQ ID NO: 1414796 - RNA, 19 nt, Artificial Sequence
  Description of Artificial Sequence: Synthetic oligonucleotide
  Sense strand starting at position 882 of SEQ ID NO: 1243412
aaugauguguaugucaaca

SEQ ID NO: 1414797 - RNA, 19 nt, Artificial Sequence
  Description of Artificial Sequence: Synthetic oligonucleotide
  Antisense strand to SEQ ID NO: 1414796
uguugacauacacaucauu

SEQ ID NO: 1414798 - RNA, 19 nt, Artificial Sequence
  Description of Artificial Sequence: Synthetic oligonucleotide
  Sense strand starting at position 913 of SEQ ID NO: 1243412
gacugauacuuaguaggca

SEQ ID NO: 1414799 - RNA, 19 nt, Artificial Sequence
  Description of Artificial Sequence: Synthetic oligonucleotide
  Antisense strand to SEQ ID NO: 1414798
ugccuacuaaguaucaguc

SEQ ID NO: 1414800 - RNA, 19 nt, Artificial Sequence
  Description of Artificial Sequence: Synthetic oligonucleotide
  Sense strand starting at position 1257 of SEQ ID NO: 1243412
cgugaucuuggacagguua

SEQ ID NO: 1414801 - RNA, 19 nt, Artificial Sequence
  Description of Artificial Sequence: Synthetic oligonucleotide
  Antisense strand to SEQ ID NO: 1414800
uaaccuguccaagaucacg

SEQ ID NO: 1414802 - RNA, 19 nt, Artificial Sequence
  Description of Artificial Sequence: Synthetic oligonucleotide
  Sense strand starting at position 1264 of SEQ ID NO: 1243412
uuggacagguuacuuaauu

SEQ ID NO: 1414803 - RNA, 19 nt, Artificial Sequence
  Description of Artificial Sequence: Synthetic oligonucleotide
  Antisense strand to SEQ ID NO: 1414802
aauuaaguaaccuguccaa

SEQ ID NO: 1414804 - RNA, 19 nt, Artificial Sequence
  Description of Artificial Sequence: Synthetic oligonucleotide
  Sense strand starting at position 1601 of SEQ ID NO: 1243412
ugcaguaagcacugaauga

SEQ ID NO: 1414805 - RNA, 19 nt, Artificial Sequence
  Description of Artificial Sequence: Synthetic oligonucleotide
  Antisense strand to SEQ ID NO: 1414804
ucauucagugcuuacugca

SEQ ID NO: 1414806 - RNA, 19 nt, Artificial Sequence
  Description of Artificial Sequence: Synthetic oligonucleotide
  Sense strand starting at position 1602 of SEQ ID NO: 1243412
gcaguaagcacugaaugaa

SEQ ID NO: 1414807 - RNA, 19 nt, Artificial Sequence
  Description of Artificial Sequence: Synthetic oligonucleotide
  Antisense strand to SEQ ID NO: 1414806
uucauucagugcuuacugc

SEQ ID NO: 1414808 - RNA, 19 nt, Artificial Sequence
  Description of Artificial Sequence: Synthetic oligonucleotide
  Sense strand starting at position 1605 of SEQ ID NO: 1243412
guaagcacugaaugaaaua

SEQ ID NO: 1414809 - RNA, 19 nt, Artificial Sequence
  Description of Artificial Sequence: Synthetic oligonucleotide
  Antisense strand to SEQ ID NO: 1414808
uauuucauucagugcuuac

SEQ ID NO: 1414810 - RNA, 19 nt, Artificial Sequence
  Description of Artificial Sequence: Synthetic oligonucleotide
  Sense strand starting at position 1654 of SEQ ID NO: 1243412
gcaaaugcucaagagaugu

SEQ ID NO: 1414811 - RNA, 19 nt, Artificial Sequence
  Description of Artificial Sequence: Synthetic oligonucleotide
  Antisense strand to SEQ ID NO: 1414810
acaucucuugagcauuugc

SEQ ID NO: 1414812 - RNA, 19 nt, Artificial Sequence
  Description of Artificial Sequence: Synthetic oligonucleotide
  Sense strand starting at position 1662 of SEQ ID NO: 1243412
ucaagagauguuggcuaau

SEQ ID NO: 1414813 - RNA, 19 nt, Artificial Sequence
  Description of Artificial Sequence: Synthetic oligonucleotide
  Antisense strand to SEQ ID NO: 1414812
auuagccaacaucucuuga

SEQ ID NO: 1414814 - RNA, 19 nt, Artificial Sequence
  Description of Artificial Sequence: Synthetic oligonucleotide
  Sense strand starting at position 1664 of SEQ ID NO: 1243412
aagagauguuggcuaauau

SEQ ID NO: 1414815 - RNA, 19 nt, Artificial Sequence
  Description of Artificial Sequence: Synthetic oligonucleotide
  Antisense strand to SEQ ID NO: 1414814
auauuagccaacaucucuu

SEQ ID NO: 1414816 - RNA, 19 nt, Artificial Sequence
  Description of Artificial Sequence: Synthetic oligonucleotide
  Sense strand starting at position 1665 of SEQ ID NO: 1243412
agagauguuggcuaauauc

SEQ ID NO: 1414817 - RNA, 19 nt, Artificial Sequence
  Description of Artificial Sequence: Synthetic oligonucleotide
  Antisense strand to SEQ ID NO: 1414816
gauauuagccaacaucucu

SEQ ID NO: 1414818 - RNA, 19 nt, Artificial Sequence
  Description of Artificial Sequence: Synthetic oligonucleotide
  Sense strand starting at position 1674 of SEQ ID NO: 1243412
ggcuaauaucagcagucaa

SEQ ID NO: 1414819 - RNA, 19 nt, Artificial Sequence
  Description of Artificial Sequence: Synthetic oligonucleotide
  Antisense strand to SEQ ID NO: 1414818
uugacugcugauauuagcc

SEQ ID NO: 1414820 - RNA, 19 nt, Artificial Sequence
  Description of Artificial Sequence: Synthetic oligonucleotide
  Sense strand starting at position 1718 of SEQ ID NO: 1243412
caguuuccucaagaacgua

SEQ ID NO: 1414821 - RNA, 19 nt, Artificial Sequence
  Description of Artificial Sequence: Synthetic oligonucleotide
  Antisense strand to SEQ ID NO: 1414820
uacguucuugaggaaacug

SEQ ID NO: 1414822 - RNA, 19 nt, Artificial Sequence
  Description of Artificial Sequence: Synthetic oligonucleotide
  Sense strand starting at position 1745 of SEQ ID NO: 1243412
gggcauagacaaugcucaa

SEQ ID NO: 1414823 - RNA, 19 nt, Artificial Sequence
  Description of Artificial Sequence: Synthetic oligonucleotide
  Antisense strand to SEQ ID NO: 1414822
uugagcauugucuaugccc

SEQ ID NO: 1414824 - RNA, 19 nt, Artificial Sequence
  Description of Artificial Sequence: Synthetic oligonucleotide
  Sense strand starting at position 1986 of SEQ ID NO: 1243412
ccaugacuggaguguaaca

SEQ ID NO: 1414825 - RNA, 19 nt, Artificial Sequence
  Description of Artificial Sequence: Synthetic oligonucleotide
  Antisense strand to SEQ ID NO: 1414824
uguuacacuccagucaugg

SEQ ID NO: 1414826 - RNA, 19 nt, Artificial Sequence
  Description of Artificial Sequence: Synthetic oligonucleotide
  Sense strand starting at position 2095 of SEQ ID NO: 1243412
ggccaaaucgaucgggaac

SEQ ID NO: 1414827 - RNA, 19 nt, Artificial Sequence
  Description of Artificial Sequence: Synthetic oligonucleotide
  Antisense strand to SEQ ID NO: 1414826
guucccgaucgauuuggcc

SEQ ID NO: 1414828 - RNA, 19 nt, Artificial Sequence
  Description of Artificial Sequence: Synthetic oligonucleotide
  Sense strand starting at position 2214 of SEQ ID NO: 1243412
augauuaaccgcuauguaa

SEQ ID NO: 1414829 - RNA, 19 nt, Artificial Sequence
  Description of Artificial Sequence: Synthetic oligonucleotide
  Antisense strand to SEQ ID NO: 1414828
uuacauagcgguuaaucau

SEQ ID NO: 1414830 - RNA, 19 nt, Artificial Sequence
  Description of Artificial Sequence: Synthetic oligonucleotide
  Sense strand starting at position 2216 of SEQ ID NO: 1243412
gauuaaccgcuauguaaag

SEQ ID NO: 1414831 - RNA, 19 nt, Artificial Sequence
  Description of Artificial Sequence: Synthetic oligonucleotide
  Antisense strand to SEQ ID NO: 1414830
cuuuacauagcgguuaauc

SEQ ID NO: 1414832 - RNA, 19 nt, Artificial Sequence
  Description of Artificial Sequence: Synthetic oligonucleotide
  Sense strand starting at position 2222 of SEQ ID NO: 1243412
ccgcuauguaaagaaggaa

SEQ ID NO: 1414833 - RNA, 19 nt, Artificial Sequence
  Description of Artificial Sequence: Synthetic oligonucleotide
  Antisense strand to SEQ ID NO: 1414832
uuccuucuuuacauagcgg

SEQ ID NO: 1414834 - RNA, 19 nt, Artificial Sequence
  Description of Artificial Sequence: Synthetic oligonucleotide
  Sense strand starting at position 2247 of SEQ ID NO: 1243412
aguaauguaucauuaaagc

SEQ ID NO: 1414835 - RNA, 19 nt, Artificial Sequence
  Description of Artificial Sequence: Synthetic oligonucleotide
  Antisense strand to SEQ ID NO: 1414834
gcuuuaaugauacauuacu

SEQ ID NO: 1414836 - RNA, 19 nt, Artificial Sequence
  Description of Artificial Sequence: Synthetic oligonucleotide
  Sense strand starting at position 2341 of SEQ ID NO: 1243412
uacagugaaguauggauaa

SEQ ID NO: 1414837 - RNA, 19 nt, Artificial Sequence
  Description of Artificial Sequence: Synthetic oligonucleotide
  Antisense strand to SEQ ID NO: 1414836
uuauccauacuucacugua

SEQ ID NO: 1414838 - RNA, 19 nt, Artificial Sequence
  Description of Artificial Sequence: Synthetic oligonucleotide
  Sense strand starting at position 2454 of SEQ ID NO: 1243412
agaccaaccuguccgauau

SEQ ID NO: 1414839 - RNA, 19 nt, Artificial Sequence
  Description of Artificial Sequence: Synthetic oligonucleotide
  Antisense strand to SEQ ID NO: 1414838
auaucggacagguuggucu

SEQ ID NO: 1414840 - RNA, 19 nt, Artificial Sequence
  Description of Artificial Sequence: Synthetic oligonucleotide
  Sense strand starting at position 2702 of SEQ ID NO: 1243412
uauauccaucgugaaugua

SEQ ID NO: 1414841 - RNA, 19 nt, Artificial Sequence
  Description of Artificial Sequence: Synthetic oligonucleotide
  Antisense strand to SEQ ID NO: 1414840
uacauucacgauggauaua

SEQ ID NO: 1414842 - RNA, 19 nt, Artificial Sequence
  Description of Artificial Sequence: Synthetic oligonucleotide
  Sense strand starting at position 2705 of SEQ ID NO: 1243412
auccaucgugaauguaaag

SEQ ID NO: 1414843 - RNA, 19 nt, Artificial Sequence
  Description of Artificial Sequence: Synthetic oligonucleotide
  Antisense strand to SEQ ID NO: 1414842
cuuuacauucacgauggau

SEQ ID NO: 1414844 - RNA, 19 nt, Artificial Sequence
  Description of Artificial Sequence: Synthetic oligonucleotide
  Sense strand starting at position 2731 of SEQ ID NO: 1243412
uguuguuauggguaauaug

SEQ ID NO: 1414845 - RNA, 19 nt, Artificial Sequence
  Description of Artificial Sequence: Synthetic oligonucleotide
  Antisense strand to SEQ ID NO: 1414844
cauauuacccauaacaaca

SEQ ID NO: 1414846 - RNA, 19 nt, Artificial Sequence
  Description of Artificial Sequence: Synthetic oligonucleotide
  Sense strand starting at position 2769 of SEQ ID NO: 1243412
uuaguaaaguucccaguaa

SEQ ID NO: 1414847 - RNA, 19 nt, Artificial Sequence
  Description of Artificial Sequence: Synthetic oligonucleotide
  Antisense strand to SEQ ID NO: 1414846
uuacugggaacuuuacuaa

SEQ ID NO: 1414848 - RNA, 19 nt, Artificial Sequence
  Description of Artificial Sequence: Synthetic oligonucleotide
  Sense strand starting at position 2790 of SEQ ID NO: 1243412
guucgaucuguguucuguu

SEQ ID NO: 1414849 - RNA, 19 nt, Artificial Sequence
  Description of Artificial Sequence: Synthetic oligonucleotide
  Antisense strand to SEQ ID NO: 1414848
aacagaacacagaucgaac

SEQ ID NO: 1414850 - RNA, 19 nt, Artificial Sequence
  Description of Artificial Sequence: Synthetic oligonucleotide
  Sense strand starting at position 2931 of SEQ ID NO: 1243412
uacauaaauccugguggga

SEQ ID NO: 1414851 - RNA, 19 nt, Artificial Sequence
  Description of Artificial Sequence: Synthetic oligonucleotide
  Antisense strand to SEQ ID NO: 1414850
ucccaccaggauuuaugua

SEQ ID NO: 1414852 - RNA, 19 nt, Artificial Sequence
  Description of Artificial Sequence: Synthetic oligonucleotide
  Sense strand starting at position 2957 of SEQ ID NO: 1243412
aaaccauguugucugaaag

SEQ ID NO: 1414853 - RNA, 19 nt, Artificial Sequence
  Description of Artificial Sequence: Synthetic oligonucleotide
  Antisense strand to SEQ ID NO: 1414852
cuuucagacaacaugguuu

SEQ ID NO: 1414854 - RNA, 19 nt, Artificial Sequence
  Description of Artificial Sequence: Synthetic oligonucleotide
  Sense strand starting at position 2958 of SEQ ID NO: 1243412
aaccauguugucugaaagu

SEQ ID NO: 1414855 - RNA, 19 nt, Artificial Sequence
  Description of Artificial Sequence: Synthetic oligonucleotide
  Antisense strand to SEQ ID NO: 1414854
acuuucagacaacaugguu

SEQ ID NO: 1414856 - RNA, 19 nt, Artificial Sequence
  Description of Artificial Sequence: Synthetic oligonucleotide
  Sense strand starting at position 3344 of SEQ ID NO: 1243412
cgguccuugggcgagaaua

SEQ ID NO: 1414857 - RNA, 19 nt, Artificial Sequence
  Description of Artificial Sequence: Synthetic oligonucleotide
  Antisense strand to SEQ ID NO: 1414856
uauucucgcccaaggaccg

SEQ ID NO: 1414858 - RNA, 19 nt, Artificial Sequence
  Description of Artificial Sequence: Synthetic oligonucleotide
  Sense strand starting at position 3346 of SEQ ID NO: 1243412
guccuugggcgagaauaag

SEQ ID NO: 1414859 - RNA, 19 nt, Artificial Sequence
  Description of Artificial Sequence: Synthetic oligonucleotide
  Antisense strand to SEQ ID NO: 1414858
cuuauucucgcccaaggac

SEQ ID NO: 1414860 - RNA, 19 nt, Artificial Sequence
  Description of Artificial Sequence: Synthetic oligonucleotide
  Sense strand starting at position 178 of SEQ ID NO: 1243413
gcuaccauuugucaggaga

SEQ ID NO: 1414861 - RNA, 19 nt, Artificial Sequence
  Description of Artificial Sequence: Synthetic oligonucleotide
  Antisense strand to SEQ ID NO: 1414860
ucuccugacaaaugguagc

SEQ ID NO: 1414862 - RNA, 19 nt, Artificial Sequence
  Description of Artificial Sequence: Synthetic oligonucleotide
  Sense strand starting at position 180 of SEQ ID NO: 1243413
uaccauuugucaggagaga

SEQ ID NO: 1414863 - RNA, 19 nt, Artificial Sequence
  Description of Artificial Sequence: Synthetic oligonucleotide
  Antisense strand to SEQ ID NO: 1414862
ucucuccugacaaauggua

SEQ ID NO: 1414864 - RNA, 19 nt, Artificial Sequence
  Description of Artificial Sequence: Synthetic oligonucleotide
  Sense strand starting at position 401 of SEQ ID NO: 1243413
agcccaaacucagaggaaa

SEQ ID NO: 1414865 - RNA, 19 nt, Artificial Sequence
  Description of Artificial Sequence: Synthetic oligonucleotide
  Antisense strand to SEQ ID NO: 1414864
uuuccucugaguuugggcu

SEQ ID NO: 1414866 - RNA, 19 nt, Artificial Sequence
  Description of Artificial Sequence: Synthetic oligonucleotide
  Sense strand starting at position 544 of SEQ ID NO: 1243413
augggaagaugccaauaaa

SEQ ID NO: 1414867 - RNA, 19 nt, Artificial Sequence
  Description of Artificial Sequence: Synthetic oligonucleotide
  Antisense strand to SEQ ID NO: 1414866
uuuauuggcaucuucccau

SEQ ID NO: 1414868 - RNA, 19 nt, Artificial Sequence
  Description of Artificial Sequence: Synthetic oligonucleotide
  Sense strand starting at position 597 of SEQ ID NO: 1243413
augagagaauggcugucaa

SEQ ID NO: 1414869 - RNA, 19 nt, Artificial Sequence
  Description of Artificial Sequence: Synthetic oligonucleotide
  Antisense strand to SEQ ID NO: 1414868
uugacagccauucucucau

SEQ ID NO: 1414870 - RNA, 19 nt, Artificial Sequence
  Description of Artificial Sequence: Synthetic oligonucleotide
  Sense strand starting at position 627 of SEQ ID NO: 1243413
aaagacagaucguuugaca

SEQ ID NO: 1414871 - RNA, 19 nt, Artificial Sequence
  Description of Artificial Sequence: Synthetic oligonucleotide
  Antisense strand to SEQ ID NO: 1414870
ugucaaacgaucugucuuu

SEQ ID NO: 1414872 - RNA, 19 nt, Artificial Sequence
  Description of Artificial Sequence: Synthetic oligonucleotide
  Sense strand starting at position 636 of SEQ ID NO: 1243413
ucguuugacaaauggauga

SEQ ID NO: 1414873 - RNA, 19 nt, Artificial Sequence
  Description of Artificial Sequence: Synthetic oligonucleotide
  Antisense strand to SEQ ID NO: 1414872
ucauccauuugucaaacga

SEQ ID NO: 1414874 - RNA, 19 nt, Artificial Sequence
  Description of Artificial Sequence: Synthetic oligonucleotide
  Sense strand starting at position 643 of SEQ ID NO: 1243413
acaaauggaugagauuauu

SEQ ID NO: 1414875 - RNA, 19 nt, Artificial Sequence
  Description of Artificial Sequence: Synthetic oligonucleotide
  Antisense strand to SEQ ID NO: 1414874
aauaaucucauccauuugu

SEQ ID NO: 1414876 - RNA, 19 nt, Artificial Sequence
  Description of Artificial Sequence: Synthetic oligonucleotide
  Sense strand starting at position 674 of SEQ ID NO: 1243413
gcaagagguuggaagguaa

SEQ ID NO: 1414877 - RNA, 19 nt, Artificial Sequence
  Description of Artificial Sequence: Synthetic oligonucleotide
  Antisense strand to SEQ ID NO: 1414876
uuaccuuccaaccucuugc

SEQ ID NO: 1414878 - RNA, 19 nt, Artificial Sequence
  Description of Artificial Sequence: Synthetic oligonucleotide
  Sense strand starting at position 930 of SEQ ID NO: 1243413
agaagacugaagugcaaau

SEQ ID NO: 1414879 - RNA, 19 nt, Artificial Sequence
  Description of Artificial Sequence: Synthetic oligonucleotide
  Antisense strand to SEQ ID NO: 1414878
auuugcacuucagucuucu

SEQ ID NO: 1414880 - RNA, 19 nt, Artificial Sequence
  Description of Artificial Sequence: Synthetic oligonucleotide
  Sense strand starting at position 976 of SEQ ID NO: 1243413
gugugaacgccggugacau

SEQ ID NO: 1414881 - RNA, 19 nt, Artificial Sequence
  Description of Artificial Sequence: Synthetic oligonucleotide
  Antisense strand to SEQ ID NO: 1414880
augucaccggcguucacac

SEQ ID NO: 1414882 - RNA, 19 nt, Artificial Sequence
  Description of Artificial Sequence: Synthetic oligonucleotide
  Sense strand starting at position 2404 of SEQ ID NO: 1243413
aauagacugcuccgagguu

SEQ ID NO: 1414883 - RNA, 19 nt, Artificial Sequence
  Description of Artificial Sequence: Synthetic oligonucleotide
  Antisense strand to SEQ ID NO: 1414882
aaccucggagcagucuauu

SEQ ID NO: 1414884 - RNA, 19 nt, Artificial Sequence
  Description of Artificial Sequence: Synthetic oligonucleotide
  Sense strand starting at position 2536 of SEQ ID NO: 1243413
aagacuugccaaggucaca

SEQ ID NO: 1414885 - RNA, 19 nt, Artificial Sequence
  Description of Artificial Sequence: Synthetic oligonucleotide
  Antisense strand to SEQ ID NO: 1414884
ugugaccuuggcaagucuu

SEQ ID NO: 1414886 - RNA, 19 nt, Artificial Sequence
  Description of Artificial Sequence: Synthetic oligonucleotide
  Sense strand starting at position 2641 of SEQ ID NO: 1243413
caagacagguguuuaccaa

SEQ ID NO: 1414887 - RNA, 19 nt, Artificial Sequence
  Description of Artificial Sequence: Synthetic oligonucleotide
  Antisense strand to SEQ ID NO: 1414886
uugguaaacaccugucuug

SEQ ID NO: 1414888 - RNA, 19 nt, Artificial Sequence
  Description of Artificial Sequence: Synthetic oligonucleotide
  Sense strand starting at position 2705 of SEQ ID NO: 1243413
ccaaccuguguccaaacua

SEQ ID NO: 1414889 - RNA, 19 nt, Artificial Sequence
  Description of Artificial Sequence: Synthetic oligonucleotide
  Antisense strand to SEQ ID NO: 1414888
uaguuuggacacagguugg

SEQ ID NO: 1414890 - RNA, 19 nt, Artificial Sequence
  Description of Artificial Sequence: Synthetic oligonucleotide
  Sense strand starting at position 2973 of SEQ ID NO: 1243413
cucugagaugugugcagaa

SEQ ID NO: 1414891 - RNA, 19 nt, Artificial Sequence
  Description of Artificial Sequence: Synthetic oligonucleotide
  Antisense strand to SEQ ID NO: 1414890
uucugcacacaucucagag

SEQ ID NO: 1414892 - RNA, 19 nt, Artificial Sequence
  Description of Artificial Sequence: Synthetic oligonucleotide
  Sense strand starting at position 2975 of SEQ ID NO: 1243413
cugagaugugugcagaaau

SEQ ID NO: 1414893 - RNA, 19 nt, Artificial Sequence
  Description of Artificial Sequence: Synthetic oligonucleotide
  Antisense strand to SEQ ID NO: 1414892
auuucugcacacaucucag

SEQ ID NO: 1414894 - RNA, 19 nt, Artificial Sequence
  Description of Artificial Sequence: Synthetic oligonucleotide
  Sense strand starting at position 2982 of SEQ ID NO: 1243413
gugugcagaaauugaggaa

SEQ ID NO: 1414895 - RNA, 19 nt, Artificial Sequence
  Description of Artificial Sequence: Synthetic oligonucleotide
  Antisense strand to SEQ ID NO: 1414894
uuccucaauuucugcacac

SEQ ID NO: 1414896 - RNA, 19 nt, Artificial Sequence
  Description of Artificial Sequence: Synthetic oligonucleotide
  Sense strand starting at position 3128 of SEQ ID NO: 1243413
gucauuuccugucccaagu

SEQ ID NO: 1414897 - RNA, 19 nt, Artificial Sequence
  Description of Artificial Sequence: Synthetic oligonucleotide
  Antisense strand to SEQ ID NO: 1414896
acuugggacaggaaaugac

SEQ ID NO: 1414898 - RNA, 19 nt, Artificial Sequence
  Description of Artificial Sequence: Synthetic oligonucleotide
  Sense strand starting at position 3191 of SEQ ID NO: 1243413
aguugaucuugagcuucca

SEQ ID NO: 1414899 - RNA, 19 nt, Artificial Sequence
  Description of Artificial Sequence: Synthetic oligonucleotide
  Antisense strand to SEQ ID NO: 1414898
uggaagcucaagaucaacu

SEQ ID NO: 1414900 - RNA, 19 nt, Artificial Sequence
  Description of Artificial Sequence: Synthetic oligonucleotide
  Sense strand starting at position 3305 of SEQ ID NO: 1243413
guucaagagcuggaugcau

SEQ ID NO: 1414901 - RNA, 19 nt, Artificial Sequence
  Description of Artificial Sequence: Synthetic oligonucleotide
  Antisense strand to SEQ ID NO: 1414900
augcauccagcucuugaac

SEQ ID NO: 1414902 - RNA, 19 nt, Artificial Sequence
  Description of Artificial Sequence: Synthetic oligonucleotide
  Sense strand starting at position 3307 of SEQ ID NO: 1243413
ucaagagcuggaugcauaa

SEQ ID NO: 1414903 - RNA, 19 nt, Artificial Sequence
  Description of Artificial Sequence: Synthetic oligonucleotide
  Antisense strand to SEQ ID NO: 1414902
uuaugcauccagcucuuga

SEQ ID NO: 1414904 - RNA, 19 nt, Artificial Sequence
  Description of Artificial Sequence: Synthetic oligonucleotide
  Sense strand starting at position 3404 of SEQ ID NO: 1243413
ugaugugugaacugguuaa

SEQ ID NO: 1414905 - RNA, 19 nt, Artificial Sequence
  Description of Artificial Sequence: Synthetic oligonucleotide
  Antisense strand to SEQ ID NO: 1414904
uuaaccaguucacacauca

SEQ ID NO: 1414906 - RNA, 19 nt, Artificial Sequence
  Description of Artificial Sequence: Synthetic oligonucleotide
  Sense strand starting at position 3408 of SEQ ID NO: 1243413
gugugaacugguuaaccaa

SEQ ID NO: 1414907 - RNA, 19 nt, Artificial Sequence
  Description of Artificial Sequence: Synthetic oligonucleotide
  Antisense strand to SEQ ID NO: 1414906
uugguuaaccaguucacac

SEQ ID NO: 1414908 - RNA, 19 nt, Artificial Sequence
  Description of Artificial Sequence: Synthetic oligonucleotide
  Sense strand starting at position 3458 of SEQ ID NO: 1243413
gcugauucccuccaaagau

SEQ ID NO: 1414909 - RNA, 19 nt, Artificial Sequence
  Description of Artificial Sequence: Synthetic oligonucleotide
  Antisense strand to SEQ ID NO: 1414908
aucuuuggagggaaucagc

SEQ ID NO: 1414910 - RNA, 19 nt, Artificial Sequence
  Description of Artificial Sequence: Synthetic oligonucleotide
  Sense strand starting at position 3539 of SEQ ID NO: 1243413
ugucaaguucuugggcaca

SEQ ID NO: 1414911 - RNA, 19 nt, Artificial Sequence
  Description of Artificial Sequence: Synthetic oligonucleotide
  Antisense strand to SEQ ID NO: 1414910
ugugcccaagaacuugaca

SEQ ID NO: 1414912 - RNA, 19 nt, Artificial Sequence
  Description of Artificial Sequence: Synthetic oligonucleotide
  Sense strand starting at position 3541 of SEQ ID NO: 1243413
ucaaguucuugggcacaua

SEQ ID NO: 1414913 - RNA, 19 nt, Artificial Sequence
  Description of Artificial Sequence: Synthetic oligonucleotide
  Antisense strand to SEQ ID NO: 1414912
uaugugcccaagaacuuga

SEQ ID NO: 1414914 - RNA, 19 nt, Artificial Sequence
  Description of Artificial Sequence: Synthetic oligonucleotide
  Sense strand starting at position 3567 of SEQ ID NO: 1243413
cccaguaaaugaguaucau

SEQ ID NO: 1414915 - RNA, 19 nt, Artificial Sequence
  Description of Artificial Sequence: Synthetic oligonucleotide
  Antisense strand to SEQ ID NO: 1414914
augauacucauuuacuggg

SEQ ID NO: 1414916 - RNA, 19 nt, Artificial Sequence
  Description of Artificial Sequence: Synthetic oligonucleotide
  Sense strand starting at position 3568 of SEQ ID NO: 1243413
ccaguaaaugaguaucauc

SEQ ID NO: 1414917 - RNA, 19 nt, Artificial Sequence
  Description of Artificial Sequence: Synthetic oligonucleotide
  Antisense strand to SEQ ID NO: 1414916
gaugauacucauuuacugg

SEQ ID NO: 1414918 - RNA, 19 nt, Artificial Sequence
  Description of Artificial Sequence: Synthetic oligonucleotide
  Sense strand starting at position 3576 of SEQ ID NO: 1243413
ugaguaucaucaguuagac

SEQ ID NO: 1414919 - RNA, 19 nt, Artificial Sequence
  Description of Artificial Sequence: Synthetic oligonucleotide
  Antisense strand to SEQ ID NO: 1414918
gucuaacugaugauacuca

SEQ ID NO: 1414920 - RNA, 19 nt, Artificial Sequence
  Description of Artificial Sequence: Synthetic oligonucleotide
  Sense strand starting at position 3745 of SEQ ID NO: 1243413
uuggaugugaacuaguuau

SEQ ID NO: 1414921 - RNA, 19 nt, Artificial Sequence
  Description of Artificial Sequence: Synthetic oligonucleotide
  Antisense strand to SEQ ID NO: 1414920
auaacuaguucacauccaa

SEQ ID NO: 1414922 - RNA, 19 nt, Artificial Sequence
  Description of Artificial Sequence: Synthetic oligonucleotide
  Sense strand starting at position 3749 of SEQ ID NO: 1243413
augugaacuaguuaugagu

SEQ ID NO: 1414923 - RNA, 19 nt, Artificial Sequence
  Description of Artificial Sequence: Synthetic oligonucleotide
  Antisense strand to SEQ ID NO: 1414922
acucauaacuaguucacau

SEQ ID NO: 1414924 - RNA, 19 nt, Artificial Sequence
  Description of Artificial Sequence: Synthetic oligonucleotide
  Sense strand starting at position 3776 of SEQ ID NO: 1243413
cacaauguugcuugaaaga

SEQ ID NO: 1414925 - RNA, 19 nt, Artificial Sequence
  Description of Artificial Sequence: Synthetic oligonucleotide
  Antisense strand to SEQ ID NO: 1414924
ucuuucaagcaacauugug

SEQ ID NO: 1414926 - RNA, 19 nt, Artificial Sequence
  Description of Artificial Sequence: Synthetic oligonucleotide
  Sense strand starting at position 3806 of SEQ ID NO: 1243413
aaagaauguguaugauucu

SEQ ID NO: 1414927 - RNA, 19 nt, Artificial Sequence
  Description of Artificial Sequence: Synthetic oligonucleotide
  Antisense strand to SEQ ID NO: 1414926
agaaucauacacauucuuu

SEQ ID NO: 1414928 - RNA, 19 nt, Artificial Sequence
  Description of Artificial Sequence: Synthetic oligonucleotide
  Sense strand starting at position 3815 of SEQ ID NO: 1243413
guaugauucugucuacaua

SEQ ID NO: 1414929 - RNA, 19 nt, Artificial Sequence
  Description of Artificial Sequence: Synthetic oligonucleotide
  Antisense strand to SEQ ID NO: 1414928
uauguagacagaaucauac

SEQ ID NO: 1414930 - RNA, 19 nt, Artificial Sequence
  Description of Artificial Sequence: Synthetic oligonucleotide
  Sense strand starting at position 3818 of SEQ ID NO: 1243413
ugauucugucuacauaguu

SEQ ID NO: 1414931 - RNA, 19 nt, Artificial Sequence
  Description of Artificial Sequence: Synthetic oligonucleotide
  Antisense strand to SEQ ID NO: 1414930
aacuauguagacagaauca

SEQ ID NO: 1414932 - RNA, 19 nt, Artificial Sequence
  Description of Artificial Sequence: Synthetic oligonucleotide
  Sense strand starting at position 3903 of SEQ ID NO: 1243413
gacaguaauuucuagggag

SEQ ID NO: 1414933 - RNA, 19 nt, Artificial Sequence
  Description of Artificial Sequence: Synthetic oligonucleotide
  Antisense strand to SEQ ID NO: 1414932
cucccuagaaauuacuguc

SEQ ID NO: 1414934 - RNA, 19 nt, Artificial Sequence
  Description of Artificial Sequence: Synthetic oligonucleotide
  Sense strand starting at position 3906 of SEQ ID NO: 1243413
aguaauuucuagggagaga

SEQ ID NO: 1414935 - RNA, 19 nt, Artificial Sequence
  Description of Artificial Sequence: Synthetic oligonucleotide
  Antisense strand to SEQ ID NO: 1414934
ucucucccuagaaauuacu

SEQ ID NO: 1414936 - RNA, 19 nt, Artificial Sequence
  Description of Artificial Sequence: Synthetic oligonucleotide
  Sense strand starting at position 3974 of SEQ ID NO: 1243413
guaauauucuacucagugg

SEQ ID NO: 1414937 - RNA, 19 nt, Artificial Sequence
  Description of Artificial Sequence: Synthetic oligonucleotide
  Antisense strand to SEQ ID NO: 1414936
ccacugaguagaauauuac

SEQ ID NO: 1414938 - RNA, 19 nt, Artificial Sequence
  Description of Artificial Sequence: Synthetic oligonucleotide
  Sense strand starting at position 3977 of SEQ ID NO: 1243413
auauucuacucagugguau

SEQ ID NO: 1414939 - RNA, 19 nt, Artificial Sequence
  Description of Artificial Sequence: Synthetic oligonucleotide
  Antisense strand to SEQ ID NO: 1414938
auaccacugaguagaauau

SEQ ID NO: 1414940 - RNA, 19 nt, Artificial Sequence
  Description of Artificial Sequence: Synthetic oligonucleotide
  Sense strand starting at position 65 of SEQ ID NO: 1243414
cgauauaacucuuuaaagu

SEQ ID NO: 1414941 - RNA, 19 nt, Artificial Sequence
  Description of Artificial Sequence: Synthetic oligonucleotide
  Antisense strand to SEQ ID NO: 1414940
acuuuaaagaguuauaucg

SEQ ID NO: 1414942 - RNA, 19 nt, Artificial Sequence
  Description of Artificial Sequence: Synthetic oligonucleotide
  Sense strand starting at position 130 of SEQ ID NO: 1243414
uuaagaauguguuucuaug

SEQ ID NO: 1414943 - RNA, 19 nt, Artificial Sequence
  Description of Artificial Sequence: Synthetic oligonucleotide
  Antisense strand to SEQ ID NO: 1414942
cauagaaacacauucuuaa

SEQ ID NO: 1414944 - RNA, 19 nt, Artificial Sequence
  Description of Artificial Sequence: Synthetic oligonucleotide
  Sense strand starting at position 139 of SEQ ID NO: 1243414
uguuucuauguacacauaa

SEQ ID NO: 1414945 - RNA, 19 nt, Artificial Sequence
  Description of Artificial Sequence: Synthetic oligonucleotide
  Antisense strand to SEQ ID NO: 1414944
uuauguguacauagaaaca

SEQ ID NO: 1414946 - RNA, 19 nt, Artificial Sequence
  Description of Artificial Sequence: Synthetic oligonucleotide
  Sense strand starting at position 188 of SEQ ID NO: 1243414
ggaaucauguacuuuacca

SEQ ID NO: 1414947 - RNA, 19 nt, Artificial Sequence
  Description of Artificial Sequence: Synthetic oligonucleotide
  Antisense strand to SEQ ID NO: 1414946
ugguaaaguacaugauucc

SEQ ID NO: 1414948 - RNA, 19 nt, Artificial Sequence
  Description of Artificial Sequence: Synthetic oligonucleotide
  Sense strand starting at position 356 of SEQ ID NO: 1243414
agucauaaacgguaacaau

SEQ ID NO: 1414949 - RNA, 19 nt, Artificial Sequence
  Description of Artificial Sequence: Synthetic oligonucleotide
  Antisense strand to SEQ ID NO: 1414948
auuguuaccguuuaugacu

SEQ ID NO: 1414950 - RNA, 19 nt, Artificial Sequence
  Description of Artificial Sequence: Synthetic oligonucleotide
  Sense strand starting at position 382 of SEQ ID NO: 1243414
caaugugcucaggaccaua

SEQ ID NO: 1414951 - RNA, 19 nt, Artificial Sequence
  Description of Artificial Sequence: Synthetic oligonucleotide
  Antisense strand to SEQ ID NO: 1414950
uaugguccugagcacauug

SEQ ID NO: 1414952 - RNA, 19 nt, Artificial Sequence
  Description of Artificial Sequence: Synthetic oligonucleotide
  Sense strand starting at position 556 of SEQ ID NO: 1243414
auaggagcuuuacuugaca

SEQ ID NO: 1414953 - RNA, 19 nt, Artificial Sequence
  Description of Artificial Sequence: Synthetic oligonucleotide
  Antisense strand to SEQ ID NO: 1414952
ugucaaguaaagcuccuau

SEQ ID NO: 1414954 - RNA, 19 nt, Artificial Sequence
  Description of Artificial Sequence: Synthetic oligonucleotide
  Sense strand starting at position 647 of SEQ ID NO: 1243414
gaugccuuguauuuaagca

SEQ ID NO: 1414955 - RNA, 19 nt, Artificial Sequence
  Description of Artificial Sequence: Synthetic oligonucleotide
  Antisense strand to SEQ ID NO: 1414954
ugcuuaaauacaaggcauc

SEQ ID NO: 1414956 - RNA, 19 nt, Artificial Sequence
  Description of Artificial Sequence: Synthetic oligonucleotide
  Sense strand starting at position 687 of SEQ ID NO: 1243414
uccaaaggaccauguaauc

SEQ ID NO: 1414957 - RNA, 19 nt, Artificial Sequence
  Description of Artificial Sequence: Synthetic oligonucleotide
  Antisense strand to SEQ ID NO: 1414956
gauuacaugguccuuugga

SEQ ID NO: 1414958 - RNA, 19 nt, Artificial Sequence
  Description of Artificial Sequence: Synthetic oligonucleotide
  Sense strand starting at position 706 of SEQ ID NO: 1243414
uuagccucuccuuaggaau

SEQ ID NO: 1414959 - RNA, 19 nt, Artificial Sequence
  Description of Artificial Sequence: Synthetic oligonucleotide
  Antisense strand to SEQ ID NO: 1414958
auuccuaaggagaggcuaa

SEQ ID NO: 1414960 - RNA, 19 nt, Artificial Sequence
  Description of Artificial Sequence: Synthetic oligonucleotide
  Sense strand starting at position 738 of SEQ ID NO: 1243414
agugaagaggauugcuaga

SEQ ID NO: 1414961 - RNA, 19 nt, Artificial Sequence
  Description of Artificial Sequence: Synthetic oligonucleotide
  Antisense strand to SEQ ID NO: 1414960
ucuagcaauccucuucacu

SEQ ID NO: 1414962 - RNA, 19 nt, Artificial Sequence
  Description of Artificial Sequence: Synthetic oligonucleotide
  Sense strand starting at position 766 of SEQ ID NO: 1243414
cuguuauaagagcacuaaa

SEQ ID NO: 1414963 - RNA, 19 nt, Artificial Sequence
  Description of Artificial Sequence: Synthetic oligonucleotide
  Antisense strand to SEQ ID NO: 1414962
uuuagugcucuuauaacag

SEQ ID NO: 1414964 - RNA, 19 nt, Artificial Sequence
  Description of Artificial Sequence: Synthetic oligonucleotide
  Sense strand starting at position 844 of SEQ ID NO: 1243414
ccauuauauuugcccgagu

SEQ ID NO: 1414965 - RNA, 19 nt, Artificial Sequence
  Description of Artificial Sequence: Synthetic oligonucleotide
  Antisense strand to SEQ ID NO: 1414964
acucgggcaaauauaaugg

SEQ ID NO: 1414966 - RNA, 19 nt, Artificial Sequence
  Description of Artificial Sequence: Synthetic oligonucleotide
  Sense strand starting at position 961 of SEQ ID NO: 1243414
ccaagagguuauucuccca

SEQ ID NO: 1414967 - RNA, 19 nt, Artificial Sequence
  Description of Artificial Sequence: Synthetic oligonucleotide
  Antisense strand to SEQ ID NO: 1414966
ugggagaauaaccucuugg

SEQ ID NO: 1414968 - RNA, 19 nt, Artificial Sequence
  Description of Artificial Sequence: Synthetic oligonucleotide
  Sense strand starting at position 1025 of SEQ ID NO: 1243414
gccugugaacaugagagua

SEQ ID NO: 1414969 - RNA, 19 nt, Artificial Sequence
  Description of Artificial Sequence: Synthetic oligonucleotide
  Antisense strand to SEQ ID NO: 1414968
uacucucauguucacaggc

SEQ ID NO: 1414970 - RNA, 19 nt, Artificial Sequence
  Description of Artificial Sequence: Synthetic oligonucleotide
  Sense strand starting at position 1298 of SEQ ID NO: 1243414
aucugaaucauguaugggu

SEQ ID NO: 1414971 - RNA, 19 nt, Artificial Sequence
  Description of Artificial Sequence: Synthetic oligonucleotide
  Antisense strand to SEQ ID NO: 1414970
acccauacaugauucagau

SEQ ID NO: 1414972 - RNA, 19 nt, Artificial Sequence
  Description of Artificial Sequence: Synthetic oligonucleotide
  Sense strand starting at position 1342 of SEQ ID NO: 1243414
gaaagaaguucccugugau

SEQ ID NO: 1414973 - RNA, 19 nt, Artificial Sequence
  Description of Artificial Sequence: Synthetic oligonucleotide
  Antisense strand to SEQ ID NO: 1414972
aucacagggaacuucuuuc

SEQ ID NO: 1414974 - RNA, 19 nt, Artificial Sequence
  Description of Artificial Sequence: Synthetic oligonucleotide
  Sense strand starting at position 1343 of SEQ ID NO: 1243414
aaagaaguucccugugaug

SEQ ID NO: 1414975 - RNA, 19 nt, Artificial Sequence
  Description of Artificial Sequence: Synthetic oligonucleotide
  Antisense strand to SEQ ID NO: 1414974
caucacagggaacuucuuu

SEQ ID NO: 1414976 - RNA, 19 nt, Artificial Sequence
  Description of Artificial Sequence: Synthetic oligonucleotide
  Sense strand starting at position 1352 of SEQ ID NO: 1243414
cccugugauguugauaaca

SEQ ID NO: 1414977 - RNA, 19 nt, Artificial Sequence
  Description of Artificial Sequence: Synthetic oligonucleotide
  Antisense strand to SEQ ID NO: 1414976
uguuaucaacaucacaggg

SEQ ID NO: 1414978 - RNA, 19 nt, Artificial Sequence
  Description of Artificial Sequence: Synthetic oligonucleotide
  Sense strand starting at position 1596 of SEQ ID NO: 1243414
uuaaccaugcucuauguga

SEQ ID NO: 1414979 - RNA, 19 nt, Artificial Sequence
  Description of Artificial Sequence: Synthetic oligonucleotide
  Antisense strand to SEQ ID NO: 1414978
ucacauagagcaugguuaa

SEQ ID NO: 1414980 - RNA, 19 nt, Artificial Sequence
  Description of Artificial Sequence: Synthetic oligonucleotide
  Sense strand starting at position 1711 of SEQ ID NO: 1243414
ucuugucaucugcagagga

SEQ ID NO: 1414981 - RNA, 19 nt, Artificial Sequence
  Description of Artificial Sequence: Synthetic oligonucleotide
  Antisense strand to SEQ ID NO: 1414980
uccucugcagaugacaaga

SEQ ID NO: 1414982 - RNA, 19 nt, Artificial Sequence
  Description of Artificial Sequence: Synthetic oligonucleotide
  Sense strand starting at position 1753 of SEQ ID NO: 1243414
uuagaaguuccauguaaau

SEQ ID NO: 1414983 - RNA, 19 nt, Artificial Sequence
  Description of Artificial Sequence: Synthetic oligonucleotide
  Antisense strand to SEQ ID NO: 1414982
auuuacauggaacuucuaa

SEQ ID NO: 1414984 - RNA, 19 nt, Artificial Sequence
  Description of Artificial Sequence: Synthetic oligonucleotide
  Sense strand starting at position 2064 of SEQ ID NO: 1243414
augccauugguuggaauga

SEQ ID NO: 1414985 - RNA, 19 nt, Artificial Sequence
  Description of Artificial Sequence: Synthetic oligonucleotide
  Antisense strand to SEQ ID NO: 1414984
ucauuccaaccaauggcau

SEQ ID NO: 1414986 - RNA, 19 nt, Artificial Sequence
  Description of Artificial Sequence: Synthetic oligonucleotide
  Sense strand starting at position 2267 of SEQ ID NO: 1243414
aguacuucugguuacaguu

SEQ ID NO: 1414987 - RNA, 19 nt, Artificial Sequence
  Description of Artificial Sequence: Synthetic oligonucleotide
  Antisense strand to SEQ ID NO: 1414986
aacuguaaccagaaguacu

SEQ ID NO: 1414988 - RNA, 19 nt, Artificial Sequence
  Description of Artificial Sequence: Synthetic oligonucleotide
  Sense strand starting at position 2354 of SEQ ID NO: 1243414
guaagaagugagcauucuu

SEQ ID NO: 1414989 - RNA, 19 nt, Artificial Sequence
  Description of Artificial Sequence: Synthetic oligonucleotide
  Antisense strand to SEQ ID NO: 1414988
aagaaugcucacuucuuac

SEQ ID NO: 1414990 - RNA, 19 nt, Artificial Sequence
  Description of Artificial Sequence: Synthetic oligonucleotide
  Sense strand starting at position 2467 of SEQ ID NO: 1243414
uacauauaggugcauagau

SEQ ID NO: 1414991 - RNA, 19 nt, Artificial Sequence
  Description of Artificial Sequence: Synthetic oligonucleotide
  Antisense strand to SEQ ID NO: 1414990
aucuaugcaccuauaugua

SEQ ID NO: 1414992 - RNA, 19 nt, Artificial Sequence
  Description of Artificial Sequence: Synthetic oligonucleotide
  Sense strand starting at position 2583 of SEQ ID NO: 1243414
cuugucaguccacaaaguu

SEQ ID NO: 1414993 - RNA, 19 nt, Artificial Sequence
  Description of Artificial Sequence: Synthetic oligonucleotide
  Antisense strand to SEQ ID NO: 1414992
aacuuuguggacugacaag

SEQ ID NO: 1414994 - RNA, 19 nt, Artificial Sequence
  Description of Artificial Sequence: Synthetic oligonucleotide
  Sense strand starting at position 2867 of SEQ ID NO: 1243414
agagaagccucagugaucu

SEQ ID NO: 1414995 - RNA, 19 nt, Artificial Sequence
  Description of Artificial Sequence: Synthetic oligonucleotide
  Antisense strand to SEQ ID NO: 1414994
agaucacugaggcuucucu

SEQ ID NO: 1414996 - RNA, 19 nt, Artificial Sequence
  Description of Artificial Sequence: Synthetic oligonucleotide
  Sense strand starting at position 2904 of SEQ ID NO: 1243414
gucuguuuauuuguuggaa

SEQ ID NO: 1414997 - RNA, 19 nt, Artificial Sequence
  Description of Artificial Sequence: Synthetic oligonucleotide
  Antisense strand to SEQ ID NO: 1414996
uuccaacaaauaaacagac

SEQ ID NO: 1414998 - RNA, 19 nt, Artificial Sequence
  Description of Artificial Sequence: Synthetic oligonucleotide
  Sense strand starting at position 3052 of SEQ ID NO: 1243414
ugaaauuauggaugucuga

SEQ ID NO: 1414999 - RNA, 19 nt, Artificial Sequence
  Description of Artificial Sequence: Synthetic oligonucleotide
  Antisense strand to SEQ ID NO: 1414998
ucagacauccauaauuuca

SEQ ID NO: 1415000 - RNA, 19 nt, Artificial Sequence
  Description of Artificial Sequence: Synthetic oligonucleotide
  Sense strand starting at position 3055 of SEQ ID NO: 1243414
aauuauggaugucugaaac

SEQ ID NO: 1415001 - RNA, 19 nt, Artificial Sequence
  Description of Artificial Sequence: Synthetic oligonucleotide
  Antisense strand to SEQ ID NO: 1415000
guuucagacauccauaauu

SEQ ID NO: 1415002 - RNA, 19 nt, Artificial Sequence
  Description of Artificial Sequence: Synthetic oligonucleotide
  Sense strand starting at position 3182 of SEQ ID NO: 1243414
agggcauccuugucauaaa

SEQ ID NO: 1415003 - RNA, 19 nt, Artificial Sequence
  Description of Artificial Sequence: Synthetic oligonucleotide
  Antisense strand to SEQ ID NO: 1415002
uuuaugacaaggaugcccu

SEQ ID NO: 1415004 - RNA, 19 nt, Artificial Sequence
  Description of Artificial Sequence: Synthetic oligonucleotide
  Sense strand starting at position 3252 of SEQ ID NO: 1243414
cuguguugcaaagaauaag

SEQ ID NO: 1415005 - RNA, 19 nt, Artificial Sequence
  Description of Artificial Sequence: Synthetic oligonucleotide
  Antisense strand to SEQ ID NO: 1415004
cuuauucuuugcaacacag

SEQ ID NO: 1415006 - RNA, 19 nt, Artificial Sequence
  Description of Artificial Sequence: Synthetic oligonucleotide
  Sense strand starting at position 3325 of SEQ ID NO: 1243414
aauagagauguacgugaau

SEQ ID NO: 1415007 - RNA, 19 nt, Artificial Sequence
  Description of Artificial Sequence: Synthetic oligonucleotide
  Antisense strand to SEQ ID NO: 1415006
auucacguacaucucuauu

SEQ ID NO: 1415008 - RNA, 19 nt, Artificial Sequence
  Description of Artificial Sequence: Synthetic oligonucleotide
  Sense strand starting at position 3327 of SEQ ID NO: 1243414
uagagauguacgugaauua

SEQ ID NO: 1415009 - RNA, 19 nt, Artificial Sequence
  Description of Artificial Sequence: Synthetic oligonucleotide
  Antisense strand to SEQ ID NO: 1415008
uaauucacguacaucucua

SEQ ID NO: 1415010 - RNA, 19 nt, Artificial Sequence
  Description of Artificial Sequence: Synthetic oligonucleotide
  Sense strand starting at position 3398 of SEQ ID NO: 1243414
uuuagucauuucuugugua

SEQ ID NO: 1415011 - RNA, 19 nt, Artificial Sequence
  Description of Artificial Sequence: Synthetic oligonucleotide
  Antisense strand to SEQ ID NO: 1415010
uacacaagaaaugacuaaa

SEQ ID NO: 1415012 - RNA, 19 nt, Artificial Sequence
  Description of Artificial Sequence: Synthetic oligonucleotide
  Sense strand starting at position 3451 of SEQ ID NO: 1243414
guauaaagcugguuuggga

SEQ ID NO: 1415013 - RNA, 19 nt, Artificial Sequence
  Description of Artificial Sequence: Synthetic oligonucleotide
  Antisense strand to SEQ ID NO: 1415012
ucccaaaccagcuuuauac

SEQ ID NO: 1415014 - RNA, 19 nt, Artificial Sequence
  Description of Artificial Sequence: Synthetic oligonucleotide
  Sense strand starting at position 3545 of SEQ ID NO: 1243414
cguugaauacuugaaaugu

SEQ ID NO: 1415015 - RNA, 19 nt, Artificial Sequence
  Description of Artificial Sequence: Synthetic oligonucleotide
  Antisense strand to SEQ ID NO: 1415014
acauuucaaguauucaacg

SEQ ID NO: 1415016 - RNA, 19 nt, Artificial Sequence
  Description of Artificial Sequence: Synthetic oligonucleotide
  Sense strand starting at position 3560 of SEQ ID NO: 1243414
augugacuggucugaauua

SEQ ID NO: 1415017 - RNA, 19 nt, Artificial Sequence
  Description of Artificial Sequence: Synthetic oligonucleotide
  Antisense strand to SEQ ID NO: 1415016
uaauucagaccagucacau

SEQ ID NO: 1415018 - RNA, 19 nt, Artificial Sequence
  Description of Artificial Sequence: Synthetic oligonucleotide
  Sense strand starting at position 3955 of SEQ ID NO: 1243414
augagaccuugccucagaa

SEQ ID NO: 1415019 - RNA, 19 nt, Artificial Sequence
  Description of Artificial Sequence: Synthetic oligonucleotide
  Antisense strand to SEQ ID NO: 1415018
uucugaggcaaggucucau

SEQ ID NO: 1415020 - RNA, 19 nt, Artificial Sequence
  Description of Artificial Sequence: Synthetic oligonucleotide
  Sense strand starting at position 115 of SEQ ID NO: 1243415
ucuggagaucucuaggcua

SEQ ID NO: 1415021 - RNA, 19 nt, Artificial Sequence
  Description of Artificial Sequence: Synthetic oligonucleotide
  Antisense strand to SEQ ID NO: 1415020
uagccuagagaucuccaga

SEQ ID NO: 1415022 - RNA, 19 nt, Artificial Sequence
  Description of Artificial Sequence: Synthetic oligonucleotide
  Sense strand starting at position 117 of SEQ ID NO: 1243415
uggagaucucuaggcuaaa

SEQ ID NO: 1415023 - RNA, 19 nt, Artificial Sequence
  Description of Artificial Sequence: Synthetic oligonucleotide
  Antisense strand to SEQ ID NO: 1415022
uuuagccuagagaucucca

SEQ ID NO: 1415024 - RNA, 19 nt, Artificial Sequence
  Description of Artificial Sequence: Synthetic oligonucleotide
  Sense strand starting at position 118 of SEQ ID NO: 1243415
ggagaucucuaggcuaaac

SEQ ID NO: 1415025 - RNA, 19 nt, Artificial Sequence
  Description of Artificial Sequence: Synthetic oligonucleotide
  Antisense strand to SEQ ID NO: 1415024
guuuagccuagagaucucc

SEQ ID NO: 1415026 - RNA, 19 nt, Artificial Sequence
  Description of Artificial Sequence: Synthetic oligonucleotide
  Sense strand starting at position 139 of SEQ ID NO: 1243415
gaggucuucuauugaaacc

SEQ ID NO: 1415027 - RNA, 19 nt, Artificial Sequence
  Description of Artificial Sequence: Synthetic oligonucleotide
  Antisense strand to SEQ ID NO: 1415026
gguuucaauagaagaccuc

SEQ ID NO: 1415028 - RNA, 19 nt, Artificial Sequence
  Description of Artificial Sequence: Synthetic oligonucleotide
  Sense strand starting at position 188 of SEQ ID NO: 1243415
augauuggcuccuugaaag

SEQ ID NO: 1415029 - RNA, 19 nt, Artificial Sequence
  Description of Artificial Sequence: Synthetic oligonucleotide
  Antisense strand to SEQ ID NO: 1415028
cuuucaaggagccaaucau

SEQ ID NO: 1415030 - RNA, 19 nt, Artificial Sequence
  Description of Artificial Sequence: Synthetic oligonucleotide
  Sense strand starting at position 194 of SEQ ID NO: 1243415
ggcuccuugaaaggacuau

SEQ ID NO: 1415031 - RNA, 19 nt, Artificial Sequence
  Description of Artificial Sequence: Synthetic oligonucleotide
  Antisense strand to SEQ ID NO: 1415030
auaguccuuucaaggagcc

SEQ ID NO: 1415032 - RNA, 19 nt, Artificial Sequence
  Description of Artificial Sequence: Synthetic oligonucleotide
  Sense strand starting at position 483 of SEQ ID NO: 1243415
gcgggauccugacugcaca

SEQ ID NO: 1415033 - RNA, 19 nt, Artificial Sequence
  Description of Artificial Sequence: Synthetic oligonucleotide
  Antisense strand to SEQ ID NO: 1415032
ugugcagucaggaucccgc

SEQ ID NO: 1415034 - RNA, 19 nt, Artificial Sequence
  Description of Artificial Sequence: Synthetic oligonucleotide
  Sense strand starting at position 933 of SEQ ID NO: 1243415
gccagagucugggcaaagu

SEQ ID NO: 1415035 - RNA, 19 nt, Artificial Sequence
  Description of Artificial Sequence: Synthetic oligonucleotide
  Antisense strand to SEQ ID NO: 1415034
acuuugcccagacucuggc

SEQ ID NO: 1415036 - RNA, 19 nt, Artificial Sequence
  Description of Artificial Sequence: Synthetic oligonucleotide
  Sense strand starting at position 1088 of SEQ ID NO: 1243415
gcccguuuaucucugaauc

SEQ ID NO: 1415037 - RNA, 19 nt, Artificial Sequence
  Description of Artificial Sequence: Synthetic oligonucleotide
  Antisense strand to SEQ ID NO: 1415036
gauucagagauaaacgggc

SEQ ID NO: 1415038 - RNA, 19 nt, Artificial Sequence
  Description of Artificial Sequence: Synthetic oligonucleotide
  Sense strand starting at position 1089 of SEQ ID NO: 1243415
cccguuuaucucugaaucu

SEQ ID NO: 1415039 - RNA, 19 nt, Artificial Sequence
  Description of Artificial Sequence: Synthetic oligonucleotide
  Antisense strand to SEQ ID NO: 1415038
agauucagagauaaacggg

SEQ ID NO: 1415040 - RNA, 19 nt, Artificial Sequence
  Description of Artificial Sequence: Synthetic oligonucleotide
  Sense strand starting at position 1090 of SEQ ID NO: 1243415
ccguuuaucucugaaucug

SEQ ID NO: 1415041 - RNA, 19 nt, Artificial Sequence
  Description of Artificial Sequence: Synthetic oligonucleotide
  Antisense strand to SEQ ID NO: 1415040
cagauucagagauaaacgg

SEQ ID NO: 1415042 - RNA, 19 nt, Artificial Sequence
  Description of Artificial Sequence: Synthetic oligonucleotide
  Sense strand starting at position 1401 of SEQ ID NO: 1243415
accugucacuuguccugau

SEQ ID NO: 1415043 - RNA, 19 nt, Artificial Sequence
  Description of Artificial Sequence: Synthetic oligonucleotide
  Antisense strand to SEQ ID NO: 1415042
aucaggacaagugacaggu

SEQ ID NO: 1415044 - RNA, 19 nt, Artificial Sequence
  Description of Artificial Sequence: Synthetic oligonucleotide
  Sense strand starting at position 2342 of SEQ ID NO: 1243415
cccgccuagucagaggauu

SEQ ID NO: 1415045 - RNA, 19 nt, Artificial Sequence
  Description of Artificial Sequence: Synthetic oligonucleotide
  Antisense strand to SEQ ID NO: 1415044
aauccucugacuaggcggg

SEQ ID NO: 1415046 - RNA, 19 nt, Artificial Sequence
  Description of Artificial Sequence: Synthetic oligonucleotide
  Sense strand starting at position 2344 of SEQ ID NO: 1243415
cgccuagucagaggauuug

SEQ ID NO: 1415047 - RNA, 19 nt, Artificial Sequence
  Description of Artificial Sequence: Synthetic oligonucleotide
  Antisense strand to SEQ ID NO: 1415046
caaauccucugacuaggcg

SEQ ID NO: 1415048 - RNA, 19 nt, Artificial Sequence
  Description of Artificial Sequence: Synthetic oligonucleotide
  Sense strand starting at position 2350 of SEQ ID NO: 1243415
gucagaggauuuggacgaa

SEQ ID NO: 1415049 - RNA, 19 nt, Artificial Sequence
  Description of Artificial Sequence: Synthetic oligonucleotide
  Antisense strand to SEQ ID NO: 1415048
uucguccaaauccucugac

SEQ ID NO: 1415050 - RNA, 19 nt, Artificial Sequence
  Description of Artificial Sequence: Synthetic oligonucleotide
  Sense strand starting at position 2392 of SEQ ID NO: 1243415
uucugccaaucguuggaau

SEQ ID NO: 1415051 - RNA, 19 nt, Artificial Sequence
  Description of Artificial Sequence: Synthetic oligonucleotide
  Antisense strand to SEQ ID NO: 1415050
auuccaacgauuggcagaa

SEQ ID NO: 1415052 - RNA, 19 nt, Artificial Sequence
  Description of Artificial Sequence: Synthetic oligonucleotide
  Sense strand starting at position 2463 of SEQ ID NO: 1243415
ggagaaagcuagggcugua

SEQ ID NO: 1415053 - RNA, 19 nt, Artificial Sequence
  Description of Artificial Sequence: Synthetic oligonucleotide
  Antisense strand to SEQ ID NO: 1415052
uacagcccuagcuuucucc

SEQ ID NO: 1415054 - RNA, 19 nt, Artificial Sequence
  Description of Artificial Sequence: Synthetic oligonucleotide
  Sense strand starting at position 2466 of SEQ ID NO: 1243415
gaaagcuagggcuguaaga

SEQ ID NO: 1415055 - RNA, 19 nt, Artificial Sequence
  Description of Artificial Sequence: Synthetic oligonucleotide
  Antisense strand to SEQ ID NO: 1415054
ucuuacagcccuagcuuuc

SEQ ID NO: 1415056 - RNA, 19 nt, Artificial Sequence
  Description of Artificial Sequence: Synthetic oligonucleotide
  Sense strand starting at position 2558 of SEQ ID NO: 1243415
ccuccuggccaaugaauau

SEQ ID NO: 1415057 - RNA, 19 nt, Artificial Sequence
  Description of Artificial Sequence: Synthetic oligonucleotide
  Antisense strand to SEQ ID NO: 1415056
auauucauuggccaggagg

SEQ ID NO: 1415058 - RNA, 19 nt, Artificial Sequence
  Description of Artificial Sequence: Synthetic oligonucleotide
  Sense strand starting at position 2565 of SEQ ID NO: 1243415
gccaaugaauaugacugaa

SEQ ID NO: 1415059 - RNA, 19 nt, Artificial Sequence
  Description of Artificial Sequence: Synthetic oligonucleotide
  Antisense strand to SEQ ID NO: 1415058
uucagucauauucauuggc

SEQ ID NO: 1415060 - RNA, 19 nt, Artificial Sequence
  Description of Artificial Sequence: Synthetic oligonucleotide
  Sense strand starting at position 2643 of SEQ ID NO: 1243415
ccuggaggcuucuuaacca

SEQ ID NO: 1415061 - RNA, 19 nt, Artificial Sequence
  Description of Artificial Sequence: Synthetic oligonucleotide
  Antisense strand to SEQ ID NO: 1415060
ugguuaagaagccuccagg

SEQ ID NO: 1415062 - RNA, 19 nt, Artificial Sequence
  Description of Artificial Sequence: Synthetic oligonucleotide
  Sense strand starting at position 2729 of SEQ ID NO: 1243415
gucuauuuaggcggugaca

SEQ ID NO: 1415063 - RNA, 19 nt, Artificial Sequence
  Description of Artificial Sequence: Synthetic oligonucleotide
  Antisense strand to SEQ ID NO: 1415062
ugucaccgccuaaauagac

SEQ ID NO: 1415064 - RNA, 19 nt, Artificial Sequence
  Description of Artificial Sequence: Synthetic oligonucleotide
  Sense strand starting at position 2774 of SEQ ID NO: 1243415
gcugaagaauucuuuaggu

SEQ ID NO: 1415065 - RNA, 19 nt, Artificial Sequence
  Description of Artificial Sequence: Synthetic oligonucleotide
  Antisense strand to SEQ ID NO: 1415064
accuaaagaauucuucagc

SEQ ID NO: 1415066 - RNA, 19 nt, Artificial Sequence
  Description of Artificial Sequence: Synthetic oligonucleotide
  Sense strand starting at position 2867 of SEQ ID NO: 1243415
caaugaucguguucuccca

SEQ ID NO: 1415067 - RNA, 19 nt, Artificial Sequence
  Description of Artificial Sequence: Synthetic oligonucleotide
  Antisense strand to SEQ ID NO: 1415066
ugggagaacacgaucauug

SEQ ID NO: 1415068 - RNA, 19 nt, Artificial Sequence
  Description of Artificial Sequence: Synthetic oligonucleotide
  Sense strand starting at position 2975 of SEQ ID NO: 1243415
cagggauagucggugacaa

SEQ ID NO: 1415069 - RNA, 19 nt, Artificial Sequence
  Description of Artificial Sequence: Synthetic oligonucleotide
  Antisense strand to SEQ ID NO: 1415068
uugucaccgacuaucccug

SEQ ID NO: 1415070 - RNA, 19 nt, Artificial Sequence
  Description of Artificial Sequence: Synthetic oligonucleotide
  Sense strand starting at position 2976 of SEQ ID NO: 1243415
agggauagucggugacaac

SEQ ID NO: 1415071 - RNA, 19 nt, Artificial Sequence
  Description of Artificial Sequence: Synthetic oligonucleotide
  Antisense strand to SEQ ID NO: 1415070
guugucaccgacuaucccu

SEQ ID NO: 1415072 - RNA, 19 nt, Artificial Sequence
  Description of Artificial Sequence: Synthetic oligonucleotide
  Sense strand starting at position 3004 of SEQ ID NO: 1243415
gccuuaugggagggugaca

SEQ ID NO: 1415073 - RNA, 19 nt, Artificial Sequence
  Description of Artificial Sequence: Synthetic oligonucleotide
  Antisense strand to SEQ ID NO: 1415072
ugucacccucccauaaggc

SEQ ID NO: 1415074 - RNA, 19 nt, Artificial Sequence
  Description of Artificial Sequence: Synthetic oligonucleotide
  Sense strand starting at position 3321 of SEQ ID NO: 1243415
cccauuuccugcgggaauc

SEQ ID NO: 1415075 - RNA, 19 nt, Artificial Sequence
  Description of Artificial Sequence: Synthetic oligonucleotide
  Antisense strand to SEQ ID NO: 1415074
gauucccgcaggaaauggg

SEQ ID NO: 1415076 - RNA, 19 nt, Artificial Sequence
  Description of Artificial Sequence: Synthetic oligonucleotide
  Sense strand starting at position 3414 of SEQ ID NO: 1243415
accuuaucccucugaguac

SEQ ID NO: 1415077 - RNA, 19 nt, Artificial Sequence
  Description of Artificial Sequence: Synthetic oligonucleotide
  Antisense strand to SEQ ID NO: 1415076
guacucagagggauaaggu

SEQ ID NO: 1415078 - RNA, 19 nt, Artificial Sequence
  Description of Artificial Sequence: Synthetic oligonucleotide
  Sense strand starting at position 3499 of SEQ ID NO: 1243415
ccauauguguguuacuauu

SEQ ID NO: 1415079 - RNA, 19 nt, Artificial Sequence
  Description of Artificial Sequence: Synthetic oligonucleotide
  Antisense strand to SEQ ID NO: 1415078
aauaguaacacacauaugg

SEQ ID NO: 1415080 - RNA, 19 nt, Artificial Sequence
  Description of Artificial Sequence: Synthetic oligonucleotide
  Sense strand starting at position 3501 of SEQ ID NO: 1243415
auauguguguuacuauucu

SEQ ID NO: 1415081 - RNA, 19 nt, Artificial Sequence
  Description of Artificial Sequence: Synthetic oligonucleotide
  Antisense strand to SEQ ID NO: 1415080
agaauaguaacacacauau

SEQ ID NO: 1415082 - RNA, 19 nt, Artificial Sequence
  Description of Artificial Sequence: Synthetic oligonucleotide
  Sense strand starting at position 3625 of SEQ ID NO: 1243415
gcuccagguuguccuuaga

SEQ ID NO: 1415083 - RNA, 19 nt, Artificial Sequence
  Description of Artificial Sequence: Synthetic oligonucleotide
  Antisense strand to SEQ ID NO: 1415082
ucuaaggacaaccuggagc

SEQ ID NO: 1415084 - RNA, 19 nt, Artificial Sequence
  Description of Artificial Sequence: Synthetic oligonucleotide
  Sense strand starting at position 3628 of SEQ ID NO: 1243415
ccagguuguccuuagauca

SEQ ID NO: 1415085 - RNA, 19 nt, Artificial Sequence
  Description of Artificial Sequence: Synthetic oligonucleotide
  Antisense strand to SEQ ID NO: 1415084
ugaucuaaggacaaccugg

SEQ ID NO: 1415086 - RNA, 19 nt, Artificial Sequence
  Description of Artificial Sequence: Synthetic oligonucleotide
  Sense strand starting at position 3635 of SEQ ID NO: 1243415
guccuuagaucacaagcau

SEQ ID NO: 1415087 - RNA, 19 nt, Artificial Sequence
  Description of Artificial Sequence: Synthetic oligonucleotide
  Antisense strand to SEQ ID NO: 1415086
augcuugugaucuaaggac

SEQ ID NO: 1415088 - RNA, 19 nt, Artificial Sequence
  Description of Artificial Sequence: Synthetic oligonucleotide
  Sense strand starting at position 3649 of SEQ ID NO: 1243415
agcauaaagaccugacguu

SEQ ID NO: 1415089 - RNA, 19 nt, Artificial Sequence
  Description of Artificial Sequence: Synthetic oligonucleotide
  Antisense strand to SEQ ID NO: 1415088
aacgucaggucuuuaugcu

SEQ ID NO: 1415090 - RNA, 19 nt, Artificial Sequence
  Description of Artificial Sequence: Synthetic oligonucleotide
  Sense strand starting at position 3650 of SEQ ID NO: 1243415
gcauaaagaccugacguua

SEQ ID NO: 1415091 - RNA, 19 nt, Artificial Sequence
  Description of Artificial Sequence: Synthetic oligonucleotide
  Antisense strand to SEQ ID NO: 1415090
uaacgucaggucuuuaugc

SEQ ID NO: 1415092 - RNA, 19 nt, Artificial Sequence
  Description of Artificial Sequence: Synthetic oligonucleotide
  Sense strand starting at position 3664 of SEQ ID NO: 1243415
cguuaugagcuccaaccuu

SEQ ID NO: 1415093 - RNA, 19 nt, Artificial Sequence
  Description of Artificial Sequence: Synthetic oligonucleotide
  Antisense strand to SEQ ID NO: 1415092
aagguuggagcucauaacg

SEQ ID NO: 1415094 - RNA, 19 nt, Artificial Sequence
  Description of Artificial Sequence: Synthetic oligonucleotide
  Sense strand starting at position 3750 of SEQ ID NO: 1243415
cuggaauuccagugagacc

SEQ ID NO: 1415095 - RNA, 19 nt, Artificial Sequence
  Description of Artificial Sequence: Synthetic oligonucleotide
  Antisense strand to SEQ ID NO: 1415094
ggucucacuggaauuccag

SEQ ID NO: 1415096 - RNA, 19 nt, Artificial Sequence
  Description of Artificial Sequence: Synthetic oligonucleotide
  Sense strand starting at position 3797 of SEQ ID NO: 1243415
guuucugaguccucuaagg

SEQ ID NO: 1415097 - RNA, 19 nt, Artificial Sequence
  Description of Artificial Sequence: Synthetic oligonucleotide
  Antisense strand to SEQ ID NO: 1415096
ccuuagaggacucagaaac

SEQ ID NO: 1415098 - RNA, 19 nt, Artificial Sequence
  Description of Artificial Sequence: Synthetic oligonucleotide
  Sense strand starting at position 3799 of SEQ ID NO: 1243415
uucugaguccucuaagguc

SEQ ID NO: 1415099 - RNA, 19 nt, Artificial Sequence
  Description of Artificial Sequence: Synthetic oligonucleotide
  Antisense strand to SEQ ID NO: 1415098
gaccuuagaggacucagaa

SEQ ID NO: 1415100 - RNA, 19 nt, Artificial Sequence
  Description of Artificial Sequence: Synthetic oligonucleotide
  Sense strand starting at position 28 of SEQ ID NO: 1243416
uuuacagaguugucauaac

SEQ ID NO: 1415101 - RNA, 19 nt, Artificial Sequence
  Description of Artificial Sequence: Synthetic oligonucleotide
  Antisense strand to SEQ ID NO: 1415100
guuaugacaacucuguaaa

SEQ ID NO: 1415102 - RNA, 19 nt, Artificial Sequence
  Description of Artificial Sequence: Synthetic oligonucleotide
  Sense strand starting at position 51 of SEQ ID NO: 1243416
aagguaugcucagacaggu

SEQ ID NO: 1415103 - RNA, 19 nt, Artificial Sequence
  Description of Artificial Sequence: Synthetic oligonucleotide
  Antisense strand to SEQ ID NO: 1415102
accugucugagcauaccuu

SEQ ID NO: 1415104 - RNA, 19 nt, Artificial Sequence
  Description of Artificial Sequence: Synthetic oligonucleotide
  Sense strand starting at position 84 of SEQ ID NO: 1243416
gguaaauguuaagugcuuu

SEQ ID NO: 1415105 - RNA, 19 nt, Artificial Sequence
  Description of Artificial Sequence: Synthetic oligonucleotide
  Antisense strand to SEQ ID NO: 1415104
aaagcacuuaacauuuacc

SEQ ID NO: 1415106 - RNA, 19 nt, Artificial Sequence
  Description of Artificial Sequence: Synthetic oligonucleotide
  Sense strand starting at position 122 of SEQ ID NO: 1243416
guccuuauguacuuuaaac

SEQ ID NO: 1415107 - RNA, 19 nt, Artificial Sequence
  Description of Artificial Sequence: Synthetic oligonucleotide
  Antisense strand to SEQ ID NO: 1415106
guuuaaaguacauaaggac

SEQ ID NO: 1415108 - RNA, 19 nt, Artificial Sequence
  Description of Artificial Sequence: Synthetic oligonucleotide
  Sense strand starting at position 183 of SEQ ID NO: 1243416
uuggcucaaucuguagaua

SEQ ID NO: 1415109 - RNA, 19 nt, Artificial Sequence
  Description of Artificial Sequence: Synthetic oligonucleotide
  Antisense strand to SEQ ID NO: 1415108
uaucuacagauugagccaa

SEQ ID NO: 1415110 - RNA, 19 nt, Artificial Sequence
  Description of Artificial Sequence: Synthetic oligonucleotide
  Sense strand starting at position 184 of SEQ ID NO: 1243416
uggcucaaucuguagauaa

SEQ ID NO: 1415111 - RNA, 19 nt, Artificial Sequence
  Description of Artificial Sequence: Synthetic oligonucleotide
  Antisense strand to SEQ ID NO: 1415110
uuaucuacagauugagcca

SEQ ID NO: 1415112 - RNA, 19 nt, Artificial Sequence
  Description of Artificial Sequence: Synthetic oligonucleotide
  Sense strand starting at position 186 of SEQ ID NO: 1243416
gcucaaucuguagauaauu

SEQ ID NO: 1415113 - RNA, 19 nt, Artificial Sequence
  Description of Artificial Sequence: Synthetic oligonucleotide
  Antisense strand to SEQ ID NO: 1415112
aauuaucuacagauugagc

SEQ ID NO: 1415114 - RNA, 19 nt, Artificial Sequence
  Description of Artificial Sequence: Synthetic oligonucleotide
  Sense strand starting at position 255 of SEQ ID NO: 1243416
gcagguguggucagcgaga

SEQ ID NO: 1415115 - RNA, 19 nt, Artificial Sequence
  Description of Artificial Sequence: Synthetic oligonucleotide
  Antisense strand to SEQ ID NO: 1415114
ucucgcugaccacaccugc

SEQ ID NO: 1415116 - RNA, 19 nt, Artificial Sequence
  Description of Artificial Sequence: Synthetic oligonucleotide
  Sense strand starting at position 316 of SEQ ID NO: 1243416
ggccaaauuuauuguuguu

SEQ ID NO: 1415117 - RNA, 19 nt, Artificial Sequence
  Description of Artificial Sequence: Synthetic oligonucleotide
  Antisense strand to SEQ ID NO: 1415116
aacaacaauaaauuuggcc

SEQ ID NO: 1415118 - RNA, 19 nt, Artificial Sequence
  Description of Artificial Sequence: Synthetic oligonucleotide
  Sense strand starting at position 388 of SEQ ID NO: 1243416
guggaaagccacugcaaua

SEQ ID NO: 1415119 - RNA, 19 nt, Artificial Sequence
  Description of Artificial Sequence: Synthetic oligonucleotide
  Antisense strand to SEQ ID NO: 1415118
uauugcaguggcuuuccac

SEQ ID NO: 1415120 - RNA, 19 nt, Artificial Sequence
  Description of Artificial Sequence: Synthetic oligonucleotide
  Sense strand starting at position 400 of SEQ ID NO: 1243416
ugcaauaguugacaucuau

SEQ ID NO: 1415121 - RNA, 19 nt, Artificial Sequence
  Description of Artificial Sequence: Synthetic oligonucleotide
  Antisense strand to SEQ ID NO: 1415120
auagaugucaacuauugca

SEQ ID NO: 1415122 - RNA, 19 nt, Artificial Sequence
  Description of Artificial Sequence: Synthetic oligonucleotide
  Sense strand starting at position 571 of SEQ ID NO: 1243416
cccaauaaguccuccaugu

SEQ ID NO: 1415123 - RNA, 19 nt, Artificial Sequence
  Description of Artificial Sequence: Synthetic oligonucleotide
  Antisense strand to SEQ ID NO: 1415122
acauggaggacuuauuggg

SEQ ID NO: 1415124 - RNA, 19 nt, Artificial Sequence
  Description of Artificial Sequence: Synthetic oligonucleotide
  Sense strand starting at position 575 of SEQ ID NO: 1243416
auaaguccuccauguaaag

SEQ ID NO: 1415125 - RNA, 19 nt, Artificial Sequence
  Description of Artificial Sequence: Synthetic oligonucleotide
  Antisense strand to SEQ ID NO: 1415124
cuuuacauggaggacuuau

SEQ ID NO: 1415126 - RNA, 19 nt, Artificial Sequence
  Description of Artificial Sequence: Synthetic oligonucleotide
  Sense strand starting at position 586 of SEQ ID NO: 1243416
auguaaagccucuaucuga

SEQ ID NO: 1415127 - RNA, 19 nt, Artificial Sequence
  Description of Artificial Sequence: Synthetic oligonucleotide
  Antisense strand to SEQ ID NO: 1415126
ucagauagaggcuuuacau

SEQ ID NO: 1415128 - RNA, 19 nt, Artificial Sequence
  Description of Artificial Sequence: Synthetic oligonucleotide
  Sense strand starting at position 610 of SEQ ID NO: 1243416
cagauuagaugaggaucaa

SEQ ID NO: 1415129 - RNA, 19 nt, Artificial Sequence
  Description of Artificial Sequence: Synthetic oligonucleotide
  Antisense strand to SEQ ID NO: 1415128
uugauccucaucuaaucug

SEQ ID NO: 1415130 - RNA, 19 nt, Artificial Sequence
  Description of Artificial Sequence: Synthetic oligonucleotide
  Sense strand starting at position 779 of SEQ ID NO: 1243416
uugucuucgccgcaacuga

SEQ ID NO: 1415131 - RNA, 19 nt, Artificial Sequence
  Description of Artificial Sequence: Synthetic oligonucleotide
  Antisense strand to SEQ ID NO: 1415130
ucaguugcggcgaagacaa

SEQ ID NO: 1415132 - RNA, 19 nt, Artificial Sequence
  Description of Artificial Sequence: Synthetic oligonucleotide
  Sense strand starting at position 812 of SEQ ID NO: 1243416
gugccuacugugugcugaa

SEQ ID NO: 1415133 - RNA, 19 nt, Artificial Sequence
  Description of Artificial Sequence: Synthetic oligonucleotide
  Antisense strand to SEQ ID NO: 1415132
uucagcacacaguaggcac

SEQ ID NO: 1415134 - RNA, 19 nt, Artificial Sequence
  Description of Artificial Sequence: Synthetic oligonucleotide
  Sense strand starting at position 1092 of SEQ ID NO: 1243416
ggaauaagcugcuggguaa

SEQ ID NO: 1415135 - RNA, 19 nt, Artificial Sequence
  Description of Artificial Sequence: Synthetic oligonucleotide
  Antisense strand to SEQ ID NO: 1415134
uuacccagcagcuuauucc

SEQ ID NO: 1415136 - RNA, 19 nt, Artificial Sequence
  Description of Artificial Sequence: Synthetic oligonucleotide
  Sense strand starting at position 1093 of SEQ ID NO: 1243416
gaauaagcugcuggguaaa

SEQ ID NO: 1415137 - RNA, 19 nt, Artificial Sequence
  Description of Artificial Sequence: Synthetic oligonucleotide
  Antisense strand to SEQ ID NO: 1415136
uuuacccagcagcuuauuc

SEQ ID NO: 1415138 - RNA, 19 nt, Artificial Sequence
  Description of Artificial Sequence: Synthetic oligonucleotide
  Sense strand starting at position 1574 of SEQ ID NO: 1243416
guaucagaaucuguugcaa

SEQ ID NO: 1415139 - RNA, 19 nt, Artificial Sequence
  Description of Artificial Sequence: Synthetic oligonucleotide
  Antisense strand to SEQ ID NO: 1415138
uugcaacagauucugauac

SEQ ID NO: 1415140 - RNA, 19 nt, Artificial Sequence
  Description of Artificial Sequence: Synthetic oligonucleotide
  Sense strand starting at position 1576 of SEQ ID NO: 1243416
aucagaaucuguugcaauc

SEQ ID NO: 1415141 - RNA, 19 nt, Artificial Sequence
  Description of Artificial Sequence: Synthetic oligonucleotide
  Antisense strand to SEQ ID NO: 1415140
gauugcaacagauucugau

SEQ ID NO: 1415142 - RNA, 19 nt, Artificial Sequence
  Description of Artificial Sequence: Synthetic oligonucleotide
  Sense strand starting at position 1663 of SEQ ID NO: 1243416
gucacucuuccagacgaca

SEQ ID NO: 1415143 - RNA, 19 nt, Artificial Sequence
  Description of Artificial Sequence: Synthetic oligonucleotide
  Antisense strand to SEQ ID NO: 1415142
ugucgucuggaagagugac

SEQ ID NO: 1415144 - RNA, 19 nt, Artificial Sequence
  Description of Artificial Sequence: Synthetic oligonucleotide
  Sense strand starting at position 2816 of SEQ ID NO: 1243416
ccgggugugccauaucauc

SEQ ID NO: 1415145 - RNA, 19 nt, Artificial Sequence
  Description of Artificial Sequence: Synthetic oligonucleotide
  Antisense strand to SEQ ID NO: 1415144
gaugauauggcacacccgg

SEQ ID NO: 1415146 - RNA, 19 nt, Artificial Sequence
  Description of Artificial Sequence: Synthetic oligonucleotide
  Sense strand starting at position 2988 of SEQ ID NO: 1243416
ggugaacgugcgccuagau

SEQ ID NO: 1415147 - RNA, 19 nt, Artificial Sequence
  Description of Artificial Sequence: Synthetic oligonucleotide
  Antisense strand to SEQ ID NO: 1415146
aucuaggcgcacguucacc

SEQ ID NO: 1415148 - RNA, 19 nt, Artificial Sequence
  Description of Artificial Sequence: Synthetic oligonucleotide
  Sense strand starting at position 3710 of SEQ ID NO: 1243416
agucacagucuggguagaa

SEQ ID NO: 1415149 - RNA, 19 nt, Artificial Sequence
  Description of Artificial Sequence: Synthetic oligonucleotide
  Antisense strand to SEQ ID NO: 1415148
uucuacccagacugugacu

SEQ ID NO: 1415150 - RNA, 19 nt, Artificial Sequence
  Description of Artificial Sequence: Synthetic oligonucleotide
  Sense strand starting at position 3893 of SEQ ID NO: 1243416
gggagaauggccugcgaug

SEQ ID NO: 1415151 - RNA, 19 nt, Artificial Sequence
  Description of Artificial Sequence: Synthetic oligonucleotide
  Antisense strand to SEQ ID NO: 1415150
caucgcaggccauucuccc

SEQ ID NO: 1415152 - RNA, 19 nt, Artificial Sequence
  Description of Artificial Sequence: Synthetic oligonucleotide
  Sense strand starting at position 113 of SEQ ID NO: 1243417
ccuugaguuucugggcaac

SEQ ID NO: 1415153 - RNA, 19 nt, Artificial Sequence
  Description of Artificial Sequence: Synthetic oligonucleotide
  Antisense strand to SEQ ID NO: 1415152
guugcccagaaacucaagg

SEQ ID NO: 1415154 - RNA, 19 nt, Artificial Sequence
  Description of Artificial Sequence: Synthetic oligonucleotide
  Sense strand starting at position 115 of SEQ ID NO: 1243417
uugaguuucugggcaacag

SEQ ID NO: 1415155 - RNA, 19 nt, Artificial Sequence
  Description of Artificial Sequence: Synthetic oligonucleotide
  Antisense strand to SEQ ID NO: 1415154
cuguugcccagaaacucaa

SEQ ID NO: 1415156 - RNA, 19 nt, Artificial Sequence
  Description of Artificial Sequence: Synthetic oligonucleotide
  Sense strand starting at position 184 of SEQ ID NO: 1243417
accgucgucacugagaagu

SEQ ID NO: 1415157 - RNA, 19 nt, Artificial Sequence
  Description of Artificial Sequence: Synthetic oligonucleotide
  Antisense strand to SEQ ID NO: 1415156
acuucucagugacgacggu

SEQ ID NO: 1415158 - RNA, 19 nt, Artificial Sequence
  Description of Artificial Sequence: Synthetic oligonucleotide
  Sense strand starting at position 186 of SEQ ID NO: 1243417
cgucgucacugagaaguag

SEQ ID NO: 1415159 - RNA, 19 nt, Artificial Sequence
  Description of Artificial Sequence: Synthetic oligonucleotide
  Antisense strand to SEQ ID NO: 1415158
cuacuucucagugacgacg

SEQ ID NO: 1415160 - RNA, 19 nt, Artificial Sequence
  Description of Artificial Sequence: Synthetic oligonucleotide
  Sense strand starting at position 218 of SEQ ID NO: 1243417
gcuggugaucccugaggca

SEQ ID NO: 1415161 - RNA, 19 nt, Artificial Sequence
  Description of Artificial Sequence: Synthetic oligonucleotide
  Antisense strand to SEQ ID NO: 1415160
ugccucagggaucaccagc

SEQ ID NO: 1415162 - RNA, 19 nt, Artificial Sequence
  Description of Artificial Sequence: Synthetic oligonucleotide
  Sense strand starting at position 221 of SEQ ID NO: 1243417
ggugaucccugaggcagua

SEQ ID NO: 1415163 - RNA, 19 nt, Artificial Sequence
  Description of Artificial Sequence: Synthetic oligonucleotide
  Antisense strand to SEQ ID NO: 1415162
uacugccucagggaucacc

SEQ ID NO: 1415164 - RNA, 19 nt, Artificial Sequence
  Description of Artificial Sequence: Synthetic oligonucleotide
  Sense strand starting at position 394 of SEQ ID NO: 1243417
aucccugaggucuggcaua

SEQ ID NO: 1415165 - RNA, 19 nt, Artificial Sequence
  Description of Artificial Sequence: Synthetic oligonucleotide
  Antisense strand to SEQ ID NO: 1415164
uaugccagaccucagggau

SEQ ID NO: 1415166 - RNA, 19 nt, Artificial Sequence
  Description of Artificial Sequence: Synthetic oligonucleotide
  Sense strand starting at position 479 of SEQ ID NO: 1243417
cugucauuucugugaccuc

SEQ ID NO: 1415167 - RNA, 19 nt, Artificial Sequence
  Description of Artificial Sequence: Synthetic oligonucleotide
  Antisense strand to SEQ ID NO: 1415166
gaggucacagaaaugacag

SEQ ID NO: 1415168 - RNA, 19 nt, Artificial Sequence
  Description of Artificial Sequence: Synthetic oligonucleotide
  Sense strand starting at position 480 of SEQ ID NO: 1243417
ugucauuucugugaccuca

SEQ ID NO: 1415169 - RNA, 19 nt, Artificial Sequence
  Description of Artificial Sequence: Synthetic oligonucleotide
  Antisense strand to SEQ ID NO: 1415168
ugaggucacagaaaugaca

SEQ ID NO: 1415170 - RNA, 19 nt, Artificial Sequence
  Description of Artificial Sequence: Synthetic oligonucleotide
  Sense strand starting at position 1144 of SEQ ID NO: 1243417
gggcuucucuucccagaug

SEQ ID NO: 1415171 - RNA, 19 nt, Artificial Sequence
  Description of Artificial Sequence: Synthetic oligonucleotide
  Antisense strand to SEQ ID NO: 1415170
caucugggaagagaagccc

SEQ ID NO: 1415172 - RNA, 19 nt, Artificial Sequence
  Description of Artificial Sequence: Synthetic oligonucleotide
  Sense strand starting at position 1145 of SEQ ID NO: 1243417
ggcuucucuucccagaugu

SEQ ID NO: 1415173 - RNA, 19 nt, Artificial Sequence
  Description of Artificial Sequence: Synthetic oligonucleotide
  Antisense strand to SEQ ID NO: 1415172
acaucugggaagagaagcc

SEQ ID NO: 1415174 - RNA, 19 nt, Artificial Sequence
  Description of Artificial Sequence: Synthetic oligonucleotide
  Sense strand starting at position 1147 of SEQ ID NO: 1243417
cuucucuucccagauguca

SEQ ID NO: 1415175 - RNA, 19 nt, Artificial Sequence
  Description of Artificial Sequence: Synthetic oligonucleotide
  Antisense strand to SEQ ID NO: 1415174
ugacaucugggaagagaag

SEQ ID NO: 1415176 - RNA, 19 nt, Artificial Sequence
  Description of Artificial Sequence: Synthetic oligonucleotide
  Sense strand starting at position 1265 of SEQ ID NO: 1243417
cugggacuuuccuuuacca

SEQ ID NO: 1415177 - RNA, 19 nt, Artificial Sequence
  Description of Artificial Sequence: Synthetic oligonucleotide
  Antisense strand to SEQ ID NO: 1415176
ugguaaaggaaagucccag

SEQ ID NO: 1415178 - RNA, 19 nt, Artificial Sequence
  Description of Artificial Sequence: Synthetic oligonucleotide
  Sense strand starting at position 1267 of SEQ ID NO: 1243417
gggacuuuccuuuaccagu

SEQ ID NO: 1415179 - RNA, 19 nt, Artificial Sequence
  Description of Artificial Sequence: Synthetic oligonucleotide
  Antisense strand to SEQ ID NO: 1415178
acugguaaaggaaaguccc

SEQ ID NO: 1415180 - RNA, 19 nt, Artificial Sequence
  Description of Artificial Sequence: Synthetic oligonucleotide
  Sense strand starting at position 1323 of SEQ ID NO: 1243417
acgauaaucccaugaggcu

SEQ ID NO: 1415181 - RNA, 19 nt, Artificial Sequence
  Description of Artificial Sequence: Synthetic oligonucleotide
  Antisense strand to SEQ ID NO: 1415180
agccucaugggauuaucgu

SEQ ID NO: 1415182 - RNA, 19 nt, Artificial Sequence
  Description of Artificial Sequence: Synthetic oligonucleotide
  Sense strand starting at position 1454 of SEQ ID NO: 1243417
cucccugcucccuggagaa

SEQ ID NO: 1415183 - RNA, 19 nt, Artificial Sequence
  Description of Artificial Sequence: Synthetic oligonucleotide
  Antisense strand to SEQ ID NO: 1415182
uucuccagggagcagggag

SEQ ID NO: 1415184 - RNA, 19 nt, Artificial Sequence
  Description of Artificial Sequence: Synthetic oligonucleotide
  Sense strand starting at position 1456 of SEQ ID NO: 1243417
cccugcucccuggagaaga

SEQ ID NO: 1415185 - RNA, 19 nt, Artificial Sequence
  Description of Artificial Sequence: Synthetic oligonucleotide
  Antisense strand to SEQ ID NO: 1415184
ucuucuccagggagcaggg

SEQ ID NO: 1415186 - RNA, 19 nt, Artificial Sequence
  Description of Artificial Sequence: Synthetic oligonucleotide
  Sense strand starting at position 1472 of SEQ ID NO: 1243417
agacggaucgcggaugaaa

SEQ ID NO: 1415187 - RNA, 19 nt, Artificial Sequence
  Description of Artificial Sequence: Synthetic oligonucleotide
  Antisense strand to SEQ ID NO: 1415186
uuucauccgcgauccgucu

SEQ ID NO: 1415188 - RNA, 19 nt, Artificial Sequence
  Description of Artificial Sequence: Synthetic oligonucleotide
  Sense strand starting at position 1851 of SEQ ID NO: 1243417
gggcucacuuggucuugaa

SEQ ID NO: 1415189 - RNA, 19 nt, Artificial Sequence
  Description of Artificial Sequence: Synthetic oligonucleotide
  Antisense strand to SEQ ID NO: 1415188
uucaagaccaagugagccc

SEQ ID NO: 1415190 - RNA, 19 nt, Artificial Sequence
  Description of Artificial Sequence: Synthetic oligonucleotide
  Sense strand starting at position 2215 of SEQ ID NO: 1243417
gcucuuugauaccaguaua

SEQ ID NO: 1415191 - RNA, 19 nt, Artificial Sequence
  Description of Artificial Sequence: Synthetic oligonucleotide
  Antisense strand to SEQ ID NO: 1415190
uauacugguaucaaagagc

SEQ ID NO: 1415192 - RNA, 19 nt, Artificial Sequence
  Description of Artificial Sequence: Synthetic oligonucleotide
  Sense strand starting at position 2238 of SEQ ID NO: 1243417
ggcauuuguagccagcguu

SEQ ID NO: 1415193 - RNA, 19 nt, Artificial Sequence
  Description of Artificial Sequence: Synthetic oligonucleotide
  Antisense strand to SEQ ID NO: 1415192
aacgcuggcuacaaaugcc

SEQ ID NO: 1415194 - RNA, 19 nt, Artificial Sequence
  Description of Artificial Sequence: Synthetic oligonucleotide
  Sense strand starting at position 2350 of SEQ ID NO: 1243417
cgcaguguggcucuugaua

SEQ ID NO: 1415195 - RNA, 19 nt, Artificial Sequence
  Description of Artificial Sequence: Synthetic oligonucleotide
  Antisense strand to SEQ ID NO: 1415194
uaucaagagccacacugcg

SEQ ID NO: 1415196 - RNA, 19 nt, Artificial Sequence
  Description of Artificial Sequence: Synthetic oligonucleotide
  Sense strand starting at position 2352 of SEQ ID NO: 1243417
caguguggcucuugauaaa

SEQ ID NO: 1415197 - RNA, 19 nt, Artificial Sequence
  Description of Artificial Sequence: Synthetic oligonucleotide
  Antisense strand to SEQ ID NO: 1415196
uuuaucaagagccacacug

SEQ ID NO: 1415198 - RNA, 19 nt, Artificial Sequence
  Description of Artificial Sequence: Synthetic oligonucleotide
  Sense strand starting at position 2355 of SEQ ID NO: 1243417
uguggcucuugauaaauaa

SEQ ID NO: 1415199 - RNA, 19 nt, Artificial Sequence
  Description of Artificial Sequence: Synthetic oligonucleotide
  Antisense strand to SEQ ID NO: 1415198
uuauuuaucaagagccaca

SEQ ID NO: 1415200 - RNA, 19 nt, Artificial Sequence
  Description of Artificial Sequence: Synthetic oligonucleotide
  Sense strand starting at position 2383 of SEQ ID NO: 1243417
augaauaaaccggguaauc

SEQ ID NO: 1415201 - RNA, 19 nt, Artificial Sequence
  Description of Artificial Sequence: Synthetic oligonucleotide
  Antisense strand to SEQ ID NO: 1415200
gauuacccgguuuauucau

SEQ ID NO: 1415202 - RNA, 19 nt, Artificial Sequence
  Description of Artificial Sequence: Synthetic oligonucleotide
  Sense strand starting at position 2422 of SEQ ID NO: 1243417
agcaccuucugugugcaaa

SEQ ID NO: 1415203 - RNA, 19 nt, Artificial Sequence
  Description of Artificial Sequence: Synthetic oligonucleotide
  Antisense strand to SEQ ID NO: 1415202
uuugcacacagaaggugcu

SEQ ID NO: 1415204 - RNA, 19 nt, Artificial Sequence
  Description of Artificial Sequence: Synthetic oligonucleotide
  Sense strand starting at position 2423 of SEQ ID NO: 1243417
gcaccuucugugugcaaag

SEQ ID NO: 1415205 - RNA, 19 nt, Artificial Sequence
  Description of Artificial Sequence: Synthetic oligonucleotide
  Antisense strand to SEQ ID NO: 1415204
cuuugcacacagaaggugc

SEQ ID NO: 1415206 - RNA, 19 nt, Artificial Sequence
  Description of Artificial Sequence: Synthetic oligonucleotide
  Sense strand starting at position 2433 of SEQ ID NO: 1243417
ugugcaaagcacuguaauc

SEQ ID NO: 1415207 - RNA, 19 nt, Artificial Sequence
  Description of Artificial Sequence: Synthetic oligonucleotide
  Antisense strand to SEQ ID NO: 1415206
gauuacagugcuuugcaca

SEQ ID NO: 1415208 - RNA, 19 nt, Artificial Sequence
  Description of Artificial Sequence: Synthetic oligonucleotide
  Sense strand starting at position 2909 of SEQ ID NO: 1243417
gacacaaguucgcgaagca

SEQ ID NO: 1415209 - RNA, 19 nt, Artificial Sequence
  Description of Artificial Sequence: Synthetic oligonucleotide
  Antisense strand to SEQ ID NO: 1415208
ugcuucgcgaacuuguguc

SEQ ID NO: 1415210 - RNA, 19 nt, Artificial Sequence
  Description of Artificial Sequence: Synthetic oligonucleotide
  Sense strand starting at position 2941 of SEQ ID NO: 1243417
aacgaaugguguugagaac

SEQ ID NO: 1415211 - RNA, 19 nt, Artificial Sequence
  Description of Artificial Sequence: Synthetic oligonucleotide
  Antisense strand to SEQ ID NO: 1415210
guucucaacaccauucguu

SEQ ID NO: 1415212 - RNA, 19 nt, Artificial Sequence
  Description of Artificial Sequence: Synthetic oligonucleotide
  Sense strand starting at position 2942 of SEQ ID NO: 1243417
acgaaugguguugagaaca

SEQ ID NO: 1415213 - RNA, 19 nt, Artificial Sequence
  Description of Artificial Sequence: Synthetic oligonucleotide
  Antisense strand to SEQ ID NO: 1415212
uguucucaacaccauucgu

SEQ ID NO: 1415214 - RNA, 19 nt, Artificial Sequence
  Description of Artificial Sequence: Synthetic oligonucleotide
  Sense strand starting at position 3423 of SEQ ID NO: 1243417
gcaagacugucucagagaa

SEQ ID NO: 1415215 - RNA, 19 nt, Artificial Sequence
  Description of Artificial Sequence: Synthetic oligonucleotide
  Antisense strand to SEQ ID NO: 1415214
uucucugagacagucuugc

SEQ ID NO: 1415216 - RNA, 19 nt, Artificial Sequence
  Description of Artificial Sequence: Synthetic oligonucleotide
  Sense strand starting at position 3590 of SEQ ID NO: 1243417
cugggaagcugaguuucua

SEQ ID NO: 1415217 - RNA, 19 nt, Artificial Sequence
  Description of Artificial Sequence: Synthetic oligonucleotide
  Antisense strand to SEQ ID NO: 1415216
uagaaacucagcuucccag

SEQ ID NO: 1415218 - RNA, 19 nt, Artificial Sequence
  Description of Artificial Sequence: Synthetic oligonucleotide
  Sense strand starting at position 3594 of SEQ ID NO: 1243417
gaagcugaguuucuaguga

SEQ ID NO: 1415219 - RNA, 19 nt, Artificial Sequence
  Description of Artificial Sequence: Synthetic oligonucleotide
  Antisense strand to SEQ ID NO: 1415218
ucacuagaaacucagcuuc

SEQ ID NO: 1415220 - RNA, 19 nt, Artificial Sequence
  Description of Artificial Sequence: Synthetic oligonucleotide
  Sense strand starting at position 3598 of SEQ ID NO: 1243417
cugaguuucuagugagcug

SEQ ID NO: 1415221 - RNA, 19 nt, Artificial Sequence
  Description of Artificial Sequence: Synthetic oligonucleotide
  Antisense strand to SEQ ID NO: 1415220
cagcucacuagaaacucag

SEQ ID NO: 1415222 - RNA, 19 nt, Artificial Sequence
  Description of Artificial Sequence: Synthetic oligonucleotide
  Sense strand starting at position 3599 of SEQ ID NO: 1243417
ugaguuucuagugagcugu

SEQ ID NO: 1415223 - RNA, 19 nt, Artificial Sequence
  Description of Artificial Sequence: Synthetic oligonucleotide
  Antisense strand to SEQ ID NO: 1415222
acagcucacuagaaacuca

SEQ ID NO: 1415224 - RNA, 19 nt, Artificial Sequence
  Description of Artificial Sequence: Synthetic oligonucleotide
  Sense strand starting at position 3603 of SEQ ID NO: 1243417
uuucuagugagcugugauu

SEQ ID NO: 1415225 - RNA, 19 nt, Artificial Sequence
  Description of Artificial Sequence: Synthetic oligonucleotide
  Antisense strand to SEQ ID NO: 1415224
aaucacagcucacuagaaa

SEQ ID NO: 1415226 - RNA, 19 nt, Artificial Sequence
  Description of Artificial Sequence: Synthetic oligonucleotide
  Sense strand starting at position 3748 of SEQ ID NO: 1243417
agagauauuugagggaaag

SEQ ID NO: 1415227 - RNA, 19 nt, Artificial Sequence
  Description of Artificial Sequence: Synthetic oligonucleotide
  Antisense strand to SEQ ID NO: 1415226
cuuucccucaaauaucucu

SEQ ID NO: 1415228 - RNA, 19 nt, Artificial Sequence
  Description of Artificial Sequence: Synthetic oligonucleotide
  Sense strand starting at position 88 of SEQ ID NO: 1243418
aucuuagagcuggaagguu

SEQ ID NO: 1415229 - RNA, 19 nt, Artificial Sequence
  Description of Artificial Sequence: Synthetic oligonucleotide
  Antisense strand to SEQ ID NO: 1415228
aaccuuccagcucuaagau

SEQ ID NO: 1415230 - RNA, 19 nt, Artificial Sequence
  Description of Artificial Sequence: Synthetic oligonucleotide
  Sense strand starting at position 144 of SEQ ID NO: 1243418
cggguuaagugaucuguca

SEQ ID NO: 1415231 - RNA, 19 nt, Artificial Sequence
  Description of Artificial Sequence: Synthetic oligonucleotide
  Antisense strand to SEQ ID NO: 1415230
ugacagaucacuuaacccg

SEQ ID NO: 1415232 - RNA, 19 nt, Artificial Sequence
  Description of Artificial Sequence: Synthetic oligonucleotide
  Sense strand starting at position 146 of SEQ ID NO: 1243418
gguuaagugaucugucaca

SEQ ID NO: 1415233 - RNA, 19 nt, Artificial Sequence
  Description of Artificial Sequence: Synthetic oligonucleotide
  Antisense strand to SEQ ID NO: 1415232
ugugacagaucacuuaacc

SEQ ID NO: 1415234 - RNA, 19 nt, Artificial Sequence
  Description of Artificial Sequence: Synthetic oligonucleotide
  Sense strand starting at position 225 of SEQ ID NO: 1243418
gugacuaacuuucuugcua

SEQ ID NO: 1415235 - RNA, 19 nt, Artificial Sequence
  Description of Artificial Sequence: Synthetic oligonucleotide
  Antisense strand to SEQ ID NO: 1415234
uagcaagaaaguuagucac

SEQ ID NO: 1415236 - RNA, 19 nt, Artificial Sequence
  Description of Artificial Sequence: Synthetic oligonucleotide
  Sense strand starting at position 455 of SEQ ID NO: 1243418
gucauauacugacuccuau

SEQ ID NO: 1415237 - RNA, 19 nt, Artificial Sequence
  Description of Artificial Sequence: Synthetic oligonucleotide
  Antisense strand to SEQ ID NO: 1415236
auaggagucaguauaugac

SEQ ID NO: 1415238 - RNA, 19 nt, Artificial Sequence
  Description of Artificial Sequence: Synthetic oligonucleotide
  Sense strand starting at position 462 of SEQ ID NO: 1243418
acugacuccuauucgaguu

SEQ ID NO: 1415239 - RNA, 19 nt, Artificial Sequence
  Description of Artificial Sequence: Synthetic oligonucleotide
  Antisense strand to SEQ ID NO: 1415238
aacucgaauaggagucagu

SEQ ID NO: 1415240 - RNA, 19 nt, Artificial Sequence
  Description of Artificial Sequence: Synthetic oligonucleotide
  Sense strand starting at position 472 of SEQ ID NO: 1243418
auucgaguugcauacugau

SEQ ID NO: 1415241 - RNA, 19 nt, Artificial Sequence
  Description of Artificial Sequence: Synthetic oligonucleotide
  Antisense strand to SEQ ID NO: 1415240
aucaguaugcaacucgaau

SEQ ID NO: 1415242 - RNA, 19 nt, Artificial Sequence
  Description of Artificial Sequence: Synthetic oligonucleotide
  Sense strand starting at position 478 of SEQ ID NO: 1243418
guugcauacugaucccgaa

SEQ ID NO: 1415243 - RNA, 19 nt, Artificial Sequence
  Description of Artificial Sequence: Synthetic oligonucleotide
  Antisense strand to SEQ ID NO: 1415242
uucgggaucaguaugcaac

SEQ ID NO: 1415244 - RNA, 19 nt, Artificial Sequence
  Description of Artificial Sequence: Synthetic oligonucleotide
  Sense strand starting at position 491 of SEQ ID NO: 1243418
cccgaauccuggccagauu

SEQ ID NO: 1415245 - RNA, 19 nt, Artificial Sequence
  Description of Artificial Sequence: Synthetic oligonucleotide
  Antisense strand to SEQ ID NO: 1415244
aaucuggccaggauucggg

SEQ ID NO: 1415246 - RNA, 19 nt, Artificial Sequence
  Description of Artificial Sequence: Synthetic oligonucleotide
  Sense strand starting at position 502 of SEQ ID NO: 1243418
gccagauuucccugaugcu

SEQ ID NO: 1415247 - RNA, 19 nt, Artificial Sequence
  Description of Artificial Sequence: Synthetic oligonucleotide
  Antisense strand to SEQ ID NO: 1415246
agcaucagggaaaucuggc

SEQ ID NO: 1415248 - RNA, 19 nt, Artificial Sequence
  Description of Artificial Sequence: Synthetic oligonucleotide
  Sense strand starting at position 509 of SEQ ID NO: 1243418
uucccugaugcuggucaau

SEQ ID NO: 1415249 - RNA, 19 nt, Artificial Sequence
  Description of Artificial Sequence: Synthetic oligonucleotide
  Antisense strand to SEQ ID NO: 1415248
auugaccagcaucagggaa

SEQ ID NO: 1415250 - RNA, 19 nt, Artificial Sequence
  Description of Artificial Sequence: Synthetic oligonucleotide
  Sense strand starting at position 636 of SEQ ID NO: 1243418
ugccauagauuggucccua

SEQ ID NO: 1415251 - RNA, 19 nt, Artificial Sequence
  Description of Artificial Sequence: Synthetic oligonucleotide
  Antisense strand to SEQ ID NO: 1415250
uagggaccaaucuauggca

SEQ ID NO: 1415252 - RNA, 19 nt, Artificial Sequence
  Description of Artificial Sequence: Synthetic oligonucleotide
  Sense strand starting at position 637 of SEQ ID NO: 1243418
gccauagauuggucccuaa

SEQ ID NO: 1415253 - RNA, 19 nt, Artificial Sequence
  Description of Artificial Sequence: Synthetic oligonucleotide
  Antisense strand to SEQ ID NO: 1415252
uuagggaccaaucuauggc

SEQ ID NO: 1415254 - RNA, 19 nt, Artificial Sequence
  Description of Artificial Sequence: Synthetic oligonucleotide
  Sense strand starting at position 640 of SEQ ID NO: 1243418
auagauuggucccuaaacu

SEQ ID NO: 1415255 - RNA, 19 nt, Artificial Sequence
  Description of Artificial Sequence: Synthetic oligonucleotide
  Antisense strand to SEQ ID NO: 1415254
aguuuagggaccaaucuau

SEQ ID NO: 1415256 - RNA, 19 nt, Artificial Sequence
  Description of Artificial Sequence: Synthetic oligonucleotide
  Sense strand starting at position 710 of SEQ ID NO: 1243418
ugauuccugccacagagua

SEQ ID NO: 1415257 - RNA, 19 nt, Artificial Sequence
  Description of Artificial Sequence: Synthetic oligonucleotide
  Antisense strand to SEQ ID NO: 1415256
uacucuguggcaggaauca

SEQ ID NO: 1415258 - RNA, 19 nt, Artificial Sequence
  Description of Artificial Sequence: Synthetic oligonucleotide
  Sense strand starting at position 740 of SEQ ID NO: 1243418
aggccauagucagauucua

SEQ ID NO: 1415259 - RNA, 19 nt, Artificial Sequence
  Description of Artificial Sequence: Synthetic oligonucleotide
  Antisense strand to SEQ ID NO: 1415258
uagaaucugacuauggccu

SEQ ID NO: 1415260 - RNA, 19 nt, Artificial Sequence
  Description of Artificial Sequence: Synthetic oligonucleotide
  Sense strand starting at position 818 of SEQ ID NO: 1243418
cucugccuuucccaagaga

SEQ ID NO: 1415261 - RNA, 19 nt, Artificial Sequence
  Description of Artificial Sequence: Synthetic oligonucleotide
  Antisense strand to SEQ ID NO: 1415260
ucucuugggaaaggcagag

SEQ ID NO: 1415262 - RNA, 19 nt, Artificial Sequence
  Description of Artificial Sequence: Synthetic oligonucleotide
  Sense strand starting at position 879 of SEQ ID NO: 1243418
agcuuuggugaugaucauu

SEQ ID NO: 1415263 - RNA, 19 nt, Artificial Sequence
  Description of Artificial Sequence: Synthetic oligonucleotide
  Antisense strand to SEQ ID NO: 1415262
aaugaucaucaccaaagcu

SEQ ID NO: 1415264 - RNA, 19 nt, Artificial Sequence
  Description of Artificial Sequence: Synthetic oligonucleotide
  Sense strand starting at position 1288 of SEQ ID NO: 1243418
acaauucucguggauggua

SEQ ID NO: 1415265 - RNA, 19 nt, Artificial Sequence
  Description of Artificial Sequence: Synthetic oligonucleotide
  Antisense strand to SEQ ID NO: 1415264
uaccauccacgagaauugu

SEQ ID NO: 1415266 - RNA, 19 nt, Artificial Sequence
  Description of Artificial Sequence: Synthetic oligonucleotide
  Sense strand starting at position 1297 of SEQ ID NO: 1243418
guggaugguacauguugua

SEQ ID NO: 1415267 - RNA, 19 nt, Artificial Sequence
  Description of Artificial Sequence: Synthetic oligonucleotide
  Antisense strand to SEQ ID NO: 1415266
uacaacauguaccauccac

SEQ ID NO: 1415268 - RNA, 19 nt, Artificial Sequence
  Description of Artificial Sequence: Synthetic oligonucleotide
  Sense strand starting at position 1576 of SEQ ID NO: 1243418
auaauuaacuccucggcuu

SEQ ID NO: 1415269 - RNA, 19 nt, Artificial Sequence
  Description of Artificial Sequence: Synthetic oligonucleotide
  Antisense strand to SEQ ID NO: 1415268
aagccgaggaguuaauuau

SEQ ID NO: 1415270 - RNA, 19 nt, Artificial Sequence
  Description of Artificial Sequence: Synthetic oligonucleotide
  Sense strand starting at position 1582 of SEQ ID NO: 1243418
aacuccucggcuugauuga

SEQ ID NO: 1415271 - RNA, 19 nt, Artificial Sequence
  Description of Artificial Sequence: Synthetic oligonucleotide
  Antisense strand to SEQ ID NO: 1415270
ucaaucaagccgaggaguu

SEQ ID NO: 1415272 - RNA, 19 nt, Artificial Sequence
  Description of Artificial Sequence: Synthetic oligonucleotide
  Sense strand starting at position 1719 of SEQ ID NO: 1243418
ccaagagucccgggacaca

SEQ ID NO: 1415273 - RNA, 19 nt, Artificial Sequence
  Description of Artificial Sequence: Synthetic oligonucleotide
  Antisense strand to SEQ ID NO: 1415272
ugugucccgggacucuugg

SEQ ID NO: 1415274 - RNA, 19 nt, Artificial Sequence
  Description of Artificial Sequence: Synthetic oligonucleotide
  Sense strand starting at position 1957 of SEQ ID NO: 1243418
gagccaagccuccaaaguu

SEQ ID NO: 1415275 - RNA, 19 nt, Artificial Sequence
  Description of Artificial Sequence: Synthetic oligonucleotide
  Antisense strand to SEQ ID NO: 1415274
aacuuuggaggcuuggcuc

SEQ ID NO: 1415276 - RNA, 19 nt, Artificial Sequence
  Description of Artificial Sequence: Synthetic oligonucleotide
  Sense strand starting at position 2377 of SEQ ID NO: 1243418
ggcggaaaucuccgcuuga

SEQ ID NO: 1415277 - RNA, 19 nt, Artificial Sequence
  Description of Artificial Sequence: Synthetic oligonucleotide
  Antisense strand to SEQ ID NO: 1415276
ucaagcggagauuuccgcc

SEQ ID NO: 1415278 - RNA, 19 nt, Artificial Sequence
  Description of Artificial Sequence: Synthetic oligonucleotide
  Sense strand starting at position 2378 of SEQ ID NO: 1243418
gcggaaaucuccgcuugag

SEQ ID NO: 1415279 - RNA, 19 nt, Artificial Sequence
  Description of Artificial Sequence: Synthetic oligonucleotide
  Antisense strand to SEQ ID NO: 1415278
cucaagcggagauuuccgc

SEQ ID NO: 1415280 - RNA, 19 nt, Artificial Sequence
  Description of Artificial Sequence: Synthetic oligonucleotide
  Sense strand starting at position 2671 of SEQ ID NO: 1243418
ggucacagugcaugcaaua

SEQ ID NO: 1415281 - RNA, 19 nt, Artificial Sequence
  Description of Artificial Sequence: Synthetic oligonucleotide
  Antisense strand to SEQ ID NO: 1415280
uauugcaugcacugugacc

SEQ ID NO: 1415282 - RNA, 19 nt, Artificial Sequence
  Description of Artificial Sequence: Synthetic oligonucleotide
  Sense strand starting at position 2706 of SEQ ID NO: 1243418
gcuagauccguccucugca

SEQ ID NO: 1415283 - RNA, 19 nt, Artificial Sequence
  Description of Artificial Sequence: Synthetic oligonucleotide
  Antisense strand to SEQ ID NO: 1415282
ugcagaggacggaucuagc

SEQ ID NO: 1415284 - RNA, 19 nt, Artificial Sequence
  Description of Artificial Sequence: Synthetic oligonucleotide
  Sense strand starting at position 2834 of SEQ ID NO: 1243418
agccguugucuuugaucau

SEQ ID NO: 1415285 - RNA, 19 nt, Artificial Sequence
  Description of Artificial Sequence: Synthetic oligonucleotide
  Antisense strand to SEQ ID NO: 1415284
augaucaaagacaacggcu

SEQ ID NO: 1415286 - RNA, 19 nt, Artificial Sequence
  Description of Artificial Sequence: Synthetic oligonucleotide
  Sense strand starting at position 2845 of SEQ ID NO: 1243418
uugaucaugugguugaguu

SEQ ID NO: 1415287 - RNA, 19 nt, Artificial Sequence
  Description of Artificial Sequence: Synthetic oligonucleotide
  Antisense strand to SEQ ID NO: 1415286
aacucaaccacaugaucaa

SEQ ID NO: 1415288 - RNA, 19 nt, Artificial Sequence
  Description of Artificial Sequence: Synthetic oligonucleotide
  Sense strand starting at position 2846 of SEQ ID NO: 1243418
ugaucaugugguugaguuc

SEQ ID NO: 1415289 - RNA, 19 nt, Artificial Sequence
  Description of Artificial Sequence: Synthetic oligonucleotide
  Antisense strand to SEQ ID NO: 1415288
gaacucaaccacaugauca

SEQ ID NO: 1415290 - RNA, 19 nt, Artificial Sequence
  Description of Artificial Sequence: Synthetic oligonucleotide
  Sense strand starting at position 2852 of SEQ ID NO: 1243418
ugugguugaguucaaugau

SEQ ID NO: 1415291 - RNA, 19 nt, Artificial Sequence
  Description of Artificial Sequence: Synthetic oligonucleotide
  Antisense strand to SEQ ID NO: 1415290
aucauugaacucaaccaca

SEQ ID NO: 1415292 - RNA, 19 nt, Artificial Sequence
  Description of Artificial Sequence: Synthetic oligonucleotide
  Sense strand starting at position 2855 of SEQ ID NO: 1243418
gguugaguucaaugaugua

SEQ ID NO: 1415293 - RNA, 19 nt, Artificial Sequence
  Description of Artificial Sequence: Synthetic oligonucleotide
  Antisense strand to SEQ ID NO: 1415292
uacaucauugaacucaacc

SEQ ID NO: 1415294 - RNA, 19 nt, Artificial Sequence
  Description of Artificial Sequence: Synthetic oligonucleotide
  Sense strand starting at position 2888 of SEQ ID NO: 1243418
acuucuggcugcucucaaa

SEQ ID NO: 1415295 - RNA, 19 nt, Artificial Sequence
  Description of Artificial Sequence: Synthetic oligonucleotide
  Antisense strand to SEQ ID NO: 1415294
uuugagagcagccagaagu

SEQ ID NO: 1415296 - RNA, 19 nt, Artificial Sequence
  Description of Artificial Sequence: Synthetic oligonucleotide
  Sense strand starting at position 2906 of SEQ ID NO: 1243418
aggccuguuccugaaagga

SEQ ID NO: 1415297 - RNA, 19 nt, Artificial Sequence
  Description of Artificial Sequence: Synthetic oligonucleotide
  Antisense strand to SEQ ID NO: 1415296
uccuuucaggaacaggccu

SEQ ID NO: 1415298 - RNA, 19 nt, Artificial Sequence
  Description of Artificial Sequence: Synthetic oligonucleotide
  Sense strand starting at position 3038 of SEQ ID NO: 1243418
ggccguauuucucacaaac

SEQ ID NO: 1415299 - RNA, 19 nt, Artificial Sequence
  Description of Artificial Sequence: Synthetic oligonucleotide
  Antisense strand to SEQ ID NO: 1415298
guuugugagaaauacggcc

SEQ ID NO: 1415300 - RNA, 19 nt, Artificial Sequence
  Description of Artificial Sequence: Synthetic oligonucleotide
  Sense strand starting at position 3201 of SEQ ID NO: 1243418
cauguauuauguuuggaca

SEQ ID NO: 1415301 - RNA, 19 nt, Artificial Sequence
  Description of Artificial Sequence: Synthetic oligonucleotide
  Antisense strand to SEQ ID NO: 1415300
uguccaaacauaauacaug

SEQ ID NO: 1415302 - RNA, 19 nt, Artificial Sequence
  Description of Artificial Sequence: Synthetic oligonucleotide
  Sense strand starting at position 3202 of SEQ ID NO: 1243418
auguauuauguuuggacag

SEQ ID NO: 1415303 - RNA, 19 nt, Artificial Sequence
  Description of Artificial Sequence: Synthetic oligonucleotide
  Antisense strand to SEQ ID NO: 1415302
cuguccaaacauaauacau

SEQ ID NO: 1415304 - RNA, 19 nt, Artificial Sequence
  Description of Artificial Sequence: Synthetic oligonucleotide
  Sense strand starting at position 3204 of SEQ ID NO: 1243418
guauuauguuuggacagca

SEQ ID NO: 1415305 - RNA, 19 nt, Artificial Sequence
  Description of Artificial Sequence: Synthetic oligonucleotide
  Antisense strand to SEQ ID NO: 1415304
ugcuguccaaacauaauac

SEQ ID NO: 1415306 - RNA, 19 nt, Artificial Sequence
  Description of Artificial Sequence: Synthetic oligonucleotide
  Sense strand starting at position 3706 of SEQ ID NO: 1243418
aggccagcucuuuauuaau

SEQ ID NO: 1415307 - RNA, 19 nt, Artificial Sequence
  Description of Artificial Sequence: Synthetic oligonucleotide
  Antisense strand to SEQ ID NO: 1415306
auuaauaaagagcuggccu

SEQ ID NO: 1415308 - RNA, 19 nt, Artificial Sequence
  Description of Artificial Sequence: Synthetic oligonucleotide
  Sense strand starting at position 28 of SEQ ID NO: 1243419
gcccuuuaggcacgaggaa

SEQ ID NO: 1415309 - RNA, 19 nt, Artificial Sequence
  Description of Artificial Sequence: Synthetic oligonucleotide
  Antisense strand to SEQ ID NO: 1415308
uuccucgugccuaaagggc

SEQ ID NO: 1415310 - RNA, 19 nt, Artificial Sequence
  Description of Artificial Sequence: Synthetic oligonucleotide
  Sense strand starting at position 95 of SEQ ID NO: 1243419
ggaacaguguucccaaccu

SEQ ID NO: 1415311 - RNA, 19 nt, Artificial Sequence
  Description of Artificial Sequence: Synthetic oligonucleotide
  Antisense strand to SEQ ID NO: 1415310
agguugggaacacuguucc

SEQ ID NO: 1415312 - RNA, 19 nt, Artificial Sequence
  Description of Artificial Sequence: Synthetic oligonucleotide
  Sense strand starting at position 198 of SEQ ID NO: 1243419
ugcuguuugacuggugaag

SEQ ID NO: 1415313 - RNA, 19 nt, Artificial Sequence
  Description of Artificial Sequence: Synthetic oligonucleotide
  Antisense strand to SEQ ID NO: 1415312
cuucaccagucaaacagca

SEQ ID NO: 1415314 - RNA, 19 nt, Artificial Sequence
  Description of Artificial Sequence: Synthetic oligonucleotide
  Sense strand starting at position 247 of SEQ ID NO: 1243419
aagaguuggucauccugag

SEQ ID NO: 1415315 - RNA, 19 nt, Artificial Sequence
  Description of Artificial Sequence: Synthetic oligonucleotide
  Antisense strand to SEQ ID NO: 1415314
cucaggaugaccaacucuu

SEQ ID NO: 1415316 - RNA, 19 nt, Artificial Sequence
  Description of Artificial Sequence: Synthetic oligonucleotide
  Sense strand starting at position 251 of SEQ ID NO: 1243419
guuggucauccugaggaga

SEQ ID NO: 1415317 - RNA, 19 nt, Artificial Sequence
  Description of Artificial Sequence: Synthetic oligonucleotide
  Antisense strand to SEQ ID NO: 1415316
ucuccucaggaugaccaac

SEQ ID NO: 1415318 - RNA, 19 nt, Artificial Sequence
  Description of Artificial Sequence: Synthetic oligonucleotide
  Sense strand starting at position 405 of SEQ ID NO: 1243419
cacagauuccaggguuaua

SEQ ID NO: 1415319 - RNA, 19 nt, Artificial Sequence
  Description of Artificial Sequence: Synthetic oligonucleotide
  Antisense strand to SEQ ID NO: 1415318
uauaacccuggaaucugug

SEQ ID NO: 1415320 - RNA, 19 nt, Artificial Sequence
  Description of Artificial Sequence: Synthetic oligonucleotide
  Sense strand starting at position 505 of SEQ ID NO: 1243419
ugaggagccacugagcuau

SEQ ID NO: 1415321 - RNA, 19 nt, Artificial Sequence
  Description of Artificial Sequence: Synthetic oligonucleotide
  Antisense strand to SEQ ID NO: 1415320
auagcucaguggcuccuca

SEQ ID NO: 1415322 - RNA, 19 nt, Artificial Sequence
  Description of Artificial Sequence: Synthetic oligonucleotide
  Sense strand starting at position 793 of SEQ ID NO: 1243419
ucuguaaacuaggaauuac

SEQ ID NO: 1415323 - RNA, 19 nt, Artificial Sequence
  Description of Artificial Sequence: Synthetic oligonucleotide
  Antisense strand to SEQ ID NO: 1415322
guaauuccuaguuuacaga

SEQ ID NO: 1415324 - RNA, 19 nt, Artificial Sequence
  Description of Artificial Sequence: Synthetic oligonucleotide
  Sense strand starting at position 841 of SEQ ID NO: 1243419
ggguuucaaugagcuagga

SEQ ID NO: 1415325 - RNA, 19 nt, Artificial Sequence
  Description of Artificial Sequence: Synthetic oligonucleotide
  Antisense strand to SEQ ID NO: 1415324
uccuagcucauugaaaccc

SEQ ID NO: 1415326 - RNA, 19 nt, Artificial Sequence
  Description of Artificial Sequence: Synthetic oligonucleotide
  Sense strand starting at position 937 of SEQ ID NO: 1243419
aguaguuaugagugaggaa

SEQ ID NO: 1415327 - RNA, 19 nt, Artificial Sequence
  Description of Artificial Sequence: Synthetic oligonucleotide
  Antisense strand to SEQ ID NO: 1415326
uuccucacucauaacuacu

SEQ ID NO: 1415328 - RNA, 19 nt, Artificial Sequence
  Description of Artificial Sequence: Synthetic oligonucleotide
  Sense strand starting at position 1063 of SEQ ID NO: 1243419
aauguugggagacguaaau

SEQ ID NO: 1415329 - RNA, 19 nt, Artificial Sequence
  Description of Artificial Sequence: Synthetic oligonucleotide
  Antisense strand to SEQ ID NO: 1415328
auuuacgucucccaacauu

SEQ ID NO: 1415330 - RNA, 19 nt, Artificial Sequence
  Description of Artificial Sequence: Synthetic oligonucleotide
  Sense strand starting at position 1074 of SEQ ID NO: 1243419
acguaaaucagaggcugau

SEQ ID NO: 1415331 - RNA, 19 nt, Artificial Sequence
  Description of Artificial Sequence: Synthetic oligonucleotide
  Antisense strand to SEQ ID NO: 1415330
aucagccucugauuuacgu

SEQ ID NO: 1415332 - RNA, 19 nt, Artificial Sequence
  Description of Artificial Sequence: Synthetic oligonucleotide
  Sense strand starting at position 1127 of SEQ ID NO: 1243419
agccauucugacugaauaa

SEQ ID NO: 1415333 - RNA, 19 nt, Artificial Sequence
  Description of Artificial Sequence: Synthetic oligonucleotide
  Antisense strand to SEQ ID NO: 1415332
uuauucagucagaauggcu

SEQ ID NO: 1415334 - RNA, 19 nt, Artificial Sequence
  Description of Artificial Sequence: Synthetic oligonucleotide
  Sense strand starting at position 1139 of SEQ ID NO: 1243419
ugaauaaucucaguucguu

SEQ ID NO: 1415335 - RNA, 19 nt, Artificial Sequence
  Description of Artificial Sequence: Synthetic oligonucleotide
  Antisense strand to SEQ ID NO: 1415334
aacgaacugagauuauuca

SEQ ID NO: 1415336 - RNA, 19 nt, Artificial Sequence
  Description of Artificial Sequence: Synthetic oligonucleotide
  Sense strand starting at position 1144 of SEQ ID NO: 1243419
aaucucaguucguuugcaa

SEQ ID NO: 1415337 - RNA, 19 nt, Artificial Sequence
  Description of Artificial Sequence: Synthetic oligonucleotide
  Antisense strand to SEQ ID NO: 1415336
uugcaaacgaacugagauu

SEQ ID NO: 1415338 - RNA, 19 nt, Artificial Sequence
  Description of Artificial Sequence: Synthetic oligonucleotide
  Sense strand starting at position 1192 of SEQ ID NO: 1243419
aggaggucgggagguaaua

SEQ ID NO: 1415339 - RNA, 19 nt, Artificial Sequence
  Description of Artificial Sequence: Synthetic oligonucleotide
  Antisense strand to SEQ ID NO: 1415338
uauuaccucccgaccuccu

SEQ ID NO: 1415340 - RNA, 19 nt, Artificial Sequence
  Description of Artificial Sequence: Synthetic oligonucleotide
  Sense strand starting at position 1214 of SEQ ID NO: 1243419
aacgguugcuuggugaaga

SEQ ID NO: 1415341 - RNA, 19 nt, Artificial Sequence
  Description of Artificial Sequence: Synthetic oligonucleotide
  Antisense strand to SEQ ID NO: 1415340
ucuucaccaagcaaccguu

SEQ ID NO: 1415342 - RNA, 19 nt, Artificial Sequence
  Description of Artificial Sequence: Synthetic oligonucleotide
  Sense strand starting at position 1233 of SEQ ID NO: 1243419
acgagugggaccugacuuu

SEQ ID NO: 1415343 - RNA, 19 nt, Artificial Sequence
  Description of Artificial Sequence: Synthetic oligonucleotide
  Antisense strand to SEQ ID NO: 1415342
aaagucaggucccacucgu

SEQ ID NO: 1415344 - RNA, 19 nt, Artificial Sequence
  Description of Artificial Sequence: Synthetic oligonucleotide
  Sense strand starting at position 1376 of SEQ ID NO: 1243419
augaccuuuggcugguuaa

SEQ ID NO: 1415345 - RNA, 19 nt, Artificial Sequence
  Description of Artificial Sequence: Synthetic oligonucleotide
  Antisense strand to SEQ ID NO: 1415344
uuaaccagccaaaggucau

SEQ ID NO: 1415346 - RNA, 19 nt, Artificial Sequence
  Description of Artificial Sequence: Synthetic oligonucleotide
  Sense strand starting at position 1488 of SEQ ID NO: 1243419
cggcacgaggucuaaacau

SEQ ID NO: 1415347 - RNA, 19 nt, Artificial Sequence
  Description of Artificial Sequence: Synthetic oligonucleotide
  Antisense strand to SEQ ID NO: 1415346
auguuuagaccucgugccg

SEQ ID NO: 1415348 - RNA, 19 nt, Artificial Sequence
  Description of Artificial Sequence: Synthetic oligonucleotide
  Sense strand starting at position 2389 of SEQ ID NO: 1243419
gcuuaugaccugugaagag

SEQ ID NO: 1415349 - RNA, 19 nt, Artificial Sequence
  Description of Artificial Sequence: Synthetic oligonucleotide
  Antisense strand to SEQ ID NO: 1415348
cucuucacaggucauaagc

SEQ ID NO: 1415350 - RNA, 19 nt, Artificial Sequence
  Description of Artificial Sequence: Synthetic oligonucleotide
  Sense strand starting at position 2442 of SEQ ID NO: 1243419
gggcgaacuccuugggcua

SEQ ID NO: 1415351 - RNA, 19 nt, Artificial Sequence
  Description of Artificial Sequence: Synthetic oligonucleotide
  Antisense strand to SEQ ID NO: 1415350
uagcccaaggaguucgccc

SEQ ID NO: 1415352 - RNA, 19 nt, Artificial Sequence
  Description of Artificial Sequence: Synthetic oligonucleotide
  Sense strand starting at position 2445 of SEQ ID NO: 1243419
cgaacuccuugggcuagaa

SEQ ID NO: 1415353 - RNA, 19 nt, Artificial Sequence
  Description of Artificial Sequence: Synthetic oligonucleotide
  Antisense strand to SEQ ID NO: 1415352
uucuagcccaaggaguucg

SEQ ID NO: 1415354 - RNA, 19 nt, Artificial Sequence
  Description of Artificial Sequence: Synthetic oligonucleotide
  Sense strand starting at position 2585 of SEQ ID NO: 1243419
ggccuagagacuugauucu

SEQ ID NO: 1415355 - RNA, 19 nt, Artificial Sequence
  Description of Artificial Sequence: Synthetic oligonucleotide
  Antisense strand to SEQ ID NO: 1415354
agaaucaagucucuaggcc

SEQ ID NO: 1415356 - RNA, 19 nt, Artificial Sequence
  Description of Artificial Sequence: Synthetic oligonucleotide
  Sense strand starting at position 2638 of SEQ ID NO: 1243419
uccugaaugcuggacacua

SEQ ID NO: 1415357 - RNA, 19 nt, Artificial Sequence
  Description of Artificial Sequence: Synthetic oligonucleotide
  Antisense strand to SEQ ID NO: 1415356
uaguguccagcauucagga

SEQ ID NO: 1415358 - RNA, 19 nt, Artificial Sequence
  Description of Artificial Sequence: Synthetic oligonucleotide
  Sense strand starting at position 2938 of SEQ ID NO: 1243419
ggccguuaaccucaucaaa

SEQ ID NO: 1415359 - RNA, 19 nt, Artificial Sequence
  Description of Artificial Sequence: Synthetic oligonucleotide
  Antisense strand to SEQ ID NO: 1415358
uuugaugagguuaacggcc

SEQ ID NO: 1415360 - RNA, 19 nt, Artificial Sequence
  Description of Artificial Sequence: Synthetic oligonucleotide
  Sense strand starting at position 2968 of SEQ ID NO: 1243419
uccuguuguagaugggaga

SEQ ID NO: 1415361 - RNA, 19 nt, Artificial Sequence
  Description of Artificial Sequence: Synthetic oligonucleotide
  Antisense strand to SEQ ID NO: 1415360
ucucccaucuacaacagga

SEQ ID NO: 1415362 - RNA, 19 nt, Artificial Sequence
  Description of Artificial Sequence: Synthetic oligonucleotide
  Sense strand starting at position 3017 of SEQ ID NO: 1243419
gcaagucuuagcgcugcau

SEQ ID NO: 1415363 - RNA, 19 nt, Artificial Sequence
  Description of Artificial Sequence: Synthetic oligonucleotide
  Antisense strand to SEQ ID NO: 1415362
augcagcgcuaagacuugc

SEQ ID NO: 1415364 - RNA, 19 nt, Artificial Sequence
  Description of Artificial Sequence: Synthetic oligonucleotide
  Sense strand starting at position 3018 of SEQ ID NO: 1243419
caagucuuagcgcugcauu

SEQ ID NO: 1415365 - RNA, 19 nt, Artificial Sequence
  Description of Artificial Sequence: Synthetic oligonucleotide
  Antisense strand to SEQ ID NO: 1415364
aaugcagcgcuaagacuug

SEQ ID NO: 1415366 - RNA, 19 nt, Artificial Sequence
  Description of Artificial Sequence: Synthetic oligonucleotide
  Sense strand starting at position 3019 of SEQ ID NO: 1243419
aagucuuagcgcugcauuu

SEQ ID NO: 1415367 - RNA, 19 nt, Artificial Sequence
  Description of Artificial Sequence: Synthetic oligonucleotide
  Antisense strand to SEQ ID NO: 1415366
aaaugcagcgcuaagacuu

SEQ ID NO: 1415368 - RNA, 19 nt, Artificial Sequence
  Description of Artificial Sequence: Synthetic oligonucleotide
  Sense strand starting at position 3226 of SEQ ID NO: 1243419
ugagucaugaggcauugga

SEQ ID NO: 1415369 - RNA, 19 nt, Artificial Sequence
  Description of Artificial Sequence: Synthetic oligonucleotide
  Antisense strand to SEQ ID NO: 1415368
uccaaugccucaugacuca

SEQ ID NO: 1415370 - RNA, 19 nt, Artificial Sequence
  Description of Artificial Sequence: Synthetic oligonucleotide
  Sense strand starting at position 3235 of SEQ ID NO: 1243419
aggcauuggacagguaauu

SEQ ID NO: 1415371 - RNA, 19 nt, Artificial Sequence
  Description of Artificial Sequence: Synthetic oligonucleotide
  Antisense strand to SEQ ID NO: 1415370
aauuaccuguccaaugccu

SEQ ID NO: 1415372 - RNA, 19 nt, Artificial Sequence
  Description of Artificial Sequence: Synthetic oligonucleotide
  Sense strand starting at position 3245 of SEQ ID NO: 1243419
cagguaauugcugggaaga

SEQ ID NO: 1415373 - RNA, 19 nt, Artificial Sequence
  Description of Artificial Sequence: Synthetic oligonucleotide
  Antisense strand to SEQ ID NO: 1415372
ucuucccagcaauuaccug

SEQ ID NO: 1415374 - RNA, 19 nt, Artificial Sequence
  Description of Artificial Sequence: Synthetic oligonucleotide
  Sense strand starting at position 3246 of SEQ ID NO: 1243419
agguaauugcugggaagag

SEQ ID NO: 1415375 - RNA, 19 nt, Artificial Sequence
  Description of Artificial Sequence: Synthetic oligonucleotide
  Antisense strand to SEQ ID NO: 1415374
cucuucccagcaauuaccu

SEQ ID NO: 1415376 - RNA, 19 nt, Artificial Sequence
  Description of Artificial Sequence: Synthetic oligonucleotide
  Sense strand starting at position 3263 of SEQ ID NO: 1243419
agcucuuggccaggcuaaa

SEQ ID NO: 1415377 - RNA, 19 nt, Artificial Sequence
  Description of Artificial Sequence: Synthetic oligonucleotide
  Antisense strand to SEQ ID NO: 1415376
uuuagccuggccaagagcu

SEQ ID NO: 1415378 - RNA, 19 nt, Artificial Sequence
  Description of Artificial Sequence: Synthetic oligonucleotide
  Sense strand starting at position 3598 of SEQ ID NO: 1243419
aucccagugucuuuaccua

SEQ ID NO: 1415379 - RNA, 19 nt, Artificial Sequence
  Description of Artificial Sequence: Synthetic oligonucleotide
  Antisense strand to SEQ ID NO: 1415378
uagguaaagacacugggau

SEQ ID NO: 1415380 - RNA, 19 nt, Artificial Sequence
  Description of Artificial Sequence: Synthetic oligonucleotide
  Sense strand starting at position 3642 of SEQ ID NO: 1243419
gugcuucuguggagggaga

SEQ ID NO: 1415381 - RNA, 19 nt, Artificial Sequence
  Description of Artificial Sequence: Synthetic oligonucleotide
  Antisense strand to SEQ ID NO: 1415380
ucucccuccacagaagcac

SEQ ID NO: 1415382 - RNA, 19 nt, Artificial Sequence
  Description of Artificial Sequence: Synthetic oligonucleotide
  Sense strand starting at position 3765 of SEQ ID NO: 1243419
gggagacgccuggauccau

SEQ ID NO: 1415383 - RNA, 19 nt, Artificial Sequence
  Description of Artificial Sequence: Synthetic oligonucleotide
  Antisense strand to SEQ ID NO: 1415382
auggauccaggcgucuccc

SEQ ID NO: 1415384 - RNA, 19 nt, Artificial Sequence
  Description of Artificial Sequence: Synthetic oligonucleotide
  Sense strand starting at position 3921 of SEQ ID NO: 1243419
gagagcauaucacuggguu

SEQ ID NO: 1415385 - RNA, 19 nt, Artificial Sequence
  Description of Artificial Sequence: Synthetic oligonucleotide
  Antisense strand to SEQ ID NO: 1415384
aacccagugauaugcucuc

SEQ ID NO: 1415386 - RNA, 19 nt, Artificial Sequence
  Description of Artificial Sequence: Synthetic oligonucleotide
  Sense strand starting at position 3982 of SEQ ID NO: 1243419
gguguucccauccaugaag

SEQ ID NO: 1415387 - RNA, 19 nt, Artificial Sequence
  Description of Artificial Sequence: Synthetic oligonucleotide
  Antisense strand to SEQ ID NO: 1415386
cuucauggaugggaacacc

SEQ ID NO: 1415388 - RNA, 19 nt, Artificial Sequence
  Description of Artificial Sequence: Synthetic oligonucleotide
  Sense strand starting at position 71 of SEQ ID NO: 1243420
aaacucacgucagggaaua

SEQ ID NO: 1415389 - RNA, 19 nt, Artificial Sequence
  Description of Artificial Sequence: Synthetic oligonucleotide
  Antisense strand to SEQ ID NO: 1415388
uauucccugacgugaguuu

SEQ ID NO: 1415390 - RNA, 19 nt, Artificial Sequence
  Description of Artificial Sequence: Synthetic oligonucleotide
  Sense strand starting at position 72 of SEQ ID NO: 1243420
aacucacgucagggaauau

SEQ ID NO: 1415391 - RNA, 19 nt, Artificial Sequence
  Description of Artificial Sequence: Synthetic oligonucleotide
  Antisense strand to SEQ ID NO: 1415390
auauucccugacgugaguu

SEQ ID NO: 1415392 - RNA, 19 nt, Artificial Sequence
  Description of Artificial Sequence: Synthetic oligonucleotide
  Sense strand starting at position 76 of SEQ ID NO: 1243420
cacgucagggaauaucuau

SEQ ID NO: 1415393 - RNA, 19 nt, Artificial Sequence
  Description of Artificial Sequence: Synthetic oligonucleotide
  Antisense strand to SEQ ID NO: 1415392
auagauauucccugacgug

SEQ ID NO: 1415394 - RNA, 19 nt, Artificial Sequence
  Description of Artificial Sequence: Synthetic oligonucleotide
  Sense strand starting at position 85 of SEQ ID NO: 1243420
gaauaucuaugugaagaca

SEQ ID NO: 1415395 - RNA, 19 nt, Artificial Sequence
  Description of Artificial Sequence: Synthetic oligonucleotide
  Antisense strand to SEQ ID NO: 1415394
ugucuucacauagauauuc

SEQ ID NO: 1415396 - RNA, 19 nt, Artificial Sequence
  Description of Artificial Sequence: Synthetic oligonucleotide
  Sense strand starting at position 107 of SEQ ID NO: 1243420
uagagagauggauguguaa

SEQ ID NO: 1415397 - RNA, 19 nt, Artificial Sequence
  Description of Artificial Sequence: Synthetic oligonucleotide
  Antisense strand to SEQ ID NO: 1415396
uuacacauccaucucucua

SEQ ID NO: 1415398 - RNA, 19 nt, Artificial Sequence
  Description of Artificial Sequence: Synthetic oligonucleotide
  Sense strand starting at position 109 of SEQ ID NO: 1243420
gagagauggauguguaaca

SEQ ID NO: 1415399 - RNA, 19 nt, Artificial Sequence
  Description of Artificial Sequence: Synthetic oligonucleotide
  Antisense strand to SEQ ID NO: 1415398
uguuacacauccaucucuc

SEQ ID NO: 1415400 - RNA, 19 nt, Artificial Sequence
  Description of Artificial Sequence: Synthetic oligonucleotide
  Sense strand starting at position 202 of SEQ ID NO: 1243420
auacguuagagacaaucga

SEQ ID NO: 1415401 - RNA, 19 nt, Artificial Sequence
  Description of Artificial Sequence: Synthetic oligonucleotide
  Antisense strand to SEQ ID NO: 1415400
ucgauugucucuaacguau

SEQ ID NO: 1415402 - RNA, 19 nt, Artificial Sequence
  Description of Artificial Sequence: Synthetic oligonucleotide
  Sense strand starting at position 223 of SEQ ID NO: 1243420
gcaagcuuccacgagcaaa

SEQ ID NO: 1415403 - RNA, 19 nt, Artificial Sequence
  Description of Artificial Sequence: Synthetic oligonucleotide
  Antisense strand to SEQ ID NO: 1415402
uuugcucguggaagcuugc

SEQ ID NO: 1415404 - RNA, 19 nt, Artificial Sequence
  Description of Artificial Sequence: Synthetic oligonucleotide
  Sense strand starting at position 275 of SEQ ID NO: 1243420
auauaaacagguugucaca

SEQ ID NO: 1415405 - RNA, 19 nt, Artificial Sequence
  Description of Artificial Sequence: Synthetic oligonucleotide
  Antisense strand to SEQ ID NO: 1415404
ugugacaaccuguuuauau

SEQ ID NO: 1415406 - RNA, 19 nt, Artificial Sequence
  Description of Artificial Sequence: Synthetic oligonucleotide
  Sense strand starting at position 277 of SEQ ID NO: 1243420
auaaacagguugucacaaa

SEQ ID NO: 1415407 - RNA, 19 nt, Artificial Sequence
  Description of Artificial Sequence: Synthetic oligonucleotide
  Antisense strand to SEQ ID NO: 1415406
uuugugacaaccuguuuau

SEQ ID NO: 1415408 - RNA, 19 nt, Artificial Sequence
  Description of Artificial Sequence: Synthetic oligonucleotide
  Sense strand starting at position 585 of SEQ ID NO: 1243420
caguaacugcugugaaucu

SEQ ID NO: 1415409 - RNA, 19 nt, Artificial Sequence
  Description of Artificial Sequence: Synthetic oligonucleotide
  Antisense strand to SEQ ID NO: 1415408
agauucacagcaguuacug

SEQ ID NO: 1415410 - RNA, 19 nt, Artificial Sequence
  Description of Artificial Sequence: Synthetic oligonucleotide
  Sense strand starting at position 730 of SEQ ID NO: 1243420
cagauuguuugagcgcaga

SEQ ID NO: 1415411 - RNA, 19 nt, Artificial Sequence
  Description of Artificial Sequence: Synthetic oligonucleotide
  Antisense strand to SEQ ID NO: 1415410
ucugcgcucaaacaaucug

SEQ ID NO: 1415412 - RNA, 19 nt, Artificial Sequence
  Description of Artificial Sequence: Synthetic oligonucleotide
  Sense strand starting at position 733 of SEQ ID NO: 1243420
auuguuugagcgcagaagu

SEQ ID NO: 1415413 - RNA, 19 nt, Artificial Sequence
  Description of Artificial Sequence: Synthetic oligonucleotide
  Antisense strand to SEQ ID NO: 1415412
acuucugcgcucaaacaau

SEQ ID NO: 1415414 - RNA, 19 nt, Artificial Sequence
  Description of Artificial Sequence: Synthetic oligonucleotide
  Sense strand starting at position 966 of SEQ ID NO: 1243420
cuguuacuucccugugcca

SEQ ID NO: 1415415 - RNA, 19 nt, Artificial Sequence
  Description of Artificial Sequence: Synthetic oligonucleotide
  Antisense strand to SEQ ID NO: 1415414
uggcacagggaaguaacag

SEQ ID NO: 1415416 - RNA, 19 nt, Artificial Sequence
  Description of Artificial Sequence: Synthetic oligonucleotide
  Sense strand starting at position 968 of SEQ ID NO: 1243420
guuacuucccugugccaga

SEQ ID NO: 1415417 - RNA, 19 nt, Artificial Sequence
  Description of Artificial Sequence: Synthetic oligonucleotide
  Antisense strand to SEQ ID NO: 1415416
ucuggcacagggaaguaac

SEQ ID NO: 1415418 - RNA, 19 nt, Artificial Sequence
  Description of Artificial Sequence: Synthetic oligonucleotide
  Sense strand starting at position 969 of SEQ ID NO: 1243420
uuacuucccugugccagaa

SEQ ID NO: 1415419 - RNA, 19 nt, Artificial Sequence
  Description of Artificial Sequence: Synthetic oligonucleotide
  Antisense strand to SEQ ID NO: 1415418
uucuggcacagggaaguaa

SEQ ID NO: 1415420 - RNA, 19 nt, Artificial Sequence
  Description of Artificial Sequence: Synthetic oligonucleotide
  Sense strand starting at position 1006 of SEQ ID NO: 1243420
agcaaagaguaagacuaau

SEQ ID NO: 1415421 - RNA, 19 nt, Artificial Sequence
  Description of Artificial Sequence: Synthetic oligonucleotide
  Antisense strand to SEQ ID NO: 1415420
auuagucuuacucuuugcu

SEQ ID NO: 1415422 - RNA, 19 nt, Artificial Sequence
  Description of Artificial Sequence: Synthetic oligonucleotide
  Sense strand starting at position 1017 of SEQ ID NO: 1243420
agacuaauccgcuggguua

SEQ ID NO: 1415423 - RNA, 19 nt, Artificial Sequence
  Description of Artificial Sequence: Synthetic oligonucleotide
  Antisense strand to SEQ ID NO: 1415422
uaacccagcggauuagucu

SEQ ID NO: 1415424 - RNA, 19 nt, Artificial Sequence
  Description of Artificial Sequence: Synthetic oligonucleotide
  Sense strand starting at position 1018 of SEQ ID NO: 1243420
gacuaauccgcuggguuag

SEQ ID NO: 1415425 - RNA, 19 nt, Artificial Sequence
  Description of Artificial Sequence: Synthetic oligonucleotide
  Antisense strand to SEQ ID NO: 1415424
cuaacccagcggauuaguc

SEQ ID NO: 1415426 - RNA, 19 nt, Artificial Sequence
  Description of Artificial Sequence: Synthetic oligonucleotide
  Sense strand starting at position 2394 of SEQ ID NO: 1243420
uuucgugucagggugucau

SEQ ID NO: 1415427 - RNA, 19 nt, Artificial Sequence
  Description of Artificial Sequence: Synthetic oligonucleotide
  Antisense strand to SEQ ID NO: 1415426
augacacccugacacgaaa

SEQ ID NO: 1415428 - RNA, 19 nt, Artificial Sequence
  Description of Artificial Sequence: Synthetic oligonucleotide
  Sense strand starting at position 2402 of SEQ ID NO: 1243420
cagggugucauucgaguga

SEQ ID NO: 1415429 - RNA, 19 nt, Artificial Sequence
  Description of Artificial Sequence: Synthetic oligonucleotide
  Antisense strand to SEQ ID NO: 1415428
ucacucgaaugacacccug

SEQ ID NO: 1415430 - RNA, 19 nt, Artificial Sequence
  Description of Artificial Sequence: Synthetic oligonucleotide
  Sense strand starting at position 2404 of SEQ ID NO: 1243420
gggugucauucgagugauc

SEQ ID NO: 1415431 - RNA, 19 nt, Artificial Sequence
  Description of Artificial Sequence: Synthetic oligonucleotide
  Antisense strand to SEQ ID NO: 1415430
gaucacucgaaugacaccc

SEQ ID NO: 1415432 - RNA, 19 nt, Artificial Sequence
  Description of Artificial Sequence: Synthetic oligonucleotide
  Sense strand starting at position 2406 of SEQ ID NO: 1243420
gugucauucgagugaucua

SEQ ID NO: 1415433 - RNA, 19 nt, Artificial Sequence
  Description of Artificial Sequence: Synthetic oligonucleotide
  Antisense strand to SEQ ID NO: 1415432
uagaucacucgaaugacac

SEQ ID NO: 1415434 - RNA, 19 nt, Artificial Sequence
  Description of Artificial Sequence: Synthetic oligonucleotide
  Sense strand starting at position 2407 of SEQ ID NO: 1243420
ugucauucgagugaucuag

SEQ ID NO: 1415435 - RNA, 19 nt, Artificial Sequence
  Description of Artificial Sequence: Synthetic oligonucleotide
  Antisense strand to SEQ ID NO: 1415434
cuagaucacucgaaugaca

SEQ ID NO: 1415436 - RNA, 19 nt, Artificial Sequence
  Description of Artificial Sequence: Synthetic oligonucleotide
  Sense strand starting at position 2414 of SEQ ID NO: 1243420
cgagugaucuagccgucga

SEQ ID NO: 1415437 - RNA, 19 nt, Artificial Sequence
  Description of Artificial Sequence: Synthetic oligonucleotide
  Antisense strand to SEQ ID NO: 1415436
ucgacggcuagaucacucg

SEQ ID NO: 1415438 - RNA, 19 nt, Artificial Sequence
  Description of Artificial Sequence: Synthetic oligonucleotide
  Sense strand starting at position 2415 of SEQ ID NO: 1243420
gagugaucuagccgucgau

SEQ ID NO: 1415439 - RNA, 19 nt, Artificial Sequence
  Description of Artificial Sequence: Synthetic oligonucleotide
  Antisense strand to SEQ ID NO: 1415438
aucgacggcuagaucacuc

SEQ ID NO: 1415440 - RNA, 19 nt, Artificial Sequence
  Description of Artificial Sequence: Synthetic oligonucleotide
  Sense strand starting at position 2524 of SEQ ID NO: 1243420
uucugacaguucuaggaca

SEQ ID NO: 1415441 - RNA, 19 nt, Artificial Sequence
  Description of Artificial Sequence: Synthetic oligonucleotide
  Antisense strand to SEQ ID NO: 1415440
uguccuagaacugucagaa

SEQ ID NO: 1415442 - RNA, 19 nt, Artificial Sequence
  Description of Artificial Sequence: Synthetic oligonucleotide
  Sense strand starting at position 2550 of SEQ ID NO: 1243420
cgcguuugucacgaucuaa

SEQ ID NO: 1415443 - RNA, 19 nt, Artificial Sequence
  Description of Artificial Sequence: Synthetic oligonucleotide
  Antisense strand to SEQ ID NO: 1415442
uuagaucgugacaaacgcg

SEQ ID NO: 1415444 - RNA, 19 nt, Artificial Sequence
  Description of Artificial Sequence: Synthetic oligonucleotide
  Sense strand starting at position 2668 of SEQ ID NO: 1243420
cggugaaacucccucuacu

SEQ ID NO: 1415445 - RNA, 19 nt, Artificial Sequence
  Description of Artificial Sequence: Synthetic oligonucleotide
  Antisense strand to SEQ ID NO: 1415444
aguagagggaguuucaccg

SEQ ID NO: 1415446 - RNA, 19 nt, Artificial Sequence
  Description of Artificial Sequence: Synthetic oligonucleotide
  Sense strand starting at position 3361 of SEQ ID NO: 1243420
aguguuccuguaugaauua

SEQ ID NO: 1415447 - RNA, 19 nt, Artificial Sequence
  Description of Artificial Sequence: Synthetic oligonucleotide
  Antisense strand to SEQ ID NO: 1415446
uaauucauacaggaacacu

SEQ ID NO: 1415448 - RNA, 19 nt, Artificial Sequence
  Description of Artificial Sequence: Synthetic oligonucleotide
  Sense strand starting at position 3472 of SEQ ID NO: 1243420
gcugugugaccggaggagu

SEQ ID NO: 1415449 - RNA, 19 nt, Artificial Sequence
  Description of Artificial Sequence: Synthetic oligonucleotide
  Antisense strand to SEQ ID NO: 1415448
acuccuccggucacacagc

SEQ ID NO: 1415450 - RNA, 19 nt, Artificial Sequence
  Description of Artificial Sequence: Synthetic oligonucleotide
  Sense strand starting at position 3483 of SEQ ID NO: 1243420
ggaggaguucccugacccu

SEQ ID NO: 1415451 - RNA, 19 nt, Artificial Sequence
  Description of Artificial Sequence: Synthetic oligonucleotide
  Antisense strand to SEQ ID NO: 1415450
agggucagggaacuccucc

SEQ ID NO: 1415452 - RNA, 19 nt, Artificial Sequence
  Description of Artificial Sequence: Synthetic oligonucleotide
  Sense strand starting at position 3546 of SEQ ID NO: 1243420
gccagagaguccgugaaau

SEQ ID NO: 1415453 - RNA, 19 nt, Artificial Sequence
  Description of Artificial Sequence: Synthetic oligonucleotide
  Antisense strand to SEQ ID NO: 1415452
auuucacggacucucuggc

SEQ ID NO: 1415454 - RNA, 19 nt, Artificial Sequence
  Description of Artificial Sequence: Synthetic oligonucleotide
  Sense strand starting at position 3564 of SEQ ID NO: 1243420
ugcuuacacgcaugcuaga

SEQ ID NO: 1415455 - RNA, 19 nt, Artificial Sequence
  Description of Artificial Sequence: Synthetic oligonucleotide
  Antisense strand to SEQ ID NO: 1415454
ucuagcaugcguguaagca

SEQ ID NO: 1415456 - RNA, 19 nt, Artificial Sequence
  Description of Artificial Sequence: Synthetic oligonucleotide
  Sense strand starting at position 3751 of SEQ ID NO: 1243420
guguaucuuuggccaaauu

SEQ ID NO: 1415457 - RNA, 19 nt, Artificial Sequence
  Description of Artificial Sequence: Synthetic oligonucleotide
  Antisense strand to SEQ ID NO: 1415456
aauuuggccaaagauacac

SEQ ID NO: 1415458 - RNA, 19 nt, Artificial Sequence
  Description of Artificial Sequence: Synthetic oligonucleotide
  Sense strand starting at position 3761 of SEQ ID NO: 1243420
ggccaaauucuuugaccuc

SEQ ID NO: 1415459 - RNA, 19 nt, Artificial Sequence
  Description of Artificial Sequence: Synthetic oligonucleotide
  Antisense strand to SEQ ID NO: 1415458
gaggucaaagaauuuggcc

SEQ ID NO: 1415460 - RNA, 19 nt, Artificial Sequence
  Description of Artificial Sequence: Synthetic oligonucleotide
  Sense strand starting at position 3792 of SEQ ID NO: 1243420
uucccucaucuguaaggua

SEQ ID NO: 1415461 - RNA, 19 nt, Artificial Sequence
  Description of Artificial Sequence: Synthetic oligonucleotide
  Antisense strand to SEQ ID NO: 1415460
uaccuuacagaugagggaa

SEQ ID NO: 1415462 - RNA, 19 nt, Artificial Sequence
  Description of Artificial Sequence: Synthetic oligonucleotide
  Sense strand starting at position 3795 of SEQ ID NO: 1243420
ccucaucuguaagguaaga

SEQ ID NO: 1415463 - RNA, 19 nt, Artificial Sequence
  Description of Artificial Sequence: Synthetic oligonucleotide
  Antisense strand to SEQ ID NO: 1415462
ucuuaccuuacagaugagg

SEQ ID NO: 1415464 - RNA, 19 nt, Artificial Sequence
  Description of Artificial Sequence: Synthetic oligonucleotide
  Sense strand starting at position 3939 of SEQ ID NO: 1243420
ggauccucucccuggagaa

SEQ ID NO: 1415465 - RNA, 19 nt, Artificial Sequence
  Description of Artificial Sequence: Synthetic oligonucleotide
  Antisense strand to SEQ ID NO: 1415464
uucuccagggagaggaucc

SEQ ID NO: 1415466 - RNA, 19 nt, Artificial Sequence
  Description of Artificial Sequence: Synthetic oligonucleotide
  Sense strand starting at position 3961 of SEQ ID NO: 1243420
gaauacggaucugggaaau

SEQ ID NO: 1415467 - RNA, 19 nt, Artificial Sequence
  Description of Artificial Sequence: Synthetic oligonucleotide
  Antisense strand to SEQ ID NO: 1415466
auuucccagauccguauuc

SEQ ID NO: 1415468 - RNA, 19 nt, Artificial Sequence
  Description of Artificial Sequence: Synthetic oligonucleotide
  Sense strand starting at position 23 of SEQ ID NO: 1243421
aaccacuaucguggaguau

SEQ ID NO: 1415469 - RNA, 19 nt, Artificial Sequence
  Description of Artificial Sequence: Synthetic oligonucleotide
  Antisense strand to SEQ ID NO: 1415468
auacuccacgauagugguu

SEQ ID NO: 1415470 - RNA, 19 nt, Artificial Sequence
  Description of Artificial Sequence: Synthetic oligonucleotide
  Sense strand starting at position 24 of SEQ ID NO: 1243421
accacuaucguggaguauu

SEQ ID NO: 1415471 - RNA, 19 nt, Artificial Sequence
  Description of Artificial Sequence: Synthetic oligonucleotide
  Antisense strand to SEQ ID NO: 1415470
aauacuccacgauaguggu

SEQ ID NO: 1415472 - RNA, 19 nt, Artificial Sequence
  Description of Artificial Sequence: Synthetic oligonucleotide
  Sense strand starting at position 32 of SEQ ID NO: 1243421
cguggaguauuuguuacau

SEQ ID NO: 1415473 - RNA, 19 nt, Artificial Sequence
  Description of Artificial Sequence: Synthetic oligonucleotide
  Antisense strand to SEQ ID NO: 1415472
auguaacaaauacuccacg

SEQ ID NO: 1415474 - RNA, 19 nt, Artificial Sequence
  Description of Artificial Sequence: Synthetic oligonucleotide
  Sense strand starting at position 40 of SEQ ID NO: 1243421
auuuguuacaugcggcuaa

SEQ ID NO: 1415475 - RNA, 19 nt, Artificial Sequence
  Description of Artificial Sequence: Synthetic oligonucleotide
  Antisense strand to SEQ ID NO: 1415474
uuagccgcauguaacaaau

SEQ ID NO: 1415476 - RNA, 19 nt, Artificial Sequence
  Description of Artificial Sequence: Synthetic oligonucleotide
  Sense strand starting at position 513 of SEQ ID NO: 1243421
cuguccuaggcugggaaua

SEQ ID NO: 1415477 - RNA, 19 nt, Artificial Sequence
  Description of Artificial Sequence: Synthetic oligonucleotide
  Antisense strand to SEQ ID NO: 1415476
uauucccagccuaggacag

SEQ ID NO: 1415478 - RNA, 19 nt, Artificial Sequence
  Description of Artificial Sequence: Synthetic oligonucleotide
  Sense strand starting at position 569 of SEQ ID NO: 1243421
cgacauuggucacuacgga

SEQ ID NO: 1415479 - RNA, 19 nt, Artificial Sequence
  Description of Artificial Sequence: Synthetic oligonucleotide
  Antisense strand to SEQ ID NO: 1415478
uccguagugaccaaugucg

SEQ ID NO: 1415480 - RNA, 19 nt, Artificial Sequence
  Description of Artificial Sequence: Synthetic oligonucleotide
  Sense strand starting at position 621 of SEQ ID NO: 1243421
agcagucuugaauacauca

SEQ ID NO: 1415481 - RNA, 19 nt, Artificial Sequence
  Description of Artificial Sequence: Synthetic oligonucleotide
  Antisense strand to SEQ ID NO: 1415480
ugauguauucaagacugcu

SEQ ID NO: 1415482 - RNA, 19 nt, Artificial Sequence
  Description of Artificial Sequence: Synthetic oligonucleotide
  Sense strand starting at position 700 of SEQ ID NO: 1243421
ucaaguauagagcauguua

SEQ ID NO: 1415483 - RNA, 19 nt, Artificial Sequence
  Description of Artificial Sequence: Synthetic oligonucleotide
  Antisense strand to SEQ ID NO: 1415482
uaacaugcucuauacuuga

SEQ ID NO: 1415484 - RNA, 19 nt, Artificial Sequence
  Description of Artificial Sequence: Synthetic oligonucleotide
  Sense strand starting at position 702 of SEQ ID NO: 1243421
aaguauagagcauguuaaa

SEQ ID NO: 1415485 - RNA, 19 nt, Artificial Sequence
  Description of Artificial Sequence: Synthetic oligonucleotide
  Antisense strand to SEQ ID NO: 1415484
uuuaacaugcucuauacuu

SEQ ID NO: 1415486 - RNA, 19 nt, Artificial Sequence
  Description of Artificial Sequence: Synthetic oligonucleotide
  Sense strand starting at position 1188 of SEQ ID NO: 1243421
ugauuugacugggauuauc

SEQ ID NO: 1415487 - RNA, 19 nt, Artificial Sequence
  Description of Artificial Sequence: Synthetic oligonucleotide
  Antisense strand to SEQ ID NO: 1415486
gauaaucccagucaaauca

SEQ ID NO: 1415488 - RNA, 19 nt, Artificial Sequence
  Description of Artificial Sequence: Synthetic oligonucleotide
  Sense strand starting at position 1657 of SEQ ID NO: 1243421
gggcuauagcgagagaaga

SEQ ID NO: 1415489 - RNA, 19 nt, Artificial Sequence
  Description of Artificial Sequence: Synthetic oligonucleotide
  Antisense strand to SEQ ID NO: 1415488
ucuucucucgcuauagccc

SEQ ID NO: 1415490 - RNA, 19 nt, Artificial Sequence
  Description of Artificial Sequence: Synthetic oligonucleotide
  Sense strand starting at position 1768 of SEQ ID NO: 1243421
aggcuaggccuccaugaau

SEQ ID NO: 1415491 - RNA, 19 nt, Artificial Sequence
  Description of Artificial Sequence: Synthetic oligonucleotide
  Antisense strand to SEQ ID NO: 1415490
auucauggaggccuagccu

SEQ ID NO: 1415492 - RNA, 19 nt, Artificial Sequence
  Description of Artificial Sequence: Synthetic oligonucleotide
  Sense strand starting at position 1775 of SEQ ID NO: 1243421
gccuccaugaauugaggua

SEQ ID NO: 1415493 - RNA, 19 nt, Artificial Sequence
  Description of Artificial Sequence: Synthetic oligonucleotide
  Antisense strand to SEQ ID NO: 1415492
uaccucaauucauggaggc

SEQ ID NO: 1415494 - RNA, 19 nt, Artificial Sequence
  Description of Artificial Sequence: Synthetic oligonucleotide
  Sense strand starting at position 1808 of SEQ ID NO: 1243421
gguaguagggcugauagca

SEQ ID NO: 1415495 - RNA, 19 nt, Artificial Sequence
  Description of Artificial Sequence: Synthetic oligonucleotide
  Antisense strand to SEQ ID NO: 1415494
ugcuaucagcccuacuacc

SEQ ID NO: 1415496 - RNA, 19 nt, Artificial Sequence
  Description of Artificial Sequence: Synthetic oligonucleotide
  Sense strand starting at position 1820 of SEQ ID NO: 1243421
gauagcauuccuggaucac

SEQ ID NO: 1415497 - RNA, 19 nt, Artificial Sequence
  Description of Artificial Sequence: Synthetic oligonucleotide
  Antisense strand to SEQ ID NO: 1415496
gugauccaggaaugcuauc

SEQ ID NO: 1415498 - RNA, 19 nt, Artificial Sequence
  Description of Artificial Sequence: Synthetic oligonucleotide
  Sense strand starting at position 1821 of SEQ ID NO: 1243421
auagcauuccuggaucacu

SEQ ID NO: 1415499 - RNA, 19 nt, Artificial Sequence
  Description of Artificial Sequence: Synthetic oligonucleotide
  Antisense strand to SEQ ID NO: 1415498
agugauccaggaaugcuau

SEQ ID NO: 1415500 - RNA, 19 nt, Artificial Sequence
  Description of Artificial Sequence: Synthetic oligonucleotide
  Sense strand starting at position 1874 of SEQ ID NO: 1243421
agcauuucuugggaccaca

SEQ ID NO: 1415501 - RNA, 19 nt, Artificial Sequence
  Description of Artificial Sequence: Synthetic oligonucleotide
  Antisense strand to SEQ ID NO: 1415500
uguggucccaagaaaugcu

SEQ ID NO: 1415502 - RNA, 19 nt, Artificial Sequence
  Description of Artificial Sequence: Synthetic oligonucleotide
  Sense strand starting at position 2018 of SEQ ID NO: 1243421
gcagaaccucuaugacuca

SEQ ID NO: 1415503 - RNA, 19 nt, Artificial Sequence
  Description of Artificial Sequence: Synthetic oligonucleotide
  Antisense strand to SEQ ID NO: 1415502
ugagucauagagguucugc

SEQ ID NO: 1415504 - RNA, 19 nt, Artificial Sequence
  Description of Artificial Sequence: Synthetic oligonucleotide
  Sense strand starting at position 2144 of SEQ ID NO: 1243421
cagcaaagugaaugugagu

SEQ ID NO: 1415505 - RNA, 19 nt, Artificial Sequence
  Description of Artificial Sequence: Synthetic oligonucleotide
  Antisense strand to SEQ ID NO: 1415504
acucacauucacuuugcug

SEQ ID NO: 1415506 - RNA, 19 nt, Artificial Sequence
  Description of Artificial Sequence: Synthetic oligonucleotide
  Sense strand starting at position 2172 of SEQ ID NO: 1243421
cacagauucgguugcaaga

SEQ ID NO: 1415507 - RNA, 19 nt, Artificial Sequence
  Description of Artificial Sequence: Synthetic oligonucleotide
  Antisense strand to SEQ ID NO: 1415506
ucuugcaaccgaaucugug

SEQ ID NO: 1415508 - RNA, 19 nt, Artificial Sequence
  Description of Artificial Sequence: Synthetic oligonucleotide
  Sense strand starting at position 2181 of SEQ ID NO: 1243421
gguugcaagaagugacauu

SEQ ID NO: 1415509 - RNA, 19 nt, Artificial Sequence
  Description of Artificial Sequence: Synthetic oligonucleotide
  Antisense strand to SEQ ID NO: 1415508
aaugucacuucuugcaacc

SEQ ID NO: 1415510 - RNA, 19 nt, Artificial Sequence
  Description of Artificial Sequence: Synthetic oligonucleotide
  Sense strand starting at position 2235 of SEQ ID NO: 1243421
aauguaguuuacccaguga

SEQ ID NO: 1415511 - RNA, 19 nt, Artificial Sequence
  Description of Artificial Sequence: Synthetic oligonucleotide
  Antisense strand to SEQ ID NO: 1415510
ucacuggguaaacuacauu

SEQ ID NO: 1415512 - RNA, 19 nt, Artificial Sequence
  Description of Artificial Sequence: Synthetic oligonucleotide
  Sense strand starting at position 2256 of SEQ ID NO: 1243421
ucaucagcucagggacaau

SEQ ID NO: 1415513 - RNA, 19 nt, Artificial Sequence
  Description of Artificial Sequence: Synthetic oligonucleotide
  Antisense strand to SEQ ID NO: 1415512
auugucccugagcugauga

SEQ ID NO: 1415514 - RNA, 19 nt, Artificial Sequence
  Description of Artificial Sequence: Synthetic oligonucleotide
  Sense strand starting at position 2265 of SEQ ID NO: 1243421
cagggacaauuuggucaaa

SEQ ID NO: 1415515 - RNA, 19 nt, Artificial Sequence
  Description of Artificial Sequence: Synthetic oligonucleotide
  Antisense strand to SEQ ID NO: 1415514
uuugaccaaauugucccug

SEQ ID NO: 1415516 - RNA, 19 nt, Artificial Sequence
  Description of Artificial Sequence: Synthetic oligonucleotide
  Sense strand starting at position 2629 of SEQ ID NO: 1243421
gagcaagacugucuccaau

SEQ ID NO: 1415517 - RNA, 19 nt, Artificial Sequence
  Description of Artificial Sequence: Synthetic oligonucleotide
  Antisense strand to SEQ ID NO: 1415516
auuggagacagucuugcuc

SEQ ID NO: 1415518 - RNA, 19 nt, Artificial Sequence
  Description of Artificial Sequence: Synthetic oligonucleotide
  Sense strand starting at position 2631 of SEQ ID NO: 1243421
gcaagacugucuccaauaa

SEQ ID NO: 1415519 - RNA, 19 nt, Artificial Sequence
  Description of Artificial Sequence: Synthetic oligonucleotide
  Antisense strand to SEQ ID NO: 1415518
uuauuggagacagucuugc

SEQ ID NO: 1415520 - RNA, 19 nt, Artificial Sequence
  Description of Artificial Sequence: Synthetic oligonucleotide
  Sense strand starting at position 2756 of SEQ ID NO: 1243421
gaugacacuguguauuagu

SEQ ID NO: 1415521 - RNA, 19 nt, Artificial Sequence
  Description of Artificial Sequence: Synthetic oligonucleotide
  Antisense strand to SEQ ID NO: 1415520
acuaauacacagugucauc

SEQ ID NO: 1415522 - RNA, 19 nt, Artificial Sequence
  Description of Artificial Sequence: Synthetic oligonucleotide
  Sense strand starting at position 2856 of SEQ ID NO: 1243421
gagaguuguuggcuccaaa

SEQ ID NO: 1415523 - RNA, 19 nt, Artificial Sequence
  Description of Artificial Sequence: Synthetic oligonucleotide
  Antisense strand to SEQ ID NO: 1415522
uuuggagccaacaacucuc

SEQ ID NO: 1415524 - RNA, 19 nt, Artificial Sequence
  Description of Artificial Sequence: Synthetic oligonucleotide
  Sense strand starting at position 2900 of SEQ ID NO: 1243421
gagacaguauguucuagau

SEQ ID NO: 1415525 - RNA, 19 nt, Artificial Sequence
  Description of Artificial Sequence: Synthetic oligonucleotide
  Antisense strand to SEQ ID NO: 1415524
aucuagaacauacugucuc

SEQ ID NO: 1415526 - RNA, 19 nt, Artificial Sequence
  Description of Artificial Sequence: Synthetic oligonucleotide
  Sense strand starting at position 2912 of SEQ ID NO: 1243421
ucuagaucuuaauuguguu

SEQ ID NO: 1415527 - RNA, 19 nt, Artificial Sequence
  Description of Artificial Sequence: Synthetic oligonucleotide
  Antisense strand to SEQ ID NO: 1415526
aacacaauuaagaucuaga

SEQ ID NO: 1415528 - RNA, 19 nt, Artificial Sequence
  Description of Artificial Sequence: Synthetic oligonucleotide
  Sense strand starting at position 2922 of SEQ ID NO: 1243421
aauuguguugguuacacau

SEQ ID NO: 1415529 - RNA, 19 nt, Artificial Sequence
  Description of Artificial Sequence: Synthetic oligonucleotide
  Antisense strand to SEQ ID NO: 1415528
auguguaaccaacacaauu

SEQ ID NO: 1415530 - RNA, 19 nt, Artificial Sequence
  Description of Artificial Sequence: Synthetic oligonucleotide
  Sense strand starting at position 3102 of SEQ ID NO: 1243421
cacacuauugaaugaguga

SEQ ID NO: 1415531 - RNA, 19 nt, Artificial Sequence
  Description of Artificial Sequence: Synthetic oligonucleotide
  Antisense strand to SEQ ID NO: 1415530
ucacucauucaauagugug

SEQ ID NO: 1415532 - RNA, 19 nt, Artificial Sequence
  Description of Artificial Sequence: Synthetic oligonucleotide
  Sense strand starting at position 3115 of SEQ ID NO: 1243421
gagugaaugaauggguauc

SEQ ID NO: 1415533 - RNA, 19 nt, Artificial Sequence
  Description of Artificial Sequence: Synthetic oligonucleotide
  Antisense strand to SEQ ID NO: 1415532
gauacccauucauucacuc

SEQ ID NO: 1415534 - RNA, 19 nt, Artificial Sequence
  Description of Artificial Sequence: Synthetic oligonucleotide
  Sense strand starting at position 3117 of SEQ ID NO: 1243421
gugaaugaauggguaucua

SEQ ID NO: 1415535 - RNA, 19 nt, Artificial Sequence
  Description of Artificial Sequence: Synthetic oligonucleotide
  Antisense strand to SEQ ID NO: 1415534
uagauacccauucauucac

SEQ ID NO: 1415536 - RNA, 19 nt, Artificial Sequence
  Description of Artificial Sequence: Synthetic oligonucleotide
  Sense strand starting at position 3142 of SEQ ID NO: 1243421
gagcuuucuuguuccagaa

SEQ ID NO: 1415537 - RNA, 19 nt, Artificial Sequence
  Description of Artificial Sequence: Synthetic oligonucleotide
  Antisense strand to SEQ ID NO: 1415536
uucuggaacaagaaagcuc

SEQ ID NO: 1415538 - RNA, 19 nt, Artificial Sequence
  Description of Artificial Sequence: Synthetic oligonucleotide
  Sense strand starting at position 3326 of SEQ ID NO: 1243421
gauggaugucaucaugccu

SEQ ID NO: 1415539 - RNA, 19 nt, Artificial Sequence
  Description of Artificial Sequence: Synthetic oligonucleotide
  Antisense strand to SEQ ID NO: 1415538
aggcaugaugacauccauc

SEQ ID NO: 1415540 - RNA, 19 nt, Artificial Sequence
  Description of Artificial Sequence: Synthetic oligonucleotide
  Sense strand starting at position 3621 of SEQ ID NO: 1243421
gcuguugaacugggaaaga

SEQ ID NO: 1415541 - RNA, 19 nt, Artificial Sequence
  Description of Artificial Sequence: Synthetic oligonucleotide
  Antisense strand to SEQ ID NO: 1415540
ucuuucccaguucaacagc

SEQ ID NO: 1415542 - RNA, 19 nt, Artificial Sequence
  Description of Artificial Sequence: Synthetic oligonucleotide
  Sense strand starting at position 3653 of SEQ ID NO: 1243421
cucaaauggucuuuguuag

SEQ ID NO: 1415543 - RNA, 19 nt, Artificial Sequence
  Description of Artificial Sequence: Synthetic oligonucleotide
  Antisense strand to SEQ ID NO: 1415542
cuaacaaagaccauuugag

SEQ ID NO: 1415544 - RNA, 19 nt, Artificial Sequence
  Description of Artificial Sequence: Synthetic oligonucleotide
  Sense strand starting at position 3665 of SEQ ID NO: 1243421
uuguuaguagaguaugaug

SEQ ID NO: 1415545 - RNA, 19 nt, Artificial Sequence
  Description of Artificial Sequence: Synthetic oligonucleotide
  Antisense strand to SEQ ID NO: 1415544
caucauacucuacuaacaa

SEQ ID NO: 1415546 - RNA, 19 nt, Artificial Sequence
  Description of Artificial Sequence: Synthetic oligonucleotide
  Sense strand starting at position 3921 of SEQ ID NO: 1243421
cucucaggaucuucuaaga

SEQ ID NO: 1415547 - RNA, 19 nt, Artificial Sequence
  Description of Artificial Sequence: Synthetic oligonucleotide
  Antisense strand to SEQ ID NO: 1415546
ucuuagaagauccugagag

SEQ ID NO: 1415548 - RNA, 19 nt, Artificial Sequence
  Description of Artificial Sequence: Synthetic oligonucleotide
  Sense strand starting at position 168 of SEQ ID NO: 1243422
ccuaaauaacugcgauuac

SEQ ID NO: 1415549 - RNA, 19 nt, Artificial Sequence
  Description of Artificial Sequence: Synthetic oligonucleotide
  Antisense strand to SEQ ID NO: 1415548
guaaucgcaguuauuuagg

SEQ ID NO: 1415550 - RNA, 19 nt, Artificial Sequence
  Description of Artificial Sequence: Synthetic oligonucleotide
  Sense strand starting at position 169 of SEQ ID NO: 1243422
cuaaauaacugcgauuacu

SEQ ID NO: 1415551 - RNA, 19 nt, Artificial Sequence
  Description of Artificial Sequence: Synthetic oligonucleotide
  Antisense strand to SEQ ID NO: 1415550
aguaaucgcaguuauuuag

SEQ ID NO: 1415552 - RNA, 19 nt, Artificial Sequence
  Description of Artificial Sequence: Synthetic oligonucleotide
  Sense strand starting at position 177 of SEQ ID NO: 1243422
cugcgauuacugugugaga

SEQ ID NO: 1415553 - RNA, 19 nt, Artificial Sequence
  Description of Artificial Sequence: Synthetic oligonucleotide
  Antisense strand to SEQ ID NO: 1415552
ucucacacaguaaucgcag

SEQ ID NO: 1415554 - RNA, 19 nt, Artificial Sequence
  Description of Artificial Sequence: Synthetic oligonucleotide
  Sense strand starting at position 178 of SEQ ID NO: 1243422
ugcgauuacugugugagag

SEQ ID NO: 1415555 - RNA, 19 nt, Artificial Sequence
  Description of Artificial Sequence: Synthetic oligonucleotide
  Antisense strand to SEQ ID NO: 1415554
cucucacacaguaaucgca

SEQ ID NO: 1415556 - RNA, 19 nt, Artificial Sequence
  Description of Artificial Sequence: Synthetic oligonucleotide
  Sense strand starting at position 179 of SEQ ID NO: 1243422
gcgauuacugugugagagc

SEQ ID NO: 1415557 - RNA, 19 nt, Artificial Sequence
  Description of Artificial Sequence: Synthetic oligonucleotide
  Antisense strand to SEQ ID NO: 1415556
gcucucacacaguaaucgc

SEQ ID NO: 1415558 - RNA, 19 nt, Artificial Sequence
  Description of Artificial Sequence: Synthetic oligonucleotide
  Sense strand starting at position 180 of SEQ ID NO: 1243422
cgauuacugugugagagcu

SEQ ID NO: 1415559 - RNA, 19 nt, Artificial Sequence
  Description of Artificial Sequence: Synthetic oligonucleotide
  Antisense strand to SEQ ID NO: 1415558
agcucucacacaguaaucg

SEQ ID NO: 1415560 - RNA, 19 nt, Artificial Sequence
  Description of Artificial Sequence: Synthetic oligonucleotide
  Sense strand starting at position 274 of SEQ ID NO: 1243422
agugcuugcuuugaucaca

SEQ ID NO: 1415561 - RNA, 19 nt, Artificial Sequence
  Description of Artificial Sequence: Synthetic oligonucleotide
  Antisense strand to SEQ ID NO: 1415560
ugugaucaaagcaagcacu

SEQ ID NO: 1415562 - RNA, 19 nt, Artificial Sequence
  Description of Artificial Sequence: Synthetic oligonucleotide
  Sense strand starting at position 395 of SEQ ID NO: 1243422
ugggacacgugucagugau

SEQ ID NO: 1415563 - RNA, 19 nt, Artificial Sequence
  Description of Artificial Sequence: Synthetic oligonucleotide
  Antisense strand to SEQ ID NO: 1415562
aucacugacacguguccca

SEQ ID NO: 1415564 - RNA, 19 nt, Artificial Sequence
  Description of Artificial Sequence: Synthetic oligonucleotide
  Sense strand starting at position 397 of SEQ ID NO: 1243422
ggacacgugucagugauga

SEQ ID NO: 1415565 - RNA, 19 nt, Artificial Sequence
  Description of Artificial Sequence: Synthetic oligonucleotide
  Antisense strand to SEQ ID NO: 1415564
ucaucacugacacgugucc

SEQ ID NO: 1415566 - RNA, 19 nt, Artificial Sequence
  Description of Artificial Sequence: Synthetic oligonucleotide
  Sense strand starting at position 399 of SEQ ID NO: 1243422
acacgugucagugaugaca

SEQ ID NO: 1415567 - RNA, 19 nt, Artificial Sequence
  Description of Artificial Sequence: Synthetic oligonucleotide
  Antisense strand to SEQ ID NO: 1415566
ugucaucacugacacgugu

SEQ ID NO: 1415568 - RNA, 19 nt, Artificial Sequence
  Description of Artificial Sequence: Synthetic oligonucleotide
  Sense strand starting at position 417 of SEQ ID NO: 1243422
agcugugcuucccuggaaa

SEQ ID NO: 1415569 - RNA, 19 nt, Artificial Sequence
  Description of Artificial Sequence: Synthetic oligonucleotide
  Antisense strand to SEQ ID NO: 1415568
uuuccagggaagcacagcu

SEQ ID NO: 1415570 - RNA, 19 nt, Artificial Sequence
  Description of Artificial Sequence: Synthetic oligonucleotide
  Sense strand starting at position 1253 of SEQ ID NO: 1243422
ccgguuuccacccagaguu

SEQ ID NO: 1415571 - RNA, 19 nt, Artificial Sequence
  Description of Artificial Sequence: Synthetic oligonucleotide
  Antisense strand to SEQ ID NO: 1415570
aacucuggguggaaaccgg

SEQ ID NO: 1415572 - RNA, 19 nt, Artificial Sequence
  Description of Artificial Sequence: Synthetic oligonucleotide
  Sense strand starting at position 1339 of SEQ ID NO: 1243422
agggaacauucucaguugu

SEQ ID NO: 1415573 - RNA, 19 nt, Artificial Sequence
  Description of Artificial Sequence: Synthetic oligonucleotide
  Antisense strand to SEQ ID NO: 1415572
acaacugagaauguucccu

SEQ ID NO: 1415574 - RNA, 19 nt, Artificial Sequence
  Description of Artificial Sequence: Synthetic oligonucleotide
  Sense strand starting at position 1341 of SEQ ID NO: 1243422
ggaacauucucaguugucu

SEQ ID NO: 1415575 - RNA, 19 nt, Artificial Sequence
  Description of Artificial Sequence: Synthetic oligonucleotide
  Antisense strand to SEQ ID NO: 1415574
agacaacugagaauguucc

SEQ ID NO: 1415576 - RNA, 19 nt, Artificial Sequence
  Description of Artificial Sequence: Synthetic oligonucleotide
  Sense strand starting at position 1352 of SEQ ID NO: 1243422
aguugucucaaccgggagu

SEQ ID NO: 1415577 - RNA, 19 nt, Artificial Sequence
  Description of Artificial Sequence: Synthetic oligonucleotide
  Antisense strand to SEQ ID NO: 1415576
acucccgguugagacaacu

SEQ ID NO: 1415578 - RNA, 19 nt, Artificial Sequence
  Description of Artificial Sequence: Synthetic oligonucleotide
  Sense strand starting at position 1397 of SEQ ID NO: 1243422
gcuagagaugcuggugagu

SEQ ID NO: 1415579 - RNA, 19 nt, Artificial Sequence
  Description of Artificial Sequence: Synthetic oligonucleotide
  Antisense strand to SEQ ID NO: 1415578
acucaccagcaucucuagc

SEQ ID NO: 1415580 - RNA, 19 nt, Artificial Sequence
  Description of Artificial Sequence: Synthetic oligonucleotide
  Sense strand starting at position 2142 of SEQ ID NO: 1243422
guggguucucgccuuaguu

SEQ ID NO: 1415581 - RNA, 19 nt, Artificial Sequence
  Description of Artificial Sequence: Synthetic oligonucleotide
  Antisense strand to SEQ ID NO: 1415580
aacuaaggcgagaacccac

SEQ ID NO: 1415582 - RNA, 19 nt, Artificial Sequence
  Description of Artificial Sequence: Synthetic oligonucleotide
  Sense strand starting at position 2143 of SEQ ID NO: 1243422
uggguucucgccuuaguuu

SEQ ID NO: 1415583 - RNA, 19 nt, Artificial Sequence
  Description of Artificial Sequence: Synthetic oligonucleotide
  Antisense strand to SEQ ID NO: 1415582
aaacuaaggcgagaaccca

SEQ ID NO: 1415584 - RNA, 19 nt, Artificial Sequence
  Description of Artificial Sequence: Synthetic oligonucleotide
  Sense strand starting at position 2176 of SEQ ID NO: 1243422
gucccuacccuggagugau

SEQ ID NO: 1415585 - RNA, 19 nt, Artificial Sequence
  Description of Artificial Sequence: Synthetic oligonucleotide
  Antisense strand to SEQ ID NO: 1415584
aucacuccaggguagggac

SEQ ID NO: 1415586 - RNA, 19 nt, Artificial Sequence
  Description of Artificial Sequence: Synthetic oligonucleotide
  Sense strand starting at position 2246 of SEQ ID NO: 1243422
gagcguucgcucuaaggca

SEQ ID NO: 1415587 - RNA, 19 nt, Artificial Sequence
  Description of Artificial Sequence: Synthetic oligonucleotide
  Antisense strand to SEQ ID NO: 1415586
ugccuuagagcgaacgcuc

SEQ ID NO: 1415588 - RNA, 19 nt, Artificial Sequence
  Description of Artificial Sequence: Synthetic oligonucleotide
  Sense strand starting at position 2253 of SEQ ID NO: 1243422
cgcucuaaggcagauguuu

SEQ ID NO: 1415589 - RNA, 19 nt, Artificial Sequence
  Description of Artificial Sequence: Synthetic oligonucleotide
  Antisense strand to SEQ ID NO: 1415588
aaacaucugccuuagagcg

SEQ ID NO: 1415590 - RNA, 19 nt, Artificial Sequence
  Description of Artificial Sequence: Synthetic oligonucleotide
  Sense strand starting at position 2261 of SEQ ID NO: 1243422
ggcagauguuuaccaagac

SEQ ID NO: 1415591 - RNA, 19 nt, Artificial Sequence
  Description of Artificial Sequence: Synthetic oligonucleotide
  Antisense strand to SEQ ID NO: 1415590
gucuugguaaacaucugcc

SEQ ID NO: 1415592 - RNA, 19 nt, Artificial Sequence
  Description of Artificial Sequence: Synthetic oligonucleotide
  Sense strand starting at position 2262 of SEQ ID NO: 1243422
gcagauguuuaccaagaca

SEQ ID NO: 1415593 - RNA, 19 nt, Artificial Sequence
  Description of Artificial Sequence: Synthetic oligonucleotide
  Antisense strand to SEQ ID NO: 1415592
ugucuugguaaacaucugc

SEQ ID NO: 1415594 - RNA, 19 nt, Artificial Sequence
  Description of Artificial Sequence: Synthetic oligonucleotide
  Sense strand starting at position 2375 of SEQ ID NO: 1243422
uugagaucaugucagaucu

SEQ ID NO: 1415595 - RNA, 19 nt, Artificial Sequence
  Description of Artificial Sequence: Synthetic oligonucleotide
  Antisense strand to SEQ ID NO: 1415594
agaucugacaugaucucaa

SEQ ID NO: 1415596 - RNA, 19 nt, Artificial Sequence
  Description of Artificial Sequence: Synthetic oligonucleotide
  Sense strand starting at position 2377 of SEQ ID NO: 1243422
gagaucaugucagaucuga

SEQ ID NO: 1415597 - RNA, 19 nt, Artificial Sequence
  Description of Artificial Sequence: Synthetic oligonucleotide
  Antisense strand to SEQ ID NO: 1415596
ucagaucugacaugaucuc

SEQ ID NO: 1415598 - RNA, 19 nt, Artificial Sequence
  Description of Artificial Sequence: Synthetic oligonucleotide
  Sense strand starting at position 2399 of SEQ ID NO: 1243422
auugcagcuccguaaauga

SEQ ID NO: 1415599 - RNA, 19 nt, Artificial Sequence
  Description of Artificial Sequence: Synthetic oligonucleotide
  Antisense strand to SEQ ID NO: 1415598
ucauuuacggagcugcaau

SEQ ID NO: 1415600 - RNA, 19 nt, Artificial Sequence
  Description of Artificial Sequence: Synthetic oligonucleotide
  Sense strand starting at position 2418 of SEQ ID NO: 1243422
ggccgggucguggaauaaa

SEQ ID NO: 1415601 - RNA, 19 nt, Artificial Sequence
  Description of Artificial Sequence: Synthetic oligonucleotide
  Antisense strand to SEQ ID NO: 1415600
uuuauuccacgacccggcc

SEQ ID NO: 1415602 - RNA, 19 nt, Artificial Sequence
  Description of Artificial Sequence: Synthetic oligonucleotide
  Sense strand starting at position 2466 of SEQ ID NO: 1243422
gcauguggcucuguaaauu

SEQ ID NO: 1415603 - RNA, 19 nt, Artificial Sequence
  Description of Artificial Sequence: Synthetic oligonucleotide
  Antisense strand to SEQ ID NO: 1415602
aauuuacagagccacaugc

SEQ ID NO: 1415604 - RNA, 19 nt, Artificial Sequence
  Description of Artificial Sequence: Synthetic oligonucleotide
  Sense strand starting at position 2682 of SEQ ID NO: 1243422
gcgccauuucagcagugau

SEQ ID NO: 1415605 - RNA, 19 nt, Artificial Sequence
  Description of Artificial Sequence: Synthetic oligonucleotide
  Antisense strand to SEQ ID NO: 1415604
aucacugcugaaauggcgc

SEQ ID NO: 1415606 - RNA, 19 nt, Artificial Sequence
  Description of Artificial Sequence: Synthetic oligonucleotide
  Sense strand starting at position 2694 of SEQ ID NO: 1243422
cagugauggaugugggaaa

SEQ ID NO: 1415607 - RNA, 19 nt, Artificial Sequence
  Description of Artificial Sequence: Synthetic oligonucleotide
  Antisense strand to SEQ ID NO: 1415606
uuucccacauccaucacug

SEQ ID NO: 1415608 - RNA, 19 nt, Artificial Sequence
  Description of Artificial Sequence: Synthetic oligonucleotide
  Sense strand starting at position 2835 of SEQ ID NO: 1243422
uacgaaauaugccagguga

SEQ ID NO: 1415609 - RNA, 19 nt, Artificial Sequence
  Description of Artificial Sequence: Synthetic oligonucleotide
  Antisense strand to SEQ ID NO: 1415608
ucaccuggcauauuucgua

SEQ ID NO: 1415610 - RNA, 19 nt, Artificial Sequence
  Description of Artificial Sequence: Synthetic oligonucleotide
  Sense strand starting at position 2837 of SEQ ID NO: 1243422
cgaaauaugccaggugaca

SEQ ID NO: 1415611 - RNA, 19 nt, Artificial Sequence
  Description of Artificial Sequence: Synthetic oligonucleotide
  Antisense strand to SEQ ID NO: 1415610
ugucaccuggcauauuucg

SEQ ID NO: 1415612 - RNA, 19 nt, Artificial Sequence
  Description of Artificial Sequence: Synthetic oligonucleotide
  Sense strand starting at position 2930 of SEQ ID NO: 1243422
gugggagaaucguuugcac

SEQ ID NO: 1415613 - RNA, 19 nt, Artificial Sequence
  Description of Artificial Sequence: Synthetic oligonucleotide
  Antisense strand to SEQ ID NO: 1415612
gugcaaacgauucucccac

SEQ ID NO: 1415614 - RNA, 19 nt, Artificial Sequence
  Description of Artificial Sequence: Synthetic oligonucleotide
  Sense strand starting at position 3020 of SEQ ID NO: 1243422
gugucaugagccugugauc

SEQ ID NO: 1415615 - RNA, 19 nt, Artificial Sequence
  Description of Artificial Sequence: Synthetic oligonucleotide
  Antisense strand to SEQ ID NO: 1415614
gaucacaggcucaugacac

SEQ ID NO: 1415616 - RNA, 19 nt, Artificial Sequence
  Description of Artificial Sequence: Synthetic oligonucleotide
  Sense strand starting at position 3551 of SEQ ID NO: 1243422
gugggugcugucuuacgua

SEQ ID NO: 1415617 - RNA, 19 nt, Artificial Sequence
  Description of Artificial Sequence: Synthetic oligonucleotide
  Antisense strand to SEQ ID NO: 1415616
uacguaagacagcacccac

SEQ ID NO: 1415618 - RNA, 19 nt, Artificial Sequence
  Description of Artificial Sequence: Synthetic oligonucleotide
  Sense strand starting at position 3559 of SEQ ID NO: 1243422
ugucuuacguaaggugaga

SEQ ID NO: 1415619 - RNA, 19 nt, Artificial Sequence
  Description of Artificial Sequence: Synthetic oligonucleotide
  Antisense strand to SEQ ID NO: 1415618
ucucaccuuacguaagaca

SEQ ID NO: 1415620 - RNA, 19 nt, Artificial Sequence
  Description of Artificial Sequence: Synthetic oligonucleotide
  Sense strand starting at position 3570 of SEQ ID NO: 1243422
aggugagagcucugaacag

SEQ ID NO: 1415621 - RNA, 19 nt, Artificial Sequence
  Description of Artificial Sequence: Synthetic oligonucleotide
  Antisense strand to SEQ ID NO: 1415620
cuguucagagcucucaccu

SEQ ID NO: 1415622 - RNA, 19 nt, Artificial Sequence
  Description of Artificial Sequence: Synthetic oligonucleotide
  Sense strand starting at position 3597 of SEQ ID NO: 1243422
agagcagagcccugaaugu

SEQ ID NO: 1415623 - RNA, 19 nt, Artificial Sequence
  Description of Artificial Sequence: Synthetic oligonucleotide
  Antisense strand to SEQ ID NO: 1415622
acauucagggcucugcucu

SEQ ID NO: 1415624 - RNA, 19 nt, Artificial Sequence
  Description of Artificial Sequence: Synthetic oligonucleotide
  Sense strand starting at position 3628 of SEQ ID NO: 1243422
ggaagagucucacuggcag

SEQ ID NO: 1415625 - RNA, 19 nt, Artificial Sequence
  Description of Artificial Sequence: Synthetic oligonucleotide
  Antisense strand to SEQ ID NO: 1415624
cugccagugagacucuucc

SEQ ID NO: 1415626 - RNA, 19 nt, Artificial Sequence
  Description of Artificial Sequence: Synthetic oligonucleotide
  Sense strand starting at position 3766 of SEQ ID NO: 1243422
ccucgcagggacuaagauu

SEQ ID NO: 1415627 - RNA, 19 nt, Artificial Sequence
  Description of Artificial Sequence: Synthetic oligonucleotide
  Antisense strand to SEQ ID NO: 1415626
aaucuuagucccugcgagg

SEQ ID NO: 1415628 - RNA, 19 nt, Artificial Sequence
  Description of Artificial Sequence: Synthetic oligonucleotide
  Sense strand starting at position 212 of SEQ ID NO: 1243423
ugagguaggccuugucaau

SEQ ID NO: 1415629 - RNA, 19 nt, Artificial Sequence
  Description of Artificial Sequence: Synthetic oligonucleotide
  Antisense strand to SEQ ID NO: 1415628
auugacaaggccuaccuca

SEQ ID NO: 1415630 - RNA, 19 nt, Artificial Sequence
  Description of Artificial Sequence: Synthetic oligonucleotide
  Sense strand starting at position 224 of SEQ ID NO: 1243423
ugucaauuauccucauugu

SEQ ID NO: 1415631 - RNA, 19 nt, Artificial Sequence
  Description of Artificial Sequence: Synthetic oligonucleotide
  Antisense strand to SEQ ID NO: 1415630
acaaugaggauaauugaca

SEQ ID NO: 1415632 - RNA, 19 nt, Artificial Sequence
  Description of Artificial Sequence: Synthetic oligonucleotide
  Sense strand starting at position 225 of SEQ ID NO: 1243423
gucaauuauccucauugua

SEQ ID NO: 1415633 - RNA, 19 nt, Artificial Sequence
  Description of Artificial Sequence: Synthetic oligonucleotide
  Antisense strand to SEQ ID NO: 1415632
uacaaugaggauaauugac

SEQ ID NO: 1415634 - RNA, 19 nt, Artificial Sequence
  Description of Artificial Sequence: Synthetic oligonucleotide
  Sense strand starting at position 237 of SEQ ID NO: 1243423
cauuguacugagcaguaaa

SEQ ID NO: 1415635 - RNA, 19 nt, Artificial Sequence
  Description of Artificial Sequence: Synthetic oligonucleotide
  Antisense strand to SEQ ID NO: 1415634
uuuacugcucaguacaaug

SEQ ID NO: 1415636 - RNA, 19 nt, Artificial Sequence
  Description of Artificial Sequence: Synthetic oligonucleotide
  Sense strand starting at position 656 of SEQ ID NO: 1243423
ggcucaugcuggccagaca

SEQ ID NO: 1415637 - RNA, 19 nt, Artificial Sequence
  Description of Artificial Sequence: Synthetic oligonucleotide
  Antisense strand to SEQ ID NO: 1415636
ugucuggccagcaugagcc

SEQ ID NO: 1415638 - RNA, 19 nt, Artificial Sequence
  Description of Artificial Sequence: Synthetic oligonucleotide
  Sense strand starting at position 968 of SEQ ID NO: 1243423
ggugguauuugagucuauu

SEQ ID NO: 1415639 - RNA, 19 nt, Artificial Sequence
  Description of Artificial Sequence: Synthetic oligonucleotide
  Antisense strand to SEQ ID NO: 1415638
aauagacucaaauaccacc

SEQ ID NO: 1415640 - RNA, 19 nt, Artificial Sequence
  Description of Artificial Sequence: Synthetic oligonucleotide
  Sense strand starting at position 971 of SEQ ID NO: 1243423
gguauuugagucuauucgu

SEQ ID NO: 1415641 - RNA, 19 nt, Artificial Sequence
  Description of Artificial Sequence: Synthetic oligonucleotide
  Antisense strand to SEQ ID NO: 1415640
acgaauagacucaaauacc

SEQ ID NO: 1415642 - RNA, 19 nt, Artificial Sequence
  Description of Artificial Sequence: Synthetic oligonucleotide
  Sense strand starting at position 1044 of SEQ ID NO: 1243423
uucugcucagacugaagua

SEQ ID NO: 1415643 - RNA, 19 nt, Artificial Sequence
  Description of Artificial Sequence: Synthetic oligonucleotide
  Antisense strand to SEQ ID NO: 1415642
uacuucagucugagcagaa

SEQ ID NO: 1415644 - RNA, 19 nt, Artificial Sequence
  Description of Artificial Sequence: Synthetic oligonucleotide
  Sense strand starting at position 1304 of SEQ ID NO: 1243423
uggcgagucuauucuuaaa

SEQ ID NO: 1415645 - RNA, 19 nt, Artificial Sequence
  Description of Artificial Sequence: Synthetic oligonucleotide
  Antisense strand to SEQ ID NO: 1415644
uuuaagaauagacucgcca

SEQ ID NO: 1415646 - RNA, 19 nt, Artificial Sequence
  Description of Artificial Sequence: Synthetic oligonucleotide
  Sense strand starting at position 1306 of SEQ ID NO: 1243423
gcgagucuauucuuaaaua

SEQ ID NO: 1415647 - RNA, 19 nt, Artificial Sequence
  Description of Artificial Sequence: Synthetic oligonucleotide
  Antisense strand to SEQ ID NO: 1415646
uauuuaagaauagacucgc

SEQ ID NO: 1415648 - RNA, 19 nt, Artificial Sequence
  Description of Artificial Sequence: Synthetic oligonucleotide
  Sense strand starting at position 1356 of SEQ ID NO: 1243423
cagaauguagcuuaguaug

SEQ ID NO: 1415649 - RNA, 19 nt, Artificial Sequence
  Description of Artificial Sequence: Synthetic oligonucleotide
  Antisense strand to SEQ ID NO: 1415648
cauacuaagcuacauucug

SEQ ID NO: 1415650 - RNA, 19 nt, Artificial Sequence
  Description of Artificial Sequence: Synthetic oligonucleotide
  Sense strand starting at position 1366 of SEQ ID NO: 1243423
cuuaguaugccguauaccu

SEQ ID NO: 1415651 - RNA, 19 nt, Artificial Sequence
  Description of Artificial Sequence: Synthetic oligonucleotide
  Antisense strand to SEQ ID NO: 1415650
agguauacggcauacuaag

SEQ ID NO: 1415652 - RNA, 19 nt, Artificial Sequence
  Description of Artificial Sequence: Synthetic oligonucleotide
  Sense strand starting at position 1376 of SEQ ID NO: 1243423
cguauaccucugggugaau

SEQ ID NO: 1415653 - RNA, 19 nt, Artificial Sequence
  Description of Artificial Sequence: Synthetic oligonucleotide
  Antisense strand to SEQ ID NO: 1415652
auucacccagagguauacg

SEQ ID NO: 1415654 - RNA, 19 nt, Artificial Sequence
  Description of Artificial Sequence: Synthetic oligonucleotide
  Sense strand starting at position 1377 of SEQ ID NO: 1243423
guauaccucugggugaaua

SEQ ID NO: 1415655 - RNA, 19 nt, Artificial Sequence
  Description of Artificial Sequence: Synthetic oligonucleotide
  Antisense strand to SEQ ID NO: 1415654
uauucacccagagguauac

SEQ ID NO: 1415656 - RNA, 19 nt, Artificial Sequence
  Description of Artificial Sequence: Synthetic oligonucleotide
  Sense strand starting at position 1378 of SEQ ID NO: 1243423
uauaccucugggugaauaa

SEQ ID NO: 1415657 - RNA, 19 nt, Artificial Sequence
  Description of Artificial Sequence: Synthetic oligonucleotide
  Antisense strand to SEQ ID NO: 1415656
uuauucacccagagguaua

SEQ ID NO: 1415658 - RNA, 19 nt, Artificial Sequence
  Description of Artificial Sequence: Synthetic oligonucleotide
  Sense strand starting at position 1399 of SEQ ID NO: 1243423
auggacuugcccuagcuau

SEQ ID NO: 1415659 - RNA, 19 nt, Artificial Sequence
  Description of Artificial Sequence: Synthetic oligonucleotide
  Antisense strand to SEQ ID NO: 1415658
auagcuagggcaaguccau

SEQ ID NO: 1415660 - RNA, 19 nt, Artificial Sequence
  Description of Artificial Sequence: Synthetic oligonucleotide
  Sense strand starting at position 1463 of SEQ ID NO: 1243423
ggagcaacaugauauauuu

SEQ ID NO: 1415661 - RNA, 19 nt, Artificial Sequence
  Description of Artificial Sequence: Synthetic oligonucleotide
  Antisense strand to SEQ ID NO: 1415660
aaauauaucauguugcucc

SEQ ID NO: 1415662 - RNA, 19 nt, Artificial Sequence
  Description of Artificial Sequence: Synthetic oligonucleotide
  Sense strand starting at position 1566 of SEQ ID NO: 1243423
gugagaauuuguugagaca

SEQ ID NO: 1415663 - RNA, 19 nt, Artificial Sequence
  Description of Artificial Sequence: Synthetic oligonucleotide
  Antisense strand to SEQ ID NO: 1415662
ugucucaacaaauucucac

SEQ ID NO: 1415664 - RNA, 19 nt, Artificial Sequence
  Description of Artificial Sequence: Synthetic oligonucleotide
  Sense strand starting at position 1569 of SEQ ID NO: 1243423
agaauuuguugagacagcu

SEQ ID NO: 1415665 - RNA, 19 nt, Artificial Sequence
  Description of Artificial Sequence: Synthetic oligonucleotide
  Antisense strand to SEQ ID NO: 1415664
agcugucucaacaaauucu

SEQ ID NO: 1415666 - RNA, 19 nt, Artificial Sequence
  Description of Artificial Sequence: Synthetic oligonucleotide
  Sense strand starting at position 1593 of SEQ ID NO: 1243423
ucuuccugacccugaguua

SEQ ID NO: 1415667 - RNA, 19 nt, Artificial Sequence
  Description of Artificial Sequence: Synthetic oligonucleotide
  Antisense strand to SEQ ID NO: 1415666
uaacucagggucaggaaga

SEQ ID NO: 1415668 - RNA, 19 nt, Artificial Sequence
  Description of Artificial Sequence: Synthetic oligonucleotide
  Sense strand starting at position 1602 of SEQ ID NO: 1243423
cccugaguuagaggugaga

SEQ ID NO: 1415669 - RNA, 19 nt, Artificial Sequence
  Description of Artificial Sequence: Synthetic oligonucleotide
  Antisense strand to SEQ ID NO: 1415668
ucucaccucuaacucaggg

SEQ ID NO: 1415670 - RNA, 19 nt, Artificial Sequence
  Description of Artificial Sequence: Synthetic oligonucleotide
  Sense strand starting at position 1657 of SEQ ID NO: 1243423
gaccuuagaucauggagga

SEQ ID NO: 1415671 - RNA, 19 nt, Artificial Sequence
  Description of Artificial Sequence: Synthetic oligonucleotide
  Antisense strand to SEQ ID NO: 1415670
uccuccaugaucuaagguc

SEQ ID NO: 1415672 - RNA, 19 nt, Artificial Sequence
  Description of Artificial Sequence: Synthetic oligonucleotide
  Sense strand starting at position 2034 of SEQ ID NO: 1243423
ccagaauuccugugcucug

SEQ ID NO: 1415673 - RNA, 19 nt, Artificial Sequence
  Description of Artificial Sequence: Synthetic oligonucleotide
  Antisense strand to SEQ ID NO: 1415672
cagagcacaggaauucugg

SEQ ID NO: 1415674 - RNA, 19 nt, Artificial Sequence
  Description of Artificial Sequence: Synthetic oligonucleotide
  Sense strand starting at position 2202 of SEQ ID NO: 1243423
cuguguaauccugggcuaa

SEQ ID NO: 1415675 - RNA, 19 nt, Artificial Sequence
  Description of Artificial Sequence: Synthetic oligonucleotide
  Antisense strand to SEQ ID NO: 1415674
uuagcccaggauuacacag

SEQ ID NO: 1415676 - RNA, 19 nt, Artificial Sequence
  Description of Artificial Sequence: Synthetic oligonucleotide
  Sense strand starting at position 2204 of SEQ ID NO: 1243423
guguaauccugggcuaauu

SEQ ID NO: 1415677 - RNA, 19 nt, Artificial Sequence
  Description of Artificial Sequence: Synthetic oligonucleotide
  Antisense strand to SEQ ID NO: 1415676
aauuagcccaggauuacac

SEQ ID NO: 1415678 - RNA, 19 nt, Artificial Sequence
  Description of Artificial Sequence: Synthetic oligonucleotide
  Sense strand starting at position 2243 of SEQ ID NO: 1243423
aaggcucuccucuguguua

SEQ ID NO: 1415679 - RNA, 19 nt, Artificial Sequence
  Description of Artificial Sequence: Synthetic oligonucleotide
  Antisense strand to SEQ ID NO: 1415678
uaacacagaggagagccuu

SEQ ID NO: 1415680 - RNA, 19 nt, Artificial Sequence
  Description of Artificial Sequence: Synthetic oligonucleotide
  Sense strand starting at position 2452 of SEQ ID NO: 1243423
gggauuagcagaugauacu

SEQ ID NO: 1415681 - RNA, 19 nt, Artificial Sequence
  Description of Artificial Sequence: Synthetic oligonucleotide
  Antisense strand to SEQ ID NO: 1415680
aguaucaucugcuaauccc

SEQ ID NO: 1415682 - RNA, 19 nt, Artificial Sequence
  Description of Artificial Sequence: Synthetic oligonucleotide
  Sense strand starting at position 2632 of SEQ ID NO: 1243423
cauauauuggcaugugcuu

SEQ ID NO: 1415683 - RNA, 19 nt, Artificial Sequence
  Description of Artificial Sequence: Synthetic oligonucleotide
  Antisense strand to SEQ ID NO: 1415682
aagcacaugccaauauaug

SEQ ID NO: 1415684 - RNA, 19 nt, Artificial Sequence
  Description of Artificial Sequence: Synthetic oligonucleotide
  Sense strand starting at position 2951 of SEQ ID NO: 1243423
cuggucaagacauggagua

SEQ ID NO: 1415685 - RNA, 19 nt, Artificial Sequence
  Description of Artificial Sequence: Synthetic oligonucleotide
  Antisense strand to SEQ ID NO: 1415684
uacuccaugucuugaccag

SEQ ID NO: 1415686 - RNA, 19 nt, Artificial Sequence
  Description of Artificial Sequence: Synthetic oligonucleotide
  Sense strand starting at position 3009 of SEQ ID NO: 1243423
acagaaauguaccauauga

SEQ ID NO: 1415687 - RNA, 19 nt, Artificial Sequence
  Description of Artificial Sequence: Synthetic oligonucleotide
  Antisense strand to SEQ ID NO: 1415686
ucauaugguacauuucugu

SEQ ID NO: 1415688 - RNA, 19 nt, Artificial Sequence
  Description of Artificial Sequence: Synthetic oligonucleotide
  Sense strand starting at position 3017 of SEQ ID NO: 1243423
guaccauaugauuggguca

SEQ ID NO: 1415689 - RNA, 19 nt, Artificial Sequence
  Description of Artificial Sequence: Synthetic oligonucleotide
  Antisense strand to SEQ ID NO: 1415688
ugacccaaucauaugguac

SEQ ID NO: 1415690 - RNA, 19 nt, Artificial Sequence
  Description of Artificial Sequence: Synthetic oligonucleotide
  Sense strand starting at position 3020 of SEQ ID NO: 1243423
ccauaugauugggucaucu

SEQ ID NO: 1415691 - RNA, 19 nt, Artificial Sequence
  Description of Artificial Sequence: Synthetic oligonucleotide
  Antisense strand to SEQ ID NO: 1415690
agaugacccaaucauaugg

SEQ ID NO: 1415692 - RNA, 19 nt, Artificial Sequence
  Description of Artificial Sequence: Synthetic oligonucleotide
  Sense strand starting at position 3024 of SEQ ID NO: 1243423
augauugggucaucuggaa

SEQ ID NO: 1415693 - RNA, 19 nt, Artificial Sequence
  Description of Artificial Sequence: Synthetic oligonucleotide
  Antisense strand to SEQ ID NO: 1415692
uuccagaugacccaaucau

SEQ ID NO: 1415694 - RNA, 19 nt, Artificial Sequence
  Description of Artificial Sequence: Synthetic oligonucleotide
  Sense strand starting at position 3451 of SEQ ID NO: 1243423
accuguguccacugaugag

SEQ ID NO: 1415695 - RNA, 19 nt, Artificial Sequence
  Description of Artificial Sequence: Synthetic oligonucleotide
  Antisense strand to SEQ ID NO: 1415694
cucaucaguggacacaggu

SEQ ID NO: 1415696 - RNA, 19 nt, Artificial Sequence
  Description of Artificial Sequence: Synthetic oligonucleotide
  Sense strand starting at position 3457 of SEQ ID NO: 1243423
guccacugaugaguggaua

SEQ ID NO: 1415697 - RNA, 19 nt, Artificial Sequence
  Description of Artificial Sequence: Synthetic oligonucleotide
  Antisense strand to SEQ ID NO: 1415696
uauccacucaucaguggac

SEQ ID NO: 1415698 - RNA, 19 nt, Artificial Sequence
  Description of Artificial Sequence: Synthetic oligonucleotide
  Sense strand starting at position 3485 of SEQ ID NO: 1243423
gcgucuauaccaugcaaua

SEQ ID NO: 1415699 - RNA, 19 nt, Artificial Sequence
  Description of Artificial Sequence: Synthetic oligonucleotide
  Antisense strand to SEQ ID NO: 1415698
uauugcaugguauagacgc

SEQ ID NO: 1415700 - RNA, 19 nt, Artificial Sequence
  Description of Artificial Sequence: Synthetic oligonucleotide
  Sense strand starting at position 3497 of SEQ ID NO: 1243423
ugcaauacucuugggcaau

SEQ ID NO: 1415701 - RNA, 19 nt, Artificial Sequence
  Description of Artificial Sequence: Synthetic oligonucleotide
  Antisense strand to SEQ ID NO: 1415700
auugcccaagaguauugca

SEQ ID NO: 1415702 - RNA, 19 nt, Artificial Sequence
  Description of Artificial Sequence: Synthetic oligonucleotide
  Sense strand starting at position 3691 of SEQ ID NO: 1243423
ggguguacgaaugaagagu

SEQ ID NO: 1415703 - RNA, 19 nt, Artificial Sequence
  Description of Artificial Sequence: Synthetic oligonucleotide
  Antisense strand to SEQ ID NO: 1415702
acucuucauucguacaccc

SEQ ID NO: 1415704 - RNA, 19 nt, Artificial Sequence
  Description of Artificial Sequence: Synthetic oligonucleotide
  Sense strand starting at position 3697 of SEQ ID NO: 1243423
acgaaugaagagugguuau

SEQ ID NO: 1415705 - RNA, 19 nt, Artificial Sequence
  Description of Artificial Sequence: Synthetic oligonucleotide
  Antisense strand to SEQ ID NO: 1415704
auaaccacucuucauucgu

SEQ ID NO: 1415706 - RNA, 19 nt, Artificial Sequence
  Description of Artificial Sequence: Synthetic oligonucleotide
  Sense strand starting at position 3700 of SEQ ID NO: 1243423
aaugaagagugguuaucau

SEQ ID NO: 1415707 - RNA, 19 nt, Artificial Sequence
  Description of Artificial Sequence: Synthetic oligonucleotide
  Antisense strand to SEQ ID NO: 1415706
augauaaccacucuucauu

SEQ ID NO: 1415708 - RNA, 19 nt, Artificial Sequence
  Description of Artificial Sequence: Synthetic oligonucleotide
  Sense strand starting at position 180 of SEQ ID NO: 1243424
ccucuuucugcagacagaa

SEQ ID NO: 1415709 - RNA, 19 nt, Artificial Sequence
  Description of Artificial Sequence: Synthetic oligonucleotide
  Antisense strand to SEQ ID NO: 1415708
uucugucugcagaaagagg

SEQ ID NO: 1415710 - RNA, 19 nt, Artificial Sequence
  Description of Artificial Sequence: Synthetic oligonucleotide
  Sense strand starting at position 235 of SEQ ID NO: 1243424
aguuuaucuccuugguuua

SEQ ID NO: 1415711 - RNA, 19 nt, Artificial Sequence
  Description of Artificial Sequence: Synthetic oligonucleotide
  Antisense strand to SEQ ID NO: 1415710
uaaaccaaggagauaaacu

SEQ ID NO: 1415712 - RNA, 19 nt, Artificial Sequence
  Description of Artificial Sequence: Synthetic oligonucleotide
  Sense strand starting at position 237 of SEQ ID NO: 1243424
uuuaucuccuugguuuauu

SEQ ID NO: 1415713 - RNA, 19 nt, Artificial Sequence
  Description of Artificial Sequence: Synthetic oligonucleotide
  Antisense strand to SEQ ID NO: 1415712
aauaaaccaaggagauaaa

SEQ ID NO: 1415714 - RNA, 19 nt, Artificial Sequence
  Description of Artificial Sequence: Synthetic oligonucleotide
  Sense strand starting at position 238 of SEQ ID NO: 1243424
uuaucuccuugguuuauua

SEQ ID NO: 1415715 - RNA, 19 nt, Artificial Sequence
  Description of Artificial Sequence: Synthetic oligonucleotide
  Antisense strand to SEQ ID NO: 1415714
uaauaaaccaaggagauaa

SEQ ID NO: 1415716 - RNA, 19 nt, Artificial Sequence
  Description of Artificial Sequence: Synthetic oligonucleotide
  Sense strand starting at position 240 of SEQ ID NO: 1243424
aucuccuugguuuauuaua

SEQ ID NO: 1415717 - RNA, 19 nt, Artificial Sequence
  Description of Artificial Sequence: Synthetic oligonucleotide
  Antisense strand to SEQ ID NO: 1415716
uauaauaaaccaaggagau

SEQ ID NO: 1415718 - RNA, 19 nt, Artificial Sequence
  Description of Artificial Sequence: Synthetic oligonucleotide
  Sense strand starting at position 304 of SEQ ID NO: 1243424
uagagugcucccgaauggu

SEQ ID NO: 1415719 - RNA, 19 nt, Artificial Sequence
  Description of Artificial Sequence: Synthetic oligonucleotide
  Antisense strand to SEQ ID NO: 1415718
accauucgggagcacucua

SEQ ID NO: 1415720 - RNA, 19 nt, Artificial Sequence
  Description of Artificial Sequence: Synthetic oligonucleotide
  Sense strand starting at position 463 of SEQ ID NO: 1243424
gcuuucuugcuugcucaau

SEQ ID NO: 1415721 - RNA, 19 nt, Artificial Sequence
  Description of Artificial Sequence: Synthetic oligonucleotide
  Antisense strand to SEQ ID NO: 1415720
auugagcaagcaagaaagc

SEQ ID NO: 1415722 - RNA, 19 nt, Artificial Sequence
  Description of Artificial Sequence: Synthetic oligonucleotide
  Sense strand starting at position 521 of SEQ ID NO: 1243424
gaguaagugcuguauccuc

SEQ ID NO: 1415723 - RNA, 19 nt, Artificial Sequence
  Description of Artificial Sequence: Synthetic oligonucleotide
  Antisense strand to SEQ ID NO: 1415722
gaggauacagcacuuacuc

SEQ ID NO: 1415724 - RNA, 19 nt, Artificial Sequence
  Description of Artificial Sequence: Synthetic oligonucleotide
  Sense strand starting at position 526 of SEQ ID NO: 1243424
agugcuguauccucaaaga

SEQ ID NO: 1415725 - RNA, 19 nt, Artificial Sequence
  Description of Artificial Sequence: Synthetic oligonucleotide
  Antisense strand to SEQ ID NO: 1415724
ucuuugaggauacagcacu

SEQ ID NO: 1415726 - RNA, 19 nt, Artificial Sequence
  Description of Artificial Sequence: Synthetic oligonucleotide
  Sense strand starting at position 670 of SEQ ID NO: 1243424
auugauagcugauuccagu

SEQ ID NO: 1415727 - RNA, 19 nt, Artificial Sequence
  Description of Artificial Sequence: Synthetic oligonucleotide
  Antisense strand to SEQ ID NO: 1415726
acuggaaucagcuaucaau

SEQ ID NO: 1415728 - RNA, 19 nt, Artificial Sequence
  Description of Artificial Sequence: Synthetic oligonucleotide
  Sense strand starting at position 715 of SEQ ID NO: 1243424
ggaacagucuaggacaaag

SEQ ID NO: 1415729 - RNA, 19 nt, Artificial Sequence
  Description of Artificial Sequence: Synthetic oligonucleotide
  Antisense strand to SEQ ID NO: 1415728
cuuuguccuagacuguucc

SEQ ID NO: 1415730 - RNA, 19 nt, Artificial Sequence
  Description of Artificial Sequence: Synthetic oligonucleotide
  Sense strand starting at position 806 of SEQ ID NO: 1243424
ggaaauggagcaugcaaau

SEQ ID NO: 1415731 - RNA, 19 nt, Artificial Sequence
  Description of Artificial Sequence: Synthetic oligonucleotide
  Antisense strand to SEQ ID NO: 1415730
auuugcaugcuccauuucc

SEQ ID NO: 1415732 - RNA, 19 nt, Artificial Sequence
  Description of Artificial Sequence: Synthetic oligonucleotide
  Sense strand starting at position 812 of SEQ ID NO: 1243424
ggagcaugcaaauauggua

SEQ ID NO: 1415733 - RNA, 19 nt, Artificial Sequence
  Description of Artificial Sequence: Synthetic oligonucleotide
  Antisense strand to SEQ ID NO: 1415732
uaccauauuugcaugcucc

SEQ ID NO: 1415734 - RNA, 19 nt, Artificial Sequence
  Description of Artificial Sequence: Synthetic oligonucleotide
  Sense strand starting at position 850 of SEQ ID NO: 1243424
ugacauauuugcuacaggu

SEQ ID NO: 1415735 - RNA, 19 nt, Artificial Sequence
  Description of Artificial Sequence: Synthetic oligonucleotide
  Antisense strand to SEQ ID NO: 1415734
accuguagcaaauauguca

SEQ ID NO: 1415736 - RNA, 19 nt, Artificial Sequence
  Description of Artificial Sequence: Synthetic oligonucleotide
  Sense strand starting at position 857 of SEQ ID NO: 1243424
uuugcuacagguugacaua

SEQ ID NO: 1415737 - RNA, 19 nt, Artificial Sequence
  Description of Artificial Sequence: Synthetic oligonucleotide
  Antisense strand to SEQ ID NO: 1415736
uaugucaaccuguagcaaa

SEQ ID NO: 1415738 - RNA, 19 nt, Artificial Sequence
  Description of Artificial Sequence: Synthetic oligonucleotide
  Sense strand starting at position 866 of SEQ ID NO: 1243424
gguugacauacacgauaag

SEQ ID NO: 1415739 - RNA, 19 nt, Artificial Sequence
  Description of Artificial Sequence: Synthetic oligonucleotide
  Antisense strand to SEQ ID NO: 1415738
cuuaucguguaugucaacc

SEQ ID NO: 1415740 - RNA, 19 nt, Artificial Sequence
  Description of Artificial Sequence: Synthetic oligonucleotide
  Sense strand starting at position 1071 of SEQ ID NO: 1243424
augucagaguacuuccacu

SEQ ID NO: 1415741 - RNA, 19 nt, Artificial Sequence
  Description of Artificial Sequence: Synthetic oligonucleotide
  Antisense strand to SEQ ID NO: 1415740
aguggaaguacucugacau

SEQ ID NO: 1415742 - RNA, 19 nt, Artificial Sequence
  Description of Artificial Sequence: Synthetic oligonucleotide
  Sense strand starting at position 1168 of SEQ ID NO: 1243424
gagcaauuaacagguggga

SEQ ID NO: 1415743 - RNA, 19 nt, Artificial Sequence
  Description of Artificial Sequence: Synthetic oligonucleotide
  Antisense strand to SEQ ID NO: 1415742
ucccaccuguuaauugcuc

SEQ ID NO: 1415744 - RNA, 19 nt, Artificial Sequence
  Description of Artificial Sequence: Synthetic oligonucleotide
  Sense strand starting at position 1170 of SEQ ID NO: 1243424
gcaauuaacaggugggaga

SEQ ID NO: 1415745 - RNA, 19 nt, Artificial Sequence
  Description of Artificial Sequence: Synthetic oligonucleotide
  Antisense strand to SEQ ID NO: 1415744
ucucccaccuguuaauugc

SEQ ID NO: 1415746 - RNA, 19 nt, Artificial Sequence
  Description of Artificial Sequence: Synthetic oligonucleotide
  Sense strand starting at position 1608 of SEQ ID NO: 1243424
gcaugaugucccggaucug

SEQ ID NO: 1415747 - RNA, 19 nt, Artificial Sequence
  Description of Artificial Sequence: Synthetic oligonucleotide
  Antisense strand to SEQ ID NO: 1415746
cagauccgggacaucaugc

SEQ ID NO: 1415748 - RNA, 19 nt, Artificial Sequence
  Description of Artificial Sequence: Synthetic oligonucleotide
  Sense strand starting at position 1617 of SEQ ID NO: 1243424
cccggaucugucugaaguc

SEQ ID NO: 1415749 - RNA, 19 nt, Artificial Sequence
  Description of Artificial Sequence: Synthetic oligonucleotide
  Antisense strand to SEQ ID NO: 1415748
gacuucagacagauccggg

SEQ ID NO: 1415750 - RNA, 19 nt, Artificial Sequence
  Description of Artificial Sequence: Synthetic oligonucleotide
  Sense strand starting at position 2147 of SEQ ID NO: 1243424
ucaacuucgcuccgaauuu

SEQ ID NO: 1415751 - RNA, 19 nt, Artificial Sequence
  Description of Artificial Sequence: Synthetic oligonucleotide
  Antisense strand to SEQ ID NO: 1415750
aaauucggagcgaaguuga

SEQ ID NO: 1415752 - RNA, 19 nt, Artificial Sequence
  Description of Artificial Sequence: Synthetic oligonucleotide
  Sense strand starting at position 2192 of SEQ ID NO: 1243424
cgcggaacaguguauuaga

SEQ ID NO: 1415753 - RNA, 19 nt, Artificial Sequence
  Description of Artificial Sequence: Synthetic oligonucleotide
  Antisense strand to SEQ ID NO: 1415752
ucuaauacacuguuccgcg

SEQ ID NO: 1415754 - RNA, 19 nt, Artificial Sequence
  Description of Artificial Sequence: Synthetic oligonucleotide
  Sense strand starting at position 2638 of SEQ ID NO: 1243424
agcaaagaccagugugaua

SEQ ID NO: 1415755 - RNA, 19 nt, Artificial Sequence
  Description of Artificial Sequence: Synthetic oligonucleotide
  Antisense strand to SEQ ID NO: 1415754
uaucacacuggucuuugcu

SEQ ID NO: 1415756 - RNA, 19 nt, Artificial Sequence
  Description of Artificial Sequence: Synthetic oligonucleotide
  Sense strand starting at position 2807 of SEQ ID NO: 1243424
ucugauacucuuggaauuc

SEQ ID NO: 1415757 - RNA, 19 nt, Artificial Sequence
  Description of Artificial Sequence: Synthetic oligonucleotide
  Antisense strand to SEQ ID NO: 1415756
gaauuccaagaguaucaga

SEQ ID NO: 1415758 - RNA, 19 nt, Artificial Sequence
  Description of Artificial Sequence: Synthetic oligonucleotide
  Sense strand starting at position 3013 of SEQ ID NO: 1243424
guggccauguccuugagga

SEQ ID NO: 1415759 - RNA, 19 nt, Artificial Sequence
  Description of Artificial Sequence: Synthetic oligonucleotide
  Antisense strand to SEQ ID NO: 1415758
uccucaaggacauggccac

SEQ ID NO: 1415760 - RNA, 19 nt, Artificial Sequence
  Description of Artificial Sequence: Synthetic oligonucleotide
  Sense strand starting at position 3014 of SEQ ID NO: 1243424
uggccauguccuugaggau

SEQ ID NO: 1415761 - RNA, 19 nt, Artificial Sequence
  Description of Artificial Sequence: Synthetic oligonucleotide
  Antisense strand to SEQ ID NO: 1415760
auccucaaggacauggcca

SEQ ID NO: 1415762 - RNA, 19 nt, Artificial Sequence
  Description of Artificial Sequence: Synthetic oligonucleotide
  Sense strand starting at position 3015 of SEQ ID NO: 1243424
ggccauguccuugaggaug

SEQ ID NO: 1415763 - RNA, 19 nt, Artificial Sequence
  Description of Artificial Sequence: Synthetic oligonucleotide
  Antisense strand to SEQ ID NO: 1415762
cauccucaaggacauggcc

SEQ ID NO: 1415764 - RNA, 19 nt, Artificial Sequence
  Description of Artificial Sequence: Synthetic oligonucleotide
  Sense strand starting at position 3020 of SEQ ID NO: 1243424
uguccuugaggaugugaau

SEQ ID NO: 1415765 - RNA, 19 nt, Artificial Sequence
  Description of Artificial Sequence: Synthetic oligonucleotide
  Antisense strand to SEQ ID NO: 1415764
auucacauccucaaggaca

SEQ ID NO: 1415766 - RNA, 19 nt, Artificial Sequence
  Description of Artificial Sequence: Synthetic oligonucleotide
  Sense strand starting at position 3031 of SEQ ID NO: 1243424
augugaaucccaugcugga

SEQ ID NO: 1415767 - RNA, 19 nt, Artificial Sequence
  Description of Artificial Sequence: Synthetic oligonucleotide
  Antisense strand to SEQ ID NO: 1415766
uccagcaugggauucacau

SEQ ID NO: 1415768 - RNA, 19 nt, Artificial Sequence
  Description of Artificial Sequence: Synthetic oligonucleotide
  Sense strand starting at position 3040 of SEQ ID NO: 1243424
ccaugcuggaccugugaau

SEQ ID NO: 1415769 - RNA, 19 nt, Artificial Sequence
  Description of Artificial Sequence: Synthetic oligonucleotide
  Antisense strand to SEQ ID NO: 1415768
auucacagguccagcaugg

SEQ ID NO: 1415770 - RNA, 19 nt, Artificial Sequence
  Description of Artificial Sequence: Synthetic oligonucleotide
  Sense strand starting at position 3067 of SEQ ID NO: 1243424
ggaccuuaauauguauagu

SEQ ID NO: 1415771 - RNA, 19 nt, Artificial Sequence
  Description of Artificial Sequence: Synthetic oligonucleotide
  Antisense strand to SEQ ID NO: 1415770
acuauacauauuaaggucc

SEQ ID NO: 1415772 - RNA, 19 nt, Artificial Sequence
  Description of Artificial Sequence: Synthetic oligonucleotide
  Sense strand starting at position 3070 of SEQ ID NO: 1243424
ccuuaauauguauaguauc

SEQ ID NO: 1415773 - RNA, 19 nt, Artificial Sequence
  Description of Artificial Sequence: Synthetic oligonucleotide
  Antisense strand to SEQ ID NO: 1415772
gauacuauacauauuaagg

SEQ ID NO: 1415774 - RNA, 19 nt, Artificial Sequence
  Description of Artificial Sequence: Synthetic oligonucleotide
  Sense strand starting at position 3076 of SEQ ID NO: 1243424
uauguauaguauccuggaa

SEQ ID NO: 1415775 - RNA, 19 nt, Artificial Sequence
  Description of Artificial Sequence: Synthetic oligonucleotide
  Antisense strand to SEQ ID NO: 1415774
uuccaggauacuauacaua

SEQ ID NO: 1415776 - RNA, 19 nt, Artificial Sequence
  Description of Artificial Sequence: Synthetic oligonucleotide
  Sense strand starting at position 3148 of SEQ ID NO: 1243424
ucugacugaucuuugguga

SEQ ID NO: 1415777 - RNA, 19 nt, Artificial Sequence
  Description of Artificial Sequence: Synthetic oligonucleotide
  Antisense strand to SEQ ID NO: 1415776
ucaccaaagaucagucaga

SEQ ID NO: 1415778 - RNA, 19 nt, Artificial Sequence
  Description of Artificial Sequence: Synthetic oligonucleotide
  Sense strand starting at position 3149 of SEQ ID NO: 1243424
cugacugaucuuuggugau

SEQ ID NO: 1415779 - RNA, 19 nt, Artificial Sequence
  Description of Artificial Sequence: Synthetic oligonucleotide
  Antisense strand to SEQ ID NO: 1415778
aucaccaaagaucagucag

SEQ ID NO: 1415780 - RNA, 19 nt, Artificial Sequence
  Description of Artificial Sequence: Synthetic oligonucleotide
  Sense strand starting at position 3151 of SEQ ID NO: 1243424
gacugaucuuuggugauca

SEQ ID NO: 1415781 - RNA, 19 nt, Artificial Sequence
  Description of Artificial Sequence: Synthetic oligonucleotide
  Antisense strand to SEQ ID NO: 1415780
ugaucaccaaagaucaguc

SEQ ID NO: 1415782 - RNA, 19 nt, Artificial Sequence
  Description of Artificial Sequence: Synthetic oligonucleotide
  Sense strand starting at position 3153 of SEQ ID NO: 1243424
cugaucuuuggugaucaua

SEQ ID NO: 1415783 - RNA, 19 nt, Artificial Sequence
  Description of Artificial Sequence: Synthetic oligonucleotide
  Antisense strand to SEQ ID NO: 1415782
uaugaucaccaaagaucag

SEQ ID NO: 1415784 - RNA, 19 nt, Artificial Sequence
  Description of Artificial Sequence: Synthetic oligonucleotide
  Sense strand starting at position 3155 of SEQ ID NO: 1243424
gaucuuuggugaucauagc

SEQ ID NO: 1415785 - RNA, 19 nt, Artificial Sequence
  Description of Artificial Sequence: Synthetic oligonucleotide
  Antisense strand to SEQ ID NO: 1415784
gcuaugaucaccaaagauc

SEQ ID NO: 1415786 - RNA, 19 nt, Artificial Sequence
  Description of Artificial Sequence: Synthetic oligonucleotide
  Sense strand starting at position 3569 of SEQ ID NO: 1243424
cucuguaaugcagguugga

SEQ ID NO: 1415787 - RNA, 19 nt, Artificial Sequence
  Description of Artificial Sequence: Synthetic oligonucleotide
  Antisense strand to SEQ ID NO: 1415786
uccaaccugcauuacagag

SEQ ID NO: 1415788 - RNA, 19 nt, Artificial Sequence
  Description of Artificial Sequence: Synthetic oligonucleotide
  Sense strand starting at position 21 of SEQ ID NO: 1243425
acgccagagcauuaaagua

SEQ ID NO: 1415789 - RNA, 19 nt, Artificial Sequence
  Description of Artificial Sequence: Synthetic oligonucleotide
  Antisense strand to SEQ ID NO: 1415788
uacuuuaaugcucuggcgu

SEQ ID NO: 1415790 - RNA, 19 nt, Artificial Sequence
  Description of Artificial Sequence: Synthetic oligonucleotide
  Sense strand starting at position 135 of SEQ ID NO: 1243425
gccaguuagcccgugggua

SEQ ID NO: 1415791 - RNA, 19 nt, Artificial Sequence
  Description of Artificial Sequence: Synthetic oligonucleotide
  Antisense strand to SEQ ID NO: 1415790
uacccacgggcuaacuggc

SEQ ID NO: 1415792 - RNA, 19 nt, Artificial Sequence
  Description of Artificial Sequence: Synthetic oligonucleotide
  Sense strand starting at position 527 of SEQ ID NO: 1243425
ucaauauucuagucaaugg

SEQ ID NO: 1415793 - RNA, 19 nt, Artificial Sequence
  Description of Artificial Sequence: Synthetic oligonucleotide
  Antisense strand to SEQ ID NO: 1415792
ccauugacuagaauauuga

SEQ ID NO: 1415794 - RNA, 19 nt, Artificial Sequence
  Description of Artificial Sequence: Synthetic oligonucleotide
  Sense strand starting at position 566 of SEQ ID NO: 1243425
ccaagaagcugggugugau

SEQ ID NO: 1415795 - RNA, 19 nt, Artificial Sequence
  Description of Artificial Sequence: Synthetic oligonucleotide
  Antisense strand to SEQ ID NO: 1415794
aucacacccagcuucuugg

SEQ ID NO: 1415796 - RNA, 19 nt, Artificial Sequence
  Description of Artificial Sequence: Synthetic oligonucleotide
  Sense strand starting at position 652 of SEQ ID NO: 1243425
gagaccugucagggcaaca

SEQ ID NO: 1415797 - RNA, 19 nt, Artificial Sequence
  Description of Artificial Sequence: Synthetic oligonucleotide
  Antisense strand to SEQ ID NO: 1415796
uguugcccugacaggucuc

SEQ ID NO: 1415798 - RNA, 19 nt, Artificial Sequence
  Description of Artificial Sequence: Synthetic oligonucleotide
  Sense strand starting at position 1045 of SEQ ID NO: 1243425
ugcaaauuuacccggaugu

SEQ ID NO: 1415799 - RNA, 19 nt, Artificial Sequence
  Description of Artificial Sequence: Synthetic oligonucleotide
  Antisense strand to SEQ ID NO: 1415798
acauccggguaaauuugca

SEQ ID NO: 1415800 - RNA, 19 nt, Artificial Sequence
  Description of Artificial Sequence: Synthetic oligonucleotide
  Sense strand starting at position 1046 of SEQ ID NO: 1243425
gcaaauuuacccggauguc

SEQ ID NO: 1415801 - RNA, 19 nt, Artificial Sequence
  Description of Artificial Sequence: Synthetic oligonucleotide
  Antisense strand to SEQ ID NO: 1415800
gacauccggguaaauuugc

SEQ ID NO: 1415802 - RNA, 19 nt, Artificial Sequence
  Description of Artificial Sequence: Synthetic oligonucleotide
  Sense strand starting at position 2036 of SEQ ID NO: 1243425
cgcaccuugaccuggaaau

SEQ ID NO: 1415803 - RNA, 19 nt, Artificial Sequence
  Description of Artificial Sequence: Synthetic oligonucleotide
  Antisense strand to SEQ ID NO: 1415802
auuuccaggucaaggugcg

SEQ ID NO: 1415804 - RNA, 19 nt, Artificial Sequence
  Description of Artificial Sequence: Synthetic oligonucleotide
  Sense strand starting at position 2037 of SEQ ID NO: 1243425
gcaccuugaccuggaaauu

SEQ ID NO: 1415805 - RNA, 19 nt, Artificial Sequence
  Description of Artificial Sequence: Synthetic oligonucleotide
  Antisense strand to SEQ ID NO: 1415804
aauuuccaggucaaggugc

SEQ ID NO: 1415806 - RNA, 19 nt, Artificial Sequence
  Description of Artificial Sequence: Synthetic oligonucleotide
  Sense strand starting at position 2166 of SEQ ID NO: 1243425
ugucgcugcgagucuuuaa

SEQ ID NO: 1415807 - RNA, 19 nt, Artificial Sequence
  Description of Artificial Sequence: Synthetic oligonucleotide
  Antisense strand to SEQ ID NO: 1415806
uuaaagacucgcagcgaca

SEQ ID NO: 1415808 - RNA, 19 nt, Artificial Sequence
  Description of Artificial Sequence: Synthetic oligonucleotide
  Sense strand starting at position 2167 of SEQ ID NO: 1243425
gucgcugcgagucuuuaaa

SEQ ID NO: 1415809 - RNA, 19 nt, Artificial Sequence
  Description of Artificial Sequence: Synthetic oligonucleotide
  Antisense strand to SEQ ID NO: 1415808
uuuaaagacucgcagcgac

SEQ ID NO: 1415810 - RNA, 19 nt, Artificial Sequence
  Description of Artificial Sequence: Synthetic oligonucleotide
  Sense strand starting at position 2184 of SEQ ID NO: 1243425
aagccuuugcgguaggaga

SEQ ID NO: 1415811 - RNA, 19 nt, Artificial Sequence
  Description of Artificial Sequence: Synthetic oligonucleotide
  Antisense strand to SEQ ID NO: 1415810
ucuccuaccgcaaaggcuu

SEQ ID NO: 1415812 - RNA, 19 nt, Artificial Sequence
  Description of Artificial Sequence: Synthetic oligonucleotide
  Sense strand starting at position 2370 of SEQ ID NO: 1243425
cgggaugcucccuaucaua

SEQ ID NO: 1415813 - RNA, 19 nt, Artificial Sequence
  Description of Artificial Sequence: Synthetic oligonucleotide
  Antisense strand to SEQ ID NO: 1415812
uaugauagggagcaucccg

SEQ ID NO: 1415814 - RNA, 19 nt, Artificial Sequence
  Description of Artificial Sequence: Synthetic oligonucleotide
  Sense strand starting at position 2515 of SEQ ID NO: 1243425
cucaguaaacguggaaguu

SEQ ID NO: 1415815 - RNA, 19 nt, Artificial Sequence
  Description of Artificial Sequence: Synthetic oligonucleotide
  Antisense strand to SEQ ID NO: 1415814
aacuuccacguuuacugag

SEQ ID NO: 1415816 - RNA, 19 nt, Artificial Sequence
  Description of Artificial Sequence: Synthetic oligonucleotide
  Sense strand starting at position 2524 of SEQ ID NO: 1243425
cguggaaguuggagaaaug

SEQ ID NO: 1415817 - RNA, 19 nt, Artificial Sequence
  Description of Artificial Sequence: Synthetic oligonucleotide
  Antisense strand to SEQ ID NO: 1415816
cauuucuccaacuuccacg

SEQ ID NO: 1415818 - RNA, 19 nt, Artificial Sequence
  Description of Artificial Sequence: Synthetic oligonucleotide
  Sense strand starting at position 2589 of SEQ ID NO: 1243425
ucacuaaggucauucugaa

SEQ ID NO: 1415819 - RNA, 19 nt, Artificial Sequence
  Description of Artificial Sequence: Synthetic oligonucleotide
  Antisense strand to SEQ ID NO: 1415818
uucagaaugaccuuaguga

SEQ ID NO: 1415820 - RNA, 19 nt, Artificial Sequence
  Description of Artificial Sequence: Synthetic oligonucleotide
  Sense strand starting at position 2599 of SEQ ID NO: 1243425
cauucugaacguuauguau

SEQ ID NO: 1415821 - RNA, 19 nt, Artificial Sequence
  Description of Artificial Sequence: Synthetic oligonucleotide
  Antisense strand to SEQ ID NO: 1415820
auacauaacguucagaaug

SEQ ID NO: 1415822 - RNA, 19 nt, Artificial Sequence
  Description of Artificial Sequence: Synthetic oligonucleotide
  Sense strand starting at position 2602 of SEQ ID NO: 1243425
ucugaacguuauguauuaa

SEQ ID NO: 1415823 - RNA, 19 nt, Artificial Sequence
  Description of Artificial Sequence: Synthetic oligonucleotide
  Antisense strand to SEQ ID NO: 1415822
uuaauacauaacguucaga

SEQ ID NO: 1415824 - RNA, 19 nt, Artificial Sequence
  Description of Artificial Sequence: Synthetic oligonucleotide
  Sense strand starting at position 2667 of SEQ ID NO: 1243425
ucaguagauaccugugagu

SEQ ID NO: 1415825 - RNA, 19 nt, Artificial Sequence
  Description of Artificial Sequence: Synthetic oligonucleotide
  Antisense strand to SEQ ID NO: 1415824
acucacagguaucuacuga

SEQ ID NO: 1415826 - RNA, 19 nt, Artificial Sequence
  Description of Artificial Sequence: Synthetic oligonucleotide
  Sense strand starting at position 2669 of SEQ ID NO: 1243425
aguagauaccugugaguau

SEQ ID NO: 1415827 - RNA, 19 nt, Artificial Sequence
  Description of Artificial Sequence: Synthetic oligonucleotide
  Antisense strand to SEQ ID NO: 1415826
auacucacagguaucuacu

SEQ ID NO: 1415828 - RNA, 19 nt, Artificial Sequence
  Description of Artificial Sequence: Synthetic oligonucleotide
  Sense strand starting at position 2672 of SEQ ID NO: 1243425
agauaccugugaguauuaa

SEQ ID NO: 1415829 - RNA, 19 nt, Artificial Sequence
  Description of Artificial Sequence: Synthetic oligonucleotide
  Antisense strand to SEQ ID NO: 1415828
uuaauacucacagguaucu

SEQ ID NO: 1415830 - RNA, 19 nt, Artificial Sequence
  Description of Artificial Sequence: Synthetic oligonucleotide
  Sense strand starting at position 2680 of SEQ ID NO: 1243425
gugaguauuaagugaucaa

SEQ ID NO: 1415831 - RNA, 19 nt, Artificial Sequence
  Description of Artificial Sequence: Synthetic oligonucleotide
  Antisense strand to SEQ ID NO: 1415830
uugaucacuuaauacucac

SEQ ID NO: 1415832 - RNA, 19 nt, Artificial Sequence
  Description of Artificial Sequence: Synthetic oligonucleotide
  Sense strand starting at position 2683 of SEQ ID NO: 1243425
aguauuaagugaucaacgu

SEQ ID NO: 1415833 - RNA, 19 nt, Artificial Sequence
  Description of Artificial Sequence: Synthetic oligonucleotide
  Antisense strand to SEQ ID NO: 1415832
acguugaucacuuaauacu

SEQ ID NO: 1415834 - RNA, 19 nt, Artificial Sequence
  Description of Artificial Sequence: Synthetic oligonucleotide
  Sense strand starting at position 2684 of SEQ ID NO: 1243425
guauuaagugaucaacguc

SEQ ID NO: 1415835 - RNA, 19 nt, Artificial Sequence
  Description of Artificial Sequence: Synthetic oligonucleotide
  Antisense strand to SEQ ID NO: 1415834
gacguugaucacuuaauac

SEQ ID NO: 1415836 - RNA, 19 nt, Artificial Sequence
  Description of Artificial Sequence: Synthetic oligonucleotide
  Sense strand starting at position 2687 of SEQ ID NO: 1243425
uuaagugaucaacgucuaa

SEQ ID NO: 1415837 - RNA, 19 nt, Artificial Sequence
  Description of Artificial Sequence: Synthetic oligonucleotide
  Antisense strand to SEQ ID NO: 1415836
uuagacguugaucacuuaa

SEQ ID NO: 1415838 - RNA, 19 nt, Artificial Sequence
  Description of Artificial Sequence: Synthetic oligonucleotide
  Sense strand starting at position 2691 of SEQ ID NO: 1243425
gugaucaacgucuaacagu

SEQ ID NO: 1415839 - RNA, 19 nt, Artificial Sequence
  Description of Artificial Sequence: Synthetic oligonucleotide
  Antisense strand to SEQ ID NO: 1415838
acuguuagacguugaucac

SEQ ID NO: 1415840 - RNA, 19 nt, Artificial Sequence
  Description of Artificial Sequence: Synthetic oligonucleotide
  Sense strand starting at position 2749 of SEQ ID NO: 1243425
cucccaaaucccuggagua

SEQ ID NO: 1415841 - RNA, 19 nt, Artificial Sequence
  Description of Artificial Sequence: Synthetic oligonucleotide
  Antisense strand to SEQ ID NO: 1415840
uacuccagggauuugggag

SEQ ID NO: 1415842 - RNA, 19 nt, Artificial Sequence
  Description of Artificial Sequence: Synthetic oligonucleotide
  Sense strand starting at position 2750 of SEQ ID NO: 1243425
ucccaaaucccuggaguau

SEQ ID NO: 1415843 - RNA, 19 nt, Artificial Sequence
  Description of Artificial Sequence: Synthetic oligonucleotide
  Antisense strand to SEQ ID NO: 1415842
auacuccagggauuuggga

SEQ ID NO: 1415844 - RNA, 19 nt, Artificial Sequence
  Description of Artificial Sequence: Synthetic oligonucleotide
  Sense strand starting at position 2761 of SEQ ID NO: 1243425
uggaguauguagguuaaca

SEQ ID NO: 1415845 - RNA, 19 nt, Artificial Sequence
  Description of Artificial Sequence: Synthetic oligonucleotide
  Antisense strand to SEQ ID NO: 1415844
uguuaaccuacauacucca

SEQ ID NO: 1415846 - RNA, 19 nt, Artificial Sequence
  Description of Artificial Sequence: Synthetic oligonucleotide
  Sense strand starting at position 2763 of SEQ ID NO: 1243425
gaguauguagguuaacaua

SEQ ID NO: 1415847 - RNA, 19 nt, Artificial Sequence
  Description of Artificial Sequence: Synthetic oligonucleotide
  Antisense strand to SEQ ID NO: 1415846
uauguuaaccuacauacuc

SEQ ID NO: 1415848 - RNA, 19 nt, Artificial Sequence
  Description of Artificial Sequence: Synthetic oligonucleotide
  Sense strand starting at position 2805 of SEQ ID NO: 1243425
uuaacuggcugucuuauau

SEQ ID NO: 1415849 - RNA, 19 nt, Artificial Sequence
  Description of Artificial Sequence: Synthetic oligonucleotide
  Antisense strand to SEQ ID NO: 1415848
auauaagacagccaguuaa

SEQ ID NO: 1415850 - RNA, 19 nt, Artificial Sequence
  Description of Artificial Sequence: Synthetic oligonucleotide
  Sense strand starting at position 2874 of SEQ ID NO: 1243425
uuaucauugcuaggaagau

SEQ ID NO: 1415851 - RNA, 19 nt, Artificial Sequence
  Description of Artificial Sequence: Synthetic oligonucleotide
  Antisense strand to SEQ ID NO: 1415850
aucuuccuagcaaugauaa

SEQ ID NO: 1415852 - RNA, 19 nt, Artificial Sequence
  Description of Artificial Sequence: Synthetic oligonucleotide
  Sense strand starting at position 2900 of SEQ ID NO: 1243425
aguaccauuccagaggcau

SEQ ID NO: 1415853 - RNA, 19 nt, Artificial Sequence
  Description of Artificial Sequence: Synthetic oligonucleotide
  Antisense strand to SEQ ID NO: 1415852
augccucuggaaugguacu

SEQ ID NO: 1415854 - RNA, 19 nt, Artificial Sequence
  Description of Artificial Sequence: Synthetic oligonucleotide
  Sense strand starting at position 3047 of SEQ ID NO: 1243425
cugggagacuugagguagu

SEQ ID NO: 1415855 - RNA, 19 nt, Artificial Sequence
  Description of Artificial Sequence: Synthetic oligonucleotide
  Antisense strand to SEQ ID NO: 1415854
acuaccucaagucucccag

SEQ ID NO: 1415856 - RNA, 19 nt, Artificial Sequence
  Description of Artificial Sequence: Synthetic oligonucleotide
  Sense strand starting at position 3540 of SEQ ID NO: 1243425
agagaaauugucgaaguuu

SEQ ID NO: 1415857 - RNA, 19 nt, Artificial Sequence
  Description of Artificial Sequence: Synthetic oligonucleotide
  Antisense strand to SEQ ID NO: 1415856
aaacuucgacaauuucucu

SEQ ID NO: 1415858 - RNA, 19 nt, Artificial Sequence
  Description of Artificial Sequence: Synthetic oligonucleotide
  Sense strand starting at position 3595 of SEQ ID NO: 1243425
agagcaauccgauggacuu

SEQ ID NO: 1415859 - RNA, 19 nt, Artificial Sequence
  Description of Artificial Sequence: Synthetic oligonucleotide
  Antisense strand to SEQ ID NO: 1415858
aaguccaucggauugcucu

SEQ ID NO: 1415860 - RNA, 19 nt, Artificial Sequence
  Description of Artificial Sequence: Synthetic oligonucleotide
  Sense strand starting at position 3596 of SEQ ID NO: 1243425
gagcaauccgauggacuuc

SEQ ID NO: 1415861 - RNA, 19 nt, Artificial Sequence
  Description of Artificial Sequence: Synthetic oligonucleotide
  Antisense strand to SEQ ID NO: 1415860
gaaguccaucggauugcuc

SEQ ID NO: 1415862 - RNA, 19 nt, Artificial Sequence
  Description of Artificial Sequence: Synthetic oligonucleotide
  Sense strand starting at position 3695 of SEQ ID NO: 1243425
ugugguauaucugugauau

SEQ ID NO: 1415863 - RNA, 19 nt, Artificial Sequence
  Description of Artificial Sequence: Synthetic oligonucleotide
  Antisense strand to SEQ ID NO: 1415862
auaucacagauauaccaca

SEQ ID NO: 1415864 - RNA, 19 nt, Artificial Sequence
  Description of Artificial Sequence: Synthetic oligonucleotide
  Sense strand starting at position 3696 of SEQ ID NO: 1243425
gugguauaucugugauaua

SEQ ID NO: 1415865 - RNA, 19 nt, Artificial Sequence
  Description of Artificial Sequence: Synthetic oligonucleotide
  Antisense strand to SEQ ID NO: 1415864
uauaucacagauauaccac

SEQ ID NO: 1415866 - RNA, 19 nt, Artificial Sequence
  Description of Artificial Sequence: Synthetic oligonucleotide
  Sense strand starting at position 3774 of SEQ ID NO: 1243425
gaacuuuaggacuguauau

SEQ ID NO: 1415867 - RNA, 19 nt, Artificial Sequence
  Description of Artificial Sequence: Synthetic oligonucleotide
  Antisense strand to SEQ ID NO: 1415866
auauacaguccuaaaguuc

SEQ ID NO: 1415868 - RNA, 19 nt, Artificial Sequence
  Description of Artificial Sequence: Synthetic oligonucleotide
  Sense strand starting at position 146 of SEQ ID NO: 1243426
gcccaagucuagguauuga

SEQ ID NO: 1415869 - RNA, 19 nt, Artificial Sequence
  Description of Artificial Sequence: Synthetic oligonucleotide
  Antisense strand to SEQ ID NO: 1415868
ucaauaccuagacuugggc

SEQ ID NO: 1415870 - RNA, 19 nt, Artificial Sequence
  Description of Artificial Sequence: Synthetic oligonucleotide
  Sense strand starting at position 154 of SEQ ID NO: 1243426
cuagguauugacugggaac

SEQ ID NO: 1415871 - RNA, 19 nt, Artificial Sequence
  Description of Artificial Sequence: Synthetic oligonucleotide
  Antisense strand to SEQ ID NO: 1415870
guucccagucaauaccuag

SEQ ID NO: 1415872 - RNA, 19 nt, Artificial Sequence
  Description of Artificial Sequence: Synthetic oligonucleotide
  Sense strand starting at position 156 of SEQ ID NO: 1243426
agguauugacugggaacuu

SEQ ID NO: 1415873 - RNA, 19 nt, Artificial Sequence
  Description of Artificial Sequence: Synthetic oligonucleotide
  Antisense strand to SEQ ID NO: 1415872
aaguucccagucaauaccu

SEQ ID NO: 1415874 - RNA, 19 nt, Artificial Sequence
  Description of Artificial Sequence: Synthetic oligonucleotide
  Sense strand starting at position 503 of SEQ ID NO: 1243426
cgaucagaguuccaggcau

SEQ ID NO: 1415875 - RNA, 19 nt, Artificial Sequence
  Description of Artificial Sequence: Synthetic oligonucleotide
  Antisense strand to SEQ ID NO: 1415874
augccuggaacucugaucg

SEQ ID NO: 1415876 - RNA, 19 nt, Artificial Sequence
  Description of Artificial Sequence: Synthetic oligonucleotide
  Sense strand starting at position 505 of SEQ ID NO: 1243426
aucagaguuccaggcaugu

SEQ ID NO: 1415877 - RNA, 19 nt, Artificial Sequence
  Description of Artificial Sequence: Synthetic oligonucleotide
  Antisense strand to SEQ ID NO: 1415876
acaugccuggaacucugau

SEQ ID NO: 1415878 - RNA, 19 nt, Artificial Sequence
  Description of Artificial Sequence: Synthetic oligonucleotide
  Sense strand starting at position 702 of SEQ ID NO: 1243426
ggcguuggaugggaaaguu

SEQ ID NO: 1415879 - RNA, 19 nt, Artificial Sequence
  Description of Artificial Sequence: Synthetic oligonucleotide
  Antisense strand to SEQ ID NO: 1415878
aacuuucccauccaacgcc

SEQ ID NO: 1415880 - RNA, 19 nt, Artificial Sequence
  Description of Artificial Sequence: Synthetic oligonucleotide
  Sense strand starting at position 839 of SEQ ID NO: 1243426
ccgagcuuugugcagggaa

SEQ ID NO: 1415881 - RNA, 19 nt, Artificial Sequence
  Description of Artificial Sequence: Synthetic oligonucleotide
  Antisense strand to SEQ ID NO: 1415880
uucccugcacaaagcucgg

SEQ ID NO: 1415882 - RNA, 19 nt, Artificial Sequence
  Description of Artificial Sequence: Synthetic oligonucleotide
  Sense strand starting at position 840 of SEQ ID NO: 1243426
cgagcuuugugcagggaaa

SEQ ID NO: 1415883 - RNA, 19 nt, Artificial Sequence
  Description of Artificial Sequence: Synthetic oligonucleotide
  Antisense strand to SEQ ID NO: 1415882
uuucccugcacaaagcucg

SEQ ID NO: 1415884 - RNA, 19 nt, Artificial Sequence
  Description of Artificial Sequence: Synthetic oligonucleotide
  Sense strand starting at position 841 of SEQ ID NO: 1243426
gagcuuugugcagggaaag

SEQ ID NO: 1415885 - RNA, 19 nt, Artificial Sequence
  Description of Artificial Sequence: Synthetic oligonucleotide
  Antisense strand to SEQ ID NO: 1415884
cuuucccugcacaaagcuc

SEQ ID NO: 1415886 - RNA, 19 nt, Artificial Sequence
  Description of Artificial Sequence: Synthetic oligonucleotide
  Sense strand starting at position 1272 of SEQ ID NO: 1243426
gaccucagaucccgaggaa

SEQ ID NO: 1415887 - RNA, 19 nt, Artificial Sequence
  Description of Artificial Sequence: Synthetic oligonucleotide
  Antisense strand to SEQ ID NO: 1415886
uuccucgggaucugagguc

SEQ ID NO: 1415888 - RNA, 19 nt, Artificial Sequence
  Description of Artificial Sequence: Synthetic oligonucleotide
  Sense strand starting at position 1389 of SEQ ID NO: 1243426
gugggucuguuugcaauuu

SEQ ID NO: 1415889 - RNA, 19 nt, Artificial Sequence
  Description of Artificial Sequence: Synthetic oligonucleotide
  Antisense strand to SEQ ID NO: 1415888
aaauugcaaacagacccac

SEQ ID NO: 1415890 - RNA, 19 nt, Artificial Sequence
  Description of Artificial Sequence: Synthetic oligonucleotide
  Sense strand starting at position 1390 of SEQ ID NO: 1243426
ugggucuguuugcaauuua

SEQ ID NO: 1415891 - RNA, 19 nt, Artificial Sequence
  Description of Artificial Sequence: Synthetic oligonucleotide
  Antisense strand to SEQ ID NO: 1415890
uaaauugcaaacagaccca

SEQ ID NO: 1415892 - RNA, 19 nt, Artificial Sequence
  Description of Artificial Sequence: Synthetic oligonucleotide
  Sense strand starting at position 1693 of SEQ ID NO: 1243426
ccugaaauguugcaaagag

SEQ ID NO: 1415893 - RNA, 19 nt, Artificial Sequence
  Description of Artificial Sequence: Synthetic oligonucleotide
  Antisense strand to SEQ ID NO: 1415892
cucuuugcaacauuucagg

SEQ ID NO: 1415894 - RNA, 19 nt, Artificial Sequence
  Description of Artificial Sequence: Synthetic oligonucleotide
  Sense strand starting at position 1734 of SEQ ID NO: 1243426
ugaaauacuccauagcgau

SEQ ID NO: 1415895 - RNA, 19 nt, Artificial Sequence
  Description of Artificial Sequence: Synthetic oligonucleotide
  Antisense strand to SEQ ID NO: 1415894
aucgcuauggaguauuuca

SEQ ID NO: 1415896 - RNA, 19 nt, Artificial Sequence
  Description of Artificial Sequence: Synthetic oligonucleotide
  Sense strand starting at position 1782 of SEQ ID NO: 1243426
ccgcgaucagccggagaau

SEQ ID NO: 1415897 - RNA, 19 nt, Artificial Sequence
  Description of Artificial Sequence: Synthetic oligonucleotide
  Antisense strand to SEQ ID NO: 1415896
auucuccggcugaucgcgg

SEQ ID NO: 1415898 - RNA, 19 nt, Artificial Sequence
  Description of Artificial Sequence: Synthetic oligonucleotide
  Sense strand starting at position 1998 of SEQ ID NO: 1243426
guguguuugcagcugauca

SEQ ID NO: 1415899 - RNA, 19 nt, Artificial Sequence
  Description of Artificial Sequence: Synthetic oligonucleotide
  Antisense strand to SEQ ID NO: 1415898
ugaucagcugcaaacacac

SEQ ID NO: 1415900 - RNA, 19 nt, Artificial Sequence
  Description of Artificial Sequence: Synthetic oligonucleotide
  Sense strand starting at position 2000 of SEQ ID NO: 1243426
guguuugcagcugaucaga

SEQ ID NO: 1415901 - RNA, 19 nt, Artificial Sequence
  Description of Artificial Sequence: Synthetic oligonucleotide
  Antisense strand to SEQ ID NO: 1415900
ucugaucagcugcaaacac

SEQ ID NO: 1415902 - RNA, 19 nt, Artificial Sequence
  Description of Artificial Sequence: Synthetic oligonucleotide
  Sense strand starting at position 2033 of SEQ ID NO: 1243426
cgggaaacagcuggugaaa

SEQ ID NO: 1415903 - RNA, 19 nt, Artificial Sequence
  Description of Artificial Sequence: Synthetic oligonucleotide
  Antisense strand to SEQ ID NO: 1415902
uuucaccagcuguuucccg

SEQ ID NO: 1415904 - RNA, 19 nt, Artificial Sequence
  Description of Artificial Sequence: Synthetic oligonucleotide
  Sense strand starting at position 2068 of SEQ ID NO: 1243426
gccuccuuccgcggaguaa

SEQ ID NO: 1415905 - RNA, 19 nt, Artificial Sequence
  Description of Artificial Sequence: Synthetic oligonucleotide
  Antisense strand to SEQ ID NO: 1415904
uuacuccgcggaaggaggc

SEQ ID NO: 1415906 - RNA, 19 nt, Artificial Sequence
  Description of Artificial Sequence: Synthetic oligonucleotide
  Sense strand starting at position 2080 of SEQ ID NO: 1243426
ggaguaaggaauugcaugu

SEQ ID NO: 1415907 - RNA, 19 nt, Artificial Sequence
  Description of Artificial Sequence: Synthetic oligonucleotide
  Antisense strand to SEQ ID NO: 1415906
acaugcaauuccuuacucc

SEQ ID NO: 1415908 - RNA, 19 nt, Artificial Sequence
  Description of Artificial Sequence: Synthetic oligonucleotide
  Sense strand starting at position 2589 of SEQ ID NO: 1243426
ccuggaaacuugcgucaca

SEQ ID NO: 1415909 - RNA, 19 nt, Artificial Sequence
  Description of Artificial Sequence: Synthetic oligonucleotide
  Antisense strand to SEQ ID NO: 1415908
ugugacgcaaguuuccagg

SEQ ID NO: 1415910 - RNA, 19 nt, Artificial Sequence
  Description of Artificial Sequence: Synthetic oligonucleotide
  Sense strand starting at position 2700 of SEQ ID NO: 1243426
uccggauccugggaaucuu

SEQ ID NO: 1415911 - RNA, 19 nt, Artificial Sequence
  Description of Artificial Sequence: Synthetic oligonucleotide
  Antisense strand to SEQ ID NO: 1415910
aagauucccaggauccgga

SEQ ID NO: 1415912 - RNA, 19 nt, Artificial Sequence
  Description of Artificial Sequence: Synthetic oligonucleotide
  Sense strand starting at position 3175 of SEQ ID NO: 1243426
gccuaaaucgcgccuccua

SEQ ID NO: 1415913 - RNA, 19 nt, Artificial Sequence
  Description of Artificial Sequence: Synthetic oligonucleotide
  Antisense strand to SEQ ID NO: 1415912
uaggaggcgcgauuuaggc

SEQ ID NO: 1415914 - RNA, 19 nt, Artificial Sequence
  Description of Artificial Sequence: Synthetic oligonucleotide
  Sense strand starting at position 3196 of SEQ ID NO: 1243426
uugacuuauuccuacuagu

SEQ ID NO: 1415915 - RNA, 19 nt, Artificial Sequence
  Description of Artificial Sequence: Synthetic oligonucleotide
  Antisense strand to SEQ ID NO: 1415914
acuaguaggaauaagucaa

SEQ ID NO: 1415916 - RNA, 19 nt, Artificial Sequence
  Description of Artificial Sequence: Synthetic oligonucleotide
  Sense strand starting at position 3224 of SEQ ID NO: 1243426
uacuguuauuauugggaaa

SEQ ID NO: 1415917 - RNA, 19 nt, Artificial Sequence
  Description of Artificial Sequence: Synthetic oligonucleotide
  Antisense strand to SEQ ID NO: 1415916
uuucccaauaauaacagua

SEQ ID NO: 1415918 - RNA, 19 nt, Artificial Sequence
  Description of Artificial Sequence: Synthetic oligonucleotide
  Sense strand starting at position 3226 of SEQ ID NO: 1243426
cuguuauuauugggaaaua

SEQ ID NO: 1415919 - RNA, 19 nt, Artificial Sequence
  Description of Artificial Sequence: Synthetic oligonucleotide
  Antisense strand to SEQ ID NO: 1415918
uauuucccaauaauaacag

SEQ ID NO: 1415920 - RNA, 19 nt, Artificial Sequence
  Description of Artificial Sequence: Synthetic oligonucleotide
  Sense strand starting at position 3236 of SEQ ID NO: 1243426
ugggaaauauuguuauuag

SEQ ID NO: 1415921 - RNA, 19 nt, Artificial Sequence
  Description of Artificial Sequence: Synthetic oligonucleotide
  Antisense strand to SEQ ID NO: 1415920
cuaauaacaauauuuccca

SEQ ID NO: 1415922 - RNA, 19 nt, Artificial Sequence
  Description of Artificial Sequence: Synthetic oligonucleotide
  Sense strand starting at position 3237 of SEQ ID NO: 1243426
gggaaauauuguuauuaga

SEQ ID NO: 1415923 - RNA, 19 nt, Artificial Sequence
  Description of Artificial Sequence: Synthetic oligonucleotide
  Antisense strand to SEQ ID NO: 1415922
ucuaauaacaauauuuccc

SEQ ID NO: 1415924 - RNA, 19 nt, Artificial Sequence
  Description of Artificial Sequence: Synthetic oligonucleotide
  Sense strand starting at position 3324 of SEQ ID NO: 1243426
uaggcaguuucucuaagga

SEQ ID NO: 1415925 - RNA, 19 nt, Artificial Sequence
  Description of Artificial Sequence: Synthetic oligonucleotide
  Antisense strand to SEQ ID NO: 1415924
uccuuagagaaacugccua

SEQ ID NO: 1415926 - RNA, 19 nt, Artificial Sequence
  Description of Artificial Sequence: Synthetic oligonucleotide
  Sense strand starting at position 3328 of SEQ ID NO: 1243426
caguuucucuaaggagaga

SEQ ID NO: 1415927 - RNA, 19 nt, Artificial Sequence
  Description of Artificial Sequence: Synthetic oligonucleotide
  Antisense strand to SEQ ID NO: 1415926
ucucuccuuagagaaacug

SEQ ID NO: 1415928 - RNA, 19 nt, Artificial Sequence
  Description of Artificial Sequence: Synthetic oligonucleotide
  Sense strand starting at position 3382 of SEQ ID NO: 1243426
ggcuuacuauguuucuacu

SEQ ID NO: 1415929 - RNA, 19 nt, Artificial Sequence
  Description of Artificial Sequence: Synthetic oligonucleotide
  Antisense strand to SEQ ID NO: 1415928
aguagaaacauaguaagcc

SEQ ID NO: 1415930 - RNA, 19 nt, Artificial Sequence
  Description of Artificial Sequence: Synthetic oligonucleotide
  Sense strand starting at position 3897 of SEQ ID NO: 1243426
gcccuuagugagcaagcua

SEQ ID NO: 1415931 - RNA, 19 nt, Artificial Sequence
  Description of Artificial Sequence: Synthetic oligonucleotide
  Antisense strand to SEQ ID NO: 1415930
uagcuugcucacuaagggc

SEQ ID NO: 1415932 - RNA, 19 nt, Artificial Sequence
  Description of Artificial Sequence: Synthetic oligonucleotide
  Sense strand starting at position 66 of SEQ ID NO: 1243427
ggcuuuaggucccuuuaac

SEQ ID NO: 1415933 - RNA, 19 nt, Artificial Sequence
  Description of Artificial Sequence: Synthetic oligonucleotide
  Antisense strand to SEQ ID NO: 1415932
guuaaagggaccuaaagcc

SEQ ID NO: 1415934 - RNA, 19 nt, Artificial Sequence
  Description of Artificial Sequence: Synthetic oligonucleotide
  Sense strand starting at position 82 of SEQ ID NO: 1243427
aacugcuacucugggaagu

SEQ ID NO: 1415935 - RNA, 19 nt, Artificial Sequence
  Description of Artificial Sequence: Synthetic oligonucleotide
  Antisense strand to SEQ ID NO: 1415934
acuucccagaguagcaguu

SEQ ID NO: 1415936 - RNA, 19 nt, Artificial Sequence
  Description of Artificial Sequence: Synthetic oligonucleotide
  Sense strand starting at position 93 of SEQ ID NO: 1243427
ugggaaguguauuccucuu

SEQ ID NO: 1415937 - RNA, 19 nt, Artificial Sequence
  Description of Artificial Sequence: Synthetic oligonucleotide
  Antisense strand to SEQ ID NO: 1415936
aagaggaauacacuuccca

SEQ ID NO: 1415938 - RNA, 19 nt, Artificial Sequence
  Description of Artificial Sequence: Synthetic oligonucleotide
  Sense strand starting at position 95 of SEQ ID NO: 1243427
ggaaguguauuccucuuag

SEQ ID NO: 1415939 - RNA, 19 nt, Artificial Sequence
  Description of Artificial Sequence: Synthetic oligonucleotide
  Antisense strand to SEQ ID NO: 1415938
cuaagaggaauacacuucc

SEQ ID NO: 1415940 - RNA, 19 nt, Artificial Sequence
  Description of Artificial Sequence: Synthetic oligonucleotide
  Sense strand starting at position 99 of SEQ ID NO: 1243427
guguauuccucuuagucuc

SEQ ID NO: 1415941 - RNA, 19 nt, Artificial Sequence
  Description of Artificial Sequence: Synthetic oligonucleotide
  Antisense strand to SEQ ID NO: 1415940
gagacuaagaggaauacac

SEQ ID NO: 1415942 - RNA, 19 nt, Artificial Sequence
  Description of Artificial Sequence: Synthetic oligonucleotide
  Sense strand starting at position 173 of SEQ ID NO: 1243427
ugguaccugugauguugaa

SEQ ID NO: 1415943 - RNA, 19 nt, Artificial Sequence
  Description of Artificial Sequence: Synthetic oligonucleotide
  Antisense strand to SEQ ID NO: 1415942
uucaacaucacagguacca

SEQ ID NO: 1415944 - RNA, 19 nt, Artificial Sequence
  Description of Artificial Sequence: Synthetic oligonucleotide
  Sense strand starting at position 746 of SEQ ID NO: 1243427
aagggucacgguuagauca

SEQ ID NO: 1415945 - RNA, 19 nt, Artificial Sequence
  Description of Artificial Sequence: Synthetic oligonucleotide
  Antisense strand to SEQ ID NO: 1415944
ugaucuaaccgugacccuu

SEQ ID NO: 1415946 - RNA, 19 nt, Artificial Sequence
  Description of Artificial Sequence: Synthetic oligonucleotide
  Sense strand starting at position 748 of SEQ ID NO: 1243427
gggucacgguuagaucaga

SEQ ID NO: 1415947 - RNA, 19 nt, Artificial Sequence
  Description of Artificial Sequence: Synthetic oligonucleotide
  Antisense strand to SEQ ID NO: 1415946
ucugaucuaaccgugaccc

SEQ ID NO: 1415948 - RNA, 19 nt, Artificial Sequence
  Description of Artificial Sequence: Synthetic oligonucleotide
  Sense strand starting at position 753 of SEQ ID NO: 1243427
acgguuagaucagaagaua

SEQ ID NO: 1415949 - RNA, 19 nt, Artificial Sequence
  Description of Artificial Sequence: Synthetic oligonucleotide
  Antisense strand to SEQ ID NO: 1415948
uaucuucugaucuaaccgu

SEQ ID NO: 1415950 - RNA, 19 nt, Artificial Sequence
  Description of Artificial Sequence: Synthetic oligonucleotide
  Sense strand starting at position 803 of SEQ ID NO: 1243427
agaagccaguauuaagaga

SEQ ID NO: 1415951 - RNA, 19 nt, Artificial Sequence
  Description of Artificial Sequence: Synthetic oligonucleotide
  Antisense strand to SEQ ID NO: 1415950
ucucuuaauacuggcuucu

SEQ ID NO: 1415952 - RNA, 19 nt, Artificial Sequence
  Description of Artificial Sequence: Synthetic oligonucleotide
  Sense strand starting at position 1179 of SEQ ID NO: 1243427
ccuucugauuggcuguuua

SEQ ID NO: 1415953 - RNA, 19 nt, Artificial Sequence
  Description of Artificial Sequence: Synthetic oligonucleotide
  Antisense strand to SEQ ID NO: 1415952
uaaacagccaaucagaagg

SEQ ID NO: 1415954 - RNA, 19 nt, Artificial Sequence
  Description of Artificial Sequence: Synthetic oligonucleotide
  Sense strand starting at position 1190 of SEQ ID NO: 1243427
gcuguuuaucugcgguaca

SEQ ID NO: 1415955 - RNA, 19 nt, Artificial Sequence
  Description of Artificial Sequence: Synthetic oligonucleotide
  Antisense strand to SEQ ID NO: 1415954
uguaccgcagauaaacagc

SEQ ID NO: 1415956 - RNA, 19 nt, Artificial Sequence
  Description of Artificial Sequence: Synthetic oligonucleotide
  Sense strand starting at position 1200 of SEQ ID NO: 1243427
ugcgguacagcgucaguua

SEQ ID NO: 1415957 - RNA, 19 nt, Artificial Sequence
  Description of Artificial Sequence: Synthetic oligonucleotide
  Antisense strand to SEQ ID NO: 1415956
uaacugacgcuguaccgca

SEQ ID NO: 1415958 - RNA, 19 nt, Artificial Sequence
  Description of Artificial Sequence: Synthetic oligonucleotide
  Sense strand starting at position 1421 of SEQ ID NO: 1243427
cagucuucgucucugagca

SEQ ID NO: 1415959 - RNA, 19 nt, Artificial Sequence
  Description of Artificial Sequence: Synthetic oligonucleotide
  Antisense strand to SEQ ID NO: 1415958
ugcucagagacgaagacug

SEQ ID NO: 1415960 - RNA, 19 nt, Artificial Sequence
  Description of Artificial Sequence: Synthetic oligonucleotide
  Sense strand starting at position 1443 of SEQ ID NO: 1243427
gcgugaaacccugaagccu

SEQ ID NO: 1415961 - RNA, 19 nt, Artificial Sequence
  Description of Artificial Sequence: Synthetic oligonucleotide
  Antisense strand to SEQ ID NO: 1415960
aggcuucaggguuucacgc

SEQ ID NO: 1415962 - RNA, 19 nt, Artificial Sequence
  Description of Artificial Sequence: Synthetic oligonucleotide
  Sense strand starting at position 1474 of SEQ ID NO: 1243427
aggcacuccugaguuacua

SEQ ID NO: 1415963 - RNA, 19 nt, Artificial Sequence
  Description of Artificial Sequence: Synthetic oligonucleotide
  Antisense strand to SEQ ID NO: 1415962
uaguaacucaggagugccu

SEQ ID NO: 1415964 - RNA, 19 nt, Artificial Sequence
  Description of Artificial Sequence: Synthetic oligonucleotide
  Sense strand starting at position 2351 of SEQ ID NO: 1243427
gcgccugaguccuagacaa

SEQ ID NO: 1415965 - RNA, 19 nt, Artificial Sequence
  Description of Artificial Sequence: Synthetic oligonucleotide
  Antisense strand to SEQ ID NO: 1415964
uugucuaggacucaggcgc

SEQ ID NO: 1415966 - RNA, 19 nt, Artificial Sequence
  Description of Artificial Sequence: Synthetic oligonucleotide
  Sense strand starting at position 2353 of SEQ ID NO: 1243427
gccugaguccuagacaaga

SEQ ID NO: 1415967 - RNA, 19 nt, Artificial Sequence
  Description of Artificial Sequence: Synthetic oligonucleotide
  Antisense strand to SEQ ID NO: 1415966
ucuugucuaggacucaggc

SEQ ID NO: 1415968 - RNA, 19 nt, Artificial Sequence
  Description of Artificial Sequence: Synthetic oligonucleotide
  Sense strand starting at position 2385 of SEQ ID NO: 1243427
ccaugccauuccugggaga

SEQ ID NO: 1415969 - RNA, 19 nt, Artificial Sequence
  Description of Artificial Sequence: Synthetic oligonucleotide
  Antisense strand to SEQ ID NO: 1415968
ucucccaggaauggcaugg

SEQ ID NO: 1415970 - RNA, 19 nt, Artificial Sequence
  Description of Artificial Sequence: Synthetic oligonucleotide
  Sense strand starting at position 2387 of SEQ ID NO: 1243427
augccauuccugggagacu

SEQ ID NO: 1415971 - RNA, 19 nt, Artificial Sequence
  Description of Artificial Sequence: Synthetic oligonucleotide
  Antisense strand to SEQ ID NO: 1415970
agucucccaggaauggcau

SEQ ID NO: 1415972 - RNA, 19 nt, Artificial Sequence
  Description of Artificial Sequence: Synthetic oligonucleotide
  Sense strand starting at position 2388 of SEQ ID NO: 1243427
ugccauuccugggagacuu

SEQ ID NO: 1415973 - RNA, 19 nt, Artificial Sequence
  Description of Artificial Sequence: Synthetic oligonucleotide
  Antisense strand to SEQ ID NO: 1415972
aagucucccaggaauggca

SEQ ID NO: 1415974 - RNA, 19 nt, Artificial Sequence
  Description of Artificial Sequence: Synthetic oligonucleotide
  Sense strand starting at position 2396 of SEQ ID NO: 1243427
cugggagacuugucccaga

SEQ ID NO: 1415975 - RNA, 19 nt, Artificial Sequence
  Description of Artificial Sequence: Synthetic oligonucleotide
  Antisense strand to SEQ ID NO: 1415974
ucugggacaagucucccag

SEQ ID NO: 1415976 - RNA, 19 nt, Artificial Sequence
  Description of Artificial Sequence: Synthetic oligonucleotide
  Sense strand starting at position 2403 of SEQ ID NO: 1243427
acuugucccagacggaauu

SEQ ID NO: 1415977 - RNA, 19 nt, Artificial Sequence
  Description of Artificial Sequence: Synthetic oligonucleotide
  Antisense strand to SEQ ID NO: 1415976
aauuccgucugggacaagu

SEQ ID NO: 1415978 - RNA, 19 nt, Artificial Sequence
  Description of Artificial Sequence: Synthetic oligonucleotide
  Sense strand starting at position 2440 of SEQ ID NO: 1243427
gugauauucuaaggcucaa

SEQ ID NO: 1415979 - RNA, 19 nt, Artificial Sequence
  Description of Artificial Sequence: Synthetic oligonucleotide
  Antisense strand to SEQ ID NO: 1415978
uugagccuuagaauaucac

SEQ ID NO: 1415980 - RNA, 19 nt, Artificial Sequence
  Description of Artificial Sequence: Synthetic oligonucleotide
  Sense strand starting at position 2488 of SEQ ID NO: 1243427
cggagacccugacagauaa

SEQ ID NO: 1415981 - RNA, 19 nt, Artificial Sequence
  Description of Artificial Sequence: Synthetic oligonucleotide
  Antisense strand to SEQ ID NO: 1415980
uuaucugucagggucuccg

SEQ ID NO: 1415982 - RNA, 19 nt, Artificial Sequence
  Description of Artificial Sequence: Synthetic oligonucleotide
  Sense strand starting at position 2741 of SEQ ID NO: 1243427
ccaggccugcucugaaaca

SEQ ID NO: 1415983 - RNA, 19 nt, Artificial Sequence
  Description of Artificial Sequence: Synthetic oligonucleotide
  Antisense strand to SEQ ID NO: 1415982
uguuucagagcaggccugg

SEQ ID NO: 1415984 - RNA, 19 nt, Artificial Sequence
  Description of Artificial Sequence: Synthetic oligonucleotide
  Sense strand starting at position 2768 of SEQ ID NO: 1243427
ccaaguuacugaugaacuc

SEQ ID NO: 1415985 - RNA, 19 nt, Artificial Sequence
  Description of Artificial Sequence: Synthetic oligonucleotide
  Antisense strand to SEQ ID NO: 1415984
gaguucaucaguaacuugg

SEQ ID NO: 1415986 - RNA, 19 nt, Artificial Sequence
  Description of Artificial Sequence: Synthetic oligonucleotide
  Sense strand starting at position 2873 of SEQ ID NO: 1243427
aggccauagagguaguuau

SEQ ID NO: 1415987 - RNA, 19 nt, Artificial Sequence
  Description of Artificial Sequence: Synthetic oligonucleotide
  Antisense strand to SEQ ID NO: 1415986
auaacuaccucuauggccu

SEQ ID NO: 1415988 - RNA, 19 nt, Artificial Sequence
  Description of Artificial Sequence: Synthetic oligonucleotide
  Sense strand starting at position 2880 of SEQ ID NO: 1243427
agagguaguuauggacaga

SEQ ID NO: 1415989 - RNA, 19 nt, Artificial Sequence
  Description of Artificial Sequence: Synthetic oligonucleotide
  Antisense strand to SEQ ID NO: 1415988
ucuguccauaacuaccucu

SEQ ID NO: 1415990 - RNA, 19 nt, Artificial Sequence
  Description of Artificial Sequence: Synthetic oligonucleotide
  Sense strand starting at position 2911 of SEQ ID NO: 1243427
agccacucuucuggacaga

SEQ ID NO: 1415991 - RNA, 19 nt, Artificial Sequence
  Description of Artificial Sequence: Synthetic oligonucleotide
  Antisense strand to SEQ ID NO: 1415990
ucuguccagaagaguggcu

SEQ ID NO: 1415992 - RNA, 19 nt, Artificial Sequence
  Description of Artificial Sequence: Synthetic oligonucleotide
  Sense strand starting at position 2912 of SEQ ID NO: 1243427
gccacucuucuggacagau

SEQ ID NO: 1415993 - RNA, 19 nt, Artificial Sequence
  Description of Artificial Sequence: Synthetic oligonucleotide
  Antisense strand to SEQ ID NO: 1415992
aucuguccagaagaguggc

SEQ ID NO: 1415994 - RNA, 19 nt, Artificial Sequence
  Description of Artificial Sequence: Synthetic oligonucleotide
  Sense strand starting at position 2937 of SEQ ID NO: 1243427
acuggaaugugaguaucaa

SEQ ID NO: 1415995 - RNA, 19 nt, Artificial Sequence
  Description of Artificial Sequence: Synthetic oligonucleotide
  Antisense strand to SEQ ID NO: 1415994
uugauacucacauuccagu

SEQ ID NO: 1415996 - RNA, 19 nt, Artificial Sequence
  Description of Artificial Sequence: Synthetic oligonucleotide
  Sense strand starting at position 2941 of SEQ ID NO: 1243427
gaaugugaguaucaaccca

SEQ ID NO: 1415997 - RNA, 19 nt, Artificial Sequence
  Description of Artificial Sequence: Synthetic oligonucleotide
  Antisense strand to SEQ ID NO: 1415996
uggguugauacucacauuc

SEQ ID NO: 1415998 - RNA, 19 nt, Artificial Sequence
  Description of Artificial Sequence: Synthetic oligonucleotide
  Sense strand starting at position 3349 of SEQ ID NO: 1243427
agccaaugauuacaugaaa

SEQ ID NO: 1415999 - RNA, 19 nt, Artificial Sequence
  Description of Artificial Sequence: Synthetic oligonucleotide
  Antisense strand to SEQ ID NO: 1415998
uuucauguaaucauuggcu

SEQ ID NO: 1416000 - RNA, 19 nt, Artificial Sequence
  Description of Artificial Sequence: Synthetic oligonucleotide
  Sense strand starting at position 3433 of SEQ ID NO: 1243427
accuauuaggauggcaaua

SEQ ID NO: 1416001 - RNA, 19 nt, Artificial Sequence
  Description of Artificial Sequence: Synthetic oligonucleotide
  Antisense strand to SEQ ID NO: 1416000
uauugccauccuaauaggu

SEQ ID NO: 1416002 - RNA, 19 nt, Artificial Sequence
  Description of Artificial Sequence: Synthetic oligonucleotide
  Sense strand starting at position 119 of SEQ ID NO: 1243428
ggcuuuaggucccuuuaac

SEQ ID NO: 1416003 - RNA, 19 nt, Artificial Sequence
  Description of Artificial Sequence: Synthetic oligonucleotide
  Antisense strand to SEQ ID NO: 1416002
guuaaagggaccuaaagcc

SEQ ID NO: 1416004 - RNA, 19 nt, Artificial Sequence
  Description of Artificial Sequence: Synthetic oligonucleotide
  Sense strand starting at position 135 of SEQ ID NO: 1243428
aacugcuacucugggaagu

SEQ ID NO: 1416005 - RNA, 19 nt, Artificial Sequence
  Description of Artificial Sequence: Synthetic oligonucleotide
  Antisense strand to SEQ ID NO: 1416004
acuucccagaguagcaguu

SEQ ID NO: 1416006 - RNA, 19 nt, Artificial Sequence
  Description of Artificial Sequence: Synthetic oligonucleotide
  Sense strand starting at position 146 of SEQ ID NO: 1243428
ugggaaguguauuccucuu

SEQ ID NO: 1416007 - RNA, 19 nt, Artificial Sequence
  Description of Artificial Sequence: Synthetic oligonucleotide
  Antisense strand to SEQ ID NO: 1416006
aagaggaauacacuuccca

SEQ ID NO: 1416008 - RNA, 19 nt, Artificial Sequence
  Description of Artificial Sequence: Synthetic oligonucleotide
  Sense strand starting at position 148 of SEQ ID NO: 1243428
ggaaguguauuccucuuag

SEQ ID NO: 1416009 - RNA, 19 nt, Artificial Sequence
  Description of Artificial Sequence: Synthetic oligonucleotide
  Antisense strand to SEQ ID NO: 1416008
cuaagaggaauacacuucc

SEQ ID NO: 1416010 - RNA, 19 nt, Artificial Sequence
  Description of Artificial Sequence: Synthetic oligonucleotide
  Sense strand starting at position 152 of SEQ ID NO: 1243428
guguauuccucuuagucuc

SEQ ID NO: 1416011 - RNA, 19 nt, Artificial Sequence
  Description of Artificial Sequence: Synthetic oligonucleotide
  Antisense strand to SEQ ID NO: 1416010
gagacuaagaggaauacac

SEQ ID NO: 1416012 - RNA, 19 nt, Artificial Sequence
  Description of Artificial Sequence: Synthetic oligonucleotide
  Sense strand starting at position 226 of SEQ ID NO: 1243428
ugguaccugugauguugaa

SEQ ID NO: 1416013 - RNA, 19 nt, Artificial Sequence
  Description of Artificial Sequence: Synthetic oligonucleotide
  Antisense strand to SEQ ID NO: 1416012
uucaacaucacagguacca

SEQ ID NO: 1416014 - RNA, 19 nt, Artificial Sequence
  Description of Artificial Sequence: Synthetic oligonucleotide
  Sense strand starting at position 799 of SEQ ID NO: 1243428
aagggucacgguuagauca

SEQ ID NO: 1416015 - RNA, 19 nt, Artificial Sequence
  Description of Artificial Sequence: Synthetic oligonucleotide
  Antisense strand to SEQ ID NO: 1416014
ugaucuaaccgugacccuu

SEQ ID NO: 1416016 - RNA, 19 nt, Artificial Sequence
  Description of Artificial Sequence: Synthetic oligonucleotide
  Sense strand starting at position 801 of SEQ ID NO: 1243428
gggucacgguuagaucaga

SEQ ID NO: 1416017 - RNA, 19 nt, Artificial Sequence
  Description of Artificial Sequence: Synthetic oligonucleotide
  Antisense strand to SEQ ID NO: 1416016
ucugaucuaaccgugaccc

SEQ ID NO: 1416018 - RNA, 19 nt, Artificial Sequence
  Description of Artificial Sequence: Synthetic oligonucleotide
  Sense strand starting at position 806 of SEQ ID NO: 1243428
acgguuagaucagaagaua

SEQ ID NO: 1416019 - RNA, 19 nt, Artificial Sequence
  Description of Artificial Sequence: Synthetic oligonucleotide
  Antisense strand to SEQ ID NO: 1416018
uaucuucugaucuaaccgu

SEQ ID NO: 1416020 - RNA, 19 nt, Artificial Sequence
  Description of Artificial Sequence: Synthetic oligonucleotide
  Sense strand starting at position 856 of SEQ ID NO: 1243428
agaagccaguauuaagaga

SEQ ID NO: 1416021 - RNA, 19 nt, Artificial Sequence
  Description of Artificial Sequence: Synthetic oligonucleotide
  Antisense strand to SEQ ID NO: 1416020
ucucuuaauacuggcuucu

SEQ ID NO: 1416022 - RNA, 19 nt, Artificial Sequence
  Description of Artificial Sequence: Synthetic oligonucleotide
  Sense strand starting at position 1232 of SEQ ID NO: 1243428
ccuucugauuggcuguuua

SEQ ID NO: 1416023 - RNA, 19 nt, Artificial Sequence
  Description of Artificial Sequence: Synthetic oligonucleotide
  Antisense strand to SEQ ID NO: 1416022
uaaacagccaaucagaagg

SEQ ID NO: 1416024 - RNA, 19 nt, Artificial Sequence
  Description of Artificial Sequence: Synthetic oligonucleotide
  Sense strand starting at position 1243 of SEQ ID NO: 1243428
gcuguuuaucugcgguaca

SEQ ID NO: 1416025 - RNA, 19 nt, Artificial Sequence
  Description of Artificial Sequence: Synthetic oligonucleotide
  Antisense strand to SEQ ID NO: 1416024
uguaccgcagauaaacagc

SEQ ID NO: 1416026 - RNA, 19 nt, Artificial Sequence
  Description of Artificial Sequence: Synthetic oligonucleotide
  Sense strand starting at position 1253 of SEQ ID NO: 1243428
ugcgguacagcgucaguua

SEQ ID NO: 1416027 - RNA, 19 nt, Artificial Sequence
  Description of Artificial Sequence: Synthetic oligonucleotide
  Antisense strand to SEQ ID NO: 1416026
uaacugacgcuguaccgca

SEQ ID NO: 1416028 - RNA, 19 nt, Artificial Sequence
  Description of Artificial Sequence: Synthetic oligonucleotide
  Sense strand starting at position 1474 of SEQ ID NO: 1243428
cagucuucgucucugagca

SEQ ID NO: 1416029 - RNA, 19 nt, Artificial Sequence
  Description of Artificial Sequence: Synthetic oligonucleotide
  Antisense strand to SEQ ID NO: 1416028
ugcucagagacgaagacug

SEQ ID NO: 1416030 - RNA, 19 nt, Artificial Sequence
  Description of Artificial Sequence: Synthetic oligonucleotide
  Sense strand starting at position 1496 of SEQ ID NO: 1243428
gcgugaaacccugaagccu

SEQ ID NO: 1416031 - RNA, 19 nt, Artificial Sequence
  Description of Artificial Sequence: Synthetic oligonucleotide
  Antisense strand to SEQ ID NO: 1416030
aggcuucaggguuucacgc

SEQ ID NO: 1416032 - RNA, 19 nt, Artificial Sequence
  Description of Artificial Sequence: Synthetic oligonucleotide
  Sense strand starting at position 1527 of SEQ ID NO: 1243428
aggcacuccugaguuacua

SEQ ID NO: 1416033 - RNA, 19 nt, Artificial Sequence
  Description of Artificial Sequence: Synthetic oligonucleotide
  Antisense strand to SEQ ID NO: 1416032
uaguaacucaggagugccu

SEQ ID NO: 1416034 - RNA, 19 nt, Artificial Sequence
  Description of Artificial Sequence: Synthetic oligonucleotide
  Sense strand starting at position 2404 of SEQ ID NO: 1243428
gcgccugaguccuagacaa

SEQ ID NO: 1416035 - RNA, 19 nt, Artificial Sequence
  Description of Artificial Sequence: Synthetic oligonucleotide
  Antisense strand to SEQ ID NO: 1416034
uugucuaggacucaggcgc

SEQ ID NO: 1416036 - RNA, 19 nt, Artificial Sequence
  Description of Artificial Sequence: Synthetic oligonucleotide
  Sense strand starting at position 2406 of SEQ ID NO: 1243428
gccugaguccuagacaaga

SEQ ID NO: 1416037 - RNA, 19 nt, Artificial Sequence
  Description of Artificial Sequence: Synthetic oligonucleotide
  Antisense strand to SEQ ID NO: 1416036
ucuugucuaggacucaggc

SEQ ID NO: 1416038 - RNA, 19 nt, Artificial Sequence
  Description of Artificial Sequence: Synthetic oligonucleotide
  Sense strand starting at position 2438 of SEQ ID NO: 1243428
ccaugccauuccugggaga

SEQ ID NO: 1416039 - RNA, 19 nt, Artificial Sequence
  Description of Artificial Sequence: Synthetic oligonucleotide
  Antisense strand to SEQ ID NO: 1416038
ucucccaggaauggcaugg

SEQ ID NO: 1416040 - RNA, 19 nt, Artificial Sequence
  Description of Artificial Sequence: Synthetic oligonucleotide
  Sense strand starting at position 2440 of SEQ ID NO: 1243428
augccauuccugggagacu

SEQ ID NO: 1416041 - RNA, 19 nt, Artificial Sequence
  Description of Artificial Sequence: Synthetic oligonucleotide
  Antisense strand to SEQ ID NO: 1416040
agucucccaggaauggcau

SEQ ID NO: 1416042 - RNA, 19 nt, Artificial Sequence
  Description of Artificial Sequence: Synthetic oligonucleotide
  Sense strand starting at position 2441 of SEQ ID NO: 1243428
ugccauuccugggagacuu

SEQ ID NO: 1416043 - RNA, 19 nt, Artificial Sequence
  Description of Artificial Sequence: Synthetic oligonucleotide
  Antisense strand to SEQ ID NO: 1416042
aagucucccaggaauggca

SEQ ID NO: 1416044 - RNA, 19 nt, Artificial Sequence
  Description of Artificial Sequence: Synthetic oligonucleotide
  Sense strand starting at position 2449 of SEQ ID NO: 1243428
cugggagacuugucccaga

SEQ ID NO: 1416045 - RNA, 19 nt, Artificial Sequence
  Description of Artificial Sequence: Synthetic oligonucleotide
  Antisense strand to SEQ ID NO: 1416044
ucugggacaagucucccag

SEQ ID NO: 1416046 - RNA, 19 nt, Artificial Sequence
  Description of Artificial Sequence: Synthetic oligonucleotide
  Sense strand starting at position 2456 of SEQ ID NO: 1243428
acuugucccagacggaauu

SEQ ID NO: 1416047 - RNA, 19 nt, Artificial Sequence
  Description of Artificial Sequence: Synthetic oligonucleotide
  Antisense strand to SEQ ID NO: 1416046
aauuccgucugggacaagu

SEQ ID NO: 1416048 - RNA, 19 nt, Artificial Sequence
  Description of Artificial Sequence: Synthetic oligonucleotide
  Sense strand starting at position 2493 of SEQ ID NO: 1243428
gugauauucuaaggcucaa

SEQ ID NO: 1416049 - RNA, 19 nt, Artificial Sequence
  Description of Artificial Sequence: Synthetic oligonucleotide
  Antisense strand to SEQ ID NO: 1416048
uugagccuuagaauaucac

SEQ ID NO: 1416050 - RNA, 19 nt, Artificial Sequence
  Description of Artificial Sequence: Synthetic oligonucleotide
  Sense strand starting at position 2541 of SEQ ID NO: 1243428
cggagacccugacagauaa

SEQ ID NO: 1416051 - RNA, 19 nt, Artificial Sequence
  Description of Artificial Sequence: Synthetic oligonucleotide
  Antisense strand to SEQ ID NO: 1416050
uuaucugucagggucuccg

SEQ ID NO: 1416052 - RNA, 19 nt, Artificial Sequence
  Description of Artificial Sequence: Synthetic oligonucleotide
  Sense strand starting at position 2794 of SEQ ID NO: 1243428
ccaggccugcucugaaaca

SEQ ID NO: 1416053 - RNA, 19 nt, Artificial Sequence
  Description of Artificial Sequence: Synthetic oligonucleotide
  Antisense strand to SEQ ID NO: 1416052
uguuucagagcaggccugg

SEQ ID NO: 1416054 - RNA, 19 nt, Artificial Sequence
  Description of Artificial Sequence: Synthetic oligonucleotide
  Sense strand starting at position 2821 of SEQ ID NO: 1243428
ccaaguuacugaugaacuc

SEQ ID NO: 1416055 - RNA, 19 nt, Artificial Sequence
  Description of Artificial Sequence: Synthetic oligonucleotide
  Antisense strand to SEQ ID NO: 1416054
gaguucaucaguaacuugg

SEQ ID NO: 1416056 - RNA, 19 nt, Artificial Sequence
  Description of Artificial Sequence: Synthetic oligonucleotide
  Sense strand starting at position 2926 of SEQ ID NO: 1243428
aggccauagagguaguuau

SEQ ID NO: 1416057 - RNA, 19 nt, Artificial Sequence
  Description of Artificial Sequence: Synthetic oligonucleotide
  Antisense strand to SEQ ID NO: 1416056
auaacuaccucuauggccu

SEQ ID NO: 1416058 - RNA, 19 nt, Artificial Sequence
  Description of Artificial Sequence: Synthetic oligonucleotide
  Sense strand starting at position 2933 of SEQ ID NO: 1243428
agagguaguuauggacaga

SEQ ID NO: 1416059 - RNA, 19 nt, Artificial Sequence
  Description of Artificial Sequence: Synthetic oligonucleotide
  Antisense strand to SEQ ID NO: 1416058
ucuguccauaacuaccucu

SEQ ID NO: 1416060 - RNA, 19 nt, Artificial Sequence
  Description of Artificial Sequence: Synthetic oligonucleotide
  Sense strand starting at position 2964 of SEQ ID NO: 1243428
agccacucuucuggacaga

SEQ ID NO: 1416061 - RNA, 19 nt, Artificial Sequence
  Description of Artificial Sequence: Synthetic oligonucleotide
  Antisense strand to SEQ ID NO: 1416060
ucuguccagaagaguggcu

SEQ ID NO: 1416062 - RNA, 19 nt, Artificial Sequence
  Description of Artificial Sequence: Synthetic oligonucleotide
  Sense strand starting at position 2965 of SEQ ID NO: 1243428
gccacucuucuggacagau

SEQ ID NO: 1416063 - RNA, 19 nt, Artificial Sequence
  Description of Artificial Sequence: Synthetic oligonucleotide
  Antisense strand to SEQ ID NO: 1416062
aucuguccagaagaguggc

SEQ ID NO: 1416064 - RNA, 19 nt, Artificial Sequence
  Description of Artificial Sequence: Synthetic oligonucleotide
  Sense strand starting at position 2990 of SEQ ID NO: 1243428
acuggaaugugaguaucaa

SEQ ID NO: 1416065 - RNA, 19 nt, Artificial Sequence
  Description of Artificial Sequence: Synthetic oligonucleotide
  Antisense strand to SEQ ID NO: 1416064
uugauacucacauuccagu

SEQ ID NO: 1416066 - RNA, 19 nt, Artificial Sequence
  Description of Artificial Sequence: Synthetic oligonucleotide
  Sense strand starting at position 2994 of SEQ ID NO: 1243428
gaaugugaguaucaaccca

SEQ ID NO: 1416067 - RNA, 19 nt, Artificial Sequence
  Description of Artificial Sequence: Synthetic oligonucleotide
  Antisense strand to SEQ ID NO: 1416066
uggguugauacucacauuc

SEQ ID NO: 1416068 - RNA, 19 nt, Artificial Sequence
  Description of Artificial Sequence: Synthetic oligonucleotide
  Sense strand starting at position 3402 of SEQ ID NO: 1243428
agccaaugauuacaugaaa

SEQ ID NO: 1416069 - RNA, 19 nt, Artificial Sequence
  Description of Artificial Sequence: Synthetic oligonucleotide
  Antisense strand to SEQ ID NO: 1416068
uuucauguaaucauuggcu

SEQ ID NO: 1416070 - RNA, 19 nt, Artificial Sequence
  Description of Artificial Sequence: Synthetic oligonucleotide
  Sense strand starting at position 3486 of SEQ ID NO: 1243428
accuauuaggauggcaaua

SEQ ID NO: 1416071 - RNA, 19 nt, Artificial Sequence
  Description of Artificial Sequence: Synthetic oligonucleotide
  Antisense strand to SEQ ID NO: 1416070
uauugccauccuaauaggu

SEQ ID NO: 1416072 - RNA, 19 nt, Artificial Sequence
  Description of Artificial Sequence: Synthetic oligonucleotide
  Sense strand starting at position 120 of SEQ ID NO: 1243429
gagagagccuuuguagaug

SEQ ID NO: 1416073 - RNA, 19 nt, Artificial Sequence
  Description of Artificial Sequence: Synthetic oligonucleotide
  Antisense strand to SEQ ID NO: 1416072
caucuacaaaggcucucuc

SEQ ID NO: 1416074 - RNA, 19 nt, Artificial Sequence
  Description of Artificial Sequence: Synthetic oligonucleotide
  Sense strand starting at position 129 of SEQ ID NO: 1243429
uuuguagaugccugagaga

SEQ ID NO: 1416075 - RNA, 19 nt, Artificial Sequence
  Description of Artificial Sequence: Synthetic oligonucleotide
  Antisense strand to SEQ ID NO: 1416074
ucucucaggcaucuacaaa

SEQ ID NO: 1416076 - RNA, 19 nt, Artificial Sequence
  Description of Artificial Sequence: Synthetic oligonucleotide
  Sense strand starting at position 132 of SEQ ID NO: 1243429
guagaugccugagagauau

SEQ ID NO: 1416077 - RNA, 19 nt, Artificial Sequence
  Description of Artificial Sequence: Synthetic oligonucleotide
  Antisense strand to SEQ ID NO: 1416076
auaucucucaggcaucuac

SEQ ID NO: 1416078 - RNA, 19 nt, Artificial Sequence
  Description of Artificial Sequence: Synthetic oligonucleotide
  Sense strand starting at position 144 of SEQ ID NO: 1243429
gagauauuggguggagcca

SEQ ID NO: 1416079 - RNA, 19 nt, Artificial Sequence
  Description of Artificial Sequence: Synthetic oligonucleotide
  Antisense strand to SEQ ID NO: 1416078
uggcuccacccaauaucuc

SEQ ID NO: 1416080 - RNA, 19 nt, Artificial Sequence
  Description of Artificial Sequence: Synthetic oligonucleotide
  Sense strand starting at position 172 of SEQ ID NO: 1243429
uugugaagaucagaugaga

SEQ ID NO: 1416081 - RNA, 19 nt, Artificial Sequence
  Description of Artificial Sequence: Synthetic oligonucleotide
  Antisense strand to SEQ ID NO: 1416080
ucucaucugaucuucacaa

SEQ ID NO: 1416082 - RNA, 19 nt, Artificial Sequence
  Description of Artificial Sequence: Synthetic oligonucleotide
  Sense strand starting at position 247 of SEQ ID NO: 1243429
ugguaacaugguuggaauu

SEQ ID NO: 1416083 - RNA, 19 nt, Artificial Sequence
  Description of Artificial Sequence: Synthetic oligonucleotide
  Antisense strand to SEQ ID NO: 1416082
aauuccaaccauguuacca

SEQ ID NO: 1416084 - RNA, 19 nt, Artificial Sequence
  Description of Artificial Sequence: Synthetic oligonucleotide
  Sense strand starting at position 395 of SEQ ID NO: 1243429
uaaagaugggucugugaca

SEQ ID NO: 1416085 - RNA, 19 nt, Artificial Sequence
  Description of Artificial Sequence: Synthetic oligonucleotide
  Antisense strand to SEQ ID NO: 1416084
ugucacagacccaucuuua

SEQ ID NO: 1416086 - RNA, 19 nt, Artificial Sequence
  Description of Artificial Sequence: Synthetic oligonucleotide
  Sense strand starting at position 689 of SEQ ID NO: 1243429
guggaauugucuagaaggg

SEQ ID NO: 1416087 - RNA, 19 nt, Artificial Sequence
  Description of Artificial Sequence: Synthetic oligonucleotide
  Antisense strand to SEQ ID NO: 1416086
cccuucuagacaauuccac

SEQ ID NO: 1416088 - RNA, 19 nt, Artificial Sequence
  Description of Artificial Sequence: Synthetic oligonucleotide
  Sense strand starting at position 848 of SEQ ID NO: 1243429
cuggaagggcugugaagaa

SEQ ID NO: 1416089 - RNA, 19 nt, Artificial Sequence
  Description of Artificial Sequence: Synthetic oligonucleotide
  Antisense strand to SEQ ID NO: 1416088
uucuucacagcccuuccag

SEQ ID NO: 1416090 - RNA, 19 nt, Artificial Sequence
  Description of Artificial Sequence: Synthetic oligonucleotide
  Sense strand starting at position 868 of SEQ ID NO: 1243429
augcuugugucaucucaga

SEQ ID NO: 1416091 - RNA, 19 nt, Artificial Sequence
  Description of Artificial Sequence: Synthetic oligonucleotide
  Antisense strand to SEQ ID NO: 1416090
ucugagaugacacaagcau

SEQ ID NO: 1416092 - RNA, 19 nt, Artificial Sequence
  Description of Artificial Sequence: Synthetic oligonucleotide
  Sense strand starting at position 916 of SEQ ID NO: 1243429
cucagauauccaggacuca

SEQ ID NO: 1416093 - RNA, 19 nt, Artificial Sequence
  Description of Artificial Sequence: Synthetic oligonucleotide
  Antisense strand to SEQ ID NO: 1416092
ugaguccuggauaucugag

SEQ ID NO: 1416094 - RNA, 19 nt, Artificial Sequence
  Description of Artificial Sequence: Synthetic oligonucleotide
  Sense strand starting at position 1116 of SEQ ID NO: 1243429
ggcuuuaggucccuuuaac

SEQ ID NO: 1416095 - RNA, 19 nt, Artificial Sequence
  Description of Artificial Sequence: Synthetic oligonucleotide
  Antisense strand to SEQ ID NO: 1416094
guuaaagggaccuaaagcc

SEQ ID NO: 1416096 - RNA, 19 nt, Artificial Sequence
  Description of Artificial Sequence: Synthetic oligonucleotide
  Sense strand starting at position 1132 of SEQ ID NO: 1243429
aacugcuacucugggaagu

SEQ ID NO: 1416097 - RNA, 19 nt, Artificial Sequence
  Description of Artificial Sequence: Synthetic oligonucleotide
  Antisense strand to SEQ ID NO: 1416096
acuucccagaguagcaguu

SEQ ID NO: 1416098 - RNA, 19 nt, Artificial Sequence
  Description of Artificial Sequence: Synthetic oligonucleotide
  Sense strand starting at position 1143 of SEQ ID NO: 1243429
ugggaaguguauuccucuu

SEQ ID NO: 1416099 - RNA, 19 nt, Artificial Sequence
  Description of Artificial Sequence: Synthetic oligonucleotide
  Antisense strand to SEQ ID NO: 1416098
aagaggaauacacuuccca

SEQ ID NO: 1416100 - RNA, 19 nt, Artificial Sequence
  Description of Artificial Sequence: Synthetic oligonucleotide
  Sense strand starting at position 1145 of SEQ ID NO: 1243429
ggaaguguauuccucuuag

SEQ ID NO: 1416101 - RNA, 19 nt, Artificial Sequence
  Description of Artificial Sequence: Synthetic oligonucleotide
  Antisense strand to SEQ ID NO: 1416100
cuaagaggaauacacuucc

SEQ ID NO: 1416102 - RNA, 19 nt, Artificial Sequence
  Description of Artificial Sequence: Synthetic oligonucleotide
  Sense strand starting at position 1223 of SEQ ID NO: 1243429
ugguaccugugauguugaa

SEQ ID NO: 1416103 - RNA, 19 nt, Artificial Sequence
  Description of Artificial Sequence: Synthetic oligonucleotide
  Antisense strand to SEQ ID NO: 1416102
uucaacaucacagguacca

SEQ ID NO: 1416104 - RNA, 19 nt, Artificial Sequence
  Description of Artificial Sequence: Synthetic oligonucleotide
  Sense strand starting at position 1796 of SEQ ID NO: 1243429
aagggucacgguuagauca

SEQ ID NO: 1416105 - RNA, 19 nt, Artificial Sequence
  Description of Artificial Sequence: Synthetic oligonucleotide
  Antisense strand to SEQ ID NO: 1416104
ugaucuaaccgugacccuu

SEQ ID NO: 1416106 - RNA, 19 nt, Artificial Sequence
  Description of Artificial Sequence: Synthetic oligonucleotide
  Sense strand starting at position 1798 of SEQ ID NO: 1243429
gggucacgguuagaucaga

SEQ ID NO: 1416107 - RNA, 19 nt, Artificial Sequence
  Description of Artificial Sequence: Synthetic oligonucleotide
  Antisense strand to SEQ ID NO: 1416106
ucugaucuaaccgugaccc

SEQ ID NO: 1416108 - RNA, 19 nt, Artificial Sequence
  Description of Artificial Sequence: Synthetic oligonucleotide
  Sense strand starting at position 1803 of SEQ ID NO: 1243429
acgguuagaucagaagaua

SEQ ID NO: 1416109 - RNA, 19 nt, Artificial Sequence
  Description of Artificial Sequence: Synthetic oligonucleotide
  Antisense strand to SEQ ID NO: 1416108
uaucuucugaucuaaccgu

SEQ ID NO: 1416110 - RNA, 19 nt, Artificial Sequence
  Description of Artificial Sequence: Synthetic oligonucleotide
  Sense strand starting at position 1853 of SEQ ID NO: 1243429
agaagccaguauuaagaga

SEQ ID NO: 1416111 - RNA, 19 nt, Artificial Sequence
  Description of Artificial Sequence: Synthetic oligonucleotide
  Antisense strand to SEQ ID NO: 1416110
ucucuuaauacuggcuucu

SEQ ID NO: 1416112 - RNA, 19 nt, Artificial Sequence
  Description of Artificial Sequence: Synthetic oligonucleotide
  Sense strand starting at position 2229 of SEQ ID NO: 1243429
ccuucugauuggcuguuua

SEQ ID NO: 1416113 - RNA, 19 nt, Artificial Sequence
  Description of Artificial Sequence: Synthetic oligonucleotide
  Antisense strand to SEQ ID NO: 1416112
uaaacagccaaucagaagg

SEQ ID NO: 1416114 - RNA, 19 nt, Artificial Sequence
  Description of Artificial Sequence: Synthetic oligonucleotide
  Sense strand starting at position 2240 of SEQ ID NO: 1243429
gcuguuuaucugcgguaca

SEQ ID NO: 1416115 - RNA, 19 nt, Artificial Sequence
  Description of Artificial Sequence: Synthetic oligonucleotide
  Antisense strand to SEQ ID NO: 1416114
uguaccgcagauaaacagc

SEQ ID NO: 1416116 - RNA, 19 nt, Artificial Sequence
  Description of Artificial Sequence: Synthetic oligonucleotide
  Sense strand starting at position 2250 of SEQ ID NO: 1243429
ugcgguacagcgucaguua

SEQ ID NO: 1416117 - RNA, 19 nt, Artificial Sequence
  Description of Artificial Sequence: Synthetic oligonucleotide
  Antisense strand to SEQ ID NO: 1416116
uaacugacgcuguaccgca

SEQ ID NO: 1416118 - RNA, 19 nt, Artificial Sequence
  Description of Artificial Sequence: Synthetic oligonucleotide
  Sense strand starting at position 2471 of SEQ ID NO: 1243429
cagucuucgucucugagca

SEQ ID NO: 1416119 - RNA, 19 nt, Artificial Sequence
  Description of Artificial Sequence: Synthetic oligonucleotide
  Antisense strand to SEQ ID NO: 1416118
ugcucagagacgaagacug

SEQ ID NO: 1416120 - RNA, 19 nt, Artificial Sequence
  Description of Artificial Sequence: Synthetic oligonucleotide
  Sense strand starting at position 2493 of SEQ ID NO: 1243429
gcgugaaacccugaagccu

SEQ ID NO: 1416121 - RNA, 19 nt, Artificial Sequence
  Description of Artificial Sequence: Synthetic oligonucleotide
  Antisense strand to SEQ ID NO: 1416120
aggcuucaggguuucacgc

SEQ ID NO: 1416122 - RNA, 19 nt, Artificial Sequence
  Description of Artificial Sequence: Synthetic oligonucleotide
  Sense strand starting at position 2524 of SEQ ID NO: 1243429
aggcacuccugaguuacua

SEQ ID NO: 1416123 - RNA, 19 nt, Artificial Sequence
  Description of Artificial Sequence: Synthetic oligonucleotide
  Antisense strand to SEQ ID NO: 1416122
uaguaacucaggagugccu

SEQ ID NO: 1416124 - RNA, 19 nt, Artificial Sequence
  Description of Artificial Sequence: Synthetic oligonucleotide
  Sense strand starting at position 3403 of SEQ ID NO: 1243429
gccugaguccuagacaaga

SEQ ID NO: 1416125 - RNA, 19 nt, Artificial Sequence
  Description of Artificial Sequence: Synthetic oligonucleotide
  Antisense strand to SEQ ID NO: 1416124
ucuugucuaggacucaggc

SEQ ID NO: 1416126 - RNA, 19 nt, Artificial Sequence
  Description of Artificial Sequence: Synthetic oligonucleotide
  Sense strand starting at position 3435 of SEQ ID NO: 1243429
ccaugccauuccugggaga

SEQ ID NO: 1416127 - RNA, 19 nt, Artificial Sequence
  Description of Artificial Sequence: Synthetic oligonucleotide
  Antisense strand to SEQ ID NO: 1416126
ucucccaggaauggcaugg

SEQ ID NO: 1416128 - RNA, 19 nt, Artificial Sequence
  Description of Artificial Sequence: Synthetic oligonucleotide
  Sense strand starting at position 3437 of SEQ ID NO: 1243429
augccauuccugggagacu

SEQ ID NO: 1416129 - RNA, 19 nt, Artificial Sequence
  Description of Artificial Sequence: Synthetic oligonucleotide
  Antisense strand to SEQ ID NO: 1416128
agucucccaggaauggcau

SEQ ID NO: 1416130 - RNA, 19 nt, Artificial Sequence
  Description of Artificial Sequence: Synthetic oligonucleotide
  Sense strand starting at position 3438 of SEQ ID NO: 1243429
ugccauuccugggagacuu

SEQ ID NO: 1416131 - RNA, 19 nt, Artificial Sequence
  Description of Artificial Sequence: Synthetic oligonucleotide
  Antisense strand to SEQ ID NO: 1416130
aagucucccaggaauggca

SEQ ID NO: 1416132 - RNA, 19 nt, Artificial Sequence
  Description of Artificial Sequence: Synthetic oligonucleotide
  Sense strand starting at position 3446 of SEQ ID NO: 1243429
cugggagacuugucccaga

SEQ ID NO: 1416133 - RNA, 19 nt, Artificial Sequence
  Description of Artificial Sequence: Synthetic oligonucleotide
  Antisense strand to SEQ ID NO: 1416132
ucugggacaagucucccag

SEQ ID NO: 1416134 - RNA, 19 nt, Artificial Sequence
  Description of Artificial Sequence: Synthetic oligonucleotide
  Sense strand starting at position 3453 of SEQ ID NO: 1243429
acuugucccagacggaauu

SEQ ID NO: 1416135 - RNA, 19 nt, Artificial Sequence
  Description of Artificial Sequence: Synthetic oligonucleotide
  Antisense strand to SEQ ID NO: 1416134
aauuccgucugggacaagu

SEQ ID NO: 1416136 - RNA, 19 nt, Artificial Sequence
  Description of Artificial Sequence: Synthetic oligonucleotide
  Sense strand starting at position 3490 of SEQ ID NO: 1243429
gugauauucuaaggcucaa

SEQ ID NO: 1416137 - RNA, 19 nt, Artificial Sequence
  Description of Artificial Sequence: Synthetic oligonucleotide
  Antisense strand to SEQ ID NO: 1416136
uugagccuuagaauaucac

SEQ ID NO: 1416138 - RNA, 19 nt, Artificial Sequence
  Description of Artificial Sequence: Synthetic oligonucleotide
  Sense strand starting at position 3538 of SEQ ID NO: 1243429
cggagacccugacagauaa

SEQ ID NO: 1416139 - RNA, 19 nt, Artificial Sequence
  Description of Artificial Sequence: Synthetic oligonucleotide
  Antisense strand to SEQ ID NO: 1416138
uuaucugucagggucuccg

SEQ ID NO: 1416140 - RNA, 19 nt, Artificial Sequence
  Description of Artificial Sequence: Synthetic oligonucleotide
  Sense strand starting at position 3791 of SEQ ID NO: 1243429
ccaggccugcucugaaaca

SEQ ID NO: 1416141 - RNA, 19 nt, Artificial Sequence
  Description of Artificial Sequence: Synthetic oligonucleotide
  Antisense strand to SEQ ID NO: 1416140
uguuucagagcaggccugg

SEQ ID NO: 1416142 - RNA, 19 nt, Artificial Sequence
  Description of Artificial Sequence: Synthetic oligonucleotide
  Sense strand starting at position 3818 of SEQ ID NO: 1243429
ccaaguuacugaugaacuc

SEQ ID NO: 1416143 - RNA, 19 nt, Artificial Sequence
  Description of Artificial Sequence: Synthetic oligonucleotide
  Antisense strand to SEQ ID NO: 1416142
gaguucaucaguaacuugg

SEQ ID NO: 1416144 - RNA, 19 nt, Artificial Sequence
  Description of Artificial Sequence: Synthetic oligonucleotide
  Sense strand starting at position 3923 of SEQ ID NO: 1243429
aggccauagagguaguuau

SEQ ID NO: 1416145 - RNA, 19 nt, Artificial Sequence
  Description of Artificial Sequence: Synthetic oligonucleotide
  Antisense strand to SEQ ID NO: 1416144
auaacuaccucuauggccu

SEQ ID NO: 1416146 - RNA, 19 nt, Artificial Sequence
  Description of Artificial Sequence: Synthetic oligonucleotide
  Sense strand starting at position 3930 of SEQ ID NO: 1243429
agagguaguuauggacaga

SEQ ID NO: 1416147 - RNA, 19 nt, Artificial Sequence
  Description of Artificial Sequence: Synthetic oligonucleotide
  Antisense strand to SEQ ID NO: 1416146
ucuguccauaacuaccucu

SEQ ID NO: 1416148 - RNA, 19 nt, Artificial Sequence
  Description of Artificial Sequence: Synthetic oligonucleotide
  Sense strand starting at position 3961 of SEQ ID NO: 1243429
agccacucuucuggacaga

SEQ ID NO: 1416149 - RNA, 19 nt, Artificial Sequence
  Description of Artificial Sequence: Synthetic oligonucleotide
  Antisense strand to SEQ ID NO: 1416148
ucuguccagaagaguggcu

SEQ ID NO: 1416150 - RNA, 19 nt, Artificial Sequence
  Description of Artificial Sequence: Synthetic oligonucleotide
  Sense strand starting at position 3962 of SEQ ID NO: 1243429
gccacucuucuggacagau

SEQ ID NO: 1416151 - RNA, 19 nt, Artificial Sequence
  Description of Artificial Sequence: Synthetic oligonucleotide
  Antisense strand to SEQ ID NO: 1416150
aucuguccagaagaguggc

SEQ ID NO: 1416152 - RNA, 19 nt, Artificial Sequence
  Description of Artificial Sequence: Synthetic oligonucleotide
  Sense strand starting at position 19 of SEQ ID NO: 1243430
gggucagccuggucuuuca

SEQ ID NO: 1416153 - RNA, 19 nt, Artificial Sequence
  Description of Artificial Sequence: Synthetic oligonucleotide
  Antisense strand to SEQ ID NO: 1416152
ugaaagaccaggcugaccc

SEQ ID NO: 1416154 - RNA, 19 nt, Artificial Sequence
  Description of Artificial Sequence: Synthetic oligonucleotide
  Sense strand starting at position 2160 of SEQ ID NO: 1243430
gggcgagagaggcguauua

SEQ ID NO: 1416155 - RNA, 19 nt, Artificial Sequence
  Description of Artificial Sequence: Synthetic oligonucleotide
  Antisense strand to SEQ ID NO: 1416154
uaauacgccucucucgccc

SEQ ID NO: 1416156 - RNA, 19 nt, Artificial Sequence
  Description of Artificial Sequence: Synthetic oligonucleotide
  Sense strand starting at position 2307 of SEQ ID NO: 1243430
ccgugaugccucgcgcuga

SEQ ID NO: 1416157 - RNA, 19 nt, Artificial Sequence
  Description of Artificial Sequence: Synthetic oligonucleotide
  Antisense strand to SEQ ID NO: 1416156
ucagcgcgaggcaucacgg

SEQ ID NO: 1416158 - RNA, 19 nt, Artificial Sequence
  Description of Artificial Sequence: Synthetic oligonucleotide
  Sense strand starting at position 2308 of SEQ ID NO: 1243430
cgugaugccucgcgcugaa

SEQ ID NO: 1416159 - RNA, 19 nt, Artificial Sequence
  Description of Artificial Sequence: Synthetic oligonucleotide
  Antisense strand to SEQ ID NO: 1416158
uucagcgcgaggcaucacg

SEQ ID NO: 1416160 - RNA, 19 nt, Artificial Sequence
  Description of Artificial Sequence: Synthetic oligonucleotide
  Sense strand starting at position 2381 of SEQ ID NO: 1243430
ccaggauucgggcgagguu

SEQ ID NO: 1416161 - RNA, 19 nt, Artificial Sequence
  Description of Artificial Sequence: Synthetic oligonucleotide
  Antisense strand to SEQ ID NO: 1416160
aaccucgcccgaauccugg

SEQ ID NO: 1416162 - RNA, 19 nt, Artificial Sequence
  Description of Artificial Sequence: Synthetic oligonucleotide
  Sense strand starting at position 2396 of SEQ ID NO: 1243430
gguugugcuguuugccaga

SEQ ID NO: 1416163 - RNA, 19 nt, Artificial Sequence
  Description of Artificial Sequence: Synthetic oligonucleotide
  Antisense strand to SEQ ID NO: 1416162
ucuggcaaacagcacaacc

SEQ ID NO: 1416164 - RNA, 19 nt, Artificial Sequence
  Description of Artificial Sequence: Synthetic oligonucleotide
  Sense strand starting at position 2666 of SEQ ID NO: 1243430
ugacuaccuagacggauaa

SEQ ID NO: 1416165 - RNA, 19 nt, Artificial Sequence
  Description of Artificial Sequence: Synthetic oligonucleotide
  Antisense strand to SEQ ID NO: 1416164
uuauccgucuagguaguca

SEQ ID NO: 1416166 - RNA, 19 nt, Artificial Sequence
  Description of Artificial Sequence: Synthetic oligonucleotide
  Sense strand starting at position 2678 of SEQ ID NO: 1243430
cggauaagcgucugucuuu

SEQ ID NO: 1416167 - RNA, 19 nt, Artificial Sequence
  Description of Artificial Sequence: Synthetic oligonucleotide
  Antisense strand to SEQ ID NO: 1416166
aaagacagacgcuuauccg

SEQ ID NO: 1416168 - RNA, 19 nt, Artificial Sequence
  Description of Artificial Sequence: Synthetic oligonucleotide
  Sense strand starting at position 2719 of SEQ ID NO: 1243430
gcgaauggaugucuacuca

SEQ ID NO: 1416169 - RNA, 19 nt, Artificial Sequence
  Description of Artificial Sequence: Synthetic oligonucleotide
  Antisense strand to SEQ ID NO: 1416168
ugaguagacauccauucgc

SEQ ID NO: 1416170 - RNA, 19 nt, Artificial Sequence
  Description of Artificial Sequence: Synthetic oligonucleotide
  Sense strand starting at position 2723 of SEQ ID NO: 1243430
auggaugucuacucacaaa

SEQ ID NO: 1416171 - RNA, 19 nt, Artificial Sequence
  Description of Artificial Sequence: Synthetic oligonucleotide
  Antisense strand to SEQ ID NO: 1416170
uuugugaguagacauccau

SEQ ID NO: 1416172 - RNA, 19 nt, Artificial Sequence
  Description of Artificial Sequence: Synthetic oligonucleotide
  Sense strand starting at position 2742 of SEQ ID NO: 1243430
uaguaaucgcuccaaagga

SEQ ID NO: 1416173 - RNA, 19 nt, Artificial Sequence
  Description of Artificial Sequence: Synthetic oligonucleotide
  Antisense strand to SEQ ID NO: 1416172
uccuuuggagcgauuacua

SEQ ID NO: 1416174 - RNA, 19 nt, Artificial Sequence
  Description of Artificial Sequence: Synthetic oligonucleotide
  Sense strand starting at position 2845 of SEQ ID NO: 1243430
gccaauucuugucccagga

SEQ ID NO: 1416175 - RNA, 19 nt, Artificial Sequence
  Description of Artificial Sequence: Synthetic oligonucleotide
  Antisense strand to SEQ ID NO: 1416174
uccugggacaagaauuggc

SEQ ID NO: 1416176 - RNA, 19 nt, Artificial Sequence
  Description of Artificial Sequence: Synthetic oligonucleotide
  Sense strand starting at position 2849 of SEQ ID NO: 1243430
auucuugucccaggaacca

SEQ ID NO: 1416177 - RNA, 19 nt, Artificial Sequence
  Description of Artificial Sequence: Synthetic oligonucleotide
  Antisense strand to SEQ ID NO: 1416176
ugguuccugggacaagaau

SEQ ID NO: 1416178 - RNA, 19 nt, Artificial Sequence
  Description of Artificial Sequence: Synthetic oligonucleotide
  Sense strand starting at position 2893 of SEQ ID NO: 1243430
gagcuaggcuccgccauua

SEQ ID NO: 1416179 - RNA, 19 nt, Artificial Sequence
  Description of Artificial Sequence: Synthetic oligonucleotide
  Antisense strand to SEQ ID NO: 1416178
uaauggcggagccuagcuc

SEQ ID NO: 1416180 - RNA, 19 nt, Artificial Sequence
  Description of Artificial Sequence: Synthetic oligonucleotide
  Sense strand starting at position 3036 of SEQ ID NO: 1243430
ggauuugcauuguaacaau

SEQ ID NO: 1416181 - RNA, 19 nt, Artificial Sequence
  Description of Artificial Sequence: Synthetic oligonucleotide
  Antisense strand to SEQ ID NO: 1416180
auuguuacaaugcaaaucc

SEQ ID NO: 1416182 - RNA, 19 nt, Artificial Sequence
  Description of Artificial Sequence: Synthetic oligonucleotide
  Sense strand starting at position 3494 of SEQ ID NO: 1243430
ggcaguucuccaggugaau

SEQ ID NO: 1416183 - RNA, 19 nt, Artificial Sequence
  Description of Artificial Sequence: Synthetic oligonucleotide
  Antisense strand to SEQ ID NO: 1416182
auucaccuggagaacugcc

SEQ ID NO: 1416184 - RNA, 19 nt, Artificial Sequence
  Description of Artificial Sequence: Synthetic oligonucleotide
  Sense strand starting at position 3507 of SEQ ID NO: 1243430
gugaauuaccugcaaacua

SEQ ID NO: 1416185 - RNA, 19 nt, Artificial Sequence
  Description of Artificial Sequence: Synthetic oligonucleotide
  Antisense strand to SEQ ID NO: 1416184
uaguuugcagguaauucac

SEQ ID NO: 1416186 - RNA, 19 nt, Artificial Sequence
  Description of Artificial Sequence: Synthetic oligonucleotide
  Sense strand starting at position 3587 of SEQ ID NO: 1243430
ggguacgugugaagguuua

SEQ ID NO: 1416187 - RNA, 19 nt, Artificial Sequence
  Description of Artificial Sequence: Synthetic oligonucleotide
  Antisense strand to SEQ ID NO: 1416186
uaaaccuucacacguaccc

SEQ ID NO: 1416188 - RNA, 19 nt, Artificial Sequence
  Description of Artificial Sequence: Synthetic oligonucleotide
  Sense strand starting at position 3594 of SEQ ID NO: 1243430
ugugaagguuuacuacaua

SEQ ID NO: 1416189 - RNA, 19 nt, Artificial Sequence
  Description of Artificial Sequence: Synthetic oligonucleotide
  Antisense strand to SEQ ID NO: 1416188
uauguaguaaaccuucaca

SEQ ID NO: 1416190 - RNA, 19 nt, Artificial Sequence
  Description of Artificial Sequence: Synthetic oligonucleotide
  Sense strand starting at position 3620 of SEQ ID NO: 1243430
ucgugucaccgcgauuugu

SEQ ID NO: 1416191 - RNA, 19 nt, Artificial Sequence
  Description of Artificial Sequence: Synthetic oligonucleotide
  Antisense strand to SEQ ID NO: 1416190
acaaaucgcggugacacga

SEQ ID NO: 1416192 - RNA, 19 nt, Artificial Sequence
  Description of Artificial Sequence: Synthetic oligonucleotide
  Sense strand starting at position 3629 of SEQ ID NO: 1243430
cgcgauuuguuguacagau

SEQ ID NO: 1416193 - RNA, 19 nt, Artificial Sequence
  Description of Artificial Sequence: Synthetic oligonucleotide
  Antisense strand to SEQ ID NO: 1416192
aucuguacaacaaaucgcg

SEQ ID NO: 1416194 - RNA, 19 nt, Artificial Sequence
  Description of Artificial Sequence: Synthetic oligonucleotide
  Sense strand starting at position 3781 of SEQ ID NO: 1243430
acucacacuugugagaaua

SEQ ID NO: 1416195 - RNA, 19 nt, Artificial Sequence
  Description of Artificial Sequence: Synthetic oligonucleotide
  Antisense strand to SEQ ID NO: 1416194
uauucucacaagugugagu

SEQ ID NO: 1416196 - RNA, 19 nt, Artificial Sequence
  Description of Artificial Sequence: Synthetic oligonucleotide
  Sense strand starting at position 3783 of SEQ ID NO: 1243430
ucacacuugugagaauaug

SEQ ID NO: 1416197 - RNA, 19 nt, Artificial Sequence
  Description of Artificial Sequence: Synthetic oligonucleotide
  Antisense strand to SEQ ID NO: 1416196
cauauucucacaaguguga

SEQ ID NO: 1416198 - RNA, 19 nt, Artificial Sequence
  Description of Artificial Sequence: Synthetic oligonucleotide
  Sense strand starting at position 3916 of SEQ ID NO: 1243430
uuucucuccugauagcaga

SEQ ID NO: 1416199 - RNA, 19 nt, Artificial Sequence
  Description of Artificial Sequence: Synthetic oligonucleotide
  Antisense strand to SEQ ID NO: 1416198
ucugcuaucaggagagaaa

SEQ ID NO: 1416200 - RNA, 19 nt, Artificial Sequence
  Description of Artificial Sequence: Synthetic oligonucleotide
  Sense strand starting at position 349 of SEQ ID NO: 1243431
cugccugggacguaugaaa

SEQ ID NO: 1416201 - RNA, 19 nt, Artificial Sequence
  Description of Artificial Sequence: Synthetic oligonucleotide
  Antisense strand to SEQ ID NO: 1416200
uuucauacgucccaggcag

SEQ ID NO: 1416202 - RNA, 19 nt, Artificial Sequence
  Description of Artificial Sequence: Synthetic oligonucleotide
  Sense strand starting at position 628 of SEQ ID NO: 1243431
ugagcuaguguauagacaa

SEQ ID NO: 1416203 - RNA, 19 nt, Artificial Sequence
  Description of Artificial Sequence: Synthetic oligonucleotide
  Antisense strand to SEQ ID NO: 1416202
uugucuauacacuagcuca

SEQ ID NO: 1416204 - RNA, 19 nt, Artificial Sequence
  Description of Artificial Sequence: Synthetic oligonucleotide
  Sense strand starting at position 660 of SEQ ID NO: 1243431
ggcugucacucagugcuua

SEQ ID NO: 1416205 - RNA, 19 nt, Artificial Sequence
  Description of Artificial Sequence: Synthetic oligonucleotide
  Antisense strand to SEQ ID NO: 1416204
uaagcacugagugacagcc

SEQ ID NO: 1416206 - RNA, 19 nt, Artificial Sequence
  Description of Artificial Sequence: Synthetic oligonucleotide
  Sense strand starting at position 661 of SEQ ID NO: 1243431
gcugucacucagugcuuaa

SEQ ID NO: 1416207 - RNA, 19 nt, Artificial Sequence
  Description of Artificial Sequence: Synthetic oligonucleotide
  Antisense strand to SEQ ID NO: 1416206
uuaagcacugagugacagc

SEQ ID NO: 1416208 - RNA, 19 nt, Artificial Sequence
  Description of Artificial Sequence: Synthetic oligonucleotide
  Sense strand starting at position 1507 of SEQ ID NO: 1243431
gaagcacuucuggguuacu

SEQ ID NO: 1416209 - RNA, 19 nt, Artificial Sequence
  Description of Artificial Sequence: Synthetic oligonucleotide
  Antisense strand to SEQ ID NO: 1416208
aguaacccagaagugcuuc

SEQ ID NO: 1416210 - RNA, 19 nt, Artificial Sequence
  Description of Artificial Sequence: Synthetic oligonucleotide
  Sense strand starting at position 1508 of SEQ ID NO: 1243431
aagcacuucuggguuacua

SEQ ID NO: 1416211 - RNA, 19 nt, Artificial Sequence
  Description of Artificial Sequence: Synthetic oligonucleotide
  Antisense strand to SEQ ID NO: 1416210
uaguaacccagaagugcuu

SEQ ID NO: 1416212 - RNA, 19 nt, Artificial Sequence
  Description of Artificial Sequence: Synthetic oligonucleotide
  Sense strand starting at position 1510 of SEQ ID NO: 1243431
gcacuucuggguuacuauc

SEQ ID NO: 1416213 - RNA, 19 nt, Artificial Sequence
  Description of Artificial Sequence: Synthetic oligonucleotide
  Antisense strand to SEQ ID NO: 1416212
gauaguaacccagaagugc

SEQ ID NO: 1416214 - RNA, 19 nt, Artificial Sequence
  Description of Artificial Sequence: Synthetic oligonucleotide
  Sense strand starting at position 1544 of SEQ ID NO: 1243431
gagucugagucccacaaau

SEQ ID NO: 1416215 - RNA, 19 nt, Artificial Sequence
  Description of Artificial Sequence: Synthetic oligonucleotide
  Antisense strand to SEQ ID NO: 1416214
auuugugggacucagacuc

SEQ ID NO: 1416216 - RNA, 19 nt, Artificial Sequence
  Description of Artificial Sequence: Synthetic oligonucleotide
  Sense strand starting at position 1546 of SEQ ID NO: 1243431
gucugagucccacaaauag

SEQ ID NO: 1416217 - RNA, 19 nt, Artificial Sequence
  Description of Artificial Sequence: Synthetic oligonucleotide
  Antisense strand to SEQ ID NO: 1416216
cuauuugugggacucagac

SEQ ID NO: 1416218 - RNA, 19 nt, Artificial Sequence
  Description of Artificial Sequence: Synthetic oligonucleotide
  Sense strand starting at position 2250 of SEQ ID NO: 1243431
acuggucugcaggaugaau

SEQ ID NO: 1416219 - RNA, 19 nt, Artificial Sequence
  Description of Artificial Sequence: Synthetic oligonucleotide
  Antisense strand to SEQ ID NO: 1416218
auucauccugcagaccagu

SEQ ID NO: 1416220 - RNA, 19 nt, Artificial Sequence
  Description of Artificial Sequence: Synthetic oligonucleotide
  Sense strand starting at position 2333 of SEQ ID NO: 1243431
ggucgagacuuccgaggua

SEQ ID NO: 1416221 - RNA, 19 nt, Artificial Sequence
  Description of Artificial Sequence: Synthetic oligonucleotide
  Antisense strand to SEQ ID NO: 1416220
uaccucggaagucucgacc

SEQ ID NO: 1416222 - RNA, 19 nt, Artificial Sequence
  Description of Artificial Sequence: Synthetic oligonucleotide
  Sense strand starting at position 2439 of SEQ ID NO: 1243431
gcgggcagauccuugggaa

SEQ ID NO: 1416223 - RNA, 19 nt, Artificial Sequence
  Description of Artificial Sequence: Synthetic oligonucleotide
  Antisense strand to SEQ ID NO: 1416222
uucccaaggaucugcccgc

SEQ ID NO: 1416224 - RNA, 19 nt, Artificial Sequence
  Description of Artificial Sequence: Synthetic oligonucleotide
  Sense strand starting at position 2682 of SEQ ID NO: 1243431
gcaagcaguuucugucuga

SEQ ID NO: 1416225 - RNA, 19 nt, Artificial Sequence
  Description of Artificial Sequence: Synthetic oligonucleotide
  Antisense strand to SEQ ID NO: 1416224
ucagacagaaacugcuugc

SEQ ID NO: 1416226 - RNA, 19 nt, Artificial Sequence
  Description of Artificial Sequence: Synthetic oligonucleotide
  Sense strand starting at position 2685 of SEQ ID NO: 1243431
agcaguuucugucugagga

SEQ ID NO: 1416227 - RNA, 19 nt, Artificial Sequence
  Description of Artificial Sequence: Synthetic oligonucleotide
  Antisense strand to SEQ ID NO: 1416226
uccucagacagaaacugcu

SEQ ID NO: 1416228 - RNA, 19 nt, Artificial Sequence
  Description of Artificial Sequence: Synthetic oligonucleotide
  Sense strand starting at position 2686 of SEQ ID NO: 1243431
gcaguuucugucugaggag

SEQ ID NO: 1416229 - RNA, 19 nt, Artificial Sequence
  Description of Artificial Sequence: Synthetic oligonucleotide
  Antisense strand to SEQ ID NO: 1416228
cuccucagacagaaacugc

SEQ ID NO: 1416230 - RNA, 19 nt, Artificial Sequence
  Description of Artificial Sequence: Synthetic oligonucleotide
  Sense strand starting at position 2687 of SEQ ID NO: 1243431
caguuucugucugaggaga

SEQ ID NO: 1416231 - RNA, 19 nt, Artificial Sequence
  Description of Artificial Sequence: Synthetic oligonucleotide
  Antisense strand to SEQ ID NO: 1416230
ucuccucagacagaaacug

SEQ ID NO: 1416232 - RNA, 19 nt, Artificial Sequence
  Description of Artificial Sequence: Synthetic oligonucleotide
  Sense strand starting at position 3318 of SEQ ID NO: 1243431
acggaguucugggauggga

SEQ ID NO: 1416233 - RNA, 19 nt, Artificial Sequence
  Description of Artificial Sequence: Synthetic oligonucleotide
  Antisense strand to SEQ ID NO: 1416232
ucccaucccagaacuccgu

SEQ ID NO: 1416234 - RNA, 19 nt, Artificial Sequence
  Description of Artificial Sequence: Synthetic oligonucleotide
  Sense strand starting at position 3526 of SEQ ID NO: 1243431
ggcugaguuccaggcauug

SEQ ID NO: 1416235 - RNA, 19 nt, Artificial Sequence
  Description of Artificial Sequence: Synthetic oligonucleotide
  Antisense strand to SEQ ID NO: 1416234
caaugccuggaacucagcc

SEQ ID NO: 1416236 - RNA, 19 nt, Artificial Sequence
  Description of Artificial Sequence: Synthetic oligonucleotide
  Sense strand starting at position 3531 of SEQ ID NO: 1243431
aguuccaggcauugagaau

SEQ ID NO: 1416237 - RNA, 19 nt, Artificial Sequence
  Description of Artificial Sequence: Synthetic oligonucleotide
  Antisense strand to SEQ ID NO: 1416236
auucucaaugccuggaacu

SEQ ID NO: 1416238 - RNA, 19 nt, Artificial Sequence
  Description of Artificial Sequence: Synthetic oligonucleotide
  Sense strand starting at position 3532 of SEQ ID NO: 1243431
guuccaggcauugagaaug

SEQ ID NO: 1416239 - RNA, 19 nt, Artificial Sequence
  Description of Artificial Sequence: Synthetic oligonucleotide
  Antisense strand to SEQ ID NO: 1416238
cauucucaaugccuggaac

SEQ ID NO: 1416240 - RNA, 19 nt, Artificial Sequence
  Description of Artificial Sequence: Synthetic oligonucleotide
  Sense strand starting at position 3537 of SEQ ID NO: 1243431
aggcauugagaauguguga

SEQ ID NO: 1416241 - RNA, 19 nt, Artificial Sequence
  Description of Artificial Sequence: Synthetic oligonucleotide
  Antisense strand to SEQ ID NO: 1416240
ucacacauucucaaugccu

SEQ ID NO: 1416242 - RNA, 19 nt, Artificial Sequence
  Description of Artificial Sequence: Synthetic oligonucleotide
  Sense strand starting at position 53 of SEQ ID NO: 1243432
gagaaacgugcugaccaga

SEQ ID NO: 1416243 - RNA, 19 nt, Artificial Sequence
  Description of Artificial Sequence: Synthetic oligonucleotide
  Antisense strand to SEQ ID NO: 1416242
ucuggucagcacguuucuc

SEQ ID NO: 1416244 - RNA, 19 nt, Artificial Sequence
  Description of Artificial Sequence: Synthetic oligonucleotide
  Sense strand starting at position 58 of SEQ ID NO: 1243432
acgugcugaccagaucaau

SEQ ID NO: 1416245 - RNA, 19 nt, Artificial Sequence
  Description of Artificial Sequence: Synthetic oligonucleotide
  Antisense strand to SEQ ID NO: 1416244
auugaucuggucagcacgu

SEQ ID NO: 1416246 - RNA, 19 nt, Artificial Sequence
  Description of Artificial Sequence: Synthetic oligonucleotide
  Sense strand starting at position 61 of SEQ ID NO: 1243432
ugcugaccagaucaaucau

SEQ ID NO: 1416247 - RNA, 19 nt, Artificial Sequence
  Description of Artificial Sequence: Synthetic oligonucleotide
  Antisense strand to SEQ ID NO: 1416246
augauugaucuggucagca

SEQ ID NO: 1416248 - RNA, 19 nt, Artificial Sequence
  Description of Artificial Sequence: Synthetic oligonucleotide
  Sense strand starting at position 106 of SEQ ID NO: 1243432
cagguaucugugugccuca

SEQ ID NO: 1416249 - RNA, 19 nt, Artificial Sequence
  Description of Artificial Sequence: Synthetic oligonucleotide
  Antisense strand to SEQ ID NO: 1416248
ugaggcacacagauaccug

SEQ ID NO: 1416250 - RNA, 19 nt, Artificial Sequence
  Description of Artificial Sequence: Synthetic oligonucleotide
  Sense strand starting at position 153 of SEQ ID NO: 1243432
accaaauaccuguggaauu

SEQ ID NO: 1416251 - RNA, 19 nt, Artificial Sequence
  Description of Artificial Sequence: Synthetic oligonucleotide
  Antisense strand to SEQ ID NO: 1416250
aauuccacagguauuuggu

SEQ ID NO: 1416252 - RNA, 19 nt, Artificial Sequence
  Description of Artificial Sequence: Synthetic oligonucleotide
  Sense strand starting at position 589 of SEQ ID NO: 1243432
ccuagugcccaacgaaauu

SEQ ID NO: 1416253 - RNA, 19 nt, Artificial Sequence
  Description of Artificial Sequence: Synthetic oligonucleotide
  Antisense strand to SEQ ID NO: 1416252
aauuucguugggcacuagg

SEQ ID NO: 1416254 - RNA, 19 nt, Artificial Sequence
  Description of Artificial Sequence: Synthetic oligonucleotide
  Sense strand starting at position 608 of SEQ ID NO: 1243432
gccagucaggcacaauaau

SEQ ID NO: 1416255 - RNA, 19 nt, Artificial Sequence
  Description of Artificial Sequence: Synthetic oligonucleotide
  Antisense strand to SEQ ID NO: 1416254
auuauugugccugacuggc

SEQ ID NO: 1416256 - RNA, 19 nt, Artificial Sequence
  Description of Artificial Sequence: Synthetic oligonucleotide
  Sense strand starting at position 652 of SEQ ID NO: 1243432
auuacauaccaguauguau

SEQ ID NO: 1416257 - RNA, 19 nt, Artificial Sequence
  Description of Artificial Sequence: Synthetic oligonucleotide
  Antisense strand to SEQ ID NO: 1416256
auacauacugguauguaau

SEQ ID NO: 1416258 - RNA, 19 nt, Artificial Sequence
  Description of Artificial Sequence: Synthetic oligonucleotide
  Sense strand starting at position 699 of SEQ ID NO: 1243432
gucuuaaaguauucucuuu

SEQ ID NO: 1416259 - RNA, 19 nt, Artificial Sequence
  Description of Artificial Sequence: Synthetic oligonucleotide
  Antisense strand to SEQ ID NO: 1416258
aaagagaauacuuuaagac

SEQ ID NO: 1416260 - RNA, 19 nt, Artificial Sequence
  Description of Artificial Sequence: Synthetic oligonucleotide
  Sense strand starting at position 842 of SEQ ID NO: 1243432
uguguauugguccagauuc

SEQ ID NO: 1416261 - RNA, 19 nt, Artificial Sequence
  Description of Artificial Sequence: Synthetic oligonucleotide
  Antisense strand to SEQ ID NO: 1416260
gaaucuggaccaauacaca

SEQ ID NO: 1416262 - RNA, 19 nt, Artificial Sequence
  Description of Artificial Sequence: Synthetic oligonucleotide
  Sense strand starting at position 844 of SEQ ID NO: 1243432
uguauugguccagauucua

SEQ ID NO: 1416263 - RNA, 19 nt, Artificial Sequence
  Description of Artificial Sequence: Synthetic oligonucleotide
  Antisense strand to SEQ ID NO: 1416262
uagaaucuggaccaauaca

SEQ ID NO: 1416264 - RNA, 19 nt, Artificial Sequence
  Description of Artificial Sequence: Synthetic oligonucleotide
  Sense strand starting at position 852 of SEQ ID NO: 1243432
uccagauucuaagccagua

SEQ ID NO: 1416265 - RNA, 19 nt, Artificial Sequence
  Description of Artificial Sequence: Synthetic oligonucleotide
  Antisense strand to SEQ ID NO: 1416264
uacuggcuuagaaucugga

SEQ ID NO: 1416266 - RNA, 19 nt, Artificial Sequence
  Description of Artificial Sequence: Synthetic oligonucleotide
  Sense strand starting at position 857 of SEQ ID NO: 1243432
auucuaagccaguaauaug

SEQ ID NO: 1416267 - RNA, 19 nt, Artificial Sequence
  Description of Artificial Sequence: Synthetic oligonucleotide
  Antisense strand to SEQ ID NO: 1416266
cauauuacuggcuuagaau

SEQ ID NO: 1416268 - RNA, 19 nt, Artificial Sequence
  Description of Artificial Sequence: Synthetic oligonucleotide
  Sense strand starting at position 887 of SEQ ID NO: 1243432
cuaagacuuuaggugauau

SEQ ID NO: 1416269 - RNA, 19 nt, Artificial Sequence
  Description of Artificial Sequence: Synthetic oligonucleotide
  Antisense strand to SEQ ID NO: 1416268
auaucaccuaaagucuuag

SEQ ID NO: 1416270 - RNA, 19 nt, Artificial Sequence
  Description of Artificial Sequence: Synthetic oligonucleotide
  Sense strand starting at position 945 of SEQ ID NO: 1243432
aguaacuagcauuaguagu

SEQ ID NO: 1416271 - RNA, 19 nt, Artificial Sequence
  Description of Artificial Sequence: Synthetic oligonucleotide
  Antisense strand to SEQ ID NO: 1416270
acuacuaaugcuaguuacu

SEQ ID NO: 1416272 - RNA, 19 nt, Artificial Sequence
  Description of Artificial Sequence: Synthetic oligonucleotide
  Sense strand starting at position 1038 of SEQ ID NO: 1243432
aaauguguuucugaaagag

SEQ ID NO: 1416273 - RNA, 19 nt, Artificial Sequence
  Description of Artificial Sequence: Synthetic oligonucleotide
  Antisense strand to SEQ ID NO: 1416272
cucuuucagaaacacauuu

SEQ ID NO: 1416274 - RNA, 19 nt, Artificial Sequence
  Description of Artificial Sequence: Synthetic oligonucleotide
  Sense strand starting at position 1087 of SEQ ID NO: 1243432
aauccuuaagugggaggua

SEQ ID NO: 1416275 - RNA, 19 nt, Artificial Sequence
  Description of Artificial Sequence: Synthetic oligonucleotide
  Antisense strand to SEQ ID NO: 1416274
uaccucccacuuaaggauu

SEQ ID NO: 1416276 - RNA, 19 nt, Artificial Sequence
  Description of Artificial Sequence: Synthetic oligonucleotide
  Sense strand starting at position 1300 of SEQ ID NO: 1243432
cgaggcuucccugagcuau

SEQ ID NO: 1416277 - RNA, 19 nt, Artificial Sequence
  Description of Artificial Sequence: Synthetic oligonucleotide
  Antisense strand to SEQ ID NO: 1416276
auagcucagggaagccucg

SEQ ID NO: 1416278 - RNA, 19 nt, Artificial Sequence
  Description of Artificial Sequence: Synthetic oligonucleotide
  Sense strand starting at position 1302 of SEQ ID NO: 1243432
aggcuucccugagcuauca

SEQ ID NO: 1416279 - RNA, 19 nt, Artificial Sequence
  Description of Artificial Sequence: Synthetic oligonucleotide
  Antisense strand to SEQ ID NO: 1416278
ugauagcucagggaagccu

SEQ ID NO: 1416280 - RNA, 19 nt, Artificial Sequence
  Description of Artificial Sequence: Synthetic oligonucleotide
  Sense strand starting at position 1401 of SEQ ID NO: 1243432
gugguuacugauggcaaga

SEQ ID NO: 1416281 - RNA, 19 nt, Artificial Sequence
  Description of Artificial Sequence: Synthetic oligonucleotide
  Antisense strand to SEQ ID NO: 1416280
ucuugccaucaguaaccac

SEQ ID NO: 1416282 - RNA, 19 nt, Artificial Sequence
  Description of Artificial Sequence: Synthetic oligonucleotide
  Sense strand starting at position 1692 of SEQ ID NO: 1243432
gcacuugcgcucguucaua

SEQ ID NO: 1416283 - RNA, 19 nt, Artificial Sequence
  Description of Artificial Sequence: Synthetic oligonucleotide
  Antisense strand to SEQ ID NO: 1416282
uaugaacgagcgcaagugc

SEQ ID NO: 1416284 - RNA, 19 nt, Artificial Sequence
  Description of Artificial Sequence: Synthetic oligonucleotide
  Sense strand starting at position 1704 of SEQ ID NO: 1243432
guucauauugcaggugaug

SEQ ID NO: 1416285 - RNA, 19 nt, Artificial Sequence
  Description of Artificial Sequence: Synthetic oligonucleotide
  Antisense strand to SEQ ID NO: 1416284
caucaccugcaauaugaac

SEQ ID NO: 1416286 - RNA, 19 nt, Artificial Sequence
  Description of Artificial Sequence: Synthetic oligonucleotide
  Sense strand starting at position 1706 of SEQ ID NO: 1243432
ucauauugcaggugaugag

SEQ ID NO: 1416287 - RNA, 19 nt, Artificial Sequence
  Description of Artificial Sequence: Synthetic oligonucleotide
  Antisense strand to SEQ ID NO: 1416286
cucaucaccugcaauauga

SEQ ID NO: 1416288 - RNA, 19 nt, Artificial Sequence
  Description of Artificial Sequence: Synthetic oligonucleotide
  Sense strand starting at position 2014 of SEQ ID NO: 1243432
gccggucugcaaucgugaa

SEQ ID NO: 1416289 - RNA, 19 nt, Artificial Sequence
  Description of Artificial Sequence: Synthetic oligonucleotide
  Antisense strand to SEQ ID NO: 1416288
uucacgauugcagaccggc

SEQ ID NO: 1416290 - RNA, 19 nt, Artificial Sequence
  Description of Artificial Sequence: Synthetic oligonucleotide
  Sense strand starting at position 2015 of SEQ ID NO: 1243432
ccggucugcaaucgugaaa

SEQ ID NO: 1416291 - RNA, 19 nt, Artificial Sequence
  Description of Artificial Sequence: Synthetic oligonucleotide
  Antisense strand to SEQ ID NO: 1416290
uuucacgauugcagaccgg

SEQ ID NO: 1416292 - RNA, 19 nt, Artificial Sequence
  Description of Artificial Sequence: Synthetic oligonucleotide
  Sense strand starting at position 2038 of SEQ ID NO: 1243432
uggagugauacccgcccaa

SEQ ID NO: 1416293 - RNA, 19 nt, Artificial Sequence
  Description of Artificial Sequence: Synthetic oligonucleotide
  Antisense strand to SEQ ID NO: 1416292
uugggcggguaucacucca

SEQ ID NO: 1416294 - RNA, 19 nt, Artificial Sequence
  Description of Artificial Sequence: Synthetic oligonucleotide
  Sense strand starting at position 2361 of SEQ ID NO: 1243432
uguaccuguacuugaguua

SEQ ID NO: 1416295 - RNA, 19 nt, Artificial Sequence
  Description of Artificial Sequence: Synthetic oligonucleotide
  Antisense strand to SEQ ID NO: 1416294
uaacucaaguacagguaca

SEQ ID NO: 1416296 - RNA, 19 nt, Artificial Sequence
  Description of Artificial Sequence: Synthetic oligonucleotide
  Sense strand starting at position 2404 of SEQ ID NO: 1243432
caaguugaccuuuaugugu

SEQ ID NO: 1416297 - RNA, 19 nt, Artificial Sequence
  Description of Artificial Sequence: Synthetic oligonucleotide
  Antisense strand to SEQ ID NO: 1416296
acacauaaaggucaacuug

SEQ ID NO: 1416298 - RNA, 19 nt, Artificial Sequence
  Description of Artificial Sequence: Synthetic oligonucleotide
  Sense strand starting at position 2411 of SEQ ID NO: 1243432
accuuuauguguuccuuga

SEQ ID NO: 1416299 - RNA, 19 nt, Artificial Sequence
  Description of Artificial Sequence: Synthetic oligonucleotide
  Antisense strand to SEQ ID NO: 1416298
ucaaggaacacauaaaggu

SEQ ID NO: 1416300 - RNA, 19 nt, Artificial Sequence
  Description of Artificial Sequence: Synthetic oligonucleotide
  Sense strand starting at position 3042 of SEQ ID NO: 1243432
aaagguauuguauguuugu

SEQ ID NO: 1416301 - RNA, 19 nt, Artificial Sequence
  Description of Artificial Sequence: Synthetic oligonucleotide
  Antisense strand to SEQ ID NO: 1416300
acaaacauacaauaccuuu

SEQ ID NO: 1416302 - RNA, 19 nt, Artificial Sequence
  Description of Artificial Sequence: Synthetic oligonucleotide
  Sense strand starting at position 3045 of SEQ ID NO: 1243432
gguauuguauguuugucua

SEQ ID NO: 1416303 - RNA, 19 nt, Artificial Sequence
  Description of Artificial Sequence: Synthetic oligonucleotide
  Antisense strand to SEQ ID NO: 1416302
uagacaaacauacaauacc

SEQ ID NO: 1416304 - RNA, 19 nt, Artificial Sequence
  Description of Artificial Sequence: Synthetic oligonucleotide
  Sense strand starting at position 3531 of SEQ ID NO: 1243432
uccauagucuuggcaacuu

SEQ ID NO: 1416305 - RNA, 19 nt, Artificial Sequence
  Description of Artificial Sequence: Synthetic oligonucleotide
  Antisense strand to SEQ ID NO: 1416304
aaguugccaagacuaugga

SEQ ID NO: 1416306 - RNA, 19 nt, Artificial Sequence
  Description of Artificial Sequence: Synthetic oligonucleotide
  Sense strand starting at position 3852 of SEQ ID NO: 1243432
agcagagauuucuagaagu

SEQ ID NO: 1416307 - RNA, 19 nt, Artificial Sequence
  Description of Artificial Sequence: Synthetic oligonucleotide
  Antisense strand to SEQ ID NO: 1416306
acuucuagaaaucucugcu

SEQ ID NO: 1416308 - RNA, 19 nt, Artificial Sequence
  Description of Artificial Sequence: Synthetic oligonucleotide
  Sense strand starting at position 3862 of SEQ ID NO: 1243432
ucuagaaguccucaguugu

SEQ ID NO: 1416309 - RNA, 19 nt, Artificial Sequence
  Description of Artificial Sequence: Synthetic oligonucleotide
  Antisense strand to SEQ ID NO: 1416308
acaacugaggacuucuaga

SEQ ID NO: 1416310 - RNA, 19 nt, Artificial Sequence
  Description of Artificial Sequence: Synthetic oligonucleotide
  Sense strand starting at position 3868 of SEQ ID NO: 1243432
aguccucaguuguuuguga

SEQ ID NO: 1416311 - RNA, 19 nt, Artificial Sequence
  Description of Artificial Sequence: Synthetic oligonucleotide
  Antisense strand to SEQ ID NO: 1416310
ucacaaacaacugaggacu

SEQ ID NO: 1416312 - RNA, 19 nt, Artificial Sequence
  Description of Artificial Sequence: Synthetic oligonucleotide
  Sense strand starting at position 3869 of SEQ ID NO: 1243432
guccucaguuguuugugaa

SEQ ID NO: 1416313 - RNA, 19 nt, Artificial Sequence
  Description of Artificial Sequence: Synthetic oligonucleotide
  Antisense strand to SEQ ID NO: 1416312
uucacaaacaacugaggac

SEQ ID NO: 1416314 - RNA, 19 nt, Artificial Sequence
  Description of Artificial Sequence: Synthetic oligonucleotide
  Sense strand starting at position 3870 of SEQ ID NO: 1243432
uccucaguuguuugugaag

SEQ ID NO: 1416315 - RNA, 19 nt, Artificial Sequence
  Description of Artificial Sequence: Synthetic oligonucleotide
  Antisense strand to SEQ ID NO: 1416314
cuucacaaacaacugagga

SEQ ID NO: 1416316 - RNA, 19 nt, Artificial Sequence
  Description of Artificial Sequence: Synthetic oligonucleotide
  Sense strand starting at position 3882 of SEQ ID NO: 1243432
ugugaagagcagugucaug

SEQ ID NO: 1416317 - RNA, 19 nt, Artificial Sequence
  Description of Artificial Sequence: Synthetic oligonucleotide
  Antisense strand to SEQ ID NO: 1416316
caugacacugcucuucaca

SEQ ID NO: 1416318 - RNA, 19 nt, Artificial Sequence
  Description of Artificial Sequence: Synthetic oligonucleotide
  Sense strand starting at position 3893 of SEQ ID NO: 1243432
gugucaugacacuggcauu

SEQ ID NO: 1416319 - RNA, 19 nt, Artificial Sequence
  Description of Artificial Sequence: Synthetic oligonucleotide
  Antisense strand to SEQ ID NO: 1416318
aaugccagugucaugacac

SEQ ID NO: 1416320 - RNA, 19 nt, Artificial Sequence
  Description of Artificial Sequence: Synthetic oligonucleotide
  Sense strand starting at position 3969 of SEQ ID NO: 1243432
gccaccuguccuuaggaua

SEQ ID NO: 1416321 - RNA, 19 nt, Artificial Sequence
  Description of Artificial Sequence: Synthetic oligonucleotide
  Antisense strand to SEQ ID NO: 1416320
uauccuaaggacagguggc

SEQ ID NO: 1416322 - RNA, 19 nt, Artificial Sequence
  Description of Artificial Sequence: Synthetic oligonucleotide
  Sense strand starting at position 64 of SEQ ID NO: 1243433
cugauagacugagaauauu

SEQ ID NO: 1416323 - RNA, 19 nt, Artificial Sequence
  Description of Artificial Sequence: Synthetic oligonucleotide
  Antisense strand to SEQ ID NO: 1416322
aauauucucagucuaucag

SEQ ID NO: 1416324 - RNA, 19 nt, Artificial Sequence
  Description of Artificial Sequence: Synthetic oligonucleotide
  Sense strand starting at position 102 of SEQ ID NO: 1243433
ucccaaccuggcugagauu

SEQ ID NO: 1416325 - RNA, 19 nt, Artificial Sequence
  Description of Artificial Sequence: Synthetic oligonucleotide
  Antisense strand to SEQ ID NO: 1416324
aaucucagccagguuggga

SEQ ID NO: 1416326 - RNA, 19 nt, Artificial Sequence
  Description of Artificial Sequence: Synthetic oligonucleotide
  Sense strand starting at position 160 of SEQ ID NO: 1243433
uuaggcagaugcucauuau

SEQ ID NO: 1416327 - RNA, 19 nt, Artificial Sequence
  Description of Artificial Sequence: Synthetic oligonucleotide
  Antisense strand to SEQ ID NO: 1416326
auaaugagcaucugccuaa

SEQ ID NO: 1416328 - RNA, 19 nt, Artificial Sequence
  Description of Artificial Sequence: Synthetic oligonucleotide
  Sense strand starting at position 161 of SEQ ID NO: 1243433
uaggcagaugcucauuauu

SEQ ID NO: 1416329 - RNA, 19 nt, Artificial Sequence
  Description of Artificial Sequence: Synthetic oligonucleotide
  Antisense strand to SEQ ID NO: 1416328
aauaaugagcaucugccua

SEQ ID NO: 1416330 - RNA, 19 nt, Artificial Sequence
  Description of Artificial Sequence: Synthetic oligonucleotide
  Sense strand starting at position 163 of SEQ ID NO: 1243433
ggcagaugcucauuauuaa

SEQ ID NO: 1416331 - RNA, 19 nt, Artificial Sequence
  Description of Artificial Sequence: Synthetic oligonucleotide
  Antisense strand to SEQ ID NO: 1416330
uuaauaaugagcaucugcc

SEQ ID NO: 1416332 - RNA, 19 nt, Artificial Sequence
  Description of Artificial Sequence: Synthetic oligonucleotide
  Sense strand starting at position 164 of SEQ ID NO: 1243433
gcagaugcucauuauuaaa

SEQ ID NO: 1416333 - RNA, 19 nt, Artificial Sequence
  Description of Artificial Sequence: Synthetic oligonucleotide
  Antisense strand to SEQ ID NO: 1416332
uuuaauaaugagcaucugc

SEQ ID NO: 1416334 - RNA, 19 nt, Artificial Sequence
  Description of Artificial Sequence: Synthetic oligonucleotide
  Sense strand starting at position 222 of SEQ ID NO: 1243433
cuaugccuaagaggaguua

SEQ ID NO: 1416335 - RNA, 19 nt, Artificial Sequence
  Description of Artificial Sequence: Synthetic oligonucleotide
  Antisense strand to SEQ ID NO: 1416334
uaacuccucuuaggcauag

SEQ ID NO: 1416336 - RNA, 19 nt, Artificial Sequence
  Description of Artificial Sequence: Synthetic oligonucleotide
  Sense strand starting at position 268 of SEQ ID NO: 1243433
agcauaauggccugguaau

SEQ ID NO: 1416337 - RNA, 19 nt, Artificial Sequence
  Description of Artificial Sequence: Synthetic oligonucleotide
  Antisense strand to SEQ ID NO: 1416336
auuaccaggccauuaugcu

SEQ ID NO: 1416338 - RNA, 19 nt, Artificial Sequence
  Description of Artificial Sequence: Synthetic oligonucleotide
  Sense strand starting at position 269 of SEQ ID NO: 1243433
gcauaauggccugguaaug

SEQ ID NO: 1416339 - RNA, 19 nt, Artificial Sequence
  Description of Artificial Sequence: Synthetic oligonucleotide
  Antisense strand to SEQ ID NO: 1416338
cauuaccaggccauuaugc

SEQ ID NO: 1416340 - RNA, 19 nt, Artificial Sequence
  Description of Artificial Sequence: Synthetic oligonucleotide
  Sense strand starting at position 748 of SEQ ID NO: 1243433
guauaagugccacauaaac

SEQ ID NO: 1416341 - RNA, 19 nt, Artificial Sequence
  Description of Artificial Sequence: Synthetic oligonucleotide
  Antisense strand to SEQ ID NO: 1416340
guuuauguggcacuuauac

SEQ ID NO: 1416342 - RNA, 19 nt, Artificial Sequence
  Description of Artificial Sequence: Synthetic oligonucleotide
  Sense strand starting at position 887 of SEQ ID NO: 1243433
ccuggaaagugucuccauu

SEQ ID NO: 1416343 - RNA, 19 nt, Artificial Sequence
  Description of Artificial Sequence: Synthetic oligonucleotide
  Antisense strand to SEQ ID NO: 1416342
aauggagacacuuuccagg

SEQ ID NO: 1416344 - RNA, 19 nt, Artificial Sequence
  Description of Artificial Sequence: Synthetic oligonucleotide
  Sense strand starting at position 1013 of SEQ ID NO: 1243433
acccuuguguuacugauau

SEQ ID NO: 1416345 - RNA, 19 nt, Artificial Sequence
  Description of Artificial Sequence: Synthetic oligonucleotide
  Antisense strand to SEQ ID NO: 1416344
auaucaguaacacaagggu

SEQ ID NO: 1416346 - RNA, 19 nt, Artificial Sequence
  Description of Artificial Sequence: Synthetic oligonucleotide
  Sense strand starting at position 1033 of SEQ ID NO: 1243433
cacgaaauugcucaguccu

SEQ ID NO: 1416347 - RNA, 19 nt, Artificial Sequence
  Description of Artificial Sequence: Synthetic oligonucleotide
  Antisense strand to SEQ ID NO: 1416346
aggacugagcaauuucgug

SEQ ID NO: 1416348 - RNA, 19 nt, Artificial Sequence
  Description of Artificial Sequence: Synthetic oligonucleotide
  Sense strand starting at position 1053 of SEQ ID NO: 1243433
ucaagagauugcuuaagga

SEQ ID NO: 1416349 - RNA, 19 nt, Artificial Sequence
  Description of Artificial Sequence: Synthetic oligonucleotide
  Antisense strand to SEQ ID NO: 1416348
uccuuaagcaaucucuuga

SEQ ID NO: 1416350 - RNA, 19 nt, Artificial Sequence
  Description of Artificial Sequence: Synthetic oligonucleotide
  Sense strand starting at position 1092 of SEQ ID NO: 1243433
cugcaauauuggcuacaca

SEQ ID NO: 1416351 - RNA, 19 nt, Artificial Sequence
  Description of Artificial Sequence: Synthetic oligonucleotide
  Antisense strand to SEQ ID NO: 1416350
uguguagccaauauugcag

SEQ ID NO: 1416352 - RNA, 19 nt, Artificial Sequence
  Description of Artificial Sequence: Synthetic oligonucleotide
  Sense strand starting at position 1093 of SEQ ID NO: 1243433
ugcaauauuggcuacacau

SEQ ID NO: 1416353 - RNA, 19 nt, Artificial Sequence
  Description of Artificial Sequence: Synthetic oligonucleotide
  Antisense strand to SEQ ID NO: 1416352
auguguagccaauauugca

SEQ ID NO: 1416354 - RNA, 19 nt, Artificial Sequence
  Description of Artificial Sequence: Synthetic oligonucleotide
  Sense strand starting at position 1127 of SEQ ID NO: 1243433
uagucccuugacugguaua

SEQ ID NO: 1416355 - RNA, 19 nt, Artificial Sequence
  Description of Artificial Sequence: Synthetic oligonucleotide
  Antisense strand to SEQ ID NO: 1416354
uauaccagucaagggacua

SEQ ID NO: 1416356 - RNA, 19 nt, Artificial Sequence
  Description of Artificial Sequence: Synthetic oligonucleotide
  Sense strand starting at position 1138 of SEQ ID NO: 1243433
cugguauaagcugacguua

SEQ ID NO: 1416357 - RNA, 19 nt, Artificial Sequence
  Description of Artificial Sequence: Synthetic oligonucleotide
  Antisense strand to SEQ ID NO: 1416356
uaacgucagcuuauaccag

SEQ ID NO: 1416358 - RNA, 19 nt, Artificial Sequence
  Description of Artificial Sequence: Synthetic oligonucleotide
  Sense strand starting at position 1211 of SEQ ID NO: 1243433
acugguacagacugacauu

SEQ ID NO: 1416359 - RNA, 19 nt, Artificial Sequence
  Description of Artificial Sequence: Synthetic oligonucleotide
  Antisense strand to SEQ ID NO: 1416358
aaugucagucuguaccagu

SEQ ID NO: 1416360 - RNA, 19 nt, Artificial Sequence
  Description of Artificial Sequence: Synthetic oligonucleotide
  Sense strand starting at position 1315 of SEQ ID NO: 1243433
ccuaucuuaccaggugacu

SEQ ID NO: 1416361 - RNA, 19 nt, Artificial Sequence
  Description of Artificial Sequence: Synthetic oligonucleotide
  Antisense strand to SEQ ID NO: 1416360
agucaccugguaagauagg

SEQ ID NO: 1416362 - RNA, 19 nt, Artificial Sequence
  Description of Artificial Sequence: Synthetic oligonucleotide
  Sense strand starting at position 1321 of SEQ ID NO: 1243433
uuaccaggugacuauguua

SEQ ID NO: 1416363 - RNA, 19 nt, Artificial Sequence
  Description of Artificial Sequence: Synthetic oligonucleotide
  Antisense strand to SEQ ID NO: 1416362
uaacauagucaccugguaa

SEQ ID NO: 1416364 - RNA, 19 nt, Artificial Sequence
  Description of Artificial Sequence: Synthetic oligonucleotide
  Sense strand starting at position 1342 of SEQ ID NO: 1243433
cgcugcaugagauauaaga

SEQ ID NO: 1416365 - RNA, 19 nt, Artificial Sequence
  Description of Artificial Sequence: Synthetic oligonucleotide
  Antisense strand to SEQ ID NO: 1416364
ucuuauaucucaugcagcg

SEQ ID NO: 1416366 - RNA, 19 nt, Artificial Sequence
  Description of Artificial Sequence: Synthetic oligonucleotide
  Sense strand starting at position 1474 of SEQ ID NO: 1243433
cugagcaagucacuucuua

SEQ ID NO: 1416367 - RNA, 19 nt, Artificial Sequence
  Description of Artificial Sequence: Synthetic oligonucleotide
  Antisense strand to SEQ ID NO: 1416366
uaagaagugacuugcucag

SEQ ID NO: 1416368 - RNA, 19 nt, Artificial Sequence
  Description of Artificial Sequence: Synthetic oligonucleotide
  Sense strand starting at position 1501 of SEQ ID NO: 1243433
uuucucugucaaggagaga

SEQ ID NO: 1416369 - RNA, 19 nt, Artificial Sequence
  Description of Artificial Sequence: Synthetic oligonucleotide
  Antisense strand to SEQ ID NO: 1416368
ucucuccuugacagagaaa

SEQ ID NO: 1416370 - RNA, 19 nt, Artificial Sequence
  Description of Artificial Sequence: Synthetic oligonucleotide
  Sense strand starting at position 1912 of SEQ ID NO: 1243433
ucuggauacucgguggcau

SEQ ID NO: 1416371 - RNA, 19 nt, Artificial Sequence
  Description of Artificial Sequence: Synthetic oligonucleotide
  Antisense strand to SEQ ID NO: 1416370
augccaccgaguauccaga

SEQ ID NO: 1416372 - RNA, 19 nt, Artificial Sequence
  Description of Artificial Sequence: Synthetic oligonucleotide
  Sense strand starting at position 1914 of SEQ ID NO: 1243433
uggauacucgguggcauua

SEQ ID NO: 1416373 - RNA, 19 nt, Artificial Sequence
  Description of Artificial Sequence: Synthetic oligonucleotide
  Antisense strand to SEQ ID NO: 1416372
uaaugccaccgaguaucca

SEQ ID NO: 1416374 - RNA, 19 nt, Artificial Sequence
  Description of Artificial Sequence: Synthetic oligonucleotide
  Sense strand starting at position 1962 of SEQ ID NO: 1243433
guuucucuggcgaggaagu

SEQ ID NO: 1416375 - RNA, 19 nt, Artificial Sequence
  Description of Artificial Sequence: Synthetic oligonucleotide
  Antisense strand to SEQ ID NO: 1416374
acuuccucgccagagaaac

SEQ ID NO: 1416376 - RNA, 19 nt, Artificial Sequence
  Description of Artificial Sequence: Synthetic oligonucleotide
  Sense strand starting at position 2661 of SEQ ID NO: 1243433
cuggccacuucuuugaaua

SEQ ID NO: 1416377 - RNA, 19 nt, Artificial Sequence
  Description of Artificial Sequence: Synthetic oligonucleotide
  Antisense strand to SEQ ID NO: 1416376
uauucaaagaaguggccag

SEQ ID NO: 1416378 - RNA, 19 nt, Artificial Sequence
  Description of Artificial Sequence: Synthetic oligonucleotide
  Sense strand starting at position 2662 of SEQ ID NO: 1243433
uggccacuucuuugaauac

SEQ ID NO: 1416379 - RNA, 19 nt, Artificial Sequence
  Description of Artificial Sequence: Synthetic oligonucleotide
  Antisense strand to SEQ ID NO: 1416378
guauucaaagaaguggcca

SEQ ID NO: 1416380 - RNA, 19 nt, Artificial Sequence
  Description of Artificial Sequence: Synthetic oligonucleotide
  Sense strand starting at position 2672 of SEQ ID NO: 1243433
uuugaauaccgguggcauc

SEQ ID NO: 1416381 - RNA, 19 nt, Artificial Sequence
  Description of Artificial Sequence: Synthetic oligonucleotide
  Antisense strand to SEQ ID NO: 1416380
gaugccaccgguauucaaa

SEQ ID NO: 1416382 - RNA, 19 nt, Artificial Sequence
  Description of Artificial Sequence: Synthetic oligonucleotide
  Sense strand starting at position 2682 of SEQ ID NO: 1243433
gguggcauccugggcagaa

SEQ ID NO: 1416383 - RNA, 19 nt, Artificial Sequence
  Description of Artificial Sequence: Synthetic oligonucleotide
  Antisense strand to SEQ ID NO: 1416382
uucugcccaggaugccacc

SEQ ID NO: 1416384 - RNA, 19 nt, Artificial Sequence
  Description of Artificial Sequence: Synthetic oligonucleotide
  Sense strand starting at position 2683 of SEQ ID NO: 1243433
guggcauccugggcagaau

SEQ ID NO: 1416385 - RNA, 19 nt, Artificial Sequence
  Description of Artificial Sequence: Synthetic oligonucleotide
  Antisense strand to SEQ ID NO: 1416384
auucugcccaggaugccac

SEQ ID NO: 1416386 - RNA, 19 nt, Artificial Sequence
  Description of Artificial Sequence: Synthetic oligonucleotide
  Sense strand starting at position 2684 of SEQ ID NO: 1243433
uggcauccugggcagaauu

SEQ ID NO: 1416387 - RNA, 19 nt, Artificial Sequence
  Description of Artificial Sequence: Synthetic oligonucleotide
  Antisense strand to SEQ ID NO: 1416386
aauucugcccaggaugcca

SEQ ID NO: 1416388 - RNA, 19 nt, Artificial Sequence
  Description of Artificial Sequence: Synthetic oligonucleotide
  Sense strand starting at position 2694 of SEQ ID NO: 1243433
ggcagaauuucggugccgu

SEQ ID NO: 1416389 - RNA, 19 nt, Artificial Sequence
  Description of Artificial Sequence: Synthetic oligonucleotide
  Antisense strand to SEQ ID NO: 1416388
acggcaccgaaauucugcc

SEQ ID NO: 1416390 - RNA, 19 nt, Artificial Sequence
  Description of Artificial Sequence: Synthetic oligonucleotide
  Sense strand starting at position 2834 of SEQ ID NO: 1243433
uccuguuggaguugauauu

SEQ ID NO: 1416391 - RNA, 19 nt, Artificial Sequence
  Description of Artificial Sequence: Synthetic oligonucleotide
  Antisense strand to SEQ ID NO: 1416390
aauaucaacuccaacagga

SEQ ID NO: 1416392 - RNA, 19 nt, Artificial Sequence
  Description of Artificial Sequence: Synthetic oligonucleotide
  Sense strand starting at position 3002 of SEQ ID NO: 1243433
cgguguuugacgccuguaa

SEQ ID NO: 1416393 - RNA, 19 nt, Artificial Sequence
  Description of Artificial Sequence: Synthetic oligonucleotide
  Antisense strand to SEQ ID NO: 1416392
uuacaggcgucaaacaccg

SEQ ID NO: 1416394 - RNA, 19 nt, Artificial Sequence
  Description of Artificial Sequence: Synthetic oligonucleotide
  Sense strand starting at position 3290 of SEQ ID NO: 1243433
ucguauaaaucaucugcau

SEQ ID NO: 1416395 - RNA, 19 nt, Artificial Sequence
  Description of Artificial Sequence: Synthetic oligonucleotide
  Antisense strand to SEQ ID NO: 1416394
augcagaugauuuauacga

SEQ ID NO: 1416396 - RNA, 19 nt, Artificial Sequence
  Description of Artificial Sequence: Synthetic oligonucleotide
  Sense strand starting at position 3321 of SEQ ID NO: 1243433
guguguugcaaagaaugau

SEQ ID NO: 1416397 - RNA, 19 nt, Artificial Sequence
  Description of Artificial Sequence: Synthetic oligonucleotide
  Antisense strand to SEQ ID NO: 1416396
aucauucuuugcaacacac

SEQ ID NO: 1416398 - RNA, 19 nt, Artificial Sequence
  Description of Artificial Sequence: Synthetic oligonucleotide
  Sense strand starting at position 3877 of SEQ ID NO: 1243433
aagguaucauagcuaugua

SEQ ID NO: 1416399 - RNA, 19 nt, Artificial Sequence
  Description of Artificial Sequence: Synthetic oligonucleotide
  Antisense strand to SEQ ID NO: 1416398
uacauagcuaugauaccuu

SEQ ID NO: 1416400 - RNA, 19 nt, Artificial Sequence
  Description of Artificial Sequence: Synthetic oligonucleotide
  Sense strand starting at position 3880 of SEQ ID NO: 1243433
guaucauagcuauguauac

SEQ ID NO: 1416401 - RNA, 19 nt, Artificial Sequence
  Description of Artificial Sequence: Synthetic oligonucleotide
  Antisense strand to SEQ ID NO: 1416400
guauacauagcuaugauac

SEQ ID NO: 1416402 - RNA, 19 nt, Artificial Sequence
  Description of Artificial Sequence: Synthetic oligonucleotide
  Sense strand starting at position 81 of SEQ ID NO: 1243434
ggaauugagccuugguuug

SEQ ID NO: 1416403 - RNA, 19 nt, Artificial Sequence
  Description of Artificial Sequence: Synthetic oligonucleotide
  Antisense strand to SEQ ID NO: 1416402
caaaccaaggcucaauucc

SEQ ID NO: 1416404 - RNA, 19 nt, Artificial Sequence
  Description of Artificial Sequence: Synthetic oligonucleotide
  Sense strand starting at position 261 of SEQ ID NO: 1243434
ccuaaugguuucucucuga

SEQ ID NO: 1416405 - RNA, 19 nt, Artificial Sequence
  Description of Artificial Sequence: Synthetic oligonucleotide
  Antisense strand to SEQ ID NO: 1416404
ucagagagaaaccauuagg

SEQ ID NO: 1416406 - RNA, 19 nt, Artificial Sequence
  Description of Artificial Sequence: Synthetic oligonucleotide
  Sense strand starting at position 475 of SEQ ID NO: 1243434
gcuccuaucugugcagacu

SEQ ID NO: 1416407 - RNA, 19 nt, Artificial Sequence
  Description of Artificial Sequence: Synthetic oligonucleotide
  Antisense strand to SEQ ID NO: 1416406
agucugcacagauaggagc

SEQ ID NO: 1416408 - RNA, 19 nt, Artificial Sequence
  Description of Artificial Sequence: Synthetic oligonucleotide
  Sense strand starting at position 550 of SEQ ID NO: 1243434
cuuccuucucccuggagau

SEQ ID NO: 1416409 - RNA, 19 nt, Artificial Sequence
  Description of Artificial Sequence: Synthetic oligonucleotide
  Antisense strand to SEQ ID NO: 1416408
aucuccagggagaaggaag

SEQ ID NO: 1416410 - RNA, 19 nt, Artificial Sequence
  Description of Artificial Sequence: Synthetic oligonucleotide
  Sense strand starting at position 562 of SEQ ID NO: 1243434
uggagauccucuuguauuu

SEQ ID NO: 1416411 - RNA, 19 nt, Artificial Sequence
  Description of Artificial Sequence: Synthetic oligonucleotide
  Antisense strand to SEQ ID NO: 1416410
aaauacaagaggaucucca

SEQ ID NO: 1416412 - RNA, 19 nt, Artificial Sequence
  Description of Artificial Sequence: Synthetic oligonucleotide
  Sense strand starting at position 646 of SEQ ID NO: 1243434
accaaauuauccuagagag

SEQ ID NO: 1416413 - RNA, 19 nt, Artificial Sequence
  Description of Artificial Sequence: Synthetic oligonucleotide
  Antisense strand to SEQ ID NO: 1416412
cucucuaggauaauuuggu

SEQ ID NO: 1416414 - RNA, 19 nt, Artificial Sequence
  Description of Artificial Sequence: Synthetic oligonucleotide
  Sense strand starting at position 772 of SEQ ID NO: 1243434
gcccuaauuugcuacauga

SEQ ID NO: 1416415 - RNA, 19 nt, Artificial Sequence
  Description of Artificial Sequence: Synthetic oligonucleotide
  Antisense strand to SEQ ID NO: 1416414
ucauguagcaaauuagggc

SEQ ID NO: 1416416 - RNA, 19 nt, Artificial Sequence
  Description of Artificial Sequence: Synthetic oligonucleotide
  Sense strand starting at position 929 of SEQ ID NO: 1243434
cagugugcucgaguucuuu

SEQ ID NO: 1416417 - RNA, 19 nt, Artificial Sequence
  Description of Artificial Sequence: Synthetic oligonucleotide
  Antisense strand to SEQ ID NO: 1416416
aaagaacucgagcacacug

SEQ ID NO: 1416418 - RNA, 19 nt, Artificial Sequence
  Description of Artificial Sequence: Synthetic oligonucleotide
  Sense strand starting at position 1284 of SEQ ID NO: 1243434
accagagugugagcagaau

SEQ ID NO: 1416419 - RNA, 19 nt, Artificial Sequence
  Description of Artificial Sequence: Synthetic oligonucleotide
  Antisense strand to SEQ ID NO: 1416418
auucugcucacacucuggu

SEQ ID NO: 1416420 - RNA, 19 nt, Artificial Sequence
  Description of Artificial Sequence: Synthetic oligonucleotide
  Sense strand starting at position 1292 of SEQ ID NO: 1243434
gugagcagaaucggcuuaa

SEQ ID NO: 1416421 - RNA, 19 nt, Artificial Sequence
  Description of Artificial Sequence: Synthetic oligonucleotide
  Antisense strand to SEQ ID NO: 1416420
uuaagccgauucugcucac

SEQ ID NO: 1416422 - RNA, 19 nt, Artificial Sequence
  Description of Artificial Sequence: Synthetic oligonucleotide
  Sense strand starting at position 1296 of SEQ ID NO: 1243434
gcagaaucggcuuaaggca

SEQ ID NO: 1416423 - RNA, 19 nt, Artificial Sequence
  Description of Artificial Sequence: Synthetic oligonucleotide
  Antisense strand to SEQ ID NO: 1416422
ugccuuaagccgauucugc

SEQ ID NO: 1416424 - RNA, 19 nt, Artificial Sequence
  Description of Artificial Sequence: Synthetic oligonucleotide
  Sense strand starting at position 1377 of SEQ ID NO: 1243434
gaguuugggccggaauguu

SEQ ID NO: 1416425 - RNA, 19 nt, Artificial Sequence
  Description of Artificial Sequence: Synthetic oligonucleotide
  Antisense strand to SEQ ID NO: 1416424
aacauuccggcccaaacuc

SEQ ID NO: 1416426 - RNA, 19 nt, Artificial Sequence
  Description of Artificial Sequence: Synthetic oligonucleotide
  Sense strand starting at position 2031 of SEQ ID NO: 1243434
cagcgacugaaggguuaau

SEQ ID NO: 1416427 - RNA, 19 nt, Artificial Sequence
  Description of Artificial Sequence: Synthetic oligonucleotide
  Antisense strand to SEQ ID NO: 1416426
auuaacccuucagucgcug

SEQ ID NO: 1416428 - RNA, 19 nt, Artificial Sequence
  Description of Artificial Sequence: Synthetic oligonucleotide
  Sense strand starting at position 2042 of SEQ ID NO: 1243434
ggguuaauuaaugauugca

SEQ ID NO: 1416429 - RNA, 19 nt, Artificial Sequence
  Description of Artificial Sequence: Synthetic oligonucleotide
  Antisense strand to SEQ ID NO: 1416428
ugcaaucauuaauuaaccc

SEQ ID NO: 1416430 - RNA, 19 nt, Artificial Sequence
  Description of Artificial Sequence: Synthetic oligonucleotide
  Sense strand starting at position 2044 of SEQ ID NO: 1243434
guuaauuaaugauugcaga

SEQ ID NO: 1416431 - RNA, 19 nt, Artificial Sequence
  Description of Artificial Sequence: Synthetic oligonucleotide
  Antisense strand to SEQ ID NO: 1416430
ucugcaaucauuaauuaac

SEQ ID NO: 1416432 - RNA, 19 nt, Artificial Sequence
  Description of Artificial Sequence: Synthetic oligonucleotide
  Sense strand starting at position 2055 of SEQ ID NO: 1243434
auugcagauuaauugaaca

SEQ ID NO: 1416433 - RNA, 19 nt, Artificial Sequence
  Description of Artificial Sequence: Synthetic oligonucleotide
  Antisense strand to SEQ ID NO: 1416432
uguucaauuaaucugcaau

SEQ ID NO: 1416434 - RNA, 19 nt, Artificial Sequence
  Description of Artificial Sequence: Synthetic oligonucleotide
  Sense strand starting at position 2163 of SEQ ID NO: 1243434
ccgagcuuguccucagaga

SEQ ID NO: 1416435 - RNA, 19 nt, Artificial Sequence
  Description of Artificial Sequence: Synthetic oligonucleotide
  Antisense strand to SEQ ID NO: 1416434
ucucugaggacaagcucgg

SEQ ID NO: 1416436 - RNA, 19 nt, Artificial Sequence
  Description of Artificial Sequence: Synthetic oligonucleotide
  Sense strand starting at position 2164 of SEQ ID NO: 1243434
cgagcuuguccucagagaa

SEQ ID NO: 1416437 - RNA, 19 nt, Artificial Sequence
  Description of Artificial Sequence: Synthetic oligonucleotide
  Antisense strand to SEQ ID NO: 1416436
uucucugaggacaagcucg

SEQ ID NO: 1416438 - RNA, 19 nt, Artificial Sequence
  Description of Artificial Sequence: Synthetic oligonucleotide
  Sense strand starting at position 2982 of SEQ ID NO: 1243434
uggagcucuuuccucugaa

SEQ ID NO: 1416439 - RNA, 19 nt, Artificial Sequence
  Description of Artificial Sequence: Synthetic oligonucleotide
  Antisense strand to SEQ ID NO: 1416438
uucagaggaaagagcucca

SEQ ID NO: 1416440 - RNA, 19 nt, Artificial Sequence
  Description of Artificial Sequence: Synthetic oligonucleotide
  Sense strand starting at position 2983 of SEQ ID NO: 1243434
ggagcucuuuccucugaac

SEQ ID NO: 1416441 - RNA, 19 nt, Artificial Sequence
  Description of Artificial Sequence: Synthetic oligonucleotide
  Antisense strand to SEQ ID NO: 1416440
guucagaggaaagagcucc

SEQ ID NO: 1416442 - RNA, 19 nt, Artificial Sequence
  Description of Artificial Sequence: Synthetic oligonucleotide
  Sense strand starting at position 2992 of SEQ ID NO: 1243434
uccucugaacuuugacagu

SEQ ID NO: 1416443 - RNA, 19 nt, Artificial Sequence
  Description of Artificial Sequence: Synthetic oligonucleotide
  Antisense strand to SEQ ID NO: 1416442
acugucaaaguucagagga

SEQ ID NO: 1416444 - RNA, 19 nt, Artificial Sequence
  Description of Artificial Sequence: Synthetic oligonucleotide
  Sense strand starting at position 3015 of SEQ ID NO: 1243434
gcgucuagacucuaaacgu

SEQ ID NO: 1416445 - RNA, 19 nt, Artificial Sequence
  Description of Artificial Sequence: Synthetic oligonucleotide
  Antisense strand to SEQ ID NO: 1416444
acguuuagagucuagacgc

SEQ ID NO: 1416446 - RNA, 19 nt, Artificial Sequence
  Description of Artificial Sequence: Synthetic oligonucleotide
  Sense strand starting at position 3031 of SEQ ID NO: 1243434
cguacuagaucccuccaga

SEQ ID NO: 1416447 - RNA, 19 nt, Artificial Sequence
  Description of Artificial Sequence: Synthetic oligonucleotide
  Antisense strand to SEQ ID NO: 1416446
ucuggagggaucuaguacg

SEQ ID NO: 1416448 - RNA, 19 nt, Artificial Sequence
  Description of Artificial Sequence: Synthetic oligonucleotide
  Sense strand starting at position 3331 of SEQ ID NO: 1243434
uugugcuuccuguauaucu

SEQ ID NO: 1416449 - RNA, 19 nt, Artificial Sequence
  Description of Artificial Sequence: Synthetic oligonucleotide
  Antisense strand to SEQ ID NO: 1416448
agauauacaggaagcacaa

SEQ ID NO: 1416450 - RNA, 19 nt, Artificial Sequence
  Description of Artificial Sequence: Synthetic oligonucleotide
  Sense strand starting at position 3362 of SEQ ID NO: 1243434
gcaagugugcucuccguaa

SEQ ID NO: 1416451 - RNA, 19 nt, Artificial Sequence
  Description of Artificial Sequence: Synthetic oligonucleotide
  Antisense strand to SEQ ID NO: 1416450
uuacggagagcacacuugc

SEQ ID NO: 1416452 - RNA, 19 nt, Artificial Sequence
  Description of Artificial Sequence: Synthetic oligonucleotide
  Sense strand starting at position 3366 of SEQ ID NO: 1243434
gugugcucuccguaaauaa

SEQ ID NO: 1416453 - RNA, 19 nt, Artificial Sequence
  Description of Artificial Sequence: Synthetic oligonucleotide
  Antisense strand to SEQ ID NO: 1416452
uuauuuacggagagcacac

SEQ ID NO: 1416454 - RNA, 19 nt, Artificial Sequence
  Description of Artificial Sequence: Synthetic oligonucleotide
  Sense strand starting at position 3408 of SEQ ID NO: 1243434
gugagugauuugugaugaa

SEQ ID NO: 1416455 - RNA, 19 nt, Artificial Sequence
  Description of Artificial Sequence: Synthetic oligonucleotide
  Antisense strand to SEQ ID NO: 1416454
uucaucacaaaucacucac

SEQ ID NO: 1416456 - RNA, 19 nt, Artificial Sequence
  Description of Artificial Sequence: Synthetic oligonucleotide
  Sense strand starting at position 3417 of SEQ ID NO: 1243434
uugugaugaagcuguugga

SEQ ID NO: 1416457 - RNA, 19 nt, Artificial Sequence
  Description of Artificial Sequence: Synthetic oligonucleotide
  Antisense strand to SEQ ID NO: 1416456
uccaacagcuucaucacaa

SEQ ID NO: 1416458 - RNA, 19 nt, Artificial Sequence
  Description of Artificial Sequence: Synthetic oligonucleotide
  Sense strand starting at position 3430 of SEQ ID NO: 1243434
guuggagguaacugucgau

SEQ ID NO: 1416459 - RNA, 19 nt, Artificial Sequence
  Description of Artificial Sequence: Synthetic oligonucleotide
  Antisense strand to SEQ ID NO: 1416458
aucgacaguuaccuccaac

SEQ ID NO: 1416460 - RNA, 19 nt, Artificial Sequence
  Description of Artificial Sequence: Synthetic oligonucleotide
  Sense strand starting at position 3434 of SEQ ID NO: 1243434
gagguaacugucgaucaga

SEQ ID NO: 1416461 - RNA, 19 nt, Artificial Sequence
  Description of Artificial Sequence: Synthetic oligonucleotide
  Antisense strand to SEQ ID NO: 1416460
ucugaucgacaguuaccuc

SEQ ID NO: 1416462 - RNA, 19 nt, Artificial Sequence
  Description of Artificial Sequence: Synthetic oligonucleotide
  Sense strand starting at position 3439 of SEQ ID NO: 1243434
aacugucgaucagauuuaa

SEQ ID NO: 1416463 - RNA, 19 nt, Artificial Sequence
  Description of Artificial Sequence: Synthetic oligonucleotide
  Antisense strand to SEQ ID NO: 1416462
uuaaaucugaucgacaguu

SEQ ID NO: 1416464 - RNA, 19 nt, Artificial Sequence
  Description of Artificial Sequence: Synthetic oligonucleotide
  Sense strand starting at position 3494 of SEQ ID NO: 1243434
ccaaacagaucugaaugaa

SEQ ID NO: 1416465 - RNA, 19 nt, Artificial Sequence
  Description of Artificial Sequence: Synthetic oligonucleotide
  Antisense strand to SEQ ID NO: 1416464
uucauucagaucuguuugg

SEQ ID NO: 1416466 - RNA, 19 nt, Artificial Sequence
  Description of Artificial Sequence: Synthetic oligonucleotide
  Sense strand starting at position 3514 of SEQ ID NO: 1243434
uacggugauggccaaauua

SEQ ID NO: 1416467 - RNA, 19 nt, Artificial Sequence
  Description of Artificial Sequence: Synthetic oligonucleotide
  Antisense strand to SEQ ID NO: 1416466
uaauuuggccaucaccgua

SEQ ID NO: 1416468 - RNA, 19 nt, Artificial Sequence
  Description of Artificial Sequence: Synthetic oligonucleotide
  Sense strand starting at position 3522 of SEQ ID NO: 1243434
uggccaaauuauccaagau

SEQ ID NO: 1416469 - RNA, 19 nt, Artificial Sequence
  Description of Artificial Sequence: Synthetic oligonucleotide
  Antisense strand to SEQ ID NO: 1416468
aucuuggauaauuuggcca

SEQ ID NO: 1416470 - RNA, 19 nt, Artificial Sequence
  Description of Artificial Sequence: Synthetic oligonucleotide
  Sense strand starting at position 3644 of SEQ ID NO: 1243434
cauuaaguaucugaaggga

SEQ ID NO: 1416471 - RNA, 19 nt, Artificial Sequence
  Description of Artificial Sequence: Synthetic oligonucleotide
  Antisense strand to SEQ ID NO: 1416470
ucccuucagauacuuaaug

SEQ ID NO: 1416472 - RNA, 19 nt, Artificial Sequence
  Description of Artificial Sequence: Synthetic oligonucleotide
  Sense strand starting at position 3665 of SEQ ID NO: 1243434
caggcuguuccacggaaga

SEQ ID NO: 1416473 - RNA, 19 nt, Artificial Sequence
  Description of Artificial Sequence: Synthetic oligonucleotide
  Antisense strand to SEQ ID NO: 1416472
ucuuccguggaacagccug

SEQ ID NO: 1416474 - RNA, 19 nt, Artificial Sequence
  Description of Artificial Sequence: Synthetic oligonucleotide
  Sense strand starting at position 3667 of SEQ ID NO: 1243434
ggcuguuccacggaagaac

SEQ ID NO: 1416475 - RNA, 19 nt, Artificial Sequence
  Description of Artificial Sequence: Synthetic oligonucleotide
  Antisense strand to SEQ ID NO: 1416474
guucuuccguggaacagcc

SEQ ID NO: 1416476 - RNA, 19 nt, Artificial Sequence
  Description of Artificial Sequence: Synthetic oligonucleotide
  Sense strand starting at position 3877 of SEQ ID NO: 1243434
gcaauaaacgcucagaagu

SEQ ID NO: 1416477 - RNA, 19 nt, Artificial Sequence
  Description of Artificial Sequence: Synthetic oligonucleotide
  Antisense strand to SEQ ID NO: 1416476
acuucugagcguuuauugc

SEQ ID NO: 1416478 - RNA, 19 nt, Artificial Sequence
  Description of Artificial Sequence: Synthetic oligonucleotide
  Sense strand starting at position 3935 of SEQ ID NO: 1243434
ccuuuaaggaggugauauu

SEQ ID NO: 1416479 - RNA, 19 nt, Artificial Sequence
  Description of Artificial Sequence: Synthetic oligonucleotide
  Antisense strand to SEQ ID NO: 1416478
aauaucaccuccuuaaagg

SEQ ID NO: 1416480 - RNA, 19 nt, Artificial Sequence
  Description of Artificial Sequence: Synthetic oligonucleotide
  Sense strand starting at position 3960 of SEQ ID NO: 1243434
gcccaaguuguugggagau

SEQ ID NO: 1416481 - RNA, 19 nt, Artificial Sequence
  Description of Artificial Sequence: Synthetic oligonucleotide
  Antisense strand to SEQ ID NO: 1416480
aucucccaacaacuugggc

SEQ ID NO: 1416482 - RNA, 19 nt, Artificial Sequence
  Description of Artificial Sequence: Synthetic oligonucleotide
  Sense strand starting at position 140 of SEQ ID NO: 1243435
ccuaaugguuucucucuga

SEQ ID NO: 1416483 - RNA, 19 nt, Artificial Sequence
  Description of Artificial Sequence: Synthetic oligonucleotide
  Antisense strand to SEQ ID NO: 1416482
ucagagagaaaccauuagg

SEQ ID NO: 1416484 - RNA, 19 nt, Artificial Sequence
  Description of Artificial Sequence: Synthetic oligonucleotide
  Sense strand starting at position 429 of SEQ ID NO: 1243435
cuuccuucucccuggagau

SEQ ID NO: 1416485 - RNA, 19 nt, Artificial Sequence
  Description of Artificial Sequence: Synthetic oligonucleotide
  Antisense strand to SEQ ID NO: 1416484
aucuccagggagaaggaag

SEQ ID NO: 1416486 - RNA, 19 nt, Artificial Sequence
  Description of Artificial Sequence: Synthetic oligonucleotide
  Sense strand starting at position 441 of SEQ ID NO: 1243435
uggagauccucuuguauuu

SEQ ID NO: 1416487 - RNA, 19 nt, Artificial Sequence
  Description of Artificial Sequence: Synthetic oligonucleotide
  Antisense strand to SEQ ID NO: 1416486
aaauacaagaggaucucca

SEQ ID NO: 1416488 - RNA, 19 nt, Artificial Sequence
  Description of Artificial Sequence: Synthetic oligonucleotide
  Sense strand starting at position 525 of SEQ ID NO: 1243435
accaaauuauccuagagag

SEQ ID NO: 1416489 - RNA, 19 nt, Artificial Sequence
  Description of Artificial Sequence: Synthetic oligonucleotide
  Antisense strand to SEQ ID NO: 1416488
cucucuaggauaauuuggu

SEQ ID NO: 1416490 - RNA, 19 nt, Artificial Sequence
  Description of Artificial Sequence: Synthetic oligonucleotide
  Sense strand starting at position 651 of SEQ ID NO: 1243435
gcccuaauuugcuacauga

SEQ ID NO: 1416491 - RNA, 19 nt, Artificial Sequence
  Description of Artificial Sequence: Synthetic oligonucleotide
  Antisense strand to SEQ ID NO: 1416490
ucauguagcaaauuagggc

SEQ ID NO: 1416492 - RNA, 19 nt, Artificial Sequence
  Description of Artificial Sequence: Synthetic oligonucleotide
  Sense strand starting at position 808 of SEQ ID NO: 1243435
cagugugcucgaguucuuu

SEQ ID NO: 1416493 - RNA, 19 nt, Artificial Sequence
  Description of Artificial Sequence: Synthetic oligonucleotide
  Antisense strand to SEQ ID NO: 1416492
aaagaacucgagcacacug

SEQ ID NO: 1416494 - RNA, 19 nt, Artificial Sequence
  Description of Artificial Sequence: Synthetic oligonucleotide
  Sense strand starting at position 1163 of SEQ ID NO: 1243435
accagagugugagcagaau

SEQ ID NO: 1416495 - RNA, 19 nt, Artificial Sequence
  Description of Artificial Sequence: Synthetic oligonucleotide
  Antisense strand to SEQ ID NO: 1416494
auucugcucacacucuggu

SEQ ID NO: 1416496 - RNA, 19 nt, Artificial Sequence
  Description of Artificial Sequence: Synthetic oligonucleotide
  Sense strand starting at position 1171 of SEQ ID NO: 1243435
gugagcagaaucggcuuaa

SEQ ID NO: 1416497 - RNA, 19 nt, Artificial Sequence
  Description of Artificial Sequence: Synthetic oligonucleotide
  Antisense strand to SEQ ID NO: 1416496
uuaagccgauucugcucac

SEQ ID NO: 1416498 - RNA, 19 nt, Artificial Sequence
  Description of Artificial Sequence: Synthetic oligonucleotide
  Sense strand starting at position 1175 of SEQ ID NO: 1243435
gcagaaucggcuuaaggca

SEQ ID NO: 1416499 - RNA, 19 nt, Artificial Sequence
  Description of Artificial Sequence: Synthetic oligonucleotide
  Antisense strand to SEQ ID NO: 1416498
ugccuuaagccgauucugc

SEQ ID NO: 1416500 - RNA, 19 nt, Artificial Sequence
  Description of Artificial Sequence: Synthetic oligonucleotide
  Sense strand starting at position 1256 of SEQ ID NO: 1243435
gaguuugggccggaauguu

SEQ ID NO: 1416501 - RNA, 19 nt, Artificial Sequence
  Description of Artificial Sequence: Synthetic oligonucleotide
  Antisense strand to SEQ ID NO: 1416500
aacauuccggcccaaacuc

SEQ ID NO: 1416502 - RNA, 19 nt, Artificial Sequence
  Description of Artificial Sequence: Synthetic oligonucleotide
  Sense strand starting at position 1910 of SEQ ID NO: 1243435
cagcgacugaaggguuaau

SEQ ID NO: 1416503 - RNA, 19 nt, Artificial Sequence
  Description of Artificial Sequence: Synthetic oligonucleotide
  Antisense strand to SEQ ID NO: 1416502
auuaacccuucagucgcug

SEQ ID NO: 1416504 - RNA, 19 nt, Artificial Sequence
  Description of Artificial Sequence: Synthetic oligonucleotide
  Sense strand starting at position 1921 of SEQ ID NO: 1243435
ggguuaauuaaugauugca

SEQ ID NO: 1416505 - RNA, 19 nt, Artificial Sequence
  Description of Artificial Sequence: Synthetic oligonucleotide
  Antisense strand to SEQ ID NO: 1416504
ugcaaucauuaauuaaccc

SEQ ID NO: 1416506 - RNA, 19 nt, Artificial Sequence
  Description of Artificial Sequence: Synthetic oligonucleotide
  Sense strand starting at position 1923 of SEQ ID NO: 1243435
guuaauuaaugauugcaga

SEQ ID NO: 1416507 - RNA, 19 nt, Artificial Sequence
  Description of Artificial Sequence: Synthetic oligonucleotide
  Antisense strand to SEQ ID NO: 1416506
ucugcaaucauuaauuaac

SEQ ID NO: 1416508 - RNA, 19 nt, Artificial Sequence
  Description of Artificial Sequence: Synthetic oligonucleotide
  Sense strand starting at position 1934 of SEQ ID NO: 1243435
auugcagauuaauugaaca

SEQ ID NO: 1416509 - RNA, 19 nt, Artificial Sequence
  Description of Artificial Sequence: Synthetic oligonucleotide
  Antisense strand to SEQ ID NO: 1416508
uguucaauuaaucugcaau

SEQ ID NO: 1416510 - RNA, 19 nt, Artificial Sequence
  Description of Artificial Sequence: Synthetic oligonucleotide
  Sense strand starting at position 2042 of SEQ ID NO: 1243435
ccgagcuuguccucagaga

SEQ ID NO: 1416511 - RNA, 19 nt, Artificial Sequence
  Description of Artificial Sequence: Synthetic oligonucleotide
  Antisense strand to SEQ ID NO: 1416510
ucucugaggacaagcucgg

SEQ ID NO: 1416512 - RNA, 19 nt, Artificial Sequence
  Description of Artificial Sequence: Synthetic oligonucleotide
  Sense strand starting at position 2043 of SEQ ID NO: 1243435
cgagcuuguccucagagaa

SEQ ID NO: 1416513 - RNA, 19 nt, Artificial Sequence
  Description of Artificial Sequence: Synthetic oligonucleotide
  Antisense strand to SEQ ID NO: 1416512
uucucugaggacaagcucg

SEQ ID NO: 1416514 - RNA, 19 nt, Artificial Sequence
  Description of Artificial Sequence: Synthetic oligonucleotide
  Sense strand starting at position 2861 of SEQ ID NO: 1243435
uggagcucuuuccucugaa

SEQ ID NO: 1416515 - RNA, 19 nt, Artificial Sequence
  Description of Artificial Sequence: Synthetic oligonucleotide
  Antisense strand to SEQ ID NO: 1416514
uucagaggaaagagcucca

SEQ ID NO: 1416516 - RNA, 19 nt, Artificial Sequence
  Description of Artificial Sequence: Synthetic oligonucleotide
  Sense strand starting at position 2862 of SEQ ID NO: 1243435
ggagcucuuuccucugaac

SEQ ID NO: 1416517 - RNA, 19 nt, Artificial Sequence
  Description of Artificial Sequence: Synthetic oligonucleotide
  Antisense strand to SEQ ID NO: 1416516
guucagaggaaagagcucc

SEQ ID NO: 1416518 - RNA, 19 nt, Artificial Sequence
  Description of Artificial Sequence: Synthetic oligonucleotide
  Sense strand starting at position 2871 of SEQ ID NO: 1243435
uccucugaacuuugacagu

SEQ ID NO: 1416519 - RNA, 19 nt, Artificial Sequence
  Description of Artificial Sequence: Synthetic oligonucleotide
  Antisense strand to SEQ ID NO: 1416518
acugucaaaguucagagga

SEQ ID NO: 1416520 - RNA, 19 nt, Artificial Sequence
  Description of Artificial Sequence: Synthetic oligonucleotide
  Sense strand starting at position 2894 of SEQ ID NO: 1243435
gcgucuagacucuaaacgu

SEQ ID NO: 1416521 - RNA, 19 nt, Artificial Sequence
  Description of Artificial Sequence: Synthetic oligonucleotide
  Antisense strand to SEQ ID NO: 1416520
acguuuagagucuagacgc

SEQ ID NO: 1416522 - RNA, 19 nt, Artificial Sequence
  Description of Artificial Sequence: Synthetic oligonucleotide
  Sense strand starting at position 2910 of SEQ ID NO: 1243435
cguacuagaucccuccaga

SEQ ID NO: 1416523 - RNA, 19 nt, Artificial Sequence
  Description of Artificial Sequence: Synthetic oligonucleotide
  Antisense strand to SEQ ID NO: 1416522
ucuggagggaucuaguacg

SEQ ID NO: 1416524 - RNA, 19 nt, Artificial Sequence
  Description of Artificial Sequence: Synthetic oligonucleotide
  Sense strand starting at position 3210 of SEQ ID NO: 1243435
uugugcuuccuguauaucu

SEQ ID NO: 1416525 - RNA, 19 nt, Artificial Sequence
  Description of Artificial Sequence: Synthetic oligonucleotide
  Antisense strand to SEQ ID NO: 1416524
agauauacaggaagcacaa

SEQ ID NO: 1416526 - RNA, 19 nt, Artificial Sequence
  Description of Artificial Sequence: Synthetic oligonucleotide
  Sense strand starting at position 3241 of SEQ ID NO: 1243435
gcaagugugcucuccguaa

SEQ ID NO: 1416527 - RNA, 19 nt, Artificial Sequence
  Description of Artificial Sequence: Synthetic oligonucleotide
  Antisense strand to SEQ ID NO: 1416526
uuacggagagcacacuugc

SEQ ID NO: 1416528 - RNA, 19 nt, Artificial Sequence
  Description of Artificial Sequence: Synthetic oligonucleotide
  Sense strand starting at position 3245 of SEQ ID NO: 1243435
gugugcucuccguaaauaa

SEQ ID NO: 1416529 - RNA, 19 nt, Artificial Sequence
  Description of Artificial Sequence: Synthetic oligonucleotide
  Antisense strand to SEQ ID NO: 1416528
uuauuuacggagagcacac

SEQ ID NO: 1416530 - RNA, 19 nt, Artificial Sequence
  Description of Artificial Sequence: Synthetic oligonucleotide
  Sense strand starting at position 3287 of SEQ ID NO: 1243435
gugagugauuugugaugaa

SEQ ID NO: 1416531 - RNA, 19 nt, Artificial Sequence
  Description of Artificial Sequence: Synthetic oligonucleotide
  Antisense strand to SEQ ID NO: 1416530
uucaucacaaaucacucac

SEQ ID NO: 1416532 - RNA, 19 nt, Artificial Sequence
  Description of Artificial Sequence: Synthetic oligonucleotide
  Sense strand starting at position 3296 of SEQ ID NO: 1243435
uugugaugaagcuguugga

SEQ ID NO: 1416533 - RNA, 19 nt, Artificial Sequence
  Description of Artificial Sequence: Synthetic oligonucleotide
  Antisense strand to SEQ ID NO: 1416532
uccaacagcuucaucacaa

SEQ ID NO: 1416534 - RNA, 19 nt, Artificial Sequence
  Description of Artificial Sequence: Synthetic oligonucleotide
  Sense strand starting at position 3309 of SEQ ID NO: 1243435
guuggagguaacugucgau

SEQ ID NO: 1416535 - RNA, 19 nt, Artificial Sequence
  Description of Artificial Sequence: Synthetic oligonucleotide
  Antisense strand to SEQ ID NO: 1416534
aucgacaguuaccuccaac

SEQ ID NO: 1416536 - RNA, 19 nt, Artificial Sequence
  Description of Artificial Sequence: Synthetic oligonucleotide
  Sense strand starting at position 3313 of SEQ ID NO: 1243435
gagguaacugucgaucaga

SEQ ID NO: 1416537 - RNA, 19 nt, Artificial Sequence
  Description of Artificial Sequence: Synthetic oligonucleotide
  Antisense strand to SEQ ID NO: 1416536
ucugaucgacaguuaccuc

SEQ ID NO: 1416538 - RNA, 19 nt, Artificial Sequence
  Description of Artificial Sequence: Synthetic oligonucleotide
  Sense strand starting at position 3318 of SEQ ID NO: 1243435
aacugucgaucagauuuaa

SEQ ID NO: 1416539 - RNA, 19 nt, Artificial Sequence
  Description of Artificial Sequence: Synthetic oligonucleotide
  Antisense strand to SEQ ID NO: 1416538
uuaaaucugaucgacaguu

SEQ ID NO: 1416540 - RNA, 19 nt, Artificial Sequence
  Description of Artificial Sequence: Synthetic oligonucleotide
  Sense strand starting at position 3373 of SEQ ID NO: 1243435
ccaaacagaucugaaugaa

SEQ ID NO: 1416541 - RNA, 19 nt, Artificial Sequence
  Description of Artificial Sequence: Synthetic oligonucleotide
  Antisense strand to SEQ ID NO: 1416540
uucauucagaucuguuugg

SEQ ID NO: 1416542 - RNA, 19 nt, Artificial Sequence
  Description of Artificial Sequence: Synthetic oligonucleotide
  Sense strand starting at position 3393 of SEQ ID NO: 1243435
uacggugauggccaaauua

SEQ ID NO: 1416543 - RNA, 19 nt, Artificial Sequence
  Description of Artificial Sequence: Synthetic oligonucleotide
  Antisense strand to SEQ ID NO: 1416542
uaauuuggccaucaccgua

SEQ ID NO: 1416544 - RNA, 19 nt, Artificial Sequence
  Description of Artificial Sequence: Synthetic oligonucleotide
  Sense strand starting at position 3401 of SEQ ID NO: 1243435
uggccaaauuauccaagau

SEQ ID NO: 1416545 - RNA, 19 nt, Artificial Sequence
  Description of Artificial Sequence: Synthetic oligonucleotide
  Antisense strand to SEQ ID NO: 1416544
aucuuggauaauuuggcca

SEQ ID NO: 1416546 - RNA, 19 nt, Artificial Sequence
  Description of Artificial Sequence: Synthetic oligonucleotide
  Sense strand starting at position 3523 of SEQ ID NO: 1243435
cauuaaguaucugaaggga

SEQ ID NO: 1416547 - RNA, 19 nt, Artificial Sequence
  Description of Artificial Sequence: Synthetic oligonucleotide
  Antisense strand to SEQ ID NO: 1416546
ucccuucagauacuuaaug

SEQ ID NO: 1416548 - RNA, 19 nt, Artificial Sequence
  Description of Artificial Sequence: Synthetic oligonucleotide
  Sense strand starting at position 3544 of SEQ ID NO: 1243435
caggcuguuccacggaaga

SEQ ID NO: 1416549 - RNA, 19 nt, Artificial Sequence
  Description of Artificial Sequence: Synthetic oligonucleotide
  Antisense strand to SEQ ID NO: 1416548
ucuuccguggaacagccug

SEQ ID NO: 1416550 - RNA, 19 nt, Artificial Sequence
  Description of Artificial Sequence: Synthetic oligonucleotide
  Sense strand starting at position 3546 of SEQ ID NO: 1243435
ggcuguuccacggaagaac

SEQ ID NO: 1416551 - RNA, 19 nt, Artificial Sequence
  Description of Artificial Sequence: Synthetic oligonucleotide
  Antisense strand to SEQ ID NO: 1416550
guucuuccguggaacagcc

SEQ ID NO: 1416552 - RNA, 19 nt, Artificial Sequence
  Description of Artificial Sequence: Synthetic oligonucleotide
  Sense strand starting at position 3756 of SEQ ID NO: 1243435
gcaauaaacgcucagaagu

SEQ ID NO: 1416553 - RNA, 19 nt, Artificial Sequence
  Description of Artificial Sequence: Synthetic oligonucleotide
  Antisense strand to SEQ ID NO: 1416552
acuucugagcguuuauugc

SEQ ID NO: 1416554 - RNA, 19 nt, Artificial Sequence
  Description of Artificial Sequence: Synthetic oligonucleotide
  Sense strand starting at position 3814 of SEQ ID NO: 1243435
ccuuuaaggaggugauauu

SEQ ID NO: 1416555 - RNA, 19 nt, Artificial Sequence
  Description of Artificial Sequence: Synthetic oligonucleotide
  Antisense strand to SEQ ID NO: 1416554
aauaucaccuccuuaaagg

SEQ ID NO: 1416556 - RNA, 19 nt, Artificial Sequence
  Description of Artificial Sequence: Synthetic oligonucleotide
  Sense strand starting at position 3839 of SEQ ID NO: 1243435
gcccaaguuguugggagau

SEQ ID NO: 1416557 - RNA, 19 nt, Artificial Sequence
  Description of Artificial Sequence: Synthetic oligonucleotide
  Antisense strand to SEQ ID NO: 1416556
aucucccaacaacuugggc

SEQ ID NO: 1416558 - RNA, 19 nt, Artificial Sequence
  Description of Artificial Sequence: Synthetic oligonucleotide
  Sense strand starting at position 3941 of SEQ ID NO: 1243435
gcuggagugcugccgucau

SEQ ID NO: 1416559 - RNA, 19 nt, Artificial Sequence
  Description of Artificial Sequence: Synthetic oligonucleotide
  Antisense strand to SEQ ID NO: 1416558
augacggcagcacuccagc

SEQ ID NO: 1416560 - RNA, 19 nt, Artificial Sequence
  Description of Artificial Sequence: Synthetic oligonucleotide
  Sense strand starting at position 3943 of SEQ ID NO: 1243435
uggagugcugccgucauua

SEQ ID NO: 1416561 - RNA, 19 nt, Artificial Sequence
  Description of Artificial Sequence: Synthetic oligonucleotide
  Antisense strand to SEQ ID NO: 1416560
uaaugacggcagcacucca

SEQ ID NO: 1416562 - RNA, 19 nt, Artificial Sequence
  Description of Artificial Sequence: Synthetic oligonucleotide
  Sense strand starting at position 140 of SEQ ID NO: 1243436
gcucacacuugucaucaca

SEQ ID NO: 1416563 - RNA, 19 nt, Artificial Sequence
  Description of Artificial Sequence: Synthetic oligonucleotide
  Antisense strand to SEQ ID NO: 1416562
ugugaugacaagugugagc

SEQ ID NO: 1416564 - RNA, 19 nt, Artificial Sequence
  Description of Artificial Sequence: Synthetic oligonucleotide
  Sense strand starting at position 447 of SEQ ID NO: 1243436
cugucuacccucugcagau

SEQ ID NO: 1416565 - RNA, 19 nt, Artificial Sequence
  Description of Artificial Sequence: Synthetic oligonucleotide
  Antisense strand to SEQ ID NO: 1416564
aucugcagaggguagacag

SEQ ID NO: 1416566 - RNA, 19 nt, Artificial Sequence
  Description of Artificial Sequence: Synthetic oligonucleotide
  Sense strand starting at position 547 of SEQ ID NO: 1243436
ggaauugagccuugguuug

SEQ ID NO: 1416567 - RNA, 19 nt, Artificial Sequence
  Description of Artificial Sequence: Synthetic oligonucleotide
  Antisense strand to SEQ ID NO: 1416566
caaaccaaggcucaauucc

SEQ ID NO: 1416568 - RNA, 19 nt, Artificial Sequence
  Description of Artificial Sequence: Synthetic oligonucleotide
  Sense strand starting at position 727 of SEQ ID NO: 1243436
ccuaaugguuucucucuga

SEQ ID NO: 1416569 - RNA, 19 nt, Artificial Sequence
  Description of Artificial Sequence: Synthetic oligonucleotide
  Antisense strand to SEQ ID NO: 1416568
ucagagagaaaccauuagg

SEQ ID NO: 1416570 - RNA, 19 nt, Artificial Sequence
  Description of Artificial Sequence: Synthetic oligonucleotide
  Sense strand starting at position 941 of SEQ ID NO: 1243436
gcuccuaucugugcagacu

SEQ ID NO: 1416571 - RNA, 19 nt, Artificial Sequence
  Description of Artificial Sequence: Synthetic oligonucleotide
  Antisense strand to SEQ ID NO: 1416570
agucugcacagauaggagc

SEQ ID NO: 1416572 - RNA, 19 nt, Artificial Sequence
  Description of Artificial Sequence: Synthetic oligonucleotide
  Sense strand starting at position 1016 of SEQ ID NO: 1243436
cuuccuucucccuggagau

SEQ ID NO: 1416573 - RNA, 19 nt, Artificial Sequence
  Description of Artificial Sequence: Synthetic oligonucleotide
  Antisense strand to SEQ ID NO: 1416572
aucuccagggagaaggaag

SEQ ID NO: 1416574 - RNA, 19 nt, Artificial Sequence
  Description of Artificial Sequence: Synthetic oligonucleotide
  Sense strand starting at position 1028 of SEQ ID NO: 1243436
uggagauccucuuguauuu

SEQ ID NO: 1416575 - RNA, 19 nt, Artificial Sequence
  Description of Artificial Sequence: Synthetic oligonucleotide
  Antisense strand to SEQ ID NO: 1416574
aaauacaagaggaucucca

SEQ ID NO: 1416576 - RNA, 19 nt, Artificial Sequence
  Description of Artificial Sequence: Synthetic oligonucleotide
  Sense strand starting at position 1112 of SEQ ID NO: 1243436
accaaauuauccuagagag

SEQ ID NO: 1416577 - RNA, 19 nt, Artificial Sequence
  Description of Artificial Sequence: Synthetic oligonucleotide
  Antisense strand to SEQ ID NO: 1416576
cucucuaggauaauuuggu

SEQ ID NO: 1416578 - RNA, 19 nt, Artificial Sequence
  Description of Artificial Sequence: Synthetic oligonucleotide
  Sense strand starting at position 1238 of SEQ ID NO: 1243436
gcccuaauuugcuacauga

SEQ ID NO: 1416579 - RNA, 19 nt, Artificial Sequence
  Description of Artificial Sequence: Synthetic oligonucleotide
  Antisense strand to SEQ ID NO: 1416578
ucauguagcaaauuagggc

SEQ ID NO: 1416580 - RNA, 19 nt, Artificial Sequence
  Description of Artificial Sequence: Synthetic oligonucleotide
  Sense strand starting at position 1395 of SEQ ID NO: 1243436
cagugugcucgaguucuuu

SEQ ID NO: 1416581 - RNA, 19 nt, Artificial Sequence
  Description of Artificial Sequence: Synthetic oligonucleotide
  Antisense strand to SEQ ID NO: 1416580
aaagaacucgagcacacug

SEQ ID NO: 1416582 - RNA, 19 nt, Artificial Sequence
  Description of Artificial Sequence: Synthetic oligonucleotide
  Sense strand starting at position 1750 of SEQ ID NO: 1243436
accagagugugagcagaau

SEQ ID NO: 1416583 - RNA, 19 nt, Artificial Sequence
  Description of Artificial Sequence: Synthetic oligonucleotide
  Antisense strand to SEQ ID NO: 1416582
auucugcucacacucuggu

SEQ ID NO: 1416584 - RNA, 19 nt, Artificial Sequence
  Description of Artificial Sequence: Synthetic oligonucleotide
  Sense strand starting at position 1758 of SEQ ID NO: 1243436
gugagcagaaucggcuuaa

SEQ ID NO: 1416585 - RNA, 19 nt, Artificial Sequence
  Description of Artificial Sequence: Synthetic oligonucleotide
  Antisense strand to SEQ ID NO: 1416584
uuaagccgauucugcucac

SEQ ID NO: 1416586 - RNA, 19 nt, Artificial Sequence
  Description of Artificial Sequence: Synthetic oligonucleotide
  Sense strand starting at position 1762 of SEQ ID NO: 1243436
gcagaaucggcuuaaggca

SEQ ID NO: 1416587 - RNA, 19 nt, Artificial Sequence
  Description of Artificial Sequence: Synthetic oligonucleotide
  Antisense strand to SEQ ID NO: 1416586
ugccuuaagccgauucugc

SEQ ID NO: 1416588 - RNA, 19 nt, Artificial Sequence
  Description of Artificial Sequence: Synthetic oligonucleotide
  Sense strand starting at position 1842 of SEQ ID NO: 1243436
cgaguuugggccggaaugu

SEQ ID NO: 1416589 - RNA, 19 nt, Artificial Sequence
  Description of Artificial Sequence: Synthetic oligonucleotide
  Antisense strand to SEQ ID NO: 1416588
acauuccggcccaaacucg

SEQ ID NO: 1416590 - RNA, 19 nt, Artificial Sequence
  Description of Artificial Sequence: Synthetic oligonucleotide
  Sense strand starting at position 1843 of SEQ ID NO: 1243436
gaguuugggccggaauguu

SEQ ID NO: 1416591 - RNA, 19 nt, Artificial Sequence
  Description of Artificial Sequence: Synthetic oligonucleotide
  Antisense strand to SEQ ID NO: 1416590
aacauuccggcccaaacuc

SEQ ID NO: 1416592 - RNA, 19 nt, Artificial Sequence
  Description of Artificial Sequence: Synthetic oligonucleotide
  Sense strand starting at position 2497 of SEQ ID NO: 1243436
cagcgacugaaggguuaau

SEQ ID NO: 1416593 - RNA, 19 nt, Artificial Sequence
  Description of Artificial Sequence: Synthetic oligonucleotide
  Antisense strand to SEQ ID NO: 1416592
auuaacccuucagucgcug

SEQ ID NO: 1416594 - RNA, 19 nt, Artificial Sequence
  Description of Artificial Sequence: Synthetic oligonucleotide
  Sense strand starting at position 2508 of SEQ ID NO: 1243436
ggguuaauuaaugauugca

SEQ ID NO: 1416595 - RNA, 19 nt, Artificial Sequence
  Description of Artificial Sequence: Synthetic oligonucleotide
  Antisense strand to SEQ ID NO: 1416594
ugcaaucauuaauuaaccc

SEQ ID NO: 1416596 - RNA, 19 nt, Artificial Sequence
  Description of Artificial Sequence: Synthetic oligonucleotide
  Sense strand starting at position 2510 of SEQ ID NO: 1243436
guuaauuaaugauugcaga

SEQ ID NO: 1416597 - RNA, 19 nt, Artificial Sequence
  Description of Artificial Sequence: Synthetic oligonucleotide
  Antisense strand to SEQ ID NO: 1416596
ucugcaaucauuaauuaac

SEQ ID NO: 1416598 - RNA, 19 nt, Artificial Sequence
  Description of Artificial Sequence: Synthetic oligonucleotide
  Sense strand starting at position 2521 of SEQ ID NO: 1243436
auugcagauuaauugaaca

SEQ ID NO: 1416599 - RNA, 19 nt, Artificial Sequence
  Description of Artificial Sequence: Synthetic oligonucleotide
  Antisense strand to SEQ ID NO: 1416598
uguucaauuaaucugcaau

SEQ ID NO: 1416600 - RNA, 19 nt, Artificial Sequence
  Description of Artificial Sequence: Synthetic oligonucleotide
  Sense strand starting at position 2629 of SEQ ID NO: 1243436
ccgagcuuguccucagaga

SEQ ID NO: 1416601 - RNA, 19 nt, Artificial Sequence
  Description of Artificial Sequence: Synthetic oligonucleotide
  Antisense strand to SEQ ID NO: 1416600
ucucugaggacaagcucgg

SEQ ID NO: 1416602 - RNA, 19 nt, Artificial Sequence
  Description of Artificial Sequence: Synthetic oligonucleotide
  Sense strand starting at position 2630 of SEQ ID NO: 1243436
cgagcuuguccucagagaa

SEQ ID NO: 1416603 - RNA, 19 nt, Artificial Sequence
  Description of Artificial Sequence: Synthetic oligonucleotide
  Antisense strand to SEQ ID NO: 1416602
uucucugaggacaagcucg

SEQ ID NO: 1416604 - RNA, 19 nt, Artificial Sequence
  Description of Artificial Sequence: Synthetic oligonucleotide
  Sense strand starting at position 2640 of SEQ ID NO: 1243436
cucagagaauuagguaacu

SEQ ID NO: 1416605 - RNA, 19 nt, Artificial Sequence
  Description of Artificial Sequence: Synthetic oligonucleotide
  Antisense strand to SEQ ID NO: 1416604
aguuaccuaauucucugag

SEQ ID NO: 1416606 - RNA, 19 nt, Artificial Sequence
  Description of Artificial Sequence: Synthetic oligonucleotide
  Sense strand starting at position 3448 of SEQ ID NO: 1243436
uggagcucuuuccucugaa

SEQ ID NO: 1416607 - RNA, 19 nt, Artificial Sequence
  Description of Artificial Sequence: Synthetic oligonucleotide
  Antisense strand to SEQ ID NO: 1416606
uucagaggaaagagcucca

SEQ ID NO: 1416608 - RNA, 19 nt, Artificial Sequence
  Description of Artificial Sequence: Synthetic oligonucleotide
  Sense strand starting at position 3449 of SEQ ID NO: 1243436
ggagcucuuuccucugaac

SEQ ID NO: 1416609 - RNA, 19 nt, Artificial Sequence
  Description of Artificial Sequence: Synthetic oligonucleotide
  Antisense strand to SEQ ID NO: 1416608
guucagaggaaagagcucc

SEQ ID NO: 1416610 - RNA, 19 nt, Artificial Sequence
  Description of Artificial Sequence: Synthetic oligonucleotide
  Sense strand starting at position 3458 of SEQ ID NO: 1243436
uccucugaacuuugacagu

SEQ ID NO: 1416611 - RNA, 19 nt, Artificial Sequence
  Description of Artificial Sequence: Synthetic oligonucleotide
  Antisense strand to SEQ ID NO: 1416610
acugucaaaguucagagga

SEQ ID NO: 1416612 - RNA, 19 nt, Artificial Sequence
  Description of Artificial Sequence: Synthetic oligonucleotide
  Sense strand starting at position 3481 of SEQ ID NO: 1243436
gcgucuagacucuaaacgu

SEQ ID NO: 1416613 - RNA, 19 nt, Artificial Sequence
  Description of Artificial Sequence: Synthetic oligonucleotide
  Antisense strand to SEQ ID NO: 1416612
acguuuagagucuagacgc

SEQ ID NO: 1416614 - RNA, 19 nt, Artificial Sequence
  Description of Artificial Sequence: Synthetic oligonucleotide
  Sense strand starting at position 3497 of SEQ ID NO: 1243436
cguacuagaucccuccaga

SEQ ID NO: 1416615 - RNA, 19 nt, Artificial Sequence
  Description of Artificial Sequence: Synthetic oligonucleotide
  Antisense strand to SEQ ID NO: 1416614
ucuggagggaucuaguacg

SEQ ID NO: 1416616 - RNA, 19 nt, Artificial Sequence
  Description of Artificial Sequence: Synthetic oligonucleotide
  Sense strand starting at position 3614 of SEQ ID NO: 1243436
gucacagaguauuagaauu

SEQ ID NO: 1416617 - RNA, 19 nt, Artificial Sequence
  Description of Artificial Sequence: Synthetic oligonucleotide
  Antisense strand to SEQ ID NO: 1416616
aauucuaauacucugugac

SEQ ID NO: 1416618 - RNA, 19 nt, Artificial Sequence
  Description of Artificial Sequence: Synthetic oligonucleotide
  Sense strand starting at position 3797 of SEQ ID NO: 1243436
uugugcuuccuguauaucu

SEQ ID NO: 1416619 - RNA, 19 nt, Artificial Sequence
  Description of Artificial Sequence: Synthetic oligonucleotide
  Antisense strand to SEQ ID NO: 1416618
agauauacaggaagcacaa

SEQ ID NO: 1416620 - RNA, 19 nt, Artificial Sequence
  Description of Artificial Sequence: Synthetic oligonucleotide
  Sense strand starting at position 3828 of SEQ ID NO: 1243436
gcaagugugcucuccguaa

SEQ ID NO: 1416621 - RNA, 19 nt, Artificial Sequence
  Description of Artificial Sequence: Synthetic oligonucleotide
  Antisense strand to SEQ ID NO: 1416620
uuacggagagcacacuugc

SEQ ID NO: 1416622 - RNA, 19 nt, Artificial Sequence
  Description of Artificial Sequence: Synthetic oligonucleotide
  Sense strand starting at position 3830 of SEQ ID NO: 1243436
aagugugcucuccguaaau

SEQ ID NO: 1416623 - RNA, 19 nt, Artificial Sequence
  Description of Artificial Sequence: Synthetic oligonucleotide
  Antisense strand to SEQ ID NO: 1416622
auuuacggagagcacacuu

SEQ ID NO: 1416624 - RNA, 19 nt, Artificial Sequence
  Description of Artificial Sequence: Synthetic oligonucleotide
  Sense strand starting at position 3832 of SEQ ID NO: 1243436
gugugcucuccguaaauaa

SEQ ID NO: 1416625 - RNA, 19 nt, Artificial Sequence
  Description of Artificial Sequence: Synthetic oligonucleotide
  Antisense strand to SEQ ID NO: 1416624
uuauuuacggagagcacac

SEQ ID NO: 1416626 - RNA, 19 nt, Artificial Sequence
  Description of Artificial Sequence: Synthetic oligonucleotide
  Sense strand starting at position 3874 of SEQ ID NO: 1243436
gugagugauuugugaugaa

SEQ ID NO: 1416627 - RNA, 19 nt, Artificial Sequence
  Description of Artificial Sequence: Synthetic oligonucleotide
  Antisense strand to SEQ ID NO: 1416626
uucaucacaaaucacucac

SEQ ID NO: 1416628 - RNA, 19 nt, Artificial Sequence
  Description of Artificial Sequence: Synthetic oligonucleotide
  Sense strand starting at position 3877 of SEQ ID NO: 1243436
agugauuugugaugaagcu

SEQ ID NO: 1416629 - RNA, 19 nt, Artificial Sequence
  Description of Artificial Sequence: Synthetic oligonucleotide
  Antisense strand to SEQ ID NO: 1416628
agcuucaucacaaaucacu

SEQ ID NO: 1416630 - RNA, 19 nt, Artificial Sequence
  Description of Artificial Sequence: Synthetic oligonucleotide
  Sense strand starting at position 3883 of SEQ ID NO: 1243436
uugugaugaagcuguugga

SEQ ID NO: 1416631 - RNA, 19 nt, Artificial Sequence
  Description of Artificial Sequence: Synthetic oligonucleotide
  Antisense strand to SEQ ID NO: 1416630
uccaacagcuucaucacaa

SEQ ID NO: 1416632 - RNA, 19 nt, Artificial Sequence
  Description of Artificial Sequence: Synthetic oligonucleotide
  Sense strand starting at position 3896 of SEQ ID NO: 1243436
guuggagguaacugucgau

SEQ ID NO: 1416633 - RNA, 19 nt, Artificial Sequence
  Description of Artificial Sequence: Synthetic oligonucleotide
  Antisense strand to SEQ ID NO: 1416632
aucgacaguuaccuccaac

SEQ ID NO: 1416634 - RNA, 19 nt, Artificial Sequence
  Description of Artificial Sequence: Synthetic oligonucleotide
  Sense strand starting at position 3900 of SEQ ID NO: 1243436
gagguaacugucgaucaga

SEQ ID NO: 1416635 - RNA, 19 nt, Artificial Sequence
  Description of Artificial Sequence: Synthetic oligonucleotide
  Antisense strand to SEQ ID NO: 1416634
ucugaucgacaguuaccuc

SEQ ID NO: 1416636 - RNA, 19 nt, Artificial Sequence
  Description of Artificial Sequence: Synthetic oligonucleotide
  Sense strand starting at position 3905 of SEQ ID NO: 1243436
aacugucgaucagauuuaa

SEQ ID NO: 1416637 - RNA, 19 nt, Artificial Sequence
  Description of Artificial Sequence: Synthetic oligonucleotide
  Antisense strand to SEQ ID NO: 1416636
uuaaaucugaucgacaguu

SEQ ID NO: 1416638 - RNA, 19 nt, Artificial Sequence
  Description of Artificial Sequence: Synthetic oligonucleotide
  Sense strand starting at position 3960 of SEQ ID NO: 1243436
ccaaacagaucugaaugaa

SEQ ID NO: 1416639 - RNA, 19 nt, Artificial Sequence
  Description of Artificial Sequence: Synthetic oligonucleotide
  Antisense strand to SEQ ID NO: 1416638
uucauucagaucuguuugg

SEQ ID NO: 1416640 - RNA, 19 nt, Artificial Sequence
  Description of Artificial Sequence: Synthetic oligonucleotide
  Sense strand starting at position 3980 of SEQ ID NO: 1243436
uacggugauggccaaauua

SEQ ID NO: 1416641 - RNA, 19 nt, Artificial Sequence
  Description of Artificial Sequence: Synthetic oligonucleotide
  Antisense strand to SEQ ID NO: 1416640
uaauuuggccaucaccgua

SEQ ID NO: 1416642 - RNA, 19 nt, Artificial Sequence
  Description of Artificial Sequence: Synthetic oligonucleotide
  Sense strand starting at position 10 of SEQ ID NO: 1243437
gagacuucgucucugccaa

SEQ ID NO: 1416643 - RNA, 19 nt, Artificial Sequence
  Description of Artificial Sequence: Synthetic oligonucleotide
  Antisense strand to SEQ ID NO: 1416642
uuggcagagacgaagucuc

SEQ ID NO: 1416644 - RNA, 19 nt, Artificial Sequence
  Description of Artificial Sequence: Synthetic oligonucleotide
  Sense strand starting at position 11 of SEQ ID NO: 1243437
agacuucgucucugccaaa

SEQ ID NO: 1416645 - RNA, 19 nt, Artificial Sequence
  Description of Artificial Sequence: Synthetic oligonucleotide
  Antisense strand to SEQ ID NO: 1416644
uuuggcagagacgaagucu

SEQ ID NO: 1416646 - RNA, 19 nt, Artificial Sequence
  Description of Artificial Sequence: Synthetic oligonucleotide
  Sense strand starting at position 239 of SEQ ID NO: 1243437
uuugcuugaccagacuuua

SEQ ID NO: 1416647 - RNA, 19 nt, Artificial Sequence
  Description of Artificial Sequence: Synthetic oligonucleotide
  Antisense strand to SEQ ID NO: 1416646
uaaagucuggucaagcaaa

SEQ ID NO: 1416648 - RNA, 19 nt, Artificial Sequence
  Description of Artificial Sequence: Synthetic oligonucleotide
  Sense strand starting at position 277 of SEQ ID NO: 1243437
cuguguaccucuuuguaaa

SEQ ID NO: 1416649 - RNA, 19 nt, Artificial Sequence
  Description of Artificial Sequence: Synthetic oligonucleotide
  Antisense strand to SEQ ID NO: 1416648
uuuacaaagagguacacag

SEQ ID NO: 1416650 - RNA, 19 nt, Artificial Sequence
  Description of Artificial Sequence: Synthetic oligonucleotide
  Sense strand starting at position 386 of SEQ ID NO: 1243437
gcuaucuaaccagguuuaa

SEQ ID NO: 1416651 - RNA, 19 nt, Artificial Sequence
  Description of Artificial Sequence: Synthetic oligonucleotide
  Antisense strand to SEQ ID NO: 1416650
uuaaaccugguuagauagc

SEQ ID NO: 1416652 - RNA, 19 nt, Artificial Sequence
  Description of Artificial Sequence: Synthetic oligonucleotide
  Sense strand starting at position 396 of SEQ ID NO: 1243437
cagguuuaaugcuuagguu

SEQ ID NO: 1416653 - RNA, 19 nt, Artificial Sequence
  Description of Artificial Sequence: Synthetic oligonucleotide
  Antisense strand to SEQ ID NO: 1416652
aaccuaagcauuaaaccug

SEQ ID NO: 1416654 - RNA, 19 nt, Artificial Sequence
  Description of Artificial Sequence: Synthetic oligonucleotide
  Sense strand starting at position 397 of SEQ ID NO: 1243437
agguuuaaugcuuagguua

SEQ ID NO: 1416655 - RNA, 19 nt, Artificial Sequence
  Description of Artificial Sequence: Synthetic oligonucleotide
  Antisense strand to SEQ ID NO: 1416654
uaaccuaagcauuaaaccu

SEQ ID NO: 1416656 - RNA, 19 nt, Artificial Sequence
  Description of Artificial Sequence: Synthetic oligonucleotide
  Sense strand starting at position 495 of SEQ ID NO: 1243437
cugauaagugcauauaucu

SEQ ID NO: 1416657 - RNA, 19 nt, Artificial Sequence
  Description of Artificial Sequence: Synthetic oligonucleotide
  Antisense strand to SEQ ID NO: 1416656
agauauaugcacuuaucag

SEQ ID NO: 1416658 - RNA, 19 nt, Artificial Sequence
  Description of Artificial Sequence: Synthetic oligonucleotide
  Sense strand starting at position 556 of SEQ ID NO: 1243437
augaauuuguguuggaugu

SEQ ID NO: 1416659 - RNA, 19 nt, Artificial Sequence
  Description of Artificial Sequence: Synthetic oligonucleotide
  Antisense strand to SEQ ID NO: 1416658
acauccaacacaaauucau

SEQ ID NO: 1416660 - RNA, 19 nt, Artificial Sequence
  Description of Artificial Sequence: Synthetic oligonucleotide
  Sense strand starting at position 558 of SEQ ID NO: 1243437
gaauuuguguuggauguca

SEQ ID NO: 1416661 - RNA, 19 nt, Artificial Sequence
  Description of Artificial Sequence: Synthetic oligonucleotide
  Antisense strand to SEQ ID NO: 1416660
ugacauccaacacaaauuc

SEQ ID NO: 1416662 - RNA, 19 nt, Artificial Sequence
  Description of Artificial Sequence: Synthetic oligonucleotide
  Sense strand starting at position 560 of SEQ ID NO: 1243437
auuuguguuggaugucauu

SEQ ID NO: 1416663 - RNA, 19 nt, Artificial Sequence
  Description of Artificial Sequence: Synthetic oligonucleotide
  Antisense strand to SEQ ID NO: 1416662
aaugacauccaacacaaau

SEQ ID NO: 1416664 - RNA, 19 nt, Artificial Sequence
  Description of Artificial Sequence: Synthetic oligonucleotide
  Sense strand starting at position 673 of SEQ ID NO: 1243437
uagguaagcuuacccagaa

SEQ ID NO: 1416665 - RNA, 19 nt, Artificial Sequence
  Description of Artificial Sequence: Synthetic oligonucleotide
  Antisense strand to SEQ ID NO: 1416664
uucuggguaagcuuaccua

SEQ ID NO: 1416666 - RNA, 19 nt, Artificial Sequence
  Description of Artificial Sequence: Synthetic oligonucleotide
  Sense strand starting at position 674 of SEQ ID NO: 1243437
agguaagcuuacccagaau

SEQ ID NO: 1416667 - RNA, 19 nt, Artificial Sequence
  Description of Artificial Sequence: Synthetic oligonucleotide
  Antisense strand to SEQ ID NO: 1416666
auucuggguaagcuuaccu

SEQ ID NO: 1416668 - RNA, 19 nt, Artificial Sequence
  Description of Artificial Sequence: Synthetic oligonucleotide
  Sense strand starting at position 705 of SEQ ID NO: 1243437
ccugauguuuccucaguca

SEQ ID NO: 1416669 - RNA, 19 nt, Artificial Sequence
  Description of Artificial Sequence: Synthetic oligonucleotide
  Antisense strand to SEQ ID NO: 1416668
ugacugaggaaacaucagg

SEQ ID NO: 1416670 - RNA, 19 nt, Artificial Sequence
  Description of Artificial Sequence: Synthetic oligonucleotide
  Sense strand starting at position 937 of SEQ ID NO: 1243437
gggcauuugaucugcuuac

SEQ ID NO: 1416671 - RNA, 19 nt, Artificial Sequence
  Description of Artificial Sequence: Synthetic oligonucleotide
  Antisense strand to SEQ ID NO: 1416670
guaagcagaucaaaugccc

SEQ ID NO: 1416672 - RNA, 19 nt, Artificial Sequence
  Description of Artificial Sequence: Synthetic oligonucleotide
  Sense strand starting at position 938 of SEQ ID NO: 1243437
ggcauuugaucugcuuacu

SEQ ID NO: 1416673 - RNA, 19 nt, Artificial Sequence
  Description of Artificial Sequence: Synthetic oligonucleotide
  Antisense strand to SEQ ID NO: 1416672
aguaagcagaucaaaugcc

SEQ ID NO: 1416674 - RNA, 19 nt, Artificial Sequence
  Description of Artificial Sequence: Synthetic oligonucleotide
  Sense strand starting at position 948 of SEQ ID NO: 1243437
cugcuuacuggaggucaga

SEQ ID NO: 1416675 - RNA, 19 nt, Artificial Sequence
  Description of Artificial Sequence: Synthetic oligonucleotide
  Antisense strand to SEQ ID NO: 1416674
ucugaccuccaguaagcag

SEQ ID NO: 1416676 - RNA, 19 nt, Artificial Sequence
  Description of Artificial Sequence: Synthetic oligonucleotide
  Sense strand starting at position 993 of SEQ ID NO: 1243437
gagaauggcuccuugggau

SEQ ID NO: 1416677 - RNA, 19 nt, Artificial Sequence
  Description of Artificial Sequence: Synthetic oligonucleotide
  Antisense strand to SEQ ID NO: 1416676
aucccaaggagccauucuc

SEQ ID NO: 1416678 - RNA, 19 nt, Artificial Sequence
  Description of Artificial Sequence: Synthetic oligonucleotide
  Sense strand starting at position 1005 of SEQ ID NO: 1243437
uugggaucuugucuuagaa

SEQ ID NO: 1416679 - RNA, 19 nt, Artificial Sequence
  Description of Artificial Sequence: Synthetic oligonucleotide
  Antisense strand to SEQ ID NO: 1416678
uucuaagacaagaucccaa

SEQ ID NO: 1416680 - RNA, 19 nt, Artificial Sequence
  Description of Artificial Sequence: Synthetic oligonucleotide
  Sense strand starting at position 1007 of SEQ ID NO: 1243437
gggaucuugucuuagaaca

SEQ ID NO: 1416681 - RNA, 19 nt, Artificial Sequence
  Description of Artificial Sequence: Synthetic oligonucleotide
  Antisense strand to SEQ ID NO: 1416680
uguucuaagacaagauccc

SEQ ID NO: 1416682 - RNA, 19 nt, Artificial Sequence
  Description of Artificial Sequence: Synthetic oligonucleotide
  Sense strand starting at position 1009 of SEQ ID NO: 1243437
gaucuugucuuagaacaag

SEQ ID NO: 1416683 - RNA, 19 nt, Artificial Sequence
  Description of Artificial Sequence: Synthetic oligonucleotide
  Antisense strand to SEQ ID NO: 1416682
cuuguucuaagacaagauc

SEQ ID NO: 1416684 - RNA, 19 nt, Artificial Sequence
  Description of Artificial Sequence: Synthetic oligonucleotide
  Sense strand starting at position 1092 of SEQ ID NO: 1243437
gaccgauugucugcaggau

SEQ ID NO: 1416685 - RNA, 19 nt, Artificial Sequence
  Description of Artificial Sequence: Synthetic oligonucleotide
  Antisense strand to SEQ ID NO: 1416684
auccugcagacaaucgguc

SEQ ID NO: 1416686 - RNA, 19 nt, Artificial Sequence
  Description of Artificial Sequence: Synthetic oligonucleotide
  Sense strand starting at position 1125 of SEQ ID NO: 1243437
ccacuaguauccuaggaau

SEQ ID NO: 1416687 - RNA, 19 nt, Artificial Sequence
  Description of Artificial Sequence: Synthetic oligonucleotide
  Antisense strand to SEQ ID NO: 1416686
auuccuaggauacuagugg

SEQ ID NO: 1416688 - RNA, 19 nt, Artificial Sequence
  Description of Artificial Sequence: Synthetic oligonucleotide
  Sense strand starting at position 1131 of SEQ ID NO: 1243437
guauccuaggaauggcuua

SEQ ID NO: 1416689 - RNA, 19 nt, Artificial Sequence
  Description of Artificial Sequence: Synthetic oligonucleotide
  Antisense strand to SEQ ID NO: 1416688
uaagccauuccuaggauac

SEQ ID NO: 1416690 - RNA, 19 nt, Artificial Sequence
  Description of Artificial Sequence: Synthetic oligonucleotide
  Sense strand starting at position 1677 of SEQ ID NO: 1243437
ggugcaggaugauucugau

SEQ ID NO: 1416691 - RNA, 19 nt, Artificial Sequence
  Description of Artificial Sequence: Synthetic oligonucleotide
  Antisense strand to SEQ ID NO: 1416690
aucagaaucauccugcacc

SEQ ID NO: 1416692 - RNA, 19 nt, Artificial Sequence
  Description of Artificial Sequence: Synthetic oligonucleotide
  Sense strand starting at position 2016 of SEQ ID NO: 1243437
ggcagucauuugguccaau

SEQ ID NO: 1416693 - RNA, 19 nt, Artificial Sequence
  Description of Artificial Sequence: Synthetic oligonucleotide
  Antisense strand to SEQ ID NO: 1416692
auuggaccaaaugacugcc

SEQ ID NO: 1416694 - RNA, 19 nt, Artificial Sequence
  Description of Artificial Sequence: Synthetic oligonucleotide
  Sense strand starting at position 2017 of SEQ ID NO: 1243437
gcagucauuugguccaauc

SEQ ID NO: 1416695 - RNA, 19 nt, Artificial Sequence
  Description of Artificial Sequence: Synthetic oligonucleotide
  Antisense strand to SEQ ID NO: 1416694
gauuggaccaaaugacugc

SEQ ID NO: 1416696 - RNA, 19 nt, Artificial Sequence
  Description of Artificial Sequence: Synthetic oligonucleotide
  Sense strand starting at position 2067 of SEQ ID NO: 1243437
agaggagucagccaauggu

SEQ ID NO: 1416697 - RNA, 19 nt, Artificial Sequence
  Description of Artificial Sequence: Synthetic oligonucleotide
  Antisense strand to SEQ ID NO: 1416696
accauuggcugacuccucu

SEQ ID NO: 1416698 - RNA, 19 nt, Artificial Sequence
  Description of Artificial Sequence: Synthetic oligonucleotide
  Sense strand starting at position 2746 of SEQ ID NO: 1243437
gcauuuggcgcuuggugau

SEQ ID NO: 1416699 - RNA, 19 nt, Artificial Sequence
  Description of Artificial Sequence: Synthetic oligonucleotide
  Antisense strand to SEQ ID NO: 1416698
aucaccaagcgccaaaugc

SEQ ID NO: 1416700 - RNA, 19 nt, Artificial Sequence
  Description of Artificial Sequence: Synthetic oligonucleotide
  Sense strand starting at position 2858 of SEQ ID NO: 1243437
uggcuucugcccuggaguu

SEQ ID NO: 1416701 - RNA, 19 nt, Artificial Sequence
  Description of Artificial Sequence: Synthetic oligonucleotide
  Antisense strand to SEQ ID NO: 1416700
aacuccagggcagaagcca

SEQ ID NO: 1416702 - RNA, 19 nt, Artificial Sequence
  Description of Artificial Sequence: Synthetic oligonucleotide
  Sense strand starting at position 2859 of SEQ ID NO: 1243437
ggcuucugcccuggaguuu

SEQ ID NO: 1416703 - RNA, 19 nt, Artificial Sequence
  Description of Artificial Sequence: Synthetic oligonucleotide
  Antisense strand to SEQ ID NO: 1416702
aaacuccagggcagaagcc

SEQ ID NO: 1416704 - RNA, 19 nt, Artificial Sequence
  Description of Artificial Sequence: Synthetic oligonucleotide
  Sense strand starting at position 3023 of SEQ ID NO: 1243437
gccaacguccgcuugaguu

SEQ ID NO: 1416705 - RNA, 19 nt, Artificial Sequence
  Description of Artificial Sequence: Synthetic oligonucleotide
  Antisense strand to SEQ ID NO: 1416704
aacucaagcggacguuggc

SEQ ID NO: 1416706 - RNA, 19 nt, Artificial Sequence
  Description of Artificial Sequence: Synthetic oligonucleotide
  Sense strand starting at position 3128 of SEQ ID NO: 1243437
ggucaccucuuauucuuua

SEQ ID NO: 1416707 - RNA, 19 nt, Artificial Sequence
  Description of Artificial Sequence: Synthetic oligonucleotide
  Antisense strand to SEQ ID NO: 1416706
uaaagaauaagaggugacc

SEQ ID NO: 1416708 - RNA, 19 nt, Artificial Sequence
  Description of Artificial Sequence: Synthetic oligonucleotide
  Sense strand starting at position 3136 of SEQ ID NO: 1243437
cuuauucuuuaagcuggaa

SEQ ID NO: 1416709 - RNA, 19 nt, Artificial Sequence
  Description of Artificial Sequence: Synthetic oligonucleotide
  Antisense strand to SEQ ID NO: 1416708
uuccagcuuaaagaauaag

SEQ ID NO: 1416710 - RNA, 19 nt, Artificial Sequence
  Description of Artificial Sequence: Synthetic oligonucleotide
  Sense strand starting at position 3139 of SEQ ID NO: 1243437
auucuuuaagcuggaacaa

SEQ ID NO: 1416711 - RNA, 19 nt, Artificial Sequence
  Description of Artificial Sequence: Synthetic oligonucleotide
  Antisense strand to SEQ ID NO: 1416710
uuguuccagcuuaaagaau

SEQ ID NO: 1416712 - RNA, 19 nt, Artificial Sequence
  Description of Artificial Sequence: Synthetic oligonucleotide
  Sense strand starting at position 3226 of SEQ ID NO: 1243437
ccaagacauugcucugaga

SEQ ID NO: 1416713 - RNA, 19 nt, Artificial Sequence
  Description of Artificial Sequence: Synthetic oligonucleotide
  Antisense strand to SEQ ID NO: 1416712
ucucagagcaaugucuugg

SEQ ID NO: 1416714 - RNA, 19 nt, Artificial Sequence
  Description of Artificial Sequence: Synthetic oligonucleotide
  Sense strand starting at position 3251 of SEQ ID NO: 1243437
gccaaugucccaggagaag

SEQ ID NO: 1416715 - RNA, 19 nt, Artificial Sequence
  Description of Artificial Sequence: Synthetic oligonucleotide
  Antisense strand to SEQ ID NO: 1416714
cuucuccugggacauuggc

SEQ ID NO: 1416716 - RNA, 19 nt, Artificial Sequence
  Description of Artificial Sequence: Synthetic oligonucleotide
  Sense strand starting at position 3414 of SEQ ID NO: 1243437
ggccuuuagacaugaagga

SEQ ID NO: 1416717 - RNA, 19 nt, Artificial Sequence
  Description of Artificial Sequence: Synthetic oligonucleotide
  Antisense strand to SEQ ID NO: 1416716
uccuucaugucuaaaggcc

SEQ ID NO: 1416718 - RNA, 19 nt, Artificial Sequence
  Description of Artificial Sequence: Synthetic oligonucleotide
  Sense strand starting at position 3890 of SEQ ID NO: 1243437
ccguuugagagcuaccgaa

SEQ ID NO: 1416719 - RNA, 19 nt, Artificial Sequence
  Description of Artificial Sequence: Synthetic oligonucleotide
  Antisense strand to SEQ ID NO: 1416718
uucgguagcucucaaacgg

SEQ ID NO: 1416720 - RNA, 19 nt, Artificial Sequence
  Description of Artificial Sequence: Synthetic oligonucleotide
  Sense strand starting at position 3962 of SEQ ID NO: 1243437
ccaccugccugguuggaaa

SEQ ID NO: 1416721 - RNA, 19 nt, Artificial Sequence
  Description of Artificial Sequence: Synthetic oligonucleotide
  Antisense strand to SEQ ID NO: 1416720
uuuccaaccaggcaggugg

SEQ ID NO: 1416722 - RNA, 19 nt, Artificial Sequence
  Description of Artificial Sequence: Synthetic oligonucleotide
  Sense strand starting at position 675 of SEQ ID NO: 1243438
uaggauaggugccauuauu

SEQ ID NO: 1416723 - RNA, 19 nt, Artificial Sequence
  Description of Artificial Sequence: Synthetic oligonucleotide
  Antisense strand to SEQ ID NO: 1416722
aauaauggcaccuauccua

SEQ ID NO: 1416724 - RNA, 19 nt, Artificial Sequence
  Description of Artificial Sequence: Synthetic oligonucleotide
  Sense strand starting at position 683 of SEQ ID NO: 1243438
gugccauuauuguccucau

SEQ ID NO: 1416725 - RNA, 19 nt, Artificial Sequence
  Description of Artificial Sequence: Synthetic oligonucleotide
  Antisense strand to SEQ ID NO: 1416724
augaggacaauaauggcac

SEQ ID NO: 1416726 - RNA, 19 nt, Artificial Sequence
  Description of Artificial Sequence: Synthetic oligonucleotide
  Sense strand starting at position 684 of SEQ ID NO: 1243438
ugccauuauuguccucauu

SEQ ID NO: 1416727 - RNA, 19 nt, Artificial Sequence
  Description of Artificial Sequence: Synthetic oligonucleotide
  Antisense strand to SEQ ID NO: 1416726
aaugaggacaauaauggca

SEQ ID NO: 1416728 - RNA, 19 nt, Artificial Sequence
  Description of Artificial Sequence: Synthetic oligonucleotide
  Sense strand starting at position 777 of SEQ ID NO: 1243438
uggauugcaugucaagauc

SEQ ID NO: 1416729 - RNA, 19 nt, Artificial Sequence
  Description of Artificial Sequence: Synthetic oligonucleotide
  Antisense strand to SEQ ID NO: 1416728
gaucuugacaugcaaucca

SEQ ID NO: 1416730 - RNA, 19 nt, Artificial Sequence
  Description of Artificial Sequence: Synthetic oligonucleotide
  Sense strand starting at position 780 of SEQ ID NO: 1243438
auugcaugucaagaucaca

SEQ ID NO: 1416731 - RNA, 19 nt, Artificial Sequence
  Description of Artificial Sequence: Synthetic oligonucleotide
  Antisense strand to SEQ ID NO: 1416730
ugugaucuugacaugcaau

SEQ ID NO: 1416732 - RNA, 19 nt, Artificial Sequence
  Description of Artificial Sequence: Synthetic oligonucleotide
  Sense strand starting at position 1050 of SEQ ID NO: 1243438
uggguuagcucaguagauc

SEQ ID NO: 1416733 - RNA, 19 nt, Artificial Sequence
  Description of Artificial Sequence: Synthetic oligonucleotide
  Antisense strand to SEQ ID NO: 1416732
gaucuacugagcuaaccca

SEQ ID NO: 1416734 - RNA, 19 nt, Artificial Sequence
  Description of Artificial Sequence: Synthetic oligonucleotide
  Sense strand starting at position 1051 of SEQ ID NO: 1243438
ggguuagcucaguagaucu

SEQ ID NO: 1416735 - RNA, 19 nt, Artificial Sequence
  Description of Artificial Sequence: Synthetic oligonucleotide
  Antisense strand to SEQ ID NO: 1416734
agaucuacugagcuaaccc

SEQ ID NO: 1416736 - RNA, 19 nt, Artificial Sequence
  Description of Artificial Sequence: Synthetic oligonucleotide
  Sense strand starting at position 1084 of SEQ ID NO: 1243438
gcaagcuacuauuauugca

SEQ ID NO: 1416737 - RNA, 19 nt, Artificial Sequence
  Description of Artificial Sequence: Synthetic oligonucleotide
  Antisense strand to SEQ ID NO: 1416736
ugcaauaauaguagcuugc

SEQ ID NO: 1416738 - RNA, 19 nt, Artificial Sequence
  Description of Artificial Sequence: Synthetic oligonucleotide
  Sense strand starting at position 1165 of SEQ ID NO: 1243438
aauggugggaccuggauua

SEQ ID NO: 1416739 - RNA, 19 nt, Artificial Sequence
  Description of Artificial Sequence: Synthetic oligonucleotide
  Antisense strand to SEQ ID NO: 1416738
uaauccaggucccaccauu

SEQ ID NO: 1416740 - RNA, 19 nt, Artificial Sequence
  Description of Artificial Sequence: Synthetic oligonucleotide
  Sense strand starting at position 1172 of SEQ ID NO: 1243438
ggaccuggauuagauaaua

SEQ ID NO: 1416741 - RNA, 19 nt, Artificial Sequence
  Description of Artificial Sequence: Synthetic oligonucleotide
  Antisense strand to SEQ ID NO: 1416740
uauuaucuaauccaggucc

SEQ ID NO: 1416742 - RNA, 19 nt, Artificial Sequence
  Description of Artificial Sequence: Synthetic oligonucleotide
  Sense strand starting at position 1202 of SEQ ID NO: 1243438
gaguuugacuuccugaguu

SEQ ID NO: 1416743 - RNA, 19 nt, Artificial Sequence
  Description of Artificial Sequence: Synthetic oligonucleotide
  Antisense strand to SEQ ID NO: 1416742
aacucaggaagucaaacuc

SEQ ID NO: 1416744 - RNA, 19 nt, Artificial Sequence
  Description of Artificial Sequence: Synthetic oligonucleotide
  Sense strand starting at position 1238 of SEQ ID NO: 1243438
auuuaauugcuguggucaa

SEQ ID NO: 1416745 - RNA, 19 nt, Artificial Sequence
  Description of Artificial Sequence: Synthetic oligonucleotide
  Antisense strand to SEQ ID NO: 1416744
uugaccacagcaauuaaau

SEQ ID NO: 1416746 - RNA, 19 nt, Artificial Sequence
  Description of Artificial Sequence: Synthetic oligonucleotide
  Sense strand starting at position 1239 of SEQ ID NO: 1243438
uuuaauugcuguggucaag

SEQ ID NO: 1416747 - RNA, 19 nt, Artificial Sequence
  Description of Artificial Sequence: Synthetic oligonucleotide
  Antisense strand to SEQ ID NO: 1416746
cuugaccacagcaauuaaa

SEQ ID NO: 1416748 - RNA, 19 nt, Artificial Sequence
  Description of Artificial Sequence: Synthetic oligonucleotide
  Sense strand starting at position 1242 of SEQ ID NO: 1243438
aauugcuguggucaaguua

SEQ ID NO: 1416749 - RNA, 19 nt, Artificial Sequence
  Description of Artificial Sequence: Synthetic oligonucleotide
  Antisense strand to SEQ ID NO: 1416748
uaacuugaccacagcaauu

SEQ ID NO: 1416750 - RNA, 19 nt, Artificial Sequence
  Description of Artificial Sequence: Synthetic oligonucleotide
  Sense strand starting at position 1260 of SEQ ID NO: 1243438
acuuaacugucugaaacug

SEQ ID NO: 1416751 - RNA, 19 nt, Artificial Sequence
  Description of Artificial Sequence: Synthetic oligonucleotide
  Antisense strand to SEQ ID NO: 1416750
caguuucagacaguuaagu

SEQ ID NO: 1416752 - RNA, 19 nt, Artificial Sequence
  Description of Artificial Sequence: Synthetic oligonucleotide
  Sense strand starting at position 1277 of SEQ ID NO: 1243438
uggaucucccaaggguaaa

SEQ ID NO: 1416753 - RNA, 19 nt, Artificial Sequence
  Description of Artificial Sequence: Synthetic oligonucleotide
  Antisense strand to SEQ ID NO: 1416752
uuuacccuugggagaucca

SEQ ID NO: 1416754 - RNA, 19 nt, Artificial Sequence
  Description of Artificial Sequence: Synthetic oligonucleotide
  Sense strand starting at position 1308 of SEQ ID NO: 1243438
gacccuauuucguagauua

SEQ ID NO: 1416755 - RNA, 19 nt, Artificial Sequence
  Description of Artificial Sequence: Synthetic oligonucleotide
  Antisense strand to SEQ ID NO: 1416754
uaaucuacgaaauaggguc

SEQ ID NO: 1416756 - RNA, 19 nt, Artificial Sequence
  Description of Artificial Sequence: Synthetic oligonucleotide
  Sense strand starting at position 1378 of SEQ ID NO: 1243438
gaaucucugugagggaagu

SEQ ID NO: 1416757 - RNA, 19 nt, Artificial Sequence
  Description of Artificial Sequence: Synthetic oligonucleotide
  Antisense strand to SEQ ID NO: 1416756
acuucccucacagagauuc

SEQ ID NO: 1416758 - RNA, 19 nt, Artificial Sequence
  Description of Artificial Sequence: Synthetic oligonucleotide
  Sense strand starting at position 1464 of SEQ ID NO: 1243438
uaaguaaccuguccagaga

SEQ ID NO: 1416759 - RNA, 19 nt, Artificial Sequence
  Description of Artificial Sequence: Synthetic oligonucleotide
  Antisense strand to SEQ ID NO: 1416758
ucucuggacagguuacuua

SEQ ID NO: 1416760 - RNA, 19 nt, Artificial Sequence
  Description of Artificial Sequence: Synthetic oligonucleotide
  Sense strand starting at position 2076 of SEQ ID NO: 1243438
aucgcuuucuucugagaau

SEQ ID NO: 1416761 - RNA, 19 nt, Artificial Sequence
  Description of Artificial Sequence: Synthetic oligonucleotide
  Antisense strand to SEQ ID NO: 1416760
auucucagaagaaagcgau

SEQ ID NO: 1416762 - RNA, 19 nt, Artificial Sequence
  Description of Artificial Sequence: Synthetic oligonucleotide
  Sense strand starting at position 2077 of SEQ ID NO: 1243438
ucgcuuucuucugagaauu

SEQ ID NO: 1416763 - RNA, 19 nt, Artificial Sequence
  Description of Artificial Sequence: Synthetic oligonucleotide
  Antisense strand to SEQ ID NO: 1416762
aauucucagaagaaagcga

SEQ ID NO: 1416764 - RNA, 19 nt, Artificial Sequence
  Description of Artificial Sequence: Synthetic oligonucleotide
  Sense strand starting at position 2079 of SEQ ID NO: 1243438
gcuuucuucugagaauuga

SEQ ID NO: 1416765 - RNA, 19 nt, Artificial Sequence
  Description of Artificial Sequence: Synthetic oligonucleotide
  Antisense strand to SEQ ID NO: 1416764
ucaauucucagaagaaagc

SEQ ID NO: 1416766 - RNA, 19 nt, Artificial Sequence
  Description of Artificial Sequence: Synthetic oligonucleotide
  Sense strand starting at position 2302 of SEQ ID NO: 1243438
aucaucuaauccugagaga

SEQ ID NO: 1416767 - RNA, 19 nt, Artificial Sequence
  Description of Artificial Sequence: Synthetic oligonucleotide
  Antisense strand to SEQ ID NO: 1416766
ucucucaggauuagaugau

SEQ ID NO: 1416768 - RNA, 19 nt, Artificial Sequence
  Description of Artificial Sequence: Synthetic oligonucleotide
  Sense strand starting at position 2318 of SEQ ID NO: 1243438
agaugcaaguccucuaaug

SEQ ID NO: 1416769 - RNA, 19 nt, Artificial Sequence
  Description of Artificial Sequence: Synthetic oligonucleotide
  Antisense strand to SEQ ID NO: 1416768
cauuagaggacuugcaucu

SEQ ID NO: 1416770 - RNA, 19 nt, Artificial Sequence
  Description of Artificial Sequence: Synthetic oligonucleotide
  Sense strand starting at position 2320 of SEQ ID NO: 1243438
augcaaguccucuaaugau

SEQ ID NO: 1416771 - RNA, 19 nt, Artificial Sequence
  Description of Artificial Sequence: Synthetic oligonucleotide
  Antisense strand to SEQ ID NO: 1416770
aucauuagaggacuugcau

SEQ ID NO: 1416772 - RNA, 19 nt, Artificial Sequence
  Description of Artificial Sequence: Synthetic oligonucleotide
  Sense strand starting at position 2340 of SEQ ID NO: 1243438
aucaguaacuacgagauaa

SEQ ID NO: 1416773 - RNA, 19 nt, Artificial Sequence
  Description of Artificial Sequence: Synthetic oligonucleotide
  Antisense strand to SEQ ID NO: 1416772
uuaucucguaguuacugau

SEQ ID NO: 1416774 - RNA, 19 nt, Artificial Sequence
  Description of Artificial Sequence: Synthetic oligonucleotide
  Sense strand starting at position 2410 of SEQ ID NO: 1243438
aagaguguauaagcagaaa

SEQ ID NO: 1416775 - RNA, 19 nt, Artificial Sequence
  Description of Artificial Sequence: Synthetic oligonucleotide
  Antisense strand to SEQ ID NO: 1416774
uuucugcuuauacacucuu

SEQ ID NO: 1416776 - RNA, 19 nt, Artificial Sequence
  Description of Artificial Sequence: Synthetic oligonucleotide
  Sense strand starting at position 2766 of SEQ ID NO: 1243438
agugcucaguccuuuggau

SEQ ID NO: 1416777 - RNA, 19 nt, Artificial Sequence
  Description of Artificial Sequence: Synthetic oligonucleotide
  Antisense strand to SEQ ID NO: 1416776
auccaaaggacugagcacu

SEQ ID NO: 1416778 - RNA, 19 nt, Artificial Sequence
  Description of Artificial Sequence: Synthetic oligonucleotide
  Sense strand starting at position 2768 of SEQ ID NO: 1243438
ugcucaguccuuuggaugu

SEQ ID NO: 1416779 - RNA, 19 nt, Artificial Sequence
  Description of Artificial Sequence: Synthetic oligonucleotide
  Antisense strand to SEQ ID NO: 1416778
acauccaaaggacugagca

SEQ ID NO: 1416780 - RNA, 19 nt, Artificial Sequence
  Description of Artificial Sequence: Synthetic oligonucleotide
  Sense strand starting at position 2838 of SEQ ID NO: 1243438
cccauaggucucugugauu

SEQ ID NO: 1416781 - RNA, 19 nt, Artificial Sequence
  Description of Artificial Sequence: Synthetic oligonucleotide
  Antisense strand to SEQ ID NO: 1416780
aaucacagagaccuauggg

SEQ ID NO: 1416782 - RNA, 19 nt, Artificial Sequence
  Description of Artificial Sequence: Synthetic oligonucleotide
  Sense strand starting at position 2843 of SEQ ID NO: 1243438
aggucucugugauuccuua

SEQ ID NO: 1416783 - RNA, 19 nt, Artificial Sequence
  Description of Artificial Sequence: Synthetic oligonucleotide
  Antisense strand to SEQ ID NO: 1416782
uaaggaaucacagagaccu

SEQ ID NO: 1416784 - RNA, 19 nt, Artificial Sequence
  Description of Artificial Sequence: Synthetic oligonucleotide
  Sense strand starting at position 3268 of SEQ ID NO: 1243438
ggagaaauugugcacuguc

SEQ ID NO: 1416785 - RNA, 19 nt, Artificial Sequence
  Description of Artificial Sequence: Synthetic oligonucleotide
  Antisense strand to SEQ ID NO: 1416784
gacagugcacaauuucucc

SEQ ID NO: 1416786 - RNA, 19 nt, Artificial Sequence
  Description of Artificial Sequence: Synthetic oligonucleotide
  Sense strand starting at position 3809 of SEQ ID NO: 1243438
aagacaaugugguuacaua

SEQ ID NO: 1416787 - RNA, 19 nt, Artificial Sequence
  Description of Artificial Sequence: Synthetic oligonucleotide
  Antisense strand to SEQ ID NO: 1416786
uauguaaccacauugucuu

SEQ ID NO: 1416788 - RNA, 19 nt, Artificial Sequence
  Description of Artificial Sequence: Synthetic oligonucleotide
  Sense strand starting at position 3835 of SEQ ID NO: 1243438
uggaguauugugcagccuu

SEQ ID NO: 1416789 - RNA, 19 nt, Artificial Sequence
  Description of Artificial Sequence: Synthetic oligonucleotide
  Antisense strand to SEQ ID NO: 1416788
aaggcugcacaauacucca

SEQ ID NO: 1416790 - RNA, 19 nt, Artificial Sequence
  Description of Artificial Sequence: Synthetic oligonucleotide
  Sense strand starting at position 405 of SEQ ID NO: 1243439
gcaugaagacagcacuauu

SEQ ID NO: 1416791 - RNA, 19 nt, Artificial Sequence
  Description of Artificial Sequence: Synthetic oligonucleotide
  Antisense strand to SEQ ID NO: 1416790
aauagugcugucuucaugc

SEQ ID NO: 1416792 - RNA, 19 nt, Artificial Sequence
  Description of Artificial Sequence: Synthetic oligonucleotide
  Sense strand starting at position 527 of SEQ ID NO: 1243439
uuaugauuacauugagacc

SEQ ID NO: 1416793 - RNA, 19 nt, Artificial Sequence
  Description of Artificial Sequence: Synthetic oligonucleotide
  Antisense strand to SEQ ID NO: 1416792
ggucucaauguaaucauaa

SEQ ID NO: 1416794 - RNA, 19 nt, Artificial Sequence
  Description of Artificial Sequence: Synthetic oligonucleotide
  Sense strand starting at position 634 of SEQ ID NO: 1243439
gggcuuggaucaucaucau

SEQ ID NO: 1416795 - RNA, 19 nt, Artificial Sequence
  Description of Artificial Sequence: Synthetic oligonucleotide
  Antisense strand to SEQ ID NO: 1416794
augaugaugauccaagccc

SEQ ID NO: 1416796 - RNA, 19 nt, Artificial Sequence
  Description of Artificial Sequence: Synthetic oligonucleotide
  Sense strand starting at position 937 of SEQ ID NO: 1243439
gugagauauugucucgaaa

SEQ ID NO: 1416797 - RNA, 19 nt, Artificial Sequence
  Description of Artificial Sequence: Synthetic oligonucleotide
  Antisense strand to SEQ ID NO: 1416796
uuucgagacaauaucucac

SEQ ID NO: 1416798 - RNA, 19 nt, Artificial Sequence
  Description of Artificial Sequence: Synthetic oligonucleotide
  Sense strand starting at position 1014 of SEQ ID NO: 1243439
ugagaaggaugagaagaau

SEQ ID NO: 1416799 - RNA, 19 nt, Artificial Sequence
  Description of Artificial Sequence: Synthetic oligonucleotide
  Antisense strand to SEQ ID NO: 1416798
auucuucucauccuucuca

SEQ ID NO: 1416800 - RNA, 19 nt, Artificial Sequence
  Description of Artificial Sequence: Synthetic oligonucleotide
  Sense strand starting at position 1043 of SEQ ID NO: 1243439
agaaguuauuguuucuuga

SEQ ID NO: 1416801 - RNA, 19 nt, Artificial Sequence
  Description of Artificial Sequence: Synthetic oligonucleotide
  Antisense strand to SEQ ID NO: 1416800
ucaagaaacaauaacuucu

SEQ ID NO: 1416802 - RNA, 19 nt, Artificial Sequence
  Description of Artificial Sequence: Synthetic oligonucleotide
  Sense strand starting at position 1046 of SEQ ID NO: 1243439
aguuauuguuucuugaaca

SEQ ID NO: 1416803 - RNA, 19 nt, Artificial Sequence
  Description of Artificial Sequence: Synthetic oligonucleotide
  Antisense strand to SEQ ID NO: 1416802
uguucaagaaacaauaacu

SEQ ID NO: 1416804 - RNA, 19 nt, Artificial Sequence
  Description of Artificial Sequence: Synthetic oligonucleotide
  Sense strand starting at position 1107 of SEQ ID NO: 1243439
gaaauaccauugggagaga

SEQ ID NO: 1416805 - RNA, 19 nt, Artificial Sequence
  Description of Artificial Sequence: Synthetic oligonucleotide
  Antisense strand to SEQ ID NO: 1416804
ucucucccaaugguauuuc

SEQ ID NO: 1416806 - RNA, 19 nt, Artificial Sequence
  Description of Artificial Sequence: Synthetic oligonucleotide
  Sense strand starting at position 1151 of SEQ ID NO: 1243439
agcauucuucuagaacaug

SEQ ID NO: 1416807 - RNA, 19 nt, Artificial Sequence
  Description of Artificial Sequence: Synthetic oligonucleotide
  Antisense strand to SEQ ID NO: 1416806
cauguucuagaagaaugcu

SEQ ID NO: 1416808 - RNA, 19 nt, Artificial Sequence
  Description of Artificial Sequence: Synthetic oligonucleotide
  Sense strand starting at position 1166 of SEQ ID NO: 1243439
caugaugcuccaggagaca

SEQ ID NO: 1416809 - RNA, 19 nt, Artificial Sequence
  Description of Artificial Sequence: Synthetic oligonucleotide
  Antisense strand to SEQ ID NO: 1416808
ugucuccuggagcaucaug

SEQ ID NO: 1416810 - RNA, 19 nt, Artificial Sequence
  Description of Artificial Sequence: Synthetic oligonucleotide
  Sense strand starting at position 1203 of SEQ ID NO: 1243439
acauuuauugcguguuugu

SEQ ID NO: 1416811 - RNA, 19 nt, Artificial Sequence
  Description of Artificial Sequence: Synthetic oligonucleotide
  Antisense strand to SEQ ID NO: 1416810
acaaacacgcaauaaaugu

SEQ ID NO: 1416812 - RNA, 19 nt, Artificial Sequence
  Description of Artificial Sequence: Synthetic oligonucleotide
  Sense strand starting at position 1390 of SEQ ID NO: 1243439
uagggcuuguucucauaau

SEQ ID NO: 1416813 - RNA, 19 nt, Artificial Sequence
  Description of Artificial Sequence: Synthetic oligonucleotide
  Antisense strand to SEQ ID NO: 1416812
auuaugagaacaagcccua

SEQ ID NO: 1416814 - RNA, 19 nt, Artificial Sequence
  Description of Artificial Sequence: Synthetic oligonucleotide
  Sense strand starting at position 1492 of SEQ ID NO: 1243439
ggcaauaagcaauacgaca

SEQ ID NO: 1416815 - RNA, 19 nt, Artificial Sequence
  Description of Artificial Sequence: Synthetic oligonucleotide
  Antisense strand to SEQ ID NO: 1416814
ugucguauugcuuauugcc

SEQ ID NO: 1416816 - RNA, 19 nt, Artificial Sequence
  Description of Artificial Sequence: Synthetic oligonucleotide
  Sense strand starting at position 1545 of SEQ ID NO: 1243439
ccaagcauuccgcauuauu

SEQ ID NO: 1416817 - RNA, 19 nt, Artificial Sequence
  Description of Artificial Sequence: Synthetic oligonucleotide
  Antisense strand to SEQ ID NO: 1416816
aauaaugcggaaugcuugg

SEQ ID NO: 1416818 - RNA, 19 nt, Artificial Sequence
  Description of Artificial Sequence: Synthetic oligonucleotide
  Sense strand starting at position 2053 of SEQ ID NO: 1243439
uuguuaucagcucaaugaa

SEQ ID NO: 1416819 - RNA, 19 nt, Artificial Sequence
  Description of Artificial Sequence: Synthetic oligonucleotide
  Antisense strand to SEQ ID NO: 1416818
uucauugagcugauaacaa

SEQ ID NO: 1416820 - RNA, 19 nt, Artificial Sequence
  Description of Artificial Sequence: Synthetic oligonucleotide
  Sense strand starting at position 2079 of SEQ ID NO: 1243439
aaguccuuucuagagguua

SEQ ID NO: 1416821 - RNA, 19 nt, Artificial Sequence
  Description of Artificial Sequence: Synthetic oligonucleotide
  Antisense strand to SEQ ID NO: 1416820
uaaccucuagaaaggacuu

SEQ ID NO: 1416822 - RNA, 19 nt, Artificial Sequence
  Description of Artificial Sequence: Synthetic oligonucleotide
  Sense strand starting at position 2939 of SEQ ID NO: 1243439
cagguuuaacucuguaguu

SEQ ID NO: 1416823 - RNA, 19 nt, Artificial Sequence
  Description of Artificial Sequence: Synthetic oligonucleotide
  Antisense strand to SEQ ID NO: 1416822
aacuacagaguuaaaccug

SEQ ID NO: 1416824 - RNA, 19 nt, Artificial Sequence
  Description of Artificial Sequence: Synthetic oligonucleotide
  Sense strand starting at position 2940 of SEQ ID NO: 1243439
agguuuaacucuguaguua

SEQ ID NO: 1416825 - RNA, 19 nt, Artificial Sequence
  Description of Artificial Sequence: Synthetic oligonucleotide
  Antisense strand to SEQ ID NO: 1416824
uaacuacagaguuaaaccu

SEQ ID NO: 1416826 - RNA, 19 nt, Artificial Sequence
  Description of Artificial Sequence: Synthetic oligonucleotide
  Sense strand starting at position 2941 of SEQ ID NO: 1243439
gguuuaacucuguaguuau

SEQ ID NO: 1416827 - RNA, 19 nt, Artificial Sequence
  Description of Artificial Sequence: Synthetic oligonucleotide
  Antisense strand to SEQ ID NO: 1416826
auaacuacagaguuaaacc

SEQ ID NO: 1416828 - RNA, 19 nt, Artificial Sequence
  Description of Artificial Sequence: Synthetic oligonucleotide
  Sense strand starting at position 2944 of SEQ ID NO: 1243439
uuaacucuguaguuaugau

SEQ ID NO: 1416829 - RNA, 19 nt, Artificial Sequence
  Description of Artificial Sequence: Synthetic oligonucleotide
  Antisense strand to SEQ ID NO: 1416828
aucauaacuacagaguuaa

SEQ ID NO: 1416830 - RNA, 19 nt, Artificial Sequence
  Description of Artificial Sequence: Synthetic oligonucleotide
  Sense strand starting at position 2951 of SEQ ID NO: 1243439
uguaguuaugaucaccaau

SEQ ID NO: 1416831 - RNA, 19 nt, Artificial Sequence
  Description of Artificial Sequence: Synthetic oligonucleotide
  Antisense strand to SEQ ID NO: 1416830
auuggugaucauaacuaca

SEQ ID NO: 1416832 - RNA, 19 nt, Artificial Sequence
  Description of Artificial Sequence: Synthetic oligonucleotide
  Sense strand starting at position 3023 of SEQ ID NO: 1243439
caagacaguugacucgaau

SEQ ID NO: 1416833 - RNA, 19 nt, Artificial Sequence
  Description of Artificial Sequence: Synthetic oligonucleotide
  Antisense strand to SEQ ID NO: 1416832
auucgagucaacugucuug

SEQ ID NO: 1416834 - RNA, 19 nt, Artificial Sequence
  Description of Artificial Sequence: Synthetic oligonucleotide
  Sense strand starting at position 3058 of SEQ ID NO: 1243439
gcacucuaagacuguaaug

SEQ ID NO: 1416835 - RNA, 19 nt, Artificial Sequence
  Description of Artificial Sequence: Synthetic oligonucleotide
  Antisense strand to SEQ ID NO: 1416834
cauuacagucuuagagugc

SEQ ID NO: 1416836 - RNA, 19 nt, Artificial Sequence
  Description of Artificial Sequence: Synthetic oligonucleotide
  Sense strand starting at position 3153 of SEQ ID NO: 1243439
guugauaagggcuacauca

SEQ ID NO: 1416837 - RNA, 19 nt, Artificial Sequence
  Description of Artificial Sequence: Synthetic oligonucleotide
  Antisense strand to SEQ ID NO: 1416836
ugauguagcccuuaucaac

SEQ ID NO: 1416838 - RNA, 19 nt, Artificial Sequence
  Description of Artificial Sequence: Synthetic oligonucleotide
  Sense strand starting at position 3155 of SEQ ID NO: 1243439
ugauaagggcuacaucagu

SEQ ID NO: 1416839 - RNA, 19 nt, Artificial Sequence
  Description of Artificial Sequence: Synthetic oligonucleotide
  Antisense strand to SEQ ID NO: 1416838
acugauguagcccuuauca

SEQ ID NO: 1416840 - RNA, 19 nt, Artificial Sequence
  Description of Artificial Sequence: Synthetic oligonucleotide
  Sense strand starting at position 3160 of SEQ ID NO: 1243439
agggcuacaucaguuaaca

SEQ ID NO: 1416841 - RNA, 19 nt, Artificial Sequence
  Description of Artificial Sequence: Synthetic oligonucleotide
  Antisense strand to SEQ ID NO: 1416840
uguuaacugauguagcccu

SEQ ID NO: 1416842 - RNA, 19 nt, Artificial Sequence
  Description of Artificial Sequence: Synthetic oligonucleotide
  Sense strand starting at position 3170 of SEQ ID NO: 1243439
caguuaacauuugagaaag

SEQ ID NO: 1416843 - RNA, 19 nt, Artificial Sequence
  Description of Artificial Sequence: Synthetic oligonucleotide
  Antisense strand to SEQ ID NO: 1416842
cuuucucaaauguuaacug

SEQ ID NO: 1416844 - RNA, 19 nt, Artificial Sequence
  Description of Artificial Sequence: Synthetic oligonucleotide
  Sense strand starting at position 3172 of SEQ ID NO: 1243439
guuaacauuugagaaaguu

SEQ ID NO: 1416845 - RNA, 19 nt, Artificial Sequence
  Description of Artificial Sequence: Synthetic oligonucleotide
  Antisense strand to SEQ ID NO: 1416844
aacuuucucaaauguuaac

SEQ ID NO: 1416846 - RNA, 19 nt, Artificial Sequence
  Description of Artificial Sequence: Synthetic oligonucleotide
  Sense strand starting at position 3181 of SEQ ID NO: 1243439
ugagaaaguuuggacuaag

SEQ ID NO: 1416847 - RNA, 19 nt, Artificial Sequence
  Description of Artificial Sequence: Synthetic oligonucleotide
  Antisense strand to SEQ ID NO: 1416846
cuuaguccaaacuuucuca

SEQ ID NO: 1416848 - RNA, 19 nt, Artificial Sequence
  Description of Artificial Sequence: Synthetic oligonucleotide
  Sense strand starting at position 3221 of SEQ ID NO: 1243439
cucacauucccagggauaa

SEQ ID NO: 1416849 - RNA, 19 nt, Artificial Sequence
  Description of Artificial Sequence: Synthetic oligonucleotide
  Antisense strand to SEQ ID NO: 1416848
uuaucccugggaaugugag

SEQ ID NO: 1416850 - RNA, 19 nt, Artificial Sequence
  Description of Artificial Sequence: Synthetic oligonucleotide
  Sense strand starting at position 3250 of SEQ ID NO: 1243439
augggaugcuaauccauca

SEQ ID NO: 1416851 - RNA, 19 nt, Artificial Sequence
  Description of Artificial Sequence: Synthetic oligonucleotide
  Antisense strand to SEQ ID NO: 1416850
ugauggauuagcaucccau

SEQ ID NO: 1416852 - RNA, 19 nt, Artificial Sequence
  Description of Artificial Sequence: Synthetic oligonucleotide
  Sense strand starting at position 3328 of SEQ ID NO: 1243439
acaauugagggcuggauca

SEQ ID NO: 1416853 - RNA, 19 nt, Artificial Sequence
  Description of Artificial Sequence: Synthetic oligonucleotide
  Antisense strand to SEQ ID NO: 1416852
ugauccagcccucaauugu

SEQ ID NO: 1416854 - RNA, 19 nt, Artificial Sequence
  Description of Artificial Sequence: Synthetic oligonucleotide
  Sense strand starting at position 3341 of SEQ ID NO: 1243439
ggaucaaauuucuguauuu

SEQ ID NO: 1416855 - RNA, 19 nt, Artificial Sequence
  Description of Artificial Sequence: Synthetic oligonucleotide
  Antisense strand to SEQ ID NO: 1416854
aaauacagaaauuugaucc

SEQ ID NO: 1416856 - RNA, 19 nt, Artificial Sequence
  Description of Artificial Sequence: Synthetic oligonucleotide
  Sense strand starting at position 3581 of SEQ ID NO: 1243439
gacuguugggcucaagcaa

SEQ ID NO: 1416857 - RNA, 19 nt, Artificial Sequence
  Description of Artificial Sequence: Synthetic oligonucleotide
  Antisense strand to SEQ ID NO: 1416856
uugcuugagcccaacaguc

SEQ ID NO: 1416858 - RNA, 19 nt, Artificial Sequence
  Description of Artificial Sequence: Synthetic oligonucleotide
  Sense strand starting at position 3805 of SEQ ID NO: 1243439
uuugauguauuagcacuaa

SEQ ID NO: 1416859 - RNA, 19 nt, Artificial Sequence
  Description of Artificial Sequence: Synthetic oligonucleotide
  Antisense strand to SEQ ID NO: 1416858
uuagugcuaauacaucaaa

SEQ ID NO: 1416860 - RNA, 19 nt, Artificial Sequence
  Description of Artificial Sequence: Synthetic oligonucleotide
  Sense strand starting at position 3834 of SEQ ID NO: 1243439
guggcuuuccaauggagaa

SEQ ID NO: 1416861 - RNA, 19 nt, Artificial Sequence
  Description of Artificial Sequence: Synthetic oligonucleotide
  Antisense strand to SEQ ID NO: 1416860
uucuccauuggaaagccac

SEQ ID NO: 1416862 - RNA, 19 nt, Artificial Sequence
  Description of Artificial Sequence: Synthetic oligonucleotide
  Sense strand starting at position 3868 of SEQ ID NO: 1243439
guggaagagaccugaguua

SEQ ID NO: 1416863 - RNA, 19 nt, Artificial Sequence
  Description of Artificial Sequence: Synthetic oligonucleotide
  Antisense strand to SEQ ID NO: 1416862
uaacucaggucucuuccac

SEQ ID NO: 1416864 - RNA, 19 nt, Artificial Sequence
  Description of Artificial Sequence: Synthetic oligonucleotide
  Sense strand starting at position 3875 of SEQ ID NO: 1243439
agaccugaguuauaaauug

SEQ ID NO: 1416865 - RNA, 19 nt, Artificial Sequence
  Description of Artificial Sequence: Synthetic oligonucleotide
  Antisense strand to SEQ ID NO: 1416864
caauuuauaacucaggucu

SEQ ID NO: 1416866 - RNA, 19 nt, Artificial Sequence
  Description of Artificial Sequence: Synthetic oligonucleotide
  Sense strand starting at position 3890 of SEQ ID NO: 1243439
auuguaugaucagaggaaa

SEQ ID NO: 1416867 - RNA, 19 nt, Artificial Sequence
  Description of Artificial Sequence: Synthetic oligonucleotide
  Antisense strand to SEQ ID NO: 1416866
uuuccucugaucauacaau

SEQ ID NO: 1416868 - RNA, 19 nt, Artificial Sequence
  Description of Artificial Sequence: Synthetic oligonucleotide
  Sense strand starting at position 3917 of SEQ ID NO: 1243439
ggaggguggugguuuccaa

SEQ ID NO: 1416869 - RNA, 19 nt, Artificial Sequence
  Description of Artificial Sequence: Synthetic oligonucleotide
  Antisense strand to SEQ ID NO: 1416868
uuggaaaccaccacccucc

SEQ ID NO: 1416870 - RNA, 19 nt, Artificial Sequence
  Description of Artificial Sequence: Synthetic oligonucleotide
  Sense strand starting at position 291 of SEQ ID NO: 1243440
gcuggaaggucucagcuaa

SEQ ID NO: 1416871 - RNA, 19 nt, Artificial Sequence
  Description of Artificial Sequence: Synthetic oligonucleotide
  Antisense strand to SEQ ID NO: 1416870
uuagcugagaccuuccagc

SEQ ID NO: 1416872 - RNA, 19 nt, Artificial Sequence
  Description of Artificial Sequence: Synthetic oligonucleotide
  Sense strand starting at position 309 of SEQ ID NO: 1243440
agaucugguuuccugauga

SEQ ID NO: 1416873 - RNA, 19 nt, Artificial Sequence
  Description of Artificial Sequence: Synthetic oligonucleotide
  Antisense strand to SEQ ID NO: 1416872
ucaucaggaaaccagaucu

SEQ ID NO: 1416874 - RNA, 19 nt, Artificial Sequence
  Description of Artificial Sequence: Synthetic oligonucleotide
  Sense strand starting at position 313 of SEQ ID NO: 1243440
cugguuuccugaugaucuu

SEQ ID NO: 1416875 - RNA, 19 nt, Artificial Sequence
  Description of Artificial Sequence: Synthetic oligonucleotide
  Antisense strand to SEQ ID NO: 1416874
aagaucaucaggaaaccag

SEQ ID NO: 1416876 - RNA, 19 nt, Artificial Sequence
  Description of Artificial Sequence: Synthetic oligonucleotide
  Sense strand starting at position 319 of SEQ ID NO: 1243440
uccugaugaucuugccaac

SEQ ID NO: 1416877 - RNA, 19 nt, Artificial Sequence
  Description of Artificial Sequence: Synthetic oligonucleotide
  Antisense strand to SEQ ID NO: 1416876
guuggcaagaucaucagga

SEQ ID NO: 1416878 - RNA, 19 nt, Artificial Sequence
  Description of Artificial Sequence: Synthetic oligonucleotide
  Sense strand starting at position 322 of SEQ ID NO: 1243440
ugaugaucuugccaacaag

SEQ ID NO: 1416879 - RNA, 19 nt, Artificial Sequence
  Description of Artificial Sequence: Synthetic oligonucleotide
  Antisense strand to SEQ ID NO: 1416878
cuuguuggcaagaucauca

SEQ ID NO: 1416880 - RNA, 19 nt, Artificial Sequence
  Description of Artificial Sequence: Synthetic oligonucleotide
  Sense strand starting at position 389 of SEQ ID NO: 1243440
gugagacaguguagcgauu

SEQ ID NO: 1416881 - RNA, 19 nt, Artificial Sequence
  Description of Artificial Sequence: Synthetic oligonucleotide
  Antisense strand to SEQ ID NO: 1416880
aaucgcuacacugucucac

SEQ ID NO: 1416882 - RNA, 19 nt, Artificial Sequence
  Description of Artificial Sequence: Synthetic oligonucleotide
  Sense strand starting at position 395 of SEQ ID NO: 1243440
caguguagcgauuaaggau

SEQ ID NO: 1416883 - RNA, 19 nt, Artificial Sequence
  Description of Artificial Sequence: Synthetic oligonucleotide
  Antisense strand to SEQ ID NO: 1416882
auccuuaaucgcuacacug

SEQ ID NO: 1416884 - RNA, 19 nt, Artificial Sequence
  Description of Artificial Sequence: Synthetic oligonucleotide
  Sense strand starting at position 437 of SEQ ID NO: 1243440
ggcuuacacccguaaucca

SEQ ID NO: 1416885 - RNA, 19 nt, Artificial Sequence
  Description of Artificial Sequence: Synthetic oligonucleotide
  Antisense strand to SEQ ID NO: 1416884
uggauuacggguguaagcc

SEQ ID NO: 1416886 - RNA, 19 nt, Artificial Sequence
  Description of Artificial Sequence: Synthetic oligonucleotide
  Sense strand starting at position 500 of SEQ ID NO: 1243440
aggaguucgagacaagguu

SEQ ID NO: 1416887 - RNA, 19 nt, Artificial Sequence
  Description of Artificial Sequence: Synthetic oligonucleotide
  Antisense strand to SEQ ID NO: 1416886
aaccuugucucgaacuccu

SEQ ID NO: 1416888 - RNA, 19 nt, Artificial Sequence
  Description of Artificial Sequence: Synthetic oligonucleotide
  Sense strand starting at position 742 of SEQ ID NO: 1243440
gaauguagucuugggaauc

SEQ ID NO: 1416889 - RNA, 19 nt, Artificial Sequence
  Description of Artificial Sequence: Synthetic oligonucleotide
  Antisense strand to SEQ ID NO: 1416888
gauucccaagacuacauuc

SEQ ID NO: 1416890 - RNA, 19 nt, Artificial Sequence
  Description of Artificial Sequence: Synthetic oligonucleotide
  Sense strand starting at position 743 of SEQ ID NO: 1243440
aauguagucuugggaauca

SEQ ID NO: 1416891 - RNA, 19 nt, Artificial Sequence
  Description of Artificial Sequence: Synthetic oligonucleotide
  Antisense strand to SEQ ID NO: 1416890
ugauucccaagacuacauu

SEQ ID NO: 1416892 - RNA, 19 nt, Artificial Sequence
  Description of Artificial Sequence: Synthetic oligonucleotide
  Sense strand starting at position 948 of SEQ ID NO: 1243440
auaagcucuuguuagggau

SEQ ID NO: 1416893 - RNA, 19 nt, Artificial Sequence
  Description of Artificial Sequence: Synthetic oligonucleotide
  Antisense strand to SEQ ID NO: 1416892
aucccuaacaagagcuuau

SEQ ID NO: 1416894 - RNA, 19 nt, Artificial Sequence
  Description of Artificial Sequence: Synthetic oligonucleotide
  Sense strand starting at position 952 of SEQ ID NO: 1243440
gcucuuguuagggaugucu

SEQ ID NO: 1416895 - RNA, 19 nt, Artificial Sequence
  Description of Artificial Sequence: Synthetic oligonucleotide
  Antisense strand to SEQ ID NO: 1416894
agacaucccuaacaagagc

SEQ ID NO: 1416896 - RNA, 19 nt, Artificial Sequence
  Description of Artificial Sequence: Synthetic oligonucleotide
  Sense strand starting at position 954 of SEQ ID NO: 1243440
ucuuguuagggaugucuua

SEQ ID NO: 1416897 - RNA, 19 nt, Artificial Sequence
  Description of Artificial Sequence: Synthetic oligonucleotide
  Antisense strand to SEQ ID NO: 1416896
uaagacaucccuaacaaga

SEQ ID NO: 1416898 - RNA, 19 nt, Artificial Sequence
  Description of Artificial Sequence: Synthetic oligonucleotide
  Sense strand starting at position 1299 of SEQ ID NO: 1243440
cucccaaagccguaggauu

SEQ ID NO: 1416899 - RNA, 19 nt, Artificial Sequence
  Description of Artificial Sequence: Synthetic oligonucleotide
  Antisense strand to SEQ ID NO: 1416898
aauccuacggcuuugggag

SEQ ID NO: 1416900 - RNA, 19 nt, Artificial Sequence
  Description of Artificial Sequence: Synthetic oligonucleotide
  Sense strand starting at position 1301 of SEQ ID NO: 1243440
cccaaagccguaggauuau

SEQ ID NO: 1416901 - RNA, 19 nt, Artificial Sequence
  Description of Artificial Sequence: Synthetic oligonucleotide
  Antisense strand to SEQ ID NO: 1416900
auaauccuacggcuuuggg

SEQ ID NO: 1416902 - RNA, 19 nt, Artificial Sequence
  Description of Artificial Sequence: Synthetic oligonucleotide
  Sense strand starting at position 1990 of SEQ ID NO: 1243440
agagaauucugucuuggua

SEQ ID NO: 1416903 - RNA, 19 nt, Artificial Sequence
  Description of Artificial Sequence: Synthetic oligonucleotide
  Antisense strand to SEQ ID NO: 1416902
uaccaagacagaauucucu

SEQ ID NO: 1416904 - RNA, 19 nt, Artificial Sequence
  Description of Artificial Sequence: Synthetic oligonucleotide
  Sense strand starting at position 1993 of SEQ ID NO: 1243440
gaauucugucuugguagcu

SEQ ID NO: 1416905 - RNA, 19 nt, Artificial Sequence
  Description of Artificial Sequence: Synthetic oligonucleotide
  Antisense strand to SEQ ID NO: 1416904
agcuaccaagacagaauuc

SEQ ID NO: 1416906 - RNA, 19 nt, Artificial Sequence
  Description of Artificial Sequence: Synthetic oligonucleotide
  Sense strand starting at position 1994 of SEQ ID NO: 1243440
aauucugucuugguagcua

SEQ ID NO: 1416907 - RNA, 19 nt, Artificial Sequence
  Description of Artificial Sequence: Synthetic oligonucleotide
  Antisense strand to SEQ ID NO: 1416906
uagcuaccaagacagaauu

SEQ ID NO: 1416908 - RNA, 19 nt, Artificial Sequence
  Description of Artificial Sequence: Synthetic oligonucleotide
  Sense strand starting at position 2042 of SEQ ID NO: 1243440
uuaagacaaugggauucua

SEQ ID NO: 1416909 - RNA, 19 nt, Artificial Sequence
  Description of Artificial Sequence: Synthetic oligonucleotide
  Antisense strand to SEQ ID NO: 1416908
uagaaucccauugucuuaa

SEQ ID NO: 1416910 - RNA, 19 nt, Artificial Sequence
  Description of Artificial Sequence: Synthetic oligonucleotide
  Sense strand starting at position 2128 of SEQ ID NO: 1243440
gugccucuggccuagaacu

SEQ ID NO: 1416911 - RNA, 19 nt, Artificial Sequence
  Description of Artificial Sequence: Synthetic oligonucleotide
  Antisense strand to SEQ ID NO: 1416910
aguucuaggccagaggcac

SEQ ID NO: 1416912 - RNA, 19 nt, Artificial Sequence
  Description of Artificial Sequence: Synthetic oligonucleotide
  Sense strand starting at position 2130 of SEQ ID NO: 1243440
gccucuggccuagaacuua

SEQ ID NO: 1416913 - RNA, 19 nt, Artificial Sequence
  Description of Artificial Sequence: Synthetic oligonucleotide
  Antisense strand to SEQ ID NO: 1416912
uaaguucuaggccagaggc

SEQ ID NO: 1416914 - RNA, 19 nt, Artificial Sequence
  Description of Artificial Sequence: Synthetic oligonucleotide
  Sense strand starting at position 2563 of SEQ ID NO: 1243440
agaaauccacauggguuua

SEQ ID NO: 1416915 - RNA, 19 nt, Artificial Sequence
  Description of Artificial Sequence: Synthetic oligonucleotide
  Antisense strand to SEQ ID NO: 1416914
uaaacccauguggauuucu

SEQ ID NO: 1416916 - RNA, 19 nt, Artificial Sequence
  Description of Artificial Sequence: Synthetic oligonucleotide
  Sense strand starting at position 2573 of SEQ ID NO: 1243440
auggguuuacagugauaca

SEQ ID NO: 1416917 - RNA, 19 nt, Artificial Sequence
  Description of Artificial Sequence: Synthetic oligonucleotide
  Antisense strand to SEQ ID NO: 1416916
uguaucacuguaaacccau

SEQ ID NO: 1416918 - RNA, 19 nt, Artificial Sequence
  Description of Artificial Sequence: Synthetic oligonucleotide
  Sense strand starting at position 2576 of SEQ ID NO: 1243440
gguuuacagugauacaauu

SEQ ID NO: 1416919 - RNA, 19 nt, Artificial Sequence
  Description of Artificial Sequence: Synthetic oligonucleotide
  Antisense strand to SEQ ID NO: 1416918
aauuguaucacuguaaacc

SEQ ID NO: 1416920 - RNA, 19 nt, Artificial Sequence
  Description of Artificial Sequence: Synthetic oligonucleotide
  Sense strand starting at position 2614 of SEQ ID NO: 1243440
gguaguggacucugcuauu

SEQ ID NO: 1416921 - RNA, 19 nt, Artificial Sequence
  Description of Artificial Sequence: Synthetic oligonucleotide
  Antisense strand to SEQ ID NO: 1416920
aauagcagaguccacuacc

SEQ ID NO: 1416922 - RNA, 19 nt, Artificial Sequence
  Description of Artificial Sequence: Synthetic oligonucleotide
  Sense strand starting at position 2617 of SEQ ID NO: 1243440
aguggacucugcuauuugu

SEQ ID NO: 1416923 - RNA, 19 nt, Artificial Sequence
  Description of Artificial Sequence: Synthetic oligonucleotide
  Antisense strand to SEQ ID NO: 1416922
acaaauagcagaguccacu

SEQ ID NO: 1416924 - RNA, 19 nt, Artificial Sequence
  Description of Artificial Sequence: Synthetic oligonucleotide
  Sense strand starting at position 2682 of SEQ ID NO: 1243440
uccauuuccugugcagaca

SEQ ID NO: 1416925 - RNA, 19 nt, Artificial Sequence
  Description of Artificial Sequence: Synthetic oligonucleotide
  Antisense strand to SEQ ID NO: 1416924
ugucugcacaggaaaugga

SEQ ID NO: 1416926 - RNA, 19 nt, Artificial Sequence
  Description of Artificial Sequence: Synthetic oligonucleotide
  Sense strand starting at position 2695 of SEQ ID NO: 1243440
cagacauagugcucaaagu

SEQ ID NO: 1416927 - RNA, 19 nt, Artificial Sequence
  Description of Artificial Sequence: Synthetic oligonucleotide
  Antisense strand to SEQ ID NO: 1416926
acuuugagcacuaugucug

SEQ ID NO: 1416928 - RNA, 19 nt, Artificial Sequence
  Description of Artificial Sequence: Synthetic oligonucleotide
  Sense strand starting at position 2696 of SEQ ID NO: 1243440
agacauagugcucaaaguu

SEQ ID NO: 1416929 - RNA, 19 nt, Artificial Sequence
  Description of Artificial Sequence: Synthetic oligonucleotide
  Antisense strand to SEQ ID NO: 1416928
aacuuugagcacuaugucu

SEQ ID NO: 1416930 - RNA, 19 nt, Artificial Sequence
  Description of Artificial Sequence: Synthetic oligonucleotide
  Sense strand starting at position 2705 of SEQ ID NO: 1243440
gcucaaaguuucccagugu

SEQ ID NO: 1416931 - RNA, 19 nt, Artificial Sequence
  Description of Artificial Sequence: Synthetic oligonucleotide
  Antisense strand to SEQ ID NO: 1416930
acacugggaaacuuugagc

SEQ ID NO: 1416932 - RNA, 19 nt, Artificial Sequence
  Description of Artificial Sequence: Synthetic oligonucleotide
  Sense strand starting at position 2706 of SEQ ID NO: 1243440
cucaaaguuucccaguguu

SEQ ID NO: 1416933 - RNA, 19 nt, Artificial Sequence
  Description of Artificial Sequence: Synthetic oligonucleotide
  Antisense strand to SEQ ID NO: 1416932
aacacugggaaacuuugag

SEQ ID NO: 1416934 - RNA, 19 nt, Artificial Sequence
  Description of Artificial Sequence: Synthetic oligonucleotide
  Sense strand starting at position 2761 of SEQ ID NO: 1243440
gccaaugagacuuguggcu

SEQ ID NO: 1416935 - RNA, 19 nt, Artificial Sequence
  Description of Artificial Sequence: Synthetic oligonucleotide
  Antisense strand to SEQ ID NO: 1416934
agccacaagucucauuggc

SEQ ID NO: 1416936 - RNA, 19 nt, Artificial Sequence
  Description of Artificial Sequence: Synthetic oligonucleotide
  Sense strand starting at position 2770 of SEQ ID NO: 1243440
acuuguggcuuccaggaau

SEQ ID NO: 1416937 - RNA, 19 nt, Artificial Sequence
  Description of Artificial Sequence: Synthetic oligonucleotide
  Antisense strand to SEQ ID NO: 1416936
auuccuggaagccacaagu

SEQ ID NO: 1416938 - RNA, 19 nt, Artificial Sequence
  Description of Artificial Sequence: Synthetic oligonucleotide
  Sense strand starting at position 2801 of SEQ ID NO: 1243440
gggacaguuugccuggguu

SEQ ID NO: 1416939 - RNA, 19 nt, Artificial Sequence
  Description of Artificial Sequence: Synthetic oligonucleotide
  Antisense strand to SEQ ID NO: 1416938
aacccaggcaaacuguccc

SEQ ID NO: 1416940 - RNA, 19 nt, Artificial Sequence
  Description of Artificial Sequence: Synthetic oligonucleotide
  Sense strand starting at position 2836 of SEQ ID NO: 1243440
ccagucuuccuccagacau

SEQ ID NO: 1416941 - RNA, 19 nt, Artificial Sequence
  Description of Artificial Sequence: Synthetic oligonucleotide
  Antisense strand to SEQ ID NO: 1416940
augucuggaggaagacugg

SEQ ID NO: 1416942 - RNA, 19 nt, Artificial Sequence
  Description of Artificial Sequence: Synthetic oligonucleotide
  Sense strand starting at position 2883 of SEQ ID NO: 1243440
ugcuaaggaugguagagaa

SEQ ID NO: 1416943 - RNA, 19 nt, Artificial Sequence
  Description of Artificial Sequence: Synthetic oligonucleotide
  Antisense strand to SEQ ID NO: 1416942
uucucuaccauccuuagca

SEQ ID NO: 1416944 - RNA, 19 nt, Artificial Sequence
  Description of Artificial Sequence: Synthetic oligonucleotide
  Sense strand starting at position 3134 of SEQ ID NO: 1243440
uccugaguagccuggcaaa

SEQ ID NO: 1416945 - RNA, 19 nt, Artificial Sequence
  Description of Artificial Sequence: Synthetic oligonucleotide
  Antisense strand to SEQ ID NO: 1416944
uuugccaggcuacucagga

SEQ ID NO: 1416946 - RNA, 19 nt, Artificial Sequence
  Description of Artificial Sequence: Synthetic oligonucleotide
  Sense strand starting at position 3137 of SEQ ID NO: 1243440
ugaguagccuggcaaauuu

SEQ ID NO: 1416947 - RNA, 19 nt, Artificial Sequence
  Description of Artificial Sequence: Synthetic oligonucleotide
  Antisense strand to SEQ ID NO: 1416946
aaauuugccaggcuacuca

SEQ ID NO: 1416948 - RNA, 19 nt, Artificial Sequence
  Description of Artificial Sequence: Synthetic oligonucleotide
  Sense strand starting at position 3908 of SEQ ID NO: 1243440
cgcuaugaaguagauauua

SEQ ID NO: 1416949 - RNA, 19 nt, Artificial Sequence
  Description of Artificial Sequence: Synthetic oligonucleotide
  Antisense strand to SEQ ID NO: 1416948
uaauaucuacuucauagcg

SEQ ID NO: 1416950 - RNA, 19 nt, Artificial Sequence
  Description of Artificial Sequence: Synthetic oligonucleotide
  Sense strand starting at position 283 of SEQ ID NO: 1243441
gcuggagcccagugucaua

SEQ ID NO: 1416951 - RNA, 19 nt, Artificial Sequence
  Description of Artificial Sequence: Synthetic oligonucleotide
  Antisense strand to SEQ ID NO: 1416950
uaugacacugggcuccagc

SEQ ID NO: 1416952 - RNA, 19 nt, Artificial Sequence
  Description of Artificial Sequence: Synthetic oligonucleotide
  Sense strand starting at position 288 of SEQ ID NO: 1243441
agcccagugucauaaucau

SEQ ID NO: 1416953 - RNA, 19 nt, Artificial Sequence
  Description of Artificial Sequence: Synthetic oligonucleotide
  Antisense strand to SEQ ID NO: 1416952
augauuaugacacugggcu

SEQ ID NO: 1416954 - RNA, 19 nt, Artificial Sequence
  Description of Artificial Sequence: Synthetic oligonucleotide
  Sense strand starting at position 294 of SEQ ID NO: 1243441
gugucauaaucauagcuua

SEQ ID NO: 1416955 - RNA, 19 nt, Artificial Sequence
  Description of Artificial Sequence: Synthetic oligonucleotide
  Antisense strand to SEQ ID NO: 1416954
uaagcuaugauuaugacac

SEQ ID NO: 1416956 - RNA, 19 nt, Artificial Sequence
  Description of Artificial Sequence: Synthetic oligonucleotide
  Sense strand starting at position 939 of SEQ ID NO: 1243441
ucuggacauugggaacaau

SEQ ID NO: 1416957 - RNA, 19 nt, Artificial Sequence
  Description of Artificial Sequence: Synthetic oligonucleotide
  Antisense strand to SEQ ID NO: 1416956
auuguucccaauguccaga

SEQ ID NO: 1416958 - RNA, 19 nt, Artificial Sequence
  Description of Artificial Sequence: Synthetic oligonucleotide
  Sense strand starting at position 1403 of SEQ ID NO: 1243441
ggacaagauucguaagcuc

SEQ ID NO: 1416959 - RNA, 19 nt, Artificial Sequence
  Description of Artificial Sequence: Synthetic oligonucleotide
  Antisense strand to SEQ ID NO: 1416958
gagcuuacgaaucuugucc

SEQ ID NO: 1416960 - RNA, 19 nt, Artificial Sequence
  Description of Artificial Sequence: Synthetic oligonucleotide
  Sense strand starting at position 1481 of SEQ ID NO: 1243441
cguuguacauauuucugua

SEQ ID NO: 1416961 - RNA, 19 nt, Artificial Sequence
  Description of Artificial Sequence: Synthetic oligonucleotide
  Antisense strand to SEQ ID NO: 1416960
uacagaaauauguacaacg

SEQ ID NO: 1416962 - RNA, 19 nt, Artificial Sequence
  Description of Artificial Sequence: Synthetic oligonucleotide
  Sense strand starting at position 1497 of SEQ ID NO: 1243441
guagaaauucauggagcug

SEQ ID NO: 1416963 - RNA, 19 nt, Artificial Sequence
  Description of Artificial Sequence: Synthetic oligonucleotide
  Antisense strand to SEQ ID NO: 1416962
cagcuccaugaauuucuac

SEQ ID NO: 1416964 - RNA, 19 nt, Artificial Sequence
  Description of Artificial Sequence: Synthetic oligonucleotide
  Sense strand starting at position 1506 of SEQ ID NO: 1243441
cauggagcuguauacuuua

SEQ ID NO: 1416965 - RNA, 19 nt, Artificial Sequence
  Description of Artificial Sequence: Synthetic oligonucleotide
  Antisense strand to SEQ ID NO: 1416964
uaaaguauacagcuccaug

SEQ ID NO: 1416966 - RNA, 19 nt, Artificial Sequence
  Description of Artificial Sequence: Synthetic oligonucleotide
  Sense strand starting at position 1511 of SEQ ID NO: 1243441
agcuguauacuuuacugua

SEQ ID NO: 1416967 - RNA, 19 nt, Artificial Sequence
  Description of Artificial Sequence: Synthetic oligonucleotide
  Antisense strand to SEQ ID NO: 1416966
uacaguaaaguauacagcu

SEQ ID NO: 1416968 - RNA, 19 nt, Artificial Sequence
  Description of Artificial Sequence: Synthetic oligonucleotide
  Sense strand starting at position 1513 of SEQ ID NO: 1243441
cuguauacuuuacuguaau

SEQ ID NO: 1416969 - RNA, 19 nt, Artificial Sequence
  Description of Artificial Sequence: Synthetic oligonucleotide
  Antisense strand to SEQ ID NO: 1416968
auuacaguaaaguauacag

SEQ ID NO: 1416970 - RNA, 19 nt, Artificial Sequence
  Description of Artificial Sequence: Synthetic oligonucleotide
  Sense strand starting at position 1525 of SEQ ID NO: 1243441
cuguaauucuacccgauac

SEQ ID NO: 1416971 - RNA, 19 nt, Artificial Sequence
  Description of Artificial Sequence: Synthetic oligonucleotide
  Antisense strand to SEQ ID NO: 1416970
guaucggguagaauuacag

SEQ ID NO: 1416972 - RNA, 19 nt, Artificial Sequence
  Description of Artificial Sequence: Synthetic oligonucleotide
  Sense strand starting at position 1527 of SEQ ID NO: 1243441
guaauucuacccgauacaa

SEQ ID NO: 1416973 - RNA, 19 nt, Artificial Sequence
  Description of Artificial Sequence: Synthetic oligonucleotide
  Antisense strand to SEQ ID NO: 1416972
uuguaucggguagaauuac

SEQ ID NO: 1416974 - RNA, 19 nt, Artificial Sequence
  Description of Artificial Sequence: Synthetic oligonucleotide
  Sense strand starting at position 1566 of SEQ ID NO: 1243441
gcuaccauuuauugugacu

SEQ ID NO: 1416975 - RNA, 19 nt, Artificial Sequence
  Description of Artificial Sequence: Synthetic oligonucleotide
  Antisense strand to SEQ ID NO: 1416974
agucacaauaaaugguagc

SEQ ID NO: 1416976 - RNA, 19 nt, Artificial Sequence
  Description of Artificial Sequence: Synthetic oligonucleotide
  Sense strand starting at position 1579 of SEQ ID NO: 1243441
gugacugucuagccacaau

SEQ ID NO: 1416977 - RNA, 19 nt, Artificial Sequence
  Description of Artificial Sequence: Synthetic oligonucleotide
  Antisense strand to SEQ ID NO: 1416976
auuguggcuagacagucac

SEQ ID NO: 1416978 - RNA, 19 nt, Artificial Sequence
  Description of Artificial Sequence: Synthetic oligonucleotide
  Sense strand starting at position 1611 of SEQ ID NO: 1243441
cuagacacaucacacgauu

SEQ ID NO: 1416979 - RNA, 19 nt, Artificial Sequence
  Description of Artificial Sequence: Synthetic oligonucleotide
  Antisense strand to SEQ ID NO: 1416978
aaucgugugaugugucuag

SEQ ID NO: 1416980 - RNA, 19 nt, Artificial Sequence
  Description of Artificial Sequence: Synthetic oligonucleotide
  Sense strand starting at position 1620 of SEQ ID NO: 1243441
ucacacgauucucagcuaa

SEQ ID NO: 1416981 - RNA, 19 nt, Artificial Sequence
  Description of Artificial Sequence: Synthetic oligonucleotide
  Antisense strand to SEQ ID NO: 1416980
uuagcugagaaucguguga

SEQ ID NO: 1416982 - RNA, 19 nt, Artificial Sequence
  Description of Artificial Sequence: Synthetic oligonucleotide
  Sense strand starting at position 1622 of SEQ ID NO: 1243441
acacgauucucagcuaauc

SEQ ID NO: 1416983 - RNA, 19 nt, Artificial Sequence
  Description of Artificial Sequence: Synthetic oligonucleotide
  Antisense strand to SEQ ID NO: 1416982
gauuagcugagaaucgugu

SEQ ID NO: 1416984 - RNA, 19 nt, Artificial Sequence
  Description of Artificial Sequence: Synthetic oligonucleotide
  Sense strand starting at position 2463 of SEQ ID NO: 1243441
augucucacugagcuuaaa

SEQ ID NO: 1416985 - RNA, 19 nt, Artificial Sequence
  Description of Artificial Sequence: Synthetic oligonucleotide
  Antisense strand to SEQ ID NO: 1416984
uuuaagcucagugagacau

SEQ ID NO: 1416986 - RNA, 19 nt, Artificial Sequence
  Description of Artificial Sequence: Synthetic oligonucleotide
  Sense strand starting at position 2529 of SEQ ID NO: 1243441
ccgguacacccauguaaca

SEQ ID NO: 1416987 - RNA, 19 nt, Artificial Sequence
  Description of Artificial Sequence: Synthetic oligonucleotide
  Antisense strand to SEQ ID NO: 1416986
uguuacauggguguaccgg

SEQ ID NO: 1416988 - RNA, 19 nt, Artificial Sequence
  Description of Artificial Sequence: Synthetic oligonucleotide
  Sense strand starting at position 2787 of SEQ ID NO: 1243441
cagugcaucuaguaaguua

SEQ ID NO: 1416989 - RNA, 19 nt, Artificial Sequence
  Description of Artificial Sequence: Synthetic oligonucleotide
  Antisense strand to SEQ ID NO: 1416988
uaacuuacuagaugcacug

SEQ ID NO: 1416990 - RNA, 19 nt, Artificial Sequence
  Description of Artificial Sequence: Synthetic oligonucleotide
  Sense strand starting at position 2802 of SEQ ID NO: 1243441
guuaccauuugggaacaaa

SEQ ID NO: 1416991 - RNA, 19 nt, Artificial Sequence
  Description of Artificial Sequence: Synthetic oligonucleotide
  Antisense strand to SEQ ID NO: 1416990
uuuguucccaaaugguaac

SEQ ID NO: 1416992 - RNA, 19 nt, Artificial Sequence
  Description of Artificial Sequence: Synthetic oligonucleotide
  Sense strand starting at position 2840 of SEQ ID NO: 1243441
uuuguacaugcuuguaaau

SEQ ID NO: 1416993 - RNA, 19 nt, Artificial Sequence
  Description of Artificial Sequence: Synthetic oligonucleotide
  Antisense strand to SEQ ID NO: 1416992
auuuacaagcauguacaaa

SEQ ID NO: 1416994 - RNA, 19 nt, Artificial Sequence
  Description of Artificial Sequence: Synthetic oligonucleotide
  Sense strand starting at position 2850 of SEQ ID NO: 1243441
cuuguaaaugccuaagcua

SEQ ID NO: 1416995 - RNA, 19 nt, Artificial Sequence
  Description of Artificial Sequence: Synthetic oligonucleotide
  Antisense strand to SEQ ID NO: 1416994
uagcuuaggcauuuacaag

SEQ ID NO: 1416996 - RNA, 19 nt, Artificial Sequence
  Description of Artificial Sequence: Synthetic oligonucleotide
  Sense strand starting at position 3003 of SEQ ID NO: 1243441
cuguucgugugcagguuaa

SEQ ID NO: 1416997 - RNA, 19 nt, Artificial Sequence
  Description of Artificial Sequence: Synthetic oligonucleotide
  Antisense strand to SEQ ID NO: 1416996
uuaaccugcacacgaacag

SEQ ID NO: 1416998 - RNA, 19 nt, Artificial Sequence
  Description of Artificial Sequence: Synthetic oligonucleotide
  Sense strand starting at position 3372 of SEQ ID NO: 1243441
agaaaucuccugugcagau

SEQ ID NO: 1416999 - RNA, 19 nt, Artificial Sequence
  Description of Artificial Sequence: Synthetic oligonucleotide
  Antisense strand to SEQ ID NO: 1416998
aucugcacaggagauuucu

SEQ ID NO: 1417000 - RNA, 19 nt, Artificial Sequence
  Description of Artificial Sequence: Synthetic oligonucleotide
  Sense strand starting at position 3373 of SEQ ID NO: 1243441
gaaaucuccugugcagauu

SEQ ID NO: 1417001 - RNA, 19 nt, Artificial Sequence
  Description of Artificial Sequence: Synthetic oligonucleotide
  Antisense strand to SEQ ID NO: 1417000
aaucugcacaggagauuuc

SEQ ID NO: 1417002 - RNA, 19 nt, Artificial Sequence
  Description of Artificial Sequence: Synthetic oligonucleotide
  Sense strand starting at position 3393 of SEQ ID NO: 1243441
ugaaaucauuuacguagau

SEQ ID NO: 1417003 - RNA, 19 nt, Artificial Sequence
  Description of Artificial Sequence: Synthetic oligonucleotide
  Antisense strand to SEQ ID NO: 1417002
aucuacguaaaugauuuca

SEQ ID NO: 1417004 - RNA, 19 nt, Artificial Sequence
  Description of Artificial Sequence: Synthetic oligonucleotide
  Sense strand starting at position 3445 of SEQ ID NO: 1243441
uuaagugugaguugcccau

SEQ ID NO: 1417005 - RNA, 19 nt, Artificial Sequence
  Description of Artificial Sequence: Synthetic oligonucleotide
  Antisense strand to SEQ ID NO: 1417004
augggcaacucacacuuaa

SEQ ID NO: 1417006 - RNA, 19 nt, Artificial Sequence
  Description of Artificial Sequence: Synthetic oligonucleotide
  Sense strand starting at position 3451 of SEQ ID NO: 1243441
gugaguugcccauagcgac

SEQ ID NO: 1417007 - RNA, 19 nt, Artificial Sequence
  Description of Artificial Sequence: Synthetic oligonucleotide
  Antisense strand to SEQ ID NO: 1417006
gucgcuaugggcaacucac

SEQ ID NO: 1417008 - RNA, 19 nt, Artificial Sequence
  Description of Artificial Sequence: Synthetic oligonucleotide
  Sense strand starting at position 3575 of SEQ ID NO: 1243441
uuaacaucauccgggauca

SEQ ID NO: 1417009 - RNA, 19 nt, Artificial Sequence
  Description of Artificial Sequence: Synthetic oligonucleotide
  Antisense strand to SEQ ID NO: 1417008
ugaucccggaugauguuaa

SEQ ID NO: 1417010 - RNA, 19 nt, Artificial Sequence
  Description of Artificial Sequence: Synthetic oligonucleotide
  Sense strand starting at position 3577 of SEQ ID NO: 1243441
aacaucauccgggaucagu

SEQ ID NO: 1417011 - RNA, 19 nt, Artificial Sequence
  Description of Artificial Sequence: Synthetic oligonucleotide
  Antisense strand to SEQ ID NO: 1417010
acugaucccggaugauguu

SEQ ID NO: 1417012 - RNA, 19 nt, Artificial Sequence
  Description of Artificial Sequence: Synthetic oligonucleotide
  Sense strand starting at position 3958 of SEQ ID NO: 1243441
cuuuaccucuguggucaua

SEQ ID NO: 1417013 - RNA, 19 nt, Artificial Sequence
  Description of Artificial Sequence: Synthetic oligonucleotide
  Antisense strand to SEQ ID NO: 1417012
uaugaccacagagguaaag

SEQ ID NO: 1417014 - RNA, 19 nt, Artificial Sequence
  Description of Artificial Sequence: Synthetic oligonucleotide
  Sense strand starting at position 3960 of SEQ ID NO: 1243441
uuaccucuguggucauaag

SEQ ID NO: 1417015 - RNA, 19 nt, Artificial Sequence
  Description of Artificial Sequence: Synthetic oligonucleotide
  Antisense strand to SEQ ID NO: 1417014
cuuaugaccacagagguaa

SEQ ID NO: 1417016 - RNA, 19 nt, Artificial Sequence
  Description of Artificial Sequence: Synthetic oligonucleotide
  Sense strand starting at position 3961 of SEQ ID NO: 1243441
uaccucuguggucauaaga

SEQ ID NO: 1417017 - RNA, 19 nt, Artificial Sequence
  Description of Artificial Sequence: Synthetic oligonucleotide
  Antisense strand to SEQ ID NO: 1417016
ucuuaugaccacagaggua

SEQ ID NO: 1417018 - RNA, 19 nt, Artificial Sequence
  Description of Artificial Sequence: Synthetic oligonucleotide
  Sense strand starting at position 586 of SEQ ID NO: 1243442
ucuggacauugggaacaau

SEQ ID NO: 1417019 - RNA, 19 nt, Artificial Sequence
  Description of Artificial Sequence: Synthetic oligonucleotide
  Antisense strand to SEQ ID NO: 1417018
auuguucccaauguccaga

SEQ ID NO: 1417020 - RNA, 19 nt, Artificial Sequence
  Description of Artificial Sequence: Synthetic oligonucleotide
  Sense strand starting at position 1050 of SEQ ID NO: 1243442
ggacaagauucguaagcuc

SEQ ID NO: 1417021 - RNA, 19 nt, Artificial Sequence
  Description of Artificial Sequence: Synthetic oligonucleotide
  Antisense strand to SEQ ID NO: 1417020
gagcuuacgaaucuugucc

SEQ ID NO: 1417022 - RNA, 19 nt, Artificial Sequence
  Description of Artificial Sequence: Synthetic oligonucleotide
  Sense strand starting at position 1128 of SEQ ID NO: 1243442
cguuguacauauuucugua

SEQ ID NO: 1417023 - RNA, 19 nt, Artificial Sequence
  Description of Artificial Sequence: Synthetic oligonucleotide
  Antisense strand to SEQ ID NO: 1417022
uacagaaauauguacaacg

SEQ ID NO: 1417024 - RNA, 19 nt, Artificial Sequence
  Description of Artificial Sequence: Synthetic oligonucleotide
  Sense strand starting at position 1144 of SEQ ID NO: 1243442
guagaaauucauggagcug

SEQ ID NO: 1417025 - RNA, 19 nt, Artificial Sequence
  Description of Artificial Sequence: Synthetic oligonucleotide
  Antisense strand to SEQ ID NO: 1417024
cagcuccaugaauuucuac

SEQ ID NO: 1417026 - RNA, 19 nt, Artificial Sequence
  Description of Artificial Sequence: Synthetic oligonucleotide
  Sense strand starting at position 1153 of SEQ ID NO: 1243442
cauggagcuguauacuuua

SEQ ID NO: 1417027 - RNA, 19 nt, Artificial Sequence
  Description of Artificial Sequence: Synthetic oligonucleotide
  Antisense strand to SEQ ID NO: 1417026
uaaaguauacagcuccaug

SEQ ID NO: 1417028 - RNA, 19 nt, Artificial Sequence
  Description of Artificial Sequence: Synthetic oligonucleotide
  Sense strand starting at position 1158 of SEQ ID NO: 1243442
agcuguauacuuuacugua

SEQ ID NO: 1417029 - RNA, 19 nt, Artificial Sequence
  Description of Artificial Sequence: Synthetic oligonucleotide
  Antisense strand to SEQ ID NO: 1417028
uacaguaaaguauacagcu

SEQ ID NO: 1417030 - RNA, 19 nt, Artificial Sequence
  Description of Artificial Sequence: Synthetic oligonucleotide
  Sense strand starting at position 1160 of SEQ ID NO: 1243442
cuguauacuuuacuguaau

SEQ ID NO: 1417031 - RNA, 19 nt, Artificial Sequence
  Description of Artificial Sequence: Synthetic oligonucleotide
  Antisense strand to SEQ ID NO: 1417030
auuacaguaaaguauacag

SEQ ID NO: 1417032 - RNA, 19 nt, Artificial Sequence
  Description of Artificial Sequence: Synthetic oligonucleotide
  Sense strand starting at position 1172 of SEQ ID NO: 1243442
cuguaauucuacccgauac

SEQ ID NO: 1417033 - RNA, 19 nt, Artificial Sequence
  Description of Artificial Sequence: Synthetic oligonucleotide
  Antisense strand to SEQ ID NO: 1417032
guaucggguagaauuacag

SEQ ID NO: 1417034 - RNA, 19 nt, Artificial Sequence
  Description of Artificial Sequence: Synthetic oligonucleotide
  Sense strand starting at position 1174 of SEQ ID NO: 1243442
guaauucuacccgauacaa

SEQ ID NO: 1417035 - RNA, 19 nt, Artificial Sequence
  Description of Artificial Sequence: Synthetic oligonucleotide
  Antisense strand to SEQ ID NO: 1417034
uuguaucggguagaauuac

SEQ ID NO: 1417036 - RNA, 19 nt, Artificial Sequence
  Description of Artificial Sequence: Synthetic oligonucleotide
  Sense strand starting at position 1213 of SEQ ID NO: 1243442
gcuaccauuuauugugacu

SEQ ID NO: 1417037 - RNA, 19 nt, Artificial Sequence
  Description of Artificial Sequence: Synthetic oligonucleotide
  Antisense strand to SEQ ID NO: 1417036
agucacaauaaaugguagc

SEQ ID NO: 1417038 - RNA, 19 nt, Artificial Sequence
  Description of Artificial Sequence: Synthetic oligonucleotide
  Sense strand starting at position 1226 of SEQ ID NO: 1243442
gugacugucuagccacaau

SEQ ID NO: 1417039 - RNA, 19 nt, Artificial Sequence
  Description of Artificial Sequence: Synthetic oligonucleotide
  Antisense strand to SEQ ID NO: 1417038
auuguggcuagacagucac

SEQ ID NO: 1417040 - RNA, 19 nt, Artificial Sequence
  Description of Artificial Sequence: Synthetic oligonucleotide
  Sense strand starting at position 1258 of SEQ ID NO: 1243442
cuagacacaucacacgauu

SEQ ID NO: 1417041 - RNA, 19 nt, Artificial Sequence
  Description of Artificial Sequence: Synthetic oligonucleotide
  Antisense strand to SEQ ID NO: 1417040
aaucgugugaugugucuag

SEQ ID NO: 1417042 - RNA, 19 nt, Artificial Sequence
  Description of Artificial Sequence: Synthetic oligonucleotide
  Sense strand starting at position 1267 of SEQ ID NO: 1243442
ucacacgauucucagcuaa

SEQ ID NO: 1417043 - RNA, 19 nt, Artificial Sequence
  Description of Artificial Sequence: Synthetic oligonucleotide
  Antisense strand to SEQ ID NO: 1417042
uuagcugagaaucguguga

SEQ ID NO: 1417044 - RNA, 19 nt, Artificial Sequence
  Description of Artificial Sequence: Synthetic oligonucleotide
  Sense strand starting at position 1269 of SEQ ID NO: 1243442
acacgauucucagcuaauc

SEQ ID NO: 1417045 - RNA, 19 nt, Artificial Sequence
  Description of Artificial Sequence: Synthetic oligonucleotide
  Antisense strand to SEQ ID NO: 1417044
gauuagcugagaaucgugu

SEQ ID NO: 1417046 - RNA, 19 nt, Artificial Sequence
  Description of Artificial Sequence: Synthetic oligonucleotide
  Sense strand starting at position 2110 of SEQ ID NO: 1243442
augucucacugagcuuaaa

SEQ ID NO: 1417047 - RNA, 19 nt, Artificial Sequence
  Description of Artificial Sequence: Synthetic oligonucleotide
  Antisense strand to SEQ ID NO: 1417046
uuuaagcucagugagacau

SEQ ID NO: 1417048 - RNA, 19 nt, Artificial Sequence
  Description of Artificial Sequence: Synthetic oligonucleotide
  Sense strand starting at position 2176 of SEQ ID NO: 1243442
ccgguacacccauguaaca

SEQ ID NO: 1417049 - RNA, 19 nt, Artificial Sequence
  Description of Artificial Sequence: Synthetic oligonucleotide
  Antisense strand to SEQ ID NO: 1417048
uguuacauggguguaccgg

SEQ ID NO: 1417050 - RNA, 19 nt, Artificial Sequence
  Description of Artificial Sequence: Synthetic oligonucleotide
  Sense strand starting at position 2434 of SEQ ID NO: 1243442
cagugcaucuaguaaguua

SEQ ID NO: 1417051 - RNA, 19 nt, Artificial Sequence
  Description of Artificial Sequence: Synthetic oligonucleotide
  Antisense strand to SEQ ID NO: 1417050
uaacuuacuagaugcacug

SEQ ID NO: 1417052 - RNA, 19 nt, Artificial Sequence
  Description of Artificial Sequence: Synthetic oligonucleotide
  Sense strand starting at position 2449 of SEQ ID NO: 1243442
guuaccauuugggaacaaa

SEQ ID NO: 1417053 - RNA, 19 nt, Artificial Sequence
  Description of Artificial Sequence: Synthetic oligonucleotide
  Antisense strand to SEQ ID NO: 1417052
uuuguucccaaaugguaac

SEQ ID NO: 1417054 - RNA, 19 nt, Artificial Sequence
  Description of Artificial Sequence: Synthetic oligonucleotide
  Sense strand starting at position 2487 of SEQ ID NO: 1243442
uuuguacaugcuuguaaau

SEQ ID NO: 1417055 - RNA, 19 nt, Artificial Sequence
  Description of Artificial Sequence: Synthetic oligonucleotide
  Antisense strand to SEQ ID NO: 1417054
auuuacaagcauguacaaa

SEQ ID NO: 1417056 - RNA, 19 nt, Artificial Sequence
  Description of Artificial Sequence: Synthetic oligonucleotide
  Sense strand starting at position 2497 of SEQ ID NO: 1243442
cuuguaaaugccuaagcua

SEQ ID NO: 1417057 - RNA, 19 nt, Artificial Sequence
  Description of Artificial Sequence: Synthetic oligonucleotide
  Antisense strand to SEQ ID NO: 1417056
uagcuuaggcauuuacaag

SEQ ID NO: 1417058 - RNA, 19 nt, Artificial Sequence
  Description of Artificial Sequence: Synthetic oligonucleotide
  Sense strand starting at position 2650 of SEQ ID NO: 1243442
cuguucgugugcagguuaa

SEQ ID NO: 1417059 - RNA, 19 nt, Artificial Sequence
  Description of Artificial Sequence: Synthetic oligonucleotide
  Antisense strand to SEQ ID NO: 1417058
uuaaccugcacacgaacag

SEQ ID NO: 1417060 - RNA, 19 nt, Artificial Sequence
  Description of Artificial Sequence: Synthetic oligonucleotide
  Sense strand starting at position 3019 of SEQ ID NO: 1243442
agaaaucuccugugcagau

SEQ ID NO: 1417061 - RNA, 19 nt, Artificial Sequence
  Description of Artificial Sequence: Synthetic oligonucleotide
  Antisense strand to SEQ ID NO: 1417060
aucugcacaggagauuucu

SEQ ID NO: 1417062 - RNA, 19 nt, Artificial Sequence
  Description of Artificial Sequence: Synthetic oligonucleotide
  Sense strand starting at position 3020 of SEQ ID NO: 1243442
gaaaucuccugugcagauu

SEQ ID NO: 1417063 - RNA, 19 nt, Artificial Sequence
  Description of Artificial Sequence: Synthetic oligonucleotide
  Antisense strand to SEQ ID NO: 1417062
aaucugcacaggagauuuc

SEQ ID NO: 1417064 - RNA, 19 nt, Artificial Sequence
  Description of Artificial Sequence: Synthetic oligonucleotide
  Sense strand starting at position 3040 of SEQ ID NO: 1243442
ugaaaucauuuacguagau

SEQ ID NO: 1417065 - RNA, 19 nt, Artificial Sequence
  Description of Artificial Sequence: Synthetic oligonucleotide
  Antisense strand to SEQ ID NO: 1417064
aucuacguaaaugauuuca

SEQ ID NO: 1417066 - RNA, 19 nt, Artificial Sequence
  Description of Artificial Sequence: Synthetic oligonucleotide
  Sense strand starting at position 3092 of SEQ ID NO: 1243442
uuaagugugaguugcccau

SEQ ID NO: 1417067 - RNA, 19 nt, Artificial Sequence
  Description of Artificial Sequence: Synthetic oligonucleotide
  Antisense strand to SEQ ID NO: 1417066
augggcaacucacacuuaa

SEQ ID NO: 1417068 - RNA, 19 nt, Artificial Sequence
  Description of Artificial Sequence: Synthetic oligonucleotide
  Sense strand starting at position 3098 of SEQ ID NO: 1243442
gugaguugcccauagcgac

SEQ ID NO: 1417069 - RNA, 19 nt, Artificial Sequence
  Description of Artificial Sequence: Synthetic oligonucleotide
  Antisense strand to SEQ ID NO: 1417068
gucgcuaugggcaacucac

SEQ ID NO: 1417070 - RNA, 19 nt, Artificial Sequence
  Description of Artificial Sequence: Synthetic oligonucleotide
  Sense strand starting at position 3222 of SEQ ID NO: 1243442
uuaacaucauccgggauca

SEQ ID NO: 1417071 - RNA, 19 nt, Artificial Sequence
  Description of Artificial Sequence: Synthetic oligonucleotide
  Antisense strand to SEQ ID NO: 1417070
ugaucccggaugauguuaa

SEQ ID NO: 1417072 - RNA, 19 nt, Artificial Sequence
  Description of Artificial Sequence: Synthetic oligonucleotide
  Sense strand starting at position 3224 of SEQ ID NO: 1243442
aacaucauccgggaucagu

SEQ ID NO: 1417073 - RNA, 19 nt, Artificial Sequence
  Description of Artificial Sequence: Synthetic oligonucleotide
  Antisense strand to SEQ ID NO: 1417072
acugaucccggaugauguu

SEQ ID NO: 1417074 - RNA, 19 nt, Artificial Sequence
  Description of Artificial Sequence: Synthetic oligonucleotide
  Sense strand starting at position 3605 of SEQ ID NO: 1243442
cuuuaccucuguggucaua

SEQ ID NO: 1417075 - RNA, 19 nt, Artificial Sequence
  Description of Artificial Sequence: Synthetic oligonucleotide
  Antisense strand to SEQ ID NO: 1417074
uaugaccacagagguaaag

SEQ ID NO: 1417076 - RNA, 19 nt, Artificial Sequence
  Description of Artificial Sequence: Synthetic oligonucleotide
  Sense strand starting at position 3607 of SEQ ID NO: 1243442
uuaccucuguggucauaag

SEQ ID NO: 1417077 - RNA, 19 nt, Artificial Sequence
  Description of Artificial Sequence: Synthetic oligonucleotide
  Antisense strand to SEQ ID NO: 1417076
cuuaugaccacagagguaa

SEQ ID NO: 1417078 - RNA, 19 nt, Artificial Sequence
  Description of Artificial Sequence: Synthetic oligonucleotide
  Sense strand starting at position 3608 of SEQ ID NO: 1243442
uaccucuguggucauaaga

SEQ ID NO: 1417079 - RNA, 19 nt, Artificial Sequence
  Description of Artificial Sequence: Synthetic oligonucleotide
  Antisense strand to SEQ ID NO: 1417078
ucuuaugaccacagaggua

SEQ ID NO: 1417080 - RNA, 19 nt, Artificial Sequence
  Description of Artificial Sequence: Synthetic oligonucleotide
  Sense strand starting at position 3 of SEQ ID NO: 1243443
gagguaucacagugauggu

SEQ ID NO: 1417081 - RNA, 19 nt, Artificial Sequence
  Description of Artificial Sequence: Synthetic oligonucleotide
  Antisense strand to SEQ ID NO: 1417080
accaucacugugauaccuc

SEQ ID NO: 1417082 - RNA, 19 nt, Artificial Sequence
  Description of Artificial Sequence: Synthetic oligonucleotide
  Sense strand starting at position 7 of SEQ ID NO: 1243443
uaucacagugaugguguua

SEQ ID NO: 1417083 - RNA, 19 nt, Artificial Sequence
  Description of Artificial Sequence: Synthetic oligonucleotide
  Antisense strand to SEQ ID NO: 1417082
uaacaccaucacugugaua

SEQ ID NO: 1417084 - RNA, 19 nt, Artificial Sequence
  Description of Artificial Sequence: Synthetic oligonucleotide
  Sense strand starting at position 49 of SEQ ID NO: 1243443
gaacgucugcaauguaaga

SEQ ID NO: 1417085 - RNA, 19 nt, Artificial Sequence
  Description of Artificial Sequence: Synthetic oligonucleotide
  Antisense strand to SEQ ID NO: 1417084
ucuuacauugcagacguuc

SEQ ID NO: 1417086 - RNA, 19 nt, Artificial Sequence
  Description of Artificial Sequence: Synthetic oligonucleotide
  Sense strand starting at position 51 of SEQ ID NO: 1243443
acgucugcaauguaagaaa

SEQ ID NO: 1417087 - RNA, 19 nt, Artificial Sequence
  Description of Artificial Sequence: Synthetic oligonucleotide
  Antisense strand to SEQ ID NO: 1417086
uuucuuacauugcagacgu

SEQ ID NO: 1417088 - RNA, 19 nt, Artificial Sequence
  Description of Artificial Sequence: Synthetic oligonucleotide
  Sense strand starting at position 105 of SEQ ID NO: 1243443
acagcacccgugugaagaa

SEQ ID NO: 1417089 - RNA, 19 nt, Artificial Sequence
  Description of Artificial Sequence: Synthetic oligonucleotide
  Antisense strand to SEQ ID NO: 1417088
uucuucacacgggugcugu

SEQ ID NO: 1417090 - RNA, 19 nt, Artificial Sequence
  Description of Artificial Sequence: Synthetic oligonucleotide
  Sense strand starting at position 399 of SEQ ID NO: 1243443
auugcagugacucgagauc

SEQ ID NO: 1417091 - RNA, 19 nt, Artificial Sequence
  Description of Artificial Sequence: Synthetic oligonucleotide
  Antisense strand to SEQ ID NO: 1417090
gaucucgagucacugcaau

SEQ ID NO: 1417092 - RNA, 19 nt, Artificial Sequence
  Description of Artificial Sequence: Synthetic oligonucleotide
  Sense strand starting at position 480 of SEQ ID NO: 1243443
uacgauucuggcuguagaa

SEQ ID NO: 1417093 - RNA, 19 nt, Artificial Sequence
  Description of Artificial Sequence: Synthetic oligonucleotide
  Antisense strand to SEQ ID NO: 1417092
uucuacagccagaaucgua

SEQ ID NO: 1417094 - RNA, 19 nt, Artificial Sequence
  Description of Artificial Sequence: Synthetic oligonucleotide
  Sense strand starting at position 482 of SEQ ID NO: 1243443
cgauucuggcuguagaauu

SEQ ID NO: 1417095 - RNA, 19 nt, Artificial Sequence
  Description of Artificial Sequence: Synthetic oligonucleotide
  Antisense strand to SEQ ID NO: 1417094
aauucuacagccagaaucg

SEQ ID NO: 1417096 - RNA, 19 nt, Artificial Sequence
  Description of Artificial Sequence: Synthetic oligonucleotide
  Sense strand starting at position 793 of SEQ ID NO: 1243443
gcuguagaguucuugaaug

SEQ ID NO: 1417097 - RNA, 19 nt, Artificial Sequence
  Description of Artificial Sequence: Synthetic oligonucleotide
  Antisense strand to SEQ ID NO: 1417096
cauucaagaacucuacagc

SEQ ID NO: 1417098 - RNA, 19 nt, Artificial Sequence
  Description of Artificial Sequence: Synthetic oligonucleotide
  Sense strand starting at position 798 of SEQ ID NO: 1243443
agaguucuugaaugaacuu

SEQ ID NO: 1417099 - RNA, 19 nt, Artificial Sequence
  Description of Artificial Sequence: Synthetic oligonucleotide
  Antisense strand to SEQ ID NO: 1417098
aaguucauucaagaacucu

SEQ ID NO: 1417100 - RNA, 19 nt, Artificial Sequence
  Description of Artificial Sequence: Synthetic oligonucleotide
  Sense strand starting at position 991 of SEQ ID NO: 1243443
agucucugauaaguuuauu

SEQ ID NO: 1417101 - RNA, 19 nt, Artificial Sequence
  Description of Artificial Sequence: Synthetic oligonucleotide
  Antisense strand to SEQ ID NO: 1417100
aauaaacuuaucagagacu

SEQ ID NO: 1417102 - RNA, 19 nt, Artificial Sequence
  Description of Artificial Sequence: Synthetic oligonucleotide
  Sense strand starting at position 1023 of SEQ ID NO: 1243443
guuacaguggaguaagauc

SEQ ID NO: 1417103 - RNA, 19 nt, Artificial Sequence
  Description of Artificial Sequence: Synthetic oligonucleotide
  Antisense strand to SEQ ID NO: 1417102
gaucuuacuccacuguaac

SEQ ID NO: 1417104 - RNA, 19 nt, Artificial Sequence
  Description of Artificial Sequence: Synthetic oligonucleotide
  Sense strand starting at position 1047 of SEQ ID NO: 1243443
agucuauuacuauguaaac

SEQ ID NO: 1417105 - RNA, 19 nt, Artificial Sequence
  Description of Artificial Sequence: Synthetic oligonucleotide
  Antisense strand to SEQ ID NO: 1417104
guuuacauaguaauagacu

SEQ ID NO: 1417106 - RNA, 19 nt, Artificial Sequence
  Description of Artificial Sequence: Synthetic oligonucleotide
  Sense strand starting at position 1048 of SEQ ID NO: 1243443
gucuauuacuauguaaaca

SEQ ID NO: 1417107 - RNA, 19 nt, Artificial Sequence
  Description of Artificial Sequence: Synthetic oligonucleotide
  Antisense strand to SEQ ID NO: 1417106
uguuuacauaguaauagac

SEQ ID NO: 1417108 - RNA, 19 nt, Artificial Sequence
  Description of Artificial Sequence: Synthetic oligonucleotide
  Sense strand starting at position 1079 of SEQ ID NO: 1243443
uuaaccgauuucuaagaua

SEQ ID NO: 1417109 - RNA, 19 nt, Artificial Sequence
  Description of Artificial Sequence: Synthetic oligonucleotide
  Antisense strand to SEQ ID NO: 1417108
uaucuuagaaaucgguuaa

SEQ ID NO: 1417110 - RNA, 19 nt, Artificial Sequence
  Description of Artificial Sequence: Synthetic oligonucleotide
  Sense strand starting at position 1082 of SEQ ID NO: 1243443
accgauuucuaagauaaag

SEQ ID NO: 1417111 - RNA, 19 nt, Artificial Sequence
  Description of Artificial Sequence: Synthetic oligonucleotide
  Antisense strand to SEQ ID NO: 1417110
cuuuaucuuagaaaucggu

SEQ ID NO: 1417112 - RNA, 19 nt, Artificial Sequence
  Description of Artificial Sequence: Synthetic oligonucleotide
  Sense strand starting at position 1186 of SEQ ID NO: 1243443
guacuugaccuuugaauaa

SEQ ID NO: 1417113 - RNA, 19 nt, Artificial Sequence
  Description of Artificial Sequence: Synthetic oligonucleotide
  Antisense strand to SEQ ID NO: 1417112
uuauucaaaggucaaguac

SEQ ID NO: 1417114 - RNA, 19 nt, Artificial Sequence
  Description of Artificial Sequence: Synthetic oligonucleotide
  Sense strand starting at position 1241 of SEQ ID NO: 1243443
auaggauuaacuggccgaa

SEQ ID NO: 1417115 - RNA, 19 nt, Artificial Sequence
  Description of Artificial Sequence: Synthetic oligonucleotide
  Antisense strand to SEQ ID NO: 1417114
uucggccaguuaauccuau

SEQ ID NO: 1417116 - RNA, 19 nt, Artificial Sequence
  Description of Artificial Sequence: Synthetic oligonucleotide
  Sense strand starting at position 1243 of SEQ ID NO: 1243443
aggauuaacuggccgaaua

SEQ ID NO: 1417117 - RNA, 19 nt, Artificial Sequence
  Description of Artificial Sequence: Synthetic oligonucleotide
  Antisense strand to SEQ ID NO: 1417116
uauucggccaguuaauccu

SEQ ID NO: 1417118 - RNA, 19 nt, Artificial Sequence
  Description of Artificial Sequence: Synthetic oligonucleotide
  Sense strand starting at position 1244 of SEQ ID NO: 1243443
ggauuaacuggccgaauac

SEQ ID NO: 1417119 - RNA, 19 nt, Artificial Sequence
  Description of Artificial Sequence: Synthetic oligonucleotide
  Antisense strand to SEQ ID NO: 1417118
guauucggccaguuaaucc

SEQ ID NO: 1417120 - RNA, 19 nt, Artificial Sequence
  Description of Artificial Sequence: Synthetic oligonucleotide
  Sense strand starting at position 1245 of SEQ ID NO: 1243443
gauuaacuggccgaauaca

SEQ ID NO: 1417121 - RNA, 19 nt, Artificial Sequence
  Description of Artificial Sequence: Synthetic oligonucleotide
  Antisense strand to SEQ ID NO: 1417120
uguauucggccaguuaauc

SEQ ID NO: 1417122 - RNA, 19 nt, Artificial Sequence
  Description of Artificial Sequence: Synthetic oligonucleotide
  Sense strand starting at position 1274 of SEQ ID NO: 1243443
ccuagugaaucucugacuu

SEQ ID NO: 1417123 - RNA, 19 nt, Artificial Sequence
  Description of Artificial Sequence: Synthetic oligonucleotide
  Antisense strand to SEQ ID NO: 1417122
aagucagagauucacuagg

SEQ ID NO: 1417124 - RNA, 19 nt, Artificial Sequence
  Description of Artificial Sequence: Synthetic oligonucleotide
  Sense strand starting at position 1278 of SEQ ID NO: 1243443
gugaaucucugacuugcca

SEQ ID NO: 1417125 - RNA, 19 nt, Artificial Sequence
  Description of Artificial Sequence: Synthetic oligonucleotide
  Antisense strand to SEQ ID NO: 1417124
uggcaagucagagauucac

SEQ ID NO: 1417126 - RNA, 19 nt, Artificial Sequence
  Description of Artificial Sequence: Synthetic oligonucleotide
  Sense strand starting at position 1282 of SEQ ID NO: 1243443
aucucugacuugccagaau

SEQ ID NO: 1417127 - RNA, 19 nt, Artificial Sequence
  Description of Artificial Sequence: Synthetic oligonucleotide
  Antisense strand to SEQ ID NO: 1417126
auucuggcaagucagagau

SEQ ID NO: 1417128 - RNA, 19 nt, Artificial Sequence
  Description of Artificial Sequence: Synthetic oligonucleotide
  Sense strand starting at position 1291 of SEQ ID NO: 1243443
uugccagaauugcuccuaa

SEQ ID NO: 1417129 - RNA, 19 nt, Artificial Sequence
  Description of Artificial Sequence: Synthetic oligonucleotide
  Antisense strand to SEQ ID NO: 1417128
uuaggagcaauucuggcaa

SEQ ID NO: 1417130 - RNA, 19 nt, Artificial Sequence
  Description of Artificial Sequence: Synthetic oligonucleotide
  Sense strand starting at position 1369 of SEQ ID NO: 1243443
uggaucagucuccaaagca

SEQ ID NO: 1417131 - RNA, 19 nt, Artificial Sequence
  Description of Artificial Sequence: Synthetic oligonucleotide
  Antisense strand to SEQ ID NO: 1417130
ugcuuuggagacugaucca

SEQ ID NO: 1417132 - RNA, 19 nt, Artificial Sequence
  Description of Artificial Sequence: Synthetic oligonucleotide
  Sense strand starting at position 1442 of SEQ ID NO: 1243443
cccaaauccgaguacaugu

SEQ ID NO: 1417133 - RNA, 19 nt, Artificial Sequence
  Description of Artificial Sequence: Synthetic oligonucleotide
  Antisense strand to SEQ ID NO: 1417132
acauguacucggauuuggg

SEQ ID NO: 1417134 - RNA, 19 nt, Artificial Sequence
  Description of Artificial Sequence: Synthetic oligonucleotide
  Sense strand starting at position 1733 of SEQ ID NO: 1243443
ucguaacugaaauagaagu

SEQ ID NO: 1417135 - RNA, 19 nt, Artificial Sequence
  Description of Artificial Sequence: Synthetic oligonucleotide
  Antisense strand to SEQ ID NO: 1417134
acuucuauuucaguuacga

SEQ ID NO: 1417136 - RNA, 19 nt, Artificial Sequence
  Description of Artificial Sequence: Synthetic oligonucleotide
  Sense strand starting at position 1754 of SEQ ID NO: 1243443
ccagucuggugggcaaauu

SEQ ID NO: 1417137 - RNA, 19 nt, Artificial Sequence
  Description of Artificial Sequence: Synthetic oligonucleotide
  Antisense strand to SEQ ID NO: 1417136
aauuugcccaccagacugg

SEQ ID NO: 1417138 - RNA, 19 nt, Artificial Sequence
  Description of Artificial Sequence: Synthetic oligonucleotide
  Sense strand starting at position 1888 of SEQ ID NO: 1243443
ggcagacgucacuagauuc

SEQ ID NO: 1417139 - RNA, 19 nt, Artificial Sequence
  Description of Artificial Sequence: Synthetic oligonucleotide
  Antisense strand to SEQ ID NO: 1417138
gaaucuagugacgucugcc

SEQ ID NO: 1417140 - RNA, 19 nt, Artificial Sequence
  Description of Artificial Sequence: Synthetic oligonucleotide
  Sense strand starting at position 2083 of SEQ ID NO: 1243443
auagaacugccaugauacu

SEQ ID NO: 1417141 - RNA, 19 nt, Artificial Sequence
  Description of Artificial Sequence: Synthetic oligonucleotide
  Antisense strand to SEQ ID NO: 1417140
aguaucauggcaguucuau

SEQ ID NO: 1417142 - RNA, 19 nt, Artificial Sequence
  Description of Artificial Sequence: Synthetic oligonucleotide
  Sense strand starting at position 2172 of SEQ ID NO: 1243443
augggugcuacauagaauc

SEQ ID NO: 1417143 - RNA, 19 nt, Artificial Sequence
  Description of Artificial Sequence: Synthetic oligonucleotide
  Antisense strand to SEQ ID NO: 1417142
gauucuauguagcacccau

SEQ ID NO: 1417144 - RNA, 19 nt, Artificial Sequence
  Description of Artificial Sequence: Synthetic oligonucleotide
  Sense strand starting at position 2174 of SEQ ID NO: 1243443
gggugcuacauagaaucua

SEQ ID NO: 1417145 - RNA, 19 nt, Artificial Sequence
  Description of Artificial Sequence: Synthetic oligonucleotide
  Antisense strand to SEQ ID NO: 1417144
uagauucuauguagcaccc

SEQ ID NO: 1417146 - RNA, 19 nt, Artificial Sequence
  Description of Artificial Sequence: Synthetic oligonucleotide
  Sense strand starting at position 2258 of SEQ ID NO: 1243443
gauauaauaguggguaagu

SEQ ID NO: 1417147 - RNA, 19 nt, Artificial Sequence
  Description of Artificial Sequence: Synthetic oligonucleotide
  Antisense strand to SEQ ID NO: 1417146
acuuacccacuauuauauc

SEQ ID NO: 1417148 - RNA, 19 nt, Artificial Sequence
  Description of Artificial Sequence: Synthetic oligonucleotide
  Sense strand starting at position 2259 of SEQ ID NO: 1243443
auauaauaguggguaaguu

SEQ ID NO: 1417149 - RNA, 19 nt, Artificial Sequence
  Description of Artificial Sequence: Synthetic oligonucleotide
  Antisense strand to SEQ ID NO: 1417148
aacuuacccacuauuauau

SEQ ID NO: 1417150 - RNA, 19 nt, Artificial Sequence
  Description of Artificial Sequence: Synthetic oligonucleotide
  Sense strand starting at position 2260 of SEQ ID NO: 1243443
uauaauaguggguaaguuu

SEQ ID NO: 1417151 - RNA, 19 nt, Artificial Sequence
  Description of Artificial Sequence: Synthetic oligonucleotide
  Antisense strand to SEQ ID NO: 1417150
aaacuuacccacuauuaua

SEQ ID NO: 1417152 - RNA, 19 nt, Artificial Sequence
  Description of Artificial Sequence: Synthetic oligonucleotide
  Sense strand starting at position 2427 of SEQ ID NO: 1243443
ggaugaauacagugccaga

SEQ ID NO: 1417153 - RNA, 19 nt, Artificial Sequence
  Description of Artificial Sequence: Synthetic oligonucleotide
  Antisense strand to SEQ ID NO: 1417152
ucuggcacuguauucaucc

SEQ ID NO: 1417154 - RNA, 19 nt, Artificial Sequence
  Description of Artificial Sequence: Synthetic oligonucleotide
  Sense strand starting at position 3079 of SEQ ID NO: 1243443
gagcucuggcauuagagau

SEQ ID NO: 1417155 - RNA, 19 nt, Artificial Sequence
  Description of Artificial Sequence: Synthetic oligonucleotide
  Antisense strand to SEQ ID NO: 1417154
aucucuaaugccagagcuc

SEQ ID NO: 1417156 - RNA, 19 nt, Artificial Sequence
  Description of Artificial Sequence: Synthetic oligonucleotide
  Sense strand starting at position 3237 of SEQ ID NO: 1243443
gaguucugacacugccuaa

SEQ ID NO: 1417157 - RNA, 19 nt, Artificial Sequence
  Description of Artificial Sequence: Synthetic oligonucleotide
  Antisense strand to SEQ ID NO: 1417156
uuaggcagugucagaacuc

SEQ ID NO: 1417158 - RNA, 19 nt, Artificial Sequence
  Description of Artificial Sequence: Synthetic oligonucleotide
  Sense strand starting at position 3882 of SEQ ID NO: 1243443
cuugguuucggcgaaacaa

SEQ ID NO: 1417159 - RNA, 19 nt, Artificial Sequence
  Description of Artificial Sequence: Synthetic oligonucleotide
  Antisense strand to SEQ ID NO: 1417158
uuguuucgccgaaaccaag

SEQ ID NO: 1417160 - RNA, 19 nt, Artificial Sequence
  Description of Artificial Sequence: Synthetic oligonucleotide
  Sense strand starting at position 119 of SEQ ID NO: 1243444
ugggaaacauaguaacuau

SEQ ID NO: 1417161 - RNA, 19 nt, Artificial Sequence
  Description of Artificial Sequence: Synthetic oligonucleotide
  Antisense strand to SEQ ID NO: 1417160
auaguuacuauguuuccca

SEQ ID NO: 1417162 - RNA, 19 nt, Artificial Sequence
  Description of Artificial Sequence: Synthetic oligonucleotide
  Sense strand starting at position 130 of SEQ ID NO: 1243444
guaacuauguuuccuauca

SEQ ID NO: 1417163 - RNA, 19 nt, Artificial Sequence
  Description of Artificial Sequence: Synthetic oligonucleotide
  Antisense strand to SEQ ID NO: 1417162
ugauaggaaacauaguuac

SEQ ID NO: 1417164 - RNA, 19 nt, Artificial Sequence
  Description of Artificial Sequence: Synthetic oligonucleotide
  Sense strand starting at position 536 of SEQ ID NO: 1243444
ugggccuccucauuggaaa

SEQ ID NO: 1417165 - RNA, 19 nt, Artificial Sequence
  Description of Artificial Sequence: Synthetic oligonucleotide
  Antisense strand to SEQ ID NO: 1417164
uuuccaaugaggaggccca

SEQ ID NO: 1417166 - RNA, 19 nt, Artificial Sequence
  Description of Artificial Sequence: Synthetic oligonucleotide
  Sense strand starting at position 671 of SEQ ID NO: 1243444
auugaacuguuagguuuau

SEQ ID NO: 1417167 - RNA, 19 nt, Artificial Sequence
  Description of Artificial Sequence: Synthetic oligonucleotide
  Antisense strand to SEQ ID NO: 1417166
auaaaccuaacaguucaau

SEQ ID NO: 1417168 - RNA, 19 nt, Artificial Sequence
  Description of Artificial Sequence: Synthetic oligonucleotide
  Sense strand starting at position 672 of SEQ ID NO: 1243444
uugaacuguuagguuuauu

SEQ ID NO: 1417169 - RNA, 19 nt, Artificial Sequence
  Description of Artificial Sequence: Synthetic oligonucleotide
  Antisense strand to SEQ ID NO: 1417168
aauaaaccuaacaguucaa

SEQ ID NO: 1417170 - RNA, 19 nt, Artificial Sequence
  Description of Artificial Sequence: Synthetic oligonucleotide
  Sense strand starting at position 845 of SEQ ID NO: 1243444
cuaauugccuggcuccaau

SEQ ID NO: 1417171 - RNA, 19 nt, Artificial Sequence
  Description of Artificial Sequence: Synthetic oligonucleotide
  Antisense strand to SEQ ID NO: 1417170
auuggagccaggcaauuag

SEQ ID NO: 1417172 - RNA, 19 nt, Artificial Sequence
  Description of Artificial Sequence: Synthetic oligonucleotide
  Sense strand starting at position 901 of SEQ ID NO: 1243444
cugcaaagcccuuguucua

SEQ ID NO: 1417173 - RNA, 19 nt, Artificial Sequence
  Description of Artificial Sequence: Synthetic oligonucleotide
  Antisense strand to SEQ ID NO: 1417172
uagaacaagggcuuugcag

SEQ ID NO: 1417174 - RNA, 19 nt, Artificial Sequence
  Description of Artificial Sequence: Synthetic oligonucleotide
  Sense strand starting at position 913 of SEQ ID NO: 1243444
uguucuaggcaaugugaau

SEQ ID NO: 1417175 - RNA, 19 nt, Artificial Sequence
  Description of Artificial Sequence: Synthetic oligonucleotide
  Antisense strand to SEQ ID NO: 1417174
auucacauugccuagaaca

SEQ ID NO: 1417176 - RNA, 19 nt, Artificial Sequence
  Description of Artificial Sequence: Synthetic oligonucleotide
  Sense strand starting at position 943 of SEQ ID NO: 1243444
uggcauggaaucuguggaa

SEQ ID NO: 1417177 - RNA, 19 nt, Artificial Sequence
  Description of Artificial Sequence: Synthetic oligonucleotide
  Antisense strand to SEQ ID NO: 1417176
uuccacagauuccaugcca

SEQ ID NO: 1417178 - RNA, 19 nt, Artificial Sequence
  Description of Artificial Sequence: Synthetic oligonucleotide
  Sense strand starting at position 946 of SEQ ID NO: 1243444
cauggaaucuguggaauga

SEQ ID NO: 1417179 - RNA, 19 nt, Artificial Sequence
  Description of Artificial Sequence: Synthetic oligonucleotide
  Antisense strand to SEQ ID NO: 1417178
ucauuccacagauuccaug

SEQ ID NO: 1417180 - RNA, 19 nt, Artificial Sequence
  Description of Artificial Sequence: Synthetic oligonucleotide
  Sense strand starting at position 1104 of SEQ ID NO: 1243444
uggccugugucuuaaccau

SEQ ID NO: 1417181 - RNA, 19 nt, Artificial Sequence
  Description of Artificial Sequence: Synthetic oligonucleotide
  Antisense strand to SEQ ID NO: 1417180
augguuaagacacaggcca

SEQ ID NO: 1417182 - RNA, 19 nt, Artificial Sequence
  Description of Artificial Sequence: Synthetic oligonucleotide
  Sense strand starting at position 1150 of SEQ ID NO: 1243444
uagucaacgugagcugaau

SEQ ID NO: 1417183 - RNA, 19 nt, Artificial Sequence
  Description of Artificial Sequence: Synthetic oligonucleotide
  Antisense strand to SEQ ID NO: 1417182
auucagcucacguugacua

SEQ ID NO: 1417184 - RNA, 19 nt, Artificial Sequence
  Description of Artificial Sequence: Synthetic oligonucleotide
  Sense strand starting at position 1184 of SEQ ID NO: 1243444
aaacguuacagguggauca

SEQ ID NO: 1417185 - RNA, 19 nt, Artificial Sequence
  Description of Artificial Sequence: Synthetic oligonucleotide
  Antisense strand to SEQ ID NO: 1417184
ugauccaccuguaacguuu

SEQ ID NO: 1417186 - RNA, 19 nt, Artificial Sequence
  Description of Artificial Sequence: Synthetic oligonucleotide
  Sense strand starting at position 1364 of SEQ ID NO: 1243444
cccggacucacugagaagu

SEQ ID NO: 1417187 - RNA, 19 nt, Artificial Sequence
  Description of Artificial Sequence: Synthetic oligonucleotide
  Antisense strand to SEQ ID NO: 1417186
acuucucagugaguccggg

SEQ ID NO: 1417188 - RNA, 19 nt, Artificial Sequence
  Description of Artificial Sequence: Synthetic oligonucleotide
  Sense strand starting at position 1467 of SEQ ID NO: 1243444
ggaggaauccaugggugca

SEQ ID NO: 1417189 - RNA, 19 nt, Artificial Sequence
  Description of Artificial Sequence: Synthetic oligonucleotide
  Antisense strand to SEQ ID NO: 1417188
ugcacccauggauuccucc

SEQ ID NO: 1417190 - RNA, 19 nt, Artificial Sequence
  Description of Artificial Sequence: Synthetic oligonucleotide
  Sense strand starting at position 1490 of SEQ ID NO: 1243444
cccggaguucugugcagca

SEQ ID NO: 1417191 - RNA, 19 nt, Artificial Sequence
  Description of Artificial Sequence: Synthetic oligonucleotide
  Antisense strand to SEQ ID NO: 1417190
ugcugcacagaacuccggg

SEQ ID NO: 1417192 - RNA, 19 nt, Artificial Sequence
  Description of Artificial Sequence: Synthetic oligonucleotide
  Sense strand starting at position 1883 of SEQ ID NO: 1243444
gccgcucggugucaaugau

SEQ ID NO: 1417193 - RNA, 19 nt, Artificial Sequence
  Description of Artificial Sequence: Synthetic oligonucleotide
  Antisense strand to SEQ ID NO: 1417192
aucauugacaccgagcggc

SEQ ID NO: 1417194 - RNA, 19 nt, Artificial Sequence
  Description of Artificial Sequence: Synthetic oligonucleotide
  Sense strand starting at position 1887 of SEQ ID NO: 1243444
cucggugucaaugauauac

SEQ ID NO: 1417195 - RNA, 19 nt, Artificial Sequence
  Description of Artificial Sequence: Synthetic oligonucleotide
  Antisense strand to SEQ ID NO: 1417194
guauaucauugacaccgag

SEQ ID NO: 1417196 - RNA, 19 nt, Artificial Sequence
  Description of Artificial Sequence: Synthetic oligonucleotide
  Sense strand starting at position 1889 of SEQ ID NO: 1243444
cggugucaaugauauacca

SEQ ID NO: 1417197 - RNA, 19 nt, Artificial Sequence
  Description of Artificial Sequence: Synthetic oligonucleotide
  Antisense strand to SEQ ID NO: 1417196
ugguauaucauugacaccg

SEQ ID NO: 1417198 - RNA, 19 nt, Artificial Sequence
  Description of Artificial Sequence: Synthetic oligonucleotide
  Sense strand starting at position 1904 of SEQ ID NO: 1243444
accagaaguccgugccgau

SEQ ID NO: 1417199 - RNA, 19 nt, Artificial Sequence
  Description of Artificial Sequence: Synthetic oligonucleotide
  Antisense strand to SEQ ID NO: 1417198
aucggcacggacuucuggu

SEQ ID NO: 1417200 - RNA, 19 nt, Artificial Sequence
  Description of Artificial Sequence: Synthetic oligonucleotide
  Sense strand starting at position 2883 of SEQ ID NO: 1243444
ggcugacuagaaugugaaa

SEQ ID NO: 1417201 - RNA, 19 nt, Artificial Sequence
  Description of Artificial Sequence: Synthetic oligonucleotide
  Antisense strand to SEQ ID NO: 1417200
uuucacauucuagucagcc

SEQ ID NO: 1417202 - RNA, 19 nt, Artificial Sequence
  Description of Artificial Sequence: Synthetic oligonucleotide
  Sense strand starting at position 2927 of SEQ ID NO: 1243444
ucucuaaagcacugaggua

SEQ ID NO: 1417203 - RNA, 19 nt, Artificial Sequence
  Description of Artificial Sequence: Synthetic oligonucleotide
  Antisense strand to SEQ ID NO: 1417202
uaccucagugcuuuagaga

SEQ ID NO: 1417204 - RNA, 19 nt, Artificial Sequence
  Description of Artificial Sequence: Synthetic oligonucleotide
  Sense strand starting at position 2944 of SEQ ID NO: 1243444
uaguccagguccucagaau

SEQ ID NO: 1417205 - RNA, 19 nt, Artificial Sequence
  Description of Artificial Sequence: Synthetic oligonucleotide
  Antisense strand to SEQ ID NO: 1417204
auucugaggaccuggacua

SEQ ID NO: 1417206 - RNA, 19 nt, Artificial Sequence
  Description of Artificial Sequence: Synthetic oligonucleotide
  Sense strand starting at position 181 of SEQ ID NO: 1243445
ugggccuccucauuggaaa

SEQ ID NO: 1417207 - RNA, 19 nt, Artificial Sequence
  Description of Artificial Sequence: Synthetic oligonucleotide
  Antisense strand to SEQ ID NO: 1417206
uuuccaaugaggaggccca

SEQ ID NO: 1417208 - RNA, 19 nt, Artificial Sequence
  Description of Artificial Sequence: Synthetic oligonucleotide
  Sense strand starting at position 316 of SEQ ID NO: 1243445
auugaacuguuagguuuau

SEQ ID NO: 1417209 - RNA, 19 nt, Artificial Sequence
  Description of Artificial Sequence: Synthetic oligonucleotide
  Antisense strand to SEQ ID NO: 1417208
auaaaccuaacaguucaau

SEQ ID NO: 1417210 - RNA, 19 nt, Artificial Sequence
  Description of Artificial Sequence: Synthetic oligonucleotide
  Sense strand starting at position 317 of SEQ ID NO: 1243445
uugaacuguuagguuuauu

SEQ ID NO: 1417211 - RNA, 19 nt, Artificial Sequence
  Description of Artificial Sequence: Synthetic oligonucleotide
  Antisense strand to SEQ ID NO: 1417210
aauaaaccuaacaguucaa

SEQ ID NO: 1417212 - RNA, 19 nt, Artificial Sequence
  Description of Artificial Sequence: Synthetic oligonucleotide
  Sense strand starting at position 490 of SEQ ID NO: 1243445
cuaauugccuggcuccaau

SEQ ID NO: 1417213 - RNA, 19 nt, Artificial Sequence
  Description of Artificial Sequence: Synthetic oligonucleotide
  Antisense strand to SEQ ID NO: 1417212
auuggagccaggcaauuag

SEQ ID NO: 1417214 - RNA, 19 nt, Artificial Sequence
  Description of Artificial Sequence: Synthetic oligonucleotide
  Sense strand starting at position 546 of SEQ ID NO: 1243445
cugcaaagcccuuguucua

SEQ ID NO: 1417215 - RNA, 19 nt, Artificial Sequence
  Description of Artificial Sequence: Synthetic oligonucleotide
  Antisense strand to SEQ ID NO: 1417214
uagaacaagggcuuugcag

SEQ ID NO: 1417216 - RNA, 19 nt, Artificial Sequence
  Description of Artificial Sequence: Synthetic oligonucleotide
  Sense strand starting at position 558 of SEQ ID NO: 1243445
uguucuaggcaaugugaau

SEQ ID NO: 1417217 - RNA, 19 nt, Artificial Sequence
  Description of Artificial Sequence: Synthetic oligonucleotide
  Antisense strand to SEQ ID NO: 1417216
auucacauugccuagaaca

SEQ ID NO: 1417218 - RNA, 19 nt, Artificial Sequence
  Description of Artificial Sequence: Synthetic oligonucleotide
  Sense strand starting at position 588 of SEQ ID NO: 1243445
uggcauggaaucuguggaa

SEQ ID NO: 1417219 - RNA, 19 nt, Artificial Sequence
  Description of Artificial Sequence: Synthetic oligonucleotide
  Antisense strand to SEQ ID NO: 1417218
uuccacagauuccaugcca

SEQ ID NO: 1417220 - RNA, 19 nt, Artificial Sequence
  Description of Artificial Sequence: Synthetic oligonucleotide
  Sense strand starting at position 591 of SEQ ID NO: 1243445
cauggaaucuguggaauga

SEQ ID NO: 1417221 - RNA, 19 nt, Artificial Sequence
  Description of Artificial Sequence: Synthetic oligonucleotide
  Antisense strand to SEQ ID NO: 1417220
ucauuccacagauuccaug

SEQ ID NO: 1417222 - RNA, 19 nt, Artificial Sequence
  Description of Artificial Sequence: Synthetic oligonucleotide
  Sense strand starting at position 749 of SEQ ID NO: 1243445
uggccugugucuuaaccau

SEQ ID NO: 1417223 - RNA, 19 nt, Artificial Sequence
  Description of Artificial Sequence: Synthetic oligonucleotide
  Antisense strand to SEQ ID NO: 1417222
augguuaagacacaggcca

SEQ ID NO: 1417224 - RNA, 19 nt, Artificial Sequence
  Description of Artificial Sequence: Synthetic oligonucleotide
  Sense strand starting at position 795 of SEQ ID NO: 1243445
uagucaacgugagcugaau

SEQ ID NO: 1417225 - RNA, 19 nt, Artificial Sequence
  Description of Artificial Sequence: Synthetic oligonucleotide
  Antisense strand to SEQ ID NO: 1417224
auucagcucacguugacua

SEQ ID NO: 1417226 - RNA, 19 nt, Artificial Sequence
  Description of Artificial Sequence: Synthetic oligonucleotide
  Sense strand starting at position 829 of SEQ ID NO: 1243445
aaacguuacagguggauca

SEQ ID NO: 1417227 - RNA, 19 nt, Artificial Sequence
  Description of Artificial Sequence: Synthetic oligonucleotide
  Antisense strand to SEQ ID NO: 1417226
ugauccaccuguaacguuu

SEQ ID NO: 1417228 - RNA, 19 nt, Artificial Sequence
  Description of Artificial Sequence: Synthetic oligonucleotide
  Sense strand starting at position 1009 of SEQ ID NO: 1243445
cccggacucacugagaagu

SEQ ID NO: 1417229 - RNA, 19 nt, Artificial Sequence
  Description of Artificial Sequence: Synthetic oligonucleotide
  Antisense strand to SEQ ID NO: 1417228
acuucucagugaguccggg

SEQ ID NO: 1417230 - RNA, 19 nt, Artificial Sequence
  Description of Artificial Sequence: Synthetic oligonucleotide
  Sense strand starting at position 1112 of SEQ ID NO: 1243445
ggaggaauccaugggugca

SEQ ID NO: 1417231 - RNA, 19 nt, Artificial Sequence
  Description of Artificial Sequence: Synthetic oligonucleotide
  Antisense strand to SEQ ID NO: 1417230
ugcacccauggauuccucc

SEQ ID NO: 1417232 - RNA, 19 nt, Artificial Sequence
  Description of Artificial Sequence: Synthetic oligonucleotide
  Sense strand starting at position 1135 of SEQ ID NO: 1243445
cccggaguucugugcagca

SEQ ID NO: 1417233 - RNA, 19 nt, Artificial Sequence
  Description of Artificial Sequence: Synthetic oligonucleotide
  Antisense strand to SEQ ID NO: 1417232
ugcugcacagaacuccggg

SEQ ID NO: 1417234 - RNA, 19 nt, Artificial Sequence
  Description of Artificial Sequence: Synthetic oligonucleotide
  Sense strand starting at position 1528 of SEQ ID NO: 1243445
gccgcucggugucaaugau

SEQ ID NO: 1417235 - RNA, 19 nt, Artificial Sequence
  Description of Artificial Sequence: Synthetic oligonucleotide
  Antisense strand to SEQ ID NO: 1417234
aucauugacaccgagcggc

SEQ ID NO: 1417236 - RNA, 19 nt, Artificial Sequence
  Description of Artificial Sequence: Synthetic oligonucleotide
  Sense strand starting at position 1532 of SEQ ID NO: 1243445
cucggugucaaugauauac

SEQ ID NO: 1417237 - RNA, 19 nt, Artificial Sequence
  Description of Artificial Sequence: Synthetic oligonucleotide
  Antisense strand to SEQ ID NO: 1417236
guauaucauugacaccgag

SEQ ID NO: 1417238 - RNA, 19 nt, Artificial Sequence
  Description of Artificial Sequence: Synthetic oligonucleotide
  Sense strand starting at position 1534 of SEQ ID NO: 1243445
cggugucaaugauauacca

SEQ ID NO: 1417239 - RNA, 19 nt, Artificial Sequence
  Description of Artificial Sequence: Synthetic oligonucleotide
  Antisense strand to SEQ ID NO: 1417238
ugguauaucauugacaccg

SEQ ID NO: 1417240 - RNA, 19 nt, Artificial Sequence
  Description of Artificial Sequence: Synthetic oligonucleotide
  Sense strand starting at position 1549 of SEQ ID NO: 1243445
accagaaguccgugccgau

SEQ ID NO: 1417241 - RNA, 19 nt, Artificial Sequence
  Description of Artificial Sequence: Synthetic oligonucleotide
  Antisense strand to SEQ ID NO: 1417240
aucggcacggacuucuggu

SEQ ID NO: 1417242 - RNA, 19 nt, Artificial Sequence
  Description of Artificial Sequence: Synthetic oligonucleotide
  Sense strand starting at position 2528 of SEQ ID NO: 1243445
ggcugacuagaaugugaaa

SEQ ID NO: 1417243 - RNA, 19 nt, Artificial Sequence
  Description of Artificial Sequence: Synthetic oligonucleotide
  Antisense strand to SEQ ID NO: 1417242
uuucacauucuagucagcc

SEQ ID NO: 1417244 - RNA, 19 nt, Artificial Sequence
  Description of Artificial Sequence: Synthetic oligonucleotide
  Sense strand starting at position 2572 of SEQ ID NO: 1243445
ucucuaaagcacugaggua

SEQ ID NO: 1417245 - RNA, 19 nt, Artificial Sequence
  Description of Artificial Sequence: Synthetic oligonucleotide
  Antisense strand to SEQ ID NO: 1417244
uaccucagugcuuuagaga

SEQ ID NO: 1417246 - RNA, 19 nt, Artificial Sequence
  Description of Artificial Sequence: Synthetic oligonucleotide
  Sense strand starting at position 2589 of SEQ ID NO: 1243445
uaguccagguccucagaau

SEQ ID NO: 1417247 - RNA, 19 nt, Artificial Sequence
  Description of Artificial Sequence: Synthetic oligonucleotide
  Antisense strand to SEQ ID NO: 1417246
auucugaggaccuggacua

SEQ ID NO: 1417248 - RNA, 19 nt, Artificial Sequence
  Description of Artificial Sequence: Synthetic oligonucleotide
  Sense strand starting at position 3641 of SEQ ID NO: 1243445
agaaauacuuccgguaccu

SEQ ID NO: 1417249 - RNA, 19 nt, Artificial Sequence
  Description of Artificial Sequence: Synthetic oligonucleotide
  Antisense strand to SEQ ID NO: 1417248
agguaccggaaguauuucu

SEQ ID NO: 1417250 - RNA, 19 nt, Artificial Sequence
  Description of Artificial Sequence: Synthetic oligonucleotide
  Sense strand starting at position 3654 of SEQ ID NO: 1243445
guaccuucuaugugucuga

SEQ ID NO: 1417251 - RNA, 19 nt, Artificial Sequence
  Description of Artificial Sequence: Synthetic oligonucleotide
  Antisense strand to SEQ ID NO: 1417250
ucagacacauagaagguac

SEQ ID NO: 1417252 - RNA, 19 nt, Artificial Sequence
  Description of Artificial Sequence: Synthetic oligonucleotide
  Sense strand starting at position 3658 of SEQ ID NO: 1243445
cuucuaugugucugaugcu

SEQ ID NO: 1417253 - RNA, 19 nt, Artificial Sequence
  Description of Artificial Sequence: Synthetic oligonucleotide
  Antisense strand to SEQ ID NO: 1417252
agcaucagacacauagaag

SEQ ID NO: 1417254 - RNA, 19 nt, Artificial Sequence
  Description of Artificial Sequence: Synthetic oligonucleotide
  Sense strand starting at position 3659 of SEQ ID NO: 1243445
uucuaugugucugaugcua

SEQ ID NO: 1417255 - RNA, 19 nt, Artificial Sequence
  Description of Artificial Sequence: Synthetic oligonucleotide
  Antisense strand to SEQ ID NO: 1417254
uagcaucagacacauagaa

SEQ ID NO: 1417256 - RNA, 19 nt, Artificial Sequence
  Description of Artificial Sequence: Synthetic oligonucleotide
  Sense strand starting at position 3661 of SEQ ID NO: 1243445
cuaugugucugaugcuaua

SEQ ID NO: 1417257 - RNA, 19 nt, Artificial Sequence
  Description of Artificial Sequence: Synthetic oligonucleotide
  Antisense strand to SEQ ID NO: 1417256
uauagcaucagacacauag

SEQ ID NO: 1417258 - RNA, 19 nt, Artificial Sequence
  Description of Artificial Sequence: Synthetic oligonucleotide
  Sense strand starting at position 3671 of SEQ ID NO: 1243445
gaugcuauagucuauguua

SEQ ID NO: 1417259 - RNA, 19 nt, Artificial Sequence
  Description of Artificial Sequence: Synthetic oligonucleotide
  Antisense strand to SEQ ID NO: 1417258
uaacauagacuauagcauc

SEQ ID NO: 1417260 - RNA, 19 nt, Artificial Sequence
  Description of Artificial Sequence: Synthetic oligonucleotide
  Sense strand starting at position 3673 of SEQ ID NO: 1243445
ugcuauagucuauguuaag

SEQ ID NO: 1417261 - RNA, 19 nt, Artificial Sequence
  Description of Artificial Sequence: Synthetic oligonucleotide
  Antisense strand to SEQ ID NO: 1417260
cuuaacauagacuauagca

SEQ ID NO: 1417262 - RNA, 19 nt, Artificial Sequence
  Description of Artificial Sequence: Synthetic oligonucleotide
  Sense strand starting at position 3674 of SEQ ID NO: 1243445
gcuauagucuauguuaaga

SEQ ID NO: 1417263 - RNA, 19 nt, Artificial Sequence
  Description of Artificial Sequence: Synthetic oligonucleotide
  Antisense strand to SEQ ID NO: 1417262
ucuuaacauagacuauagc

SEQ ID NO: 1417264 - RNA, 19 nt, Artificial Sequence
  Description of Artificial Sequence: Synthetic oligonucleotide
  Sense strand starting at position 3790 of SEQ ID NO: 1243445
ccuauauuugcauggcuca

SEQ ID NO: 1417265 - RNA, 19 nt, Artificial Sequence
  Description of Artificial Sequence: Synthetic oligonucleotide
  Antisense strand to SEQ ID NO: 1417264
ugagccaugcaaauauagg

SEQ ID NO: 1417266 - RNA, 19 nt, Artificial Sequence
  Description of Artificial Sequence: Synthetic oligonucleotide
  Sense strand starting at position 3791 of SEQ ID NO: 1243445
cuauauuugcauggcucau

SEQ ID NO: 1417267 - RNA, 19 nt, Artificial Sequence
  Description of Artificial Sequence: Synthetic oligonucleotide
  Antisense strand to SEQ ID NO: 1417266
augagccaugcaaauauag

SEQ ID NO: 1417268 - RNA, 19 nt, Artificial Sequence
  Description of Artificial Sequence: Synthetic oligonucleotide
  Sense strand starting at position 3801 of SEQ ID NO: 1243445
auggcucauuaacagaaga

SEQ ID NO: 1417269 - RNA, 19 nt, Artificial Sequence
  Description of Artificial Sequence: Synthetic oligonucleotide
  Antisense strand to SEQ ID NO: 1417268
ucuucuguuaaugagccau

SEQ ID NO: 1417270 - RNA, 19 nt, Artificial Sequence
  Description of Artificial Sequence: Synthetic oligonucleotide
  Sense strand starting at position 3814 of SEQ ID NO: 1243445
agaagaggcuuccagauac

SEQ ID NO: 1417271 - RNA, 19 nt, Artificial Sequence
  Description of Artificial Sequence: Synthetic oligonucleotide
  Antisense strand to SEQ ID NO: 1417270
guaucuggaagccucuucu

SEQ ID NO: 1417272 - RNA, 19 nt, Artificial Sequence
  Description of Artificial Sequence: Synthetic oligonucleotide
  Sense strand starting at position 3840 of SEQ ID NO: 1243445
gaccaauccucaggaguua

SEQ ID NO: 1417273 - RNA, 19 nt, Artificial Sequence
  Description of Artificial Sequence: Synthetic oligonucleotide
  Antisense strand to SEQ ID NO: 1417272
uaacuccugaggauugguc

SEQ ID NO: 1417274 - RNA, 19 nt, Artificial Sequence
  Description of Artificial Sequence: Synthetic oligonucleotide
  Sense strand starting at position 3883 of SEQ ID NO: 1243445
ugaccuuauggcugaggaa

SEQ ID NO: 1417275 - RNA, 19 nt, Artificial Sequence
  Description of Artificial Sequence: Synthetic oligonucleotide
  Antisense strand to SEQ ID NO: 1417274
uuccucagccauaagguca

SEQ ID NO: 1417276 - RNA, 19 nt, Artificial Sequence
  Description of Artificial Sequence: Synthetic oligonucleotide
  Sense strand starting at position 3886 of SEQ ID NO: 1243445
ccuuauggcugaggaauca

SEQ ID NO: 1417277 - RNA, 19 nt, Artificial Sequence
  Description of Artificial Sequence: Synthetic oligonucleotide
  Antisense strand to SEQ ID NO: 1417276
ugauuccucagccauaagg

SEQ ID NO: 1417278 - RNA, 19 nt, Artificial Sequence
  Description of Artificial Sequence: Synthetic oligonucleotide
  Sense strand starting at position 3911 of SEQ ID NO: 1243445
uggcacuccugugauccau

SEQ ID NO: 1417279 - RNA, 19 nt, Artificial Sequence
  Description of Artificial Sequence: Synthetic oligonucleotide
  Antisense strand to SEQ ID NO: 1417278
auggaucacaggagugcca

SEQ ID NO: 1417280 - RNA, 19 nt, Artificial Sequence
  Description of Artificial Sequence: Synthetic oligonucleotide
  Sense strand starting at position 3919 of SEQ ID NO: 1243445
cugugauccauucguaagg

SEQ ID NO: 1417281 - RNA, 19 nt, Artificial Sequence
  Description of Artificial Sequence: Synthetic oligonucleotide
  Antisense strand to SEQ ID NO: 1417280
ccuuacgaauggaucacag

SEQ ID NO: 1417282 - RNA, 19 nt, Artificial Sequence
  Description of Artificial Sequence: Synthetic oligonucleotide
  Sense strand starting at position 3921 of SEQ ID NO: 1243445
gugauccauucguaaggga

SEQ ID NO: 1417283 - RNA, 19 nt, Artificial Sequence
  Description of Artificial Sequence: Synthetic oligonucleotide
  Antisense strand to SEQ ID NO: 1417282
ucccuuacgaauggaucac

SEQ ID NO: 1417284 - RNA, 19 nt, Artificial Sequence
  Description of Artificial Sequence: Synthetic oligonucleotide
  Sense strand starting at position 304 of SEQ ID NO: 1243446
cagggucuaguaugcaaau

SEQ ID NO: 1417285 - RNA, 19 nt, Artificial Sequence
  Description of Artificial Sequence: Synthetic oligonucleotide
  Antisense strand to SEQ ID NO: 1417284
auuugcauacuagacccug

SEQ ID NO: 1417286 - RNA, 19 nt, Artificial Sequence
  Description of Artificial Sequence: Synthetic oligonucleotide
  Sense strand starting at position 305 of SEQ ID NO: 1243446
agggucuaguaugcaaauu

SEQ ID NO: 1417287 - RNA, 19 nt, Artificial Sequence
  Description of Artificial Sequence: Synthetic oligonucleotide
  Antisense strand to SEQ ID NO: 1417286
aauuugcauacuagacccu

SEQ ID NO: 1417288 - RNA, 19 nt, Artificial Sequence
  Description of Artificial Sequence: Synthetic oligonucleotide
  Sense strand starting at position 306 of SEQ ID NO: 1243446
gggucuaguaugcaaauua

SEQ ID NO: 1417289 - RNA, 19 nt, Artificial Sequence
  Description of Artificial Sequence: Synthetic oligonucleotide
  Antisense strand to SEQ ID NO: 1417288
uaauuugcauacuagaccc

SEQ ID NO: 1417290 - RNA, 19 nt, Artificial Sequence
  Description of Artificial Sequence: Synthetic oligonucleotide
  Sense strand starting at position 882 of SEQ ID NO: 1243446
aacggcuaccucgaaaguu

SEQ ID NO: 1417291 - RNA, 19 nt, Artificial Sequence
  Description of Artificial Sequence: Synthetic oligonucleotide
  Antisense strand to SEQ ID NO: 1417290
aacuuucgagguagccguu

SEQ ID NO: 1417292 - RNA, 19 nt, Artificial Sequence
  Description of Artificial Sequence: Synthetic oligonucleotide
  Sense strand starting at position 1089 of SEQ ID NO: 1243446
acugaauaaugggaacuca

SEQ ID NO: 1417293 - RNA, 19 nt, Artificial Sequence
  Description of Artificial Sequence: Synthetic oligonucleotide
  Antisense strand to SEQ ID NO: 1417292
ugaguucccauuauucagu

SEQ ID NO: 1417294 - RNA, 19 nt, Artificial Sequence
  Description of Artificial Sequence: Synthetic oligonucleotide
  Sense strand starting at position 1112 of SEQ ID NO: 1243446
ggagucgaguacuuaguua

SEQ ID NO: 1417295 - RNA, 19 nt, Artificial Sequence
  Description of Artificial Sequence: Synthetic oligonucleotide
  Antisense strand to SEQ ID NO: 1417294
uaacuaaguacucgacucc

SEQ ID NO: 1417296 - RNA, 19 nt, Artificial Sequence
  Description of Artificial Sequence: Synthetic oligonucleotide
  Sense strand starting at position 1116 of SEQ ID NO: 1243446
ucgaguacuuaguuauuaa

SEQ ID NO: 1417297 - RNA, 19 nt, Artificial Sequence
  Description of Artificial Sequence: Synthetic oligonucleotide
  Antisense strand to SEQ ID NO: 1417296
uuaauaacuaaguacucga

SEQ ID NO: 1417298 - RNA, 19 nt, Artificial Sequence
  Description of Artificial Sequence: Synthetic oligonucleotide
  Sense strand starting at position 1242 of SEQ ID NO: 1243446
ucaauaauccuagggaggu

SEQ ID NO: 1417299 - RNA, 19 nt, Artificial Sequence
  Description of Artificial Sequence: Synthetic oligonucleotide
  Antisense strand to SEQ ID NO: 1417298
accucccuaggauuauuga

SEQ ID NO: 1417300 - RNA, 19 nt, Artificial Sequence
  Description of Artificial Sequence: Synthetic oligonucleotide
  Sense strand starting at position 1911 of SEQ ID NO: 1243446
gagguugacagcugaggaa

SEQ ID NO: 1417301 - RNA, 19 nt, Artificial Sequence
  Description of Artificial Sequence: Synthetic oligonucleotide
  Antisense strand to SEQ ID NO: 1417300
uuccucagcugucaaccuc

SEQ ID NO: 1417302 - RNA, 19 nt, Artificial Sequence
  Description of Artificial Sequence: Synthetic oligonucleotide
  Sense strand starting at position 1962 of SEQ ID NO: 1243446
acuggcuuggagugagaaa

SEQ ID NO: 1417303 - RNA, 19 nt, Artificial Sequence
  Description of Artificial Sequence: Synthetic oligonucleotide
  Antisense strand to SEQ ID NO: 1417302
uuucucacuccaagccagu

SEQ ID NO: 1417304 - RNA, 19 nt, Artificial Sequence
  Description of Artificial Sequence: Synthetic oligonucleotide
  Sense strand starting at position 2151 of SEQ ID NO: 1243446
cucaaaugcgaaugucaua

SEQ ID NO: 1417305 - RNA, 19 nt, Artificial Sequence
  Description of Artificial Sequence: Synthetic oligonucleotide
  Antisense strand to SEQ ID NO: 1417304
uaugacauucgcauuugag

SEQ ID NO: 1417306 - RNA, 19 nt, Artificial Sequence
  Description of Artificial Sequence: Synthetic oligonucleotide
  Sense strand starting at position 2164 of SEQ ID NO: 1243446
gucauaagccagugagauc

SEQ ID NO: 1417307 - RNA, 19 nt, Artificial Sequence
  Description of Artificial Sequence: Synthetic oligonucleotide
  Antisense strand to SEQ ID NO: 1417306
gaucucacuggcuuaugac

SEQ ID NO: 1417308 - RNA, 19 nt, Artificial Sequence
  Description of Artificial Sequence: Synthetic oligonucleotide
  Sense strand starting at position 2262 of SEQ ID NO: 1243446
ucgguuugcauggauccaa

SEQ ID NO: 1417309 - RNA, 19 nt, Artificial Sequence
  Description of Artificial Sequence: Synthetic oligonucleotide
  Antisense strand to SEQ ID NO: 1417308
uuggauccaugcaaaccga

SEQ ID NO: 1417310 - RNA, 19 nt, Artificial Sequence
  Description of Artificial Sequence: Synthetic oligonucleotide
  Sense strand starting at position 2312 of SEQ ID NO: 1243446
ccaaaucugcccuauagag

SEQ ID NO: 1417311 - RNA, 19 nt, Artificial Sequence
  Description of Artificial Sequence: Synthetic oligonucleotide
  Antisense strand to SEQ ID NO: 1417310
cucuauagggcagauuugg

SEQ ID NO: 1417312 - RNA, 19 nt, Artificial Sequence
  Description of Artificial Sequence: Synthetic oligonucleotide
  Sense strand starting at position 2319 of SEQ ID NO: 1243446
ugcccuauagaguaagguu

SEQ ID NO: 1417313 - RNA, 19 nt, Artificial Sequence
  Description of Artificial Sequence: Synthetic oligonucleotide
  Antisense strand to SEQ ID NO: 1417312
aaccuuacucuauagggca

SEQ ID NO: 1417314 - RNA, 19 nt, Artificial Sequence
  Description of Artificial Sequence: Synthetic oligonucleotide
  Sense strand starting at position 2327 of SEQ ID NO: 1243446
agaguaagguuucugaaua

SEQ ID NO: 1417315 - RNA, 19 nt, Artificial Sequence
  Description of Artificial Sequence: Synthetic oligonucleotide
  Antisense strand to SEQ ID NO: 1417314
uauucagaaaccuuacucu

SEQ ID NO: 1417316 - RNA, 19 nt, Artificial Sequence
  Description of Artificial Sequence: Synthetic oligonucleotide
  Sense strand starting at position 2337 of SEQ ID NO: 1243446
uucugaauaguaugcuauu

SEQ ID NO: 1417317 - RNA, 19 nt, Artificial Sequence
  Description of Artificial Sequence: Synthetic oligonucleotide
  Antisense strand to SEQ ID NO: 1417316
aauagcauacuauucagaa

SEQ ID NO: 1417318 - RNA, 19 nt, Artificial Sequence
  Description of Artificial Sequence: Synthetic oligonucleotide
  Sense strand starting at position 2367 of SEQ ID NO: 1243446
cggaauaauucuguuucug

SEQ ID NO: 1417319 - RNA, 19 nt, Artificial Sequence
  Description of Artificial Sequence: Synthetic oligonucleotide
  Antisense strand to SEQ ID NO: 1417318
cagaaacagaauuauuccg

SEQ ID NO: 1417320 - RNA, 19 nt, Artificial Sequence
  Description of Artificial Sequence: Synthetic oligonucleotide
  Sense strand starting at position 2369 of SEQ ID NO: 1243446
gaauaauucuguuucugag

SEQ ID NO: 1417321 - RNA, 19 nt, Artificial Sequence
  Description of Artificial Sequence: Synthetic oligonucleotide
  Antisense strand to SEQ ID NO: 1417320
cucagaaacagaauuauuc

SEQ ID NO: 1417322 - RNA, 19 nt, Artificial Sequence
  Description of Artificial Sequence: Synthetic oligonucleotide
  Sense strand starting at position 2381 of SEQ ID NO: 1243446
uucugagcuguggauugua

SEQ ID NO: 1417323 - RNA, 19 nt, Artificial Sequence
  Description of Artificial Sequence: Synthetic oligonucleotide
  Antisense strand to SEQ ID NO: 1417322
uacaauccacagcucagaa

SEQ ID NO: 1417324 - RNA, 19 nt, Artificial Sequence
  Description of Artificial Sequence: Synthetic oligonucleotide
  Sense strand starting at position 2384 of SEQ ID NO: 1243446
ugagcuguggauuguagaa

SEQ ID NO: 1417325 - RNA, 19 nt, Artificial Sequence
  Description of Artificial Sequence: Synthetic oligonucleotide
  Antisense strand to SEQ ID NO: 1417324
uucuacaauccacagcuca

SEQ ID NO: 1417326 - RNA, 19 nt, Artificial Sequence
  Description of Artificial Sequence: Synthetic oligonucleotide
  Sense strand starting at position 2555 of SEQ ID NO: 1243446
cuuacugugugacuaagua

SEQ ID NO: 1417327 - RNA, 19 nt, Artificial Sequence
  Description of Artificial Sequence: Synthetic oligonucleotide
  Antisense strand to SEQ ID NO: 1417326
uacuuagucacacaguaag

SEQ ID NO: 1417328 - RNA, 19 nt, Artificial Sequence
  Description of Artificial Sequence: Synthetic oligonucleotide
  Sense strand starting at position 3043 of SEQ ID NO: 1243446
aagcaaucacaggguugua

SEQ ID NO: 1417329 - RNA, 19 nt, Artificial Sequence
  Description of Artificial Sequence: Synthetic oligonucleotide
  Antisense strand to SEQ ID NO: 1417328
uacaacccugugauugcuu

SEQ ID NO: 1417330 - RNA, 19 nt, Artificial Sequence
  Description of Artificial Sequence: Synthetic oligonucleotide
  Sense strand starting at position 3063 of SEQ ID NO: 1243446
ugaggacuggugcaauagu

SEQ ID NO: 1417331 - RNA, 19 nt, Artificial Sequence
  Description of Artificial Sequence: Synthetic oligonucleotide
  Antisense strand to SEQ ID NO: 1417330
acuauugcaccaguccuca

SEQ ID NO: 1417332 - RNA, 19 nt, Artificial Sequence
  Description of Artificial Sequence: Synthetic oligonucleotide
  Sense strand starting at position 3087 of SEQ ID NO: 1243446
uguggcugucgagaacuua

SEQ ID NO: 1417333 - RNA, 19 nt, Artificial Sequence
  Description of Artificial Sequence: Synthetic oligonucleotide
  Antisense strand to SEQ ID NO: 1417332
uaaguucucgacagccaca

SEQ ID NO: 1417334 - RNA, 19 nt, Artificial Sequence
  Description of Artificial Sequence: Synthetic oligonucleotide
  Sense strand starting at position 3109 of SEQ ID NO: 1243446
ccuauugaggcacagagua

SEQ ID NO: 1417335 - RNA, 19 nt, Artificial Sequence
  Description of Artificial Sequence: Synthetic oligonucleotide
  Antisense strand to SEQ ID NO: 1417334
uacucugugccucaauagg

SEQ ID NO: 1417336 - RNA, 19 nt, Artificial Sequence
  Description of Artificial Sequence: Synthetic oligonucleotide
  Sense strand starting at position 3139 of SEQ ID NO: 1243446
auauuugcuugggaugaug

SEQ ID NO: 1417337 - RNA, 19 nt, Artificial Sequence
  Description of Artificial Sequence: Synthetic oligonucleotide
  Antisense strand to SEQ ID NO: 1417336
caucaucccaagcaaauau

SEQ ID NO: 1417338 - RNA, 19 nt, Artificial Sequence
  Description of Artificial Sequence: Synthetic oligonucleotide
  Sense strand starting at position 3142 of SEQ ID NO: 1243446
uuugcuugggaugaugauu

SEQ ID NO: 1417339 - RNA, 19 nt, Artificial Sequence
  Description of Artificial Sequence: Synthetic oligonucleotide
  Antisense strand to SEQ ID NO: 1417338
aaucaucaucccaagcaaa

SEQ ID NO: 1417340 - RNA, 19 nt, Artificial Sequence
  Description of Artificial Sequence: Synthetic oligonucleotide
  Sense strand starting at position 3151 of SEQ ID NO: 1243446
gaugaugauuuaugaugau

SEQ ID NO: 1417341 - RNA, 19 nt, Artificial Sequence
  Description of Artificial Sequence: Synthetic oligonucleotide
  Antisense strand to SEQ ID NO: 1417340
aucaucauaaaucaucauc

SEQ ID NO: 1417342 - RNA, 19 nt, Artificial Sequence
  Description of Artificial Sequence: Synthetic oligonucleotide
  Sense strand starting at position 3154 of SEQ ID NO: 1243446
gaugauuuaugaugaugau

SEQ ID NO: 1417343 - RNA, 19 nt, Artificial Sequence
  Description of Artificial Sequence: Synthetic oligonucleotide
  Antisense strand to SEQ ID NO: 1417342
aucaucaucauaaaucauc

SEQ ID NO: 1417344 - RNA, 19 nt, Artificial Sequence
  Description of Artificial Sequence: Synthetic oligonucleotide
  Sense strand starting at position 3157 of SEQ ID NO: 1243446
gauuuaugaugaugaucac

SEQ ID NO: 1417345 - RNA, 19 nt, Artificial Sequence
  Description of Artificial Sequence: Synthetic oligonucleotide
  Antisense strand to SEQ ID NO: 1417344
gugaucaucaucauaaauc

SEQ ID NO: 1417346 - RNA, 19 nt, Artificial Sequence
  Description of Artificial Sequence: Synthetic oligonucleotide
  Sense strand starting at position 3169 of SEQ ID NO: 1243446
ugaucacgacaaugauaug

SEQ ID NO: 1417347 - RNA, 19 nt, Artificial Sequence
  Description of Artificial Sequence: Synthetic oligonucleotide
  Antisense strand to SEQ ID NO: 1417346
cauaucauugucgugauca

SEQ ID NO: 1417348 - RNA, 19 nt, Artificial Sequence
  Description of Artificial Sequence: Synthetic oligonucleotide
  Sense strand starting at position 3205 of SEQ ID NO: 1243446
gcuguaauuccacaauagc

SEQ ID NO: 1417349 - RNA, 19 nt, Artificial Sequence
  Description of Artificial Sequence: Synthetic oligonucleotide
  Antisense strand to SEQ ID NO: 1417348
gcuauuguggaauuacagc

SEQ ID NO: 1417350 - RNA, 19 nt, Artificial Sequence
  Description of Artificial Sequence: Synthetic oligonucleotide
  Sense strand starting at position 3208 of SEQ ID NO: 1243446
guaauuccacaauagcaga

SEQ ID NO: 1417351 - RNA, 19 nt, Artificial Sequence
  Description of Artificial Sequence: Synthetic oligonucleotide
  Antisense strand to SEQ ID NO: 1417350
ucugcuauuguggaauuac

SEQ ID NO: 1417352 - RNA, 19 nt, Artificial Sequence
  Description of Artificial Sequence: Synthetic oligonucleotide
  Sense strand starting at position 3418 of SEQ ID NO: 1243446
aauggaaguugcuuuggaa

SEQ ID NO: 1417353 - RNA, 19 nt, Artificial Sequence
  Description of Artificial Sequence: Synthetic oligonucleotide
  Antisense strand to SEQ ID NO: 1417352
uuccaaagcaacuuccauu

SEQ ID NO: 1417354 - RNA, 19 nt, Artificial Sequence
  Description of Artificial Sequence: Synthetic oligonucleotide
  Sense strand starting at position 3445 of SEQ ID NO: 1243446
uaggguuuccacugggauu

SEQ ID NO: 1417355 - RNA, 19 nt, Artificial Sequence
  Description of Artificial Sequence: Synthetic oligonucleotide
  Antisense strand to SEQ ID NO: 1417354
aaucccaguggaaacccua

SEQ ID NO: 1417356 - RNA, 19 nt, Artificial Sequence
  Description of Artificial Sequence: Synthetic oligonucleotide
  Sense strand starting at position 3558 of SEQ ID NO: 1243446
cuuugugugauagaugcuu

SEQ ID NO: 1417357 - RNA, 19 nt, Artificial Sequence
  Description of Artificial Sequence: Synthetic oligonucleotide
  Antisense strand to SEQ ID NO: 1417356
aagcaucuaucacacaaag

SEQ ID NO: 1417358 - RNA, 19 nt, Artificial Sequence
  Description of Artificial Sequence: Synthetic oligonucleotide
  Sense strand starting at position 3727 of SEQ ID NO: 1243446
cugaaugucuguuccucua

SEQ ID NO: 1417359 - RNA, 19 nt, Artificial Sequence
  Description of Artificial Sequence: Synthetic oligonucleotide
  Antisense strand to SEQ ID NO: 1417358
uagaggaacagacauucag

SEQ ID NO: 1417360 - RNA, 19 nt, Artificial Sequence
  Description of Artificial Sequence: Synthetic oligonucleotide
  Sense strand starting at position 3761 of SEQ ID NO: 1243446
augugaugggauuaggcau

SEQ ID NO: 1417361 - RNA, 19 nt, Artificial Sequence
  Description of Artificial Sequence: Synthetic oligonucleotide
  Antisense strand to SEQ ID NO: 1417360
augccuaaucccaucacau

SEQ ID NO: 1417362 - RNA, 19 nt, Artificial Sequence
  Description of Artificial Sequence: Synthetic oligonucleotide
  Sense strand starting at position 3847 of SEQ ID NO: 1243446
aagagaucccaguggcuca

SEQ ID NO: 1417363 - RNA, 19 nt, Artificial Sequence
  Description of Artificial Sequence: Synthetic oligonucleotide
  Antisense strand to SEQ ID NO: 1417362
ugagccacugggaucucuu

SEQ ID NO: 1417364 - RNA, 19 nt, Artificial Sequence
  Description of Artificial Sequence: Synthetic oligonucleotide
  Sense strand starting at position 62 of SEQ ID NO: 1243447
augugugaaccuuagauca

SEQ ID NO: 1417365 - RNA, 19 nt, Artificial Sequence
  Description of Artificial Sequence: Synthetic oligonucleotide
  Antisense strand to SEQ ID NO: 1417364
ugaucuaagguucacacau

SEQ ID NO: 1417366 - RNA, 19 nt, Artificial Sequence
  Description of Artificial Sequence: Synthetic oligonucleotide
  Sense strand starting at position 155 of SEQ ID NO: 1243447
agguaacauuauucuauga

SEQ ID NO: 1417367 - RNA, 19 nt, Artificial Sequence
  Description of Artificial Sequence: Synthetic oligonucleotide
  Antisense strand to SEQ ID NO: 1417366
ucauagaauaauguuaccu

SEQ ID NO: 1417368 - RNA, 19 nt, Artificial Sequence
  Description of Artificial Sequence: Synthetic oligonucleotide
  Sense strand starting at position 178 of SEQ ID NO: 1243447
caguuucuuggaugugaua

SEQ ID NO: 1417369 - RNA, 19 nt, Artificial Sequence
  Description of Artificial Sequence: Synthetic oligonucleotide
  Antisense strand to SEQ ID NO: 1417368
uaucacauccaagaaacug

SEQ ID NO: 1417370 - RNA, 19 nt, Artificial Sequence
  Description of Artificial Sequence: Synthetic oligonucleotide
  Sense strand starting at position 180 of SEQ ID NO: 1243447
guuucuuggaugugauaug

SEQ ID NO: 1417371 - RNA, 19 nt, Artificial Sequence
  Description of Artificial Sequence: Synthetic oligonucleotide
  Antisense strand to SEQ ID NO: 1417370
cauaucacauccaagaaac

SEQ ID NO: 1417372 - RNA, 19 nt, Artificial Sequence
  Description of Artificial Sequence: Synthetic oligonucleotide
  Sense strand starting at position 225 of SEQ ID NO: 1243447
gaagauacauguuaagauu

SEQ ID NO: 1417373 - RNA, 19 nt, Artificial Sequence
  Description of Artificial Sequence: Synthetic oligonucleotide
  Antisense strand to SEQ ID NO: 1417372
aaucuuaacauguaucuuc

SEQ ID NO: 1417374 - RNA, 19 nt, Artificial Sequence
  Description of Artificial Sequence: Synthetic oligonucleotide
  Sense strand starting at position 233 of SEQ ID NO: 1243447
auguuaagauuaucaggca

SEQ ID NO: 1417375 - RNA, 19 nt, Artificial Sequence
  Description of Artificial Sequence: Synthetic oligonucleotide
  Antisense strand to SEQ ID NO: 1417374
ugccugauaaucuuaacau

SEQ ID NO: 1417376 - RNA, 19 nt, Artificial Sequence
  Description of Artificial Sequence: Synthetic oligonucleotide
  Sense strand starting at position 249 of SEQ ID NO: 1243447
gcaucaagcaaguguuaug

SEQ ID NO: 1417377 - RNA, 19 nt, Artificial Sequence
  Description of Artificial Sequence: Synthetic oligonucleotide
  Antisense strand to SEQ ID NO: 1417376
cauaacacuugcuugaugc

SEQ ID NO: 1417378 - RNA, 19 nt, Artificial Sequence
  Description of Artificial Sequence: Synthetic oligonucleotide
  Sense strand starting at position 305 of SEQ ID NO: 1243447
ugggacaugugaccuacau

SEQ ID NO: 1417379 - RNA, 19 nt, Artificial Sequence
  Description of Artificial Sequence: Synthetic oligonucleotide
  Antisense strand to SEQ ID NO: 1417378
auguaggucacauguccca

SEQ ID NO: 1417380 - RNA, 19 nt, Artificial Sequence
  Description of Artificial Sequence: Synthetic oligonucleotide
  Sense strand starting at position 313 of SEQ ID NO: 1243447
gugaccuacaucuaagugu

SEQ ID NO: 1417381 - RNA, 19 nt, Artificial Sequence
  Description of Artificial Sequence: Synthetic oligonucleotide
  Antisense strand to SEQ ID NO: 1417380
acacuuagauguaggucac

SEQ ID NO: 1417382 - RNA, 19 nt, Artificial Sequence
  Description of Artificial Sequence: Synthetic oligonucleotide
  Sense strand starting at position 316 of SEQ ID NO: 1243447
accuacaucuaagugugau

SEQ ID NO: 1417383 - RNA, 19 nt, Artificial Sequence
  Description of Artificial Sequence: Synthetic oligonucleotide
  Antisense strand to SEQ ID NO: 1417382
aucacacuuagauguaggu

SEQ ID NO: 1417384 - RNA, 19 nt, Artificial Sequence
  Description of Artificial Sequence: Synthetic oligonucleotide
  Sense strand starting at position 326 of SEQ ID NO: 1243447
aagugugauacguauguaa

SEQ ID NO: 1417385 - RNA, 19 nt, Artificial Sequence
  Description of Artificial Sequence: Synthetic oligonucleotide
  Antisense strand to SEQ ID NO: 1417384
uuacauacguaucacacuu

SEQ ID NO: 1417386 - RNA, 19 nt, Artificial Sequence
  Description of Artificial Sequence: Synthetic oligonucleotide
  Sense strand starting at position 328 of SEQ ID NO: 1243447
gugugauacguauguaaua

SEQ ID NO: 1417387 - RNA, 19 nt, Artificial Sequence
  Description of Artificial Sequence: Synthetic oligonucleotide
  Antisense strand to SEQ ID NO: 1417386
uauuacauacguaucacac

SEQ ID NO: 1417388 - RNA, 19 nt, Artificial Sequence
  Description of Artificial Sequence: Synthetic oligonucleotide
  Sense strand starting at position 329 of SEQ ID NO: 1243447
ugugauacguauguaauac

SEQ ID NO: 1417389 - RNA, 19 nt, Artificial Sequence
  Description of Artificial Sequence: Synthetic oligonucleotide
  Antisense strand to SEQ ID NO: 1417388
guauuacauacguaucaca

SEQ ID NO: 1417390 - RNA, 19 nt, Artificial Sequence
  Description of Artificial Sequence: Synthetic oligonucleotide
  Sense strand starting at position 330 of SEQ ID NO: 1243447
gugauacguauguaauaca

SEQ ID NO: 1417391 - RNA, 19 nt, Artificial Sequence
  Description of Artificial Sequence: Synthetic oligonucleotide
  Antisense strand to SEQ ID NO: 1417390
uguauuacauacguaucac

SEQ ID NO: 1417392 - RNA, 19 nt, Artificial Sequence
  Description of Artificial Sequence: Synthetic oligonucleotide
  Sense strand starting at position 337 of SEQ ID NO: 1243447
guauguaauacaugugguu

SEQ ID NO: 1417393 - RNA, 19 nt, Artificial Sequence
  Description of Artificial Sequence: Synthetic oligonucleotide
  Antisense strand to SEQ ID NO: 1417392
aaccacauguauuacauac

SEQ ID NO: 1417394 - RNA, 19 nt, Artificial Sequence
  Description of Artificial Sequence: Synthetic oligonucleotide
  Sense strand starting at position 339 of SEQ ID NO: 1243447
auguaauacaugugguuau

SEQ ID NO: 1417395 - RNA, 19 nt, Artificial Sequence
  Description of Artificial Sequence: Synthetic oligonucleotide
  Antisense strand to SEQ ID NO: 1417394
auaaccacauguauuacau

SEQ ID NO: 1417396 - RNA, 19 nt, Artificial Sequence
  Description of Artificial Sequence: Synthetic oligonucleotide
  Sense strand starting at position 432 of SEQ ID NO: 1243447
gucuaaguaaaggguacau

SEQ ID NO: 1417397 - RNA, 19 nt, Artificial Sequence
  Description of Artificial Sequence: Synthetic oligonucleotide
  Antisense strand to SEQ ID NO: 1417396
auguacccuuuacuuagac

SEQ ID NO: 1417398 - RNA, 19 nt, Artificial Sequence
  Description of Artificial Sequence: Synthetic oligonucleotide
  Sense strand starting at position 457 of SEQ ID NO: 1243447
uuguuauacuguucucuca

SEQ ID NO: 1417399 - RNA, 19 nt, Artificial Sequence
  Description of Artificial Sequence: Synthetic oligonucleotide
  Antisense strand to SEQ ID NO: 1417398
ugagagaacaguauaacaa

SEQ ID NO: 1417400 - RNA, 19 nt, Artificial Sequence
  Description of Artificial Sequence: Synthetic oligonucleotide
  Sense strand starting at position 459 of SEQ ID NO: 1243447
guuauacuguucucucaac

SEQ ID NO: 1417401 - RNA, 19 nt, Artificial Sequence
  Description of Artificial Sequence: Synthetic oligonucleotide
  Antisense strand to SEQ ID NO: 1417400
guugagagaacaguauaac

SEQ ID NO: 1417402 - RNA, 19 nt, Artificial Sequence
  Description of Artificial Sequence: Synthetic oligonucleotide
  Sense strand starting at position 1087 of SEQ ID NO: 1243447
ucuuccuggcauuagaauu

SEQ ID NO: 1417403 - RNA, 19 nt, Artificial Sequence
  Description of Artificial Sequence: Synthetic oligonucleotide
  Antisense strand to SEQ ID NO: 1417402
aauucuaaugccaggaaga

SEQ ID NO: 1417404 - RNA, 19 nt, Artificial Sequence
  Description of Artificial Sequence: Synthetic oligonucleotide
  Sense strand starting at position 1226 of SEQ ID NO: 1243447
gggaaagauuccuagaaag

SEQ ID NO: 1417405 - RNA, 19 nt, Artificial Sequence
  Description of Artificial Sequence: Synthetic oligonucleotide
  Antisense strand to SEQ ID NO: 1417404
cuuucuaggaaucuuuccc

SEQ ID NO: 1417406 - RNA, 19 nt, Artificial Sequence
  Description of Artificial Sequence: Synthetic oligonucleotide
  Sense strand starting at position 2386 of SEQ ID NO: 1243447
auuuaaagcugauaguaga

SEQ ID NO: 1417407 - RNA, 19 nt, Artificial Sequence
  Description of Artificial Sequence: Synthetic oligonucleotide
  Antisense strand to SEQ ID NO: 1417406
ucuacuaucagcuuuaaau

SEQ ID NO: 1417408 - RNA, 19 nt, Artificial Sequence
  Description of Artificial Sequence: Synthetic oligonucleotide
  Sense strand starting at position 2450 of SEQ ID NO: 1243447
cuauguagccucuauagag

SEQ ID NO: 1417409 - RNA, 19 nt, Artificial Sequence
  Description of Artificial Sequence: Synthetic oligonucleotide
  Antisense strand to SEQ ID NO: 1417408
cucuauagaggcuacauag

SEQ ID NO: 1417410 - RNA, 19 nt, Artificial Sequence
  Description of Artificial Sequence: Synthetic oligonucleotide
  Sense strand starting at position 2459 of SEQ ID NO: 1243447
cucuauagagcucgacuua

SEQ ID NO: 1417411 - RNA, 19 nt, Artificial Sequence
  Description of Artificial Sequence: Synthetic oligonucleotide
  Antisense strand to SEQ ID NO: 1417410
uaagucgagcucuauagag

SEQ ID NO: 1417412 - RNA, 19 nt, Artificial Sequence
  Description of Artificial Sequence: Synthetic oligonucleotide
  Sense strand starting at position 2501 of SEQ ID NO: 1243447
agagauucgguucagagca

SEQ ID NO: 1417413 - RNA, 19 nt, Artificial Sequence
  Description of Artificial Sequence: Synthetic oligonucleotide
  Antisense strand to SEQ ID NO: 1417412
ugcucugaaccgaaucucu

SEQ ID NO: 1417414 - RNA, 19 nt, Artificial Sequence
  Description of Artificial Sequence: Synthetic oligonucleotide
  Sense strand starting at position 2722 of SEQ ID NO: 1243447
gcgggauuucaucguguua

SEQ ID NO: 1417415 - RNA, 19 nt, Artificial Sequence
  Description of Artificial Sequence: Synthetic oligonucleotide
  Antisense strand to SEQ ID NO: 1417414
uaacacgaugaaaucccgc

SEQ ID NO: 1417416 - RNA, 19 nt, Artificial Sequence
  Description of Artificial Sequence: Synthetic oligonucleotide
  Sense strand starting at position 2893 of SEQ ID NO: 1243447
ugggcaauuuauuaagaac

SEQ ID NO: 1417417 - RNA, 19 nt, Artificial Sequence
  Description of Artificial Sequence: Synthetic oligonucleotide
  Antisense strand to SEQ ID NO: 1417416
guucuuaauaaauugccca

SEQ ID NO: 1417418 - RNA, 19 nt, Artificial Sequence
  Description of Artificial Sequence: Synthetic oligonucleotide
  Sense strand starting at position 2989 of SEQ ID NO: 1243447
gcccguuccucacugauag

SEQ ID NO: 1417419 - RNA, 19 nt, Artificial Sequence
  Description of Artificial Sequence: Synthetic oligonucleotide
  Antisense strand to SEQ ID NO: 1417418
cuaucagugaggaacgggc

SEQ ID NO: 1417420 - RNA, 19 nt, Artificial Sequence
  Description of Artificial Sequence: Synthetic oligonucleotide
  Sense strand starting at position 3102 of SEQ ID NO: 1243447
cugacuuaaucgucuccua

SEQ ID NO: 1417421 - RNA, 19 nt, Artificial Sequence
  Description of Artificial Sequence: Synthetic oligonucleotide
  Antisense strand to SEQ ID NO: 1417420
uaggagacgauuaagucag

SEQ ID NO: 1417422 - RNA, 19 nt, Artificial Sequence
  Description of Artificial Sequence: Synthetic oligonucleotide
  Sense strand starting at position 3105 of SEQ ID NO: 1243447
acuuaaucgucuccuaaag

SEQ ID NO: 1417423 - RNA, 19 nt, Artificial Sequence
  Description of Artificial Sequence: Synthetic oligonucleotide
  Antisense strand to SEQ ID NO: 1417422
cuuuaggagacgauuaagu

SEQ ID NO: 1417424 - RNA, 19 nt, Artificial Sequence
  Description of Artificial Sequence: Synthetic oligonucleotide
  Sense strand starting at position 3143 of SEQ ID NO: 1243447
ucgcauucccacgaaguuu

SEQ ID NO: 1417425 - RNA, 19 nt, Artificial Sequence
  Description of Artificial Sequence: Synthetic oligonucleotide
  Antisense strand to SEQ ID NO: 1417424
aaacuucgugggaaugcga

SEQ ID NO: 1417426 - RNA, 19 nt, Artificial Sequence
  Description of Artificial Sequence: Synthetic oligonucleotide
  Sense strand starting at position 3200 of SEQ ID NO: 1243447
agccauuaacaauaguguu

SEQ ID NO: 1417427 - RNA, 19 nt, Artificial Sequence
  Description of Artificial Sequence: Synthetic oligonucleotide
  Antisense strand to SEQ ID NO: 1417426
aacacuauuguuaauggcu

SEQ ID NO: 1417428 - RNA, 19 nt, Artificial Sequence
  Description of Artificial Sequence: Synthetic oligonucleotide
  Sense strand starting at position 3206 of SEQ ID NO: 1243447
uaacaauaguguucuggaa

SEQ ID NO: 1417429 - RNA, 19 nt, Artificial Sequence
  Description of Artificial Sequence: Synthetic oligonucleotide
  Antisense strand to SEQ ID NO: 1417428
uuccagaacacuauuguua

SEQ ID NO: 1417430 - RNA, 19 nt, Artificial Sequence
  Description of Artificial Sequence: Synthetic oligonucleotide
  Sense strand starting at position 3214 of SEQ ID NO: 1243447
guguucuggaagggaaguu

SEQ ID NO: 1417431 - RNA, 19 nt, Artificial Sequence
  Description of Artificial Sequence: Synthetic oligonucleotide
  Antisense strand to SEQ ID NO: 1417430
aacuucccuuccagaacac

SEQ ID NO: 1417432 - RNA, 19 nt, Artificial Sequence
  Description of Artificial Sequence: Synthetic oligonucleotide
  Sense strand starting at position 3223 of SEQ ID NO: 1243447
aagggaaguuaccaaggau

SEQ ID NO: 1417433 - RNA, 19 nt, Artificial Sequence
  Description of Artificial Sequence: Synthetic oligonucleotide
  Antisense strand to SEQ ID NO: 1417432
auccuugguaacuucccuu

SEQ ID NO: 1417434 - RNA, 19 nt, Artificial Sequence
  Description of Artificial Sequence: Synthetic oligonucleotide
  Sense strand starting at position 3242 of SEQ ID NO: 1243447
aaguaauguccacaagguu

SEQ ID NO: 1417435 - RNA, 19 nt, Artificial Sequence
  Description of Artificial Sequence: Synthetic oligonucleotide
  Antisense strand to SEQ ID NO: 1417434
aaccuuguggacauuacuu

SEQ ID NO: 1417436 - RNA, 19 nt, Artificial Sequence
  Description of Artificial Sequence: Synthetic oligonucleotide
  Sense strand starting at position 3273 of SEQ ID NO: 1243447
gaggcuugugacgaauaau

SEQ ID NO: 1417437 - RNA, 19 nt, Artificial Sequence
  Description of Artificial Sequence: Synthetic oligonucleotide
  Antisense strand to SEQ ID NO: 1417436
auuauucgucacaagccuc

SEQ ID NO: 1417438 - RNA, 19 nt, Artificial Sequence
  Description of Artificial Sequence: Synthetic oligonucleotide
  Sense strand starting at position 3276 of SEQ ID NO: 1243447
gcuugugacgaauaauaau

SEQ ID NO: 1417439 - RNA, 19 nt, Artificial Sequence
  Description of Artificial Sequence: Synthetic oligonucleotide
  Antisense strand to SEQ ID NO: 1417438
auuauuauucgucacaagc

SEQ ID NO: 1417440 - RNA, 19 nt, Artificial Sequence
  Description of Artificial Sequence: Synthetic oligonucleotide
  Sense strand starting at position 3590 of SEQ ID NO: 1243447
acugcaccugacugguaaa

SEQ ID NO: 1417441 - RNA, 19 nt, Artificial Sequence
  Description of Artificial Sequence: Synthetic oligonucleotide
  Antisense strand to SEQ ID NO: 1417440
uuuaccagucaggugcagu

SEQ ID NO: 1417442 - RNA, 19 nt, Artificial Sequence
  Description of Artificial Sequence: Synthetic oligonucleotide
  Sense strand starting at position 3593 of SEQ ID NO: 1243447
gcaccugacugguaaauuu

SEQ ID NO: 1417443 - RNA, 19 nt, Artificial Sequence
  Description of Artificial Sequence: Synthetic oligonucleotide
  Antisense strand to SEQ ID NO: 1417442
aaauuuaccagucaggugc

SEQ ID NO: 1417444 - RNA, 19 nt, Artificial Sequence
  Description of Artificial Sequence: Synthetic oligonucleotide
  Sense strand starting at position 5 of SEQ ID NO: 1243448
ggacucuaugggugaccuu

SEQ ID NO: 1417445 - RNA, 19 nt, Artificial Sequence
  Description of Artificial Sequence: Synthetic oligonucleotide
  Antisense strand to SEQ ID NO: 1417444
aaggucacccauagagucc

SEQ ID NO: 1417446 - RNA, 19 nt, Artificial Sequence
  Description of Artificial Sequence: Synthetic oligonucleotide
  Sense strand starting at position 24 of SEQ ID NO: 1243448
ggcauagguucuucuaaga

SEQ ID NO: 1417447 - RNA, 19 nt, Artificial Sequence
  Description of Artificial Sequence: Synthetic oligonucleotide
  Antisense strand to SEQ ID NO: 1417446
ucuuagaagaaccuaugcc

SEQ ID NO: 1417448 - RNA, 19 nt, Artificial Sequence
  Description of Artificial Sequence: Synthetic oligonucleotide
  Sense strand starting at position 67 of SEQ ID NO: 1243448
gccauuaucugacugaaug

SEQ ID NO: 1417449 - RNA, 19 nt, Artificial Sequence
  Description of Artificial Sequence: Synthetic oligonucleotide
  Antisense strand to SEQ ID NO: 1417448
cauucagucagauaauggc

SEQ ID NO: 1417450 - RNA, 19 nt, Artificial Sequence
  Description of Artificial Sequence: Synthetic oligonucleotide
  Sense strand starting at position 325 of SEQ ID NO: 1243448
cccaaacaccugugugaaa

SEQ ID NO: 1417451 - RNA, 19 nt, Artificial Sequence
  Description of Artificial Sequence: Synthetic oligonucleotide
  Antisense strand to SEQ ID NO: 1417450
uuucacacagguguuuggg

SEQ ID NO: 1417452 - RNA, 19 nt, Artificial Sequence
  Description of Artificial Sequence: Synthetic oligonucleotide
  Sense strand starting at position 408 of SEQ ID NO: 1243448
gcuggauacgcacaaacau

SEQ ID NO: 1417453 - RNA, 19 nt, Artificial Sequence
  Description of Artificial Sequence: Synthetic oligonucleotide
  Antisense strand to SEQ ID NO: 1417452
auguuugugcguauccagc

SEQ ID NO: 1417454 - RNA, 19 nt, Artificial Sequence
  Description of Artificial Sequence: Synthetic oligonucleotide
  Sense strand starting at position 462 of SEQ ID NO: 1243448
ucacaucugccaugggaca

SEQ ID NO: 1417455 - RNA, 19 nt, Artificial Sequence
  Description of Artificial Sequence: Synthetic oligonucleotide
  Antisense strand to SEQ ID NO: 1417454
ugucccauggcagauguga

SEQ ID NO: 1417456 - RNA, 19 nt, Artificial Sequence
  Description of Artificial Sequence: Synthetic oligonucleotide
  Sense strand starting at position 561 of SEQ ID NO: 1243448
caaccagucuccguaagaa

SEQ ID NO: 1417457 - RNA, 19 nt, Artificial Sequence
  Description of Artificial Sequence: Synthetic oligonucleotide
  Antisense strand to SEQ ID NO: 1417456
uucuuacggagacugguug

SEQ ID NO: 1417458 - RNA, 19 nt, Artificial Sequence
  Description of Artificial Sequence: Synthetic oligonucleotide
  Sense strand starting at position 742 of SEQ ID NO: 1243448
gaagguucugauggcauca

SEQ ID NO: 1417459 - RNA, 19 nt, Artificial Sequence
  Description of Artificial Sequence: Synthetic oligonucleotide
  Antisense strand to SEQ ID NO: 1417458
ugaugccaucagaaccuuc

SEQ ID NO: 1417460 - RNA, 19 nt, Artificial Sequence
  Description of Artificial Sequence: Synthetic oligonucleotide
  Sense strand starting at position 785 of SEQ ID NO: 1243448
ucagucucugcguuuggua

SEQ ID NO: 1417461 - RNA, 19 nt, Artificial Sequence
  Description of Artificial Sequence: Synthetic oligonucleotide
  Antisense strand to SEQ ID NO: 1417460
uaccaaacgcagagacuga

SEQ ID NO: 1417462 - RNA, 19 nt, Artificial Sequence
  Description of Artificial Sequence: Synthetic oligonucleotide
  Sense strand starting at position 987 of SEQ ID NO: 1243448
cauuaaucacacggugaac

SEQ ID NO: 1417463 - RNA, 19 nt, Artificial Sequence
  Description of Artificial Sequence: Synthetic oligonucleotide
  Antisense strand to SEQ ID NO: 1417462
guucaccgugugauuaaug

SEQ ID NO: 1417464 - RNA, 19 nt, Artificial Sequence
  Description of Artificial Sequence: Synthetic oligonucleotide
  Sense strand starting at position 989 of SEQ ID NO: 1243448
uuaaucacacggugaacau

SEQ ID NO: 1417465 - RNA, 19 nt, Artificial Sequence
  Description of Artificial Sequence: Synthetic oligonucleotide
  Antisense strand to SEQ ID NO: 1417464
auguucaccgugugauuaa

SEQ ID NO: 1417466 - RNA, 19 nt, Artificial Sequence
  Description of Artificial Sequence: Synthetic oligonucleotide
  Sense strand starting at position 1075 of SEQ ID NO: 1243448
aggguaaagccagaugcua

SEQ ID NO: 1417467 - RNA, 19 nt, Artificial Sequence
  Description of Artificial Sequence: Synthetic oligonucleotide
  Antisense strand to SEQ ID NO: 1417466
uagcaucuggcuuuacccu

SEQ ID NO: 1417468 - RNA, 19 nt, Artificial Sequence
  Description of Artificial Sequence: Synthetic oligonucleotide
  Sense strand starting at position 1168 of SEQ ID NO: 1243448
cagagaggguaagauauuu

SEQ ID NO: 1417469 - RNA, 19 nt, Artificial Sequence
  Description of Artificial Sequence: Synthetic oligonucleotide
  Antisense strand to SEQ ID NO: 1417468
aaauaucuuacccucucug

SEQ ID NO: 1417470 - RNA, 19 nt, Artificial Sequence
  Description of Artificial Sequence: Synthetic oligonucleotide
  Sense strand starting at position 1260 of SEQ ID NO: 1243448
ggaggugcggccgucauua

SEQ ID NO: 1417471 - RNA, 19 nt, Artificial Sequence
  Description of Artificial Sequence: Synthetic oligonucleotide
  Antisense strand to SEQ ID NO: 1417470
uaaugacggccgcaccucc

SEQ ID NO: 1417472 - RNA, 19 nt, Artificial Sequence
  Description of Artificial Sequence: Synthetic oligonucleotide
  Sense strand starting at position 1361 of SEQ ID NO: 1243448
acuaaauaaucagugucuu

SEQ ID NO: 1417473 - RNA, 19 nt, Artificial Sequence
  Description of Artificial Sequence: Synthetic oligonucleotide
  Antisense strand to SEQ ID NO: 1417472
aagacacugauuauuuagu

SEQ ID NO: 1417474 - RNA, 19 nt, Artificial Sequence
  Description of Artificial Sequence: Synthetic oligonucleotide
  Sense strand starting at position 1362 of SEQ ID NO: 1243448
cuaaauaaucagugucuua

SEQ ID NO: 1417475 - RNA, 19 nt, Artificial Sequence
  Description of Artificial Sequence: Synthetic oligonucleotide
  Antisense strand to SEQ ID NO: 1417474
uaagacacugauuauuuag

SEQ ID NO: 1417476 - RNA, 19 nt, Artificial Sequence
  Description of Artificial Sequence: Synthetic oligonucleotide
  Sense strand starting at position 1393 of SEQ ID NO: 1243448
agcaacaaaucugugagau

SEQ ID NO: 1417477 - RNA, 19 nt, Artificial Sequence
  Description of Artificial Sequence: Synthetic oligonucleotide
  Antisense strand to SEQ ID NO: 1417476
aucucacagauuuguugcu

SEQ ID NO: 1417478 - RNA, 19 nt, Artificial Sequence
  Description of Artificial Sequence: Synthetic oligonucleotide
  Sense strand starting at position 1394 of SEQ ID NO: 1243448
gcaacaaaucugugagaua

SEQ ID NO: 1417479 - RNA, 19 nt, Artificial Sequence
  Description of Artificial Sequence: Synthetic oligonucleotide
  Antisense strand to SEQ ID NO: 1417478
uaucucacagauuuguugc

SEQ ID NO: 1417480 - RNA, 19 nt, Artificial Sequence
  Description of Artificial Sequence: Synthetic oligonucleotide
  Sense strand starting at position 1397 of SEQ ID NO: 1243448
acaaaucugugagauauuu

SEQ ID NO: 1417481 - RNA, 19 nt, Artificial Sequence
  Description of Artificial Sequence: Synthetic oligonucleotide
  Antisense strand to SEQ ID NO: 1417480
aaauaucucacagauuugu

SEQ ID NO: 1417482 - RNA, 19 nt, Artificial Sequence
  Description of Artificial Sequence: Synthetic oligonucleotide
  Sense strand starting at position 1566 of SEQ ID NO: 1243448
ggguauuacuaggugggua

SEQ ID NO: 1417483 - RNA, 19 nt, Artificial Sequence
  Description of Artificial Sequence: Synthetic oligonucleotide
  Antisense strand to SEQ ID NO: 1417482
uacccaccuaguaauaccc

SEQ ID NO: 1417484 - RNA, 19 nt, Artificial Sequence
  Description of Artificial Sequence: Synthetic oligonucleotide
  Sense strand starting at position 1579 of SEQ ID NO: 1243448
uggguagugaagcaguaaa

SEQ ID NO: 1417485 - RNA, 19 nt, Artificial Sequence
  Description of Artificial Sequence: Synthetic oligonucleotide
  Antisense strand to SEQ ID NO: 1417484
uuuacugcuucacuaccca

SEQ ID NO: 1417486 - RNA, 19 nt, Artificial Sequence
  Description of Artificial Sequence: Synthetic oligonucleotide
  Sense strand starting at position 1737 of SEQ ID NO: 1243448
uaccuaaugcacugugaga

SEQ ID NO: 1417487 - RNA, 19 nt, Artificial Sequence
  Description of Artificial Sequence: Synthetic oligonucleotide
  Antisense strand to SEQ ID NO: 1417486
ucucacagugcauuaggua

SEQ ID NO: 1417488 - RNA, 19 nt, Artificial Sequence
  Description of Artificial Sequence: Synthetic oligonucleotide
  Sense strand starting at position 2069 of SEQ ID NO: 1243448
ggaguugcgguccaggaau

SEQ ID NO: 1417489 - RNA, 19 nt, Artificial Sequence
  Description of Artificial Sequence: Synthetic oligonucleotide
  Antisense strand to SEQ ID NO: 1417488
auuccuggaccgcaacucc

SEQ ID NO: 1417490 - RNA, 19 nt, Artificial Sequence
  Description of Artificial Sequence: Synthetic oligonucleotide
  Sense strand starting at position 2840 of SEQ ID NO: 1243448
aucaaaugagauuguguaa

SEQ ID NO: 1417491 - RNA, 19 nt, Artificial Sequence
  Description of Artificial Sequence: Synthetic oligonucleotide
  Antisense strand to SEQ ID NO: 1417490
uuacacaaucucauuugau

SEQ ID NO: 1417492 - RNA, 19 nt, Artificial Sequence
  Description of Artificial Sequence: Synthetic oligonucleotide
  Sense strand starting at position 2843 of SEQ ID NO: 1243448
aaaugagauuguguaaguu

SEQ ID NO: 1417493 - RNA, 19 nt, Artificial Sequence
  Description of Artificial Sequence: Synthetic oligonucleotide
  Antisense strand to SEQ ID NO: 1417492
aacuuacacaaucucauuu

SEQ ID NO: 1417494 - RNA, 19 nt, Artificial Sequence
  Description of Artificial Sequence: Synthetic oligonucleotide
  Sense strand starting at position 2853 of SEQ ID NO: 1243448
guguaaguucuugaaagua

SEQ ID NO: 1417495 - RNA, 19 nt, Artificial Sequence
  Description of Artificial Sequence: Synthetic oligonucleotide
  Antisense strand to SEQ ID NO: 1417494
uacuuucaagaacuuacac

SEQ ID NO: 1417496 - RNA, 19 nt, Artificial Sequence
  Description of Artificial Sequence: Synthetic oligonucleotide
  Sense strand starting at position 2957 of SEQ ID NO: 1243448
ggaggagcccuagguuauu

SEQ ID NO: 1417497 - RNA, 19 nt, Artificial Sequence
  Description of Artificial Sequence: Synthetic oligonucleotide
  Antisense strand to SEQ ID NO: 1417496
aauaaccuagggcuccucc

SEQ ID NO: 1417498 - RNA, 19 nt, Artificial Sequence
  Description of Artificial Sequence: Synthetic oligonucleotide
  Sense strand starting at position 3007 of SEQ ID NO: 1243448
cuuggaaacuugcuuucca

SEQ ID NO: 1417499 - RNA, 19 nt, Artificial Sequence
  Description of Artificial Sequence: Synthetic oligonucleotide
  Antisense strand to SEQ ID NO: 1417498
uggaaagcaaguuuccaag

SEQ ID NO: 1417500 - RNA, 19 nt, Artificial Sequence
  Description of Artificial Sequence: Synthetic oligonucleotide
  Sense strand starting at position 3224 of SEQ ID NO: 1243448
uccagaaguccaggucaaa

SEQ ID NO: 1417501 - RNA, 19 nt, Artificial Sequence
  Description of Artificial Sequence: Synthetic oligonucleotide
  Antisense strand to SEQ ID NO: 1417500
uuugaccuggacuucugga

SEQ ID NO: 1417502 - RNA, 19 nt, Artificial Sequence
  Description of Artificial Sequence: Synthetic oligonucleotide
  Sense strand starting at position 3244 of SEQ ID NO: 1243448
gcgugugaccuuagacgua

SEQ ID NO: 1417503 - RNA, 19 nt, Artificial Sequence
  Description of Artificial Sequence: Synthetic oligonucleotide
  Antisense strand to SEQ ID NO: 1417502
uacgucuaaggucacacgc

SEQ ID NO: 1417504 - RNA, 19 nt, Artificial Sequence
  Description of Artificial Sequence: Synthetic oligonucleotide
  Sense strand starting at position 3363 of SEQ ID NO: 1243448
cacacuuggguuuguuaaa

SEQ ID NO: 1417505 - RNA, 19 nt, Artificial Sequence
  Description of Artificial Sequence: Synthetic oligonucleotide
  Antisense strand to SEQ ID NO: 1417504
uuuaacaaacccaagugug

SEQ ID NO: 1417506 - RNA, 19 nt, Artificial Sequence
  Description of Artificial Sequence: Synthetic oligonucleotide
  Sense strand starting at position 3460 of SEQ ID NO: 1243448
cugacuauguggucuauag

SEQ ID NO: 1417507 - RNA, 19 nt, Artificial Sequence
  Description of Artificial Sequence: Synthetic oligonucleotide
  Antisense strand to SEQ ID NO: 1417506
cuauagaccacauagucag

SEQ ID NO: 1417508 - RNA, 19 nt, Artificial Sequence
  Description of Artificial Sequence: Synthetic oligonucleotide
  Sense strand starting at position 3462 of SEQ ID NO: 1243448
gacuauguggucuauagua

SEQ ID NO: 1417509 - RNA, 19 nt, Artificial Sequence
  Description of Artificial Sequence: Synthetic oligonucleotide
  Antisense strand to SEQ ID NO: 1417508
uacuauagaccacauaguc

SEQ ID NO: 1417510 - RNA, 19 nt, Artificial Sequence
  Description of Artificial Sequence: Synthetic oligonucleotide
  Sense strand starting at position 3464 of SEQ ID NO: 1243448
cuauguggucuauaguaac

SEQ ID NO: 1417511 - RNA, 19 nt, Artificial Sequence
  Description of Artificial Sequence: Synthetic oligonucleotide
  Antisense strand to SEQ ID NO: 1417510
guuacuauagaccacauag

SEQ ID NO: 1417512 - RNA, 19 nt, Artificial Sequence
  Description of Artificial Sequence: Synthetic oligonucleotide
  Sense strand starting at position 3470 of SEQ ID NO: 1243448
ggucuauaguaaccacuca

SEQ ID NO: 1417513 - RNA, 19 nt, Artificial Sequence
  Description of Artificial Sequence: Synthetic oligonucleotide
  Antisense strand to SEQ ID NO: 1417512
ugagugguuacuauagacc

SEQ ID NO: 1417514 - RNA, 19 nt, Artificial Sequence
  Description of Artificial Sequence: Synthetic oligonucleotide
  Sense strand starting at position 3667 of SEQ ID NO: 1243448
ucuuucuucccagguagga

SEQ ID NO: 1417515 - RNA, 19 nt, Artificial Sequence
  Description of Artificial Sequence: Synthetic oligonucleotide
  Antisense strand to SEQ ID NO: 1417514
uccuaccugggaagaaaga

SEQ ID NO: 1417516 - RNA, 19 nt, Artificial Sequence
  Description of Artificial Sequence: Synthetic oligonucleotide
  Sense strand starting at position 3677 of SEQ ID NO: 1243448
cagguaggauaguuguuau

SEQ ID NO: 1417517 - RNA, 19 nt, Artificial Sequence
  Description of Artificial Sequence: Synthetic oligonucleotide
  Antisense strand to SEQ ID NO: 1417516
auaacaacuauccuaccug

SEQ ID NO: 1417518 - RNA, 19 nt, Artificial Sequence
  Description of Artificial Sequence: Synthetic oligonucleotide
  Sense strand starting at position 3771 of SEQ ID NO: 1243448
gucucugggccucaggaua

SEQ ID NO: 1417519 - RNA, 19 nt, Artificial Sequence
  Description of Artificial Sequence: Synthetic oligonucleotide
  Antisense strand to SEQ ID NO: 1417518
uauccugaggcccagagac

SEQ ID NO: 1417520 - RNA, 19 nt, Artificial Sequence
  Description of Artificial Sequence: Synthetic oligonucleotide
  Sense strand starting at position 3785 of SEQ ID NO: 1243448
ggauauugguuccugucaa

SEQ ID NO: 1417521 - RNA, 19 nt, Artificial Sequence
  Description of Artificial Sequence: Synthetic oligonucleotide
  Antisense strand to SEQ ID NO: 1417520
uugacaggaaccaauaucc

SEQ ID NO: 1417522 - RNA, 19 nt, Artificial Sequence
  Description of Artificial Sequence: Synthetic oligonucleotide
  Sense strand starting at position 3862 of SEQ ID NO: 1243448
ucaggaaagugcuucugau

SEQ ID NO: 1417523 - RNA, 19 nt, Artificial Sequence
  Description of Artificial Sequence: Synthetic oligonucleotide
  Antisense strand to SEQ ID NO: 1417522
aucagaagcacuuuccuga

SEQ ID NO: 1417524 - RNA, 19 nt, Artificial Sequence
  Description of Artificial Sequence: Synthetic oligonucleotide
  Sense strand starting at position 115 of SEQ ID NO: 1243449
gccacauuccugugcuugu

SEQ ID NO: 1417525 - RNA, 19 nt, Artificial Sequence
  Description of Artificial Sequence: Synthetic oligonucleotide
  Antisense strand to SEQ ID NO: 1417524
acaagcacaggaauguggc

SEQ ID NO: 1417526 - RNA, 19 nt, Artificial Sequence
  Description of Artificial Sequence: Synthetic oligonucleotide
  Sense strand starting at position 122 of SEQ ID NO: 1243449
uccugugcuuguuugugau

SEQ ID NO: 1417527 - RNA, 19 nt, Artificial Sequence
  Description of Artificial Sequence: Synthetic oligonucleotide
  Antisense strand to SEQ ID NO: 1417526
aucacaaacaagcacagga

SEQ ID NO: 1417528 - RNA, 19 nt, Artificial Sequence
  Description of Artificial Sequence: Synthetic oligonucleotide
  Sense strand starting at position 124 of SEQ ID NO: 1243449
cugugcuuguuugugauuu

SEQ ID NO: 1417529 - RNA, 19 nt, Artificial Sequence
  Description of Artificial Sequence: Synthetic oligonucleotide
  Antisense strand to SEQ ID NO: 1417528
aaaucacaaacaagcacag

SEQ ID NO: 1417530 - RNA, 19 nt, Artificial Sequence
  Description of Artificial Sequence: Synthetic oligonucleotide
  Sense strand starting at position 273 of SEQ ID NO: 1243449
ugugcacaaucgggagauu

SEQ ID NO: 1417531 - RNA, 19 nt, Artificial Sequence
  Description of Artificial Sequence: Synthetic oligonucleotide
  Antisense strand to SEQ ID NO: 1417530
aaucucccgauugugcaca

SEQ ID NO: 1417532 - RNA, 19 nt, Artificial Sequence
  Description of Artificial Sequence: Synthetic oligonucleotide
  Sense strand starting at position 606 of SEQ ID NO: 1243449
aaagauucccgucgugaag

SEQ ID NO: 1417533 - RNA, 19 nt, Artificial Sequence
  Description of Artificial Sequence: Synthetic oligonucleotide
  Antisense strand to SEQ ID NO: 1417532
cuucacgacgggaaucuuu

SEQ ID NO: 1417534 - RNA, 19 nt, Artificial Sequence
  Description of Artificial Sequence: Synthetic oligonucleotide
  Sense strand starting at position 742 of SEQ ID NO: 1243449
gugagacgucugugaggag

SEQ ID NO: 1417535 - RNA, 19 nt, Artificial Sequence
  Description of Artificial Sequence: Synthetic oligonucleotide
  Antisense strand to SEQ ID NO: 1417534
cuccucacagacgucucac

SEQ ID NO: 1417536 - RNA, 19 nt, Artificial Sequence
  Description of Artificial Sequence: Synthetic oligonucleotide
  Sense strand starting at position 775 of SEQ ID NO: 1243449
ccauccgaucuguagaacu

SEQ ID NO: 1417537 - RNA, 19 nt, Artificial Sequence
  Description of Artificial Sequence: Synthetic oligonucleotide
  Antisense strand to SEQ ID NO: 1417536
aguucuacagaucggaugg

SEQ ID NO: 1417538 - RNA, 19 nt, Artificial Sequence
  Description of Artificial Sequence: Synthetic oligonucleotide
  Sense strand starting at position 777 of SEQ ID NO: 1243449
auccgaucuguagaacuga

SEQ ID NO: 1417539 - RNA, 19 nt, Artificial Sequence
  Description of Artificial Sequence: Synthetic oligonucleotide
  Antisense strand to SEQ ID NO: 1417538
ucaguucuacagaucggau

SEQ ID NO: 1417540 - RNA, 19 nt, Artificial Sequence
  Description of Artificial Sequence: Synthetic oligonucleotide
  Sense strand starting at position 867 of SEQ ID NO: 1243449
ugcaucauuugcugacgga

SEQ ID NO: 1417541 - RNA, 19 nt, Artificial Sequence
  Description of Artificial Sequence: Synthetic oligonucleotide
  Antisense strand to SEQ ID NO: 1417540
uccgucagcaaaugaugca

SEQ ID NO: 1417542 - RNA, 19 nt, Artificial Sequence
  Description of Artificial Sequence: Synthetic oligonucleotide
  Sense strand starting at position 870 of SEQ ID NO: 1243449
aucauuugcugacggauga

SEQ ID NO: 1417543 - RNA, 19 nt, Artificial Sequence
  Description of Artificial Sequence: Synthetic oligonucleotide
  Antisense strand to SEQ ID NO: 1417542
ucauccgucagcaaaugau

SEQ ID NO: 1417544 - RNA, 19 nt, Artificial Sequence
  Description of Artificial Sequence: Synthetic oligonucleotide
  Sense strand starting at position 923 of SEQ ID NO: 1243449
agucuugaggcgugucuca

SEQ ID NO: 1417545 - RNA, 19 nt, Artificial Sequence
  Description of Artificial Sequence: Synthetic oligonucleotide
  Antisense strand to SEQ ID NO: 1417544
ugagacacgccucaagacu

SEQ ID NO: 1417546 - RNA, 19 nt, Artificial Sequence
  Description of Artificial Sequence: Synthetic oligonucleotide
  Sense strand starting at position 953 of SEQ ID NO: 1243449
cugugucugagccguuuau

SEQ ID NO: 1417547 - RNA, 19 nt, Artificial Sequence
  Description of Artificial Sequence: Synthetic oligonucleotide
  Antisense strand to SEQ ID NO: 1417546
auaaacggcucagacacag

SEQ ID NO: 1417548 - RNA, 19 nt, Artificial Sequence
  Description of Artificial Sequence: Synthetic oligonucleotide
  Sense strand starting at position 954 of SEQ ID NO: 1243449
ugugucugagccguuuaua

SEQ ID NO: 1417549 - RNA, 19 nt, Artificial Sequence
  Description of Artificial Sequence: Synthetic oligonucleotide
  Antisense strand to SEQ ID NO: 1417548
uauaaacggcucagacaca

SEQ ID NO: 1417550 - RNA, 19 nt, Artificial Sequence
  Description of Artificial Sequence: Synthetic oligonucleotide
  Sense strand starting at position 957 of SEQ ID NO: 1243449
gucugagccguuuauaaac

SEQ ID NO: 1417551 - RNA, 19 nt, Artificial Sequence
  Description of Artificial Sequence: Synthetic oligonucleotide
  Antisense strand to SEQ ID NO: 1417550
guuuauaaacggcucagac

SEQ ID NO: 1417552 - RNA, 19 nt, Artificial Sequence
  Description of Artificial Sequence: Synthetic oligonucleotide
  Sense strand starting at position 959 of SEQ ID NO: 1243449
cugagccguuuauaaacua

SEQ ID NO: 1417553 - RNA, 19 nt, Artificial Sequence
  Description of Artificial Sequence: Synthetic oligonucleotide
  Antisense strand to SEQ ID NO: 1417552
uaguuuauaaacggcucag

SEQ ID NO: 1417554 - RNA, 19 nt, Artificial Sequence
  Description of Artificial Sequence: Synthetic oligonucleotide
  Sense strand starting at position 992 of SEQ ID NO: 1243449
gguccuuccacguggauuu

SEQ ID NO: 1417555 - RNA, 19 nt, Artificial Sequence
  Description of Artificial Sequence: Synthetic oligonucleotide
  Antisense strand to SEQ ID NO: 1417554
aaauccacguggaaggacc

SEQ ID NO: 1417556 - RNA, 19 nt, Artificial Sequence
  Description of Artificial Sequence: Synthetic oligonucleotide
  Sense strand starting at position 1057 of SEQ ID NO: 1243449
ugcuguuagaaagaaguuu

SEQ ID NO: 1417557 - RNA, 19 nt, Artificial Sequence
  Description of Artificial Sequence: Synthetic oligonucleotide
  Antisense strand to SEQ ID NO: 1417556
aaacuucuuucuaacagca

SEQ ID NO: 1417558 - RNA, 19 nt, Artificial Sequence
  Description of Artificial Sequence: Synthetic oligonucleotide
  Sense strand starting at position 1171 of SEQ ID NO: 1243449
ugcugaguugguggcaaga

SEQ ID NO: 1417559 - RNA, 19 nt, Artificial Sequence
  Description of Artificial Sequence: Synthetic oligonucleotide
  Antisense strand to SEQ ID NO: 1417558
ucuugccaccaacucagca

SEQ ID NO: 1417560 - RNA, 19 nt, Artificial Sequence
  Description of Artificial Sequence: Synthetic oligonucleotide
  Sense strand starting at position 1173 of SEQ ID NO: 1243449
cugaguugguggcaagagu

SEQ ID NO: 1417561 - RNA, 19 nt, Artificial Sequence
  Description of Artificial Sequence: Synthetic oligonucleotide
  Antisense strand to SEQ ID NO: 1417560
acucuugccaccaacucag

SEQ ID NO: 1417562 - RNA, 19 nt, Artificial Sequence
  Description of Artificial Sequence: Synthetic oligonucleotide
  Sense strand starting at position 1516 of SEQ ID NO: 1243449
guugguugcugcuaagaca

SEQ ID NO: 1417563 - RNA, 19 nt, Artificial Sequence
  Description of Artificial Sequence: Synthetic oligonucleotide
  Antisense strand to SEQ ID NO: 1417562
ugucuuagcagcaaccaac

SEQ ID NO: 1417564 - RNA, 19 nt, Artificial Sequence
  Description of Artificial Sequence: Synthetic oligonucleotide
  Sense strand starting at position 1566 of SEQ ID NO: 1243449
guggaaugcguccguggaa

SEQ ID NO: 1417565 - RNA, 19 nt, Artificial Sequence
  Description of Artificial Sequence: Synthetic oligonucleotide
  Antisense strand to SEQ ID NO: 1417564
uuccacggacgcauuccac

SEQ ID NO: 1417566 - RNA, 19 nt, Artificial Sequence
  Description of Artificial Sequence: Synthetic oligonucleotide
  Sense strand starting at position 1567 of SEQ ID NO: 1243449
uggaaugcguccguggaau

SEQ ID NO: 1417567 - RNA, 19 nt, Artificial Sequence
  Description of Artificial Sequence: Synthetic oligonucleotide
  Antisense strand to SEQ ID NO: 1417566
auuccacggacgcauucca

SEQ ID NO: 1417568 - RNA, 19 nt, Artificial Sequence
  Description of Artificial Sequence: Synthetic oligonucleotide
  Sense strand starting at position 1569 of SEQ ID NO: 1243449
gaaugcguccguggaauuc

SEQ ID NO: 1417569 - RNA, 19 nt, Artificial Sequence
  Description of Artificial Sequence: Synthetic oligonucleotide
  Antisense strand to SEQ ID NO: 1417568
gaauuccacggacgcauuc

SEQ ID NO: 1417570 - RNA, 19 nt, Artificial Sequence
  Description of Artificial Sequence: Synthetic oligonucleotide
  Sense strand starting at position 1760 of SEQ ID NO: 1243449
gagccauugcccugugauu

SEQ ID NO: 1417571 - RNA, 19 nt, Artificial Sequence
  Description of Artificial Sequence: Synthetic oligonucleotide
  Antisense strand to SEQ ID NO: 1417570
aaucacagggcaauggcuc

SEQ ID NO: 1417572 - RNA, 19 nt, Artificial Sequence
  Description of Artificial Sequence: Synthetic oligonucleotide
  Sense strand starting at position 1762 of SEQ ID NO: 1243449
gccauugcccugugauucu

SEQ ID NO: 1417573 - RNA, 19 nt, Artificial Sequence
  Description of Artificial Sequence: Synthetic oligonucleotide
  Antisense strand to SEQ ID NO: 1417572
agaaucacagggcaauggc

SEQ ID NO: 1417574 - RNA, 19 nt, Artificial Sequence
  Description of Artificial Sequence: Synthetic oligonucleotide
  Sense strand starting at position 2067 of SEQ ID NO: 1243449
ggcuuaucugcagggagca

SEQ ID NO: 1417575 - RNA, 19 nt, Artificial Sequence
  Description of Artificial Sequence: Synthetic oligonucleotide
  Antisense strand to SEQ ID NO: 1417574
ugcucccugcagauaagcc

SEQ ID NO: 1417576 - RNA, 19 nt, Artificial Sequence
  Description of Artificial Sequence: Synthetic oligonucleotide
  Sense strand starting at position 2146 of SEQ ID NO: 1243449
gccugugcuugugggagua

SEQ ID NO: 1417577 - RNA, 19 nt, Artificial Sequence
  Description of Artificial Sequence: Synthetic oligonucleotide
  Antisense strand to SEQ ID NO: 1417576
uacucccacaagcacaggc

SEQ ID NO: 1417578 - RNA, 19 nt, Artificial Sequence
  Description of Artificial Sequence: Synthetic oligonucleotide
  Sense strand starting at position 2537 of SEQ ID NO: 1243449
ugagcugugucuuggaaca

SEQ ID NO: 1417579 - RNA, 19 nt, Artificial Sequence
  Description of Artificial Sequence: Synthetic oligonucleotide
  Antisense strand to SEQ ID NO: 1417578
uguuccaagacacagcuca

SEQ ID NO: 1417580 - RNA, 19 nt, Artificial Sequence
  Description of Artificial Sequence: Synthetic oligonucleotide
  Sense strand starting at position 2730 of SEQ ID NO: 1243449
agcgucaugucccuagagu

SEQ ID NO: 1417581 - RNA, 19 nt, Artificial Sequence
  Description of Artificial Sequence: Synthetic oligonucleotide
  Antisense strand to SEQ ID NO: 1417580
acucuagggacaugacgcu

SEQ ID NO: 1417582 - RNA, 19 nt, Artificial Sequence
  Description of Artificial Sequence: Synthetic oligonucleotide
  Sense strand starting at position 2731 of SEQ ID NO: 1243449
gcgucaugucccuagagug

SEQ ID NO: 1417583 - RNA, 19 nt, Artificial Sequence
  Description of Artificial Sequence: Synthetic oligonucleotide
  Antisense strand to SEQ ID NO: 1417582
cacucuagggacaugacgc

SEQ ID NO: 1417584 - RNA, 19 nt, Artificial Sequence
  Description of Artificial Sequence: Synthetic oligonucleotide
  Sense strand starting at position 3579 of SEQ ID NO: 1243449
gaggcuuugucucagagca

SEQ ID NO: 1417585 - RNA, 19 nt, Artificial Sequence
  Description of Artificial Sequence: Synthetic oligonucleotide
  Antisense strand to SEQ ID NO: 1417584
ugcucugagacaaagccuc

SEQ ID NO: 1417586 - RNA, 19 nt, Artificial Sequence
  Description of Artificial Sequence: Synthetic oligonucleotide
  Sense strand starting at position 3679 of SEQ ID NO: 1243449
ccuggugaucugcauaaga

SEQ ID NO: 1417587 - RNA, 19 nt, Artificial Sequence
  Description of Artificial Sequence: Synthetic oligonucleotide
  Antisense strand to SEQ ID NO: 1417586
ucuuaugcagaucaccagg

SEQ ID NO: 1417588 - RNA, 19 nt, Artificial Sequence
  Description of Artificial Sequence: Synthetic oligonucleotide
  Sense strand starting at position 3844 of SEQ ID NO: 1243449
gcagcugugccugaugacu

SEQ ID NO: 1417589 - RNA, 19 nt, Artificial Sequence
  Description of Artificial Sequence: Synthetic oligonucleotide
  Antisense strand to SEQ ID NO: 1417588
agucaucaggcacagcugc

SEQ ID NO: 1417590 - RNA, 19 nt, Artificial Sequence
  Description of Artificial Sequence: Synthetic oligonucleotide
  Sense strand starting at position 130 of SEQ ID NO: 1243450
cucagagaccagcauuauc

SEQ ID NO: 1417591 - RNA, 19 nt, Artificial Sequence
  Description of Artificial Sequence: Synthetic oligonucleotide
  Antisense strand to SEQ ID NO: 1417590
gauaaugcuggucucugag

SEQ ID NO: 1417592 - RNA, 19 nt, Artificial Sequence
  Description of Artificial Sequence: Synthetic oligonucleotide
  Sense strand starting at position 302 of SEQ ID NO: 1243450
ggcuguaagcgccuuccua

SEQ ID NO: 1417593 - RNA, 19 nt, Artificial Sequence
  Description of Artificial Sequence: Synthetic oligonucleotide
  Antisense strand to SEQ ID NO: 1417592
uaggaaggcgcuuacagcc

SEQ ID NO: 1417594 - RNA, 19 nt, Artificial Sequence
  Description of Artificial Sequence: Synthetic oligonucleotide
  Sense strand starting at position 303 of SEQ ID NO: 1243450
gcuguaagcgccuuccuau

SEQ ID NO: 1417595 - RNA, 19 nt, Artificial Sequence
  Description of Artificial Sequence: Synthetic oligonucleotide
  Antisense strand to SEQ ID NO: 1417594
auaggaaggcgcuuacagc

SEQ ID NO: 1417596 - RNA, 19 nt, Artificial Sequence
  Description of Artificial Sequence: Synthetic oligonucleotide
  Sense strand starting at position 304 of SEQ ID NO: 1243450
cuguaagcgccuuccuauu

SEQ ID NO: 1417597 - RNA, 19 nt, Artificial Sequence
  Description of Artificial Sequence: Synthetic oligonucleotide
  Antisense strand to SEQ ID NO: 1417596
aauaggaaggcgcuuacag

SEQ ID NO: 1417598 - RNA, 19 nt, Artificial Sequence
  Description of Artificial Sequence: Synthetic oligonucleotide
  Sense strand starting at position 306 of SEQ ID NO: 1243450
guaagcgccuuccuauuua

SEQ ID NO: 1417599 - RNA, 19 nt, Artificial Sequence
  Description of Artificial Sequence: Synthetic oligonucleotide
  Antisense strand to SEQ ID NO: 1417598
uaaauaggaaggcgcuuac

SEQ ID NO: 1417600 - RNA, 19 nt, Artificial Sequence
  Description of Artificial Sequence: Synthetic oligonucleotide
  Sense strand starting at position 310 of SEQ ID NO: 1243450
gcgccuuccuauuuaugca

SEQ ID NO: 1417601 - RNA, 19 nt, Artificial Sequence
  Description of Artificial Sequence: Synthetic oligonucleotide
  Antisense strand to SEQ ID NO: 1417600
ugcauaaauaggaaggcgc

SEQ ID NO: 1417602 - RNA, 19 nt, Artificial Sequence
  Description of Artificial Sequence: Synthetic oligonucleotide
  Sense strand starting at position 534 of SEQ ID NO: 1243450
agaacucacccguguauuu

SEQ ID NO: 1417603 - RNA, 19 nt, Artificial Sequence
  Description of Artificial Sequence: Synthetic oligonucleotide
  Antisense strand to SEQ ID NO: 1417602
aaauacacgggugaguucu

SEQ ID NO: 1417604 - RNA, 19 nt, Artificial Sequence
  Description of Artificial Sequence: Synthetic oligonucleotide
  Sense strand starting at position 640 of SEQ ID NO: 1243450
aggcuagguucgucuugaa

SEQ ID NO: 1417605 - RNA, 19 nt, Artificial Sequence
  Description of Artificial Sequence: Synthetic oligonucleotide
  Antisense strand to SEQ ID NO: 1417604
uucaagacgaaccuagccu

SEQ ID NO: 1417606 - RNA, 19 nt, Artificial Sequence
  Description of Artificial Sequence: Synthetic oligonucleotide
  Sense strand starting at position 765 of SEQ ID NO: 1243450
gccuuuccuugauuugauu

SEQ ID NO: 1417607 - RNA, 19 nt, Artificial Sequence
  Description of Artificial Sequence: Synthetic oligonucleotide
  Antisense strand to SEQ ID NO: 1417606
aaucaaaucaaggaaaggc

SEQ ID NO: 1417608 - RNA, 19 nt, Artificial Sequence
  Description of Artificial Sequence: Synthetic oligonucleotide
  Sense strand starting at position 793 of SEQ ID NO: 1243450
aucucuuaacuauguguaa

SEQ ID NO: 1417609 - RNA, 19 nt, Artificial Sequence
  Description of Artificial Sequence: Synthetic oligonucleotide
  Antisense strand to SEQ ID NO: 1417608
uuacacauaguuaagagau

SEQ ID NO: 1417610 - RNA, 19 nt, Artificial Sequence
  Description of Artificial Sequence: Synthetic oligonucleotide
  Sense strand starting at position 794 of SEQ ID NO: 1243450
ucucuuaacuauguguaac

SEQ ID NO: 1417611 - RNA, 19 nt, Artificial Sequence
  Description of Artificial Sequence: Synthetic oligonucleotide
  Antisense strand to SEQ ID NO: 1417610
guuacacauaguuaagaga

SEQ ID NO: 1417612 - RNA, 19 nt, Artificial Sequence
  Description of Artificial Sequence: Synthetic oligonucleotide
  Sense strand starting at position 827 of SEQ ID NO: 1243450
ccaaaugccugagaugaau

SEQ ID NO: 1417613 - RNA, 19 nt, Artificial Sequence
  Description of Artificial Sequence: Synthetic oligonucleotide
  Antisense strand to SEQ ID NO: 1417612
auucaucucaggcauuugg

SEQ ID NO: 1417614 - RNA, 19 nt, Artificial Sequence
  Description of Artificial Sequence: Synthetic oligonucleotide
  Sense strand starting at position 836 of SEQ ID NO: 1243450
ugagaugaauuccugugua

SEQ ID NO: 1417615 - RNA, 19 nt, Artificial Sequence
  Description of Artificial Sequence: Synthetic oligonucleotide
  Antisense strand to SEQ ID NO: 1417614
uacacaggaauucaucuca

SEQ ID NO: 1417616 - RNA, 19 nt, Artificial Sequence
  Description of Artificial Sequence: Synthetic oligonucleotide
  Sense strand starting at position 864 of SEQ ID NO: 1243450
gaggcagauucugugcuga

SEQ ID NO: 1417617 - RNA, 19 nt, Artificial Sequence
  Description of Artificial Sequence: Synthetic oligonucleotide
  Antisense strand to SEQ ID NO: 1417616
ucagcacagaaucugccuc

SEQ ID NO: 1417618 - RNA, 19 nt, Artificial Sequence
  Description of Artificial Sequence: Synthetic oligonucleotide
  Sense strand starting at position 934 of SEQ ID NO: 1243450
ccugguucccugggagaca

SEQ ID NO: 1417619 - RNA, 19 nt, Artificial Sequence
  Description of Artificial Sequence: Synthetic oligonucleotide
  Antisense strand to SEQ ID NO: 1417618
ugucucccagggaaccagg

SEQ ID NO: 1417620 - RNA, 19 nt, Artificial Sequence
  Description of Artificial Sequence: Synthetic oligonucleotide
  Sense strand starting at position 1070 of SEQ ID NO: 1243450
cgcugaaggcaucaggaaa

SEQ ID NO: 1417621 - RNA, 19 nt, Artificial Sequence
  Description of Artificial Sequence: Synthetic oligonucleotide
  Antisense strand to SEQ ID NO: 1417620
uuuccugaugccuucagcg

SEQ ID NO: 1417622 - RNA, 19 nt, Artificial Sequence
  Description of Artificial Sequence: Synthetic oligonucleotide
  Sense strand starting at position 2084 of SEQ ID NO: 1243450
gugcuuccugaugggaaag

SEQ ID NO: 1417623 - RNA, 19 nt, Artificial Sequence
  Description of Artificial Sequence: Synthetic oligonucleotide
  Antisense strand to SEQ ID NO: 1417622
cuuucccaucaggaagcac

SEQ ID NO: 1417624 - RNA, 19 nt, Artificial Sequence
  Description of Artificial Sequence: Synthetic oligonucleotide
  Sense strand starting at position 2255 of SEQ ID NO: 1243450
gcugguacugagcgacuau

SEQ ID NO: 1417625 - RNA, 19 nt, Artificial Sequence
  Description of Artificial Sequence: Synthetic oligonucleotide
  Antisense strand to SEQ ID NO: 1417624
auagucgcucaguaccagc

SEQ ID NO: 1417626 - RNA, 19 nt, Artificial Sequence
  Description of Artificial Sequence: Synthetic oligonucleotide
  Sense strand starting at position 2256 of SEQ ID NO: 1243450
cugguacugagcgacuauu

SEQ ID NO: 1417627 - RNA, 19 nt, Artificial Sequence
  Description of Artificial Sequence: Synthetic oligonucleotide
  Antisense strand to SEQ ID NO: 1417626
aauagucgcucaguaccag

SEQ ID NO: 1417628 - RNA, 19 nt, Artificial Sequence
  Description of Artificial Sequence: Synthetic oligonucleotide
  Sense strand starting at position 2396 of SEQ ID NO: 1243450
cgggaaugcugcccucaaa

SEQ ID NO: 1417629 - RNA, 19 nt, Artificial Sequence
  Description of Artificial Sequence: Synthetic oligonucleotide
  Antisense strand to SEQ ID NO: 1417628
uuugagggcagcauucccg

SEQ ID NO: 1417630 - RNA, 19 nt, Artificial Sequence
  Description of Artificial Sequence: Synthetic oligonucleotide
  Sense strand starting at position 2620 of SEQ ID NO: 1243450
ggucauucuuagguggcaa

SEQ ID NO: 1417631 - RNA, 19 nt, Artificial Sequence
  Description of Artificial Sequence: Synthetic oligonucleotide
  Antisense strand to SEQ ID NO: 1417630
uugccaccuaagaaugacc

SEQ ID NO: 1417632 - RNA, 19 nt, Artificial Sequence
  Description of Artificial Sequence: Synthetic oligonucleotide
  Sense strand starting at position 2622 of SEQ ID NO: 1243450
ucauucuuagguggcaaga

SEQ ID NO: 1417633 - RNA, 19 nt, Artificial Sequence
  Description of Artificial Sequence: Synthetic oligonucleotide
  Antisense strand to SEQ ID NO: 1417632
ucuugccaccuaagaauga

SEQ ID NO: 1417634 - RNA, 19 nt, Artificial Sequence
  Description of Artificial Sequence: Synthetic oligonucleotide
  Sense strand starting at position 2827 of SEQ ID NO: 1243450
ucagaagcaucuucgucua

SEQ ID NO: 1417635 - RNA, 19 nt, Artificial Sequence
  Description of Artificial Sequence: Synthetic oligonucleotide
  Antisense strand to SEQ ID NO: 1417634
uagacgaagaugcuucuga

SEQ ID NO: 1417636 - RNA, 19 nt, Artificial Sequence
  Description of Artificial Sequence: Synthetic oligonucleotide
  Sense strand starting at position 2829 of SEQ ID NO: 1243450
agaagcaucuucgucuauu

SEQ ID NO: 1417637 - RNA, 19 nt, Artificial Sequence
  Description of Artificial Sequence: Synthetic oligonucleotide
  Antisense strand to SEQ ID NO: 1417636
aauagacgaagaugcuucu

SEQ ID NO: 1417638 - RNA, 19 nt, Artificial Sequence
  Description of Artificial Sequence: Synthetic oligonucleotide
  Sense strand starting at position 2830 of SEQ ID NO: 1243450
gaagcaucuucgucuauuc

SEQ ID NO: 1417639 - RNA, 19 nt, Artificial Sequence
  Description of Artificial Sequence: Synthetic oligonucleotide
  Antisense strand to SEQ ID NO: 1417638
gaauagacgaagaugcuuc

SEQ ID NO: 1417640 - RNA, 19 nt, Artificial Sequence
  Description of Artificial Sequence: Synthetic oligonucleotide
  Sense strand starting at position 2838 of SEQ ID NO: 1243450
uucgucuauucugcucaga

SEQ ID NO: 1417641 - RNA, 19 nt, Artificial Sequence
  Description of Artificial Sequence: Synthetic oligonucleotide
  Antisense strand to SEQ ID NO: 1417640
ucugagcagaauagacgaa

SEQ ID NO: 1417642 - RNA, 19 nt, Artificial Sequence
  Description of Artificial Sequence: Synthetic oligonucleotide
  Sense strand starting at position 2840 of SEQ ID NO: 1243450
cgucuauucugcucagaau

SEQ ID NO: 1417643 - RNA, 19 nt, Artificial Sequence
  Description of Artificial Sequence: Synthetic oligonucleotide
  Antisense strand to SEQ ID NO: 1417642
auucugagcagaauagacg

SEQ ID NO: 1417644 - RNA, 19 nt, Artificial Sequence
  Description of Artificial Sequence: Synthetic oligonucleotide
  Sense strand starting at position 2841 of SEQ ID NO: 1243450
gucuauucugcucagaauu

SEQ ID NO: 1417645 - RNA, 19 nt, Artificial Sequence
  Description of Artificial Sequence: Synthetic oligonucleotide
  Antisense strand to SEQ ID NO: 1417644
aauucugagcagaauagac

SEQ ID NO: 1417646 - RNA, 19 nt, Artificial Sequence
  Description of Artificial Sequence: Synthetic oligonucleotide
  Sense strand starting at position 2955 of SEQ ID NO: 1243450
gcuccaaagcuucgugaau

SEQ ID NO: 1417647 - RNA, 19 nt, Artificial Sequence
  Description of Artificial Sequence: Synthetic oligonucleotide
  Antisense strand to SEQ ID NO: 1417646
auucacgaagcuuuggagc

SEQ ID NO: 1417648 - RNA, 19 nt, Artificial Sequence
  Description of Artificial Sequence: Synthetic oligonucleotide
  Sense strand starting at position 2956 of SEQ ID NO: 1243450
cuccaaagcuucgugaaug

SEQ ID NO: 1417649 - RNA, 19 nt, Artificial Sequence
  Description of Artificial Sequence: Synthetic oligonucleotide
  Antisense strand to SEQ ID NO: 1417648
cauucacgaagcuuuggag

SEQ ID NO: 1417650 - RNA, 19 nt, Artificial Sequence
  Description of Artificial Sequence: Synthetic oligonucleotide
  Sense strand starting at position 3180 of SEQ ID NO: 1243450
ucuguauauccacagguga

SEQ ID NO: 1417651 - RNA, 19 nt, Artificial Sequence
  Description of Artificial Sequence: Synthetic oligonucleotide
  Antisense strand to SEQ ID NO: 1417650
ucaccuguggauauacaga

SEQ ID NO: 1417652 - RNA, 19 nt, Artificial Sequence
  Description of Artificial Sequence: Synthetic oligonucleotide
  Sense strand starting at position 3182 of SEQ ID NO: 1243450
uguauauccacaggugaag

SEQ ID NO: 1417653 - RNA, 19 nt, Artificial Sequence
  Description of Artificial Sequence: Synthetic oligonucleotide
  Antisense strand to SEQ ID NO: 1417652
cuucaccuguggauauaca

SEQ ID NO: 1417654 - RNA, 19 nt, Artificial Sequence
  Description of Artificial Sequence: Synthetic oligonucleotide
  Sense strand starting at position 3219 of SEQ ID NO: 1243450
cccugugucuguuccagaa

SEQ ID NO: 1417655 - RNA, 19 nt, Artificial Sequence
  Description of Artificial Sequence: Synthetic oligonucleotide
  Antisense strand to SEQ ID NO: 1417654
uucuggaacagacacaggg

SEQ ID NO: 1417656 - RNA, 19 nt, Artificial Sequence
  Description of Artificial Sequence: Synthetic oligonucleotide
  Sense strand starting at position 3283 of SEQ ID NO: 1243450
ugagaagcguuucuccacu

SEQ ID NO: 1417657 - RNA, 19 nt, Artificial Sequence
  Description of Artificial Sequence: Synthetic oligonucleotide
  Antisense strand to SEQ ID NO: 1417656
aguggagaaacgcuucuca

SEQ ID NO: 1417658 - RNA, 19 nt, Artificial Sequence
  Description of Artificial Sequence: Synthetic oligonucleotide
  Sense strand starting at position 3341 of SEQ ID NO: 1243450
ggauuugucgcagacgugu

SEQ ID NO: 1417659 - RNA, 19 nt, Artificial Sequence
  Description of Artificial Sequence: Synthetic oligonucleotide
  Antisense strand to SEQ ID NO: 1417658
acacgucugcgacaaaucc

SEQ ID NO: 1417660 - RNA, 19 nt, Artificial Sequence
  Description of Artificial Sequence: Synthetic oligonucleotide
  Sense strand starting at position 3352 of SEQ ID NO: 1243450
agacguguccgucagguuu

SEQ ID NO: 1417661 - RNA, 19 nt, Artificial Sequence
  Description of Artificial Sequence: Synthetic oligonucleotide
  Antisense strand to SEQ ID NO: 1417660
aaaccugacggacacgucu

SEQ ID NO: 1417662 - RNA, 19 nt, Artificial Sequence
  Description of Artificial Sequence: Synthetic oligonucleotide
  Sense strand starting at position 3388 of SEQ ID NO: 1243450
uuggcuugugcccagggaa

SEQ ID NO: 1417663 - RNA, 19 nt, Artificial Sequence
  Description of Artificial Sequence: Synthetic oligonucleotide
  Antisense strand to SEQ ID NO: 1417662
uucccugggcacaagccaa

SEQ ID NO: 1417664 - RNA, 19 nt, Artificial Sequence
  Description of Artificial Sequence: Synthetic oligonucleotide
  Sense strand starting at position 3415 of SEQ ID NO: 1243450
guuucuauuucuguucuca

SEQ ID NO: 1417665 - RNA, 19 nt, Artificial Sequence
  Description of Artificial Sequence: Synthetic oligonucleotide
  Antisense strand to SEQ ID NO: 1417664
ugagaacagaaauagaaac

SEQ ID NO: 1417666 - RNA, 19 nt, Artificial Sequence
  Description of Artificial Sequence: Synthetic oligonucleotide
  Sense strand starting at position 3689 of SEQ ID NO: 1243450
uuaaucuuucgggagucuu

SEQ ID NO: 1417667 - RNA, 19 nt, Artificial Sequence
  Description of Artificial Sequence: Synthetic oligonucleotide
  Antisense strand to SEQ ID NO: 1417666
aagacucccgaaagauuaa

SEQ ID NO: 1417668 - RNA, 19 nt, Artificial Sequence
  Description of Artificial Sequence: Synthetic oligonucleotide
  Sense strand starting at position 3755 of SEQ ID NO: 1243450
agaggacacguuugauugu

SEQ ID NO: 1417669 - RNA, 19 nt, Artificial Sequence
  Description of Artificial Sequence: Synthetic oligonucleotide
  Antisense strand to SEQ ID NO: 1417668
acaaucaaacguguccucu

SEQ ID NO: 1417670 - RNA, 19 nt, Artificial Sequence
  Description of Artificial Sequence: Synthetic oligonucleotide
  Sense strand starting at position 161 of SEQ ID NO: 1243451
aagcaagaugcagggaaua

SEQ ID NO: 1417671 - RNA, 19 nt, Artificial Sequence
  Description of Artificial Sequence: Synthetic oligonucleotide
  Antisense strand to SEQ ID NO: 1417670
uauucccugcaucuugcuu

SEQ ID NO: 1417672 - RNA, 19 nt, Artificial Sequence
  Description of Artificial Sequence: Synthetic oligonucleotide
  Sense strand starting at position 313 of SEQ ID NO: 1243451
ggugccuguggauagaaau

SEQ ID NO: 1417673 - RNA, 19 nt, Artificial Sequence
  Description of Artificial Sequence: Synthetic oligonucleotide
  Antisense strand to SEQ ID NO: 1417672
auuucuauccacaggcacc

SEQ ID NO: 1417674 - RNA, 19 nt, Artificial Sequence
  Description of Artificial Sequence: Synthetic oligonucleotide
  Sense strand starting at position 856 of SEQ ID NO: 1243451
gagcaagguuguucuuaca

SEQ ID NO: 1417675 - RNA, 19 nt, Artificial Sequence
  Description of Artificial Sequence: Synthetic oligonucleotide
  Antisense strand to SEQ ID NO: 1417674
uguaagaacaaccuugcuc

SEQ ID NO: 1417676 - RNA, 19 nt, Artificial Sequence
  Description of Artificial Sequence: Synthetic oligonucleotide
  Sense strand starting at position 864 of SEQ ID NO: 1243451
uuguucuuacaggguugaa

SEQ ID NO: 1417677 - RNA, 19 nt, Artificial Sequence
  Description of Artificial Sequence: Synthetic oligonucleotide
  Antisense strand to SEQ ID NO: 1417676
uucaacccuguaagaacaa

SEQ ID NO: 1417678 - RNA, 19 nt, Artificial Sequence
  Description of Artificial Sequence: Synthetic oligonucleotide
  Sense strand starting at position 867 of SEQ ID NO: 1243451
uucuuacaggguugaagaa

SEQ ID NO: 1417679 - RNA, 19 nt, Artificial Sequence
  Description of Artificial Sequence: Synthetic oligonucleotide
  Antisense strand to SEQ ID NO: 1417678
uucuucaacccuguaagaa

SEQ ID NO: 1417680 - RNA, 19 nt, Artificial Sequence
  Description of Artificial Sequence: Synthetic oligonucleotide
  Sense strand starting at position 945 of SEQ ID NO: 1243451
gaaagaagccuuuguguac

SEQ ID NO: 1417681 - RNA, 19 nt, Artificial Sequence
  Description of Artificial Sequence: Synthetic oligonucleotide
  Antisense strand to SEQ ID NO: 1417680
guacacaaaggcuucuuuc

SEQ ID NO: 1417682 - RNA, 19 nt, Artificial Sequence
  Description of Artificial Sequence: Synthetic oligonucleotide
  Sense strand starting at position 946 of SEQ ID NO: 1243451
aaagaagccuuuguguacu

SEQ ID NO: 1417683 - RNA, 19 nt, Artificial Sequence
  Description of Artificial Sequence: Synthetic oligonucleotide
  Antisense strand to SEQ ID NO: 1417682
aguacacaaaggcuucuuu

SEQ ID NO: 1417684 - RNA, 19 nt, Artificial Sequence
  Description of Artificial Sequence: Synthetic oligonucleotide
  Sense strand starting at position 954 of SEQ ID NO: 1243451
cuuuguguacuuggaggua

SEQ ID NO: 1417685 - RNA, 19 nt, Artificial Sequence
  Description of Artificial Sequence: Synthetic oligonucleotide
  Antisense strand to SEQ ID NO: 1417684
uaccuccaaguacacaaag

SEQ ID NO: 1417686 - RNA, 19 nt, Artificial Sequence
  Description of Artificial Sequence: Synthetic oligonucleotide
  Sense strand starting at position 1045 of SEQ ID NO: 1243451
gugcccagaucucucauuu

SEQ ID NO: 1417687 - RNA, 19 nt, Artificial Sequence
  Description of Artificial Sequence: Synthetic oligonucleotide
  Antisense strand to SEQ ID NO: 1417686
aaaugagagaucugggcac

SEQ ID NO: 1417688 - RNA, 19 nt, Artificial Sequence
  Description of Artificial Sequence: Synthetic oligonucleotide
  Sense strand starting at position 1076 of SEQ ID NO: 1243451
agcucucuucuagagcuuu

SEQ ID NO: 1417689 - RNA, 19 nt, Artificial Sequence
  Description of Artificial Sequence: Synthetic oligonucleotide
  Antisense strand to SEQ ID NO: 1417688
aaagcucuagaagagagcu

SEQ ID NO: 1417690 - RNA, 19 nt, Artificial Sequence
  Description of Artificial Sequence: Synthetic oligonucleotide
  Sense strand starting at position 1141 of SEQ ID NO: 1243451
cugacuauaagugggcaua

SEQ ID NO: 1417691 - RNA, 19 nt, Artificial Sequence
  Description of Artificial Sequence: Synthetic oligonucleotide
  Antisense strand to SEQ ID NO: 1417690
uaugcccacuuauagucag

SEQ ID NO: 1417692 - RNA, 19 nt, Artificial Sequence
  Description of Artificial Sequence: Synthetic oligonucleotide
  Sense strand starting at position 1143 of SEQ ID NO: 1243451
gacuauaagugggcauaga

SEQ ID NO: 1417693 - RNA, 19 nt, Artificial Sequence
  Description of Artificial Sequence: Synthetic oligonucleotide
  Antisense strand to SEQ ID NO: 1417692
ucuaugcccacuuauaguc

SEQ ID NO: 1417694 - RNA, 19 nt, Artificial Sequence
  Description of Artificial Sequence: Synthetic oligonucleotide
  Sense strand starting at position 1566 of SEQ ID NO: 1243451
cgacucuuccaaggguacu

SEQ ID NO: 1417695 - RNA, 19 nt, Artificial Sequence
  Description of Artificial Sequence: Synthetic oligonucleotide
  Antisense strand to SEQ ID NO: 1417694
aguacccuuggaagagucg

SEQ ID NO: 1417696 - RNA, 19 nt, Artificial Sequence
  Description of Artificial Sequence: Synthetic oligonucleotide
  Sense strand starting at position 2275 of SEQ ID NO: 1243451
accuucuagcucuggguaa

SEQ ID NO: 1417697 - RNA, 19 nt, Artificial Sequence
  Description of Artificial Sequence: Synthetic oligonucleotide
  Antisense strand to SEQ ID NO: 1417696
uuacccagagcuagaaggu

SEQ ID NO: 1417698 - RNA, 19 nt, Artificial Sequence
  Description of Artificial Sequence: Synthetic oligonucleotide
  Sense strand starting at position 2377 of SEQ ID NO: 1243451
ugucaucuccgcgagaaca

SEQ ID NO: 1417699 - RNA, 19 nt, Artificial Sequence
  Description of Artificial Sequence: Synthetic oligonucleotide
  Antisense strand to SEQ ID NO: 1417698
uguucucgcggagaugaca

SEQ ID NO: 1417700 - RNA, 19 nt, Artificial Sequence
  Description of Artificial Sequence: Synthetic oligonucleotide
  Sense strand starting at position 2440 of SEQ ID NO: 1243451
cgcucaguucuggaagaug

SEQ ID NO: 1417701 - RNA, 19 nt, Artificial Sequence
  Description of Artificial Sequence: Synthetic oligonucleotide
  Antisense strand to SEQ ID NO: 1417700
caucuuccagaacugagcg

SEQ ID NO: 1417702 - RNA, 19 nt, Artificial Sequence
  Description of Artificial Sequence: Synthetic oligonucleotide
  Sense strand starting at position 2481 of SEQ ID NO: 1243451
aaggguaacugaucuuauc

SEQ ID NO: 1417703 - RNA, 19 nt, Artificial Sequence
  Description of Artificial Sequence: Synthetic oligonucleotide
  Antisense strand to SEQ ID NO: 1417702
gauaagaucaguuacccuu

SEQ ID NO: 1417704 - RNA, 19 nt, Artificial Sequence
  Description of Artificial Sequence: Synthetic oligonucleotide
  Sense strand starting at position 2512 of SEQ ID NO: 1243451
uugggaugaucucuccauu

SEQ ID NO: 1417705 - RNA, 19 nt, Artificial Sequence
  Description of Artificial Sequence: Synthetic oligonucleotide
  Antisense strand to SEQ ID NO: 1417704
aauggagagaucaucccaa

SEQ ID NO: 1417706 - RNA, 19 nt, Artificial Sequence
  Description of Artificial Sequence: Synthetic oligonucleotide
  Sense strand starting at position 2594 of SEQ ID NO: 1243451
cugcaaugaucucugaguu

SEQ ID NO: 1417707 - RNA, 19 nt, Artificial Sequence
  Description of Artificial Sequence: Synthetic oligonucleotide
  Antisense strand to SEQ ID NO: 1417706
aacucagagaucauugcag

SEQ ID NO: 1417708 - RNA, 19 nt, Artificial Sequence
  Description of Artificial Sequence: Synthetic oligonucleotide
  Sense strand starting at position 2595 of SEQ ID NO: 1243451
ugcaaugaucucugaguuc

SEQ ID NO: 1417709 - RNA, 19 nt, Artificial Sequence
  Description of Artificial Sequence: Synthetic oligonucleotide
  Antisense strand to SEQ ID NO: 1417708
gaacucagagaucauugca

SEQ ID NO: 1417710 - RNA, 19 nt, Artificial Sequence
  Description of Artificial Sequence: Synthetic oligonucleotide
  Sense strand starting at position 2731 of SEQ ID NO: 1243451
cccaucugccagggagaua

SEQ ID NO: 1417711 - RNA, 19 nt, Artificial Sequence
  Description of Artificial Sequence: Synthetic oligonucleotide
  Antisense strand to SEQ ID NO: 1417710
uaucucccuggcagauggg

SEQ ID NO: 1417712 - RNA, 19 nt, Artificial Sequence
  Description of Artificial Sequence: Synthetic oligonucleotide
  Sense strand starting at position 2872 of SEQ ID NO: 1243451
ugcuccuguccuuagcaaa

SEQ ID NO: 1417713 - RNA, 19 nt, Artificial Sequence
  Description of Artificial Sequence: Synthetic oligonucleotide
  Antisense strand to SEQ ID NO: 1417712
uuugcuaaggacaggagca

SEQ ID NO: 1417714 - RNA, 19 nt, Artificial Sequence
  Description of Artificial Sequence: Synthetic oligonucleotide
  Sense strand starting at position 3024 of SEQ ID NO: 1243451
gacucaugggauggucacu

SEQ ID NO: 1417715 - RNA, 19 nt, Artificial Sequence
  Description of Artificial Sequence: Synthetic oligonucleotide
  Antisense strand to SEQ ID NO: 1417714
agugaccaucccaugaguc

SEQ ID NO: 1417716 - RNA, 19 nt, Artificial Sequence
  Description of Artificial Sequence: Synthetic oligonucleotide
  Sense strand starting at position 3087 of SEQ ID NO: 1243451
cucuucuuaggucaaugaa

SEQ ID NO: 1417717 - RNA, 19 nt, Artificial Sequence
  Description of Artificial Sequence: Synthetic oligonucleotide
  Antisense strand to SEQ ID NO: 1417716
uucauugaccuaagaagag

SEQ ID NO: 1417718 - RNA, 19 nt, Artificial Sequence
  Description of Artificial Sequence: Synthetic oligonucleotide
  Sense strand starting at position 3090 of SEQ ID NO: 1243451
uucuuaggucaaugaauug

SEQ ID NO: 1417719 - RNA, 19 nt, Artificial Sequence
  Description of Artificial Sequence: Synthetic oligonucleotide
  Antisense strand to SEQ ID NO: 1417718
caauucauugaccuaagaa

SEQ ID NO: 1417720 - RNA, 19 nt, Artificial Sequence
  Description of Artificial Sequence: Synthetic oligonucleotide
  Sense strand starting at position 3311 of SEQ ID NO: 1243451
ccagaagucuauucugcca

SEQ ID NO: 1417721 - RNA, 19 nt, Artificial Sequence
  Description of Artificial Sequence: Synthetic oligonucleotide
  Antisense strand to SEQ ID NO: 1417720
uggcagaauagacuucugg

SEQ ID NO: 1417722 - RNA, 19 nt, Artificial Sequence
  Description of Artificial Sequence: Synthetic oligonucleotide
  Sense strand starting at position 3333 of SEQ ID NO: 1243451
auuguccucucaguaauga

SEQ ID NO: 1417723 - RNA, 19 nt, Artificial Sequence
  Description of Artificial Sequence: Synthetic oligonucleotide
  Antisense strand to SEQ ID NO: 1417722
ucauuacugagaggacaau

SEQ ID NO: 1417724 - RNA, 19 nt, Artificial Sequence
  Description of Artificial Sequence: Synthetic oligonucleotide
  Sense strand starting at position 3341 of SEQ ID NO: 1243451
cucaguaaugacugcuuua

SEQ ID NO: 1417725 - RNA, 19 nt, Artificial Sequence
  Description of Artificial Sequence: Synthetic oligonucleotide
  Antisense strand to SEQ ID NO: 1417724
uaaagcagucauuacugag

SEQ ID NO: 1417726 - RNA, 19 nt, Artificial Sequence
  Description of Artificial Sequence: Synthetic oligonucleotide
  Sense strand starting at position 3379 of SEQ ID NO: 1243451
gagcauacucuuggugaaa

SEQ ID NO: 1417727 - RNA, 19 nt, Artificial Sequence
  Description of Artificial Sequence: Synthetic oligonucleotide
  Antisense strand to SEQ ID NO: 1417726
uuucaccaagaguaugcuc

SEQ ID NO: 1417728 - RNA, 19 nt, Artificial Sequence
  Description of Artificial Sequence: Synthetic oligonucleotide
  Sense strand starting at position 3466 of SEQ ID NO: 1243451
gcgugcuuggcaucugaga

SEQ ID NO: 1417729 - RNA, 19 nt, Artificial Sequence
  Description of Artificial Sequence: Synthetic oligonucleotide
  Antisense strand to SEQ ID NO: 1417728
ucucagaugccaagcacgc

SEQ ID NO: 1417730 - RNA, 19 nt, Artificial Sequence
  Description of Artificial Sequence: Synthetic oligonucleotide
  Sense strand starting at position 3468 of SEQ ID NO: 1243451
gugcuuggcaucugagaaa

SEQ ID NO: 1417731 - RNA, 19 nt, Artificial Sequence
  Description of Artificial Sequence: Synthetic oligonucleotide
  Antisense strand to SEQ ID NO: 1417730
uuucucagaugccaagcac

SEQ ID NO: 1417732 - RNA, 19 nt, Artificial Sequence
  Description of Artificial Sequence: Synthetic oligonucleotide
  Sense strand starting at position 3497 of SEQ ID NO: 1243451
aucacaauggguuggugaa

SEQ ID NO: 1417733 - RNA, 19 nt, Artificial Sequence
  Description of Artificial Sequence: Synthetic oligonucleotide
  Antisense strand to SEQ ID NO: 1417732
uucaccaacccauugugau

SEQ ID NO: 1417734 - RNA, 19 nt, Artificial Sequence
  Description of Artificial Sequence: Synthetic oligonucleotide
  Sense strand starting at position 3671 of SEQ ID NO: 1243451
aguggagacuguccugaga

SEQ ID NO: 1417735 - RNA, 19 nt, Artificial Sequence
  Description of Artificial Sequence: Synthetic oligonucleotide
  Antisense strand to SEQ ID NO: 1417734
ucucaggacagucuccacu

SEQ ID NO: 1417736 - RNA, 19 nt, Artificial Sequence
  Description of Artificial Sequence: Synthetic oligonucleotide
  Sense strand starting at position 3691 of SEQ ID NO: 1243451
uacugugaacccugaaguu

SEQ ID NO: 1417737 - RNA, 19 nt, Artificial Sequence
  Description of Artificial Sequence: Synthetic oligonucleotide
  Antisense strand to SEQ ID NO: 1417736
aacuucaggguucacagua

SEQ ID NO: 1417738 - RNA, 19 nt, Artificial Sequence
  Description of Artificial Sequence: Synthetic oligonucleotide
  Sense strand starting at position 3779 of SEQ ID NO: 1243451
auguauuagcaaggaugaa

SEQ ID NO: 1417739 - RNA, 19 nt, Artificial Sequence
  Description of Artificial Sequence: Synthetic oligonucleotide
  Antisense strand to SEQ ID NO: 1417738
uucauccuugcuaauacau

SEQ ID NO: 1417740 - RNA, 19 nt, Artificial Sequence
  Description of Artificial Sequence: Synthetic oligonucleotide
  Sense strand starting at position 3808 of SEQ ID NO: 1243451
aagaguucaggugggagau

SEQ ID NO: 1417741 - RNA, 19 nt, Artificial Sequence
  Description of Artificial Sequence: Synthetic oligonucleotide
  Antisense strand to SEQ ID NO: 1417740
aucucccaccugaacucuu

SEQ ID NO: 1417742 - RNA, 19 nt, Artificial Sequence
  Description of Artificial Sequence: Synthetic oligonucleotide
  Sense strand starting at position 3809 of SEQ ID NO: 1243451
agaguucaggugggagauu

SEQ ID NO: 1417743 - RNA, 19 nt, Artificial Sequence
  Description of Artificial Sequence: Synthetic oligonucleotide
  Antisense strand to SEQ ID NO: 1417742
aaucucccaccugaacucu

SEQ ID NO: 1417744 - RNA, 19 nt, Artificial Sequence
  Description of Artificial Sequence: Synthetic oligonucleotide
  Sense strand starting at position 3853 of SEQ ID NO: 1243451
guagaaaucugagcuacug

SEQ ID NO: 1417745 - RNA, 19 nt, Artificial Sequence
  Description of Artificial Sequence: Synthetic oligonucleotide
  Antisense strand to SEQ ID NO: 1417744
caguagcucagauuucuac

SEQ ID NO: 1417746 - RNA, 19 nt, Artificial Sequence
  Description of Artificial Sequence: Synthetic oligonucleotide
  Sense strand starting at position 3878 of SEQ ID NO: 1243451
ggaaguugcagagguagaa

SEQ ID NO: 1417747 - RNA, 19 nt, Artificial Sequence
  Description of Artificial Sequence: Synthetic oligonucleotide
  Antisense strand to SEQ ID NO: 1417746
uucuaccucugcaacuucc

SEQ ID NO: 1417748 - RNA, 19 nt, Artificial Sequence
  Description of Artificial Sequence: Synthetic oligonucleotide
  Sense strand starting at position 3917 of SEQ ID NO: 1243451
gcaaccauuuauggaacau

SEQ ID NO: 1417749 - RNA, 19 nt, Artificial Sequence
  Description of Artificial Sequence: Synthetic oligonucleotide
  Antisense strand to SEQ ID NO: 1417748
auguuccauaaaugguugc

SEQ ID NO: 1417750 - RNA, 19 nt, Artificial Sequence
  Description of Artificial Sequence: Synthetic oligonucleotide
  Sense strand starting at position 623 of SEQ ID NO: 1243452
gacccaguccugugagcaa

SEQ ID NO: 1417751 - RNA, 19 nt, Artificial Sequence
  Description of Artificial Sequence: Synthetic oligonucleotide
  Antisense strand to SEQ ID NO: 1417750
uugcucacaggacuggguc

SEQ ID NO: 1417752 - RNA, 19 nt, Artificial Sequence
  Description of Artificial Sequence: Synthetic oligonucleotide
  Sense strand starting at position 655 of SEQ ID NO: 1243452
agaugagauuagcagcaaa

SEQ ID NO: 1417753 - RNA, 19 nt, Artificial Sequence
  Description of Artificial Sequence: Synthetic oligonucleotide
  Antisense strand to SEQ ID NO: 1417752
uuugcugcuaaucucaucu

SEQ ID NO: 1417754 - RNA, 19 nt, Artificial Sequence
  Description of Artificial Sequence: Synthetic oligonucleotide
  Sense strand starting at position 1076 of SEQ ID NO: 1243452
cccugcacugcuggauaaa

SEQ ID NO: 1417755 - RNA, 19 nt, Artificial Sequence
  Description of Artificial Sequence: Synthetic oligonucleotide
  Antisense strand to SEQ ID NO: 1417754
uuuauccagcagugcaggg

SEQ ID NO: 1417756 - RNA, 19 nt, Artificial Sequence
  Description of Artificial Sequence: Synthetic oligonucleotide
  Sense strand starting at position 1077 of SEQ ID NO: 1243452
ccugcacugcuggauaaau

SEQ ID NO: 1417757 - RNA, 19 nt, Artificial Sequence
  Description of Artificial Sequence: Synthetic oligonucleotide
  Antisense strand to SEQ ID NO: 1417756
auuuauccagcagugcagg

SEQ ID NO: 1417758 - RNA, 19 nt, Artificial Sequence
  Description of Artificial Sequence: Synthetic oligonucleotide
  Sense strand starting at position 1079 of SEQ ID NO: 1243452
ugcacugcuggauaaauau

SEQ ID NO: 1417759 - RNA, 19 nt, Artificial Sequence
  Description of Artificial Sequence: Synthetic oligonucleotide
  Antisense strand to SEQ ID NO: 1417758
auauuuauccagcagugca

SEQ ID NO: 1417760 - RNA, 19 nt, Artificial Sequence
  Description of Artificial Sequence: Synthetic oligonucleotide
  Sense strand starting at position 1140 of SEQ ID NO: 1243452
caguguacuccgugcugga

SEQ ID NO: 1417761 - RNA, 19 nt, Artificial Sequence
  Description of Artificial Sequence: Synthetic oligonucleotide
  Antisense strand to SEQ ID NO: 1417760
uccagcacggaguacacug

SEQ ID NO: 1417762 - RNA, 19 nt, Artificial Sequence
  Description of Artificial Sequence: Synthetic oligonucleotide
  Sense strand starting at position 1143 of SEQ ID NO: 1243452
uguacuccgugcuggaaga

SEQ ID NO: 1417763 - RNA, 19 nt, Artificial Sequence
  Description of Artificial Sequence: Synthetic oligonucleotide
  Antisense strand to SEQ ID NO: 1417762
ucuuccagcacggaguaca

SEQ ID NO: 1417764 - RNA, 19 nt, Artificial Sequence
  Description of Artificial Sequence: Synthetic oligonucleotide
  Sense strand starting at position 1177 of SEQ ID NO: 1243452
agacuucucagcuggagaa

SEQ ID NO: 1417765 - RNA, 19 nt, Artificial Sequence
  Description of Artificial Sequence: Synthetic oligonucleotide
  Antisense strand to SEQ ID NO: 1417764
uucuccagcugagaagucu

SEQ ID NO: 1417766 - RNA, 19 nt, Artificial Sequence
  Description of Artificial Sequence: Synthetic oligonucleotide
  Sense strand starting at position 1178 of SEQ ID NO: 1243452
gacuucucagcuggagaaa

SEQ ID NO: 1417767 - RNA, 19 nt, Artificial Sequence
  Description of Artificial Sequence: Synthetic oligonucleotide
  Antisense strand to SEQ ID NO: 1417766
uuucuccagcugagaaguc

SEQ ID NO: 1417768 - RNA, 19 nt, Artificial Sequence
  Description of Artificial Sequence: Synthetic oligonucleotide
  Sense strand starting at position 1220 of SEQ ID NO: 1243452
ggauuuggcugaggaauag

SEQ ID NO: 1417769 - RNA, 19 nt, Artificial Sequence
  Description of Artificial Sequence: Synthetic oligonucleotide
  Antisense strand to SEQ ID NO: 1417768
cuauuccucagccaaaucc

SEQ ID NO: 1417770 - RNA, 19 nt, Artificial Sequence
  Description of Artificial Sequence: Synthetic oligonucleotide
  Sense strand starting at position 1259 of SEQ ID NO: 1243452
agggaagacucuggagaag

SEQ ID NO: 1417771 - RNA, 19 nt, Artificial Sequence
  Description of Artificial Sequence: Synthetic oligonucleotide
  Antisense strand to SEQ ID NO: 1417770
cuucuccagagucuucccu

SEQ ID NO: 1417772 - RNA, 19 nt, Artificial Sequence
  Description of Artificial Sequence: Synthetic oligonucleotide
  Sense strand starting at position 1327 of SEQ ID NO: 1243452
cacugacucugugagcuua

SEQ ID NO: 1417773 - RNA, 19 nt, Artificial Sequence
  Description of Artificial Sequence: Synthetic oligonucleotide
  Antisense strand to SEQ ID NO: 1417772
uaagcucacagagucagug

SEQ ID NO: 1417774 - RNA, 19 nt, Artificial Sequence
  Description of Artificial Sequence: Synthetic oligonucleotide
  Sense strand starting at position 1335 of SEQ ID NO: 1243452
cugugagcuuaagaaucca

SEQ ID NO: 1417775 - RNA, 19 nt, Artificial Sequence
  Description of Artificial Sequence: Synthetic oligonucleotide
  Antisense strand to SEQ ID NO: 1417774
uggauucuuaagcucacag

SEQ ID NO: 1417776 - RNA, 19 nt, Artificial Sequence
  Description of Artificial Sequence: Synthetic oligonucleotide
  Sense strand starting at position 1386 of SEQ ID NO: 1243452
aggauuaaacguggcggau

SEQ ID NO: 1417777 - RNA, 19 nt, Artificial Sequence
  Description of Artificial Sequence: Synthetic oligonucleotide
  Antisense strand to SEQ ID NO: 1417776
auccgccacguuuaauccu

SEQ ID NO: 1417778 - RNA, 19 nt, Artificial Sequence
  Description of Artificial Sequence: Synthetic oligonucleotide
  Sense strand starting at position 1404 of SEQ ID NO: 1243452
ugaagcagucugcguggua

SEQ ID NO: 1417779 - RNA, 19 nt, Artificial Sequence
  Description of Artificial Sequence: Synthetic oligonucleotide
  Antisense strand to SEQ ID NO: 1417778
uaccacgcagacugcuuca

SEQ ID NO: 1417780 - RNA, 19 nt, Artificial Sequence
  Description of Artificial Sequence: Synthetic oligonucleotide
  Sense strand starting at position 1405 of SEQ ID NO: 1243452
gaagcagucugcgugguau

SEQ ID NO: 1417781 - RNA, 19 nt, Artificial Sequence
  Description of Artificial Sequence: Synthetic oligonucleotide
  Antisense strand to SEQ ID NO: 1417780
auaccacgcagacugcuuc

SEQ ID NO: 1417782 - RNA, 19 nt, Artificial Sequence
  Description of Artificial Sequence: Synthetic oligonucleotide
  Sense strand starting at position 1407 of SEQ ID NO: 1243452
agcagucugcgugguauuu

SEQ ID NO: 1417783 - RNA, 19 nt, Artificial Sequence
  Description of Artificial Sequence: Synthetic oligonucleotide
  Antisense strand to SEQ ID NO: 1417782
aaauaccacgcagacugcu

SEQ ID NO: 1417784 - RNA, 19 nt, Artificial Sequence
  Description of Artificial Sequence: Synthetic oligonucleotide
  Sense strand starting at position 1416 of SEQ ID NO: 1243452
cgugguauuuggccaugca

SEQ ID NO: 1417785 - RNA, 19 nt, Artificial Sequence
  Description of Artificial Sequence: Synthetic oligonucleotide
  Antisense strand to SEQ ID NO: 1417784
ugcauggccaaauaccacg

SEQ ID NO: 1417786 - RNA, 19 nt, Artificial Sequence
  Description of Artificial Sequence: Synthetic oligonucleotide
  Sense strand starting at position 1419 of SEQ ID NO: 1243452
gguauuuggccaugcagga

SEQ ID NO: 1417787 - RNA, 19 nt, Artificial Sequence
  Description of Artificial Sequence: Synthetic oligonucleotide
  Antisense strand to SEQ ID NO: 1417786
uccugcauggccaaauacc

SEQ ID NO: 1417788 - RNA, 19 nt, Artificial Sequence
  Description of Artificial Sequence: Synthetic oligonucleotide
  Sense strand starting at position 1460 of SEQ ID NO: 1243452
uucucuuucucguacagau

SEQ ID NO: 1417789 - RNA, 19 nt, Artificial Sequence
  Description of Artificial Sequence: Synthetic oligonucleotide
  Antisense strand to SEQ ID NO: 1417788
aucuguacgagaaagagaa

SEQ ID NO: 1417790 - RNA, 19 nt, Artificial Sequence
  Description of Artificial Sequence: Synthetic oligonucleotide
  Sense strand starting at position 1689 of SEQ ID NO: 1243452
cggaaauguaggugucaca

SEQ ID NO: 1417791 - RNA, 19 nt, Artificial Sequence
  Description of Artificial Sequence: Synthetic oligonucleotide
  Antisense strand to SEQ ID NO: 1417790
ugugacaccuacauuuccg

SEQ ID NO: 1417792 - RNA, 19 nt, Artificial Sequence
  Description of Artificial Sequence: Synthetic oligonucleotide
  Sense strand starting at position 1692 of SEQ ID NO: 1243452
aaauguaggugucacaaau

SEQ ID NO: 1417793 - RNA, 19 nt, Artificial Sequence
  Description of Artificial Sequence: Synthetic oligonucleotide
  Antisense strand to SEQ ID NO: 1417792
auuugugacaccuacauuu

SEQ ID NO: 1417794 - RNA, 19 nt, Artificial Sequence
  Description of Artificial Sequence: Synthetic oligonucleotide
  Sense strand starting at position 2171 of SEQ ID NO: 1243452
gugcgagaaacgucgcaga

SEQ ID NO: 1417795 - RNA, 19 nt, Artificial Sequence
  Description of Artificial Sequence: Synthetic oligonucleotide
  Antisense strand to SEQ ID NO: 1417794
ucugcgacguuucucgcac

SEQ ID NO: 1417796 - RNA, 19 nt, Artificial Sequence
  Description of Artificial Sequence: Synthetic oligonucleotide
  Sense strand starting at position 2232 of SEQ ID NO: 1243452
gaagcuugucgcgggcauu

SEQ ID NO: 1417797 - RNA, 19 nt, Artificial Sequence
  Description of Artificial Sequence: Synthetic oligonucleotide
  Antisense strand to SEQ ID NO: 1417796
aaugcccgcgacaagcuuc

SEQ ID NO: 1417798 - RNA, 19 nt, Artificial Sequence
  Description of Artificial Sequence: Synthetic oligonucleotide
  Sense strand starting at position 2319 of SEQ ID NO: 1243452
ucggcauccgcucagaguu

SEQ ID NO: 1417799 - RNA, 19 nt, Artificial Sequence
  Description of Artificial Sequence: Synthetic oligonucleotide
  Antisense strand to SEQ ID NO: 1417798
aacucugagcggaugccga

SEQ ID NO: 1417800 - RNA, 19 nt, Artificial Sequence
  Description of Artificial Sequence: Synthetic oligonucleotide
  Sense strand starting at position 2442 of SEQ ID NO: 1243452
uuuagugacuccuuaaugu

SEQ ID NO: 1417801 - RNA, 19 nt, Artificial Sequence
  Description of Artificial Sequence: Synthetic oligonucleotide
  Antisense strand to SEQ ID NO: 1417800
acauuaaggagucacuaaa

SEQ ID NO: 1417802 - RNA, 19 nt, Artificial Sequence
  Description of Artificial Sequence: Synthetic oligonucleotide
  Sense strand starting at position 2446 of SEQ ID NO: 1243452
gugacuccuuaauguauag

SEQ ID NO: 1417803 - RNA, 19 nt, Artificial Sequence
  Description of Artificial Sequence: Synthetic oligonucleotide
  Antisense strand to SEQ ID NO: 1417802
cuauacauuaaggagucac

SEQ ID NO: 1417804 - RNA, 19 nt, Artificial Sequence
  Description of Artificial Sequence: Synthetic oligonucleotide
  Sense strand starting at position 2476 of SEQ ID NO: 1243452
ugaagaguugcucaguaga

SEQ ID NO: 1417805 - RNA, 19 nt, Artificial Sequence
  Description of Artificial Sequence: Synthetic oligonucleotide
  Antisense strand to SEQ ID NO: 1417804
ucuacugagcaacucuuca

SEQ ID NO: 1417806 - RNA, 19 nt, Artificial Sequence
  Description of Artificial Sequence: Synthetic oligonucleotide
  Sense strand starting at position 2478 of SEQ ID NO: 1243452
aagaguugcucaguagaga

SEQ ID NO: 1417807 - RNA, 19 nt, Artificial Sequence
  Description of Artificial Sequence: Synthetic oligonucleotide
  Antisense strand to SEQ ID NO: 1417806
ucucuacugagcaacucuu

SEQ ID NO: 1417808 - RNA, 19 nt, Artificial Sequence
  Description of Artificial Sequence: Synthetic oligonucleotide
  Sense strand starting at position 2479 of SEQ ID NO: 1243452
agaguugcucaguagagag

SEQ ID NO: 1417809 - RNA, 19 nt, Artificial Sequence
  Description of Artificial Sequence: Synthetic oligonucleotide
  Antisense strand to SEQ ID NO: 1417808
cucucuacugagcaacucu

SEQ ID NO: 1417810 - RNA, 19 nt, Artificial Sequence
  Description of Artificial Sequence: Synthetic oligonucleotide
  Sense strand starting at position 2530 of SEQ ID NO: 1243452
gugagaacaucugacugga

SEQ ID NO: 1417811 - RNA, 19 nt, Artificial Sequence
  Description of Artificial Sequence: Synthetic oligonucleotide
  Antisense strand to SEQ ID NO: 1417810
uccagucagauguucucac

SEQ ID NO: 1417812 - RNA, 19 nt, Artificial Sequence
  Description of Artificial Sequence: Synthetic oligonucleotide
  Sense strand starting at position 2658 of SEQ ID NO: 1243452
agaggaucauccuaucuau

SEQ ID NO: 1417813 - RNA, 19 nt, Artificial Sequence
  Description of Artificial Sequence: Synthetic oligonucleotide
  Antisense strand to SEQ ID NO: 1417812
auagauaggaugauccucu

SEQ ID NO: 1417814 - RNA, 19 nt, Artificial Sequence
  Description of Artificial Sequence: Synthetic oligonucleotide
  Sense strand starting at position 2806 of SEQ ID NO: 1243452
gaggccaugucguuuguau

SEQ ID NO: 1417815 - RNA, 19 nt, Artificial Sequence
  Description of Artificial Sequence: Synthetic oligonucleotide
  Antisense strand to SEQ ID NO: 1417814
auacaaacgacauggccuc

SEQ ID NO: 1417816 - RNA, 19 nt, Artificial Sequence
  Description of Artificial Sequence: Synthetic oligonucleotide
  Sense strand starting at position 2807 of SEQ ID NO: 1243452
aggccaugucguuuguauc

SEQ ID NO: 1417817 - RNA, 19 nt, Artificial Sequence
  Description of Artificial Sequence: Synthetic oligonucleotide
  Antisense strand to SEQ ID NO: 1417816
gauacaaacgacauggccu

SEQ ID NO: 1417818 - RNA, 19 nt, Artificial Sequence
  Description of Artificial Sequence: Synthetic oligonucleotide
  Sense strand starting at position 2808 of SEQ ID NO: 1243452
ggccaugucguuuguauca

SEQ ID NO: 1417819 - RNA, 19 nt, Artificial Sequence
  Description of Artificial Sequence: Synthetic oligonucleotide
  Antisense strand to SEQ ID NO: 1417818
ugauacaaacgacauggcc

SEQ ID NO: 1417820 - RNA, 19 nt, Artificial Sequence
  Description of Artificial Sequence: Synthetic oligonucleotide
  Sense strand starting at position 3355 of SEQ ID NO: 1243452
uuugcauuguguguagaga

SEQ ID NO: 1417821 - RNA, 19 nt, Artificial Sequence
  Description of Artificial Sequence: Synthetic oligonucleotide
  Antisense strand to SEQ ID NO: 1417820
ucucuacacacaaugcaaa

SEQ ID NO: 1417822 - RNA, 19 nt, Artificial Sequence
  Description of Artificial Sequence: Synthetic oligonucleotide
  Sense strand starting at position 3484 of SEQ ID NO: 1243452
ugcccugacuagucaaaug

SEQ ID NO: 1417823 - RNA, 19 nt, Artificial Sequence
  Description of Artificial Sequence: Synthetic oligonucleotide
  Antisense strand to SEQ ID NO: 1417822
cauuugacuagucagggca

SEQ ID NO: 1417824 - RNA, 19 nt, Artificial Sequence
  Description of Artificial Sequence: Synthetic oligonucleotide
  Sense strand starting at position 3521 of SEQ ID NO: 1243452
gugggcguucaguagagaa

SEQ ID NO: 1417825 - RNA, 19 nt, Artificial Sequence
  Description of Artificial Sequence: Synthetic oligonucleotide
  Antisense strand to SEQ ID NO: 1417824
uucucuacugaacgcccac

SEQ ID NO: 1417826 - RNA, 19 nt, Artificial Sequence
  Description of Artificial Sequence: Synthetic oligonucleotide
  Sense strand starting at position 361 of SEQ ID NO: 1243453
gcugauuaauaaguauuga

SEQ ID NO: 1417827 - RNA, 19 nt, Artificial Sequence
  Description of Artificial Sequence: Synthetic oligonucleotide
  Antisense strand to SEQ ID NO: 1417826
ucaauacuuauuaaucagc

SEQ ID NO: 1417828 - RNA, 19 nt, Artificial Sequence
  Description of Artificial Sequence: Synthetic oligonucleotide
  Sense strand starting at position 442 of SEQ ID NO: 1243453
uuagaaugagcaugcacuu

SEQ ID NO: 1417829 - RNA, 19 nt, Artificial Sequence
  Description of Artificial Sequence: Synthetic oligonucleotide
  Antisense strand to SEQ ID NO: 1417828
aagugcaugcucauucuaa

SEQ ID NO: 1417830 - RNA, 19 nt, Artificial Sequence
  Description of Artificial Sequence: Synthetic oligonucleotide
  Sense strand starting at position 616 of SEQ ID NO: 1243453
aguuauuuauacgaccaau

SEQ ID NO: 1417831 - RNA, 19 nt, Artificial Sequence
  Description of Artificial Sequence: Synthetic oligonucleotide
  Antisense strand to SEQ ID NO: 1417830
auuggucguauaaauaacu

SEQ ID NO: 1417832 - RNA, 19 nt, Artificial Sequence
  Description of Artificial Sequence: Synthetic oligonucleotide
  Sense strand starting at position 654 of SEQ ID NO: 1243453
uuauuuaguugcugggaac

SEQ ID NO: 1417833 - RNA, 19 nt, Artificial Sequence
  Description of Artificial Sequence: Synthetic oligonucleotide
  Antisense strand to SEQ ID NO: 1417832
guucccagcaacuaaauaa

SEQ ID NO: 1417834 - RNA, 19 nt, Artificial Sequence
  Description of Artificial Sequence: Synthetic oligonucleotide
  Sense strand starting at position 709 of SEQ ID NO: 1243453
uggcuuguagggcaaucau

SEQ ID NO: 1417835 - RNA, 19 nt, Artificial Sequence
  Description of Artificial Sequence: Synthetic oligonucleotide
  Antisense strand to SEQ ID NO: 1417834
augauugcccuacaagcca

SEQ ID NO: 1417836 - RNA, 19 nt, Artificial Sequence
  Description of Artificial Sequence: Synthetic oligonucleotide
  Sense strand starting at position 728 of SEQ ID NO: 1243453
cuuagauaugucugaagag

SEQ ID NO: 1417837 - RNA, 19 nt, Artificial Sequence
  Description of Artificial Sequence: Synthetic oligonucleotide
  Antisense strand to SEQ ID NO: 1417836
cucuucagacauaucuaag

SEQ ID NO: 1417838 - RNA, 19 nt, Artificial Sequence
  Description of Artificial Sequence: Synthetic oligonucleotide
  Sense strand starting at position 729 of SEQ ID NO: 1243453
uuagauaugucugaagaga

SEQ ID NO: 1417839 - RNA, 19 nt, Artificial Sequence
  Description of Artificial Sequence: Synthetic oligonucleotide
  Antisense strand to SEQ ID NO: 1417838
ucucuucagacauaucuaa

SEQ ID NO: 1417840 - RNA, 19 nt, Artificial Sequence
  Description of Artificial Sequence: Synthetic oligonucleotide
  Sense strand starting at position 745 of SEQ ID NO: 1243453
agauucgaauuugaaagaa

SEQ ID NO: 1417841 - RNA, 19 nt, Artificial Sequence
  Description of Artificial Sequence: Synthetic oligonucleotide
  Antisense strand to SEQ ID NO: 1417840
uucuuucaaauucgaaucu

SEQ ID NO: 1417842 - RNA, 19 nt, Artificial Sequence
  Description of Artificial Sequence: Synthetic oligonucleotide
  Sense strand starting at position 838 of SEQ ID NO: 1243453
agcauucgcuuaucucaaa

SEQ ID NO: 1417843 - RNA, 19 nt, Artificial Sequence
  Description of Artificial Sequence: Synthetic oligonucleotide
  Antisense strand to SEQ ID NO: 1417842
uuugagauaagcgaaugcu

SEQ ID NO: 1417844 - RNA, 19 nt, Artificial Sequence
  Description of Artificial Sequence: Synthetic oligonucleotide
  Sense strand starting at position 973 of SEQ ID NO: 1243453
cgcagucuccaaugggaca

SEQ ID NO: 1417845 - RNA, 19 nt, Artificial Sequence
  Description of Artificial Sequence: Synthetic oligonucleotide
  Antisense strand to SEQ ID NO: 1417844
ugucccauuggagacugcg

SEQ ID NO: 1417846 - RNA, 19 nt, Artificial Sequence
  Description of Artificial Sequence: Synthetic oligonucleotide
  Sense strand starting at position 974 of SEQ ID NO: 1243453
gcagucuccaaugggacaa

SEQ ID NO: 1417847 - RNA, 19 nt, Artificial Sequence
  Description of Artificial Sequence: Synthetic oligonucleotide
  Antisense strand to SEQ ID NO: 1417846
uugucccauuggagacugc

SEQ ID NO: 1417848 - RNA, 19 nt, Artificial Sequence
  Description of Artificial Sequence: Synthetic oligonucleotide
  Sense strand starting at position 1102 of SEQ ID NO: 1243453
ccuauaguggugugaugca

SEQ ID NO: 1417849 - RNA, 19 nt, Artificial Sequence
  Description of Artificial Sequence: Synthetic oligonucleotide
  Antisense strand to SEQ ID NO: 1417848
ugcaucacaccacuauagg

SEQ ID NO: 1417850 - RNA, 19 nt, Artificial Sequence
  Description of Artificial Sequence: Synthetic oligonucleotide
  Sense strand starting at position 1107 of SEQ ID NO: 1243453
aguggugugaugcagaaac

SEQ ID NO: 1417851 - RNA, 19 nt, Artificial Sequence
  Description of Artificial Sequence: Synthetic oligonucleotide
  Antisense strand to SEQ ID NO: 1417850
guuucugcaucacaccacu

SEQ ID NO: 1417852 - RNA, 19 nt, Artificial Sequence
  Description of Artificial Sequence: Synthetic oligonucleotide
  Sense strand starting at position 1387 of SEQ ID NO: 1243453
gcggguucgcgaguccuua

SEQ ID NO: 1417853 - RNA, 19 nt, Artificial Sequence
  Description of Artificial Sequence: Synthetic oligonucleotide
  Antisense strand to SEQ ID NO: 1417852
uaaggacucgcgaacccgc

SEQ ID NO: 1417854 - RNA, 19 nt, Artificial Sequence
  Description of Artificial Sequence: Synthetic oligonucleotide
  Sense strand starting at position 2116 of SEQ ID NO: 1243453
agcuguguacguuugcgua

SEQ ID NO: 1417855 - RNA, 19 nt, Artificial Sequence
  Description of Artificial Sequence: Synthetic oligonucleotide
  Antisense strand to SEQ ID NO: 1417854
uacgcaaacguacacagcu

SEQ ID NO: 1417856 - RNA, 19 nt, Artificial Sequence
  Description of Artificial Sequence: Synthetic oligonucleotide
  Sense strand starting at position 2122 of SEQ ID NO: 1243453
guacguuugcguaaaggcu

SEQ ID NO: 1417857 - RNA, 19 nt, Artificial Sequence
  Description of Artificial Sequence: Synthetic oligonucleotide
  Antisense strand to SEQ ID NO: 1417856
agccuuuacgcaaacguac

SEQ ID NO: 1417858 - RNA, 19 nt, Artificial Sequence
  Description of Artificial Sequence: Synthetic oligonucleotide
  Sense strand starting at position 2145 of SEQ ID NO: 1243453
ggcgauagaacguuuccgu

SEQ ID NO: 1417859 - RNA, 19 nt, Artificial Sequence
  Description of Artificial Sequence: Synthetic oligonucleotide
  Antisense strand to SEQ ID NO: 1417858
acggaaacguucuaucgcc

SEQ ID NO: 1417860 - RNA, 19 nt, Artificial Sequence
  Description of Artificial Sequence: Synthetic oligonucleotide
  Sense strand starting at position 2148 of SEQ ID NO: 1243453
gauagaacguuuccgugga

SEQ ID NO: 1417861 - RNA, 19 nt, Artificial Sequence
  Description of Artificial Sequence: Synthetic oligonucleotide
  Antisense strand to SEQ ID NO: 1417860
uccacggaaacguucuauc

SEQ ID NO: 1417862 - RNA, 19 nt, Artificial Sequence
  Description of Artificial Sequence: Synthetic oligonucleotide
  Sense strand starting at position 2153 of SEQ ID NO: 1243453
aacguuuccguggaccaga

SEQ ID NO: 1417863 - RNA, 19 nt, Artificial Sequence
  Description of Artificial Sequence: Synthetic oligonucleotide
  Antisense strand to SEQ ID NO: 1417862
ucugguccacggaaacguu

SEQ ID NO: 1417864 - RNA, 19 nt, Artificial Sequence
  Description of Artificial Sequence: Synthetic oligonucleotide
  Sense strand starting at position 2187 of SEQ ID NO: 1243453
uguguuaacauuuguguaa

SEQ ID NO: 1417865 - RNA, 19 nt, Artificial Sequence
  Description of Artificial Sequence: Synthetic oligonucleotide
  Antisense strand to SEQ ID NO: 1417864
uuacacaaauguuaacaca

SEQ ID NO: 1417866 - RNA, 19 nt, Artificial Sequence
  Description of Artificial Sequence: Synthetic oligonucleotide
  Sense strand starting at position 2188 of SEQ ID NO: 1243453
guguuaacauuuguguaaa

SEQ ID NO: 1417867 - RNA, 19 nt, Artificial Sequence
  Description of Artificial Sequence: Synthetic oligonucleotide
  Antisense strand to SEQ ID NO: 1417866
uuuacacaaauguuaacac

SEQ ID NO: 1417868 - RNA, 19 nt, Artificial Sequence
  Description of Artificial Sequence: Synthetic oligonucleotide
  Sense strand starting at position 2368 of SEQ ID NO: 1243453
agucuacuccuauacguca

SEQ ID NO: 1417869 - RNA, 19 nt, Artificial Sequence
  Description of Artificial Sequence: Synthetic oligonucleotide
  Antisense strand to SEQ ID NO: 1417868
ugacguauaggaguagacu

SEQ ID NO: 1417870 - RNA, 19 nt, Artificial Sequence
  Description of Artificial Sequence: Synthetic oligonucleotide
  Sense strand starting at position 2373 of SEQ ID NO: 1243453
acuccuauacgucaguuau

SEQ ID NO: 1417871 - RNA, 19 nt, Artificial Sequence
  Description of Artificial Sequence: Synthetic oligonucleotide
  Antisense strand to SEQ ID NO: 1417870
auaacugacguauaggagu

SEQ ID NO: 1417872 - RNA, 19 nt, Artificial Sequence
  Description of Artificial Sequence: Synthetic oligonucleotide
  Sense strand starting at position 2375 of SEQ ID NO: 1243453
uccuauacgucaguuauug

SEQ ID NO: 1417873 - RNA, 19 nt, Artificial Sequence
  Description of Artificial Sequence: Synthetic oligonucleotide
  Antisense strand to SEQ ID NO: 1417872
caauaacugacguauagga

SEQ ID NO: 1417874 - RNA, 19 nt, Artificial Sequence
  Description of Artificial Sequence: Synthetic oligonucleotide
  Sense strand starting at position 2758 of SEQ ID NO: 1243453
cuugcuuacccuuaaaggu

SEQ ID NO: 1417875 - RNA, 19 nt, Artificial Sequence
  Description of Artificial Sequence: Synthetic oligonucleotide
  Antisense strand to SEQ ID NO: 1417874
accuuuaaggguaagcaag

SEQ ID NO: 1417876 - RNA, 19 nt, Artificial Sequence
  Description of Artificial Sequence: Synthetic oligonucleotide
  Sense strand starting at position 3014 of SEQ ID NO: 1243453
uggcucuuccacggauaga

SEQ ID NO: 1417877 - RNA, 19 nt, Artificial Sequence
  Description of Artificial Sequence: Synthetic oligonucleotide
  Antisense strand to SEQ ID NO: 1417876
ucuauccguggaagagcca

SEQ ID NO: 1417878 - RNA, 19 nt, Artificial Sequence
  Description of Artificial Sequence: Synthetic oligonucleotide
  Sense strand starting at position 3015 of SEQ ID NO: 1243453
ggcucuuccacggauagag

SEQ ID NO: 1417879 - RNA, 19 nt, Artificial Sequence
  Description of Artificial Sequence: Synthetic oligonucleotide
  Antisense strand to SEQ ID NO: 1417878
cucuauccguggaagagcc

SEQ ID NO: 1417880 - RNA, 19 nt, Artificial Sequence
  Description of Artificial Sequence: Synthetic oligonucleotide
  Sense strand starting at position 3023 of SEQ ID NO: 1243453
cacggauagaguggaauua

SEQ ID NO: 1417881 - RNA, 19 nt, Artificial Sequence
  Description of Artificial Sequence: Synthetic oligonucleotide
  Antisense strand to SEQ ID NO: 1417880
uaauuccacucuauccgug

SEQ ID NO: 1417882 - RNA, 19 nt, Artificial Sequence
  Description of Artificial Sequence: Synthetic oligonucleotide
  Sense strand starting at position 3033 of SEQ ID NO: 1243453
guggaauuacuacaaagcu

SEQ ID NO: 1417883 - RNA, 19 nt, Artificial Sequence
  Description of Artificial Sequence: Synthetic oligonucleotide
  Antisense strand to SEQ ID NO: 1417882
agcuuuguaguaauuccac

SEQ ID NO: 1417884 - RNA, 19 nt, Artificial Sequence
  Description of Artificial Sequence: Synthetic oligonucleotide
  Sense strand starting at position 3041 of SEQ ID NO: 1243453
acuacaaagcucugaugca

SEQ ID NO: 1417885 - RNA, 19 nt, Artificial Sequence
  Description of Artificial Sequence: Synthetic oligonucleotide
  Antisense strand to SEQ ID NO: 1417884
ugcaucagagcuuuguagu

SEQ ID NO: 1417886 - RNA, 19 nt, Artificial Sequence
  Description of Artificial Sequence: Synthetic oligonucleotide
  Sense strand starting at position 3121 of SEQ ID NO: 1243453
cccaaagaucacuggcuua

SEQ ID NO: 1417887 - RNA, 19 nt, Artificial Sequence
  Description of Artificial Sequence: Synthetic oligonucleotide
  Antisense strand to SEQ ID NO: 1417886
uaagccagugaucuuuggg

SEQ ID NO: 1417888 - RNA, 19 nt, Artificial Sequence
  Description of Artificial Sequence: Synthetic oligonucleotide
  Sense strand starting at position 3131 of SEQ ID NO: 1243453
acuggcuuauugcuuaauu

SEQ ID NO: 1417889 - RNA, 19 nt, Artificial Sequence
  Description of Artificial Sequence: Synthetic oligonucleotide
  Antisense strand to SEQ ID NO: 1417888
aauuaagcaauaagccagu

SEQ ID NO: 1417890 - RNA, 19 nt, Artificial Sequence
  Description of Artificial Sequence: Synthetic oligonucleotide
  Sense strand starting at position 3133 of SEQ ID NO: 1243453
uggcuuauugcuuaauuga

SEQ ID NO: 1417891 - RNA, 19 nt, Artificial Sequence
  Description of Artificial Sequence: Synthetic oligonucleotide
  Antisense strand to SEQ ID NO: 1417890
ucaauuaagcaauaagcca

SEQ ID NO: 1417892 - RNA, 19 nt, Artificial Sequence
  Description of Artificial Sequence: Synthetic oligonucleotide
  Sense strand starting at position 3755 of SEQ ID NO: 1243453
uuguuaaagggucaguaaa

SEQ ID NO: 1417893 - RNA, 19 nt, Artificial Sequence
  Description of Artificial Sequence: Synthetic oligonucleotide
  Antisense strand to SEQ ID NO: 1417892
uuuacugacccuuuaacaa

SEQ ID NO: 1417894 - RNA, 19 nt, Artificial Sequence
  Description of Artificial Sequence: Synthetic oligonucleotide
  Sense strand starting at position 3794 of SEQ ID NO: 1243453
caugauaagcuuugugauu

SEQ ID NO: 1417895 - RNA, 19 nt, Artificial Sequence
  Description of Artificial Sequence: Synthetic oligonucleotide
  Antisense strand to SEQ ID NO: 1417894
aaucacaaagcuuaucaug

SEQ ID NO: 1417896 - RNA, 19 nt, Artificial Sequence
  Description of Artificial Sequence: Synthetic oligonucleotide
  Sense strand starting at position 3796 of SEQ ID NO: 1243453
ugauaagcuuugugauuug

SEQ ID NO: 1417897 - RNA, 19 nt, Artificial Sequence
  Description of Artificial Sequence: Synthetic oligonucleotide
  Antisense strand to SEQ ID NO: 1417896
caaaucacaaagcuuauca

SEQ ID NO: 1417898 - RNA, 19 nt, Artificial Sequence
  Description of Artificial Sequence: Synthetic oligonucleotide
  Sense strand starting at position 3831 of SEQ ID NO: 1243453
gacagcaugucaguagugu

SEQ ID NO: 1417899 - RNA, 19 nt, Artificial Sequence
  Description of Artificial Sequence: Synthetic oligonucleotide
  Antisense strand to SEQ ID NO: 1417898
acacuacugacaugcuguc

SEQ ID NO: 1417900 - RNA, 19 nt, Artificial Sequence
  Description of Artificial Sequence: Synthetic oligonucleotide
  Sense strand starting at position 3832 of SEQ ID NO: 1243453
acagcaugucaguagugua

SEQ ID NO: 1417901 - RNA, 19 nt, Artificial Sequence
  Description of Artificial Sequence: Synthetic oligonucleotide
  Antisense strand to SEQ ID NO: 1417900
uacacuacugacaugcugu

SEQ ID NO: 1417902 - RNA, 19 nt, Artificial Sequence
  Description of Artificial Sequence: Synthetic oligonucleotide
  Sense strand starting at position 3872 of SEQ ID NO: 1243453
agucucaaucaacguagaa

SEQ ID NO: 1417903 - RNA, 19 nt, Artificial Sequence
  Description of Artificial Sequence: Synthetic oligonucleotide
  Antisense strand to SEQ ID NO: 1417902
uucuacguugauugagacu

SEQ ID NO: 1417904 - RNA, 19 nt, Artificial Sequence
  Description of Artificial Sequence: Synthetic oligonucleotide
  Sense strand starting at position 3969 of SEQ ID NO: 1243453
gguauaacuugaguuuaua

SEQ ID NO: 1417905 - RNA, 19 nt, Artificial Sequence
  Description of Artificial Sequence: Synthetic oligonucleotide
  Antisense strand to SEQ ID NO: 1417904
uauaaacucaaguuauacc

SEQ ID NO: 1417906 - RNA, 19 nt, Artificial Sequence
  Description of Artificial Sequence: Synthetic oligonucleotide
  Sense strand starting at position 220 of SEQ ID NO: 1243454
aggccugaguucugggaca

SEQ ID NO: 1417907 - RNA, 19 nt, Artificial Sequence
  Description of Artificial Sequence: Synthetic oligonucleotide
  Antisense strand to SEQ ID NO: 1417906
ugucccagaacucaggccu

SEQ ID NO: 1417908 - RNA, 19 nt, Artificial Sequence
  Description of Artificial Sequence: Synthetic oligonucleotide
  Sense strand starting at position 241 of SEQ ID NO: 1243454
agaauuuccuuugccaguu

SEQ ID NO: 1417909 - RNA, 19 nt, Artificial Sequence
  Description of Artificial Sequence: Synthetic oligonucleotide
  Antisense strand to SEQ ID NO: 1417908
aacuggcaaaggaaauucu

SEQ ID NO: 1417910 - RNA, 19 nt, Artificial Sequence
  Description of Artificial Sequence: Synthetic oligonucleotide
  Sense strand starting at position 253 of SEQ ID NO: 1243454
gccaguuuccaacggagua

SEQ ID NO: 1417911 - RNA, 19 nt, Artificial Sequence
  Description of Artificial Sequence: Synthetic oligonucleotide
  Antisense strand to SEQ ID NO: 1417910
uacuccguuggaaacuggc

SEQ ID NO: 1417912 - RNA, 19 nt, Artificial Sequence
  Description of Artificial Sequence: Synthetic oligonucleotide
  Sense strand starting at position 254 of SEQ ID NO: 1243454
ccaguuuccaacggaguaa

SEQ ID NO: 1417913 - RNA, 19 nt, Artificial Sequence
  Description of Artificial Sequence: Synthetic oligonucleotide
  Antisense strand to SEQ ID NO: 1417912
uuacuccguuggaaacugg

SEQ ID NO: 1417914 - RNA, 19 nt, Artificial Sequence
  Description of Artificial Sequence: Synthetic oligonucleotide
  Sense strand starting at position 346 of SEQ ID NO: 1243454
gccucagcuuccuauguaa

SEQ ID NO: 1417915 - RNA, 19 nt, Artificial Sequence
  Description of Artificial Sequence: Synthetic oligonucleotide
  Antisense strand to SEQ ID NO: 1417914
uuacauaggaagcugaggc

SEQ ID NO: 1417916 - RNA, 19 nt, Artificial Sequence
  Description of Artificial Sequence: Synthetic oligonucleotide
  Sense strand starting at position 819 of SEQ ID NO: 1243454
agcucaaaggagcauuauu

SEQ ID NO: 1417917 - RNA, 19 nt, Artificial Sequence
  Description of Artificial Sequence: Synthetic oligonucleotide
  Antisense strand to SEQ ID NO: 1417916
aauaaugcuccuuugagcu

SEQ ID NO: 1417918 - RNA, 19 nt, Artificial Sequence
  Description of Artificial Sequence: Synthetic oligonucleotide
  Sense strand starting at position 1156 of SEQ ID NO: 1243454
cggcgaguuucccaacaag

SEQ ID NO: 1417919 - RNA, 19 nt, Artificial Sequence
  Description of Artificial Sequence: Synthetic oligonucleotide
  Antisense strand to SEQ ID NO: 1417918
cuuguugggaaacucgccg

SEQ ID NO: 1417920 - RNA, 19 nt, Artificial Sequence
  Description of Artificial Sequence: Synthetic oligonucleotide
  Sense strand starting at position 2560 of SEQ ID NO: 1243454
cgagaaggcugcuuguguu

SEQ ID NO: 1417921 - RNA, 19 nt, Artificial Sequence
  Description of Artificial Sequence: Synthetic oligonucleotide
  Antisense strand to SEQ ID NO: 1417920
aacacaagcagccuucucg

SEQ ID NO: 1417922 - RNA, 19 nt, Artificial Sequence
  Description of Artificial Sequence: Synthetic oligonucleotide
  Sense strand starting at position 2566 of SEQ ID NO: 1243454
ggcugcuuguguuuaggga

SEQ ID NO: 1417923 - RNA, 19 nt, Artificial Sequence
  Description of Artificial Sequence: Synthetic oligonucleotide
  Antisense strand to SEQ ID NO: 1417922
ucccuaaacacaagcagcc

SEQ ID NO: 1417924 - RNA, 19 nt, Artificial Sequence
  Description of Artificial Sequence: Synthetic oligonucleotide
  Sense strand starting at position 2574 of SEQ ID NO: 1243454
guguuuagggacuguagua

SEQ ID NO: 1417925 - RNA, 19 nt, Artificial Sequence
  Description of Artificial Sequence: Synthetic oligonucleotide
  Antisense strand to SEQ ID NO: 1417924
uacuacagucccuaaacac

SEQ ID NO: 1417926 - RNA, 19 nt, Artificial Sequence
  Description of Artificial Sequence: Synthetic oligonucleotide
  Sense strand starting at position 2656 of SEQ ID NO: 1243454
ggauucccaccauguaaga

SEQ ID NO: 1417927 - RNA, 19 nt, Artificial Sequence
  Description of Artificial Sequence: Synthetic oligonucleotide
  Antisense strand to SEQ ID NO: 1417926
ucuuacauggugggaaucc

SEQ ID NO: 1417928 - RNA, 19 nt, Artificial Sequence
  Description of Artificial Sequence: Synthetic oligonucleotide
  Sense strand starting at position 2918 of SEQ ID NO: 1243454
cuaguaacagugcaguaau

SEQ ID NO: 1417929 - RNA, 19 nt, Artificial Sequence
  Description of Artificial Sequence: Synthetic oligonucleotide
  Antisense strand to SEQ ID NO: 1417928
auuacugcacuguuacuag

SEQ ID NO: 1417930 - RNA, 19 nt, Artificial Sequence
  Description of Artificial Sequence: Synthetic oligonucleotide
  Sense strand starting at position 2921 of SEQ ID NO: 1243454
guaacagugcaguaauaaa

SEQ ID NO: 1417931 - RNA, 19 nt, Artificial Sequence
  Description of Artificial Sequence: Synthetic oligonucleotide
  Antisense strand to SEQ ID NO: 1417930
uuuauuacugcacuguuac

SEQ ID NO: 1417932 - RNA, 19 nt, Artificial Sequence
  Description of Artificial Sequence: Synthetic oligonucleotide
  Sense strand starting at position 3013 of SEQ ID NO: 1243454
ccucccucagcgcagaaau

SEQ ID NO: 1417933 - RNA, 19 nt, Artificial Sequence
  Description of Artificial Sequence: Synthetic oligonucleotide
  Antisense strand to SEQ ID NO: 1417932
auuucugcgcugagggagg

SEQ ID NO: 1417934 - RNA, 19 nt, Artificial Sequence
  Description of Artificial Sequence: Synthetic oligonucleotide
  Sense strand starting at position 3329 of SEQ ID NO: 1243454
uguacuaacaggugagacu

SEQ ID NO: 1417935 - RNA, 19 nt, Artificial Sequence
  Description of Artificial Sequence: Synthetic oligonucleotide
  Antisense strand to SEQ ID NO: 1417934
agucucaccuguuaguaca

SEQ ID NO: 1417936 - RNA, 19 nt, Artificial Sequence
  Description of Artificial Sequence: Synthetic oligonucleotide
  Sense strand starting at position 3504 of SEQ ID NO: 1243454
gcaugcguccagugaguca

SEQ ID NO: 1417937 - RNA, 19 nt, Artificial Sequence
  Description of Artificial Sequence: Synthetic oligonucleotide
  Antisense strand to SEQ ID NO: 1417936
ugacucacuggacgcaugc

SEQ ID NO: 1417938 - RNA, 19 nt, Artificial Sequence
  Description of Artificial Sequence: Synthetic oligonucleotide
  Sense strand starting at position 3627 of SEQ ID NO: 1243454
cgcugugcugcuuggaaau

SEQ ID NO: 1417939 - RNA, 19 nt, Artificial Sequence
  Description of Artificial Sequence: Synthetic oligonucleotide
  Antisense strand to SEQ ID NO: 1417938
auuuccaagcagcacagcg

SEQ ID NO: 1417940 - RNA, 19 nt, Artificial Sequence
  Description of Artificial Sequence: Synthetic oligonucleotide
  Sense strand starting at position 3684 of SEQ ID NO: 1243454
ggaagaacgguguguucaa

SEQ ID NO: 1417941 - RNA, 19 nt, Artificial Sequence
  Description of Artificial Sequence: Synthetic oligonucleotide
  Antisense strand to SEQ ID NO: 1417940
uugaacacaccguucuucc

SEQ ID NO: 1417942 - RNA, 19 nt, Artificial Sequence
  Description of Artificial Sequence: Synthetic oligonucleotide
  Sense strand starting at position 3704 of SEQ ID NO: 1243454
gcucuaccauuuguguaga

SEQ ID NO: 1417943 - RNA, 19 nt, Artificial Sequence
  Description of Artificial Sequence: Synthetic oligonucleotide
  Antisense strand to SEQ ID NO: 1417942
ucuacacaaaugguagagc

SEQ ID NO: 1417944 - RNA, 19 nt, Artificial Sequence
  Description of Artificial Sequence: Synthetic oligonucleotide
  Sense strand starting at position 3705 of SEQ ID NO: 1243454
cucuaccauuuguguagaa

SEQ ID NO: 1417945 - RNA, 19 nt, Artificial Sequence
  Description of Artificial Sequence: Synthetic oligonucleotide
  Antisense strand to SEQ ID NO: 1417944
uucuacacaaaugguagag

SEQ ID NO: 1417946 - RNA, 19 nt, Artificial Sequence
  Description of Artificial Sequence: Synthetic oligonucleotide
  Sense strand starting at position 3735 of SEQ ID NO: 1243454
acacguuuccuuugugugu

SEQ ID NO: 1417947 - RNA, 19 nt, Artificial Sequence
  Description of Artificial Sequence: Synthetic oligonucleotide
  Antisense strand to SEQ ID NO: 1417946
acacacaaaggaaacgugu

SEQ ID NO: 1417948 - RNA, 19 nt, Artificial Sequence
  Description of Artificial Sequence: Synthetic oligonucleotide
  Sense strand starting at position 3750 of SEQ ID NO: 1243454
gugugucaaaggcaucgaa

SEQ ID NO: 1417949 - RNA, 19 nt, Artificial Sequence
  Description of Artificial Sequence: Synthetic oligonucleotide
  Antisense strand to SEQ ID NO: 1417948
uucgaugccuuugacacac

SEQ ID NO: 1417950 - RNA, 19 nt, Artificial Sequence
  Description of Artificial Sequence: Synthetic oligonucleotide
  Sense strand starting at position 3753 of SEQ ID NO: 1243454
ugucaaaggcaucgaaugu

SEQ ID NO: 1417951 - RNA, 19 nt, Artificial Sequence
  Description of Artificial Sequence: Synthetic oligonucleotide
  Antisense strand to SEQ ID NO: 1417950
acauucgaugccuuugaca

SEQ ID NO: 1417952 - RNA, 19 nt, Artificial Sequence
  Description of Artificial Sequence: Synthetic oligonucleotide
  Sense strand starting at position 3762 of SEQ ID NO: 1243454
caucgaaugucuggaauga

SEQ ID NO: 1417953 - RNA, 19 nt, Artificial Sequence
  Description of Artificial Sequence: Synthetic oligonucleotide
  Antisense strand to SEQ ID NO: 1417952
ucauuccagacauucgaug

SEQ ID NO: 1417954 - RNA, 19 nt, Artificial Sequence
  Description of Artificial Sequence: Synthetic oligonucleotide
  Sense strand starting at position 3766 of SEQ ID NO: 1243454
gaaugucuggaaugaucca

SEQ ID NO: 1417955 - RNA, 19 nt, Artificial Sequence
  Description of Artificial Sequence: Synthetic oligonucleotide
  Antisense strand to SEQ ID NO: 1417954
uggaucauuccagacauuc

SEQ ID NO: 1417956 - RNA, 19 nt, Artificial Sequence
  Description of Artificial Sequence: Synthetic oligonucleotide
  Sense strand starting at position 880 of SEQ ID NO: 1243455
ccaccuccucccgaaugau

SEQ ID NO: 1417957 - RNA, 19 nt, Artificial Sequence
  Description of Artificial Sequence: Synthetic oligonucleotide
  Antisense strand to SEQ ID NO: 1417956
aucauucgggaggaggugg

SEQ ID NO: 1417958 - RNA, 19 nt, Artificial Sequence
  Description of Artificial Sequence: Synthetic oligonucleotide
  Sense strand starting at position 1173 of SEQ ID NO: 1243455
gcucgaauaacgugaguca

SEQ ID NO: 1417959 - RNA, 19 nt, Artificial Sequence
  Description of Artificial Sequence: Synthetic oligonucleotide
  Antisense strand to SEQ ID NO: 1417958
ugacucacguuauucgagc

SEQ ID NO: 1417960 - RNA, 19 nt, Artificial Sequence
  Description of Artificial Sequence: Synthetic oligonucleotide
  Sense strand starting at position 1206 of SEQ ID NO: 1243455
gcgcauuccucacagguga

SEQ ID NO: 1417961 - RNA, 19 nt, Artificial Sequence
  Description of Artificial Sequence: Synthetic oligonucleotide
  Antisense strand to SEQ ID NO: 1417960
ucaccugugaggaaugcgc

SEQ ID NO: 1417962 - RNA, 19 nt, Artificial Sequence
  Description of Artificial Sequence: Synthetic oligonucleotide
  Sense strand starting at position 1568 of SEQ ID NO: 1243455
cgaaguacuucggacuugu

SEQ ID NO: 1417963 - RNA, 19 nt, Artificial Sequence
  Description of Artificial Sequence: Synthetic oligonucleotide
  Antisense strand to SEQ ID NO: 1417962
acaaguccgaaguacuucg

SEQ ID NO: 1417964 - RNA, 19 nt, Artificial Sequence
  Description of Artificial Sequence: Synthetic oligonucleotide
  Sense strand starting at position 1572 of SEQ ID NO: 1243455
guacuucggacuuguggaa

SEQ ID NO: 1417965 - RNA, 19 nt, Artificial Sequence
  Description of Artificial Sequence: Synthetic oligonucleotide
  Antisense strand to SEQ ID NO: 1417964
uuccacaaguccgaaguac

SEQ ID NO: 1417966 - RNA, 19 nt, Artificial Sequence
  Description of Artificial Sequence: Synthetic oligonucleotide
  Sense strand starting at position 1638 of SEQ ID NO: 1243455
ccggauugugaaugaagcu

SEQ ID NO: 1417967 - RNA, 19 nt, Artificial Sequence
  Description of Artificial Sequence: Synthetic oligonucleotide
  Antisense strand to SEQ ID NO: 1417966
agcuucauucacaauccgg

SEQ ID NO: 1417968 - RNA, 19 nt, Artificial Sequence
  Description of Artificial Sequence: Synthetic oligonucleotide
  Sense strand starting at position 1639 of SEQ ID NO: 1243455
cggauugugaaugaagcuu

SEQ ID NO: 1417969 - RNA, 19 nt, Artificial Sequence
  Description of Artificial Sequence: Synthetic oligonucleotide
  Antisense strand to SEQ ID NO: 1417968
aagcuucauucacaauccg

SEQ ID NO: 1417970 - RNA, 19 nt, Artificial Sequence
  Description of Artificial Sequence: Synthetic oligonucleotide
  Sense strand starting at position 1655 of SEQ ID NO: 1243455
cuuggagagugauggaacu

SEQ ID NO: 1417971 - RNA, 19 nt, Artificial Sequence
  Description of Artificial Sequence: Synthetic oligonucleotide
  Antisense strand to SEQ ID NO: 1417970
aguuccaucacucuccaag

SEQ ID NO: 1417972 - RNA, 19 nt, Artificial Sequence
  Description of Artificial Sequence: Synthetic oligonucleotide
  Sense strand starting at position 1746 of SEQ ID NO: 1243455
cggcgcuguucuccagaca

SEQ ID NO: 1417973 - RNA, 19 nt, Artificial Sequence
  Description of Artificial Sequence: Synthetic oligonucleotide
  Antisense strand to SEQ ID NO: 1417972
ugucuggagaacagcgccg

SEQ ID NO: 1417974 - RNA, 19 nt, Artificial Sequence
  Description of Artificial Sequence: Synthetic oligonucleotide
  Sense strand starting at position 2155 of SEQ ID NO: 1243455
cggugaucuaguccagcgu

SEQ ID NO: 1417975 - RNA, 19 nt, Artificial Sequence
  Description of Artificial Sequence: Synthetic oligonucleotide
  Antisense strand to SEQ ID NO: 1417974
acgcuggacuagaucaccg

SEQ ID NO: 1417976 - RNA, 19 nt, Artificial Sequence
  Description of Artificial Sequence: Synthetic oligonucleotide
  Sense strand starting at position 2266 of SEQ ID NO: 1243455
cgccuuuaaucccaucagu

SEQ ID NO: 1417977 - RNA, 19 nt, Artificial Sequence
  Description of Artificial Sequence: Synthetic oligonucleotide
  Antisense strand to SEQ ID NO: 1417976
acugaugggauuaaaggcg

SEQ ID NO: 1417978 - RNA, 19 nt, Artificial Sequence
  Description of Artificial Sequence: Synthetic oligonucleotide
  Sense strand starting at position 2274 of SEQ ID NO: 1243455
aucccaucaguuugggagu

SEQ ID NO: 1417979 - RNA, 19 nt, Artificial Sequence
  Description of Artificial Sequence: Synthetic oligonucleotide
  Antisense strand to SEQ ID NO: 1417978
acucccaaacugaugggau

SEQ ID NO: 1417980 - RNA, 19 nt, Artificial Sequence
  Description of Artificial Sequence: Synthetic oligonucleotide
  Sense strand starting at position 2352 of SEQ ID NO: 1243455
cgccgucucuacucgaaau

SEQ ID NO: 1417981 - RNA, 19 nt, Artificial Sequence
  Description of Artificial Sequence: Synthetic oligonucleotide
  Antisense strand to SEQ ID NO: 1417980
auuucgaguagagacggcg

SEQ ID NO: 1417982 - RNA, 19 nt, Artificial Sequence
  Description of Artificial Sequence: Synthetic oligonucleotide
  Sense strand starting at position 2353 of SEQ ID NO: 1243455
gccgucucuacucgaaaua

SEQ ID NO: 1417983 - RNA, 19 nt, Artificial Sequence
  Description of Artificial Sequence: Synthetic oligonucleotide
  Antisense strand to SEQ ID NO: 1417982
uauuucgaguagagacggc

SEQ ID NO: 1417984 - RNA, 19 nt, Artificial Sequence
  Description of Artificial Sequence: Synthetic oligonucleotide
  Sense strand starting at position 2647 of SEQ ID NO: 1243455
gagauugcgucucacucuu

SEQ ID NO: 1417985 - RNA, 19 nt, Artificial Sequence
  Description of Artificial Sequence: Synthetic oligonucleotide
  Antisense strand to SEQ ID NO: 1417984
aagagugagacgcaaucuc

SEQ ID NO: 1417986 - RNA, 19 nt, Artificial Sequence
  Description of Artificial Sequence: Synthetic oligonucleotide
  Sense strand starting at position 2834 of SEQ ID NO: 1243455
ccacuacagcuuuguuaag

SEQ ID NO: 1417987 - RNA, 19 nt, Artificial Sequence
  Description of Artificial Sequence: Synthetic oligonucleotide
  Antisense strand to SEQ ID NO: 1417986
cuuaacaaagcuguagugg

SEQ ID NO: 1417988 - RNA, 19 nt, Artificial Sequence
  Description of Artificial Sequence: Synthetic oligonucleotide
  Sense strand starting at position 3041 of SEQ ID NO: 1243455
guugcagucagucgagaua

SEQ ID NO: 1417989 - RNA, 19 nt, Artificial Sequence
  Description of Artificial Sequence: Synthetic oligonucleotide
  Antisense strand to SEQ ID NO: 1417988
uaucucgacugacugcaac

SEQ ID NO: 1417990 - RNA, 19 nt, Artificial Sequence
  Description of Artificial Sequence: Synthetic oligonucleotide
  Sense strand starting at position 3535 of SEQ ID NO: 1243455
ucgagacgccugggcaaua

SEQ ID NO: 1417991 - RNA, 19 nt, Artificial Sequence
  Description of Artificial Sequence: Synthetic oligonucleotide
  Antisense strand to SEQ ID NO: 1417990
uauugcccaggcgucucga

SEQ ID NO: 1417992 - RNA, 19 nt, Artificial Sequence
  Description of Artificial Sequence: Synthetic oligonucleotide
  Sense strand starting at position 3778 of SEQ ID NO: 1243455
uuaggacguaguuacauaa

SEQ ID NO: 1417993 - RNA, 19 nt, Artificial Sequence
  Description of Artificial Sequence: Synthetic oligonucleotide
  Antisense strand to SEQ ID NO: 1417992
uuauguaacuacguccuaa

SEQ ID NO: 1417994 - RNA, 19 nt, Artificial Sequence
  Description of Artificial Sequence: Synthetic oligonucleotide
  Sense strand starting at position 3803 of SEQ ID NO: 1243455
gcagacuuguuaucuccau

SEQ ID NO: 1417995 - RNA, 19 nt, Artificial Sequence
  Description of Artificial Sequence: Synthetic oligonucleotide
  Antisense strand to SEQ ID NO: 1417994
auggagauaacaagucugc

SEQ ID NO: 1417996 - RNA, 19 nt, Artificial Sequence
  Description of Artificial Sequence: Synthetic oligonucleotide
  Sense strand starting at position 3900 of SEQ ID NO: 1243455
agucucaagcucuguucua

SEQ ID NO: 1417997 - RNA, 19 nt, Artificial Sequence
  Description of Artificial Sequence: Synthetic oligonucleotide
  Antisense strand to SEQ ID NO: 1417996
uagaacagagcuugagacu

SEQ ID NO: 1417998 - RNA, 19 nt, Artificial Sequence
  Description of Artificial Sequence: Synthetic oligonucleotide
  Sense strand starting at position 183 of SEQ ID NO: 1243456
aaaggugcugcagaaguau

SEQ ID NO: 1417999 - RNA, 19 nt, Artificial Sequence
  Description of Artificial Sequence: Synthetic oligonucleotide
  Antisense strand to SEQ ID NO: 1417998
auacuucugcagcaccuuu

SEQ ID NO: 1418000 - RNA, 19 nt, Artificial Sequence
  Description of Artificial Sequence: Synthetic oligonucleotide
  Sense strand starting at position 215 of SEQ ID NO: 1243456
ggcacuuaaguagaacauu

SEQ ID NO: 1418001 - RNA, 19 nt, Artificial Sequence
  Description of Artificial Sequence: Synthetic oligonucleotide
  Antisense strand to SEQ ID NO: 1418000
aauguucuacuuaagugcc

SEQ ID NO: 1418002 - RNA, 19 nt, Artificial Sequence
  Description of Artificial Sequence: Synthetic oligonucleotide
  Sense strand starting at position 446 of SEQ ID NO: 1243456
cugauaauguggcauuuaa

SEQ ID NO: 1418003 - RNA, 19 nt, Artificial Sequence
  Description of Artificial Sequence: Synthetic oligonucleotide
  Antisense strand to SEQ ID NO: 1418002
uuaaaugccacauuaucag

SEQ ID NO: 1418004 - RNA, 19 nt, Artificial Sequence
  Description of Artificial Sequence: Synthetic oligonucleotide
  Sense strand starting at position 454 of SEQ ID NO: 1243456
guggcauuuaaucgaugug

SEQ ID NO: 1418005 - RNA, 19 nt, Artificial Sequence
  Description of Artificial Sequence: Synthetic oligonucleotide
  Antisense strand to SEQ ID NO: 1418004
cacaucgauuaaaugccac

SEQ ID NO: 1418006 - RNA, 19 nt, Artificial Sequence
  Description of Artificial Sequence: Synthetic oligonucleotide
  Sense strand starting at position 457 of SEQ ID NO: 1243456
gcauuuaaucgaugugcua

SEQ ID NO: 1418007 - RNA, 19 nt, Artificial Sequence
  Description of Artificial Sequence: Synthetic oligonucleotide
  Antisense strand to SEQ ID NO: 1418006
uagcacaucgauuaaaugc

SEQ ID NO: 1418008 - RNA, 19 nt, Artificial Sequence
  Description of Artificial Sequence: Synthetic oligonucleotide
  Sense strand starting at position 468 of SEQ ID NO: 1243456
augugcuaacuuuagucaa

SEQ ID NO: 1418009 - RNA, 19 nt, Artificial Sequence
  Description of Artificial Sequence: Synthetic oligonucleotide
  Antisense strand to SEQ ID NO: 1418008
uugacuaaaguuagcacau

SEQ ID NO: 1418010 - RNA, 19 nt, Artificial Sequence
  Description of Artificial Sequence: Synthetic oligonucleotide
  Sense strand starting at position 470 of SEQ ID NO: 1243456
gugcuaacuuuagucaaag

SEQ ID NO: 1418011 - RNA, 19 nt, Artificial Sequence
  Description of Artificial Sequence: Synthetic oligonucleotide
  Antisense strand to SEQ ID NO: 1418010
cuuugacuaaaguuagcac

SEQ ID NO: 1418012 - RNA, 19 nt, Artificial Sequence
  Description of Artificial Sequence: Synthetic oligonucleotide
  Sense strand starting at position 471 of SEQ ID NO: 1243456
ugcuaacuuuagucaaaga

SEQ ID NO: 1418013 - RNA, 19 nt, Artificial Sequence
  Description of Artificial Sequence: Synthetic oligonucleotide
  Antisense strand to SEQ ID NO: 1418012
ucuuugacuaaaguuagca

SEQ ID NO: 1418014 - RNA, 19 nt, Artificial Sequence
  Description of Artificial Sequence: Synthetic oligonucleotide
  Sense strand starting at position 481 of SEQ ID NO: 1243456
agucaaagagacugauguu

SEQ ID NO: 1418015 - RNA, 19 nt, Artificial Sequence
  Description of Artificial Sequence: Synthetic oligonucleotide
  Antisense strand to SEQ ID NO: 1418014
aacaucagucucuuugacu

SEQ ID NO: 1418016 - RNA, 19 nt, Artificial Sequence
  Description of Artificial Sequence: Synthetic oligonucleotide
  Sense strand starting at position 487 of SEQ ID NO: 1243456
agagacugauguuucccaa

SEQ ID NO: 1418017 - RNA, 19 nt, Artificial Sequence
  Description of Artificial Sequence: Synthetic oligonucleotide
  Antisense strand to SEQ ID NO: 1418016
uugggaaacaucagucucu

SEQ ID NO: 1418018 - RNA, 19 nt, Artificial Sequence
  Description of Artificial Sequence: Synthetic oligonucleotide
  Sense strand starting at position 490 of SEQ ID NO: 1243456
gacugauguuucccaagaa

SEQ ID NO: 1418019 - RNA, 19 nt, Artificial Sequence
  Description of Artificial Sequence: Synthetic oligonucleotide
  Antisense strand to SEQ ID NO: 1418018
uucuugggaaacaucaguc

SEQ ID NO: 1418020 - RNA, 19 nt, Artificial Sequence
  Description of Artificial Sequence: Synthetic oligonucleotide
  Sense strand starting at position 502 of SEQ ID NO: 1243456
ccaagaaagccuuaguacu

SEQ ID NO: 1418021 - RNA, 19 nt, Artificial Sequence
  Description of Artificial Sequence: Synthetic oligonucleotide
  Antisense strand to SEQ ID NO: 1418020
aguacuaaggcuuucuugg

SEQ ID NO: 1418022 - RNA, 19 nt, Artificial Sequence
  Description of Artificial Sequence: Synthetic oligonucleotide
  Sense strand starting at position 663 of SEQ ID NO: 1243456
gcuguaacgaagugaaaua

SEQ ID NO: 1418023 - RNA, 19 nt, Artificial Sequence
  Description of Artificial Sequence: Synthetic oligonucleotide
  Antisense strand to SEQ ID NO: 1418022
uauuucacuucguuacagc

SEQ ID NO: 1418024 - RNA, 19 nt, Artificial Sequence
  Description of Artificial Sequence: Synthetic oligonucleotide
  Sense strand starting at position 675 of SEQ ID NO: 1243456
ugaaauagucaacgcuaaa

SEQ ID NO: 1418025 - RNA, 19 nt, Artificial Sequence
  Description of Artificial Sequence: Synthetic oligonucleotide
  Antisense strand to SEQ ID NO: 1418024
uuuagcguugacuauuuca

SEQ ID NO: 1418026 - RNA, 19 nt, Artificial Sequence
  Description of Artificial Sequence: Synthetic oligonucleotide
  Sense strand starting at position 941 of SEQ ID NO: 1243456
augagcugauaacauaaua

SEQ ID NO: 1418027 - RNA, 19 nt, Artificial Sequence
  Description of Artificial Sequence: Synthetic oligonucleotide
  Antisense strand to SEQ ID NO: 1418026
uauuauguuaucagcucau

SEQ ID NO: 1418028 - RNA, 19 nt, Artificial Sequence
  Description of Artificial Sequence: Synthetic oligonucleotide
  Sense strand starting at position 1282 of SEQ ID NO: 1243456
gcugucauacuugauuauu

SEQ ID NO: 1418029 - RNA, 19 nt, Artificial Sequence
  Description of Artificial Sequence: Synthetic oligonucleotide
  Antisense strand to SEQ ID NO: 1418028
aauaaucaaguaugacagc

SEQ ID NO: 1418030 - RNA, 19 nt, Artificial Sequence
  Description of Artificial Sequence: Synthetic oligonucleotide
  Sense strand starting at position 1451 of SEQ ID NO: 1243456
gcuaauagugcugaaucau

SEQ ID NO: 1418031 - RNA, 19 nt, Artificial Sequence
  Description of Artificial Sequence: Synthetic oligonucleotide
  Antisense strand to SEQ ID NO: 1418030
augauucagcacuauuagc

SEQ ID NO: 1418032 - RNA, 19 nt, Artificial Sequence
  Description of Artificial Sequence: Synthetic oligonucleotide
  Sense strand starting at position 1572 of SEQ ID NO: 1243456
uuauguugauucucugaau

SEQ ID NO: 1418033 - RNA, 19 nt, Artificial Sequence
  Description of Artificial Sequence: Synthetic oligonucleotide
  Antisense strand to SEQ ID NO: 1418032
auucagagaaucaacauaa

SEQ ID NO: 1418034 - RNA, 19 nt, Artificial Sequence
  Description of Artificial Sequence: Synthetic oligonucleotide
  Sense strand starting at position 2022 of SEQ ID NO: 1243456
uguaaauaucagggcauau

SEQ ID NO: 1418035 - RNA, 19 nt, Artificial Sequence
  Description of Artificial Sequence: Synthetic oligonucleotide
  Antisense strand to SEQ ID NO: 1418034
auaugcccugauauuuaca

SEQ ID NO: 1418036 - RNA, 19 nt, Artificial Sequence
  Description of Artificial Sequence: Synthetic oligonucleotide
  Sense strand starting at position 2057 of SEQ ID NO: 1243456
acugcuuauuuauagaaga

SEQ ID NO: 1418037 - RNA, 19 nt, Artificial Sequence
  Description of Artificial Sequence: Synthetic oligonucleotide
  Antisense strand to SEQ ID NO: 1418036
ucuucuauaaauaagcagu

SEQ ID NO: 1418038 - RNA, 19 nt, Artificial Sequence
  Description of Artificial Sequence: Synthetic oligonucleotide
  Sense strand starting at position 2086 of SEQ ID NO: 1243456
ccaggugacaguugcaaga

SEQ ID NO: 1418039 - RNA, 19 nt, Artificial Sequence
  Description of Artificial Sequence: Synthetic oligonucleotide
  Antisense strand to SEQ ID NO: 1418038
ucuugcaacugucaccugg

SEQ ID NO: 1418040 - RNA, 19 nt, Artificial Sequence
  Description of Artificial Sequence: Synthetic oligonucleotide
  Sense strand starting at position 2128 of SEQ ID NO: 1243456
gccgaauguucaguaacag

SEQ ID NO: 1418041 - RNA, 19 nt, Artificial Sequence
  Description of Artificial Sequence: Synthetic oligonucleotide
  Antisense strand to SEQ ID NO: 1418040
cuguuacugaacauucggc

SEQ ID NO: 1418042 - RNA, 19 nt, Artificial Sequence
  Description of Artificial Sequence: Synthetic oligonucleotide
  Sense strand starting at position 2149 of SEQ ID NO: 1243456
ucuggaacaucuguuaaua

SEQ ID NO: 1418043 - RNA, 19 nt, Artificial Sequence
  Description of Artificial Sequence: Synthetic oligonucleotide
  Antisense strand to SEQ ID NO: 1418042
uauuaacagauguuccaga

SEQ ID NO: 1418044 - RNA, 19 nt, Artificial Sequence
  Description of Artificial Sequence: Synthetic oligonucleotide
  Sense strand starting at position 2166 of SEQ ID NO: 1243456
uaagcuguacucugugaga

SEQ ID NO: 1418045 - RNA, 19 nt, Artificial Sequence
  Description of Artificial Sequence: Synthetic oligonucleotide
  Antisense strand to SEQ ID NO: 1418044
ucucacagaguacagcuua

SEQ ID NO: 1418046 - RNA, 19 nt, Artificial Sequence
  Description of Artificial Sequence: Synthetic oligonucleotide
  Sense strand starting at position 2227 of SEQ ID NO: 1243456
uuaagaucuuaacauugag

SEQ ID NO: 1418047 - RNA, 19 nt, Artificial Sequence
  Description of Artificial Sequence: Synthetic oligonucleotide
  Antisense strand to SEQ ID NO: 1418046
cucaauguuaagaucuuaa

SEQ ID NO: 1418048 - RNA, 19 nt, Artificial Sequence
  Description of Artificial Sequence: Synthetic oligonucleotide
  Sense strand starting at position 2345 of SEQ ID NO: 1243456
uggcgaaacccugacuuua

SEQ ID NO: 1418049 - RNA, 19 nt, Artificial Sequence
  Description of Artificial Sequence: Synthetic oligonucleotide
  Antisense strand to SEQ ID NO: 1418048
uaaagucaggguuucgcca

SEQ ID NO: 1418050 - RNA, 19 nt, Artificial Sequence
  Description of Artificial Sequence: Synthetic oligonucleotide
  Sense strand starting at position 2347 of SEQ ID NO: 1243456
gcgaaacccugacuuuaca

SEQ ID NO: 1418051 - RNA, 19 nt, Artificial Sequence
  Description of Artificial Sequence: Synthetic oligonucleotide
  Antisense strand to SEQ ID NO: 1418050
uguaaagucaggguuucgc

SEQ ID NO: 1418052 - RNA, 19 nt, Artificial Sequence
  Description of Artificial Sequence: Synthetic oligonucleotide
  Sense strand starting at position 2404 of SEQ ID NO: 1243456
cguggcgcucuccuguaau

SEQ ID NO: 1418053 - RNA, 19 nt, Artificial Sequence
  Description of Artificial Sequence: Synthetic oligonucleotide
  Antisense strand to SEQ ID NO: 1418052
auuacaggagagcgccacg

SEQ ID NO: 1418054 - RNA, 19 nt, Artificial Sequence
  Description of Artificial Sequence: Synthetic oligonucleotide
  Sense strand starting at position 2751 of SEQ ID NO: 1243456
agagacauuuaggguaaga

SEQ ID NO: 1418055 - RNA, 19 nt, Artificial Sequence
  Description of Artificial Sequence: Synthetic oligonucleotide
  Antisense strand to SEQ ID NO: 1418054
ucuuacccuaaaugucucu

SEQ ID NO: 1418056 - RNA, 19 nt, Artificial Sequence
  Description of Artificial Sequence: Synthetic oligonucleotide
  Sense strand starting at position 2761 of SEQ ID NO: 1243456
aggguaagagcucguggaa

SEQ ID NO: 1418057 - RNA, 19 nt, Artificial Sequence
  Description of Artificial Sequence: Synthetic oligonucleotide
  Antisense strand to SEQ ID NO: 1418056
uuccacgagcucuuacccu

SEQ ID NO: 1418058 - RNA, 19 nt, Artificial Sequence
  Description of Artificial Sequence: Synthetic oligonucleotide
  Sense strand starting at position 2764 of SEQ ID NO: 1243456
guaagagcucguggaaaga

SEQ ID NO: 1418059 - RNA, 19 nt, Artificial Sequence
  Description of Artificial Sequence: Synthetic oligonucleotide
  Antisense strand to SEQ ID NO: 1418058
ucuuuccacgagcucuuac

SEQ ID NO: 1418060 - RNA, 19 nt, Artificial Sequence
  Description of Artificial Sequence: Synthetic oligonucleotide
  Sense strand starting at position 2931 of SEQ ID NO: 1243456
ugguguaucccagaaguug

SEQ ID NO: 1418061 - RNA, 19 nt, Artificial Sequence
  Description of Artificial Sequence: Synthetic oligonucleotide
  Antisense strand to SEQ ID NO: 1418060
caacuucugggauacacca

SEQ ID NO: 1418062 - RNA, 19 nt, Artificial Sequence
  Description of Artificial Sequence: Synthetic oligonucleotide
  Sense strand starting at position 3391 of SEQ ID NO: 1243456
uauagagacguccagaugu

SEQ ID NO: 1418063 - RNA, 19 nt, Artificial Sequence
  Description of Artificial Sequence: Synthetic oligonucleotide
  Antisense strand to SEQ ID NO: 1418062
acaucuggacgucucuaua

SEQ ID NO: 1418064 - RNA, 19 nt, Artificial Sequence
  Description of Artificial Sequence: Synthetic oligonucleotide
  Sense strand starting at position 3393 of SEQ ID NO: 1243456
uagagacguccagauguuu

SEQ ID NO: 1418065 - RNA, 19 nt, Artificial Sequence
  Description of Artificial Sequence: Synthetic oligonucleotide
  Antisense strand to SEQ ID NO: 1418064
aaacaucuggacgucucua

SEQ ID NO: 1418066 - RNA, 19 nt, Artificial Sequence
  Description of Artificial Sequence: Synthetic oligonucleotide
  Sense strand starting at position 3398 of SEQ ID NO: 1243456
acguccagauguuugucaa

SEQ ID NO: 1418067 - RNA, 19 nt, Artificial Sequence
  Description of Artificial Sequence: Synthetic oligonucleotide
  Antisense strand to SEQ ID NO: 1418066
uugacaaacaucuggacgu

SEQ ID NO: 1418068 - RNA, 19 nt, Artificial Sequence
  Description of Artificial Sequence: Synthetic oligonucleotide
  Sense strand starting at position 3399 of SEQ ID NO: 1243456
cguccagauguuugucaaa

SEQ ID NO: 1418069 - RNA, 19 nt, Artificial Sequence
  Description of Artificial Sequence: Synthetic oligonucleotide
  Antisense strand to SEQ ID NO: 1418068
uuugacaaacaucuggacg

SEQ ID NO: 1418070 - RNA, 19 nt, Artificial Sequence
  Description of Artificial Sequence: Synthetic oligonucleotide
  Sense strand starting at position 3463 of SEQ ID NO: 1243456
ucaguauagugauuaucuc

SEQ ID NO: 1418071 - RNA, 19 nt, Artificial Sequence
  Description of Artificial Sequence: Synthetic oligonucleotide
  Antisense strand to SEQ ID NO: 1418070
gagauaaucacuauacuga

SEQ ID NO: 1418072 - RNA, 19 nt, Artificial Sequence
  Description of Artificial Sequence: Synthetic oligonucleotide
  Sense strand starting at position 3542 of SEQ ID NO: 1243456
uuucuuuauuaagcugagu

SEQ ID NO: 1418073 - RNA, 19 nt, Artificial Sequence
  Description of Artificial Sequence: Synthetic oligonucleotide
  Antisense strand to SEQ ID NO: 1418072
acucagcuuaauaaagaaa

SEQ ID NO: 1418074 - RNA, 19 nt, Artificial Sequence
  Description of Artificial Sequence: Synthetic oligonucleotide
  Sense strand starting at position 3553 of SEQ ID NO: 1243456
agcugagugguggauacau

SEQ ID NO: 1418075 - RNA, 19 nt, Artificial Sequence
  Description of Artificial Sequence: Synthetic oligonucleotide
  Antisense strand to SEQ ID NO: 1418074
auguauccaccacucagcu

SEQ ID NO: 1418076 - RNA, 19 nt, Artificial Sequence
  Description of Artificial Sequence: Synthetic oligonucleotide
  Sense strand starting at position 3563 of SEQ ID NO: 1243456
uggauacauugauauuugu

SEQ ID NO: 1418077 - RNA, 19 nt, Artificial Sequence
  Description of Artificial Sequence: Synthetic oligonucleotide
  Antisense strand to SEQ ID NO: 1418076
acaaauaucaauguaucca

SEQ ID NO: 1418078 - RNA, 19 nt, Artificial Sequence
  Description of Artificial Sequence: Synthetic oligonucleotide
  Sense strand starting at position 58 of SEQ ID NO: 1243457
guguguucucuaguucugu

SEQ ID NO: 1418079 - RNA, 19 nt, Artificial Sequence
  Description of Artificial Sequence: Synthetic oligonucleotide
  Antisense strand to SEQ ID NO: 1418078
acagaacuagagaacacac

SEQ ID NO: 1418080 - RNA, 19 nt, Artificial Sequence
  Description of Artificial Sequence: Synthetic oligonucleotide
  Sense strand starting at position 88 of SEQ ID NO: 1243457
agcacagucccugaacaga

SEQ ID NO: 1418081 - RNA, 19 nt, Artificial Sequence
  Description of Artificial Sequence: Synthetic oligonucleotide
  Antisense strand to SEQ ID NO: 1418080
ucuguucagggacugugcu

SEQ ID NO: 1418082 - RNA, 19 nt, Artificial Sequence
  Description of Artificial Sequence: Synthetic oligonucleotide
  Sense strand starting at position 315 of SEQ ID NO: 1243457
guucuugggcuacauacau

SEQ ID NO: 1418083 - RNA, 19 nt, Artificial Sequence
  Description of Artificial Sequence: Synthetic oligonucleotide
  Antisense strand to SEQ ID NO: 1418082
auguauguagcccaagaac

SEQ ID NO: 1418084 - RNA, 19 nt, Artificial Sequence
  Description of Artificial Sequence: Synthetic oligonucleotide
  Sense strand starting at position 321 of SEQ ID NO: 1243457
gggcuacauacauguggau

SEQ ID NO: 1418085 - RNA, 19 nt, Artificial Sequence
  Description of Artificial Sequence: Synthetic oligonucleotide
  Antisense strand to SEQ ID NO: 1418084
auccacauguauguagccc

SEQ ID NO: 1418086 - RNA, 19 nt, Artificial Sequence
  Description of Artificial Sequence: Synthetic oligonucleotide
  Sense strand starting at position 422 of SEQ ID NO: 1243457
uuguuauccaagcagagug

SEQ ID NO: 1418087 - RNA, 19 nt, Artificial Sequence
  Description of Artificial Sequence: Synthetic oligonucleotide
  Antisense strand to SEQ ID NO: 1418086
cacucugcuuggauaacaa

SEQ ID NO: 1418088 - RNA, 19 nt, Artificial Sequence
  Description of Artificial Sequence: Synthetic oligonucleotide
  Sense strand starting at position 539 of SEQ ID NO: 1243457
augacuacucagggauagu

SEQ ID NO: 1418089 - RNA, 19 nt, Artificial Sequence
  Description of Artificial Sequence: Synthetic oligonucleotide
  Antisense strand to SEQ ID NO: 1418088
acuaucccugaguagucau

SEQ ID NO: 1418090 - RNA, 19 nt, Artificial Sequence
  Description of Artificial Sequence: Synthetic oligonucleotide
  Sense strand starting at position 548 of SEQ ID NO: 1243457
cagggauagucuuccaggu

SEQ ID NO: 1418091 - RNA, 19 nt, Artificial Sequence
  Description of Artificial Sequence: Synthetic oligonucleotide
  Antisense strand to SEQ ID NO: 1418090
accuggaagacuaucccug

SEQ ID NO: 1418092 - RNA, 19 nt, Artificial Sequence
  Description of Artificial Sequence: Synthetic oligonucleotide
  Sense strand starting at position 552 of SEQ ID NO: 1243457
gauagucuuccagguacaa

SEQ ID NO: 1418093 - RNA, 19 nt, Artificial Sequence
  Description of Artificial Sequence: Synthetic oligonucleotide
  Antisense strand to SEQ ID NO: 1418092
uuguaccuggaagacuauc

SEQ ID NO: 1418094 - RNA, 19 nt, Artificial Sequence
  Description of Artificial Sequence: Synthetic oligonucleotide
  Sense strand starting at position 571 of SEQ ID NO: 1243457
gcuuuaauuaguguugcgu

SEQ ID NO: 1418095 - RNA, 19 nt, Artificial Sequence
  Description of Artificial Sequence: Synthetic oligonucleotide
  Antisense strand to SEQ ID NO: 1418094
acgcaacacuaauuaaagc

SEQ ID NO: 1418096 - RNA, 19 nt, Artificial Sequence
  Description of Artificial Sequence: Synthetic oligonucleotide
  Sense strand starting at position 572 of SEQ ID NO: 1243457
cuuuaauuaguguugcgua

SEQ ID NO: 1418097 - RNA, 19 nt, Artificial Sequence
  Description of Artificial Sequence: Synthetic oligonucleotide
  Antisense strand to SEQ ID NO: 1418096
uacgcaacacuaauuaaag

SEQ ID NO: 1418098 - RNA, 19 nt, Artificial Sequence
  Description of Artificial Sequence: Synthetic oligonucleotide
  Sense strand starting at position 587 of SEQ ID NO: 1243457
cguagaaaucaccauagua

SEQ ID NO: 1418099 - RNA, 19 nt, Artificial Sequence
  Description of Artificial Sequence: Synthetic oligonucleotide
  Antisense strand to SEQ ID NO: 1418098
uacuauggugauuucuacg

SEQ ID NO: 1418100 - RNA, 19 nt, Artificial Sequence
  Description of Artificial Sequence: Synthetic oligonucleotide
  Sense strand starting at position 608 of SEQ ID NO: 1243457
auguuccugcaagaagauu

SEQ ID NO: 1418101 - RNA, 19 nt, Artificial Sequence
  Description of Artificial Sequence: Synthetic oligonucleotide
  Antisense strand to SEQ ID NO: 1418100
aaucuucuugcaggaacau

SEQ ID NO: 1418102 - RNA, 19 nt, Artificial Sequence
  Description of Artificial Sequence: Synthetic oligonucleotide
  Sense strand starting at position 644 of SEQ ID NO: 1243457
uucuccuuugggugaaaca

SEQ ID NO: 1418103 - RNA, 19 nt, Artificial Sequence
  Description of Artificial Sequence: Synthetic oligonucleotide
  Antisense strand to SEQ ID NO: 1418102
uguuucacccaaaggagaa

SEQ ID NO: 1418104 - RNA, 19 nt, Artificial Sequence
  Description of Artificial Sequence: Synthetic oligonucleotide
  Sense strand starting at position 699 of SEQ ID NO: 1243457
ggauuuccauccuaaggga

SEQ ID NO: 1418105 - RNA, 19 nt, Artificial Sequence
  Description of Artificial Sequence: Synthetic oligonucleotide
  Antisense strand to SEQ ID NO: 1418104
ucccuuaggauggaaaucc

SEQ ID NO: 1418106 - RNA, 19 nt, Artificial Sequence
  Description of Artificial Sequence: Synthetic oligonucleotide
  Sense strand starting at position 965 of SEQ ID NO: 1243457
cuaucccauuagucuagau

SEQ ID NO: 1418107 - RNA, 19 nt, Artificial Sequence
  Description of Artificial Sequence: Synthetic oligonucleotide
  Antisense strand to SEQ ID NO: 1418106
aucuagacuaaugggauag

SEQ ID NO: 1418108 - RNA, 19 nt, Artificial Sequence
  Description of Artificial Sequence: Synthetic oligonucleotide
  Sense strand starting at position 969 of SEQ ID NO: 1243457
cccauuagucuagauaucu

SEQ ID NO: 1418109 - RNA, 19 nt, Artificial Sequence
  Description of Artificial Sequence: Synthetic oligonucleotide
  Antisense strand to SEQ ID NO: 1418108
agauaucuagacuaauggg

SEQ ID NO: 1418110 - RNA, 19 nt, Artificial Sequence
  Description of Artificial Sequence: Synthetic oligonucleotide
  Sense strand starting at position 1375 of SEQ ID NO: 1243457
caaagagacuuuccgucaa

SEQ ID NO: 1418111 - RNA, 19 nt, Artificial Sequence
  Description of Artificial Sequence: Synthetic oligonucleotide
  Antisense strand to SEQ ID NO: 1418110
uugacggaaagucucuuug

SEQ ID NO: 1418112 - RNA, 19 nt, Artificial Sequence
  Description of Artificial Sequence: Synthetic oligonucleotide
  Sense strand starting at position 1377 of SEQ ID NO: 1243457
aagagacuuuccgucaaug

SEQ ID NO: 1418113 - RNA, 19 nt, Artificial Sequence
  Description of Artificial Sequence: Synthetic oligonucleotide
  Antisense strand to SEQ ID NO: 1418112
cauugacggaaagucucuu

SEQ ID NO: 1418114 - RNA, 19 nt, Artificial Sequence
  Description of Artificial Sequence: Synthetic oligonucleotide
  Sense strand starting at position 1379 of SEQ ID NO: 1243457
gagacuuuccgucaaugua

SEQ ID NO: 1418115 - RNA, 19 nt, Artificial Sequence
  Description of Artificial Sequence: Synthetic oligonucleotide
  Antisense strand to SEQ ID NO: 1418114
uacauugacggaaagucuc

SEQ ID NO: 1418116 - RNA, 19 nt, Artificial Sequence
  Description of Artificial Sequence: Synthetic oligonucleotide
  Sense strand starting at position 2092 of SEQ ID NO: 1243457
agagauguggcucagccaa

SEQ ID NO: 1418117 - RNA, 19 nt, Artificial Sequence
  Description of Artificial Sequence: Synthetic oligonucleotide
  Antisense strand to SEQ ID NO: 1418116
uuggcugagccacaucucu

SEQ ID NO: 1418118 - RNA, 19 nt, Artificial Sequence
  Description of Artificial Sequence: Synthetic oligonucleotide
  Sense strand starting at position 2202 of SEQ ID NO: 1243457
gagcccuugggucagauua

SEQ ID NO: 1418119 - RNA, 19 nt, Artificial Sequence
  Description of Artificial Sequence: Synthetic oligonucleotide
  Antisense strand to SEQ ID NO: 1418118
uaaucugacccaagggcuc

SEQ ID NO: 1418120 - RNA, 19 nt, Artificial Sequence
  Description of Artificial Sequence: Synthetic oligonucleotide
  Sense strand starting at position 2266 of SEQ ID NO: 1243457
ugggaauucgccugaacaa

SEQ ID NO: 1418121 - RNA, 19 nt, Artificial Sequence
  Description of Artificial Sequence: Synthetic oligonucleotide
  Antisense strand to SEQ ID NO: 1418120
uuguucaggcgaauuccca

SEQ ID NO: 1418122 - RNA, 19 nt, Artificial Sequence
  Description of Artificial Sequence: Synthetic oligonucleotide
  Sense strand starting at position 2311 of SEQ ID NO: 1243457
uagggauaauaauuguacu

SEQ ID NO: 1418123 - RNA, 19 nt, Artificial Sequence
  Description of Artificial Sequence: Synthetic oligonucleotide
  Antisense strand to SEQ ID NO: 1418122
aguacaauuauuaucccua

SEQ ID NO: 1418124 - RNA, 19 nt, Artificial Sequence
  Description of Artificial Sequence: Synthetic oligonucleotide
  Sense strand starting at position 2538 of SEQ ID NO: 1243457
gaugauuagugcccagaug

SEQ ID NO: 1418125 - RNA, 19 nt, Artificial Sequence
  Description of Artificial Sequence: Synthetic oligonucleotide
  Antisense strand to SEQ ID NO: 1418124
caucugggcacuaaucauc

SEQ ID NO: 1418126 - RNA, 19 nt, Artificial Sequence
  Description of Artificial Sequence: Synthetic oligonucleotide
  Sense strand starting at position 2539 of SEQ ID NO: 1243457
augauuagugcccagauga

SEQ ID NO: 1418127 - RNA, 19 nt, Artificial Sequence
  Description of Artificial Sequence: Synthetic oligonucleotide
  Antisense strand to SEQ ID NO: 1418126
ucaucugggcacuaaucau

SEQ ID NO: 1418128 - RNA, 19 nt, Artificial Sequence
  Description of Artificial Sequence: Synthetic oligonucleotide
  Sense strand starting at position 2563 of SEQ ID NO: 1243457
aggugaugaauuggucaga

SEQ ID NO: 1418129 - RNA, 19 nt, Artificial Sequence
  Description of Artificial Sequence: Synthetic oligonucleotide
  Antisense strand to SEQ ID NO: 1418128
ucugaccaauucaucaccu

SEQ ID NO: 1418130 - RNA, 19 nt, Artificial Sequence
  Description of Artificial Sequence: Synthetic oligonucleotide
  Sense strand starting at position 2564 of SEQ ID NO: 1243457
ggugaugaauuggucagau

SEQ ID NO: 1418131 - RNA, 19 nt, Artificial Sequence
  Description of Artificial Sequence: Synthetic oligonucleotide
  Antisense strand to SEQ ID NO: 1418130
aucugaccaauucaucacc

SEQ ID NO: 1418132 - RNA, 19 nt, Artificial Sequence
  Description of Artificial Sequence: Synthetic oligonucleotide
  Sense strand starting at position 2668 of SEQ ID NO: 1243457
agaucuaaagucgggaaau

SEQ ID NO: 1418133 - RNA, 19 nt, Artificial Sequence
  Description of Artificial Sequence: Synthetic oligonucleotide
  Antisense strand to SEQ ID NO: 1418132
auuucccgacuuuagaucu

SEQ ID NO: 1418134 - RNA, 19 nt, Artificial Sequence
  Description of Artificial Sequence: Synthetic oligonucleotide
  Sense strand starting at position 2974 of SEQ ID NO: 1243457
ccagacuuauguuugaaca

SEQ ID NO: 1418135 - RNA, 19 nt, Artificial Sequence
  Description of Artificial Sequence: Synthetic oligonucleotide
  Antisense strand to SEQ ID NO: 1418134
uguucaaacauaagucugg

SEQ ID NO: 1418136 - RNA, 19 nt, Artificial Sequence
  Description of Artificial Sequence: Synthetic oligonucleotide
  Sense strand starting at position 2997 of SEQ ID NO: 1243457
gccauuugaucuucuaguc

SEQ ID NO: 1418137 - RNA, 19 nt, Artificial Sequence
  Description of Artificial Sequence: Synthetic oligonucleotide
  Antisense strand to SEQ ID NO: 1418136
gacuagaagaucaaauggc

SEQ ID NO: 1418138 - RNA, 19 nt, Artificial Sequence
  Description of Artificial Sequence: Synthetic oligonucleotide
  Sense strand starting at position 3469 of SEQ ID NO: 1243457
aacucaugagcucaagguu

SEQ ID NO: 1418139 - RNA, 19 nt, Artificial Sequence
  Description of Artificial Sequence: Synthetic oligonucleotide
  Antisense strand to SEQ ID NO: 1418138
aaccuugagcucaugaguu

SEQ ID NO: 1418140 - RNA, 19 nt, Artificial Sequence
  Description of Artificial Sequence: Synthetic oligonucleotide
  Sense strand starting at position 3575 of SEQ ID NO: 1243457
ucaaauuucuuacagugag

SEQ ID NO: 1418141 - RNA, 19 nt, Artificial Sequence
  Description of Artificial Sequence: Synthetic oligonucleotide
  Antisense strand to SEQ ID NO: 1418140
cucacuguaagaaauuuga

SEQ ID NO: 1418142 - RNA, 19 nt, Artificial Sequence
  Description of Artificial Sequence: Synthetic oligonucleotide
  Sense strand starting at position 3682 of SEQ ID NO: 1243457
acccuuuguaguggaauga

SEQ ID NO: 1418143 - RNA, 19 nt, Artificial Sequence
  Description of Artificial Sequence: Synthetic oligonucleotide
  Antisense strand to SEQ ID NO: 1418142
ucauuccacuacaaagggu

SEQ ID NO: 1418144 - RNA, 19 nt, Artificial Sequence
  Description of Artificial Sequence: Synthetic oligonucleotide
  Sense strand starting at position 3683 of SEQ ID NO: 1243457
cccuuuguaguggaaugaa

SEQ ID NO: 1418145 - RNA, 19 nt, Artificial Sequence
  Description of Artificial Sequence: Synthetic oligonucleotide
  Antisense strand to SEQ ID NO: 1418144
uucauuccacuacaaaggg

SEQ ID NO: 1418146 - RNA, 19 nt, Artificial Sequence
  Description of Artificial Sequence: Synthetic oligonucleotide
  Sense strand starting at position 3741 of SEQ ID NO: 1243457
agaacuugucaaugugaua

SEQ ID NO: 1418147 - RNA, 19 nt, Artificial Sequence
  Description of Artificial Sequence: Synthetic oligonucleotide
  Antisense strand to SEQ ID NO: 1418146
uaucacauugacaaguucu

SEQ ID NO: 1418148 - RNA, 19 nt, Artificial Sequence
  Description of Artificial Sequence: Synthetic oligonucleotide
  Sense strand starting at position 3845 of SEQ ID NO: 1243457
ugauaaaugucuuuaugag

SEQ ID NO: 1418149 - RNA, 19 nt, Artificial Sequence
  Description of Artificial Sequence: Synthetic oligonucleotide
  Antisense strand to SEQ ID NO: 1418148
cucauaaagacauuuauca

SEQ ID NO: 1418150 - RNA, 19 nt, Artificial Sequence
  Description of Artificial Sequence: Synthetic oligonucleotide
  Sense strand starting at position 3873 of SEQ ID NO: 1243457
aggugucacccagggagaa

SEQ ID NO: 1418151 - RNA, 19 nt, Artificial Sequence
  Description of Artificial Sequence: Synthetic oligonucleotide
  Antisense strand to SEQ ID NO: 1418150
uucucccugggugacaccu

SEQ ID NO: 1418152 - RNA, 19 nt, Artificial Sequence
  Description of Artificial Sequence: Synthetic oligonucleotide
  Sense strand starting at position 3923 of SEQ ID NO: 1243457
ggaguuguaugagcuagag

SEQ ID NO: 1418153 - RNA, 19 nt, Artificial Sequence
  Description of Artificial Sequence: Synthetic oligonucleotide
  Antisense strand to SEQ ID NO: 1418152
cucuagcucauacaacucc

SEQ ID NO: 1418154 - RNA, 19 nt, Artificial Sequence
  Description of Artificial Sequence: Synthetic oligonucleotide
  Sense strand starting at position 3925 of SEQ ID NO: 1243457
aguuguaugagcuagagga

SEQ ID NO: 1418155 - RNA, 19 nt, Artificial Sequence
  Description of Artificial Sequence: Synthetic oligonucleotide
  Antisense strand to SEQ ID NO: 1418154
uccucuagcucauacaacu

SEQ ID NO: 1418156 - RNA, 19 nt, Artificial Sequence
  Description of Artificial Sequence: Synthetic oligonucleotide
  Sense strand starting at position 3950 of SEQ ID NO: 1243457
gaaggauucucugcuaagg

SEQ ID NO: 1418157 - RNA, 19 nt, Artificial Sequence
  Description of Artificial Sequence: Synthetic oligonucleotide
  Antisense strand to SEQ ID NO: 1418156
ccuuagcagagaauccuuc

SEQ ID NO: 1418158 - RNA, 19 nt, Artificial Sequence
  Description of Artificial Sequence: Synthetic oligonucleotide
  Sense strand starting at position 34 of SEQ ID NO: 1243458
cugauauaguuaccugaua

SEQ ID NO: 1418159 - RNA, 19 nt, Artificial Sequence
  Description of Artificial Sequence: Synthetic oligonucleotide
  Antisense strand to SEQ ID NO: 1418158
uaucagguaacuauaucag

SEQ ID NO: 1418160 - RNA, 19 nt, Artificial Sequence
  Description of Artificial Sequence: Synthetic oligonucleotide
  Sense strand starting at position 35 of SEQ ID NO: 1243458
ugauauaguuaccugauaa

SEQ ID NO: 1418161 - RNA, 19 nt, Artificial Sequence
  Description of Artificial Sequence: Synthetic oligonucleotide
  Antisense strand to SEQ ID NO: 1418160
uuaucagguaacuauauca

SEQ ID NO: 1418162 - RNA, 19 nt, Artificial Sequence
  Description of Artificial Sequence: Synthetic oligonucleotide
  Sense strand starting at position 86 of SEQ ID NO: 1243458
cucuguucugcugauauua

SEQ ID NO: 1418163 - RNA, 19 nt, Artificial Sequence
  Description of Artificial Sequence: Synthetic oligonucleotide
  Antisense strand to SEQ ID NO: 1418162
uaauaucagcagaacagag

SEQ ID NO: 1418164 - RNA, 19 nt, Artificial Sequence
  Description of Artificial Sequence: Synthetic oligonucleotide
  Sense strand starting at position 192 of SEQ ID NO: 1243458
cacaaauagucagugaugu

SEQ ID NO: 1418165 - RNA, 19 nt, Artificial Sequence
  Description of Artificial Sequence: Synthetic oligonucleotide
  Antisense strand to SEQ ID NO: 1418164
acaucacugacuauuugug

SEQ ID NO: 1418166 - RNA, 19 nt, Artificial Sequence
  Description of Artificial Sequence: Synthetic oligonucleotide
  Sense strand starting at position 193 of SEQ ID NO: 1243458
acaaauagucagugauguc

SEQ ID NO: 1418167 - RNA, 19 nt, Artificial Sequence
  Description of Artificial Sequence: Synthetic oligonucleotide
  Antisense strand to SEQ ID NO: 1418166
gacaucacugacuauuugu

SEQ ID NO: 1418168 - RNA, 19 nt, Artificial Sequence
  Description of Artificial Sequence: Synthetic oligonucleotide
  Sense strand starting at position 257 of SEQ ID NO: 1243458
gagaaucccuuacugggua

SEQ ID NO: 1418169 - RNA, 19 nt, Artificial Sequence
  Description of Artificial Sequence: Synthetic oligonucleotide
  Antisense strand to SEQ ID NO: 1418168
uacccaguaagggauucuc

SEQ ID NO: 1418170 - RNA, 19 nt, Artificial Sequence
  Description of Artificial Sequence: Synthetic oligonucleotide
  Sense strand starting at position 303 of SEQ ID NO: 1243458
ugaacacauucuuuaacga

SEQ ID NO: 1418171 - RNA, 19 nt, Artificial Sequence
  Description of Artificial Sequence: Synthetic oligonucleotide
  Antisense strand to SEQ ID NO: 1418170
ucguuaaagaauguguuca

SEQ ID NO: 1418172 - RNA, 19 nt, Artificial Sequence
  Description of Artificial Sequence: Synthetic oligonucleotide
  Sense strand starting at position 330 of SEQ ID NO: 1243458
acagauuaguaucuuauga

SEQ ID NO: 1418173 - RNA, 19 nt, Artificial Sequence
  Description of Artificial Sequence: Synthetic oligonucleotide
  Antisense strand to SEQ ID NO: 1418172
ucauaagauacuaaucugu

SEQ ID NO: 1418174 - RNA, 19 nt, Artificial Sequence
  Description of Artificial Sequence: Synthetic oligonucleotide
  Sense strand starting at position 402 of SEQ ID NO: 1243458
cgauuugaaaugugagugu

SEQ ID NO: 1418175 - RNA, 19 nt, Artificial Sequence
  Description of Artificial Sequence: Synthetic oligonucleotide
  Antisense strand to SEQ ID NO: 1418174
acacucacauuucaaaucg

SEQ ID NO: 1418176 - RNA, 19 nt, Artificial Sequence
  Description of Artificial Sequence: Synthetic oligonucleotide
  Sense strand starting at position 405 of SEQ ID NO: 1243458
uuugaaaugugaguguuaa

SEQ ID NO: 1418177 - RNA, 19 nt, Artificial Sequence
  Description of Artificial Sequence: Synthetic oligonucleotide
  Antisense strand to SEQ ID NO: 1418176
uuaacacucacauuucaaa

SEQ ID NO: 1418178 - RNA, 19 nt, Artificial Sequence
  Description of Artificial Sequence: Synthetic oligonucleotide
  Sense strand starting at position 406 of SEQ ID NO: 1243458
uugaaaugugaguguuaaa

SEQ ID NO: 1418179 - RNA, 19 nt, Artificial Sequence
  Description of Artificial Sequence: Synthetic oligonucleotide
  Antisense strand to SEQ ID NO: 1418178
uuuaacacucacauuucaa

SEQ ID NO: 1418180 - RNA, 19 nt, Artificial Sequence
  Description of Artificial Sequence: Synthetic oligonucleotide
  Sense strand starting at position 448 of SEQ ID NO: 1243458
cgcaaucaucaagagcaaa

SEQ ID NO: 1418181 - RNA, 19 nt, Artificial Sequence
  Description of Artificial Sequence: Synthetic oligonucleotide
  Antisense strand to SEQ ID NO: 1418180
uuugcucuugaugauugcg

SEQ ID NO: 1418182 - RNA, 19 nt, Artificial Sequence
  Description of Artificial Sequence: Synthetic oligonucleotide
  Sense strand starting at position 551 of SEQ ID NO: 1243458
ugguuaauuggcuaaguuu

SEQ ID NO: 1418183 - RNA, 19 nt, Artificial Sequence
  Description of Artificial Sequence: Synthetic oligonucleotide
  Antisense strand to SEQ ID NO: 1418182
aaacuuagccaauuaacca

SEQ ID NO: 1418184 - RNA, 19 nt, Artificial Sequence
  Description of Artificial Sequence: Synthetic oligonucleotide
  Sense strand starting at position 562 of SEQ ID NO: 1243458
cuaaguuucccugaguguc

SEQ ID NO: 1418185 - RNA, 19 nt, Artificial Sequence
  Description of Artificial Sequence: Synthetic oligonucleotide
  Antisense strand to SEQ ID NO: 1418184
gacacucagggaaacuuag

SEQ ID NO: 1418186 - RNA, 19 nt, Artificial Sequence
  Description of Artificial Sequence: Synthetic oligonucleotide
  Sense strand starting at position 568 of SEQ ID NO: 1243458
uucccugagugucccaaua

SEQ ID NO: 1418187 - RNA, 19 nt, Artificial Sequence
  Description of Artificial Sequence: Synthetic oligonucleotide
  Antisense strand to SEQ ID NO: 1418186
uauugggacacucagggaa

SEQ ID NO: 1418188 - RNA, 19 nt, Artificial Sequence
  Description of Artificial Sequence: Synthetic oligonucleotide
  Sense strand starting at position 664 of SEQ ID NO: 1243458
guacaauuccuugaugcuu

SEQ ID NO: 1418189 - RNA, 19 nt, Artificial Sequence
  Description of Artificial Sequence: Synthetic oligonucleotide
  Antisense strand to SEQ ID NO: 1418188
aagcaucaaggaauuguac

SEQ ID NO: 1418190 - RNA, 19 nt, Artificial Sequence
  Description of Artificial Sequence: Synthetic oligonucleotide
  Sense strand starting at position 670 of SEQ ID NO: 1243458
uuccuugaugcuuaagcaa

SEQ ID NO: 1418191 - RNA, 19 nt, Artificial Sequence
  Description of Artificial Sequence: Synthetic oligonucleotide
  Antisense strand to SEQ ID NO: 1418190
uugcuuaagcaucaaggaa

SEQ ID NO: 1418192 - RNA, 19 nt, Artificial Sequence
  Description of Artificial Sequence: Synthetic oligonucleotide
  Sense strand starting at position 673 of SEQ ID NO: 1243458
cuugaugcuuaagcaauua

SEQ ID NO: 1418193 - RNA, 19 nt, Artificial Sequence
  Description of Artificial Sequence: Synthetic oligonucleotide
  Antisense strand to SEQ ID NO: 1418192
uaauugcuuaagcaucaag

SEQ ID NO: 1418194 - RNA, 19 nt, Artificial Sequence
  Description of Artificial Sequence: Synthetic oligonucleotide
  Sense strand starting at position 685 of SEQ ID NO: 1243458
gcaauuacagcucaaugaa

SEQ ID NO: 1418195 - RNA, 19 nt, Artificial Sequence
  Description of Artificial Sequence: Synthetic oligonucleotide
  Antisense strand to SEQ ID NO: 1418194
uucauugagcuguaauugc

SEQ ID NO: 1418196 - RNA, 19 nt, Artificial Sequence
  Description of Artificial Sequence: Synthetic oligonucleotide
  Sense strand starting at position 720 of SEQ ID NO: 1243458
ccauaaagacaucguuuaa

SEQ ID NO: 1418197 - RNA, 19 nt, Artificial Sequence
  Description of Artificial Sequence: Synthetic oligonucleotide
  Antisense strand to SEQ ID NO: 1418196
uuaaacgaugucuuuaugg

SEQ ID NO: 1418198 - RNA, 19 nt, Artificial Sequence
  Description of Artificial Sequence: Synthetic oligonucleotide
  Sense strand starting at position 1173 of SEQ ID NO: 1243458
gggugagaaugcuuuaacu

SEQ ID NO: 1418199 - RNA, 19 nt, Artificial Sequence
  Description of Artificial Sequence: Synthetic oligonucleotide
  Antisense strand to SEQ ID NO: 1418198
aguuaaagcauucucaccc

SEQ ID NO: 1418200 - RNA, 19 nt, Artificial Sequence
  Description of Artificial Sequence: Synthetic oligonucleotide
  Sense strand starting at position 1175 of SEQ ID NO: 1243458
gugagaaugcuuuaacuaa

SEQ ID NO: 1418201 - RNA, 19 nt, Artificial Sequence
  Description of Artificial Sequence: Synthetic oligonucleotide
  Antisense strand to SEQ ID NO: 1418200
uuaguuaaagcauucucac

SEQ ID NO: 1418202 - RNA, 19 nt, Artificial Sequence
  Description of Artificial Sequence: Synthetic oligonucleotide
  Sense strand starting at position 1365 of SEQ ID NO: 1243458
ggcgaaucggaguagaaau

SEQ ID NO: 1418203 - RNA, 19 nt, Artificial Sequence
  Description of Artificial Sequence: Synthetic oligonucleotide
  Antisense strand to SEQ ID NO: 1418202
auuucuacuccgauucgcc

SEQ ID NO: 1418204 - RNA, 19 nt, Artificial Sequence
  Description of Artificial Sequence: Synthetic oligonucleotide
  Sense strand starting at position 1379 of SEQ ID NO: 1243458
gaaauauacgauuaucgug

SEQ ID NO: 1418205 - RNA, 19 nt, Artificial Sequence
  Description of Artificial Sequence: Synthetic oligonucleotide
  Antisense strand to SEQ ID NO: 1418204
cacgauaaucguauauuuc

SEQ ID NO: 1418206 - RNA, 19 nt, Artificial Sequence
  Description of Artificial Sequence: Synthetic oligonucleotide
  Sense strand starting at position 2267 of SEQ ID NO: 1243458
ugcggagucccgaguccaa

SEQ ID NO: 1418207 - RNA, 19 nt, Artificial Sequence
  Description of Artificial Sequence: Synthetic oligonucleotide
  Antisense strand to SEQ ID NO: 1418206
uuggacucgggacuccgca

SEQ ID NO: 1418208 - RNA, 19 nt, Artificial Sequence
  Description of Artificial Sequence: Synthetic oligonucleotide
  Sense strand starting at position 2543 of SEQ ID NO: 1243458
ucuguuccuccucagguaa

SEQ ID NO: 1418209 - RNA, 19 nt, Artificial Sequence
  Description of Artificial Sequence: Synthetic oligonucleotide
  Antisense strand to SEQ ID NO: 1418208
uuaccugaggaggaacaga

SEQ ID NO: 1418210 - RNA, 19 nt, Artificial Sequence
  Description of Artificial Sequence: Synthetic oligonucleotide
  Sense strand starting at position 2613 of SEQ ID NO: 1243458
cgaccuuugacucagcagu

SEQ ID NO: 1418211 - RNA, 19 nt, Artificial Sequence
  Description of Artificial Sequence: Synthetic oligonucleotide
  Antisense strand to SEQ ID NO: 1418210
acugcugagucaaaggucg

SEQ ID NO: 1418212 - RNA, 19 nt, Artificial Sequence
  Description of Artificial Sequence: Synthetic oligonucleotide
  Sense strand starting at position 2658 of SEQ ID NO: 1243458
gaaauaauucuggguaucu

SEQ ID NO: 1418213 - RNA, 19 nt, Artificial Sequence
  Description of Artificial Sequence: Synthetic oligonucleotide
  Antisense strand to SEQ ID NO: 1418212
agauacccagaauuauuuc

SEQ ID NO: 1418214 - RNA, 19 nt, Artificial Sequence
  Description of Artificial Sequence: Synthetic oligonucleotide
  Sense strand starting at position 2659 of SEQ ID NO: 1243458
aaauaauucuggguaucug

SEQ ID NO: 1418215 - RNA, 19 nt, Artificial Sequence
  Description of Artificial Sequence: Synthetic oligonucleotide
  Antisense strand to SEQ ID NO: 1418214
cagauacccagaauuauuu

SEQ ID NO: 1418216 - RNA, 19 nt, Artificial Sequence
  Description of Artificial Sequence: Synthetic oligonucleotide
  Sense strand starting at position 2694 of SEQ ID NO: 1243458
gagauacuaagcuguggua

SEQ ID NO: 1418217 - RNA, 19 nt, Artificial Sequence
  Description of Artificial Sequence: Synthetic oligonucleotide
  Antisense strand to SEQ ID NO: 1418216
uaccacagcuuaguaucuc

SEQ ID NO: 1418218 - RNA, 19 nt, Artificial Sequence
  Description of Artificial Sequence: Synthetic oligonucleotide
  Sense strand starting at position 2785 of SEQ ID NO: 1243458
cauguauuaggacacugua

SEQ ID NO: 1418219 - RNA, 19 nt, Artificial Sequence
  Description of Artificial Sequence: Synthetic oligonucleotide
  Antisense strand to SEQ ID NO: 1418218
uacaguguccuaauacaug

SEQ ID NO: 1418220 - RNA, 19 nt, Artificial Sequence
  Description of Artificial Sequence: Synthetic oligonucleotide
  Sense strand starting at position 2833 of SEQ ID NO: 1243458
ggaggaaaugguugcaaua

SEQ ID NO: 1418221 - RNA, 19 nt, Artificial Sequence
  Description of Artificial Sequence: Synthetic oligonucleotide
  Antisense strand to SEQ ID NO: 1418220
uauugcaaccauuuccucc

SEQ ID NO: 1418222 - RNA, 19 nt, Artificial Sequence
  Description of Artificial Sequence: Synthetic oligonucleotide
  Sense strand starting at position 2893 of SEQ ID NO: 1243458
agaaacaucuuaguguaga

SEQ ID NO: 1418223 - RNA, 19 nt, Artificial Sequence
  Description of Artificial Sequence: Synthetic oligonucleotide
  Antisense strand to SEQ ID NO: 1418222
ucuacacuaagauguuucu

SEQ ID NO: 1418224 - RNA, 19 nt, Artificial Sequence
  Description of Artificial Sequence: Synthetic oligonucleotide
  Sense strand starting at position 2965 of SEQ ID NO: 1243458
agaugcauauguguacauu

SEQ ID NO: 1418225 - RNA, 19 nt, Artificial Sequence
  Description of Artificial Sequence: Synthetic oligonucleotide
  Antisense strand to SEQ ID NO: 1418224
aauguacacauaugcaucu

SEQ ID NO: 1418226 - RNA, 19 nt, Artificial Sequence
  Description of Artificial Sequence: Synthetic oligonucleotide
  Sense strand starting at position 2968 of SEQ ID NO: 1243458
ugcauauguguacauuaaa

SEQ ID NO: 1418227 - RNA, 19 nt, Artificial Sequence
  Description of Artificial Sequence: Synthetic oligonucleotide
  Antisense strand to SEQ ID NO: 1418226
uuuaauguacacauaugca

SEQ ID NO: 1418228 - RNA, 19 nt, Artificial Sequence
  Description of Artificial Sequence: Synthetic oligonucleotide
  Sense strand starting at position 3025 of SEQ ID NO: 1243458
uacauaucugcagguagau

SEQ ID NO: 1418229 - RNA, 19 nt, Artificial Sequence
  Description of Artificial Sequence: Synthetic oligonucleotide
  Antisense strand to SEQ ID NO: 1418228
aucuaccugcagauaugua

SEQ ID NO: 1418230 - RNA, 19 nt, Artificial Sequence
  Description of Artificial Sequence: Synthetic oligonucleotide
  Sense strand starting at position 3637 of SEQ ID NO: 1243458
uguccucuccgauagguua

SEQ ID NO: 1418231 - RNA, 19 nt, Artificial Sequence
  Description of Artificial Sequence: Synthetic oligonucleotide
  Antisense strand to SEQ ID NO: 1418230
uaaccuaucggagaggaca

SEQ ID NO: 1418232 - RNA, 19 nt, Artificial Sequence
  Description of Artificial Sequence: Synthetic oligonucleotide
  Sense strand starting at position 3651 of SEQ ID NO: 1243458
gguuaagcuagugaaugaa

SEQ ID NO: 1418233 - RNA, 19 nt, Artificial Sequence
  Description of Artificial Sequence: Synthetic oligonucleotide
  Antisense strand to SEQ ID NO: 1418232
uucauucacuagcuuaacc

SEQ ID NO: 1418234 - RNA, 19 nt, Artificial Sequence
  Description of Artificial Sequence: Synthetic oligonucleotide
  Sense strand starting at position 3701 of SEQ ID NO: 1243458
aacguuaacugauuaugac

SEQ ID NO: 1418235 - RNA, 19 nt, Artificial Sequence
  Description of Artificial Sequence: Synthetic oligonucleotide
  Antisense strand to SEQ ID NO: 1418234
gucauaaucaguuaacguu

SEQ ID NO: 1418236 - RNA, 19 nt, Artificial Sequence
  Description of Artificial Sequence: Synthetic oligonucleotide
  Sense strand starting at position 3702 of SEQ ID NO: 1243458
acguuaacugauuaugacu

SEQ ID NO: 1418237 - RNA, 19 nt, Artificial Sequence
  Description of Artificial Sequence: Synthetic oligonucleotide
  Antisense strand to SEQ ID NO: 1418236
agucauaaucaguuaacgu

SEQ ID NO: 1418238 - RNA, 19 nt, Artificial Sequence
  Description of Artificial Sequence: Synthetic oligonucleotide
  Sense strand starting at position 34 of SEQ ID NO: 1243459
aguuacauuaggcaaggua

SEQ ID NO: 1418239 - RNA, 19 nt, Artificial Sequence
  Description of Artificial Sequence: Synthetic oligonucleotide
  Antisense strand to SEQ ID NO: 1418238
uaccuugccuaauguaacu

SEQ ID NO: 1418240 - RNA, 19 nt, Artificial Sequence
  Description of Artificial Sequence: Synthetic oligonucleotide
  Sense strand starting at position 99 of SEQ ID NO: 1243459
uccacaugcuaaguuguaa

SEQ ID NO: 1418241 - RNA, 19 nt, Artificial Sequence
  Description of Artificial Sequence: Synthetic oligonucleotide
  Antisense strand to SEQ ID NO: 1418240
uuacaacuuagcaugugga

SEQ ID NO: 1418242 - RNA, 19 nt, Artificial Sequence
  Description of Artificial Sequence: Synthetic oligonucleotide
  Sense strand starting at position 146 of SEQ ID NO: 1243459
uuagguagauucucagaaa

SEQ ID NO: 1418243 - RNA, 19 nt, Artificial Sequence
  Description of Artificial Sequence: Synthetic oligonucleotide
  Antisense strand to SEQ ID NO: 1418242
uuucugagaaucuaccuaa

SEQ ID NO: 1418244 - RNA, 19 nt, Artificial Sequence
  Description of Artificial Sequence: Synthetic oligonucleotide
  Sense strand starting at position 147 of SEQ ID NO: 1243459
uagguagauucucagaaac

SEQ ID NO: 1418245 - RNA, 19 nt, Artificial Sequence
  Description of Artificial Sequence: Synthetic oligonucleotide
  Antisense strand to SEQ ID NO: 1418244
guuucugagaaucuaccua

SEQ ID NO: 1418246 - RNA, 19 nt, Artificial Sequence
  Description of Artificial Sequence: Synthetic oligonucleotide
  Sense strand starting at position 149 of SEQ ID NO: 1243459
gguagauucucagaaacac

SEQ ID NO: 1418247 - RNA, 19 nt, Artificial Sequence
  Description of Artificial Sequence: Synthetic oligonucleotide
  Antisense strand to SEQ ID NO: 1418246
guguuucugagaaucuacc

SEQ ID NO: 1418248 - RNA, 19 nt, Artificial Sequence
  Description of Artificial Sequence: Synthetic oligonucleotide
  Sense strand starting at position 173 of SEQ ID NO: 1243459
acuuaauuaggcugccuaa

SEQ ID NO: 1418249 - RNA, 19 nt, Artificial Sequence
  Description of Artificial Sequence: Synthetic oligonucleotide
  Antisense strand to SEQ ID NO: 1418248
uuaggcagccuaauuaagu

SEQ ID NO: 1418250 - RNA, 19 nt, Artificial Sequence
  Description of Artificial Sequence: Synthetic oligonucleotide
  Sense strand starting at position 192 of SEQ ID NO: 1243459
gucccuuacugagcauaca

SEQ ID NO: 1418251 - RNA, 19 nt, Artificial Sequence
  Description of Artificial Sequence: Synthetic oligonucleotide
  Antisense strand to SEQ ID NO: 1418250
uguaugcucaguaagggac

SEQ ID NO: 1418252 - RNA, 19 nt, Artificial Sequence
  Description of Artificial Sequence: Synthetic oligonucleotide
  Sense strand starting at position 313 of SEQ ID NO: 1243459
ucuauaaaugcuuagcgua

SEQ ID NO: 1418253 - RNA, 19 nt, Artificial Sequence
  Description of Artificial Sequence: Synthetic oligonucleotide
  Antisense strand to SEQ ID NO: 1418252
uacgcuaagcauuuauaga

SEQ ID NO: 1418254 - RNA, 19 nt, Artificial Sequence
  Description of Artificial Sequence: Synthetic oligonucleotide
  Sense strand starting at position 325 of SEQ ID NO: 1243459
uagcguagcccuuagaauu

SEQ ID NO: 1418255 - RNA, 19 nt, Artificial Sequence
  Description of Artificial Sequence: Synthetic oligonucleotide
  Antisense strand to SEQ ID NO: 1418254
aauucuaagggcuacgcua

SEQ ID NO: 1418256 - RNA, 19 nt, Artificial Sequence
  Description of Artificial Sequence: Synthetic oligonucleotide
  Sense strand starting at position 374 of SEQ ID NO: 1243459
gguuaaagcacacggaaua

SEQ ID NO: 1418257 - RNA, 19 nt, Artificial Sequence
  Description of Artificial Sequence: Synthetic oligonucleotide
  Antisense strand to SEQ ID NO: 1418256
uauuccgugugcuuuaacc

SEQ ID NO: 1418258 - RNA, 19 nt, Artificial Sequence
  Description of Artificial Sequence: Synthetic oligonucleotide
  Sense strand starting at position 790 of SEQ ID NO: 1243459
cccggcuguuucucugaau

SEQ ID NO: 1418259 - RNA, 19 nt, Artificial Sequence
  Description of Artificial Sequence: Synthetic oligonucleotide
  Antisense strand to SEQ ID NO: 1418258
auucagagaaacagccggg

SEQ ID NO: 1418260 - RNA, 19 nt, Artificial Sequence
  Description of Artificial Sequence: Synthetic oligonucleotide
  Sense strand starting at position 1256 of SEQ ID NO: 1243459
uguuccuuuccguccguaa

SEQ ID NO: 1418261 - RNA, 19 nt, Artificial Sequence
  Description of Artificial Sequence: Synthetic oligonucleotide
  Antisense strand to SEQ ID NO: 1418260
uuacggacggaaaggaaca

SEQ ID NO: 1418262 - RNA, 19 nt, Artificial Sequence
  Description of Artificial Sequence: Synthetic oligonucleotide
  Sense strand starting at position 1396 of SEQ ID NO: 1243459
ggcugcgaucguguuuacu

SEQ ID NO: 1418263 - RNA, 19 nt, Artificial Sequence
  Description of Artificial Sequence: Synthetic oligonucleotide
  Antisense strand to SEQ ID NO: 1418262
aguaaacacgaucgcagcc

SEQ ID NO: 1418264 - RNA, 19 nt, Artificial Sequence
  Description of Artificial Sequence: Synthetic oligonucleotide
  Sense strand starting at position 1398 of SEQ ID NO: 1243459
cugcgaucguguuuacuaa

SEQ ID NO: 1418265 - RNA, 19 nt, Artificial Sequence
  Description of Artificial Sequence: Synthetic oligonucleotide
  Antisense strand to SEQ ID NO: 1418264
uuaguaaacacgaucgcag

SEQ ID NO: 1418266 - RNA, 19 nt, Artificial Sequence
  Description of Artificial Sequence: Synthetic oligonucleotide
  Sense strand starting at position 1399 of SEQ ID NO: 1243459
ugcgaucguguuuacuaau

SEQ ID NO: 1418267 - RNA, 19 nt, Artificial Sequence
  Description of Artificial Sequence: Synthetic oligonucleotide
  Antisense strand to SEQ ID NO: 1418266
auuaguaaacacgaucgca

SEQ ID NO: 1418268 - RNA, 19 nt, Artificial Sequence
  Description of Artificial Sequence: Synthetic oligonucleotide
  Sense strand starting at position 1811 of SEQ ID NO: 1243459
gguagaaccucacauccau

SEQ ID NO: 1418269 - RNA, 19 nt, Artificial Sequence
  Description of Artificial Sequence: Synthetic oligonucleotide
  Antisense strand to SEQ ID NO: 1418268
auggaugugagguucuacc

SEQ ID NO: 1418270 - RNA, 19 nt, Artificial Sequence
  Description of Artificial Sequence: Synthetic oligonucleotide
  Sense strand starting at position 2876 of SEQ ID NO: 1243459
ugaagcuucccaggugaag

SEQ ID NO: 1418271 - RNA, 19 nt, Artificial Sequence
  Description of Artificial Sequence: Synthetic oligonucleotide
  Antisense strand to SEQ ID NO: 1418270
cuucaccugggaagcuuca

SEQ ID NO: 1418272 - RNA, 19 nt, Artificial Sequence
  Description of Artificial Sequence: Synthetic oligonucleotide
  Sense strand starting at position 2927 of SEQ ID NO: 1243459
ucuuguuuguauucgaaag

SEQ ID NO: 1418273 - RNA, 19 nt, Artificial Sequence
  Description of Artificial Sequence: Synthetic oligonucleotide
  Antisense strand to SEQ ID NO: 1418272
cuuucgaauacaaacaaga

SEQ ID NO: 1418274 - RNA, 19 nt, Artificial Sequence
  Description of Artificial Sequence: Synthetic oligonucleotide
  Sense strand starting at position 2933 of SEQ ID NO: 1243459
uuguauucgaaaggcauuu

SEQ ID NO: 1418275 - RNA, 19 nt, Artificial Sequence
  Description of Artificial Sequence: Synthetic oligonucleotide
  Antisense strand to SEQ ID NO: 1418274
aaaugccuuucgaauacaa

SEQ ID NO: 1418276 - RNA, 19 nt, Artificial Sequence
  Description of Artificial Sequence: Synthetic oligonucleotide
  Sense strand starting at position 3017 of SEQ ID NO: 1243459
gguccuagcugauuaacuu

SEQ ID NO: 1418277 - RNA, 19 nt, Artificial Sequence
  Description of Artificial Sequence: Synthetic oligonucleotide
  Antisense strand to SEQ ID NO: 1418276
aaguuaaucagcuaggacc

SEQ ID NO: 1418278 - RNA, 19 nt, Artificial Sequence
  Description of Artificial Sequence: Synthetic oligonucleotide
  Sense strand starting at position 3116 of SEQ ID NO: 1243459
cggcuuuauugcuuugagu

SEQ ID NO: 1418279 - RNA, 19 nt, Artificial Sequence
  Description of Artificial Sequence: Synthetic oligonucleotide
  Antisense strand to SEQ ID NO: 1418278
acucaaagcaauaaagccg

SEQ ID NO: 1418280 - RNA, 19 nt, Artificial Sequence
  Description of Artificial Sequence: Synthetic oligonucleotide
  Sense strand starting at position 3118 of SEQ ID NO: 1243459
gcuuuauugcuuugaguua

SEQ ID NO: 1418281 - RNA, 19 nt, Artificial Sequence
  Description of Artificial Sequence: Synthetic oligonucleotide
  Antisense strand to SEQ ID NO: 1418280
uaacucaaagcaauaaagc

SEQ ID NO: 1418282 - RNA, 19 nt, Artificial Sequence
  Description of Artificial Sequence: Synthetic oligonucleotide
  Sense strand starting at position 3129 of SEQ ID NO: 1243459
uugaguuaaucugagaguu

SEQ ID NO: 1418283 - RNA, 19 nt, Artificial Sequence
  Description of Artificial Sequence: Synthetic oligonucleotide
  Antisense strand to SEQ ID NO: 1418282
aacucucagauuaacucaa

SEQ ID NO: 1418284 - RNA, 19 nt, Artificial Sequence
  Description of Artificial Sequence: Synthetic oligonucleotide
  Sense strand starting at position 3131 of SEQ ID NO: 1243459
gaguuaaucugagaguuug

SEQ ID NO: 1418285 - RNA, 19 nt, Artificial Sequence
  Description of Artificial Sequence: Synthetic oligonucleotide
  Antisense strand to SEQ ID NO: 1418284
caaacucucagauuaacuc

SEQ ID NO: 1418286 - RNA, 19 nt, Artificial Sequence
  Description of Artificial Sequence: Synthetic oligonucleotide
  Sense strand starting at position 3149 of SEQ ID NO: 1243459
ggccuucagccuuggcgaa

SEQ ID NO: 1418287 - RNA, 19 nt, Artificial Sequence
  Description of Artificial Sequence: Synthetic oligonucleotide
  Antisense strand to SEQ ID NO: 1418286
uucgccaaggcugaaggcc

SEQ ID NO: 1418288 - RNA, 19 nt, Artificial Sequence
  Description of Artificial Sequence: Synthetic oligonucleotide
  Sense strand starting at position 3228 of SEQ ID NO: 1243459
ccaguuuaguuaucugcca

SEQ ID NO: 1418289 - RNA, 19 nt, Artificial Sequence
  Description of Artificial Sequence: Synthetic oligonucleotide
  Antisense strand to SEQ ID NO: 1418288
uggcagauaacuaaacugg

SEQ ID NO: 1418290 - RNA, 19 nt, Artificial Sequence
  Description of Artificial Sequence: Synthetic oligonucleotide
  Sense strand starting at position 3263 of SEQ ID NO: 1243459
uggcgacauucugaaauau

SEQ ID NO: 1418291 - RNA, 19 nt, Artificial Sequence
  Description of Artificial Sequence: Synthetic oligonucleotide
  Antisense strand to SEQ ID NO: 1418290
auauuucagaaugucgcca

SEQ ID NO: 1418292 - RNA, 19 nt, Artificial Sequence
  Description of Artificial Sequence: Synthetic oligonucleotide
  Sense strand starting at position 3381 of SEQ ID NO: 1243459
uucuucuguucuccagagu

SEQ ID NO: 1418293 - RNA, 19 nt, Artificial Sequence
  Description of Artificial Sequence: Synthetic oligonucleotide
  Antisense strand to SEQ ID NO: 1418292
acucuggagaacagaagaa

SEQ ID NO: 1418294 - RNA, 19 nt, Artificial Sequence
  Description of Artificial Sequence: Synthetic oligonucleotide
  Sense strand starting at position 3382 of SEQ ID NO: 1243459
ucuucuguucuccagagua

SEQ ID NO: 1418295 - RNA, 19 nt, Artificial Sequence
  Description of Artificial Sequence: Synthetic oligonucleotide
  Antisense strand to SEQ ID NO: 1418294
uacucuggagaacagaaga

SEQ ID NO: 1418296 - RNA, 19 nt, Artificial Sequence
  Description of Artificial Sequence: Synthetic oligonucleotide
  Sense strand starting at position 3384 of SEQ ID NO: 1243459
uucuguucuccagaguaga

SEQ ID NO: 1418297 - RNA, 19 nt, Artificial Sequence
  Description of Artificial Sequence: Synthetic oligonucleotide
  Antisense strand to SEQ ID NO: 1418296
ucuacucuggagaacagaa

SEQ ID NO: 1418298 - RNA, 19 nt, Artificial Sequence
  Description of Artificial Sequence: Synthetic oligonucleotide
  Sense strand starting at position 3398 of SEQ ID NO: 1243459
guagaucgggcuugugaca

SEQ ID NO: 1418299 - RNA, 19 nt, Artificial Sequence
  Description of Artificial Sequence: Synthetic oligonucleotide
  Antisense strand to SEQ ID NO: 1418298
ugucacaagcccgaucuac

SEQ ID NO: 1418300 - RNA, 19 nt, Artificial Sequence
  Description of Artificial Sequence: Synthetic oligonucleotide
  Sense strand starting at position 3483 of SEQ ID NO: 1243459
aggugaaaguuuguguauu

SEQ ID NO: 1418301 - RNA, 19 nt, Artificial Sequence
  Description of Artificial Sequence: Synthetic oligonucleotide
  Antisense strand to SEQ ID NO: 1418300
aauacacaaacuuucaccu

SEQ ID NO: 1418302 - RNA, 19 nt, Artificial Sequence
  Description of Artificial Sequence: Synthetic oligonucleotide
  Sense strand starting at position 3484 of SEQ ID NO: 1243459
ggugaaaguuuguguauuu

SEQ ID NO: 1418303 - RNA, 19 nt, Artificial Sequence
  Description of Artificial Sequence: Synthetic oligonucleotide
  Antisense strand to SEQ ID NO: 1418302
aaauacacaaacuuucacc

SEQ ID NO: 1418304 - RNA, 19 nt, Artificial Sequence
  Description of Artificial Sequence: Synthetic oligonucleotide
  Sense strand starting at position 3485 of SEQ ID NO: 1243459
gugaaaguuuguguauuug

SEQ ID NO: 1418305 - RNA, 19 nt, Artificial Sequence
  Description of Artificial Sequence: Synthetic oligonucleotide
  Antisense strand to SEQ ID NO: 1418304
caaauacacaaacuuucac

SEQ ID NO: 1418306 - RNA, 19 nt, Artificial Sequence
  Description of Artificial Sequence: Synthetic oligonucleotide
  Sense strand starting at position 3706 of SEQ ID NO: 1243459
uugacagugagcugagaua

SEQ ID NO: 1418307 - RNA, 19 nt, Artificial Sequence
  Description of Artificial Sequence: Synthetic oligonucleotide
  Antisense strand to SEQ ID NO: 1418306
uaucucagcucacugucaa

SEQ ID NO: 1418308 - RNA, 19 nt, Artificial Sequence
  Description of Artificial Sequence: Synthetic oligonucleotide
  Sense strand starting at position 3717 of SEQ ID NO: 1243459
cugagauauuaucaggaca

SEQ ID NO: 1418309 - RNA, 19 nt, Artificial Sequence
  Description of Artificial Sequence: Synthetic oligonucleotide
  Antisense strand to SEQ ID NO: 1418308
uguccugauaauaucucag

SEQ ID NO: 1418310 - RNA, 19 nt, Artificial Sequence
  Description of Artificial Sequence: Synthetic oligonucleotide
  Sense strand starting at position 3744 of SEQ ID NO: 1243459
uugagcaaguucuugaaac

SEQ ID NO: 1418311 - RNA, 19 nt, Artificial Sequence
  Description of Artificial Sequence: Synthetic oligonucleotide
  Antisense strand to SEQ ID NO: 1418310
guuucaagaacuugcucaa

SEQ ID NO: 1418312 - RNA, 19 nt, Artificial Sequence
  Description of Artificial Sequence: Synthetic oligonucleotide
  Sense strand starting at position 3752 of SEQ ID NO: 1243459
guucuugaaacgcagaagu

SEQ ID NO: 1418313 - RNA, 19 nt, Artificial Sequence
  Description of Artificial Sequence: Synthetic oligonucleotide
  Antisense strand to SEQ ID NO: 1418312
acuucugcguuucaagaac

SEQ ID NO: 1418314 - RNA, 19 nt, Artificial Sequence
  Description of Artificial Sequence: Synthetic oligonucleotide
  Sense strand starting at position 3846 of SEQ ID NO: 1243459
guugucucgcaagagaaca

SEQ ID NO: 1418315 - RNA, 19 nt, Artificial Sequence
  Description of Artificial Sequence: Synthetic oligonucleotide
  Antisense strand to SEQ ID NO: 1418314
uguucucuugcgagacaac

SEQ ID NO: 1418316 - RNA, 19 nt, Artificial Sequence
  Description of Artificial Sequence: Synthetic oligonucleotide
  Sense strand starting at position 3925 of SEQ ID NO: 1243459
agaggagcagugugaugau

SEQ ID NO: 1418317 - RNA, 19 nt, Artificial Sequence
  Description of Artificial Sequence: Synthetic oligonucleotide
  Antisense strand to SEQ ID NO: 1418316
aucaucacacugcuccucu

SEQ ID NO: 1418318 - RNA, 19 nt, Artificial Sequence
  Description of Artificial Sequence: Synthetic oligonucleotide
  Sense strand starting at position 348 of SEQ ID NO: 1243460
uguuccuuuccguccguaa

SEQ ID NO: 1418319 - RNA, 19 nt, Artificial Sequence
  Description of Artificial Sequence: Synthetic oligonucleotide
  Antisense strand to SEQ ID NO: 1418318
uuacggacggaaaggaaca

SEQ ID NO: 1418320 - RNA, 19 nt, Artificial Sequence
  Description of Artificial Sequence: Synthetic oligonucleotide
  Sense strand starting at position 488 of SEQ ID NO: 1243460
ggcugcgaucguguuuacu

SEQ ID NO: 1418321 - RNA, 19 nt, Artificial Sequence
  Description of Artificial Sequence: Synthetic oligonucleotide
  Antisense strand to SEQ ID NO: 1418320
aguaaacacgaucgcagcc

SEQ ID NO: 1418322 - RNA, 19 nt, Artificial Sequence
  Description of Artificial Sequence: Synthetic oligonucleotide
  Sense strand starting at position 1968 of SEQ ID NO: 1243460
ugaagcuucccaggugaag

SEQ ID NO: 1418323 - RNA, 19 nt, Artificial Sequence
  Description of Artificial Sequence: Synthetic oligonucleotide
  Antisense strand to SEQ ID NO: 1418322
cuucaccugggaagcuuca

SEQ ID NO: 1418324 - RNA, 19 nt, Artificial Sequence
  Description of Artificial Sequence: Synthetic oligonucleotide
  Sense strand starting at position 2019 of SEQ ID NO: 1243460
ucuuguuuguauucgaaag

SEQ ID NO: 1418325 - RNA, 19 nt, Artificial Sequence
  Description of Artificial Sequence: Synthetic oligonucleotide
  Antisense strand to SEQ ID NO: 1418324
cuuucgaauacaaacaaga

SEQ ID NO: 1418326 - RNA, 19 nt, Artificial Sequence
  Description of Artificial Sequence: Synthetic oligonucleotide
  Sense strand starting at position 2025 of SEQ ID NO: 1243460
uuguauucgaaaggcauuu

SEQ ID NO: 1418327 - RNA, 19 nt, Artificial Sequence
  Description of Artificial Sequence: Synthetic oligonucleotide
  Antisense strand to SEQ ID NO: 1418326
aaaugccuuucgaauacaa

SEQ ID NO: 1418328 - RNA, 19 nt, Artificial Sequence
  Description of Artificial Sequence: Synthetic oligonucleotide
  Sense strand starting at position 2109 of SEQ ID NO: 1243460
gguccuagcugauuaacuu

SEQ ID NO: 1418329 - RNA, 19 nt, Artificial Sequence
  Description of Artificial Sequence: Synthetic oligonucleotide
  Antisense strand to SEQ ID NO: 1418328
aaguuaaucagcuaggacc

SEQ ID NO: 1418330 - RNA, 19 nt, Artificial Sequence
  Description of Artificial Sequence: Synthetic oligonucleotide
  Sense strand starting at position 2473 of SEQ ID NO: 1243460
uucuucuguucuccagagu

SEQ ID NO: 1418331 - RNA, 19 nt, Artificial Sequence
  Description of Artificial Sequence: Synthetic oligonucleotide
  Antisense strand to SEQ ID NO: 1418330
acucuggagaacagaagaa

SEQ ID NO: 1418332 - RNA, 19 nt, Artificial Sequence
  Description of Artificial Sequence: Synthetic oligonucleotide
  Sense strand starting at position 2474 of SEQ ID NO: 1243460
ucuucuguucuccagagua

SEQ ID NO: 1418333 - RNA, 19 nt, Artificial Sequence
  Description of Artificial Sequence: Synthetic oligonucleotide
  Antisense strand to SEQ ID NO: 1418332
uacucuggagaacagaaga

SEQ ID NO: 1418334 - RNA, 19 nt, Artificial Sequence
  Description of Artificial Sequence: Synthetic oligonucleotide
  Sense strand starting at position 2476 of SEQ ID NO: 1243460
uucuguucuccagaguaga

SEQ ID NO: 1418335 - RNA, 19 nt, Artificial Sequence
  Description of Artificial Sequence: Synthetic oligonucleotide
  Antisense strand to SEQ ID NO: 1418334
ucuacucuggagaacagaa

SEQ ID NO: 1418336 - RNA, 19 nt, Artificial Sequence
  Description of Artificial Sequence: Synthetic oligonucleotide
  Sense strand starting at position 2490 of SEQ ID NO: 1243460
guagaucgggcuugugaca

SEQ ID NO: 1418337 - RNA, 19 nt, Artificial Sequence
  Description of Artificial Sequence: Synthetic oligonucleotide
  Antisense strand to SEQ ID NO: 1418336
ugucacaagcccgaucuac

SEQ ID NO: 1418338 - RNA, 19 nt, Artificial Sequence
  Description of Artificial Sequence: Synthetic oligonucleotide
  Sense strand starting at position 2575 of SEQ ID NO: 1243460
aggugaaaguuuguguauu

SEQ ID NO: 1418339 - RNA, 19 nt, Artificial Sequence
  Description of Artificial Sequence: Synthetic oligonucleotide
  Antisense strand to SEQ ID NO: 1418338
aauacacaaacuuucaccu

SEQ ID NO: 1418340 - RNA, 19 nt, Artificial Sequence
  Description of Artificial Sequence: Synthetic oligonucleotide
  Sense strand starting at position 2577 of SEQ ID NO: 1243460
gugaaaguuuguguauuug

SEQ ID NO: 1418341 - RNA, 19 nt, Artificial Sequence
  Description of Artificial Sequence: Synthetic oligonucleotide
  Antisense strand to SEQ ID NO: 1418340
caaauacacaaacuuucac

SEQ ID NO: 1418342 - RNA, 19 nt, Artificial Sequence
  Description of Artificial Sequence: Synthetic oligonucleotide
  Sense strand starting at position 2798 of SEQ ID NO: 1243460
uugacagugagcugagaua

SEQ ID NO: 1418343 - RNA, 19 nt, Artificial Sequence
  Description of Artificial Sequence: Synthetic oligonucleotide
  Antisense strand to SEQ ID NO: 1418342
uaucucagcucacugucaa

SEQ ID NO: 1418344 - RNA, 19 nt, Artificial Sequence
  Description of Artificial Sequence: Synthetic oligonucleotide
  Sense strand starting at position 2809 of SEQ ID NO: 1243460
cugagauauuaucaggaca

SEQ ID NO: 1418345 - RNA, 19 nt, Artificial Sequence
  Description of Artificial Sequence: Synthetic oligonucleotide
  Antisense strand to SEQ ID NO: 1418344
uguccugauaauaucucag

SEQ ID NO: 1418346 - RNA, 19 nt, Artificial Sequence
  Description of Artificial Sequence: Synthetic oligonucleotide
  Sense strand starting at position 2836 of SEQ ID NO: 1243460
uugagcaaguucuugaaac

SEQ ID NO: 1418347 - RNA, 19 nt, Artificial Sequence
  Description of Artificial Sequence: Synthetic oligonucleotide
  Antisense strand to SEQ ID NO: 1418346
guuucaagaacuugcucaa

SEQ ID NO: 1418348 - RNA, 19 nt, Artificial Sequence
  Description of Artificial Sequence: Synthetic oligonucleotide
  Sense strand starting at position 2844 of SEQ ID NO: 1243460
guucuugaaacgcagaagu

SEQ ID NO: 1418349 - RNA, 19 nt, Artificial Sequence
  Description of Artificial Sequence: Synthetic oligonucleotide
  Antisense strand to SEQ ID NO: 1418348
acuucugcguuucaagaac

SEQ ID NO: 1418350 - RNA, 19 nt, Artificial Sequence
  Description of Artificial Sequence: Synthetic oligonucleotide
  Sense strand starting at position 2938 of SEQ ID NO: 1243460
guugucucgcaagagaaca

SEQ ID NO: 1418351 - RNA, 19 nt, Artificial Sequence
  Description of Artificial Sequence: Synthetic oligonucleotide
  Antisense strand to SEQ ID NO: 1418350
uguucucuugcgagacaac

SEQ ID NO: 1418352 - RNA, 19 nt, Artificial Sequence
  Description of Artificial Sequence: Synthetic oligonucleotide
  Sense strand starting at position 3017 of SEQ ID NO: 1243460
agaggagcagugugaugau

SEQ ID NO: 1418353 - RNA, 19 nt, Artificial Sequence
  Description of Artificial Sequence: Synthetic oligonucleotide
  Antisense strand to SEQ ID NO: 1418352
aucaucacacugcuccucu

SEQ ID NO: 1418354 - RNA, 19 nt, Artificial Sequence
  Description of Artificial Sequence: Synthetic oligonucleotide
  Sense strand starting at position 3170 of SEQ ID NO: 1243460
gaagcaaucugagcuugau

SEQ ID NO: 1418355 - RNA, 19 nt, Artificial Sequence
  Description of Artificial Sequence: Synthetic oligonucleotide
  Antisense strand to SEQ ID NO: 1418354
aucaagcucagauugcuuc

SEQ ID NO: 1418356 - RNA, 19 nt, Artificial Sequence
  Description of Artificial Sequence: Synthetic oligonucleotide
  Sense strand starting at position 3173 of SEQ ID NO: 1243460
gcaaucugagcuugauuaa

SEQ ID NO: 1418357 - RNA, 19 nt, Artificial Sequence
  Description of Artificial Sequence: Synthetic oligonucleotide
  Antisense strand to SEQ ID NO: 1418356
uuaaucaagcucagauugc

SEQ ID NO: 1418358 - RNA, 19 nt, Artificial Sequence
  Description of Artificial Sequence: Synthetic oligonucleotide
  Sense strand starting at position 3232 of SEQ ID NO: 1243460
cugaacuuguaaucagacu

SEQ ID NO: 1418359 - RNA, 19 nt, Artificial Sequence
  Description of Artificial Sequence: Synthetic oligonucleotide
  Antisense strand to SEQ ID NO: 1418358
agucugauuacaaguucag

SEQ ID NO: 1418360 - RNA, 19 nt, Artificial Sequence
  Description of Artificial Sequence: Synthetic oligonucleotide
  Sense strand starting at position 3240 of SEQ ID NO: 1243460
guaaucagacuucgaggau

SEQ ID NO: 1418361 - RNA, 19 nt, Artificial Sequence
  Description of Artificial Sequence: Synthetic oligonucleotide
  Antisense strand to SEQ ID NO: 1418360
auccucgaagucugauuac

SEQ ID NO: 1418362 - RNA, 19 nt, Artificial Sequence
  Description of Artificial Sequence: Synthetic oligonucleotide
  Sense strand starting at position 3288 of SEQ ID NO: 1243460
acccgcuagcugcaagaau

SEQ ID NO: 1418363 - RNA, 19 nt, Artificial Sequence
  Description of Artificial Sequence: Synthetic oligonucleotide
  Antisense strand to SEQ ID NO: 1418362
auucuugcagcuagcgggu

SEQ ID NO: 1418364 - RNA, 19 nt, Artificial Sequence
  Description of Artificial Sequence: Synthetic oligonucleotide
  Sense strand starting at position 3389 of SEQ ID NO: 1243460
gcucucaggaguuaggaau

SEQ ID NO: 1418365 - RNA, 19 nt, Artificial Sequence
  Description of Artificial Sequence: Synthetic oligonucleotide
  Antisense strand to SEQ ID NO: 1418364
auuccuaacuccugagagc

SEQ ID NO: 1418366 - RNA, 19 nt, Artificial Sequence
  Description of Artificial Sequence: Synthetic oligonucleotide
  Sense strand starting at position 3400 of SEQ ID NO: 1243460
uuaggaaugcucggugaca

SEQ ID NO: 1418367 - RNA, 19 nt, Artificial Sequence
  Description of Artificial Sequence: Synthetic oligonucleotide
  Antisense strand to SEQ ID NO: 1418366
ugucaccgagcauuccuaa

SEQ ID NO: 1418368 - RNA, 19 nt, Artificial Sequence
  Description of Artificial Sequence: Synthetic oligonucleotide
  Sense strand starting at position 3401 of SEQ ID NO: 1243460
uaggaaugcucggugacaa

SEQ ID NO: 1418369 - RNA, 19 nt, Artificial Sequence
  Description of Artificial Sequence: Synthetic oligonucleotide
  Antisense strand to SEQ ID NO: 1418368
uugucaccgagcauuccua

SEQ ID NO: 1418370 - RNA, 19 nt, Artificial Sequence
  Description of Artificial Sequence: Synthetic oligonucleotide
  Sense strand starting at position 3402 of SEQ ID NO: 1243460
aggaaugcucggugacaau

SEQ ID NO: 1418371 - RNA, 19 nt, Artificial Sequence
  Description of Artificial Sequence: Synthetic oligonucleotide
  Antisense strand to SEQ ID NO: 1418370
auugucaccgagcauuccu

SEQ ID NO: 1418372 - RNA, 19 nt, Artificial Sequence
  Description of Artificial Sequence: Synthetic oligonucleotide
  Sense strand starting at position 3483 of SEQ ID NO: 1243460
ugcaaauaccuuugugaag

SEQ ID NO: 1418373 - RNA, 19 nt, Artificial Sequence
  Description of Artificial Sequence: Synthetic oligonucleotide
  Antisense strand to SEQ ID NO: 1418372
cuucacaaagguauuugca

SEQ ID NO: 1418374 - RNA, 19 nt, Artificial Sequence
  Description of Artificial Sequence: Synthetic oligonucleotide
  Sense strand starting at position 3489 of SEQ ID NO: 1243460
uaccuuugugaagggaaca

SEQ ID NO: 1418375 - RNA, 19 nt, Artificial Sequence
  Description of Artificial Sequence: Synthetic oligonucleotide
  Antisense strand to SEQ ID NO: 1418374
uguucccuucacaaaggua

SEQ ID NO: 1418376 - RNA, 19 nt, Artificial Sequence
  Description of Artificial Sequence: Synthetic oligonucleotide
  Sense strand starting at position 3508 of SEQ ID NO: 1243460
auacucaucugucugcauu

SEQ ID NO: 1418377 - RNA, 19 nt, Artificial Sequence
  Description of Artificial Sequence: Synthetic oligonucleotide
  Antisense strand to SEQ ID NO: 1418376
aaugcagacagaugaguau

SEQ ID NO: 1418378 - RNA, 19 nt, Artificial Sequence
  Description of Artificial Sequence: Synthetic oligonucleotide
  Sense strand starting at position 3592 of SEQ ID NO: 1243460
gggaagaauccgggugaug

SEQ ID NO: 1418379 - RNA, 19 nt, Artificial Sequence
  Description of Artificial Sequence: Synthetic oligonucleotide
  Antisense strand to SEQ ID NO: 1418378
caucacccggauucuuccc

SEQ ID NO: 1418380 - RNA, 19 nt, Artificial Sequence
  Description of Artificial Sequence: Synthetic oligonucleotide
  Sense strand starting at position 3594 of SEQ ID NO: 1243460
gaagaauccgggugaugag

SEQ ID NO: 1418381 - RNA, 19 nt, Artificial Sequence
  Description of Artificial Sequence: Synthetic oligonucleotide
  Antisense strand to SEQ ID NO: 1418380
cucaucacccggauucuuc

SEQ ID NO: 1418382 - RNA, 19 nt, Artificial Sequence
  Description of Artificial Sequence: Synthetic oligonucleotide
  Sense strand starting at position 3608 of SEQ ID NO: 1243460
augagcugaagauguguau

SEQ ID NO: 1418383 - RNA, 19 nt, Artificial Sequence
  Description of Artificial Sequence: Synthetic oligonucleotide
  Antisense strand to SEQ ID NO: 1418382
auacacaucuucagcucau

SEQ ID NO: 1418384 - RNA, 19 nt, Artificial Sequence
  Description of Artificial Sequence: Synthetic oligonucleotide
  Sense strand starting at position 3611 of SEQ ID NO: 1243460
agcugaagauguguauguu

SEQ ID NO: 1418385 - RNA, 19 nt, Artificial Sequence
  Description of Artificial Sequence: Synthetic oligonucleotide
  Antisense strand to SEQ ID NO: 1418384
aacauacacaucuucagcu

SEQ ID NO: 1418386 - RNA, 19 nt, Artificial Sequence
  Description of Artificial Sequence: Synthetic oligonucleotide
  Sense strand starting at position 3612 of SEQ ID NO: 1243460
gcugaagauguguauguug

SEQ ID NO: 1418387 - RNA, 19 nt, Artificial Sequence
  Description of Artificial Sequence: Synthetic oligonucleotide
  Antisense strand to SEQ ID NO: 1418386
caacauacacaucuucagc

SEQ ID NO: 1418388 - RNA, 19 nt, Artificial Sequence
  Description of Artificial Sequence: Synthetic oligonucleotide
  Sense strand starting at position 3614 of SEQ ID NO: 1243460
ugaagauguguauguugag

SEQ ID NO: 1418389 - RNA, 19 nt, Artificial Sequence
  Description of Artificial Sequence: Synthetic oligonucleotide
  Antisense strand to SEQ ID NO: 1418388
cucaacauacacaucuuca

SEQ ID NO: 1418390 - RNA, 19 nt, Artificial Sequence
  Description of Artificial Sequence: Synthetic oligonucleotide
  Sense strand starting at position 3681 of SEQ ID NO: 1243460
ggcugcugacuugacgauu

SEQ ID NO: 1418391 - RNA, 19 nt, Artificial Sequence
  Description of Artificial Sequence: Synthetic oligonucleotide
  Antisense strand to SEQ ID NO: 1418390
aaucgucaagucagcagcc

SEQ ID NO: 1418392 - RNA, 19 nt, Artificial Sequence
  Description of Artificial Sequence: Synthetic oligonucleotide
  Sense strand starting at position 3702 of SEQ ID NO: 1243460
gcccaaucuccacgcauuu

SEQ ID NO: 1418393 - RNA, 19 nt, Artificial Sequence
  Description of Artificial Sequence: Synthetic oligonucleotide
  Antisense strand to SEQ ID NO: 1418392
aaaugcguggagauugggc

SEQ ID NO: 1418394 - RNA, 19 nt, Artificial Sequence
  Description of Artificial Sequence: Synthetic oligonucleotide
  Sense strand starting at position 3795 of SEQ ID NO: 1243460
ggcacuugugaaugagaaa

SEQ ID NO: 1418395 - RNA, 19 nt, Artificial Sequence
  Description of Artificial Sequence: Synthetic oligonucleotide
  Antisense strand to SEQ ID NO: 1418394
uuucucauucacaagugcc

SEQ ID NO: 1418396 - RNA, 19 nt, Artificial Sequence
  Description of Artificial Sequence: Synthetic oligonucleotide
  Sense strand starting at position 3914 of SEQ ID NO: 1243460
guauacaugcccugaacca

SEQ ID NO: 1418397 - RNA, 19 nt, Artificial Sequence
  Description of Artificial Sequence: Synthetic oligonucleotide
  Antisense strand to SEQ ID NO: 1418396
ugguucagggcauguauac

SEQ ID NO: 1418398 - RNA, 19 nt, Artificial Sequence
  Description of Artificial Sequence: Synthetic oligonucleotide
  Sense strand starting at position 143 of SEQ ID NO: 1243461
uacuauuuguaagaaugga

SEQ ID NO: 1418399 - RNA, 19 nt, Artificial Sequence
  Description of Artificial Sequence: Synthetic oligonucleotide
  Antisense strand to SEQ ID NO: 1418398
uccauucuuacaaauagua

SEQ ID NO: 1418400 - RNA, 19 nt, Artificial Sequence
  Description of Artificial Sequence: Synthetic oligonucleotide
  Sense strand starting at position 159 of SEQ ID NO: 1243461
ggaaauaaguucuuagagu

SEQ ID NO: 1418401 - RNA, 19 nt, Artificial Sequence
  Description of Artificial Sequence: Synthetic oligonucleotide
  Antisense strand to SEQ ID NO: 1418400
acucuaagaacuuauuucc

SEQ ID NO: 1418402 - RNA, 19 nt, Artificial Sequence
  Description of Artificial Sequence: Synthetic oligonucleotide
  Sense strand starting at position 228 of SEQ ID NO: 1243461
gcagaugacuuuccagacu

SEQ ID NO: 1418403 - RNA, 19 nt, Artificial Sequence
  Description of Artificial Sequence: Synthetic oligonucleotide
  Antisense strand to SEQ ID NO: 1418402
agucuggaaagucaucugc

SEQ ID NO: 1418404 - RNA, 19 nt, Artificial Sequence
  Description of Artificial Sequence: Synthetic oligonucleotide
  Sense strand starting at position 231 of SEQ ID NO: 1243461
gaugacuuuccagacuugu

SEQ ID NO: 1418405 - RNA, 19 nt, Artificial Sequence
  Description of Artificial Sequence: Synthetic oligonucleotide
  Antisense strand to SEQ ID NO: 1418404
acaagucuggaaagucauc

SEQ ID NO: 1418406 - RNA, 19 nt, Artificial Sequence
  Description of Artificial Sequence: Synthetic oligonucleotide
  Sense strand starting at position 317 of SEQ ID NO: 1243461
ugaugcuccagagagaugu

SEQ ID NO: 1418407 - RNA, 19 nt, Artificial Sequence
  Description of Artificial Sequence: Synthetic oligonucleotide
  Antisense strand to SEQ ID NO: 1418406
acaucucucuggagcauca

SEQ ID NO: 1418408 - RNA, 19 nt, Artificial Sequence
  Description of Artificial Sequence: Synthetic oligonucleotide
  Sense strand starting at position 415 of SEQ ID NO: 1243461
ugcaguacuuaaccugaaa

SEQ ID NO: 1418409 - RNA, 19 nt, Artificial Sequence
  Description of Artificial Sequence: Synthetic oligonucleotide
  Antisense strand to SEQ ID NO: 1418408
uuucagguuaaguacugca

SEQ ID NO: 1418410 - RNA, 19 nt, Artificial Sequence
  Description of Artificial Sequence: Synthetic oligonucleotide
  Sense strand starting at position 825 of SEQ ID NO: 1243461
cuuuauuacacugguggga

SEQ ID NO: 1418411 - RNA, 19 nt, Artificial Sequence
  Description of Artificial Sequence: Synthetic oligonucleotide
  Antisense strand to SEQ ID NO: 1418410
ucccaccaguguaauaaag

SEQ ID NO: 1418412 - RNA, 19 nt, Artificial Sequence
  Description of Artificial Sequence: Synthetic oligonucleotide
  Sense strand starting at position 839 of SEQ ID NO: 1243461
ugggaaagucuccgugaga

SEQ ID NO: 1418413 - RNA, 19 nt, Artificial Sequence
  Description of Artificial Sequence: Synthetic oligonucleotide
  Antisense strand to SEQ ID NO: 1418412
ucucacggagacuuuccca

SEQ ID NO: 1418414 - RNA, 19 nt, Artificial Sequence
  Description of Artificial Sequence: Synthetic oligonucleotide
  Sense strand starting at position 840 of SEQ ID NO: 1243461
gggaaagucuccgugagag

SEQ ID NO: 1418415 - RNA, 19 nt, Artificial Sequence
  Description of Artificial Sequence: Synthetic oligonucleotide
  Antisense strand to SEQ ID NO: 1418414
cucucacggagacuuuccc

SEQ ID NO: 1418416 - RNA, 19 nt, Artificial Sequence
  Description of Artificial Sequence: Synthetic oligonucleotide
  Sense strand starting at position 841 of SEQ ID NO: 1243461
ggaaagucuccgugagagg

SEQ ID NO: 1418417 - RNA, 19 nt, Artificial Sequence
  Description of Artificial Sequence: Synthetic oligonucleotide
  Antisense strand to SEQ ID NO: 1418416
ccucucacggagacuuucc

SEQ ID NO: 1418418 - RNA, 19 nt, Artificial Sequence
  Description of Artificial Sequence: Synthetic oligonucleotide
  Sense strand starting at position 1276 of SEQ ID NO: 1243461
gcgggagaugggcaagaau

SEQ ID NO: 1418419 - RNA, 19 nt, Artificial Sequence
  Description of Artificial Sequence: Synthetic oligonucleotide
  Antisense strand to SEQ ID NO: 1418418
auucuugcccaucucccgc

SEQ ID NO: 1418420 - RNA, 19 nt, Artificial Sequence
  Description of Artificial Sequence: Synthetic oligonucleotide
  Sense strand starting at position 1649 of SEQ ID NO: 1243461
uuuguugaucugcaaggua

SEQ ID NO: 1418421 - RNA, 19 nt, Artificial Sequence
  Description of Artificial Sequence: Synthetic oligonucleotide
  Antisense strand to SEQ ID NO: 1418420
uaccuugcagaucaacaaa

SEQ ID NO: 1418422 - RNA, 19 nt, Artificial Sequence
  Description of Artificial Sequence: Synthetic oligonucleotide
  Sense strand starting at position 1664 of SEQ ID NO: 1243461
gguaucaaacuucgaacau

SEQ ID NO: 1418423 - RNA, 19 nt, Artificial Sequence
  Description of Artificial Sequence: Synthetic oligonucleotide
  Antisense strand to SEQ ID NO: 1418422
auguucgaaguuugauacc

SEQ ID NO: 1418424 - RNA, 19 nt, Artificial Sequence
  Description of Artificial Sequence: Synthetic oligonucleotide
  Sense strand starting at position 2211 of SEQ ID NO: 1243461
gaggauguguuguugggaa

SEQ ID NO: 1418425 - RNA, 19 nt, Artificial Sequence
  Description of Artificial Sequence: Synthetic oligonucleotide
  Antisense strand to SEQ ID NO: 1418424
uucccaacaacacauccuc

SEQ ID NO: 1418426 - RNA, 19 nt, Artificial Sequence
  Description of Artificial Sequence: Synthetic oligonucleotide
  Sense strand starting at position 2611 of SEQ ID NO: 1243461
ggguaaucacuggguuaca

SEQ ID NO: 1418427 - RNA, 19 nt, Artificial Sequence
  Description of Artificial Sequence: Synthetic oligonucleotide
  Antisense strand to SEQ ID NO: 1418426
uguaacccagugauuaccc

SEQ ID NO: 1418428 - RNA, 19 nt, Artificial Sequence
  Description of Artificial Sequence: Synthetic oligonucleotide
  Sense strand starting at position 2612 of SEQ ID NO: 1243461
gguaaucacuggguuacaa

SEQ ID NO: 1418429 - RNA, 19 nt, Artificial Sequence
  Description of Artificial Sequence: Synthetic oligonucleotide
  Antisense strand to SEQ ID NO: 1418428
uuguaacccagugauuacc

SEQ ID NO: 1418430 - RNA, 19 nt, Artificial Sequence
  Description of Artificial Sequence: Synthetic oligonucleotide
  Sense strand starting at position 2709 of SEQ ID NO: 1243461
ugugcaggccuccaaauau

SEQ ID NO: 1418431 - RNA, 19 nt, Artificial Sequence
  Description of Artificial Sequence: Synthetic oligonucleotide
  Antisense strand to SEQ ID NO: 1418430
auauuuggaggccugcaca

SEQ ID NO: 1418432 - RNA, 19 nt, Artificial Sequence
  Description of Artificial Sequence: Synthetic oligonucleotide
  Sense strand starting at position 2772 of SEQ ID NO: 1243461
uguggcuucguguccacua

SEQ ID NO: 1418433 - RNA, 19 nt, Artificial Sequence
  Description of Artificial Sequence: Synthetic oligonucleotide
  Antisense strand to SEQ ID NO: 1418432
uaguggacacgaagccaca

SEQ ID NO: 1418434 - RNA, 19 nt, Artificial Sequence
  Description of Artificial Sequence: Synthetic oligonucleotide
  Sense strand starting at position 2823 of SEQ ID NO: 1243461
acgauaaccugaucccuca

SEQ ID NO: 1418435 - RNA, 19 nt, Artificial Sequence
  Description of Artificial Sequence: Synthetic oligonucleotide
  Antisense strand to SEQ ID NO: 1418434
ugagggaucagguuaucgu

SEQ ID NO: 1418436 - RNA, 19 nt, Artificial Sequence
  Description of Artificial Sequence: Synthetic oligonucleotide
  Sense strand starting at position 2856 of SEQ ID NO: 1243461
ucuagcuuuguggaaguga

SEQ ID NO: 1418437 - RNA, 19 nt, Artificial Sequence
  Description of Artificial Sequence: Synthetic oligonucleotide
  Antisense strand to SEQ ID NO: 1418436
ucacuuccacaaagcuaga

SEQ ID NO: 1418438 - RNA, 19 nt, Artificial Sequence
  Description of Artificial Sequence: Synthetic oligonucleotide
  Sense strand starting at position 2867 of SEQ ID NO: 1243461
ggaagugaauuucaaggua

SEQ ID NO: 1418439 - RNA, 19 nt, Artificial Sequence
  Description of Artificial Sequence: Synthetic oligonucleotide
  Antisense strand to SEQ ID NO: 1418438
uaccuugaaauucacuucc

SEQ ID NO: 1418440 - RNA, 19 nt, Artificial Sequence
  Description of Artificial Sequence: Synthetic oligonucleotide
  Sense strand starting at position 3080 of SEQ ID NO: 1243461
aguccuauauccuuugauu

SEQ ID NO: 1418441 - RNA, 19 nt, Artificial Sequence
  Description of Artificial Sequence: Synthetic oligonucleotide
  Antisense strand to SEQ ID NO: 1418440
aaucaaaggauauaggacu

SEQ ID NO: 1418442 - RNA, 19 nt, Artificial Sequence
  Description of Artificial Sequence: Synthetic oligonucleotide
  Sense strand starting at position 3091 of SEQ ID NO: 1243461
cuuugauuccuggauggua

SEQ ID NO: 1418443 - RNA, 19 nt, Artificial Sequence
  Description of Artificial Sequence: Synthetic oligonucleotide
  Antisense strand to SEQ ID NO: 1418442
uaccauccaggaaucaaag

SEQ ID NO: 1418444 - RNA, 19 nt, Artificial Sequence
  Description of Artificial Sequence: Synthetic oligonucleotide
  Sense strand starting at position 3099 of SEQ ID NO: 1243461
ccuggaugguaccagauuu

SEQ ID NO: 1418445 - RNA, 19 nt, Artificial Sequence
  Description of Artificial Sequence: Synthetic oligonucleotide
  Antisense strand to SEQ ID NO: 1418444
aaaucugguaccauccagg

SEQ ID NO: 1418446 - RNA, 19 nt, Artificial Sequence
  Description of Artificial Sequence: Synthetic oligonucleotide
  Sense strand starting at position 3149 of SEQ ID NO: 1243461
agcguuaaucuccaugaau

SEQ ID NO: 1418447 - RNA, 19 nt, Artificial Sequence
  Description of Artificial Sequence: Synthetic oligonucleotide
  Antisense strand to SEQ ID NO: 1418446
auucauggagauuaacgcu

SEQ ID NO: 1418448 - RNA, 19 nt, Artificial Sequence
  Description of Artificial Sequence: Synthetic oligonucleotide
  Sense strand starting at position 3151 of SEQ ID NO: 1243461
cguuaaucuccaugaauag

SEQ ID NO: 1418449 - RNA, 19 nt, Artificial Sequence
  Description of Artificial Sequence: Synthetic oligonucleotide
  Antisense strand to SEQ ID NO: 1418448
cuauucauggagauuaacg

SEQ ID NO: 1418450 - RNA, 19 nt, Artificial Sequence
  Description of Artificial Sequence: Synthetic oligonucleotide
  Sense strand starting at position 3213 of SEQ ID NO: 1243461
cuuagauucugagcaggau

SEQ ID NO: 1418451 - RNA, 19 nt, Artificial Sequence
  Description of Artificial Sequence: Synthetic oligonucleotide
  Antisense strand to SEQ ID NO: 1418450
auccugcucagaaucuaag

SEQ ID NO: 1418452 - RNA, 19 nt, Artificial Sequence
  Description of Artificial Sequence: Synthetic oligonucleotide
  Sense strand starting at position 3323 of SEQ ID NO: 1243461
uaauguuaaccaugggauu

SEQ ID NO: 1418453 - RNA, 19 nt, Artificial Sequence
  Description of Artificial Sequence: Synthetic oligonucleotide
  Antisense strand to SEQ ID NO: 1418452
aaucccaugguuaacauua

SEQ ID NO: 1418454 - RNA, 19 nt, Artificial Sequence
  Description of Artificial Sequence: Synthetic oligonucleotide
  Sense strand starting at position 3325 of SEQ ID NO: 1243461
auguuaaccaugggauugu

SEQ ID NO: 1418455 - RNA, 19 nt, Artificial Sequence
  Description of Artificial Sequence: Synthetic oligonucleotide
  Antisense strand to SEQ ID NO: 1418454
acaaucccaugguuaacau

SEQ ID NO: 1418456 - RNA, 19 nt, Artificial Sequence
  Description of Artificial Sequence: Synthetic oligonucleotide
  Sense strand starting at position 3329 of SEQ ID NO: 1243461
uaaccaugggauuguccua

SEQ ID NO: 1418457 - RNA, 19 nt, Artificial Sequence
  Description of Artificial Sequence: Synthetic oligonucleotide
  Antisense strand to SEQ ID NO: 1418456
uaggacaaucccaugguua

SEQ ID NO: 1418458 - RNA, 19 nt, Artificial Sequence
  Description of Artificial Sequence: Synthetic oligonucleotide
  Sense strand starting at position 3336 of SEQ ID NO: 1243461
gggauuguccuauagcuua

SEQ ID NO: 1418459 - RNA, 19 nt, Artificial Sequence
  Description of Artificial Sequence: Synthetic oligonucleotide
  Antisense strand to SEQ ID NO: 1418458
uaagcuauaggacaauccc

SEQ ID NO: 1418460 - RNA, 19 nt, Artificial Sequence
  Description of Artificial Sequence: Synthetic oligonucleotide
  Sense strand starting at position 3341 of SEQ ID NO: 1243461
uguccuauagcuuauaaag

SEQ ID NO: 1418461 - RNA, 19 nt, Artificial Sequence
  Description of Artificial Sequence: Synthetic oligonucleotide
  Antisense strand to SEQ ID NO: 1418460
cuuuauaagcuauaggaca

SEQ ID NO: 1418462 - RNA, 19 nt, Artificial Sequence
  Description of Artificial Sequence: Synthetic oligonucleotide
  Sense strand starting at position 3655 of SEQ ID NO: 1243461
gauauuggccuguaauugu

SEQ ID NO: 1418463 - RNA, 19 nt, Artificial Sequence
  Description of Artificial Sequence: Synthetic oligonucleotide
  Antisense strand to SEQ ID NO: 1418462
acaauuacaggccaauauc

SEQ ID NO: 1418464 - RNA, 19 nt, Artificial Sequence
  Description of Artificial Sequence: Synthetic oligonucleotide
  Sense strand starting at position 3804 of SEQ ID NO: 1243461
gcaacaaagucaucagauc

SEQ ID NO: 1418465 - RNA, 19 nt, Artificial Sequence
  Description of Artificial Sequence: Synthetic oligonucleotide
  Antisense strand to SEQ ID NO: 1418464
gaucugaugacuuuguugc

SEQ ID NO: 1418466 - RNA, 19 nt, Artificial Sequence
  Description of Artificial Sequence: Synthetic oligonucleotide
  Sense strand starting at position 3886 of SEQ ID NO: 1243461
ggugguacuugucuagaaa

SEQ ID NO: 1418467 - RNA, 19 nt, Artificial Sequence
  Description of Artificial Sequence: Synthetic oligonucleotide
  Antisense strand to SEQ ID NO: 1418466
uuucuagacaaguaccacc

SEQ ID NO: 1418468 - RNA, 19 nt, Artificial Sequence
  Description of Artificial Sequence: Synthetic oligonucleotide
  Sense strand starting at position 3887 of SEQ ID NO: 1243461
gugguacuugucuagaaau

SEQ ID NO: 1418469 - RNA, 19 nt, Artificial Sequence
  Description of Artificial Sequence: Synthetic oligonucleotide
  Antisense strand to SEQ ID NO: 1418468
auuucuagacaaguaccac

SEQ ID NO: 1418470 - RNA, 19 nt, Artificial Sequence
  Description of Artificial Sequence: Synthetic oligonucleotide
  Sense strand starting at position 3889 of SEQ ID NO: 1243461
gguacuugucuagaaaugu

SEQ ID NO: 1418471 - RNA, 19 nt, Artificial Sequence
  Description of Artificial Sequence: Synthetic oligonucleotide
  Antisense strand to SEQ ID NO: 1418470
acauuucuagacaaguacc

SEQ ID NO: 1418472 - RNA, 19 nt, Artificial Sequence
  Description of Artificial Sequence: Synthetic oligonucleotide
  Sense strand starting at position 3928 of SEQ ID NO: 1243461
cccauuuggugggauauca

SEQ ID NO: 1418473 - RNA, 19 nt, Artificial Sequence
  Description of Artificial Sequence: Synthetic oligonucleotide
  Antisense strand to SEQ ID NO: 1418472
ugauaucccaccaaauggg

SEQ ID NO: 1418474 - RNA, 19 nt, Artificial Sequence
  Description of Artificial Sequence: Synthetic oligonucleotide
  Sense strand starting at position 3936 of SEQ ID NO: 1243461
gugggauaucauuguacau

SEQ ID NO: 1418475 - RNA, 19 nt, Artificial Sequence
  Description of Artificial Sequence: Synthetic oligonucleotide
  Antisense strand to SEQ ID NO: 1418474
auguacaaugauaucccac

SEQ ID NO: 1418476 - RNA, 19 nt, Artificial Sequence
  Description of Artificial Sequence: Synthetic oligonucleotide
  Sense strand starting at position 3953 of SEQ ID NO: 1243461
auaggagucuguguacaua

SEQ ID NO: 1418477 - RNA, 19 nt, Artificial Sequence
  Description of Artificial Sequence: Synthetic oligonucleotide
  Antisense strand to SEQ ID NO: 1418476
uauguacacagacuccuau

SEQ ID NO: 1418478 - RNA, 19 nt, Artificial Sequence
  Description of Artificial Sequence: Synthetic oligonucleotide
  Sense strand starting at position 143 of SEQ ID NO: 1243466
uacuauuuguaagaaugga

SEQ ID NO: 1418479 - RNA, 19 nt, Artificial Sequence
  Description of Artificial Sequence: Synthetic oligonucleotide
  Antisense strand to SEQ ID NO: 1418478
uccauucuuacaaauagua

SEQ ID NO: 1418480 - RNA, 19 nt, Artificial Sequence
  Description of Artificial Sequence: Synthetic oligonucleotide
  Sense strand starting at position 159 of SEQ ID NO: 1243466
ggaaauaaguucuuagagu

SEQ ID NO: 1418481 - RNA, 19 nt, Artificial Sequence
  Description of Artificial Sequence: Synthetic oligonucleotide
  Antisense strand to SEQ ID NO: 1418480
acucuaagaacuuauuucc

SEQ ID NO: 1418482 - RNA, 19 nt, Artificial Sequence
  Description of Artificial Sequence: Synthetic oligonucleotide
  Sense strand starting at position 228 of SEQ ID NO: 1243466
gcagaugacuuuccagacu

SEQ ID NO: 1418483 - RNA, 19 nt, Artificial Sequence
  Description of Artificial Sequence: Synthetic oligonucleotide
  Antisense strand to SEQ ID NO: 1418482
agucuggaaagucaucugc

SEQ ID NO: 1418484 - RNA, 19 nt, Artificial Sequence
  Description of Artificial Sequence: Synthetic oligonucleotide
  Sense strand starting at position 231 of SEQ ID NO: 1243466
gaugacuuuccagacuugu

SEQ ID NO: 1418485 - RNA, 19 nt, Artificial Sequence
  Description of Artificial Sequence: Synthetic oligonucleotide
  Antisense strand to SEQ ID NO: 1418484
acaagucuggaaagucauc

SEQ ID NO: 1418486 - RNA, 19 nt, Artificial Sequence
  Description of Artificial Sequence: Synthetic oligonucleotide
  Sense strand starting at position 317 of SEQ ID NO: 1243466
ugaugcuccagagagaugu

SEQ ID NO: 1418487 - RNA, 19 nt, Artificial Sequence
  Description of Artificial Sequence: Synthetic oligonucleotide
  Antisense strand to SEQ ID NO: 1418486
acaucucucuggagcauca

SEQ ID NO: 1418488 - RNA, 19 nt, Artificial Sequence
  Description of Artificial Sequence: Synthetic oligonucleotide
  Sense strand starting at position 415 of SEQ ID NO: 1243466
ugcaguacuuaaccugaaa

SEQ ID NO: 1418489 - RNA, 19 nt, Artificial Sequence
  Description of Artificial Sequence: Synthetic oligonucleotide
  Antisense strand to SEQ ID NO: 1418488
uuucagguuaaguacugca

SEQ ID NO: 1418490 - RNA, 19 nt, Artificial Sequence
  Description of Artificial Sequence: Synthetic oligonucleotide
  Sense strand starting at position 825 of SEQ ID NO: 1243466
cuuuauuacacugguggga

SEQ ID NO: 1418491 - RNA, 19 nt, Artificial Sequence
  Description of Artificial Sequence: Synthetic oligonucleotide
  Antisense strand to SEQ ID NO: 1418490
ucccaccaguguaauaaag

SEQ ID NO: 1418492 - RNA, 19 nt, Artificial Sequence
  Description of Artificial Sequence: Synthetic oligonucleotide
  Sense strand starting at position 839 of SEQ ID NO: 1243466
ugggaaagucuccgugaga

SEQ ID NO: 1418493 - RNA, 19 nt, Artificial Sequence
  Description of Artificial Sequence: Synthetic oligonucleotide
  Antisense strand to SEQ ID NO: 1418492
ucucacggagacuuuccca

SEQ ID NO: 1418494 - RNA, 19 nt, Artificial Sequence
  Description of Artificial Sequence: Synthetic oligonucleotide
  Sense strand starting at position 840 of SEQ ID NO: 1243466
gggaaagucuccgugagag

SEQ ID NO: 1418495 - RNA, 19 nt, Artificial Sequence
  Description of Artificial Sequence: Synthetic oligonucleotide
  Antisense strand to SEQ ID NO: 1418494
cucucacggagacuuuccc

SEQ ID NO: 1418496 - RNA, 19 nt, Artificial Sequence
  Description of Artificial Sequence: Synthetic oligonucleotide
  Sense strand starting at position 841 of SEQ ID NO: 1243466
ggaaagucuccgugagagg

SEQ ID NO: 1418497 - RNA, 19 nt, Artificial Sequence
  Description of Artificial Sequence: Synthetic oligonucleotide
  Antisense strand to SEQ ID NO: 1418496
ccucucacggagacuuucc

SEQ ID NO: 1418498 - RNA, 19 nt, Artificial Sequence
  Description of Artificial Sequence: Synthetic oligonucleotide
  Sense strand starting at position 1276 of SEQ ID NO: 1243466
gcgggagaugggcaagaau

SEQ ID NO: 1418499 - RNA, 19 nt, Artificial Sequence
  Description of Artificial Sequence: Synthetic oligonucleotide
  Antisense strand to SEQ ID NO: 1418498
auucuugcccaucucccgc

SEQ ID NO: 1418500 - RNA, 19 nt, Artificial Sequence
  Description of Artificial Sequence: Synthetic oligonucleotide
  Sense strand starting at position 1649 of SEQ ID NO: 1243466
uuuguugaucugcaaggua

SEQ ID NO: 1418501 - RNA, 19 nt, Artificial Sequence
  Description of Artificial Sequence: Synthetic oligonucleotide
  Antisense strand to SEQ ID NO: 1418500
uaccuugcagaucaacaaa

SEQ ID NO: 1418502 - RNA, 19 nt, Artificial Sequence
  Description of Artificial Sequence: Synthetic oligonucleotide
  Sense strand starting at position 1664 of SEQ ID NO: 1243466
gguaucaaacuucgaacau

SEQ ID NO: 1418503 - RNA, 19 nt, Artificial Sequence
  Description of Artificial Sequence: Synthetic oligonucleotide
  Antisense strand to SEQ ID NO: 1418502
auguucgaaguuugauacc

SEQ ID NO: 1418504 - RNA, 19 nt, Artificial Sequence
  Description of Artificial Sequence: Synthetic oligonucleotide
  Sense strand starting at position 2211 of SEQ ID NO: 1243466
gaggauguguuguugggaa

SEQ ID NO: 1418505 - RNA, 19 nt, Artificial Sequence
  Description of Artificial Sequence: Synthetic oligonucleotide
  Antisense strand to SEQ ID NO: 1418504
uucccaacaacacauccuc

SEQ ID NO: 1418506 - RNA, 19 nt, Artificial Sequence
  Description of Artificial Sequence: Synthetic oligonucleotide
  Sense strand starting at position 2611 of SEQ ID NO: 1243466
ggguaaucacuggguuaca

SEQ ID NO: 1418507 - RNA, 19 nt, Artificial Sequence
  Description of Artificial Sequence: Synthetic oligonucleotide
  Antisense strand to SEQ ID NO: 1418506
uguaacccagugauuaccc

SEQ ID NO: 1418508 - RNA, 19 nt, Artificial Sequence
  Description of Artificial Sequence: Synthetic oligonucleotide
  Sense strand starting at position 2612 of SEQ ID NO: 1243466
gguaaucacuggguuacaa

SEQ ID NO: 1418509 - RNA, 19 nt, Artificial Sequence
  Description of Artificial Sequence: Synthetic oligonucleotide
  Antisense strand to SEQ ID NO: 1418508
uuguaacccagugauuacc

SEQ ID NO: 1418510 - RNA, 19 nt, Artificial Sequence
  Description of Artificial Sequence: Synthetic oligonucleotide
  Sense strand starting at position 2709 of SEQ ID NO: 1243466
ugugcaggccuccaaauau

SEQ ID NO: 1418511 - RNA, 19 nt, Artificial Sequence
  Description of Artificial Sequence: Synthetic oligonucleotide
  Antisense strand to SEQ ID NO: 1418510
auauuuggaggccugcaca

SEQ ID NO: 1418512 - RNA, 19 nt, Artificial Sequence
  Description of Artificial Sequence: Synthetic oligonucleotide
  Sense strand starting at position 2772 of SEQ ID NO: 1243466
uguggcuucguguccacua

SEQ ID NO: 1418513 - RNA, 19 nt, Artificial Sequence
  Description of Artificial Sequence: Synthetic oligonucleotide
  Antisense strand to SEQ ID NO: 1418512
uaguggacacgaagccaca

SEQ ID NO: 1418514 - RNA, 19 nt, Artificial Sequence
  Description of Artificial Sequence: Synthetic oligonucleotide
  Sense strand starting at position 2823 of SEQ ID NO: 1243466
acgauaaccugaucccuca

SEQ ID NO: 1418515 - RNA, 19 nt, Artificial Sequence
  Description of Artificial Sequence: Synthetic oligonucleotide
  Antisense strand to SEQ ID NO: 1418514
ugagggaucagguuaucgu

SEQ ID NO: 1418516 - RNA, 19 nt, Artificial Sequence
  Description of Artificial Sequence: Synthetic oligonucleotide
  Sense strand starting at position 2856 of SEQ ID NO: 1243466
ucuagcuuuguggaaguga

SEQ ID NO: 1418517 - RNA, 19 nt, Artificial Sequence
  Description of Artificial Sequence: Synthetic oligonucleotide
  Antisense strand to SEQ ID NO: 1418516
ucacuuccacaaagcuaga

SEQ ID NO: 1418518 - RNA, 19 nt, Artificial Sequence
  Description of Artificial Sequence: Synthetic oligonucleotide
  Sense strand starting at position 2867 of SEQ ID NO: 1243466
ggaagugaauuucaaggua

SEQ ID NO: 1418519 - RNA, 19 nt, Artificial Sequence
  Description of Artificial Sequence: Synthetic oligonucleotide
  Antisense strand to SEQ ID NO: 1418518
uaccuugaaauucacuucc

SEQ ID NO: 1418520 - RNA, 19 nt, Artificial Sequence
  Description of Artificial Sequence: Synthetic oligonucleotide
  Sense strand starting at position 3080 of SEQ ID NO: 1243466
aguccuauauccuuugauu

SEQ ID NO: 1418521 - RNA, 19 nt, Artificial Sequence
  Description of Artificial Sequence: Synthetic oligonucleotide
  Antisense strand to SEQ ID NO: 1418520
aaucaaaggauauaggacu

SEQ ID NO: 1418522 - RNA, 19 nt, Artificial Sequence
  Description of Artificial Sequence: Synthetic oligonucleotide
  Sense strand starting at position 3091 of SEQ ID NO: 1243466
cuuugauuccuggauggua

SEQ ID NO: 1418523 - RNA, 19 nt, Artificial Sequence
  Description of Artificial Sequence: Synthetic oligonucleotide
  Antisense strand to SEQ ID NO: 1418522
uaccauccaggaaucaaag

SEQ ID NO: 1418524 - RNA, 19 nt, Artificial Sequence
  Description of Artificial Sequence: Synthetic oligonucleotide
  Sense strand starting at position 3099 of SEQ ID NO: 1243466
ccuggaugguaccagauuu

SEQ ID NO: 1418525 - RNA, 19 nt, Artificial Sequence
  Description of Artificial Sequence: Synthetic oligonucleotide
  Antisense strand to SEQ ID NO: 1418524
aaaucugguaccauccagg

SEQ ID NO: 1418526 - RNA, 19 nt, Artificial Sequence
  Description of Artificial Sequence: Synthetic oligonucleotide
  Sense strand starting at position 3149 of SEQ ID NO: 1243466
agcguuaaucuccaugaau

SEQ ID NO: 1418527 - RNA, 19 nt, Artificial Sequence
  Description of Artificial Sequence: Synthetic oligonucleotide
  Antisense strand to SEQ ID NO: 1418526
auucauggagauuaacgcu

SEQ ID NO: 1418528 - RNA, 19 nt, Artificial Sequence
  Description of Artificial Sequence: Synthetic oligonucleotide
  Sense strand starting at position 3151 of SEQ ID NO: 1243466
cguuaaucuccaugaauag

SEQ ID NO: 1418529 - RNA, 19 nt, Artificial Sequence
  Description of Artificial Sequence: Synthetic oligonucleotide
  Antisense strand to SEQ ID NO: 1418528
cuauucauggagauuaacg

SEQ ID NO: 1418530 - RNA, 19 nt, Artificial Sequence
  Description of Artificial Sequence: Synthetic oligonucleotide
  Sense strand starting at position 3213 of SEQ ID NO: 1243466
cuuagauucugagcaggau

SEQ ID NO: 1418531 - RNA, 19 nt, Artificial Sequence
  Description of Artificial Sequence: Synthetic oligonucleotide
  Antisense strand to SEQ ID NO: 1418530
auccugcucagaaucuaag

SEQ ID NO: 1418532 - RNA, 19 nt, Artificial Sequence
  Description of Artificial Sequence: Synthetic oligonucleotide
  Sense strand starting at position 3323 of SEQ ID NO: 1243466
uaauguuaaccaugggauu

SEQ ID NO: 1418533 - RNA, 19 nt, Artificial Sequence
  Description of Artificial Sequence: Synthetic oligonucleotide
  Antisense strand to SEQ ID NO: 1418532
aaucccaugguuaacauua

SEQ ID NO: 1418534 - RNA, 19 nt, Artificial Sequence
  Description of Artificial Sequence: Synthetic oligonucleotide
  Sense strand starting at position 3325 of SEQ ID NO: 1243466
auguuaaccaugggauugu

SEQ ID NO: 1418535 - RNA, 19 nt, Artificial Sequence
  Description of Artificial Sequence: Synthetic oligonucleotide
  Antisense strand to SEQ ID NO: 1418534
acaaucccaugguuaacau

SEQ ID NO: 1418536 - RNA, 19 nt, Artificial Sequence
  Description of Artificial Sequence: Synthetic oligonucleotide
  Sense strand starting at position 3329 of SEQ ID NO: 1243466
uaaccaugggauuguccua

SEQ ID NO: 1418537 - RNA, 19 nt, Artificial Sequence
  Description of Artificial Sequence: Synthetic oligonucleotide
  Antisense strand to SEQ ID NO: 1418536
uaggacaaucccaugguua

SEQ ID NO: 1418538 - RNA, 19 nt, Artificial Sequence
  Description of Artificial Sequence: Synthetic oligonucleotide
  Sense strand starting at position 3336 of SEQ ID NO: 1243466
gggauuguccuauagcuua

SEQ ID NO: 1418539 - RNA, 19 nt, Artificial Sequence
  Description of Artificial Sequence: Synthetic oligonucleotide
  Antisense strand to SEQ ID NO: 1418538
uaagcuauaggacaauccc

SEQ ID NO: 1418540 - RNA, 19 nt, Artificial Sequence
  Description of Artificial Sequence: Synthetic oligonucleotide
  Sense strand starting at position 3341 of SEQ ID NO: 1243466
uguccuauagcuuauaaag

SEQ ID NO: 1418541 - RNA, 19 nt, Artificial Sequence
  Description of Artificial Sequence: Synthetic oligonucleotide
  Antisense strand to SEQ ID NO: 1418540
cuuuauaagcuauaggaca

SEQ ID NO: 1418542 - RNA, 19 nt, Artificial Sequence
  Description of Artificial Sequence: Synthetic oligonucleotide
  Sense strand starting at position 3655 of SEQ ID NO: 1243466
gauauuggccuguaauugu

SEQ ID NO: 1418543 - RNA, 19 nt, Artificial Sequence
  Description of Artificial Sequence: Synthetic oligonucleotide
  Antisense strand to SEQ ID NO: 1418542
acaauuacaggccaauauc

SEQ ID NO: 1418544 - RNA, 19 nt, Artificial Sequence
  Description of Artificial Sequence: Synthetic oligonucleotide
  Sense strand starting at position 3804 of SEQ ID NO: 1243466
gcaacaaagucaucagauc

SEQ ID NO: 1418545 - RNA, 19 nt, Artificial Sequence
  Description of Artificial Sequence: Synthetic oligonucleotide
  Antisense strand to SEQ ID NO: 1418544
gaucugaugacuuuguugc

SEQ ID NO: 1418546 - RNA, 19 nt, Artificial Sequence
  Description of Artificial Sequence: Synthetic oligonucleotide
  Sense strand starting at position 3886 of SEQ ID NO: 1243466
ggugguacuugucuagaaa

SEQ ID NO: 1418547 - RNA, 19 nt, Artificial Sequence
  Description of Artificial Sequence: Synthetic oligonucleotide
  Antisense strand to SEQ ID NO: 1418546
uuucuagacaaguaccacc

SEQ ID NO: 1418548 - RNA, 19 nt, Artificial Sequence
  Description of Artificial Sequence: Synthetic oligonucleotide
  Sense strand starting at position 3887 of SEQ ID NO: 1243466
gugguacuugucuagaaau

SEQ ID NO: 1418549 - RNA, 19 nt, Artificial Sequence
  Description of Artificial Sequence: Synthetic oligonucleotide
  Antisense strand to SEQ ID NO: 1418548
auuucuagacaaguaccac

SEQ ID NO: 1418550 - RNA, 19 nt, Artificial Sequence
  Description of Artificial Sequence: Synthetic oligonucleotide
  Sense strand starting at position 3889 of SEQ ID NO: 1243466
gguacuugucuagaaaugu

SEQ ID NO: 1418551 - RNA, 19 nt, Artificial Sequence
  Description of Artificial Sequence: Synthetic oligonucleotide
  Antisense strand to SEQ ID NO: 1418550
acauuucuagacaaguacc

SEQ ID NO: 1418552 - RNA, 19 nt, Artificial Sequence
  Description of Artificial Sequence: Synthetic oligonucleotide
  Sense strand starting at position 3928 of SEQ ID NO: 1243466
cccauuuggugggauauca

SEQ ID NO: 1418553 - RNA, 19 nt, Artificial Sequence
  Description of Artificial Sequence: Synthetic oligonucleotide
  Antisense strand to SEQ ID NO: 1418552
ugauaucccaccaaauggg

SEQ ID NO: 1418554 - RNA, 19 nt, Artificial Sequence
  Description of Artificial Sequence: Synthetic oligonucleotide
  Sense strand starting at position 3936 of SEQ ID NO: 1243466
gugggauaucauuguacau

SEQ ID NO: 1418555 - RNA, 19 nt, Artificial Sequence
  Description of Artificial Sequence: Synthetic oligonucleotide
  Antisense strand to SEQ ID NO: 1418554
auguacaaugauaucccac

SEQ ID NO: 1418556 - RNA, 19 nt, Artificial Sequence
  Description of Artificial Sequence: Synthetic oligonucleotide
  Sense strand starting at position 3953 of SEQ ID NO: 1243466
auaggagucuguguacaua

SEQ ID NO: 1418557 - RNA, 19 nt, Artificial Sequence
  Description of Artificial Sequence: Synthetic oligonucleotide
  Antisense strand to SEQ ID NO: 1418556
uauguacacagacuccuau

SEQ ID NO: 1418558 - RNA, 19 nt, Artificial Sequence
  Description of Artificial Sequence: Synthetic oligonucleotide
  Sense strand starting at position 145 of SEQ ID NO: 1243471
uacuauuuguaagaaugga

SEQ ID NO: 1418559 - RNA, 19 nt, Artificial Sequence
  Description of Artificial Sequence: Synthetic oligonucleotide
  Antisense strand to SEQ ID NO: 1418558
uccauucuuacaaauagua

SEQ ID NO: 1418560 - RNA, 19 nt, Artificial Sequence
  Description of Artificial Sequence: Synthetic oligonucleotide
  Sense strand starting at position 161 of SEQ ID NO: 1243471
ggaaauaaguucuuagagu

SEQ ID NO: 1418561 - RNA, 19 nt, Artificial Sequence
  Description of Artificial Sequence: Synthetic oligonucleotide
  Antisense strand to SEQ ID NO: 1418560
acucuaagaacuuauuucc

SEQ ID NO: 1418562 - RNA, 19 nt, Artificial Sequence
  Description of Artificial Sequence: Synthetic oligonucleotide
  Sense strand starting at position 230 of SEQ ID NO: 1243471
gcagaugacuuuccagacu

SEQ ID NO: 1418563 - RNA, 19 nt, Artificial Sequence
  Description of Artificial Sequence: Synthetic oligonucleotide
  Antisense strand to SEQ ID NO: 1418562
agucuggaaagucaucugc

SEQ ID NO: 1418564 - RNA, 19 nt, Artificial Sequence
  Description of Artificial Sequence: Synthetic oligonucleotide
  Sense strand starting at position 233 of SEQ ID NO: 1243471
gaugacuuuccagacuugu

SEQ ID NO: 1418565 - RNA, 19 nt, Artificial Sequence
  Description of Artificial Sequence: Synthetic oligonucleotide
  Antisense strand to SEQ ID NO: 1418564
acaagucuggaaagucauc

SEQ ID NO: 1418566 - RNA, 19 nt, Artificial Sequence
  Description of Artificial Sequence: Synthetic oligonucleotide
  Sense strand starting at position 319 of SEQ ID NO: 1243471
ugaugcuccagagagaugu

SEQ ID NO: 1418567 - RNA, 19 nt, Artificial Sequence
  Description of Artificial Sequence: Synthetic oligonucleotide
  Antisense strand to SEQ ID NO: 1418566
acaucucucuggagcauca

SEQ ID NO: 1418568 - RNA, 19 nt, Artificial Sequence
  Description of Artificial Sequence: Synthetic oligonucleotide
  Sense strand starting at position 417 of SEQ ID NO: 1243471
ugcaguacuuaaccugaaa

SEQ ID NO: 1418569 - RNA, 19 nt, Artificial Sequence
  Description of Artificial Sequence: Synthetic oligonucleotide
  Antisense strand to SEQ ID NO: 1418568
uuucagguuaaguacugca

SEQ ID NO: 1418570 - RNA, 19 nt, Artificial Sequence
  Description of Artificial Sequence: Synthetic oligonucleotide
  Sense strand starting at position 827 of SEQ ID NO: 1243471
cuuuauuacacugguggga

SEQ ID NO: 1418571 - RNA, 19 nt, Artificial Sequence
  Description of Artificial Sequence: Synthetic oligonucleotide
  Antisense strand to SEQ ID NO: 1418570
ucccaccaguguaauaaag

SEQ ID NO: 1418572 - RNA, 19 nt, Artificial Sequence
  Description of Artificial Sequence: Synthetic oligonucleotide
  Sense strand starting at position 841 of SEQ ID NO: 1243471
ugggaaagucuccgugaga

SEQ ID NO: 1418573 - RNA, 19 nt, Artificial Sequence
  Description of Artificial Sequence: Synthetic oligonucleotide
  Antisense strand to SEQ ID NO: 1418572
ucucacggagacuuuccca

SEQ ID NO: 1418574 - RNA, 19 nt, Artificial Sequence
  Description of Artificial Sequence: Synthetic oligonucleotide
  Sense strand starting at position 842 of SEQ ID NO: 1243471
gggaaagucuccgugagag

SEQ ID NO: 1418575 - RNA, 19 nt, Artificial Sequence
  Description of Artificial Sequence: Synthetic oligonucleotide
  Antisense strand to SEQ ID NO: 1418574
cucucacggagacuuuccc

SEQ ID NO: 1418576 - RNA, 19 nt, Artificial Sequence
  Description of Artificial Sequence: Synthetic oligonucleotide
  Sense strand starting at position 843 of SEQ ID NO: 1243471
ggaaagucuccgugagagg

SEQ ID NO: 1418577 - RNA, 19 nt, Artificial Sequence
  Description of Artificial Sequence: Synthetic oligonucleotide
  Antisense strand to SEQ ID NO: 1418576
ccucucacggagacuuucc

SEQ ID NO: 1418578 - RNA, 19 nt, Artificial Sequence
  Description of Artificial Sequence: Synthetic oligonucleotide
  Sense strand starting at position 1278 of SEQ ID NO: 1243471
gcgggagaugggcaagaau

SEQ ID NO: 1418579 - RNA, 19 nt, Artificial Sequence
  Description of Artificial Sequence: Synthetic oligonucleotide
  Antisense strand to SEQ ID NO: 1418578
auucuugcccaucucccgc

SEQ ID NO: 1418580 - RNA, 19 nt, Artificial Sequence
  Description of Artificial Sequence: Synthetic oligonucleotide
  Sense strand starting at position 1651 of SEQ ID NO: 1243471
uuuguugaucugcaaggua

SEQ ID NO: 1418581 - RNA, 19 nt, Artificial Sequence
  Description of Artificial Sequence: Synthetic oligonucleotide
  Antisense strand to SEQ ID NO: 1418580
uaccuugcagaucaacaaa

SEQ ID NO: 1418582 - RNA, 19 nt, Artificial Sequence
  Description of Artificial Sequence: Synthetic oligonucleotide
  Sense strand starting at position 1666 of SEQ ID NO: 1243471
gguaucaaacuucgaacau

SEQ ID NO: 1418583 - RNA, 19 nt, Artificial Sequence
  Description of Artificial Sequence: Synthetic oligonucleotide
  Antisense strand to SEQ ID NO: 1418582
auguucgaaguuugauacc

SEQ ID NO: 1418584 - RNA, 19 nt, Artificial Sequence
  Description of Artificial Sequence: Synthetic oligonucleotide
  Sense strand starting at position 2213 of SEQ ID NO: 1243471
gaggauguguuguugggaa

SEQ ID NO: 1418585 - RNA, 19 nt, Artificial Sequence
  Description of Artificial Sequence: Synthetic oligonucleotide
  Antisense strand to SEQ ID NO: 1418584
uucccaacaacacauccuc

SEQ ID NO: 1418586 - RNA, 19 nt, Artificial Sequence
  Description of Artificial Sequence: Synthetic oligonucleotide
  Sense strand starting at position 2613 of SEQ ID NO: 1243471
ggguaaucacuggguuaca

SEQ ID NO: 1418587 - RNA, 19 nt, Artificial Sequence
  Description of Artificial Sequence: Synthetic oligonucleotide
  Antisense strand to SEQ ID NO: 1418586
uguaacccagugauuaccc

SEQ ID NO: 1418588 - RNA, 19 nt, Artificial Sequence
  Description of Artificial Sequence: Synthetic oligonucleotide
  Sense strand starting at position 2614 of SEQ ID NO: 1243471
gguaaucacuggguuacaa

SEQ ID NO: 1418589 - RNA, 19 nt, Artificial Sequence
  Description of Artificial Sequence: Synthetic oligonucleotide
  Antisense strand to SEQ ID NO: 1418588
uuguaacccagugauuacc

SEQ ID NO: 1418590 - RNA, 19 nt, Artificial Sequence
  Description of Artificial Sequence: Synthetic oligonucleotide
  Sense strand starting at position 2711 of SEQ ID NO: 1243471
ugugcaggccuccaaauau

SEQ ID NO: 1418591 - RNA, 19 nt, Artificial Sequence
  Description of Artificial Sequence: Synthetic oligonucleotide
  Antisense strand to SEQ ID NO: 1418590
auauuuggaggccugcaca

SEQ ID NO: 1418592 - RNA, 19 nt, Artificial Sequence
  Description of Artificial Sequence: Synthetic oligonucleotide
  Sense strand starting at position 2774 of SEQ ID NO: 1243471
uguggcuucguguccacua

SEQ ID NO: 1418593 - RNA, 19 nt, Artificial Sequence
  Description of Artificial Sequence: Synthetic oligonucleotide
  Antisense strand to SEQ ID NO: 1418592
uaguggacacgaagccaca

SEQ ID NO: 1418594 - RNA, 19 nt, Artificial Sequence
  Description of Artificial Sequence: Synthetic oligonucleotide
  Sense strand starting at position 2825 of SEQ ID NO: 1243471
acgauaaccugaucccuca

SEQ ID NO: 1418595 - RNA, 19 nt, Artificial Sequence
  Description of Artificial Sequence: Synthetic oligonucleotide
  Antisense strand to SEQ ID NO: 1418594
ugagggaucagguuaucgu

SEQ ID NO: 1418596 - RNA, 19 nt, Artificial Sequence
  Description of Artificial Sequence: Synthetic oligonucleotide
  Sense strand starting at position 2858 of SEQ ID NO: 1243471
ucuagcuuuguggaaguga

SEQ ID NO: 1418597 - RNA, 19 nt, Artificial Sequence
  Description of Artificial Sequence: Synthetic oligonucleotide
  Antisense strand to SEQ ID NO: 1418596
ucacuuccacaaagcuaga

SEQ ID NO: 1418598 - RNA, 19 nt, Artificial Sequence
  Description of Artificial Sequence: Synthetic oligonucleotide
  Sense strand starting at position 2869 of SEQ ID NO: 1243471
ggaagugaauuucaaggua

SEQ ID NO: 1418599 - RNA, 19 nt, Artificial Sequence
  Description of Artificial Sequence: Synthetic oligonucleotide
  Antisense strand to SEQ ID NO: 1418598
uaccuugaaauucacuucc

SEQ ID NO: 1418600 - RNA, 19 nt, Artificial Sequence
  Description of Artificial Sequence: Synthetic oligonucleotide
  Sense strand starting at position 3082 of SEQ ID NO: 1243471
aguccuauauccuuugauu

SEQ ID NO: 1418601 - RNA, 19 nt, Artificial Sequence
  Description of Artificial Sequence: Synthetic oligonucleotide
  Antisense strand to SEQ ID NO: 1418600
aaucaaaggauauaggacu

SEQ ID NO: 1418602 - RNA, 19 nt, Artificial Sequence
  Description of Artificial Sequence: Synthetic oligonucleotide
  Sense strand starting at position 3093 of SEQ ID NO: 1243471
cuuugauuccuggauggua

SEQ ID NO: 1418603 - RNA, 19 nt, Artificial Sequence
  Description of Artificial Sequence: Synthetic oligonucleotide
  Antisense strand to SEQ ID NO: 1418602
uaccauccaggaaucaaag

SEQ ID NO: 1418604 - RNA, 19 nt, Artificial Sequence
  Description of Artificial Sequence: Synthetic oligonucleotide
  Sense strand starting at position 3101 of SEQ ID NO: 1243471
ccuggaugguaccagauuu

SEQ ID NO: 1418605 - RNA, 19 nt, Artificial Sequence
  Description of Artificial Sequence: Synthetic oligonucleotide
  Antisense strand to SEQ ID NO: 1418604
aaaucugguaccauccagg

SEQ ID NO: 1418606 - RNA, 19 nt, Artificial Sequence
  Description of Artificial Sequence: Synthetic oligonucleotide
  Sense strand starting at position 3151 of SEQ ID NO: 1243471
agcguuaaucuccaugaau

SEQ ID NO: 1418607 - RNA, 19 nt, Artificial Sequence
  Description of Artificial Sequence: Synthetic oligonucleotide
  Antisense strand to SEQ ID NO: 1418606
auucauggagauuaacgcu

SEQ ID NO: 1418608 - RNA, 19 nt, Artificial Sequence
  Description of Artificial Sequence: Synthetic oligonucleotide
  Sense strand starting at position 3153 of SEQ ID NO: 1243471
cguuaaucuccaugaauag

SEQ ID NO: 1418609 - RNA, 19 nt, Artificial Sequence
  Description of Artificial Sequence: Synthetic oligonucleotide
  Antisense strand to SEQ ID NO: 1418608
cuauucauggagauuaacg

SEQ ID NO: 1418610 - RNA, 19 nt, Artificial Sequence
  Description of Artificial Sequence: Synthetic oligonucleotide
  Sense strand starting at position 3215 of SEQ ID NO: 1243471
cuuagauucugagcaggau

SEQ ID NO: 1418611 - RNA, 19 nt, Artificial Sequence
  Description of Artificial Sequence: Synthetic oligonucleotide
  Antisense strand to SEQ ID NO: 1418610
auccugcucagaaucuaag

SEQ ID NO: 1418612 - RNA, 19 nt, Artificial Sequence
  Description of Artificial Sequence: Synthetic oligonucleotide
  Sense strand starting at position 3325 of SEQ ID NO: 1243471
uaauguuaaccaugggauu

SEQ ID NO: 1418613 - RNA, 19 nt, Artificial Sequence
  Description of Artificial Sequence: Synthetic oligonucleotide
  Antisense strand to SEQ ID NO: 1418612
aaucccaugguuaacauua

SEQ ID NO: 1418614 - RNA, 19 nt, Artificial Sequence
  Description of Artificial Sequence: Synthetic oligonucleotide
  Sense strand starting at position 3327 of SEQ ID NO: 1243471
auguuaaccaugggauugu

SEQ ID NO: 1418615 - RNA, 19 nt, Artificial Sequence
  Description of Artificial Sequence: Synthetic oligonucleotide
  Antisense strand to SEQ ID NO: 1418614
acaaucccaugguuaacau

SEQ ID NO: 1418616 - RNA, 19 nt, Artificial Sequence
  Description of Artificial Sequence: Synthetic oligonucleotide
  Sense strand starting at position 3331 of SEQ ID NO: 1243471
uaaccaugggauuguccua

SEQ ID NO: 1418617 - RNA, 19 nt, Artificial Sequence
  Description of Artificial Sequence: Synthetic oligonucleotide
  Antisense strand to SEQ ID NO: 1418616
uaggacaaucccaugguua

SEQ ID NO: 1418618 - RNA, 19 nt, Artificial Sequence
  Description of Artificial Sequence: Synthetic oligonucleotide
  Sense strand starting at position 3338 of SEQ ID NO: 1243471
gggauuguccuauagcuua

SEQ ID NO: 1418619 - RNA, 19 nt, Artificial Sequence
  Description of Artificial Sequence: Synthetic oligonucleotide
  Antisense strand to SEQ ID NO: 1418618
uaagcuauaggacaauccc

SEQ ID NO: 1418620 - RNA, 19 nt, Artificial Sequence
  Description of Artificial Sequence: Synthetic oligonucleotide
  Sense strand starting at position 3343 of SEQ ID NO: 1243471
uguccuauagcuuauaaag

SEQ ID NO: 1418621 - RNA, 19 nt, Artificial Sequence
  Description of Artificial Sequence: Synthetic oligonucleotide
  Antisense strand to SEQ ID NO: 1418620
cuuuauaagcuauaggaca

SEQ ID NO: 1418622 - RNA, 19 nt, Artificial Sequence
  Description of Artificial Sequence: Synthetic oligonucleotide
  Sense strand starting at position 3657 of SEQ ID NO: 1243471
gauauuggccuguaauugu

SEQ ID NO: 1418623 - RNA, 19 nt, Artificial Sequence
  Description of Artificial Sequence: Synthetic oligonucleotide
  Antisense strand to SEQ ID NO: 1418622
acaauuacaggccaauauc

SEQ ID NO: 1418624 - RNA, 19 nt, Artificial Sequence
  Description of Artificial Sequence: Synthetic oligonucleotide
  Sense strand starting at position 3806 of SEQ ID NO: 1243471
gcaacaaagucaucagauc

SEQ ID NO: 1418625 - RNA, 19 nt, Artificial Sequence
  Description of Artificial Sequence: Synthetic oligonucleotide
  Antisense strand to SEQ ID NO: 1418624
gaucugaugacuuuguugc

SEQ ID NO: 1418626 - RNA, 19 nt, Artificial Sequence
  Description of Artificial Sequence: Synthetic oligonucleotide
  Sense strand starting at position 3888 of SEQ ID NO: 1243471
ggugguacuugucuagaaa

SEQ ID NO: 1418627 - RNA, 19 nt, Artificial Sequence
  Description of Artificial Sequence: Synthetic oligonucleotide
  Antisense strand to SEQ ID NO: 1418626
uuucuagacaaguaccacc

SEQ ID NO: 1418628 - RNA, 19 nt, Artificial Sequence
  Description of Artificial Sequence: Synthetic oligonucleotide
  Sense strand starting at position 3889 of SEQ ID NO: 1243471
gugguacuugucuagaaau

SEQ ID NO: 1418629 - RNA, 19 nt, Artificial Sequence
  Description of Artificial Sequence: Synthetic oligonucleotide
  Antisense strand to SEQ ID NO: 1418628
auuucuagacaaguaccac

SEQ ID NO: 1418630 - RNA, 19 nt, Artificial Sequence
  Description of Artificial Sequence: Synthetic oligonucleotide
  Sense strand starting at position 3891 of SEQ ID NO: 1243471
gguacuugucuagaaaugu

SEQ ID NO: 1418631 - RNA, 19 nt, Artificial Sequence
  Description of Artificial Sequence: Synthetic oligonucleotide
  Antisense strand to SEQ ID NO: 1418630
acauuucuagacaaguacc

SEQ ID NO: 1418632 - RNA, 19 nt, Artificial Sequence
  Description of Artificial Sequence: Synthetic oligonucleotide
  Sense strand starting at position 3930 of SEQ ID NO: 1243471
cccauuuggugggauauca

SEQ ID NO: 1418633 - RNA, 19 nt, Artificial Sequence
  Description of Artificial Sequence: Synthetic oligonucleotide
  Antisense strand to SEQ ID NO: 1418632
ugauaucccaccaaauggg

SEQ ID NO: 1418634 - RNA, 19 nt, Artificial Sequence
  Description of Artificial Sequence: Synthetic oligonucleotide
  Sense strand starting at position 3938 of SEQ ID NO: 1243471
gugggauaucauuguacau

SEQ ID NO: 1418635 - RNA, 19 nt, Artificial Sequence
  Description of Artificial Sequence: Synthetic oligonucleotide
  Antisense strand to SEQ ID NO: 1418634
auguacaaugauaucccac

SEQ ID NO: 1418636 - RNA, 19 nt, Artificial Sequence
  Description of Artificial Sequence: Synthetic oligonucleotide
  Sense strand starting at position 3955 of SEQ ID NO: 1243471
auaggagucuguguacaua

SEQ ID NO: 1418637 - RNA, 19 nt, Artificial Sequence
  Description of Artificial Sequence: Synthetic oligonucleotide
  Antisense strand to SEQ ID NO: 1418636
uauguacacagacuccuau

SEQ ID NO: 1418638 - RNA, 19 nt, Artificial Sequence
  Description of Artificial Sequence: Synthetic oligonucleotide
  Sense strand starting at position 916 of SEQ ID NO: 1243476
gagaauuugugacagccua

SEQ ID NO: 1418639 - RNA, 19 nt, Artificial Sequence
  Description of Artificial Sequence: Synthetic oligonucleotide
  Antisense strand to SEQ ID NO: 1418638
uaggcugucacaaauucuc

SEQ ID NO: 1418640 - RNA, 19 nt, Artificial Sequence
  Description of Artificial Sequence: Synthetic oligonucleotide
  Sense strand starting at position 3102 of SEQ ID NO: 1243476
ccuggaugguaccagauuu

SEQ ID NO: 1418641 - RNA, 19 nt, Artificial Sequence
  Description of Artificial Sequence: Synthetic oligonucleotide
  Antisense strand to SEQ ID NO: 1418640
aaaucugguaccauccagg

SEQ ID NO: 1418642 - RNA, 19 nt, Artificial Sequence
  Description of Artificial Sequence: Synthetic oligonucleotide
  Sense strand starting at position 3892 of SEQ ID NO: 1243476
gguacuugucuagaaauau

SEQ ID NO: 1418643 - RNA, 19 nt, Artificial Sequence
  Description of Artificial Sequence: Synthetic oligonucleotide
  Antisense strand to SEQ ID NO: 1418642
auauuucuagacaaguacc

SEQ ID NO: 1418644 - RNA, 19 nt, Artificial Sequence
  Description of Artificial Sequence: Synthetic oligonucleotide
  Sense strand starting at position 37 of SEQ ID NO: 1243477
acagcaucucuguaagggu

SEQ ID NO: 1418645 - RNA, 19 nt, Artificial Sequence
  Description of Artificial Sequence: Synthetic oligonucleotide
  Antisense strand to SEQ ID NO: 1418644
acccuuacagagaugcugu

SEQ ID NO: 1418646 - RNA, 19 nt, Artificial Sequence
  Description of Artificial Sequence: Synthetic oligonucleotide
  Sense strand starting at position 40 of SEQ ID NO: 1243477
gcaucucuguaagggucau

SEQ ID NO: 1418647 - RNA, 19 nt, Artificial Sequence
  Description of Artificial Sequence: Synthetic oligonucleotide
  Antisense strand to SEQ ID NO: 1418646
augacccuuacagagaugc

SEQ ID NO: 1418648 - RNA, 19 nt, Artificial Sequence
  Description of Artificial Sequence: Synthetic oligonucleotide
  Sense strand starting at position 120 of SEQ ID NO: 1243477
ccagcaaggccuuguuacu

SEQ ID NO: 1418649 - RNA, 19 nt, Artificial Sequence
  Description of Artificial Sequence: Synthetic oligonucleotide
  Antisense strand to SEQ ID NO: 1418648
aguaacaaggccuugcugg

SEQ ID NO: 1418650 - RNA, 19 nt, Artificial Sequence
  Description of Artificial Sequence: Synthetic oligonucleotide
  Sense strand starting at position 132 of SEQ ID NO: 1243477
uguuacuauuugcuguuaa

SEQ ID NO: 1418651 - RNA, 19 nt, Artificial Sequence
  Description of Artificial Sequence: Synthetic oligonucleotide
  Antisense strand to SEQ ID NO: 1418650
uuaacagcaaauaguaaca

SEQ ID NO: 1418652 - RNA, 19 nt, Artificial Sequence
  Description of Artificial Sequence: Synthetic oligonucleotide
  Sense strand starting at position 133 of SEQ ID NO: 1243477
guuacuauuugcuguuaaa

SEQ ID NO: 1418653 - RNA, 19 nt, Artificial Sequence
  Description of Artificial Sequence: Synthetic oligonucleotide
  Antisense strand to SEQ ID NO: 1418652
uuuaacagcaaauaguaac

SEQ ID NO: 1418654 - RNA, 19 nt, Artificial Sequence
  Description of Artificial Sequence: Synthetic oligonucleotide
  Sense strand starting at position 226 of SEQ ID NO: 1243477
ggugcugcuuggagaaugu

SEQ ID NO: 1418655 - RNA, 19 nt, Artificial Sequence
  Description of Artificial Sequence: Synthetic oligonucleotide
  Antisense strand to SEQ ID NO: 1418654
acauucuccaagcagcacc

SEQ ID NO: 1418656 - RNA, 19 nt, Artificial Sequence
  Description of Artificial Sequence: Synthetic oligonucleotide
  Sense strand starting at position 233 of SEQ ID NO: 1243477
cuuggagaauguugcuaag

SEQ ID NO: 1418657 - RNA, 19 nt, Artificial Sequence
  Description of Artificial Sequence: Synthetic oligonucleotide
  Antisense strand to SEQ ID NO: 1418656
cuuagcaacauucuccaag

SEQ ID NO: 1418658 - RNA, 19 nt, Artificial Sequence
  Description of Artificial Sequence: Synthetic oligonucleotide
  Sense strand starting at position 484 of SEQ ID NO: 1243477
aagagucgugcuggcaagu

SEQ ID NO: 1418659 - RNA, 19 nt, Artificial Sequence
  Description of Artificial Sequence: Synthetic oligonucleotide
  Antisense strand to SEQ ID NO: 1418658
acuugccagcacgacucuu

SEQ ID NO: 1418660 - RNA, 19 nt, Artificial Sequence
  Description of Artificial Sequence: Synthetic oligonucleotide
  Sense strand starting at position 1065 of SEQ ID NO: 1243477
auaagacucccagguacua

SEQ ID NO: 1418661 - RNA, 19 nt, Artificial Sequence
  Description of Artificial Sequence: Synthetic oligonucleotide
  Antisense strand to SEQ ID NO: 1418660
uaguaccugggagucuuau

SEQ ID NO: 1418662 - RNA, 19 nt, Artificial Sequence
  Description of Artificial Sequence: Synthetic oligonucleotide
  Sense strand starting at position 1074 of SEQ ID NO: 1243477
ccagguacuaugcggagau

SEQ ID NO: 1418663 - RNA, 19 nt, Artificial Sequence
  Description of Artificial Sequence: Synthetic oligonucleotide
  Antisense strand to SEQ ID NO: 1418662
aucuccgcauaguaccugg

SEQ ID NO: 1418664 - RNA, 19 nt, Artificial Sequence
  Description of Artificial Sequence: Synthetic oligonucleotide
  Sense strand starting at position 1309 of SEQ ID NO: 1243477
accggugguuccuacguua

SEQ ID NO: 1418665 - RNA, 19 nt, Artificial Sequence
  Description of Artificial Sequence: Synthetic oligonucleotide
  Antisense strand to SEQ ID NO: 1418664
uaacguaggaaccaccggu

SEQ ID NO: 1418666 - RNA, 19 nt, Artificial Sequence
  Description of Artificial Sequence: Synthetic oligonucleotide
  Sense strand starting at position 1320 of SEQ ID NO: 1243477
cuacguuacagggaccaua

SEQ ID NO: 1418667 - RNA, 19 nt, Artificial Sequence
  Description of Artificial Sequence: Synthetic oligonucleotide
  Antisense strand to SEQ ID NO: 1418666
uauggucccuguaacguag

SEQ ID NO: 1418668 - RNA, 19 nt, Artificial Sequence
  Description of Artificial Sequence: Synthetic oligonucleotide
  Sense strand starting at position 1497 of SEQ ID NO: 1243477
ucacuccuguccguggaaa

SEQ ID NO: 1418669 - RNA, 19 nt, Artificial Sequence
  Description of Artificial Sequence: Synthetic oligonucleotide
  Antisense strand to SEQ ID NO: 1418668
uuuccacggacaggaguga

SEQ ID NO: 1418670 - RNA, 19 nt, Artificial Sequence
  Description of Artificial Sequence: Synthetic oligonucleotide
  Sense strand starting at position 1499 of SEQ ID NO: 1243477
acuccuguccguggaaaga

SEQ ID NO: 1418671 - RNA, 19 nt, Artificial Sequence
  Description of Artificial Sequence: Synthetic oligonucleotide
  Antisense strand to SEQ ID NO: 1418670
ucuuuccacggacaggagu

SEQ ID NO: 1418672 - RNA, 19 nt, Artificial Sequence
  Description of Artificial Sequence: Synthetic oligonucleotide
  Sense strand starting at position 1508 of SEQ ID NO: 1243477
cguggaaagauggauucuu

SEQ ID NO: 1418673 - RNA, 19 nt, Artificial Sequence
  Description of Artificial Sequence: Synthetic oligonucleotide
  Antisense strand to SEQ ID NO: 1418672
aagaauccaucuuuccacg

SEQ ID NO: 1418674 - RNA, 19 nt, Artificial Sequence
  Description of Artificial Sequence: Synthetic oligonucleotide
  Sense strand starting at position 1513 of SEQ ID NO: 1243477
aaagauggauucuugguca

SEQ ID NO: 1418675 - RNA, 19 nt, Artificial Sequence
  Description of Artificial Sequence: Synthetic oligonucleotide
  Antisense strand to SEQ ID NO: 1418674
ugaccaagaauccaucuuu

SEQ ID NO: 1418676 - RNA, 19 nt, Artificial Sequence
  Description of Artificial Sequence: Synthetic oligonucleotide
  Sense strand starting at position 1783 of SEQ ID NO: 1243477
acccucaucgugcaggaua

SEQ ID NO: 1418677 - RNA, 19 nt, Artificial Sequence
  Description of Artificial Sequence: Synthetic oligonucleotide
  Antisense strand to SEQ ID NO: 1418676
uauccugcacgaugagggu

SEQ ID NO: 1418678 - RNA, 19 nt, Artificial Sequence
  Description of Artificial Sequence: Synthetic oligonucleotide
  Sense strand starting at position 1858 of SEQ ID NO: 1243477
cugaagugugcguucggaa

SEQ ID NO: 1418679 - RNA, 19 nt, Artificial Sequence
  Description of Artificial Sequence: Synthetic oligonucleotide
  Antisense strand to SEQ ID NO: 1418678
uuccgaacgcacacuucag

SEQ ID NO: 1418680 - RNA, 19 nt, Artificial Sequence
  Description of Artificial Sequence: Synthetic oligonucleotide
  Sense strand starting at position 1996 of SEQ ID NO: 1243477
guuucucggucuccauaga

SEQ ID NO: 1418681 - RNA, 19 nt, Artificial Sequence
  Description of Artificial Sequence: Synthetic oligonucleotide
  Antisense strand to SEQ ID NO: 1418680
ucuauggagaccgagaaac

SEQ ID NO: 1418682 - RNA, 19 nt, Artificial Sequence
  Description of Artificial Sequence: Synthetic oligonucleotide
  Sense strand starting at position 2223 of SEQ ID NO: 1243477
cugggaugugccuaaagcu

SEQ ID NO: 1418683 - RNA, 19 nt, Artificial Sequence
  Description of Artificial Sequence: Synthetic oligonucleotide
  Antisense strand to SEQ ID NO: 1418682
agcuuuaggcacaucccag

SEQ ID NO: 1418684 - RNA, 19 nt, Artificial Sequence
  Description of Artificial Sequence: Synthetic oligonucleotide
  Sense strand starting at position 2366 of SEQ ID NO: 1243477
ggguauacgguugacucaa

SEQ ID NO: 1418685 - RNA, 19 nt, Artificial Sequence
  Description of Artificial Sequence: Synthetic oligonucleotide
  Antisense strand to SEQ ID NO: 1418684
uugagucaaccguauaccc

SEQ ID NO: 1418686 - RNA, 19 nt, Artificial Sequence
  Description of Artificial Sequence: Synthetic oligonucleotide
  Sense strand starting at position 2429 of SEQ ID NO: 1243477
ucccgugcucucuugggua

SEQ ID NO: 1418687 - RNA, 19 nt, Artificial Sequence
  Description of Artificial Sequence: Synthetic oligonucleotide
  Antisense strand to SEQ ID NO: 1418686
uacccaagagagcacggga

SEQ ID NO: 1418688 - RNA, 19 nt, Artificial Sequence
  Description of Artificial Sequence: Synthetic oligonucleotide
  Sense strand starting at position 2433 of SEQ ID NO: 1243477
gugcucucuuggguaggau

SEQ ID NO: 1418689 - RNA, 19 nt, Artificial Sequence
  Description of Artificial Sequence: Synthetic oligonucleotide
  Antisense strand to SEQ ID NO: 1418688
auccuacccaagagagcac

SEQ ID NO: 1418690 - RNA, 19 nt, Artificial Sequence
  Description of Artificial Sequence: Synthetic oligonucleotide
  Sense strand starting at position 2434 of SEQ ID NO: 1243477
ugcucucuuggguaggauu

SEQ ID NO: 1418691 - RNA, 19 nt, Artificial Sequence
  Description of Artificial Sequence: Synthetic oligonucleotide
  Antisense strand to SEQ ID NO: 1418690
aauccuacccaagagagca

SEQ ID NO: 1418692 - RNA, 19 nt, Artificial Sequence
  Description of Artificial Sequence: Synthetic oligonucleotide
  Sense strand starting at position 2902 of SEQ ID NO: 1243477
aguuuauuggagcaucaca

SEQ ID NO: 1418693 - RNA, 19 nt, Artificial Sequence
  Description of Artificial Sequence: Synthetic oligonucleotide
  Antisense strand to SEQ ID NO: 1418692
ugugaugcuccaauaaacu

SEQ ID NO: 1418694 - RNA, 19 nt, Artificial Sequence
  Description of Artificial Sequence: Synthetic oligonucleotide
  Sense strand starting at position 2931 of SEQ ID NO: 1243477
cggguauugcugagucgug

SEQ ID NO: 1418695 - RNA, 19 nt, Artificial Sequence
  Description of Artificial Sequence: Synthetic oligonucleotide
  Antisense strand to SEQ ID NO: 1418694
cacgacucagcaauacccg

SEQ ID NO: 1418696 - RNA, 19 nt, Artificial Sequence
  Description of Artificial Sequence: Synthetic oligonucleotide
  Sense strand starting at position 3486 of SEQ ID NO: 1243477
cucagacguucgcacuuua

SEQ ID NO: 1418697 - RNA, 19 nt, Artificial Sequence
  Description of Artificial Sequence: Synthetic oligonucleotide
  Antisense strand to SEQ ID NO: 1418696
uaaagugcgaacgucugag

SEQ ID NO: 1418698 - RNA, 19 nt, Artificial Sequence
  Description of Artificial Sequence: Synthetic oligonucleotide
  Sense strand starting at position 3591 of SEQ ID NO: 1243477
gguagaggcuucuuucuau

SEQ ID NO: 1418699 - RNA, 19 nt, Artificial Sequence
  Description of Artificial Sequence: Synthetic oligonucleotide
  Antisense strand to SEQ ID NO: 1418698
auagaaagaagccucuacc

SEQ ID NO: 1418700 - RNA, 19 nt, Artificial Sequence
  Description of Artificial Sequence: Synthetic oligonucleotide
  Sense strand starting at position 3899 of SEQ ID NO: 1243477
ugccaugcuaacuggagau

SEQ ID NO: 1418701 - RNA, 19 nt, Artificial Sequence
  Description of Artificial Sequence: Synthetic oligonucleotide
  Antisense strand to SEQ ID NO: 1418700
aucuccaguuagcauggca

SEQ ID NO: 1418702 - RNA, 19 nt, Artificial Sequence
  Description of Artificial Sequence: Synthetic oligonucleotide
  Sense strand starting at position 2615 of SEQ ID NO: 1243478
uccuacgaguccucaaugu

SEQ ID NO: 1418703 - RNA, 19 nt, Artificial Sequence
  Description of Artificial Sequence: Synthetic oligonucleotide
  Antisense strand to SEQ ID NO: 1418702
acauugaggacucguagga

SEQ ID NO: 1418704 - RNA, 19 nt, Artificial Sequence
  Description of Artificial Sequence: Synthetic oligonucleotide
  Sense strand starting at position 2670 of SEQ ID NO: 1243478
gcaggugccuccuuaucau

SEQ ID NO: 1418705 - RNA, 19 nt, Artificial Sequence
  Description of Artificial Sequence: Synthetic oligonucleotide
  Antisense strand to SEQ ID NO: 1418704
augauaaggaggcaccugc

SEQ ID NO: 1418706 - RNA, 19 nt, Artificial Sequence
  Description of Artificial Sequence: Synthetic oligonucleotide
  Sense strand starting at position 2679 of SEQ ID NO: 1243478
uccuuaucaugggaucuga

SEQ ID NO: 1418707 - RNA, 19 nt, Artificial Sequence
  Description of Artificial Sequence: Synthetic oligonucleotide
  Antisense strand to SEQ ID NO: 1418706
ucagaucccaugauaagga

SEQ ID NO: 1418708 - RNA, 19 nt, Artificial Sequence
  Description of Artificial Sequence: Synthetic oligonucleotide
  Sense strand starting at position 2698 of SEQ ID NO: 1243478
gcuucauacgcagagggaa

SEQ ID NO: 1418709 - RNA, 19 nt, Artificial Sequence
  Description of Artificial Sequence: Synthetic oligonucleotide
  Antisense strand to SEQ ID NO: 1418708
uucccucugcguaugaagc

SEQ ID NO: 1418710 - RNA, 19 nt, Artificial Sequence
  Description of Artificial Sequence: Synthetic oligonucleotide
  Sense strand starting at position 3532 of SEQ ID NO: 1243478
gagagcuuugauuggcuaa

SEQ ID NO: 1418711 - RNA, 19 nt, Artificial Sequence
  Description of Artificial Sequence: Synthetic oligonucleotide
  Antisense strand to SEQ ID NO: 1418710
uuagccaaucaaagcucuc

SEQ ID NO: 1418712 - RNA, 19 nt, Artificial Sequence
  Description of Artificial Sequence: Synthetic oligonucleotide
  Sense strand starting at position 3534 of SEQ ID NO: 1243478
gagcuuugauuggcuaaca

SEQ ID NO: 1418713 - RNA, 19 nt, Artificial Sequence
  Description of Artificial Sequence: Synthetic oligonucleotide
  Antisense strand to SEQ ID NO: 1418712
uguuagccaaucaaagcuc

SEQ ID NO: 1418714 - RNA, 19 nt, Artificial Sequence
  Description of Artificial Sequence: Synthetic oligonucleotide
  Sense strand starting at position 3719 of SEQ ID NO: 1243478
gcugaacucccgucacgua

SEQ ID NO: 1418715 - RNA, 19 nt, Artificial Sequence
  Description of Artificial Sequence: Synthetic oligonucleotide
  Antisense strand to SEQ ID NO: 1418714
uacgugacgggaguucagc

SEQ ID NO: 1418716 - RNA, 19 nt, Artificial Sequence
  Description of Artificial Sequence: Synthetic oligonucleotide
  Sense strand starting at position 3871 of SEQ ID NO: 1243478
uucucaucagacuauguau

SEQ ID NO: 1418717 - RNA, 19 nt, Artificial Sequence
  Description of Artificial Sequence: Synthetic oligonucleotide
  Antisense strand to SEQ ID NO: 1418716
auacauagucugaugagaa

SEQ ID NO: 1418718 - RNA, 19 nt, Artificial Sequence
  Description of Artificial Sequence: Synthetic oligonucleotide
  Sense strand starting at position 394 of SEQ ID NO: 1243479
guaggaagcagugguguuu

SEQ ID NO: 1418719 - RNA, 19 nt, Artificial Sequence
  Description of Artificial Sequence: Synthetic oligonucleotide
  Antisense strand to SEQ ID NO: 1418718
aaacaccacugcuuccuac

SEQ ID NO: 1418720 - RNA, 19 nt, Artificial Sequence
  Description of Artificial Sequence: Synthetic oligonucleotide
  Sense strand starting at position 751 of SEQ ID NO: 1243479
gcaugucgucacggacgau

SEQ ID NO: 1418721 - RNA, 19 nt, Artificial Sequence
  Description of Artificial Sequence: Synthetic oligonucleotide
  Antisense strand to SEQ ID NO: 1418720
aucguccgugacgacaugc

SEQ ID NO: 1418722 - RNA, 19 nt, Artificial Sequence
  Description of Artificial Sequence: Synthetic oligonucleotide
  Sense strand starting at position 1136 of SEQ ID NO: 1243479
gggcgauguccgcuccgau

SEQ ID NO: 1418723 - RNA, 19 nt, Artificial Sequence
  Description of Artificial Sequence: Synthetic oligonucleotide
  Antisense strand to SEQ ID NO: 1418722
aucggagcggacaucgccc

SEQ ID NO: 1418724 - RNA, 19 nt, Artificial Sequence
  Description of Artificial Sequence: Synthetic oligonucleotide
  Sense strand starting at position 1151 of SEQ ID NO: 1243479
cgaucugggcgguguagaa

SEQ ID NO: 1418725 - RNA, 19 nt, Artificial Sequence
  Description of Artificial Sequence: Synthetic oligonucleotide
  Antisense strand to SEQ ID NO: 1418724
uucuacaccgcccagaucg

SEQ ID NO: 1418726 - RNA, 19 nt, Artificial Sequence
  Description of Artificial Sequence: Synthetic oligonucleotide
  Sense strand starting at position 1202 of SEQ ID NO: 1243479
gcagcugguccugguagua

SEQ ID NO: 1418727 - RNA, 19 nt, Artificial Sequence
  Description of Artificial Sequence: Synthetic oligonucleotide
  Antisense strand to SEQ ID NO: 1418726
uacuaccaggaccagcugc

SEQ ID NO: 1418728 - RNA, 19 nt, Artificial Sequence
  Description of Artificial Sequence: Synthetic oligonucleotide
  Sense strand starting at position 1895 of SEQ ID NO: 1243479
gggucuuggugcucugagu

SEQ ID NO: 1418729 - RNA, 19 nt, Artificial Sequence
  Description of Artificial Sequence: Synthetic oligonucleotide
  Antisense strand to SEQ ID NO: 1418728
acucagagcaccaagaccc

SEQ ID NO: 1418730 - RNA, 19 nt, Artificial Sequence
  Description of Artificial Sequence: Synthetic oligonucleotide
  Sense strand starting at position 2223 of SEQ ID NO: 1243479
gguggaucccagcacuaga

SEQ ID NO: 1418731 - RNA, 19 nt, Artificial Sequence
  Description of Artificial Sequence: Synthetic oligonucleotide
  Antisense strand to SEQ ID NO: 1418730
ucuagugcugggauccacc

SEQ ID NO: 1418732 - RNA, 19 nt, Artificial Sequence
  Description of Artificial Sequence: Synthetic oligonucleotide
  Sense strand starting at position 2644 of SEQ ID NO: 1243479
uccuacgaguccucaaugu

SEQ ID NO: 1418733 - RNA, 19 nt, Artificial Sequence
  Description of Artificial Sequence: Synthetic oligonucleotide
  Antisense strand to SEQ ID NO: 1418732
acauugaggacucguagga

SEQ ID NO: 1418734 - RNA, 19 nt, Artificial Sequence
  Description of Artificial Sequence: Synthetic oligonucleotide
  Sense strand starting at position 2699 of SEQ ID NO: 1243479
gcaggugccuccuuaucau

SEQ ID NO: 1418735 - RNA, 19 nt, Artificial Sequence
  Description of Artificial Sequence: Synthetic oligonucleotide
  Antisense strand to SEQ ID NO: 1418734
augauaaggaggcaccugc

SEQ ID NO: 1418736 - RNA, 19 nt, Artificial Sequence
  Description of Artificial Sequence: Synthetic oligonucleotide
  Sense strand starting at position 2708 of SEQ ID NO: 1243479
uccuuaucaugggaucuga

SEQ ID NO: 1418737 - RNA, 19 nt, Artificial Sequence
  Description of Artificial Sequence: Synthetic oligonucleotide
  Antisense strand to SEQ ID NO: 1418736
ucagaucccaugauaagga

SEQ ID NO: 1418738 - RNA, 19 nt, Artificial Sequence
  Description of Artificial Sequence: Synthetic oligonucleotide
  Sense strand starting at position 2727 of SEQ ID NO: 1243479
gcuucaucggcagagggaa

SEQ ID NO: 1418739 - RNA, 19 nt, Artificial Sequence
  Description of Artificial Sequence: Synthetic oligonucleotide
  Antisense strand to SEQ ID NO: 1418738
uucccucugccgaugaagc

SEQ ID NO: 1418740 - RNA, 19 nt, Artificial Sequence
  Description of Artificial Sequence: Synthetic oligonucleotide
  Sense strand starting at position 3744 of SEQ ID NO: 1243479
ccguccugguuccaugaau

SEQ ID NO: 1418741 - RNA, 19 nt, Artificial Sequence
  Description of Artificial Sequence: Synthetic oligonucleotide
  Antisense strand to SEQ ID NO: 1418740
auucauggaaccaggacgg

SEQ ID NO: 1418742 - RNA, 19 nt, Artificial Sequence
  Description of Artificial Sequence: Synthetic oligonucleotide
  Sense strand starting at position 3982 of SEQ ID NO: 1243479
ggccgcuccuccuaggaau

SEQ ID NO: 1418743 - RNA, 19 nt, Artificial Sequence
  Description of Artificial Sequence: Synthetic oligonucleotide
  Antisense strand to SEQ ID NO: 1418742
auuccuaggaggagcggcc

SEQ ID NO: 1418744 - RNA, 19 nt, Artificial Sequence
  Description of Artificial Sequence: Synthetic oligonucleotide
  Sense strand starting at position 513 of SEQ ID NO: 1243480
cugacuuucgucugggcua

SEQ ID NO: 1418745 - RNA, 19 nt, Artificial Sequence
  Description of Artificial Sequence: Synthetic oligonucleotide
  Antisense strand to SEQ ID NO: 1418744
uagcccagacgaaagucag

SEQ ID NO: 1418746 - RNA, 19 nt, Artificial Sequence
  Description of Artificial Sequence: Synthetic oligonucleotide
  Sense strand starting at position 636 of SEQ ID NO: 1243480
cugagugacccagagguca

SEQ ID NO: 1418747 - RNA, 19 nt, Artificial Sequence
  Description of Artificial Sequence: Synthetic oligonucleotide
  Antisense strand to SEQ ID NO: 1418746
ugaccucugggucacucag

SEQ ID NO: 1418748 - RNA, 19 nt, Artificial Sequence
  Description of Artificial Sequence: Synthetic oligonucleotide
  Sense strand starting at position 683 of SEQ ID NO: 1243480
cccaaagcuuugcucugaa

SEQ ID NO: 1418749 - RNA, 19 nt, Artificial Sequence
  Description of Artificial Sequence: Synthetic oligonucleotide
  Antisense strand to SEQ ID NO: 1418748
uucagagcaaagcuuuggg

SEQ ID NO: 1418750 - RNA, 19 nt, Artificial Sequence
  Description of Artificial Sequence: Synthetic oligonucleotide
  Sense strand starting at position 691 of SEQ ID NO: 1243480
uuugcucugaauuguggau

SEQ ID NO: 1418751 - RNA, 19 nt, Artificial Sequence
  Description of Artificial Sequence: Synthetic oligonucleotide
  Antisense strand to SEQ ID NO: 1418750
auccacaauucagagcaaa

SEQ ID NO: 1418752 - RNA, 19 nt, Artificial Sequence
  Description of Artificial Sequence: Synthetic oligonucleotide
  Sense strand starting at position 693 of SEQ ID NO: 1243480
ugcucugaauuguggauaa

SEQ ID NO: 1418753 - RNA, 19 nt, Artificial Sequence
  Description of Artificial Sequence: Synthetic oligonucleotide
  Antisense strand to SEQ ID NO: 1418752
uuauccacaauucagagca

SEQ ID NO: 1418754 - RNA, 19 nt, Artificial Sequence
  Description of Artificial Sequence: Synthetic oligonucleotide
  Sense strand starting at position 816 of SEQ ID NO: 1243480
cugccuugucuguagcaca

SEQ ID NO: 1418755 - RNA, 19 nt, Artificial Sequence
  Description of Artificial Sequence: Synthetic oligonucleotide
  Antisense strand to SEQ ID NO: 1418754
ugugcuacagacaaggcag

SEQ ID NO: 1418756 - RNA, 19 nt, Artificial Sequence
  Description of Artificial Sequence: Synthetic oligonucleotide
  Sense strand starting at position 915 of SEQ ID NO: 1243480
auagcaaguccgugacgua

SEQ ID NO: 1418757 - RNA, 19 nt, Artificial Sequence
  Description of Artificial Sequence: Synthetic oligonucleotide
  Antisense strand to SEQ ID NO: 1418756
uacgucacggacuugcuau

SEQ ID NO: 1418758 - RNA, 19 nt, Artificial Sequence
  Description of Artificial Sequence: Synthetic oligonucleotide
  Sense strand starting at position 922 of SEQ ID NO: 1243480
guccgugacguacaaacuu

SEQ ID NO: 1418759 - RNA, 19 nt, Artificial Sequence
  Description of Artificial Sequence: Synthetic oligonucleotide
  Antisense strand to SEQ ID NO: 1418758
aaguuuguacgucacggac

SEQ ID NO: 1418760 - RNA, 19 nt, Artificial Sequence
  Description of Artificial Sequence: Synthetic oligonucleotide
  Sense strand starting at position 1855 of SEQ ID NO: 1243480
aggcccugaucuguggaau

SEQ ID NO: 1418761 - RNA, 19 nt, Artificial Sequence
  Description of Artificial Sequence: Synthetic oligonucleotide
  Antisense strand to SEQ ID NO: 1418760
auuccacagaucagggccu

SEQ ID NO: 1418762 - RNA, 19 nt, Artificial Sequence
  Description of Artificial Sequence: Synthetic oligonucleotide
  Sense strand starting at position 1856 of SEQ ID NO: 1243480
ggcccugaucuguggaaug

SEQ ID NO: 1418763 - RNA, 19 nt, Artificial Sequence
  Description of Artificial Sequence: Synthetic oligonucleotide
  Antisense strand to SEQ ID NO: 1418762
cauuccacagaucagggcc

SEQ ID NO: 1418764 - RNA, 19 nt, Artificial Sequence
  Description of Artificial Sequence: Synthetic oligonucleotide
  Sense strand starting at position 1858 of SEQ ID NO: 1243480
cccugaucuguggaaugug

SEQ ID NO: 1418765 - RNA, 19 nt, Artificial Sequence
  Description of Artificial Sequence: Synthetic oligonucleotide
  Antisense strand to SEQ ID NO: 1418764
cacauuccacagaucaggg

SEQ ID NO: 1418766 - RNA, 19 nt, Artificial Sequence
  Description of Artificial Sequence: Synthetic oligonucleotide
  Sense strand starting at position 2848 of SEQ ID NO: 1243480
uccaacgauuccucaaugu

SEQ ID NO: 1418767 - RNA, 19 nt, Artificial Sequence
  Description of Artificial Sequence: Synthetic oligonucleotide
  Antisense strand to SEQ ID NO: 1418766
acauugaggaaucguugga

SEQ ID NO: 1418768 - RNA, 19 nt, Artificial Sequence
  Description of Artificial Sequence: Synthetic oligonucleotide
  Sense strand starting at position 2903 of SEQ ID NO: 1243480
gcaggugccuucuuaucau

SEQ ID NO: 1418769 - RNA, 19 nt, Artificial Sequence
  Description of Artificial Sequence: Synthetic oligonucleotide
  Antisense strand to SEQ ID NO: 1418768
augauaagaaggcaccugc

SEQ ID NO: 1418770 - RNA, 19 nt, Artificial Sequence
  Description of Artificial Sequence: Synthetic oligonucleotide
  Sense strand starting at position 2907 of SEQ ID NO: 1243480
gugccuucuuaucauggga

SEQ ID NO: 1418771 - RNA, 19 nt, Artificial Sequence
  Description of Artificial Sequence: Synthetic oligonucleotide
  Antisense strand to SEQ ID NO: 1418770
ucccaugauaagaaggcac

SEQ ID NO: 1418772 - RNA, 19 nt, Artificial Sequence
  Description of Artificial Sequence: Synthetic oligonucleotide
  Sense strand starting at position 2909 of SEQ ID NO: 1243480
gccuucuuaucaugggauc

SEQ ID NO: 1418773 - RNA, 19 nt, Artificial Sequence
  Description of Artificial Sequence: Synthetic oligonucleotide
  Antisense strand to SEQ ID NO: 1418772
gaucccaugauaagaaggc

SEQ ID NO: 1418774 - RNA, 19 nt, Artificial Sequence
  Description of Artificial Sequence: Synthetic oligonucleotide
  Sense strand starting at position 2910 of SEQ ID NO: 1243480
ccuucuuaucaugggaucu

SEQ ID NO: 1418775 - RNA, 19 nt, Artificial Sequence
  Description of Artificial Sequence: Synthetic oligonucleotide
  Antisense strand to SEQ ID NO: 1418774
agaucccaugauaagaagg

SEQ ID NO: 1418776 - RNA, 19 nt, Artificial Sequence
  Description of Artificial Sequence: Synthetic oligonucleotide
  Sense strand starting at position 2912 of SEQ ID NO: 1243480
uucuuaucaugggaucuga

SEQ ID NO: 1418777 - RNA, 19 nt, Artificial Sequence
  Description of Artificial Sequence: Synthetic oligonucleotide
  Antisense strand to SEQ ID NO: 1418776
ucagaucccaugauaagaa

SEQ ID NO: 1418778 - RNA, 19 nt, Artificial Sequence
  Description of Artificial Sequence: Synthetic oligonucleotide
  Sense strand starting at position 2931 of SEQ ID NO: 1243480
gcuucauccgcagagggaa

SEQ ID NO: 1418779 - RNA, 19 nt, Artificial Sequence
  Description of Artificial Sequence: Synthetic oligonucleotide
  Antisense strand to SEQ ID NO: 1418778
uucccucugcggaugaagc

SEQ ID NO: 1418780 - RNA, 19 nt, Artificial Sequence
  Description of Artificial Sequence: Synthetic oligonucleotide
  Sense strand starting at position 454 of SEQ ID NO: 1243481
agcucucucgucugccaga

SEQ ID NO: 1418781 - RNA, 19 nt, Artificial Sequence
  Description of Artificial Sequence: Synthetic oligonucleotide
  Antisense strand to SEQ ID NO: 1418780
ucuggcagacgagagagcu

SEQ ID NO: 1418782 - RNA, 19 nt, Artificial Sequence
  Description of Artificial Sequence: Synthetic oligonucleotide
  Sense strand starting at position 716 of SEQ ID NO: 1243481
gguggagauauucgaagcu

SEQ ID NO: 1418783 - RNA, 19 nt, Artificial Sequence
  Description of Artificial Sequence: Synthetic oligonucleotide
  Antisense strand to SEQ ID NO: 1418782
agcuucgaauaucuccacc

SEQ ID NO: 1418784 - RNA, 19 nt, Artificial Sequence
  Description of Artificial Sequence: Synthetic oligonucleotide
  Sense strand starting at position 723 of SEQ ID NO: 1243481
auauucgaagcuggauaaa

SEQ ID NO: 1418785 - RNA, 19 nt, Artificial Sequence
  Description of Artificial Sequence: Synthetic oligonucleotide
  Antisense strand to SEQ ID NO: 1418784
uuuauccagcuucgaauau

SEQ ID NO: 1418786 - RNA, 19 nt, Artificial Sequence
  Description of Artificial Sequence: Synthetic oligonucleotide
  Sense strand starting at position 788 of SEQ ID NO: 1243481
cucugaauuggacgcuuga

SEQ ID NO: 1418787 - RNA, 19 nt, Artificial Sequence
  Description of Artificial Sequence: Synthetic oligonucleotide
  Antisense strand to SEQ ID NO: 1418786
ucaagcguccaauucagag

SEQ ID NO: 1418788 - RNA, 19 nt, Artificial Sequence
  Description of Artificial Sequence: Synthetic oligonucleotide
  Sense strand starting at position 795 of SEQ ID NO: 1243481
uuggacgcuugauaaugua

SEQ ID NO: 1418789 - RNA, 19 nt, Artificial Sequence
  Description of Artificial Sequence: Synthetic oligonucleotide
  Antisense strand to SEQ ID NO: 1418788
uacauuaucaagcguccaa

SEQ ID NO: 1418790 - RNA, 19 nt, Artificial Sequence
  Description of Artificial Sequence: Synthetic oligonucleotide
  Sense strand starting at position 798 of SEQ ID NO: 1243481
gacgcuugauaauguaacu

SEQ ID NO: 1418791 - RNA, 19 nt, Artificial Sequence
  Description of Artificial Sequence: Synthetic oligonucleotide
  Antisense strand to SEQ ID NO: 1418790
aguuacauuaucaagcguc

SEQ ID NO: 1418792 - RNA, 19 nt, Artificial Sequence
  Description of Artificial Sequence: Synthetic oligonucleotide
  Sense strand starting at position 811 of SEQ ID NO: 1243481
guaacuuuaucuucuguaa

SEQ ID NO: 1418793 - RNA, 19 nt, Artificial Sequence
  Description of Artificial Sequence: Synthetic oligonucleotide
  Antisense strand to SEQ ID NO: 1418792
uuacagaagauaaaguuac

SEQ ID NO: 1418794 - RNA, 19 nt, Artificial Sequence
  Description of Artificial Sequence: Synthetic oligonucleotide
  Sense strand starting at position 833 of SEQ ID NO: 1243481
ucaccucaguaaguuaaga

SEQ ID NO: 1418795 - RNA, 19 nt, Artificial Sequence
  Description of Artificial Sequence: Synthetic oligonucleotide
  Antisense strand to SEQ ID NO: 1418794
ucuuaacuuacugagguga

SEQ ID NO: 1418796 - RNA, 19 nt, Artificial Sequence
  Description of Artificial Sequence: Synthetic oligonucleotide
  Sense strand starting at position 838 of SEQ ID NO: 1243481
ucaguaaguuaagaagaaa

SEQ ID NO: 1418797 - RNA, 19 nt, Artificial Sequence
  Description of Artificial Sequence: Synthetic oligonucleotide
  Antisense strand to SEQ ID NO: 1418796
uuucuucuuaacuuacuga

SEQ ID NO: 1418798 - RNA, 19 nt, Artificial Sequence
  Description of Artificial Sequence: Synthetic oligonucleotide
  Sense strand starting at position 898 of SEQ ID NO: 1243481
ucugccugagcuggauaau

SEQ ID NO: 1418799 - RNA, 19 nt, Artificial Sequence
  Description of Artificial Sequence: Synthetic oligonucleotide
  Antisense strand to SEQ ID NO: 1418798
auuauccagcucaggcaga

SEQ ID NO: 1418800 - RNA, 19 nt, Artificial Sequence
  Description of Artificial Sequence: Synthetic oligonucleotide
  Sense strand starting at position 901 of SEQ ID NO: 1243481
gccugagcuggauaauugu

SEQ ID NO: 1418801 - RNA, 19 nt, Artificial Sequence
  Description of Artificial Sequence: Synthetic oligonucleotide
  Antisense strand to SEQ ID NO: 1418800
acaauuauccagcucaggc

SEQ ID NO: 1418802 - RNA, 19 nt, Artificial Sequence
  Description of Artificial Sequence: Synthetic oligonucleotide
  Sense strand starting at position 910 of SEQ ID NO: 1243481
ggauaauugugcuggugau

SEQ ID NO: 1418803 - RNA, 19 nt, Artificial Sequence
  Description of Artificial Sequence: Synthetic oligonucleotide
  Antisense strand to SEQ ID NO: 1418802
aucaccagcacaauuaucc

SEQ ID NO: 1418804 - RNA, 19 nt, Artificial Sequence
  Description of Artificial Sequence: Synthetic oligonucleotide
  Sense strand starting at position 911 of SEQ ID NO: 1243481
gauaauugugcuggugaug

SEQ ID NO: 1418805 - RNA, 19 nt, Artificial Sequence
  Description of Artificial Sequence: Synthetic oligonucleotide
  Antisense strand to SEQ ID NO: 1418804
caucaccagcacaauuauc

SEQ ID NO: 1418806 - RNA, 19 nt, Artificial Sequence
  Description of Artificial Sequence: Synthetic oligonucleotide
  Sense strand starting at position 978 of SEQ ID NO: 1243481
cagagauguuuauagauag

SEQ ID NO: 1418807 - RNA, 19 nt, Artificial Sequence
  Description of Artificial Sequence: Synthetic oligonucleotide
  Antisense strand to SEQ ID NO: 1418806
cuaucuauaaacaucucug

SEQ ID NO: 1418808 - RNA, 19 nt, Artificial Sequence
  Description of Artificial Sequence: Synthetic oligonucleotide
  Sense strand starting at position 1351 of SEQ ID NO: 1243481
gcugcaaaguccugaggga

SEQ ID NO: 1418809 - RNA, 19 nt, Artificial Sequence
  Description of Artificial Sequence: Synthetic oligonucleotide
  Antisense strand to SEQ ID NO: 1418808
ucccucaggacuuugcagc

SEQ ID NO: 1418810 - RNA, 19 nt, Artificial Sequence
  Description of Artificial Sequence: Synthetic oligonucleotide
  Sense strand starting at position 1625 of SEQ ID NO: 1243481
ccagguccugcucaggaaa

SEQ ID NO: 1418811 - RNA, 19 nt, Artificial Sequence
  Description of Artificial Sequence: Synthetic oligonucleotide
  Antisense strand to SEQ ID NO: 1418810
uuuccugagcaggaccugg

SEQ ID NO: 1418812 - RNA, 19 nt, Artificial Sequence
  Description of Artificial Sequence: Synthetic oligonucleotide
  Sense strand starting at position 1627 of SEQ ID NO: 1243481
agguccugcucaggaaaga

SEQ ID NO: 1418813 - RNA, 19 nt, Artificial Sequence
  Description of Artificial Sequence: Synthetic oligonucleotide
  Antisense strand to SEQ ID NO: 1418812
ucuuuccugagcaggaccu

SEQ ID NO: 1418814 - RNA, 19 nt, Artificial Sequence
  Description of Artificial Sequence: Synthetic oligonucleotide
  Sense strand starting at position 1643 of SEQ ID NO: 1243481
agaaaucaccaguguucua

SEQ ID NO: 1418815 - RNA, 19 nt, Artificial Sequence
  Description of Artificial Sequence: Synthetic oligonucleotide
  Antisense strand to SEQ ID NO: 1418814
uagaacacuggugauuucu

SEQ ID NO: 1418816 - RNA, 19 nt, Artificial Sequence
  Description of Artificial Sequence: Synthetic oligonucleotide
  Sense strand starting at position 1804 of SEQ ID NO: 1243481
gcagucucuucagaggaga

SEQ ID NO: 1418817 - RNA, 19 nt, Artificial Sequence
  Description of Artificial Sequence: Synthetic oligonucleotide
  Antisense strand to SEQ ID NO: 1418816
ucuccucugaagagacugc

SEQ ID NO: 1418818 - RNA, 19 nt, Artificial Sequence
  Description of Artificial Sequence: Synthetic oligonucleotide
  Sense strand starting at position 2146 of SEQ ID NO: 1243481
ccuucugcaccucagagaa

SEQ ID NO: 1418819 - RNA, 19 nt, Artificial Sequence
  Description of Artificial Sequence: Synthetic oligonucleotide
  Antisense strand to SEQ ID NO: 1418818
uucucugaggugcagaagg

SEQ ID NO: 1418820 - RNA, 19 nt, Artificial Sequence
  Description of Artificial Sequence: Synthetic oligonucleotide
  Sense strand starting at position 2306 of SEQ ID NO: 1243481
gggugaguguuccucugag

SEQ ID NO: 1418821 - RNA, 19 nt, Artificial Sequence
  Description of Artificial Sequence: Synthetic oligonucleotide
  Antisense strand to SEQ ID NO: 1418820
cucagaggaacacucaccc

SEQ ID NO: 1418822 - RNA, 19 nt, Artificial Sequence
  Description of Artificial Sequence: Synthetic oligonucleotide
  Sense strand starting at position 2605 of SEQ ID NO: 1243481
ugaugacucagcugauuag

SEQ ID NO: 1418823 - RNA, 19 nt, Artificial Sequence
  Description of Artificial Sequence: Synthetic oligonucleotide
  Antisense strand to SEQ ID NO: 1418822
cuaaucagcugagucauca

SEQ ID NO: 1418824 - RNA, 19 nt, Artificial Sequence
  Description of Artificial Sequence: Synthetic oligonucleotide
  Sense strand starting at position 3320 of SEQ ID NO: 1243481
ccagcaguccugugacaug

SEQ ID NO: 1418825 - RNA, 19 nt, Artificial Sequence
  Description of Artificial Sequence: Synthetic oligonucleotide
  Antisense strand to SEQ ID NO: 1418824
caugucacaggacugcugg

SEQ ID NO: 1418826 - RNA, 19 nt, Artificial Sequence
  Description of Artificial Sequence: Synthetic oligonucleotide
  Sense strand starting at position 3734 of SEQ ID NO: 1243481
cacugagcuucccagggau

SEQ ID NO: 1418827 - RNA, 19 nt, Artificial Sequence
  Description of Artificial Sequence: Synthetic oligonucleotide
  Antisense strand to SEQ ID NO: 1418826
aucccugggaagcucagug

SEQ ID NO: 1418828 - RNA, 19 nt, Artificial Sequence
  Description of Artificial Sequence: Synthetic oligonucleotide
  Sense strand starting at position 3737 of SEQ ID NO: 1243481
ugagcuucccagggaucuu

SEQ ID NO: 1418829 - RNA, 19 nt, Artificial Sequence
  Description of Artificial Sequence: Synthetic oligonucleotide
  Antisense strand to SEQ ID NO: 1418828
aagaucccugggaagcuca

SEQ ID NO: 1418830 - RNA, 19 nt, Artificial Sequence
  Description of Artificial Sequence: Synthetic oligonucleotide
  Sense strand starting at position 3756 of SEQ ID NO: 1243481
agaucuaauuugggaagcu

SEQ ID NO: 1418831 - RNA, 19 nt, Artificial Sequence
  Description of Artificial Sequence: Synthetic oligonucleotide
  Antisense strand to SEQ ID NO: 1418830
agcuucccaaauuagaucu

SEQ ID NO: 1418832 - RNA, 19 nt, Artificial Sequence
  Description of Artificial Sequence: Synthetic oligonucleotide
  Sense strand starting at position 3757 of SEQ ID NO: 1243481
gaucuaauuugggaagcuc

SEQ ID NO: 1418833 - RNA, 19 nt, Artificial Sequence
  Description of Artificial Sequence: Synthetic oligonucleotide
  Antisense strand to SEQ ID NO: 1418832
gagcuucccaaauuagauc

SEQ ID NO: 1418834 - RNA, 19 nt, Artificial Sequence
  Description of Artificial Sequence: Synthetic oligonucleotide
  Sense strand starting at position 3924 of SEQ ID NO: 1243481
gcguguggaagugcuucua

SEQ ID NO: 1418835 - RNA, 19 nt, Artificial Sequence
  Description of Artificial Sequence: Synthetic oligonucleotide
  Antisense strand to SEQ ID NO: 1418834
uagaagcacuuccacacgc

SEQ ID NO: 1418836 - RNA, 19 nt, Artificial Sequence
  Description of Artificial Sequence: Synthetic oligonucleotide
  Sense strand starting at position 3981 of SEQ ID NO: 1243481
cugugaucccuagaaggug

SEQ ID NO: 1418837 - RNA, 19 nt, Artificial Sequence
  Description of Artificial Sequence: Synthetic oligonucleotide
  Antisense strand to SEQ ID NO: 1418836
caccuucuagggaucacag

SEQ ID NO: 1418838 - RNA, 19 nt, Artificial Sequence
  Description of Artificial Sequence: Synthetic oligonucleotide
  Sense strand starting at position 78 of SEQ ID NO: 1243482
cucaucaggguuuauauau

SEQ ID NO: 1418839 - RNA, 19 nt, Artificial Sequence
  Description of Artificial Sequence: Synthetic oligonucleotide
  Antisense strand to SEQ ID NO: 1418838
auauauaaacccugaugag

SEQ ID NO: 1418840 - RNA, 19 nt, Artificial Sequence
  Description of Artificial Sequence: Synthetic oligonucleotide
  Sense strand starting at position 88 of SEQ ID NO: 1243482
uuuauauauggugggcuaa

SEQ ID NO: 1418841 - RNA, 19 nt, Artificial Sequence
  Description of Artificial Sequence: Synthetic oligonucleotide
  Antisense strand to SEQ ID NO: 1418840
uuagcccaccauauauaaa

SEQ ID NO: 1418842 - RNA, 19 nt, Artificial Sequence
  Description of Artificial Sequence: Synthetic oligonucleotide
  Sense strand starting at position 90 of SEQ ID NO: 1243482
uauauauggugggcuaaga

SEQ ID NO: 1418843 - RNA, 19 nt, Artificial Sequence
  Description of Artificial Sequence: Synthetic oligonucleotide
  Antisense strand to SEQ ID NO: 1418842
ucuuagcccaccauauaua

SEQ ID NO: 1418844 - RNA, 19 nt, Artificial Sequence
  Description of Artificial Sequence: Synthetic oligonucleotide
  Sense strand starting at position 106 of SEQ ID NO: 1243482
agaggaguguugaguguua

SEQ ID NO: 1418845 - RNA, 19 nt, Artificial Sequence
  Description of Artificial Sequence: Synthetic oligonucleotide
  Antisense strand to SEQ ID NO: 1418844
uaacacucaacacuccucu

SEQ ID NO: 1418846 - RNA, 19 nt, Artificial Sequence
  Description of Artificial Sequence: Synthetic oligonucleotide
  Sense strand starting at position 156 of SEQ ID NO: 1243482
cugccaucuguuuacauga

SEQ ID NO: 1418847 - RNA, 19 nt, Artificial Sequence
  Description of Artificial Sequence: Synthetic oligonucleotide
  Antisense strand to SEQ ID NO: 1418846
ucauguaaacagauggcag

SEQ ID NO: 1418848 - RNA, 19 nt, Artificial Sequence
  Description of Artificial Sequence: Synthetic oligonucleotide
  Sense strand starting at position 612 of SEQ ID NO: 1243482
uggauaguaacaggaaguu

SEQ ID NO: 1418849 - RNA, 19 nt, Artificial Sequence
  Description of Artificial Sequence: Synthetic oligonucleotide
  Antisense strand to SEQ ID NO: 1418848
aacuuccuguuacuaucca

SEQ ID NO: 1418850 - RNA, 19 nt, Artificial Sequence
  Description of Artificial Sequence: Synthetic oligonucleotide
  Sense strand starting at position 639 of SEQ ID NO: 1243482
guuuaucucugggcaggau

SEQ ID NO: 1418851 - RNA, 19 nt, Artificial Sequence
  Description of Artificial Sequence: Synthetic oligonucleotide
  Antisense strand to SEQ ID NO: 1418850
auccugcccagagauaaac

SEQ ID NO: 1418852 - RNA, 19 nt, Artificial Sequence
  Description of Artificial Sequence: Synthetic oligonucleotide
  Sense strand starting at position 680 of SEQ ID NO: 1243482
ggaaggauugugggugauu

SEQ ID NO: 1418853 - RNA, 19 nt, Artificial Sequence
  Description of Artificial Sequence: Synthetic oligonucleotide
  Antisense strand to SEQ ID NO: 1418852
aaucacccacaauccuucc

SEQ ID NO: 1418854 - RNA, 19 nt, Artificial Sequence
  Description of Artificial Sequence: Synthetic oligonucleotide
  Sense strand starting at position 814 of SEQ ID NO: 1243482
ggaaacucugcaggugaca

SEQ ID NO: 1418855 - RNA, 19 nt, Artificial Sequence
  Description of Artificial Sequence: Synthetic oligonucleotide
  Antisense strand to SEQ ID NO: 1418854
ugucaccugcagaguuucc

SEQ ID NO: 1418856 - RNA, 19 nt, Artificial Sequence
  Description of Artificial Sequence: Synthetic oligonucleotide
  Sense strand starting at position 826 of SEQ ID NO: 1243482
ggugacaaguggguccaua

SEQ ID NO: 1418857 - RNA, 19 nt, Artificial Sequence
  Description of Artificial Sequence: Synthetic oligonucleotide
  Antisense strand to SEQ ID NO: 1418856
uauggacccacuugucacc

SEQ ID NO: 1418858 - RNA, 19 nt, Artificial Sequence
  Description of Artificial Sequence: Synthetic oligonucleotide
  Sense strand starting at position 963 of SEQ ID NO: 1243482
uugacuugagagugcuuga

SEQ ID NO: 1418859 - RNA, 19 nt, Artificial Sequence
  Description of Artificial Sequence: Synthetic oligonucleotide
  Antisense strand to SEQ ID NO: 1418858
ucaagcacucucaagucaa

SEQ ID NO: 1418860 - RNA, 19 nt, Artificial Sequence
  Description of Artificial Sequence: Synthetic oligonucleotide
  Sense strand starting at position 966 of SEQ ID NO: 1243482
acuugagagugcuugacuu

SEQ ID NO: 1418861 - RNA, 19 nt, Artificial Sequence
  Description of Artificial Sequence: Synthetic oligonucleotide
  Antisense strand to SEQ ID NO: 1418860
aagucaagcacucucaagu

SEQ ID NO: 1418862 - RNA, 19 nt, Artificial Sequence
  Description of Artificial Sequence: Synthetic oligonucleotide
  Sense strand starting at position 970 of SEQ ID NO: 1243482
gagagugcuugacuugguu

SEQ ID NO: 1418863 - RNA, 19 nt, Artificial Sequence
  Description of Artificial Sequence: Synthetic oligonucleotide
  Antisense strand to SEQ ID NO: 1418862
aaccaagucaagcacucuc

SEQ ID NO: 1418864 - RNA, 19 nt, Artificial Sequence
  Description of Artificial Sequence: Synthetic oligonucleotide
  Sense strand starting at position 972 of SEQ ID NO: 1243482
gagugcuugacuugguuau

SEQ ID NO: 1418865 - RNA, 19 nt, Artificial Sequence
  Description of Artificial Sequence: Synthetic oligonucleotide
  Antisense strand to SEQ ID NO: 1418864
auaaccaagucaagcacuc

SEQ ID NO: 1418866 - RNA, 19 nt, Artificial Sequence
  Description of Artificial Sequence: Synthetic oligonucleotide
  Sense strand starting at position 1113 of SEQ ID NO: 1243482
acucacuaguacuagaaga

SEQ ID NO: 1418867 - RNA, 19 nt, Artificial Sequence
  Description of Artificial Sequence: Synthetic oligonucleotide
  Antisense strand to SEQ ID NO: 1418866
ucuucuaguacuagugagu

SEQ ID NO: 1418868 - RNA, 19 nt, Artificial Sequence
  Description of Artificial Sequence: Synthetic oligonucleotide
  Sense strand starting at position 1157 of SEQ ID NO: 1243482
ucgaguuaacaggguaaag

SEQ ID NO: 1418869 - RNA, 19 nt, Artificial Sequence
  Description of Artificial Sequence: Synthetic oligonucleotide
  Antisense strand to SEQ ID NO: 1418868
cuuuacccuguuaacucga

SEQ ID NO: 1418870 - RNA, 19 nt, Artificial Sequence
  Description of Artificial Sequence: Synthetic oligonucleotide
  Sense strand starting at position 1308 of SEQ ID NO: 1243482
caggcuggguccugagaaa

SEQ ID NO: 1418871 - RNA, 19 nt, Artificial Sequence
  Description of Artificial Sequence: Synthetic oligonucleotide
  Antisense strand to SEQ ID NO: 1418870
uuucucaggacccagccug

SEQ ID NO: 1418872 - RNA, 19 nt, Artificial Sequence
  Description of Artificial Sequence: Synthetic oligonucleotide
  Sense strand starting at position 1324 of SEQ ID NO: 1243482
aaaguuugguggccggaga

SEQ ID NO: 1418873 - RNA, 19 nt, Artificial Sequence
  Description of Artificial Sequence: Synthetic oligonucleotide
  Antisense strand to SEQ ID NO: 1418872
ucuccggccaccaaacuuu

SEQ ID NO: 1418874 - RNA, 19 nt, Artificial Sequence
  Description of Artificial Sequence: Synthetic oligonucleotide
  Sense strand starting at position 1785 of SEQ ID NO: 1243482
guucgaacagcucaguaga

SEQ ID NO: 1418875 - RNA, 19 nt, Artificial Sequence
  Description of Artificial Sequence: Synthetic oligonucleotide
  Antisense strand to SEQ ID NO: 1418874
ucuacugagcuguucgaac

SEQ ID NO: 1418876 - RNA, 19 nt, Artificial Sequence
  Description of Artificial Sequence: Synthetic oligonucleotide
  Sense strand starting at position 2239 of SEQ ID NO: 1243482
gcugccagacuucgguaaa

SEQ ID NO: 1418877 - RNA, 19 nt, Artificial Sequence
  Description of Artificial Sequence: Synthetic oligonucleotide
  Antisense strand to SEQ ID NO: 1418876
uuuaccgaagucuggcagc

SEQ ID NO: 1418878 - RNA, 19 nt, Artificial Sequence
  Description of Artificial Sequence: Synthetic oligonucleotide
  Sense strand starting at position 2242 of SEQ ID NO: 1243482
gccagacuucgguaaauca

SEQ ID NO: 1418879 - RNA, 19 nt, Artificial Sequence
  Description of Artificial Sequence: Synthetic oligonucleotide
  Antisense strand to SEQ ID NO: 1418878
ugauuuaccgaagucuggc

SEQ ID NO: 1418880 - RNA, 19 nt, Artificial Sequence
  Description of Artificial Sequence: Synthetic oligonucleotide
  Sense strand starting at position 2409 of SEQ ID NO: 1243482
ggcacaaauuccgggagaa

SEQ ID NO: 1418881 - RNA, 19 nt, Artificial Sequence
  Description of Artificial Sequence: Synthetic oligonucleotide
  Antisense strand to SEQ ID NO: 1418880
uucucccggaauuugugcc

SEQ ID NO: 1418882 - RNA, 19 nt, Artificial Sequence
  Description of Artificial Sequence: Synthetic oligonucleotide
  Sense strand starting at position 2410 of SEQ ID NO: 1243482
gcacaaauuccgggagaaa

SEQ ID NO: 1418883 - RNA, 19 nt, Artificial Sequence
  Description of Artificial Sequence: Synthetic oligonucleotide
  Antisense strand to SEQ ID NO: 1418882
uuucucccggaauuugugc

SEQ ID NO: 1418884 - RNA, 19 nt, Artificial Sequence
  Description of Artificial Sequence: Synthetic oligonucleotide
  Sense strand starting at position 2427 of SEQ ID NO: 1243482
aacuguuagcccggaagau

SEQ ID NO: 1418885 - RNA, 19 nt, Artificial Sequence
  Description of Artificial Sequence: Synthetic oligonucleotide
  Antisense strand to SEQ ID NO: 1418884
aucuuccgggcuaacaguu

SEQ ID NO: 1418886 - RNA, 19 nt, Artificial Sequence
  Description of Artificial Sequence: Synthetic oligonucleotide
  Sense strand starting at position 2428 of SEQ ID NO: 1243482
acuguuagcccggaagaua

SEQ ID NO: 1418887 - RNA, 19 nt, Artificial Sequence
  Description of Artificial Sequence: Synthetic oligonucleotide
  Antisense strand to SEQ ID NO: 1418886
uaucuuccgggcuaacagu

SEQ ID NO: 1418888 - RNA, 19 nt, Artificial Sequence
  Description of Artificial Sequence: Synthetic oligonucleotide
  Sense strand starting at position 2449 of SEQ ID NO: 1243482
ggaacauuaacuggcgagu

SEQ ID NO: 1418889 - RNA, 19 nt, Artificial Sequence
  Description of Artificial Sequence: Synthetic oligonucleotide
  Antisense strand to SEQ ID NO: 1418888
acucgccaguuaauguucc

SEQ ID NO: 1418890 - RNA, 19 nt, Artificial Sequence
  Description of Artificial Sequence: Synthetic oligonucleotide
  Sense strand starting at position 2452 of SEQ ID NO: 1243482
acauuaacuggcgaguagu

SEQ ID NO: 1418891 - RNA, 19 nt, Artificial Sequence
  Description of Artificial Sequence: Synthetic oligonucleotide
  Antisense strand to SEQ ID NO: 1418890
acuacucgccaguuaaugu

SEQ ID NO: 1418892 - RNA, 19 nt, Artificial Sequence
  Description of Artificial Sequence: Synthetic oligonucleotide
  Sense strand starting at position 2462 of SEQ ID NO: 1243482
gcgaguagugugaagccuu

SEQ ID NO: 1418893 - RNA, 19 nt, Artificial Sequence
  Description of Artificial Sequence: Synthetic oligonucleotide
  Antisense strand to SEQ ID NO: 1418892
aaggcuucacacuacucgc

SEQ ID NO: 1418894 - RNA, 19 nt, Artificial Sequence
  Description of Artificial Sequence: Synthetic oligonucleotide
  Sense strand starting at position 3148 of SEQ ID NO: 1243482
ggcucauggucccugacaa

SEQ ID NO: 1418895 - RNA, 19 nt, Artificial Sequence
  Description of Artificial Sequence: Synthetic oligonucleotide
  Antisense strand to SEQ ID NO: 1418894
uugucagggaccaugagcc

SEQ ID NO: 1418896 - RNA, 19 nt, Artificial Sequence
  Description of Artificial Sequence: Synthetic oligonucleotide
  Sense strand starting at position 3149 of SEQ ID NO: 1243482
gcucauggucccugacaaa

SEQ ID NO: 1418897 - RNA, 19 nt, Artificial Sequence
  Description of Artificial Sequence: Synthetic oligonucleotide
  Antisense strand to SEQ ID NO: 1418896
uuugucagggaccaugagc

SEQ ID NO: 1418898 - RNA, 19 nt, Artificial Sequence
  Description of Artificial Sequence: Synthetic oligonucleotide
  Sense strand starting at position 3152 of SEQ ID NO: 1243482
cauggucccugacaaagaa

SEQ ID NO: 1418899 - RNA, 19 nt, Artificial Sequence
  Description of Artificial Sequence: Synthetic oligonucleotide
  Antisense strand to SEQ ID NO: 1418898
uucuuugucagggaccaug

SEQ ID NO: 1418900 - RNA, 19 nt, Artificial Sequence
  Description of Artificial Sequence: Synthetic oligonucleotide
  Sense strand starting at position 3204 of SEQ ID NO: 1243482
uguagucacuuucuacuaa

SEQ ID NO: 1418901 - RNA, 19 nt, Artificial Sequence
  Description of Artificial Sequence: Synthetic oligonucleotide
  Antisense strand to SEQ ID NO: 1418900
uuaguagaaagugacuaca

SEQ ID NO: 1418902 - RNA, 19 nt, Artificial Sequence
  Description of Artificial Sequence: Synthetic oligonucleotide
  Sense strand starting at position 3304 of SEQ ID NO: 1243482
ggccgaucgcuugagccua

SEQ ID NO: 1418903 - RNA, 19 nt, Artificial Sequence
  Description of Artificial Sequence: Synthetic oligonucleotide
  Antisense strand to SEQ ID NO: 1418902
uaggcucaagcgaucggcc

SEQ ID NO: 1418904 - RNA, 19 nt, Artificial Sequence
  Description of Artificial Sequence: Synthetic oligonucleotide
  Sense strand starting at position 3320 of SEQ ID NO: 1243482
cuaggaguucgaggucagu

SEQ ID NO: 1418905 - RNA, 19 nt, Artificial Sequence
  Description of Artificial Sequence: Synthetic oligonucleotide
  Antisense strand to SEQ ID NO: 1418904
acugaccucgaacuccuag

SEQ ID NO: 1418906 - RNA, 19 nt, Artificial Sequence
  Description of Artificial Sequence: Synthetic oligonucleotide
  Sense strand starting at position 3331 of SEQ ID NO: 1243482
aggucagucugggcaacaa

SEQ ID NO: 1418907 - RNA, 19 nt, Artificial Sequence
  Description of Artificial Sequence: Synthetic oligonucleotide
  Antisense strand to SEQ ID NO: 1418906
uuguugcccagacugaccu

SEQ ID NO: 1418908 - RNA, 19 nt, Artificial Sequence
  Description of Artificial Sequence: Synthetic oligonucleotide
  Sense strand starting at position 3566 of SEQ ID NO: 1243482
gggaguucucaacguggaa

SEQ ID NO: 1418909 - RNA, 19 nt, Artificial Sequence
  Description of Artificial Sequence: Synthetic oligonucleotide
  Antisense strand to SEQ ID NO: 1418908
uuccacguugagaacuccc

SEQ ID NO: 1418910 - RNA, 19 nt, Artificial Sequence
  Description of Artificial Sequence: Synthetic oligonucleotide
  Sense strand starting at position 3666 of SEQ ID NO: 1243482
ggugaaaucugcuuuguga

SEQ ID NO: 1418911 - RNA, 19 nt, Artificial Sequence
  Description of Artificial Sequence: Synthetic oligonucleotide
  Antisense strand to SEQ ID NO: 1418910
ucacaaagcagauuucacc

SEQ ID NO: 1418912 - RNA, 19 nt, Artificial Sequence
  Description of Artificial Sequence: Synthetic oligonucleotide
  Sense strand starting at position 3668 of SEQ ID NO: 1243482
ugaaaucugcuuugugaac

SEQ ID NO: 1418913 - RNA, 19 nt, Artificial Sequence
  Description of Artificial Sequence: Synthetic oligonucleotide
  Antisense strand to SEQ ID NO: 1418912
guucacaaagcagauuuca

SEQ ID NO: 1418914 - RNA, 19 nt, Artificial Sequence
  Description of Artificial Sequence: Synthetic oligonucleotide
  Sense strand starting at position 3669 of SEQ ID NO: 1243482
gaaaucugcuuugugaaca

SEQ ID NO: 1418915 - RNA, 19 nt, Artificial Sequence
  Description of Artificial Sequence: Synthetic oligonucleotide
  Antisense strand to SEQ ID NO: 1418914
uguucacaaagcagauuuc

SEQ ID NO: 1418916 - RNA, 19 nt, Artificial Sequence
  Description of Artificial Sequence: Synthetic oligonucleotide
  Sense strand starting at position 3674 of SEQ ID NO: 1243482
cugcuuugugaacaaguuu

SEQ ID NO: 1418917 - RNA, 19 nt, Artificial Sequence
  Description of Artificial Sequence: Synthetic oligonucleotide
  Antisense strand to SEQ ID NO: 1418916
aaacuuguucacaaagcag

SEQ ID NO: 1418918 - RNA, 19 nt, Artificial Sequence
  Description of Artificial Sequence: Synthetic oligonucleotide
  Sense strand starting at position 216 of SEQ ID NO: 1243483
gggaugugugacggcugaa

SEQ ID NO: 1418919 - RNA, 19 nt, Artificial Sequence
  Description of Artificial Sequence: Synthetic oligonucleotide
  Antisense strand to SEQ ID NO: 1418918
uucagccgucacacauccc

SEQ ID NO: 1418920 - RNA, 19 nt, Artificial Sequence
  Description of Artificial Sequence: Synthetic oligonucleotide
  Sense strand starting at position 346 of SEQ ID NO: 1243483
gccaaagacccugaacuuu

SEQ ID NO: 1418921 - RNA, 19 nt, Artificial Sequence
  Description of Artificial Sequence: Synthetic oligonucleotide
  Antisense strand to SEQ ID NO: 1418920
aaaguucagggucuuuggc

SEQ ID NO: 1418922 - RNA, 19 nt, Artificial Sequence
  Description of Artificial Sequence: Synthetic oligonucleotide
  Sense strand starting at position 553 of SEQ ID NO: 1243483
uaugaaugcccagaacagu

SEQ ID NO: 1418923 - RNA, 19 nt, Artificial Sequence
  Description of Artificial Sequence: Synthetic oligonucleotide
  Antisense strand to SEQ ID NO: 1418922
acuguucugggcauucaua

SEQ ID NO: 1418924 - RNA, 19 nt, Artificial Sequence
  Description of Artificial Sequence: Synthetic oligonucleotide
  Sense strand starting at position 938 of SEQ ID NO: 1243483
cccagugaacucugaaguc

SEQ ID NO: 1418925 - RNA, 19 nt, Artificial Sequence
  Description of Artificial Sequence: Synthetic oligonucleotide
  Antisense strand to SEQ ID NO: 1418924
gacuucagaguucacuggg

SEQ ID NO: 1418926 - RNA, 19 nt, Artificial Sequence
  Description of Artificial Sequence: Synthetic oligonucleotide
  Sense strand starting at position 1029 of SEQ ID NO: 1243483
ccaagucauuugccagcau

SEQ ID NO: 1418927 - RNA, 19 nt, Artificial Sequence
  Description of Artificial Sequence: Synthetic oligonucleotide
  Antisense strand to SEQ ID NO: 1418926
augcuggcaaaugacuugg

SEQ ID NO: 1418928 - RNA, 19 nt, Artificial Sequence
  Description of Artificial Sequence: Synthetic oligonucleotide
  Sense strand starting at position 1178 of SEQ ID NO: 1243483
ggcucuuucuacuuggaau

SEQ ID NO: 1418929 - RNA, 19 nt, Artificial Sequence
  Description of Artificial Sequence: Synthetic oligonucleotide
  Antisense strand to SEQ ID NO: 1418928
auuccaaguagaaagagcc

SEQ ID NO: 1418930 - RNA, 19 nt, Artificial Sequence
  Description of Artificial Sequence: Synthetic oligonucleotide
  Sense strand starting at position 1392 of SEQ ID NO: 1243483
gggaguuguuccgcaggag

SEQ ID NO: 1418931 - RNA, 19 nt, Artificial Sequence
  Description of Artificial Sequence: Synthetic oligonucleotide
  Antisense strand to SEQ ID NO: 1418930
cuccugcggaacaacuccc

SEQ ID NO: 1418932 - RNA, 19 nt, Artificial Sequence
  Description of Artificial Sequence: Synthetic oligonucleotide
  Sense strand starting at position 1404 of SEQ ID NO: 1243483
gcaggaggcauuugccaau

SEQ ID NO: 1418933 - RNA, 19 nt, Artificial Sequence
  Description of Artificial Sequence: Synthetic oligonucleotide
  Antisense strand to SEQ ID NO: 1418932
auuggcaaaugccuccugc

SEQ ID NO: 1418934 - RNA, 19 nt, Artificial Sequence
  Description of Artificial Sequence: Synthetic oligonucleotide
  Sense strand starting at position 1416 of SEQ ID NO: 1243483
ugccaaugcauggagacau

SEQ ID NO: 1418935 - RNA, 19 nt, Artificial Sequence
  Description of Artificial Sequence: Synthetic oligonucleotide
  Antisense strand to SEQ ID NO: 1418934
augucuccaugcauuggca

SEQ ID NO: 1418936 - RNA, 19 nt, Artificial Sequence
  Description of Artificial Sequence: Synthetic oligonucleotide
  Sense strand starting at position 1436 of SEQ ID NO: 1243483
uguuaucgcaauugaggaa

SEQ ID NO: 1418937 - RNA, 19 nt, Artificial Sequence
  Description of Artificial Sequence: Synthetic oligonucleotide
  Antisense strand to SEQ ID NO: 1418936
uuccucaauugcgauaaca

SEQ ID NO: 1418938 - RNA, 19 nt, Artificial Sequence
  Description of Artificial Sequence: Synthetic oligonucleotide
  Sense strand starting at position 2169 of SEQ ID NO: 1243483
ucagaaucacucuauguug

SEQ ID NO: 1418939 - RNA, 19 nt, Artificial Sequence
  Description of Artificial Sequence: Synthetic oligonucleotide
  Antisense strand to SEQ ID NO: 1418938
caacauagagugauucuga

SEQ ID NO: 1418940 - RNA, 19 nt, Artificial Sequence
  Description of Artificial Sequence: Synthetic oligonucleotide
  Sense strand starting at position 2171 of SEQ ID NO: 1243483
agaaucacucuauguugca

SEQ ID NO: 1418941 - RNA, 19 nt, Artificial Sequence
  Description of Artificial Sequence: Synthetic oligonucleotide
  Antisense strand to SEQ ID NO: 1418940
ugcaacauagagugauucu

SEQ ID NO: 1418942 - RNA, 19 nt, Artificial Sequence
  Description of Artificial Sequence: Synthetic oligonucleotide
  Sense strand starting at position 2178 of SEQ ID NO: 1243483
cucuauguugcagaucgaa

SEQ ID NO: 1418943 - RNA, 19 nt, Artificial Sequence
  Description of Artificial Sequence: Synthetic oligonucleotide
  Antisense strand to SEQ ID NO: 1418942
uucgaucugcaacauagag

SEQ ID NO: 1418944 - RNA, 19 nt, Artificial Sequence
  Description of Artificial Sequence: Synthetic oligonucleotide
  Sense strand starting at position 2191 of SEQ ID NO: 1243483
aucgaagucugauuggcuu

SEQ ID NO: 1418945 - RNA, 19 nt, Artificial Sequence
  Description of Artificial Sequence: Synthetic oligonucleotide
  Antisense strand to SEQ ID NO: 1418944
aagccaaucagacuucgau

SEQ ID NO: 1418946 - RNA, 19 nt, Artificial Sequence
  Description of Artificial Sequence: Synthetic oligonucleotide
  Sense strand starting at position 2265 of SEQ ID NO: 1243483
cgggucugggucugagaga

SEQ ID NO: 1418947 - RNA, 19 nt, Artificial Sequence
  Description of Artificial Sequence: Synthetic oligonucleotide
  Antisense strand to SEQ ID NO: 1418946
ucucucagacccagacccg

SEQ ID NO: 1418948 - RNA, 19 nt, Artificial Sequence
  Description of Artificial Sequence: Synthetic oligonucleotide
  Sense strand starting at position 2304 of SEQ ID NO: 1243483
acgguacgauugguggaaa

SEQ ID NO: 1418949 - RNA, 19 nt, Artificial Sequence
  Description of Artificial Sequence: Synthetic oligonucleotide
  Antisense strand to SEQ ID NO: 1418948
uuuccaccaaucguaccgu

SEQ ID NO: 1418950 - RNA, 19 nt, Artificial Sequence
  Description of Artificial Sequence: Synthetic oligonucleotide
  Sense strand starting at position 2365 of SEQ ID NO: 1243483
gggcacuuccgccaggaua

SEQ ID NO: 1418951 - RNA, 19 nt, Artificial Sequence
  Description of Artificial Sequence: Synthetic oligonucleotide
  Antisense strand to SEQ ID NO: 1418950
uauccuggcggaagugccc

SEQ ID NO: 1418952 - RNA, 19 nt, Artificial Sequence
  Description of Artificial Sequence: Synthetic oligonucleotide
  Sense strand starting at position 2398 of SEQ ID NO: 1243483
gugggacaguuucuauaaa

SEQ ID NO: 1418953 - RNA, 19 nt, Artificial Sequence
  Description of Artificial Sequence: Synthetic oligonucleotide
  Antisense strand to SEQ ID NO: 1418952
uuuauagaaacugucccac

SEQ ID NO: 1418954 - RNA, 19 nt, Artificial Sequence
  Description of Artificial Sequence: Synthetic oligonucleotide
  Sense strand starting at position 2464 of SEQ ID NO: 1243483
ggaagagguuuguuaauac

SEQ ID NO: 1418955 - RNA, 19 nt, Artificial Sequence
  Description of Artificial Sequence: Synthetic oligonucleotide
  Antisense strand to SEQ ID NO: 1418954
guauuaacaaaccucuucc

SEQ ID NO: 1418956 - RNA, 19 nt, Artificial Sequence
  Description of Artificial Sequence: Synthetic oligonucleotide
  Sense strand starting at position 2472 of SEQ ID NO: 1243483
uuuguuaauacguucgcca

SEQ ID NO: 1418957 - RNA, 19 nt, Artificial Sequence
  Description of Artificial Sequence: Synthetic oligonucleotide
  Antisense strand to SEQ ID NO: 1418956
uggcgaacguauuaacaaa

SEQ ID NO: 1418958 - RNA, 19 nt, Artificial Sequence
  Description of Artificial Sequence: Synthetic oligonucleotide
  Sense strand starting at position 2473 of SEQ ID NO: 1243483
uuguuaauacguucgccau

SEQ ID NO: 1418959 - RNA, 19 nt, Artificial Sequence
  Description of Artificial Sequence: Synthetic oligonucleotide
  Antisense strand to SEQ ID NO: 1418958
auggcgaacguauuaacaa

SEQ ID NO: 1418960 - RNA, 19 nt, Artificial Sequence
  Description of Artificial Sequence: Synthetic oligonucleotide
  Sense strand starting at position 2603 of SEQ ID NO: 1243483
ucccuuagcguuuaaaggu

SEQ ID NO: 1418961 - RNA, 19 nt, Artificial Sequence
  Description of Artificial Sequence: Synthetic oligonucleotide
  Antisense strand to SEQ ID NO: 1418960
accuuuaaacgcuaaggga

SEQ ID NO: 1418962 - RNA, 19 nt, Artificial Sequence
  Description of Artificial Sequence: Synthetic oligonucleotide
  Sense strand starting at position 2616 of SEQ ID NO: 1243483
aaagguuucuucccgaauc

SEQ ID NO: 1418963 - RNA, 19 nt, Artificial Sequence
  Description of Artificial Sequence: Synthetic oligonucleotide
  Antisense strand to SEQ ID NO: 1418962
gauucgggaagaaaccuuu

SEQ ID NO: 1418964 - RNA, 19 nt, Artificial Sequence
  Description of Artificial Sequence: Synthetic oligonucleotide
  Sense strand starting at position 2618 of SEQ ID NO: 1243483
agguuucuucccgaaucuc

SEQ ID NO: 1418965 - RNA, 19 nt, Artificial Sequence
  Description of Artificial Sequence: Synthetic oligonucleotide
  Antisense strand to SEQ ID NO: 1418964
gagauucgggaagaaaccu

SEQ ID NO: 1418966 - RNA, 19 nt, Artificial Sequence
  Description of Artificial Sequence: Synthetic oligonucleotide
  Sense strand starting at position 2688 of SEQ ID NO: 1243483
ucucccagucugugaugaa

SEQ ID NO: 1418967 - RNA, 19 nt, Artificial Sequence
  Description of Artificial Sequence: Synthetic oligonucleotide
  Antisense strand to SEQ ID NO: 1418966
uucaucacagacugggaga

SEQ ID NO: 1418968 - RNA, 19 nt, Artificial Sequence
  Description of Artificial Sequence: Synthetic oligonucleotide
  Sense strand starting at position 2743 of SEQ ID NO: 1243483
cgugcagucugauuauuua

SEQ ID NO: 1418969 - RNA, 19 nt, Artificial Sequence
  Description of Artificial Sequence: Synthetic oligonucleotide
  Antisense strand to SEQ ID NO: 1418968
uaaauaaucagacugcacg

SEQ ID NO: 1418970 - RNA, 19 nt, Artificial Sequence
  Description of Artificial Sequence: Synthetic oligonucleotide
  Sense strand starting at position 2746 of SEQ ID NO: 1243483
gcagucugauuauuuagca

SEQ ID NO: 1418971 - RNA, 19 nt, Artificial Sequence
  Description of Artificial Sequence: Synthetic oligonucleotide
  Antisense strand to SEQ ID NO: 1418970
ugcuaaauaaucagacugc

SEQ ID NO: 1418972 - RNA, 19 nt, Artificial Sequence
  Description of Artificial Sequence: Synthetic oligonucleotide
  Sense strand starting at position 2751 of SEQ ID NO: 1243483
cugauuauuuagcaagacu

SEQ ID NO: 1418973 - RNA, 19 nt, Artificial Sequence
  Description of Artificial Sequence: Synthetic oligonucleotide
  Antisense strand to SEQ ID NO: 1418972
agucuugcuaaauaaucag

SEQ ID NO: 1418974 - RNA, 19 nt, Artificial Sequence
  Description of Artificial Sequence: Synthetic oligonucleotide
  Sense strand starting at position 2841 of SEQ ID NO: 1243483
gggacuuaaugucuguauu

SEQ ID NO: 1418975 - RNA, 19 nt, Artificial Sequence
  Description of Artificial Sequence: Synthetic oligonucleotide
  Antisense strand to SEQ ID NO: 1418974
aauacagacauuaaguccc

SEQ ID NO: 1418976 - RNA, 19 nt, Artificial Sequence
  Description of Artificial Sequence: Synthetic oligonucleotide
  Sense strand starting at position 2948 of SEQ ID NO: 1243483
ggcgcugugucuauugaag

SEQ ID NO: 1418977 - RNA, 19 nt, Artificial Sequence
  Description of Artificial Sequence: Synthetic oligonucleotide
  Antisense strand to SEQ ID NO: 1418976
cuucaauagacacagcgcc

SEQ ID NO: 1418978 - RNA, 19 nt, Artificial Sequence
  Description of Artificial Sequence: Synthetic oligonucleotide
  Sense strand starting at position 2955 of SEQ ID NO: 1243483
ugucuauugaagugcuuag

SEQ ID NO: 1418979 - RNA, 19 nt, Artificial Sequence
  Description of Artificial Sequence: Synthetic oligonucleotide
  Antisense strand to SEQ ID NO: 1418978
cuaagcacuucaauagaca

SEQ ID NO: 1418980 - RNA, 19 nt, Artificial Sequence
  Description of Artificial Sequence: Synthetic oligonucleotide
  Sense strand starting at position 2959 of SEQ ID NO: 1243483
uauugaagugcuuagcaau

SEQ ID NO: 1418981 - RNA, 19 nt, Artificial Sequence
  Description of Artificial Sequence: Synthetic oligonucleotide
  Antisense strand to SEQ ID NO: 1418980
auugcuaagcacuucaaua

SEQ ID NO: 1418982 - RNA, 19 nt, Artificial Sequence
  Description of Artificial Sequence: Synthetic oligonucleotide
  Sense strand starting at position 2965 of SEQ ID NO: 1243483
agugcuuagcaauaaagaa

SEQ ID NO: 1418983 - RNA, 19 nt, Artificial Sequence
  Description of Artificial Sequence: Synthetic oligonucleotide
  Antisense strand to SEQ ID NO: 1418982
uucuuuauugcuaagcacu

SEQ ID NO: 1418984 - RNA, 19 nt, Artificial Sequence
  Description of Artificial Sequence: Synthetic oligonucleotide
  Sense strand starting at position 3096 of SEQ ID NO: 1243483
ggaagcucguuaccaguga

SEQ ID NO: 1418985 - RNA, 19 nt, Artificial Sequence
  Description of Artificial Sequence: Synthetic oligonucleotide
  Antisense strand to SEQ ID NO: 1418984
ucacugguaacgagcuucc

SEQ ID NO: 1418986 - RNA, 19 nt, Artificial Sequence
  Description of Artificial Sequence: Synthetic oligonucleotide
  Sense strand starting at position 3139 of SEQ ID NO: 1243483
cuccauuucugcccgugau

SEQ ID NO: 1418987 - RNA, 19 nt, Artificial Sequence
  Description of Artificial Sequence: Synthetic oligonucleotide
  Antisense strand to SEQ ID NO: 1418986
aucacgggcagaaauggag

SEQ ID NO: 1418988 - RNA, 19 nt, Artificial Sequence
  Description of Artificial Sequence: Synthetic oligonucleotide
  Sense strand starting at position 3140 of SEQ ID NO: 1243483
uccauuucugcccgugauu

SEQ ID NO: 1418989 - RNA, 19 nt, Artificial Sequence
  Description of Artificial Sequence: Synthetic oligonucleotide
  Antisense strand to SEQ ID NO: 1418988
aaucacgggcagaaaugga

SEQ ID NO: 1418990 - RNA, 19 nt, Artificial Sequence
  Description of Artificial Sequence: Synthetic oligonucleotide
  Sense strand starting at position 3515 of SEQ ID NO: 1243483
ccaugugccuccuuaggga

SEQ ID NO: 1418991 - RNA, 19 nt, Artificial Sequence
  Description of Artificial Sequence: Synthetic oligonucleotide
  Antisense strand to SEQ ID NO: 1418990
ucccuaaggaggcacaugg

SEQ ID NO: 1418992 - RNA, 19 nt, Artificial Sequence
  Description of Artificial Sequence: Synthetic oligonucleotide
  Sense strand starting at position 3551 of SEQ ID NO: 1243483
gaggaaugguagccacaca

SEQ ID NO: 1418993 - RNA, 19 nt, Artificial Sequence
  Description of Artificial Sequence: Synthetic oligonucleotide
  Antisense strand to SEQ ID NO: 1418992
uguguggcuaccauuccuc

SEQ ID NO: 1418994 - RNA, 19 nt, Artificial Sequence
  Description of Artificial Sequence: Synthetic oligonucleotide
  Sense strand starting at position 3609 of SEQ ID NO: 1243483
ccagcauccugcucuagaa

SEQ ID NO: 1418995 - RNA, 19 nt, Artificial Sequence
  Description of Artificial Sequence: Synthetic oligonucleotide
  Antisense strand to SEQ ID NO: 1418994
uucuagagcaggaugcugg

SEQ ID NO: 1418996 - RNA, 19 nt, Artificial Sequence
  Description of Artificial Sequence: Synthetic oligonucleotide
  Sense strand starting at position 3611 of SEQ ID NO: 1243483
agcauccugcucuagaagu

SEQ ID NO: 1418997 - RNA, 19 nt, Artificial Sequence
  Description of Artificial Sequence: Synthetic oligonucleotide
  Antisense strand to SEQ ID NO: 1418996
acuucuagagcaggaugcu

SEQ ID NO: 1418998 - RNA, 19 nt, Artificial Sequence
  Description of Artificial Sequence: Synthetic oligonucleotide
  Sense strand starting at position 211 of SEQ ID NO: 1243484
ugaucagacacuggugcua

SEQ ID NO: 1418999 - RNA, 19 nt, Artificial Sequence
  Description of Artificial Sequence: Synthetic oligonucleotide
  Antisense strand to SEQ ID NO: 1418998
uagcaccagugucugauca

SEQ ID NO: 1419000 - RNA, 19 nt, Artificial Sequence
  Description of Artificial Sequence: Synthetic oligonucleotide
  Sense strand starting at position 216 of SEQ ID NO: 1243484
agacacuggugcuagaaga

SEQ ID NO: 1419001 - RNA, 19 nt, Artificial Sequence
  Description of Artificial Sequence: Synthetic oligonucleotide
  Antisense strand to SEQ ID NO: 1419000
ucuucuagcaccagugucu

SEQ ID NO: 1419002 - RNA, 19 nt, Artificial Sequence
  Description of Artificial Sequence: Synthetic oligonucleotide
  Sense strand starting at position 243 of SEQ ID NO: 1243484
gcaucacuuucugagggaa

SEQ ID NO: 1419003 - RNA, 19 nt, Artificial Sequence
  Description of Artificial Sequence: Synthetic oligonucleotide
  Antisense strand to SEQ ID NO: 1419002
uucccucagaaagugaugc

SEQ ID NO: 1419004 - RNA, 19 nt, Artificial Sequence
  Description of Artificial Sequence: Synthetic oligonucleotide
  Sense strand starting at position 631 of SEQ ID NO: 1243484
gcagucuugaugccugcua

SEQ ID NO: 1419005 - RNA, 19 nt, Artificial Sequence
  Description of Artificial Sequence: Synthetic oligonucleotide
  Antisense strand to SEQ ID NO: 1419004
uagcaggcaucaagacugc

SEQ ID NO: 1419006 - RNA, 19 nt, Artificial Sequence
  Description of Artificial Sequence: Synthetic oligonucleotide
  Sense strand starting at position 632 of SEQ ID NO: 1243484
cagucuugaugccugcuaa

SEQ ID NO: 1419007 - RNA, 19 nt, Artificial Sequence
  Description of Artificial Sequence: Synthetic oligonucleotide
  Antisense strand to SEQ ID NO: 1419006
uuagcaggcaucaagacug

SEQ ID NO: 1419008 - RNA, 19 nt, Artificial Sequence
  Description of Artificial Sequence: Synthetic oligonucleotide
  Sense strand starting at position 633 of SEQ ID NO: 1243484
agucuugaugccugcuaaa

SEQ ID NO: 1419009 - RNA, 19 nt, Artificial Sequence
  Description of Artificial Sequence: Synthetic oligonucleotide
  Antisense strand to SEQ ID NO: 1419008
uuuagcaggcaucaagacu

SEQ ID NO: 1419010 - RNA, 19 nt, Artificial Sequence
  Description of Artificial Sequence: Synthetic oligonucleotide
  Sense strand starting at position 713 of SEQ ID NO: 1243484
augcauaggcucugaaaua

SEQ ID NO: 1419011 - RNA, 19 nt, Artificial Sequence
  Description of Artificial Sequence: Synthetic oligonucleotide
  Antisense strand to SEQ ID NO: 1419010
uauuucagagccuaugcau

SEQ ID NO: 1419012 - RNA, 19 nt, Artificial Sequence
  Description of Artificial Sequence: Synthetic oligonucleotide
  Sense strand starting at position 762 of SEQ ID NO: 1243484
aaagaaauaccgcacguga

SEQ ID NO: 1419013 - RNA, 19 nt, Artificial Sequence
  Description of Artificial Sequence: Synthetic oligonucleotide
  Antisense strand to SEQ ID NO: 1419012
ucacgugcgguauuucuuu

SEQ ID NO: 1419014 - RNA, 19 nt, Artificial Sequence
  Description of Artificial Sequence: Synthetic oligonucleotide
  Sense strand starting at position 845 of SEQ ID NO: 1243484
cuuuauugcguccacuaau

SEQ ID NO: 1419015 - RNA, 19 nt, Artificial Sequence
  Description of Artificial Sequence: Synthetic oligonucleotide
  Antisense strand to SEQ ID NO: 1419014
auuaguggacgcaauaaag

SEQ ID NO: 1419016 - RNA, 19 nt, Artificial Sequence
  Description of Artificial Sequence: Synthetic oligonucleotide
  Sense strand starting at position 898 of SEQ ID NO: 1243484
acagaauacugugugguca

SEQ ID NO: 1419017 - RNA, 19 nt, Artificial Sequence
  Description of Artificial Sequence: Synthetic oligonucleotide
  Antisense strand to SEQ ID NO: 1419016
ugaccacacaguauucugu

SEQ ID NO: 1419018 - RNA, 19 nt, Artificial Sequence
  Description of Artificial Sequence: Synthetic oligonucleotide
  Sense strand starting at position 935 of SEQ ID NO: 1243484
uguauacacugacaugaaa

SEQ ID NO: 1419019 - RNA, 19 nt, Artificial Sequence
  Description of Artificial Sequence: Synthetic oligonucleotide
  Antisense strand to SEQ ID NO: 1419018
uuucaugucaguguauaca

SEQ ID NO: 1419020 - RNA, 19 nt, Artificial Sequence
  Description of Artificial Sequence: Synthetic oligonucleotide
  Sense strand starting at position 965 of SEQ ID NO: 1243484
gaaugcugggagcguuaaa

SEQ ID NO: 1419021 - RNA, 19 nt, Artificial Sequence
  Description of Artificial Sequence: Synthetic oligonucleotide
  Antisense strand to SEQ ID NO: 1419020
uuuaacgcucccagcauuc

SEQ ID NO: 1419022 - RNA, 19 nt, Artificial Sequence
  Description of Artificial Sequence: Synthetic oligonucleotide
  Sense strand starting at position 1052 of SEQ ID NO: 1243484
cgcagacauuuauauuuac

SEQ ID NO: 1419023 - RNA, 19 nt, Artificial Sequence
  Description of Artificial Sequence: Synthetic oligonucleotide
  Antisense strand to SEQ ID NO: 1419022
guaaauauaaaugucugcg

SEQ ID NO: 1419024 - RNA, 19 nt, Artificial Sequence
  Description of Artificial Sequence: Synthetic oligonucleotide
  Sense strand starting at position 1094 of SEQ ID NO: 1243484
cgaagcaaugccgaaacuu

SEQ ID NO: 1419025 - RNA, 19 nt, Artificial Sequence
  Description of Artificial Sequence: Synthetic oligonucleotide
  Antisense strand to SEQ ID NO: 1419024
aaguuucggcauugcuucg

SEQ ID NO: 1419026 - RNA, 19 nt, Artificial Sequence
  Description of Artificial Sequence: Synthetic oligonucleotide
  Sense strand starting at position 1181 of SEQ ID NO: 1243484
cauuuauuggcgcauccau

SEQ ID NO: 1419027 - RNA, 19 nt, Artificial Sequence
  Description of Artificial Sequence: Synthetic oligonucleotide
  Antisense strand to SEQ ID NO: 1419026
auggaugcgccaauaaaug

SEQ ID NO: 1419028 - RNA, 19 nt, Artificial Sequence
  Description of Artificial Sequence: Synthetic oligonucleotide
  Sense strand starting at position 1263 of SEQ ID NO: 1243484
ggaugacugcuauagguuu

SEQ ID NO: 1419029 - RNA, 19 nt, Artificial Sequence
  Description of Artificial Sequence: Synthetic oligonucleotide
  Antisense strand to SEQ ID NO: 1419028
aaaccuauagcagucaucc

SEQ ID NO: 1419030 - RNA, 19 nt, Artificial Sequence
  Description of Artificial Sequence: Synthetic oligonucleotide
  Sense strand starting at position 1343 of SEQ ID NO: 1243484
gcguccaaugaacgaauua

SEQ ID NO: 1419031 - RNA, 19 nt, Artificial Sequence
  Description of Artificial Sequence: Synthetic oligonucleotide
  Antisense strand to SEQ ID NO: 1419030
uaauucguucauuggacgc

SEQ ID NO: 1419032 - RNA, 19 nt, Artificial Sequence
  Description of Artificial Sequence: Synthetic oligonucleotide
  Sense strand starting at position 2296 of SEQ ID NO: 1243484
gugucugcgaccuuuguga

SEQ ID NO: 1419033 - RNA, 19 nt, Artificial Sequence
  Description of Artificial Sequence: Synthetic oligonucleotide
  Antisense strand to SEQ ID NO: 1419032
ucacaaaggucgcagacac

SEQ ID NO: 1419034 - RNA, 19 nt, Artificial Sequence
  Description of Artificial Sequence: Synthetic oligonucleotide
  Sense strand starting at position 2298 of SEQ ID NO: 1243484
gucugcgaccuuugugaau

SEQ ID NO: 1419035 - RNA, 19 nt, Artificial Sequence
  Description of Artificial Sequence: Synthetic oligonucleotide
  Antisense strand to SEQ ID NO: 1419034
auucacaaaggucgcagac

SEQ ID NO: 1419036 - RNA, 19 nt, Artificial Sequence
  Description of Artificial Sequence: Synthetic oligonucleotide
  Sense strand starting at position 2461 of SEQ ID NO: 1243484
cgguuauucguuuauucca

SEQ ID NO: 1419037 - RNA, 19 nt, Artificial Sequence
  Description of Artificial Sequence: Synthetic oligonucleotide
  Antisense strand to SEQ ID NO: 1419036
uggaauaaacgaauaaccg

SEQ ID NO: 1419038 - RNA, 19 nt, Artificial Sequence
  Description of Artificial Sequence: Synthetic oligonucleotide
  Sense strand starting at position 2485 of SEQ ID NO: 1243484
cuuguccuugucgagaaga

SEQ ID NO: 1419039 - RNA, 19 nt, Artificial Sequence
  Description of Artificial Sequence: Synthetic oligonucleotide
  Antisense strand to SEQ ID NO: 1419038
ucuucucgacaaggacaag

SEQ ID NO: 1419040 - RNA, 19 nt, Artificial Sequence
  Description of Artificial Sequence: Synthetic oligonucleotide
  Sense strand starting at position 2487 of SEQ ID NO: 1243484
uguccuugucgagaagagu

SEQ ID NO: 1419041 - RNA, 19 nt, Artificial Sequence
  Description of Artificial Sequence: Synthetic oligonucleotide
  Antisense strand to SEQ ID NO: 1419040
acucuucucgacaaggaca

SEQ ID NO: 1419042 - RNA, 19 nt, Artificial Sequence
  Description of Artificial Sequence: Synthetic oligonucleotide
  Sense strand starting at position 2526 of SEQ ID NO: 1243484
agguuauucugagccaaau

SEQ ID NO: 1419043 - RNA, 19 nt, Artificial Sequence
  Description of Artificial Sequence: Synthetic oligonucleotide
  Antisense strand to SEQ ID NO: 1419042
auuuggcucagaauaaccu

SEQ ID NO: 1419044 - RNA, 19 nt, Artificial Sequence
  Description of Artificial Sequence: Synthetic oligonucleotide
  Sense strand starting at position 2538 of SEQ ID NO: 1243484
gccaaauaugagugugcau

SEQ ID NO: 1419045 - RNA, 19 nt, Artificial Sequence
  Description of Artificial Sequence: Synthetic oligonucleotide
  Antisense strand to SEQ ID NO: 1419044
augcacacucauauuuggc

SEQ ID NO: 1419046 - RNA, 19 nt, Artificial Sequence
  Description of Artificial Sequence: Synthetic oligonucleotide
  Sense strand starting at position 2654 of SEQ ID NO: 1243484
ucagucaaugcauguaaga

SEQ ID NO: 1419047 - RNA, 19 nt, Artificial Sequence
  Description of Artificial Sequence: Synthetic oligonucleotide
  Antisense strand to SEQ ID NO: 1419046
ucuuacaugcauugacuga

SEQ ID NO: 1419048 - RNA, 19 nt, Artificial Sequence
  Description of Artificial Sequence: Synthetic oligonucleotide
  Sense strand starting at position 2663 of SEQ ID NO: 1243484
gcauguaagacauagguug

SEQ ID NO: 1419049 - RNA, 19 nt, Artificial Sequence
  Description of Artificial Sequence: Synthetic oligonucleotide
  Antisense strand to SEQ ID NO: 1419048
caaccuaugucuuacaugc

SEQ ID NO: 1419050 - RNA, 19 nt, Artificial Sequence
  Description of Artificial Sequence: Synthetic oligonucleotide
  Sense strand starting at position 2676 of SEQ ID NO: 1243484
agguugguuccguguggaa

SEQ ID NO: 1419051 - RNA, 19 nt, Artificial Sequence
  Description of Artificial Sequence: Synthetic oligonucleotide
  Antisense strand to SEQ ID NO: 1419050
uuccacacggaaccaaccu

SEQ ID NO: 1419052 - RNA, 19 nt, Artificial Sequence
  Description of Artificial Sequence: Synthetic oligonucleotide
  Sense strand starting at position 2678 of SEQ ID NO: 1243484
guugguuccguguggaaag

SEQ ID NO: 1419053 - RNA, 19 nt, Artificial Sequence
  Description of Artificial Sequence: Synthetic oligonucleotide
  Antisense strand to SEQ ID NO: 1419052
cuuuccacacggaaccaac

SEQ ID NO: 1419054 - RNA, 19 nt, Artificial Sequence
  Description of Artificial Sequence: Synthetic oligonucleotide
  Sense strand starting at position 2714 of SEQ ID NO: 1243484
gugaaauacuuagagguca

SEQ ID NO: 1419055 - RNA, 19 nt, Artificial Sequence
  Description of Artificial Sequence: Synthetic oligonucleotide
  Antisense strand to SEQ ID NO: 1419054
ugaccucuaaguauuucac

SEQ ID NO: 1419056 - RNA, 19 nt, Artificial Sequence
  Description of Artificial Sequence: Synthetic oligonucleotide
  Sense strand starting at position 2746 of SEQ ID NO: 1243484
auacuuucugauuggcaau

SEQ ID NO: 1419057 - RNA, 19 nt, Artificial Sequence
  Description of Artificial Sequence: Synthetic oligonucleotide
  Antisense strand to SEQ ID NO: 1419056
auugccaaucagaaaguau

SEQ ID NO: 1419058 - RNA, 19 nt, Artificial Sequence
  Description of Artificial Sequence: Synthetic oligonucleotide
  Sense strand starting at position 3056 of SEQ ID NO: 1243484
agcugugacuccgucucaa

SEQ ID NO: 1419059 - RNA, 19 nt, Artificial Sequence
  Description of Artificial Sequence: Synthetic oligonucleotide
  Antisense strand to SEQ ID NO: 1419058
uugagacggagucacagcu

SEQ ID NO: 1419060 - RNA, 19 nt, Artificial Sequence
  Description of Artificial Sequence: Synthetic oligonucleotide
  Sense strand starting at position 3111 of SEQ ID NO: 1243484
agaguugaguuauacagac

SEQ ID NO: 1419061 - RNA, 19 nt, Artificial Sequence
  Description of Artificial Sequence: Synthetic oligonucleotide
  Antisense strand to SEQ ID NO: 1419060
gucuguauaacucaacucu

SEQ ID NO: 1419062 - RNA, 19 nt, Artificial Sequence
  Description of Artificial Sequence: Synthetic oligonucleotide
  Sense strand starting at position 3144 of SEQ ID NO: 1243484
aagagugucugggugaaga

SEQ ID NO: 1419063 - RNA, 19 nt, Artificial Sequence
  Description of Artificial Sequence: Synthetic oligonucleotide
  Antisense strand to SEQ ID NO: 1419062
ucuucacccagacacucuu

SEQ ID NO: 1419064 - RNA, 19 nt, Artificial Sequence
  Description of Artificial Sequence: Synthetic oligonucleotide
  Sense strand starting at position 3146 of SEQ ID NO: 1243484
gagugucugggugaagaua

SEQ ID NO: 1419065 - RNA, 19 nt, Artificial Sequence
  Description of Artificial Sequence: Synthetic oligonucleotide
  Antisense strand to SEQ ID NO: 1419064
uaucuucacccagacacuc

SEQ ID NO: 1419066 - RNA, 19 nt, Artificial Sequence
  Description of Artificial Sequence: Synthetic oligonucleotide
  Sense strand starting at position 3503 of SEQ ID NO: 1243484
guucuuauuauguagagga

SEQ ID NO: 1419067 - RNA, 19 nt, Artificial Sequence
  Description of Artificial Sequence: Synthetic oligonucleotide
  Antisense strand to SEQ ID NO: 1419066
uccucuacauaauaagaac

SEQ ID NO: 1419068 - RNA, 19 nt, Artificial Sequence
  Description of Artificial Sequence: Synthetic oligonucleotide
  Sense strand starting at position 3517 of SEQ ID NO: 1243484
gaggaagucucauagauga

SEQ ID NO: 1419069 - RNA, 19 nt, Artificial Sequence
  Description of Artificial Sequence: Synthetic oligonucleotide
  Antisense strand to SEQ ID NO: 1419068
ucaucuaugagacuuccuc

SEQ ID NO: 1419070 - RNA, 19 nt, Artificial Sequence
  Description of Artificial Sequence: Synthetic oligonucleotide
  Sense strand starting at position 3544 of SEQ ID NO: 1243484
acagguaauagauggcaaa

SEQ ID NO: 1419071 - RNA, 19 nt, Artificial Sequence
  Description of Artificial Sequence: Synthetic oligonucleotide
  Antisense strand to SEQ ID NO: 1419070
uuugccaucuauuaccugu

SEQ ID NO: 1419072 - RNA, 19 nt, Artificial Sequence
  Description of Artificial Sequence: Synthetic oligonucleotide
  Sense strand starting at position 3545 of SEQ ID NO: 1243484
cagguaauagauggcaaau

SEQ ID NO: 1419073 - RNA, 19 nt, Artificial Sequence
  Description of Artificial Sequence: Synthetic oligonucleotide
  Antisense strand to SEQ ID NO: 1419072
auuugccaucuauuaccug

SEQ ID NO: 1419074 - RNA, 19 nt, Artificial Sequence
  Description of Artificial Sequence: Synthetic oligonucleotide
  Sense strand starting at position 3692 of SEQ ID NO: 1243484
ggucuuaucacuugagguc

SEQ ID NO: 1419075 - RNA, 19 nt, Artificial Sequence
  Description of Artificial Sequence: Synthetic oligonucleotide
  Antisense strand to SEQ ID NO: 1419074
gaccucaagugauaagacc

SEQ ID NO: 1419076 - RNA, 19 nt, Artificial Sequence
  Description of Artificial Sequence: Synthetic oligonucleotide
  Sense strand starting at position 3693 of SEQ ID NO: 1243484
gucuuaucacuugagguca

SEQ ID NO: 1419077 - RNA, 19 nt, Artificial Sequence
  Description of Artificial Sequence: Synthetic oligonucleotide
  Antisense strand to SEQ ID NO: 1419076
ugaccucaagugauaagac

SEQ ID NO: 1419078 - RNA, 19 nt, Artificial Sequence
  Description of Artificial Sequence: Synthetic oligonucleotide
  Sense strand starting at position 14 of SEQ ID NO: 1243485
gaaagaaauccuugcaggu

SEQ ID NO: 1419079 - RNA, 19 nt, Artificial Sequence
  Description of Artificial Sequence: Synthetic oligonucleotide
  Antisense strand to SEQ ID NO: 1419078
accugcaaggauuucuuuc

SEQ ID NO: 1419080 - RNA, 19 nt, Artificial Sequence
  Description of Artificial Sequence: Synthetic oligonucleotide
  Sense strand starting at position 18 of SEQ ID NO: 1243485
gaaauccuugcagguacaa

SEQ ID NO: 1419081 - RNA, 19 nt, Artificial Sequence
  Description of Artificial Sequence: Synthetic oligonucleotide
  Antisense strand to SEQ ID NO: 1419080
uuguaccugcaaggauuuc

SEQ ID NO: 1419082 - RNA, 19 nt, Artificial Sequence
  Description of Artificial Sequence: Synthetic oligonucleotide
  Sense strand starting at position 124 of SEQ ID NO: 1243485
ccaaauggcucuuccaaug

SEQ ID NO: 1419083 - RNA, 19 nt, Artificial Sequence
  Description of Artificial Sequence: Synthetic oligonucleotide
  Antisense strand to SEQ ID NO: 1419082
cauuggaagagccauuugg

SEQ ID NO: 1419084 - RNA, 19 nt, Artificial Sequence
  Description of Artificial Sequence: Synthetic oligonucleotide
  Sense strand starting at position 238 of SEQ ID NO: 1243485
guuaucugauccuaaagua

SEQ ID NO: 1419085 - RNA, 19 nt, Artificial Sequence
  Description of Artificial Sequence: Synthetic oligonucleotide
  Antisense strand to SEQ ID NO: 1419084
uacuuuaggaucagauaac

SEQ ID NO: 1419086 - RNA, 19 nt, Artificial Sequence
  Description of Artificial Sequence: Synthetic oligonucleotide
  Sense strand starting at position 269 of SEQ ID NO: 1243485
guagguccucccugacaca

SEQ ID NO: 1419087 - RNA, 19 nt, Artificial Sequence
  Description of Artificial Sequence: Synthetic oligonucleotide
  Antisense strand to SEQ ID NO: 1419086
ugugucagggaggaccuac

SEQ ID NO: 1419088 - RNA, 19 nt, Artificial Sequence
  Description of Artificial Sequence: Synthetic oligonucleotide
  Sense strand starting at position 287 of SEQ ID NO: 1243485
acacccugcccugaaagau

SEQ ID NO: 1419089 - RNA, 19 nt, Artificial Sequence
  Description of Artificial Sequence: Synthetic oligonucleotide
  Antisense strand to SEQ ID NO: 1419088
aucuuucagggcagggugu

SEQ ID NO: 1419090 - RNA, 19 nt, Artificial Sequence
  Description of Artificial Sequence: Synthetic oligonucleotide
  Sense strand starting at position 661 of SEQ ID NO: 1243485
uaaggagauuuauguguug

SEQ ID NO: 1419091 - RNA, 19 nt, Artificial Sequence
  Description of Artificial Sequence: Synthetic oligonucleotide
  Antisense strand to SEQ ID NO: 1419090
caacacauaaaucuccuua

SEQ ID NO: 1419092 - RNA, 19 nt, Artificial Sequence
  Description of Artificial Sequence: Synthetic oligonucleotide
  Sense strand starting at position 668 of SEQ ID NO: 1243485
auuuauguguuguuugcaa

SEQ ID NO: 1419093 - RNA, 19 nt, Artificial Sequence
  Description of Artificial Sequence: Synthetic oligonucleotide
  Antisense strand to SEQ ID NO: 1419092
uugcaaacaacacauaaau

SEQ ID NO: 1419094 - RNA, 19 nt, Artificial Sequence
  Description of Artificial Sequence: Synthetic oligonucleotide
  Sense strand starting at position 670 of SEQ ID NO: 1243485
uuauguguuguuugcaaag

SEQ ID NO: 1419095 - RNA, 19 nt, Artificial Sequence
  Description of Artificial Sequence: Synthetic oligonucleotide
  Antisense strand to SEQ ID NO: 1419094
cuuugcaaacaacacauaa

SEQ ID NO: 1419096 - RNA, 19 nt, Artificial Sequence
  Description of Artificial Sequence: Synthetic oligonucleotide
  Sense strand starting at position 827 of SEQ ID NO: 1243485
cugcauggcucacccaaau

SEQ ID NO: 1419097 - RNA, 19 nt, Artificial Sequence
  Description of Artificial Sequence: Synthetic oligonucleotide
  Antisense strand to SEQ ID NO: 1419096
auuugggugagccaugcag

SEQ ID NO: 1419098 - RNA, 19 nt, Artificial Sequence
  Description of Artificial Sequence: Synthetic oligonucleotide
  Sense strand starting at position 1029 of SEQ ID NO: 1243485
gcacaaauacagugaacaa

SEQ ID NO: 1419099 - RNA, 19 nt, Artificial Sequence
  Description of Artificial Sequence: Synthetic oligonucleotide
  Antisense strand to SEQ ID NO: 1419098
uuguucacuguauuugugc

SEQ ID NO: 1419100 - RNA, 19 nt, Artificial Sequence
  Description of Artificial Sequence: Synthetic oligonucleotide
  Sense strand starting at position 1042 of SEQ ID NO: 1243485
gaacaagaguccucgcuac

SEQ ID NO: 1419101 - RNA, 19 nt, Artificial Sequence
  Description of Artificial Sequence: Synthetic oligonucleotide
  Antisense strand to SEQ ID NO: 1419100
guagcgaggacucuuguuc

SEQ ID NO: 1419102 - RNA, 19 nt, Artificial Sequence
  Description of Artificial Sequence: Synthetic oligonucleotide
  Sense strand starting at position 1071 of SEQ ID NO: 1243485
agugauaccuagucaauaa

SEQ ID NO: 1419103 - RNA, 19 nt, Artificial Sequence
  Description of Artificial Sequence: Synthetic oligonucleotide
  Antisense strand to SEQ ID NO: 1419102
uuauugacuagguaucacu

SEQ ID NO: 1419104 - RNA, 19 nt, Artificial Sequence
  Description of Artificial Sequence: Synthetic oligonucleotide
  Sense strand starting at position 1273 of SEQ ID NO: 1243485
ugcuuuccaguugaaaugu

SEQ ID NO: 1419105 - RNA, 19 nt, Artificial Sequence
  Description of Artificial Sequence: Synthetic oligonucleotide
  Antisense strand to SEQ ID NO: 1419104
acauuucaacuggaaagca

SEQ ID NO: 1419106 - RNA, 19 nt, Artificial Sequence
  Description of Artificial Sequence: Synthetic oligonucleotide
  Sense strand starting at position 1286 of SEQ ID NO: 1243485
aaauguaugugggccagua

SEQ ID NO: 1419107 - RNA, 19 nt, Artificial Sequence
  Description of Artificial Sequence: Synthetic oligonucleotide
  Antisense strand to SEQ ID NO: 1419106
uacuggcccacauacauuu

SEQ ID NO: 1419108 - RNA, 19 nt, Artificial Sequence
  Description of Artificial Sequence: Synthetic oligonucleotide
  Sense strand starting at position 1288 of SEQ ID NO: 1243485
auguaugugggccaguaaa

SEQ ID NO: 1419109 - RNA, 19 nt, Artificial Sequence
  Description of Artificial Sequence: Synthetic oligonucleotide
  Antisense strand to SEQ ID NO: 1419108
uuuacuggcccacauacau

SEQ ID NO: 1419110 - RNA, 19 nt, Artificial Sequence
  Description of Artificial Sequence: Synthetic oligonucleotide
  Sense strand starting at position 1324 of SEQ ID NO: 1243485
agagguguuccgcgugcaa

SEQ ID NO: 1419111 - RNA, 19 nt, Artificial Sequence
  Description of Artificial Sequence: Synthetic oligonucleotide
  Antisense strand to SEQ ID NO: 1419110
uugcacgcggaacaccucu

SEQ ID NO: 1419112 - RNA, 19 nt, Artificial Sequence
  Description of Artificial Sequence: Synthetic oligonucleotide
  Sense strand starting at position 1326 of SEQ ID NO: 1243485
agguguuccgcgugcaaag

SEQ ID NO: 1419113 - RNA, 19 nt, Artificial Sequence
  Description of Artificial Sequence: Synthetic oligonucleotide
  Antisense strand to SEQ ID NO: 1419112
cuuugcacgcggaacaccu

SEQ ID NO: 1419114 - RNA, 19 nt, Artificial Sequence
  Description of Artificial Sequence: Synthetic oligonucleotide
  Sense strand starting at position 1379 of SEQ ID NO: 1243485
gcugcagaauuguuugguu

SEQ ID NO: 1419115 - RNA, 19 nt, Artificial Sequence
  Description of Artificial Sequence: Synthetic oligonucleotide
  Antisense strand to SEQ ID NO: 1419114
aaccaaacaauucugcagc

SEQ ID NO: 1419116 - RNA, 19 nt, Artificial Sequence
  Description of Artificial Sequence: Synthetic oligonucleotide
  Sense strand starting at position 1504 of SEQ ID NO: 1243485
gugacaggauccgauuugu

SEQ ID NO: 1419117 - RNA, 19 nt, Artificial Sequence
  Description of Artificial Sequence: Synthetic oligonucleotide
  Antisense strand to SEQ ID NO: 1419116
acaaaucggauccugucac

SEQ ID NO: 1419118 - RNA, 19 nt, Artificial Sequence
  Description of Artificial Sequence: Synthetic oligonucleotide
  Sense strand starting at position 1820 of SEQ ID NO: 1243485
uuccuaaggugccuucuaa

SEQ ID NO: 1419119 - RNA, 19 nt, Artificial Sequence
  Description of Artificial Sequence: Synthetic oligonucleotide
  Antisense strand to SEQ ID NO: 1419118
uuagaaggcaccuuaggaa

SEQ ID NO: 1419120 - RNA, 19 nt, Artificial Sequence
  Description of Artificial Sequence: Synthetic oligonucleotide
  Sense strand starting at position 2700 of SEQ ID NO: 1243485
gcccucuacucuugggaaa

SEQ ID NO: 1419121 - RNA, 19 nt, Artificial Sequence
  Description of Artificial Sequence: Synthetic oligonucleotide
  Antisense strand to SEQ ID NO: 1419120
uuucccaagaguagagggc

SEQ ID NO: 1419122 - RNA, 19 nt, Artificial Sequence
  Description of Artificial Sequence: Synthetic oligonucleotide
  Sense strand starting at position 2864 of SEQ ID NO: 1243485
cucuguccucuggagaaug

SEQ ID NO: 1419123 - RNA, 19 nt, Artificial Sequence
  Description of Artificial Sequence: Synthetic oligonucleotide
  Antisense strand to SEQ ID NO: 1419122
cauucuccagaggacagag

SEQ ID NO: 1419124 - RNA, 19 nt, Artificial Sequence
  Description of Artificial Sequence: Synthetic oligonucleotide
  Sense strand starting at position 2900 of SEQ ID NO: 1243485
gucccuaaggucugaagaa

SEQ ID NO: 1419125 - RNA, 19 nt, Artificial Sequence
  Description of Artificial Sequence: Synthetic oligonucleotide
  Antisense strand to SEQ ID NO: 1419124
uucuucagaccuuagggac

SEQ ID NO: 1419126 - RNA, 19 nt, Artificial Sequence
  Description of Artificial Sequence: Synthetic oligonucleotide
  Sense strand starting at position 2901 of SEQ ID NO: 1243485
ucccuaaggucugaagaac

SEQ ID NO: 1419127 - RNA, 19 nt, Artificial Sequence
  Description of Artificial Sequence: Synthetic oligonucleotide
  Antisense strand to SEQ ID NO: 1419126
guucuucagaccuuaggga

SEQ ID NO: 1419128 - RNA, 19 nt, Artificial Sequence
  Description of Artificial Sequence: Synthetic oligonucleotide
  Sense strand starting at position 2989 of SEQ ID NO: 1243485
ucccuaacuccuuguggga

SEQ ID NO: 1419129 - RNA, 19 nt, Artificial Sequence
  Description of Artificial Sequence: Synthetic oligonucleotide
  Antisense strand to SEQ ID NO: 1419128
ucccacaaggaguuaggga

SEQ ID NO: 1419130 - RNA, 19 nt, Artificial Sequence
  Description of Artificial Sequence: Synthetic oligonucleotide
  Sense strand starting at position 3012 of SEQ ID NO: 1243485
ccuggagacucaggaauga

SEQ ID NO: 1419131 - RNA, 19 nt, Artificial Sequence
  Description of Artificial Sequence: Synthetic oligonucleotide
  Antisense strand to SEQ ID NO: 1419130
ucauuccugagucuccagg

SEQ ID NO: 1419132 - RNA, 19 nt, Artificial Sequence
  Description of Artificial Sequence: Synthetic oligonucleotide
  Sense strand starting at position 3552 of SEQ ID NO: 1243485
ucucauaugucuuauuugu

SEQ ID NO: 1419133 - RNA, 19 nt, Artificial Sequence
  Description of Artificial Sequence: Synthetic oligonucleotide
  Antisense strand to SEQ ID NO: 1419132
acaaauaagacauaugaga

SEQ ID NO: 1419134 - RNA, 19 nt, Artificial Sequence
  Description of Artificial Sequence: Synthetic oligonucleotide
  Sense strand starting at position 3554 of SEQ ID NO: 1243485
ucauaugucuuauuugugu

SEQ ID NO: 1419135 - RNA, 19 nt, Artificial Sequence
  Description of Artificial Sequence: Synthetic oligonucleotide
  Antisense strand to SEQ ID NO: 1419134
acacaaauaagacauauga

SEQ ID NO: 1419136 - RNA, 19 nt, Artificial Sequence
  Description of Artificial Sequence: Synthetic oligonucleotide
  Sense strand starting at position 3559 of SEQ ID NO: 1243485
ugucuuauuugugugcagu

SEQ ID NO: 1419137 - RNA, 19 nt, Artificial Sequence
  Description of Artificial Sequence: Synthetic oligonucleotide
  Antisense strand to SEQ ID NO: 1419136
acugcacacaaauaagaca

SEQ ID NO: 1419138 - RNA, 19 nt, Artificial Sequence
  Description of Artificial Sequence: Synthetic oligonucleotide
  Sense strand starting at position 3560 of SEQ ID NO: 1243485
gucuuauuugugugcagug

SEQ ID NO: 1419139 - RNA, 19 nt, Artificial Sequence
  Description of Artificial Sequence: Synthetic oligonucleotide
  Antisense strand to SEQ ID NO: 1419138
cacugcacacaaauaagac

SEQ ID NO: 1419140 - RNA, 19 nt, Artificial Sequence
  Description of Artificial Sequence: Synthetic oligonucleotide
  Sense strand starting at position 3561 of SEQ ID NO: 1243485
ucuuauuugugugcaguga

SEQ ID NO: 1419141 - RNA, 19 nt, Artificial Sequence
  Description of Artificial Sequence: Synthetic oligonucleotide
  Antisense strand to SEQ ID NO: 1419140
ucacugcacacaaauaaga

SEQ ID NO: 1419142 - RNA, 19 nt, Artificial Sequence
  Description of Artificial Sequence: Synthetic oligonucleotide
  Sense strand starting at position 3576 of SEQ ID NO: 1243485
gugacugcuuuccagagca

SEQ ID NO: 1419143 - RNA, 19 nt, Artificial Sequence
  Description of Artificial Sequence: Synthetic oligonucleotide
  Antisense strand to SEQ ID NO: 1419142
ugcucuggaaagcagucac

SEQ ID NO: 1419144 - RNA, 19 nt, Artificial Sequence
  Description of Artificial Sequence: Synthetic oligonucleotide
  Sense strand starting at position 3638 of SEQ ID NO: 1243485
gggccuuucucugcacuga

SEQ ID NO: 1419145 - RNA, 19 nt, Artificial Sequence
  Description of Artificial Sequence: Synthetic oligonucleotide
  Antisense strand to SEQ ID NO: 1419144
ucagugcagagaaaggccc

SEQ ID NO: 1419146 - RNA, 19 nt, Artificial Sequence
  Description of Artificial Sequence: Synthetic oligonucleotide
  Sense strand starting at position 3817 of SEQ ID NO: 1243485
ggugaagccucccuguuaa

SEQ ID NO: 1419147 - RNA, 19 nt, Artificial Sequence
  Description of Artificial Sequence: Synthetic oligonucleotide
  Antisense strand to SEQ ID NO: 1419146
uuaacagggaggcuucacc

SEQ ID NO: 1419148 - RNA, 19 nt, Artificial Sequence
  Description of Artificial Sequence: Synthetic oligonucleotide
  Sense strand starting at position 3847 of SEQ ID NO: 1243485
uccugacuuucucagagga

SEQ ID NO: 1419149 - RNA, 19 nt, Artificial Sequence
  Description of Artificial Sequence: Synthetic oligonucleotide
  Antisense strand to SEQ ID NO: 1419148
uccucugagaaagucagga

SEQ ID NO: 1419150 - RNA, 19 nt, Artificial Sequence
  Description of Artificial Sequence: Synthetic oligonucleotide
  Sense strand starting at position 3849 of SEQ ID NO: 1243485
cugacuuucucagaggaca

SEQ ID NO: 1419151 - RNA, 19 nt, Artificial Sequence
  Description of Artificial Sequence: Synthetic oligonucleotide
  Antisense strand to SEQ ID NO: 1419150
uguccucugagaaagucag

SEQ ID NO: 1419152 - RNA, 19 nt, Artificial Sequence
  Description of Artificial Sequence: Synthetic oligonucleotide
  Sense strand starting at position 3906 of SEQ ID NO: 1243485
guugaagacuugucgaaau

SEQ ID NO: 1419153 - RNA, 19 nt, Artificial Sequence
  Description of Artificial Sequence: Synthetic oligonucleotide
  Antisense strand to SEQ ID NO: 1419152
auuucgacaagucuucaac

SEQ ID NO: 1419154 - RNA, 19 nt, Artificial Sequence
  Description of Artificial Sequence: Synthetic oligonucleotide
  Sense strand starting at position 3930 of SEQ ID NO: 1243485
uuugguuauguuggguuaa

SEQ ID NO: 1419155 - RNA, 19 nt, Artificial Sequence
  Description of Artificial Sequence: Synthetic oligonucleotide
  Antisense strand to SEQ ID NO: 1419154
uuaacccaacauaaccaaa

SEQ ID NO: 1419156 - RNA, 19 nt, Artificial Sequence
  Description of Artificial Sequence: Synthetic oligonucleotide
  Sense strand starting at position 3932 of SEQ ID NO: 1243485
ugguuauguuggguuaaau

SEQ ID NO: 1419157 - RNA, 19 nt, Artificial Sequence
  Description of Artificial Sequence: Synthetic oligonucleotide
  Antisense strand to SEQ ID NO: 1419156
auuuaacccaacauaacca

SEQ ID NO: 1419158 - RNA, 19 nt, Artificial Sequence
  Description of Artificial Sequence: Synthetic oligonucleotide
  Sense strand starting at position 5 of SEQ ID NO: 1243486
cccugcaccugucauuuau

SEQ ID NO: 1419159 - RNA, 19 nt, Artificial Sequence
  Description of Artificial Sequence: Synthetic oligonucleotide
  Antisense strand to SEQ ID NO: 1419158
auaaaugacaggugcaggg

SEQ ID NO: 1419160 - RNA, 19 nt, Artificial Sequence
  Description of Artificial Sequence: Synthetic oligonucleotide
  Sense strand starting at position 90 of SEQ ID NO: 1243486
uagcuauacgugugugcuu

SEQ ID NO: 1419161 - RNA, 19 nt, Artificial Sequence
  Description of Artificial Sequence: Synthetic oligonucleotide
  Antisense strand to SEQ ID NO: 1419160
aagcacacacguauagcua

SEQ ID NO: 1419162 - RNA, 19 nt, Artificial Sequence
  Description of Artificial Sequence: Synthetic oligonucleotide
  Sense strand starting at position 137 of SEQ ID NO: 1243486
gugugcguucgucucuauu

SEQ ID NO: 1419163 - RNA, 19 nt, Artificial Sequence
  Description of Artificial Sequence: Synthetic oligonucleotide
  Antisense strand to SEQ ID NO: 1419162
aauagagacgaacgcacac

SEQ ID NO: 1419164 - RNA, 19 nt, Artificial Sequence
  Description of Artificial Sequence: Synthetic oligonucleotide
  Sense strand starting at position 623 of SEQ ID NO: 1243486
caguuuccucuagggacua

SEQ ID NO: 1419165 - RNA, 19 nt, Artificial Sequence
  Description of Artificial Sequence: Synthetic oligonucleotide
  Antisense strand to SEQ ID NO: 1419164
uagucccuagaggaaacug

SEQ ID NO: 1419166 - RNA, 19 nt, Artificial Sequence
  Description of Artificial Sequence: Synthetic oligonucleotide
  Sense strand starting at position 624 of SEQ ID NO: 1243486
aguuuccucuagggacuaa

SEQ ID NO: 1419167 - RNA, 19 nt, Artificial Sequence
  Description of Artificial Sequence: Synthetic oligonucleotide
  Antisense strand to SEQ ID NO: 1419166
uuagucccuagaggaaacu

SEQ ID NO: 1419168 - RNA, 19 nt, Artificial Sequence
  Description of Artificial Sequence: Synthetic oligonucleotide
  Sense strand starting at position 787 of SEQ ID NO: 1243486
ucgugagccucucuagaga

SEQ ID NO: 1419169 - RNA, 19 nt, Artificial Sequence
  Description of Artificial Sequence: Synthetic oligonucleotide
  Antisense strand to SEQ ID NO: 1419168
ucucuagagaggcucacga

SEQ ID NO: 1419170 - RNA, 19 nt, Artificial Sequence
  Description of Artificial Sequence: Synthetic oligonucleotide
  Sense strand starting at position 2010 of SEQ ID NO: 1243486
ugaguagucccugggcaca

SEQ ID NO: 1419171 - RNA, 19 nt, Artificial Sequence
  Description of Artificial Sequence: Synthetic oligonucleotide
  Antisense strand to SEQ ID NO: 1419170
ugugcccagggacuacuca

SEQ ID NO: 1419172 - RNA, 19 nt, Artificial Sequence
  Description of Artificial Sequence: Synthetic oligonucleotide
  Sense strand starting at position 2252 of SEQ ID NO: 1243486
caaguuuauggcugaccaa

SEQ ID NO: 1419173 - RNA, 19 nt, Artificial Sequence
  Description of Artificial Sequence: Synthetic oligonucleotide
  Antisense strand to SEQ ID NO: 1419172
uuggucagccauaaacuug

SEQ ID NO: 1419174 - RNA, 19 nt, Artificial Sequence
  Description of Artificial Sequence: Synthetic oligonucleotide
  Sense strand starting at position 2416 of SEQ ID NO: 1243486
cucucuaaaugcuuggaga

SEQ ID NO: 1419175 - RNA, 19 nt, Artificial Sequence
  Description of Artificial Sequence: Synthetic oligonucleotide
  Antisense strand to SEQ ID NO: 1419174
ucuccaagcauuuagagag

SEQ ID NO: 1419176 - RNA, 19 nt, Artificial Sequence
  Description of Artificial Sequence: Synthetic oligonucleotide
  Sense strand starting at position 2419 of SEQ ID NO: 1243486
ucuaaaugcuuggagaaug

SEQ ID NO: 1419177 - RNA, 19 nt, Artificial Sequence
  Description of Artificial Sequence: Synthetic oligonucleotide
  Antisense strand to SEQ ID NO: 1419176
cauucuccaagcauuuaga

SEQ ID NO: 1419178 - RNA, 19 nt, Artificial Sequence
  Description of Artificial Sequence: Synthetic oligonucleotide
  Sense strand starting at position 2508 of SEQ ID NO: 1243486
cugguuccuguauguguau

SEQ ID NO: 1419179 - RNA, 19 nt, Artificial Sequence
  Description of Artificial Sequence: Synthetic oligonucleotide
  Antisense strand to SEQ ID NO: 1419178
auacacauacaggaaccag

SEQ ID NO: 1419180 - RNA, 19 nt, Artificial Sequence
  Description of Artificial Sequence: Synthetic oligonucleotide
  Sense strand starting at position 2553 of SEQ ID NO: 1243486
uuaaguggcgcugggauaa

SEQ ID NO: 1419181 - RNA, 19 nt, Artificial Sequence
  Description of Artificial Sequence: Synthetic oligonucleotide
  Antisense strand to SEQ ID NO: 1419180
uuaucccagcgccacuuaa

SEQ ID NO: 1419182 - RNA, 19 nt, Artificial Sequence
  Description of Artificial Sequence: Synthetic oligonucleotide
  Sense strand starting at position 2571 of SEQ ID NO: 1243486
acuggcuagccuuaugcaa

SEQ ID NO: 1419183 - RNA, 19 nt, Artificial Sequence
  Description of Artificial Sequence: Synthetic oligonucleotide
  Antisense strand to SEQ ID NO: 1419182
uugcauaaggcuagccagu

SEQ ID NO: 1419184 - RNA, 19 nt, Artificial Sequence
  Description of Artificial Sequence: Synthetic oligonucleotide
  Sense strand starting at position 2573 of SEQ ID NO: 1243486
uggcuagccuuaugcaaga

SEQ ID NO: 1419185 - RNA, 19 nt, Artificial Sequence
  Description of Artificial Sequence: Synthetic oligonucleotide
  Antisense strand to SEQ ID NO: 1419184
ucuugcauaaggcuagcca

SEQ ID NO: 1419186 - RNA, 19 nt, Artificial Sequence
  Description of Artificial Sequence: Synthetic oligonucleotide
  Sense strand starting at position 2575 of SEQ ID NO: 1243486
gcuagccuuaugcaagaga

SEQ ID NO: 1419187 - RNA, 19 nt, Artificial Sequence
  Description of Artificial Sequence: Synthetic oligonucleotide
  Antisense strand to SEQ ID NO: 1419186
ucucuugcauaaggcuagc

SEQ ID NO: 1419188 - RNA, 19 nt, Artificial Sequence
  Description of Artificial Sequence: Synthetic oligonucleotide
  Sense strand starting at position 2578 of SEQ ID NO: 1243486
agccuuaugcaagagaaug

SEQ ID NO: 1419189 - RNA, 19 nt, Artificial Sequence
  Description of Artificial Sequence: Synthetic oligonucleotide
  Antisense strand to SEQ ID NO: 1419188
cauucucuugcauaaggcu

SEQ ID NO: 1419190 - RNA, 19 nt, Artificial Sequence
  Description of Artificial Sequence: Synthetic oligonucleotide
  Sense strand starting at position 2716 of SEQ ID NO: 1243486
ggauaucagccuugguaaa

SEQ ID NO: 1419191 - RNA, 19 nt, Artificial Sequence
  Description of Artificial Sequence: Synthetic oligonucleotide
  Antisense strand to SEQ ID NO: 1419190
uuuaccaaggcugauaucc

SEQ ID NO: 1419192 - RNA, 19 nt, Artificial Sequence
  Description of Artificial Sequence: Synthetic oligonucleotide
  Sense strand starting at position 2717 of SEQ ID NO: 1243486
gauaucagccuugguaaag

SEQ ID NO: 1419193 - RNA, 19 nt, Artificial Sequence
  Description of Artificial Sequence: Synthetic oligonucleotide
  Antisense strand to SEQ ID NO: 1419192
cuuuaccaaggcugauauc

SEQ ID NO: 1419194 - RNA, 19 nt, Artificial Sequence
  Description of Artificial Sequence: Synthetic oligonucleotide
  Sense strand starting at position 2718 of SEQ ID NO: 1243486
auaucagccuugguaaaga

SEQ ID NO: 1419195 - RNA, 19 nt, Artificial Sequence
  Description of Artificial Sequence: Synthetic oligonucleotide
  Antisense strand to SEQ ID NO: 1419194
ucuuuaccaaggcugauau

SEQ ID NO: 1419196 - RNA, 19 nt, Artificial Sequence
  Description of Artificial Sequence: Synthetic oligonucleotide
  Sense strand starting at position 2729 of SEQ ID NO: 1243486
gguaaagaauucuugacua

SEQ ID NO: 1419197 - RNA, 19 nt, Artificial Sequence
  Description of Artificial Sequence: Synthetic oligonucleotide
  Antisense strand to SEQ ID NO: 1419196
uagucaagaauucuuuacc

SEQ ID NO: 1419198 - RNA, 19 nt, Artificial Sequence
  Description of Artificial Sequence: Synthetic oligonucleotide
  Sense strand starting at position 3361 of SEQ ID NO: 1243486
gguuaaacuucgucucuau

SEQ ID NO: 1419199 - RNA, 19 nt, Artificial Sequence
  Description of Artificial Sequence: Synthetic oligonucleotide
  Antisense strand to SEQ ID NO: 1419198
auagagacgaaguuuaacc

SEQ ID NO: 1419200 - RNA, 19 nt, Artificial Sequence
  Description of Artificial Sequence: Synthetic oligonucleotide
  Sense strand starting at position 3368 of SEQ ID NO: 1243486
cuucgucucuaugaaacau

SEQ ID NO: 1419201 - RNA, 19 nt, Artificial Sequence
  Description of Artificial Sequence: Synthetic oligonucleotide
  Antisense strand to SEQ ID NO: 1419200
auguuucauagagacgaag

SEQ ID NO: 1419202 - RNA, 19 nt, Artificial Sequence
  Description of Artificial Sequence: Synthetic oligonucleotide
  Sense strand starting at position 3762 of SEQ ID NO: 1243486
aagugcuaacuguggcuua

SEQ ID NO: 1419203 - RNA, 19 nt, Artificial Sequence
  Description of Artificial Sequence: Synthetic oligonucleotide
  Antisense strand to SEQ ID NO: 1419202
uaagccacaguuagcacuu

SEQ ID NO: 1419204 - RNA, 19 nt, Artificial Sequence
  Description of Artificial Sequence: Synthetic oligonucleotide
  Sense strand starting at position 3765 of SEQ ID NO: 1243486
ugcuaacuguggcuuacaa

SEQ ID NO: 1419205 - RNA, 19 nt, Artificial Sequence
  Description of Artificial Sequence: Synthetic oligonucleotide
  Antisense strand to SEQ ID NO: 1419204
uuguaagccacaguuagca

SEQ ID NO: 1419206 - RNA, 19 nt, Artificial Sequence
  Description of Artificial Sequence: Synthetic oligonucleotide
  Sense strand starting at position 3767 of SEQ ID NO: 1243486
cuaacuguggcuuacaaag

SEQ ID NO: 1419207 - RNA, 19 nt, Artificial Sequence
  Description of Artificial Sequence: Synthetic oligonucleotide
  Antisense strand to SEQ ID NO: 1419206
cuuuguaagccacaguuag

SEQ ID NO: 1419208 - RNA, 19 nt, Artificial Sequence
  Description of Artificial Sequence: Synthetic oligonucleotide
  Sense strand starting at position 3840 of SEQ ID NO: 1243486
cauugaucacucggcauca

SEQ ID NO: 1419209 - RNA, 19 nt, Artificial Sequence
  Description of Artificial Sequence: Synthetic oligonucleotide
  Antisense strand to SEQ ID NO: 1419208
ugaugccgagugaucaaug

SEQ ID NO: 1419210 - RNA, 19 nt, Artificial Sequence
  Description of Artificial Sequence: Synthetic oligonucleotide
  Sense strand starting at position 58 of SEQ ID NO: 1243487
gcuccaucccgaggaguug

SEQ ID NO: 1419211 - RNA, 19 nt, Artificial Sequence
  Description of Artificial Sequence: Synthetic oligonucleotide
  Antisense strand to SEQ ID NO: 1419210
caacuccucgggauggagc

SEQ ID NO: 1419212 - RNA, 19 nt, Artificial Sequence
  Description of Artificial Sequence: Synthetic oligonucleotide
  Sense strand starting at position 69 of SEQ ID NO: 1243487
aggaguugagaaugugcaa

SEQ ID NO: 1419213 - RNA, 19 nt, Artificial Sequence
  Description of Artificial Sequence: Synthetic oligonucleotide
  Antisense strand to SEQ ID NO: 1419212
uugcacauucucaacuccu

SEQ ID NO: 1419214 - RNA, 19 nt, Artificial Sequence
  Description of Artificial Sequence: Synthetic oligonucleotide
  Sense strand starting at position 488 of SEQ ID NO: 1243487
aguuguuucuaaguagaaa

SEQ ID NO: 1419215 - RNA, 19 nt, Artificial Sequence
  Description of Artificial Sequence: Synthetic oligonucleotide
  Antisense strand to SEQ ID NO: 1419214
uuucuacuuagaaacaacu

SEQ ID NO: 1419216 - RNA, 19 nt, Artificial Sequence
  Description of Artificial Sequence: Synthetic oligonucleotide
  Sense strand starting at position 528 of SEQ ID NO: 1243487
agcauuuacucaugggcaa

SEQ ID NO: 1419217 - RNA, 19 nt, Artificial Sequence
  Description of Artificial Sequence: Synthetic oligonucleotide
  Antisense strand to SEQ ID NO: 1419216
uugcccaugaguaaaugcu

SEQ ID NO: 1419218 - RNA, 19 nt, Artificial Sequence
  Description of Artificial Sequence: Synthetic oligonucleotide
  Sense strand starting at position 949 of SEQ ID NO: 1243487
uggacauauccuuaccugu

SEQ ID NO: 1419219 - RNA, 19 nt, Artificial Sequence
  Description of Artificial Sequence: Synthetic oligonucleotide
  Antisense strand to SEQ ID NO: 1419218
acagguaaggauaugucca

SEQ ID NO: 1419220 - RNA, 19 nt, Artificial Sequence
  Description of Artificial Sequence: Synthetic oligonucleotide
  Sense strand starting at position 956 of SEQ ID NO: 1243487
auccuuaccugugaagaug

SEQ ID NO: 1419221 - RNA, 19 nt, Artificial Sequence
  Description of Artificial Sequence: Synthetic oligonucleotide
  Antisense strand to SEQ ID NO: 1419220
caucuucacagguaaggau

SEQ ID NO: 1419222 - RNA, 19 nt, Artificial Sequence
  Description of Artificial Sequence: Synthetic oligonucleotide
  Sense strand starting at position 964 of SEQ ID NO: 1243487
cugugaagaugaugauacu

SEQ ID NO: 1419223 - RNA, 19 nt, Artificial Sequence
  Description of Artificial Sequence: Synthetic oligonucleotide
  Antisense strand to SEQ ID NO: 1419222
aguaucaucaucuucacag

SEQ ID NO: 1419224 - RNA, 19 nt, Artificial Sequence
  Description of Artificial Sequence: Synthetic oligonucleotide
  Sense strand starting at position 973 of SEQ ID NO: 1243487
ugaugauacucaggccuca

SEQ ID NO: 1419225 - RNA, 19 nt, Artificial Sequence
  Description of Artificial Sequence: Synthetic oligonucleotide
  Antisense strand to SEQ ID NO: 1419224
ugaggccugaguaucauca

SEQ ID NO: 1419226 - RNA, 19 nt, Artificial Sequence
  Description of Artificial Sequence: Synthetic oligonucleotide
  Sense strand starting at position 1021 of SEQ ID NO: 1243487
ucugaauaguaacucaagu

SEQ ID NO: 1419227 - RNA, 19 nt, Artificial Sequence
  Description of Artificial Sequence: Synthetic oligonucleotide
  Antisense strand to SEQ ID NO: 1419226
acuugaguuacuauucaga

SEQ ID NO: 1419228 - RNA, 19 nt, Artificial Sequence
  Description of Artificial Sequence: Synthetic oligonucleotide
  Sense strand starting at position 1057 of SEQ ID NO: 1243487
ccaagauccugacuuucga

SEQ ID NO: 1419229 - RNA, 19 nt, Artificial Sequence
  Description of Artificial Sequence: Synthetic oligonucleotide
  Antisense strand to SEQ ID NO: 1419228
ucgaaagucaggaucuugg

SEQ ID NO: 1419230 - RNA, 19 nt, Artificial Sequence
  Description of Artificial Sequence: Synthetic oligonucleotide
  Sense strand starting at position 1074 of SEQ ID NO: 1243487
gaagucuccugaggaagga

SEQ ID NO: 1419231 - RNA, 19 nt, Artificial Sequence
  Description of Artificial Sequence: Synthetic oligonucleotide
  Antisense strand to SEQ ID NO: 1419230
uccuuccucaggagacuuc

SEQ ID NO: 1419232 - RNA, 19 nt, Artificial Sequence
  Description of Artificial Sequence: Synthetic oligonucleotide
  Sense strand starting at position 1114 of SEQ ID NO: 1243487
gagacagcauuccugugua

SEQ ID NO: 1419233 - RNA, 19 nt, Artificial Sequence
  Description of Artificial Sequence: Synthetic oligonucleotide
  Antisense strand to SEQ ID NO: 1419232
uacacaggaaugcugucuc

SEQ ID NO: 1419234 - RNA, 19 nt, Artificial Sequence
  Description of Artificial Sequence: Synthetic oligonucleotide
  Sense strand starting at position 1117 of SEQ ID NO: 1243487
acagcauuccuguguagac

SEQ ID NO: 1419235 - RNA, 19 nt, Artificial Sequence
  Description of Artificial Sequence: Synthetic oligonucleotide
  Antisense strand to SEQ ID NO: 1419234
gucuacacaggaaugcugu

SEQ ID NO: 1419236 - RNA, 19 nt, Artificial Sequence
  Description of Artificial Sequence: Synthetic oligonucleotide
  Sense strand starting at position 1118 of SEQ ID NO: 1243487
cagcauuccuguguagaca

SEQ ID NO: 1419237 - RNA, 19 nt, Artificial Sequence
  Description of Artificial Sequence: Synthetic oligonucleotide
  Antisense strand to SEQ ID NO: 1419236
ugucuacacaggaaugcug

SEQ ID NO: 1419238 - RNA, 19 nt, Artificial Sequence
  Description of Artificial Sequence: Synthetic oligonucleotide
  Sense strand starting at position 2143 of SEQ ID NO: 1243487
auguguaguccgcaggagu

SEQ ID NO: 1419239 - RNA, 19 nt, Artificial Sequence
  Description of Artificial Sequence: Synthetic oligonucleotide
  Antisense strand to SEQ ID NO: 1419238
acuccugcggacuacacau

SEQ ID NO: 1419240 - RNA, 19 nt, Artificial Sequence
  Description of Artificial Sequence: Synthetic oligonucleotide
  Sense strand starting at position 2250 of SEQ ID NO: 1243487
cgggccucuccggagaaga

SEQ ID NO: 1419241 - RNA, 19 nt, Artificial Sequence
  Description of Artificial Sequence: Synthetic oligonucleotide
  Antisense strand to SEQ ID NO: 1419240
ucuucuccggagaggcccg

SEQ ID NO: 1419242 - RNA, 19 nt, Artificial Sequence
  Description of Artificial Sequence: Synthetic oligonucleotide
  Sense strand starting at position 2252 of SEQ ID NO: 1243487
ggccucuccggagaagaga

SEQ ID NO: 1419243 - RNA, 19 nt, Artificial Sequence
  Description of Artificial Sequence: Synthetic oligonucleotide
  Antisense strand to SEQ ID NO: 1419242
ucucuucuccggagaggcc

SEQ ID NO: 1419244 - RNA, 19 nt, Artificial Sequence
  Description of Artificial Sequence: Synthetic oligonucleotide
  Sense strand starting at position 2699 of SEQ ID NO: 1243487
gggcauggcacuuauuaua

SEQ ID NO: 1419245 - RNA, 19 nt, Artificial Sequence
  Description of Artificial Sequence: Synthetic oligonucleotide
  Antisense strand to SEQ ID NO: 1419244
uauaauaagugccaugccc

SEQ ID NO: 1419246 - RNA, 19 nt, Artificial Sequence
  Description of Artificial Sequence: Synthetic oligonucleotide
  Sense strand starting at position 2832 of SEQ ID NO: 1243487
gcuggauucccauaggcac

SEQ ID NO: 1419247 - RNA, 19 nt, Artificial Sequence
  Description of Artificial Sequence: Synthetic oligonucleotide
  Antisense strand to SEQ ID NO: 1419246
gugccuaugggaauccagc

SEQ ID NO: 1419248 - RNA, 19 nt, Artificial Sequence
  Description of Artificial Sequence: Synthetic oligonucleotide
  Sense strand starting at position 2865 of SEQ ID NO: 1243487
gguaguccagacuauguca

SEQ ID NO: 1419249 - RNA, 19 nt, Artificial Sequence
  Description of Artificial Sequence: Synthetic oligonucleotide
  Antisense strand to SEQ ID NO: 1419248
ugacauagucuggacuacc

SEQ ID NO: 1419250 - RNA, 19 nt, Artificial Sequence
  Description of Artificial Sequence: Synthetic oligonucleotide
  Sense strand starting at position 2872 of SEQ ID NO: 1243487
cagacuaugucaggaggaa

SEQ ID NO: 1419251 - RNA, 19 nt, Artificial Sequence
  Description of Artificial Sequence: Synthetic oligonucleotide
  Antisense strand to SEQ ID NO: 1419250
uuccuccugacauagucug

SEQ ID NO: 1419252 - RNA, 19 nt, Artificial Sequence
  Description of Artificial Sequence: Synthetic oligonucleotide
  Sense strand starting at position 2939 of SEQ ID NO: 1243487
gagcuuugaugccaggaua

SEQ ID NO: 1419253 - RNA, 19 nt, Artificial Sequence
  Description of Artificial Sequence: Synthetic oligonucleotide
  Antisense strand to SEQ ID NO: 1419252
uauccuggcaucaaagcuc

SEQ ID NO: 1419254 - RNA, 19 nt, Artificial Sequence
  Description of Artificial Sequence: Synthetic oligonucleotide
  Sense strand starting at position 2952 of SEQ ID NO: 1243487
aggauagaguuuggaguuu

SEQ ID NO: 1419255 - RNA, 19 nt, Artificial Sequence
  Description of Artificial Sequence: Synthetic oligonucleotide
  Antisense strand to SEQ ID NO: 1419254
aaacuccaaacucuauccu

SEQ ID NO: 1419256 - RNA, 19 nt, Artificial Sequence
  Description of Artificial Sequence: Synthetic oligonucleotide
  Sense strand starting at position 2958 of SEQ ID NO: 1243487
gaguuuggaguuuauuaug

SEQ ID NO: 1419257 - RNA, 19 nt, Artificial Sequence
  Description of Artificial Sequence: Synthetic oligonucleotide
  Antisense strand to SEQ ID NO: 1419256
cauaauaaacuccaaacuc

SEQ ID NO: 1419258 - RNA, 19 nt, Artificial Sequence
  Description of Artificial Sequence: Synthetic oligonucleotide
  Sense strand starting at position 2961 of SEQ ID NO: 1243487
uuuggaguuuauuaugaca

SEQ ID NO: 1419259 - RNA, 19 nt, Artificial Sequence
  Description of Artificial Sequence: Synthetic oligonucleotide
  Antisense strand to SEQ ID NO: 1419258
ugucauaauaaacuccaaa

SEQ ID NO: 1419260 - RNA, 19 nt, Artificial Sequence
  Description of Artificial Sequence: Synthetic oligonucleotide
  Sense strand starting at position 2963 of SEQ ID NO: 1243487
uggaguuuauuaugacagu

SEQ ID NO: 1419261 - RNA, 19 nt, Artificial Sequence
  Description of Artificial Sequence: Synthetic oligonucleotide
  Antisense strand to SEQ ID NO: 1419260
acugucauaauaaacucca

SEQ ID NO: 1419262 - RNA, 19 nt, Artificial Sequence
  Description of Artificial Sequence: Synthetic oligonucleotide
  Sense strand starting at position 2964 of SEQ ID NO: 1243487
ggaguuuauuaugacagua

SEQ ID NO: 1419263 - RNA, 19 nt, Artificial Sequence
  Description of Artificial Sequence: Synthetic oligonucleotide
  Antisense strand to SEQ ID NO: 1419262
uacugucauaauaaacucc

SEQ ID NO: 1419264 - RNA, 19 nt, Artificial Sequence
  Description of Artificial Sequence: Synthetic oligonucleotide
  Sense strand starting at position 2986 of SEQ ID NO: 1243487
ggaagucaauuaggagguu

SEQ ID NO: 1419265 - RNA, 19 nt, Artificial Sequence
  Description of Artificial Sequence: Synthetic oligonucleotide
  Antisense strand to SEQ ID NO: 1419264
aaccuccuaauugacuucc

SEQ ID NO: 1419266 - RNA, 19 nt, Artificial Sequence
  Description of Artificial Sequence: Synthetic oligonucleotide
  Sense strand starting at position 2987 of SEQ ID NO: 1243487
gaagucaauuaggagguuu

SEQ ID NO: 1419267 - RNA, 19 nt, Artificial Sequence
  Description of Artificial Sequence: Synthetic oligonucleotide
  Antisense strand to SEQ ID NO: 1419266
aaaccuccuaauugacuuc

SEQ ID NO: 1419268 - RNA, 19 nt, Artificial Sequence
  Description of Artificial Sequence: Synthetic oligonucleotide
  Sense strand starting at position 3329 of SEQ ID NO: 1243487
caaccugauguggguguua

SEQ ID NO: 1419269 - RNA, 19 nt, Artificial Sequence
  Description of Artificial Sequence: Synthetic oligonucleotide
  Antisense strand to SEQ ID NO: 1419268
uaacacccacaucagguug

SEQ ID NO: 1419270 - RNA, 19 nt, Artificial Sequence
  Description of Artificial Sequence: Synthetic oligonucleotide
  Sense strand starting at position 3353 of SEQ ID NO: 1243487
cugucucuggugcaguaua

SEQ ID NO: 1419271 - RNA, 19 nt, Artificial Sequence
  Description of Artificial Sequence: Synthetic oligonucleotide
  Antisense strand to SEQ ID NO: 1419270
uauacugcaccagagacag

SEQ ID NO: 1419272 - RNA, 19 nt, Artificial Sequence
  Description of Artificial Sequence: Synthetic oligonucleotide
  Sense strand starting at position 3363 of SEQ ID NO: 1243487
ugcaguauagaagauguau

SEQ ID NO: 1419273 - RNA, 19 nt, Artificial Sequence
  Description of Artificial Sequence: Synthetic oligonucleotide
  Antisense strand to SEQ ID NO: 1419272
auacaucuucuauacugca

SEQ ID NO: 1419274 - RNA, 19 nt, Artificial Sequence
  Description of Artificial Sequence: Synthetic oligonucleotide
  Sense strand starting at position 3405 of SEQ ID NO: 1243487
uugcuagaguccucaugag

SEQ ID NO: 1419275 - RNA, 19 nt, Artificial Sequence
  Description of Artificial Sequence: Synthetic oligonucleotide
  Antisense strand to SEQ ID NO: 1419274
cucaugaggacucuagcaa

SEQ ID NO: 1419276 - RNA, 19 nt, Artificial Sequence
  Description of Artificial Sequence: Synthetic oligonucleotide
  Sense strand starting at position 3409 of SEQ ID NO: 1243487
uagaguccucaugagcuaa

SEQ ID NO: 1419277 - RNA, 19 nt, Artificial Sequence
  Description of Artificial Sequence: Synthetic oligonucleotide
  Antisense strand to SEQ ID NO: 1419276
uuagcucaugaggacucua

SEQ ID NO: 1419278 - RNA, 19 nt, Artificial Sequence
  Description of Artificial Sequence: Synthetic oligonucleotide
  Sense strand starting at position 3411 of SEQ ID NO: 1243487
gaguccucaugagcuaaca

SEQ ID NO: 1419279 - RNA, 19 nt, Artificial Sequence
  Description of Artificial Sequence: Synthetic oligonucleotide
  Antisense strand to SEQ ID NO: 1419278
uguuagcucaugaggacuc

SEQ ID NO: 1419280 - RNA, 19 nt, Artificial Sequence
  Description of Artificial Sequence: Synthetic oligonucleotide
  Sense strand starting at position 3497 of SEQ ID NO: 1243487
ccaaguguauuagaugaug

SEQ ID NO: 1419281 - RNA, 19 nt, Artificial Sequence
  Description of Artificial Sequence: Synthetic oligonucleotide
  Antisense strand to SEQ ID NO: 1419280
caucaucuaauacacuugg

SEQ ID NO: 1419282 - RNA, 19 nt, Artificial Sequence
  Description of Artificial Sequence: Synthetic oligonucleotide
  Sense strand starting at position 3499 of SEQ ID NO: 1243487
aaguguauuagaugaugga

SEQ ID NO: 1419283 - RNA, 19 nt, Artificial Sequence
  Description of Artificial Sequence: Synthetic oligonucleotide
  Antisense strand to SEQ ID NO: 1419282
uccaucaucuaauacacuu

SEQ ID NO: 1419284 - RNA, 19 nt, Artificial Sequence
  Description of Artificial Sequence: Synthetic oligonucleotide
  Sense strand starting at position 3503 of SEQ ID NO: 1243487
guauuagaugauggacagu

SEQ ID NO: 1419285 - RNA, 19 nt, Artificial Sequence
  Description of Artificial Sequence: Synthetic oligonucleotide
  Antisense strand to SEQ ID NO: 1419284
acuguccaucaucuaauac

SEQ ID NO: 1419286 - RNA, 19 nt, Artificial Sequence
  Description of Artificial Sequence: Synthetic oligonucleotide
  Sense strand starting at position 3517 of SEQ ID NO: 1243487
acaguuguggcaugaacga

SEQ ID NO: 1419287 - RNA, 19 nt, Artificial Sequence
  Description of Artificial Sequence: Synthetic oligonucleotide
  Antisense strand to SEQ ID NO: 1419286
ucguucaugccacaacugu

SEQ ID NO: 1419288 - RNA, 19 nt, Artificial Sequence
  Description of Artificial Sequence: Synthetic oligonucleotide
  Sense strand starting at position 3777 of SEQ ID NO: 1243487
acauccgugccaugaggaa

SEQ ID NO: 1419289 - RNA, 19 nt, Artificial Sequence
  Description of Artificial Sequence: Synthetic oligonucleotide
  Antisense strand to SEQ ID NO: 1419288
uuccucauggcacggaugu

SEQ ID NO: 1419290 - RNA, 19 nt, Artificial Sequence
  Description of Artificial Sequence: Synthetic oligonucleotide
  Sense strand starting at position 61 of SEQ ID NO: 1243488
aauccugugcuggguaaca

SEQ ID NO: 1419291 - RNA, 19 nt, Artificial Sequence
  Description of Artificial Sequence: Synthetic oligonucleotide
  Antisense strand to SEQ ID NO: 1419290
uguuacccagcacaggauu

SEQ ID NO: 1419292 - RNA, 19 nt, Artificial Sequence
  Description of Artificial Sequence: Synthetic oligonucleotide
  Sense strand starting at position 63 of SEQ ID NO: 1243488
uccugugcuggguaacaau

SEQ ID NO: 1419293 - RNA, 19 nt, Artificial Sequence
  Description of Artificial Sequence: Synthetic oligonucleotide
  Antisense strand to SEQ ID NO: 1419292
auuguuacccagcacagga

SEQ ID NO: 1419294 - RNA, 19 nt, Artificial Sequence
  Description of Artificial Sequence: Synthetic oligonucleotide
  Sense strand starting at position 72 of SEQ ID NO: 1243488
ggguaacaauucucuuucu

SEQ ID NO: 1419295 - RNA, 19 nt, Artificial Sequence
  Description of Artificial Sequence: Synthetic oligonucleotide
  Antisense strand to SEQ ID NO: 1419294
agaaagagaauuguuaccc

SEQ ID NO: 1419296 - RNA, 19 nt, Artificial Sequence
  Description of Artificial Sequence: Synthetic oligonucleotide
  Sense strand starting at position 619 of SEQ ID NO: 1243488
gcagcagacccugaagagu

SEQ ID NO: 1419297 - RNA, 19 nt, Artificial Sequence
  Description of Artificial Sequence: Synthetic oligonucleotide
  Antisense strand to SEQ ID NO: 1419296
acucuucagggucugcugc

SEQ ID NO: 1419298 - RNA, 19 nt, Artificial Sequence
  Description of Artificial Sequence: Synthetic oligonucleotide
  Sense strand starting at position 630 of SEQ ID NO: 1243488
ugaagaguuuaggugggau

SEQ ID NO: 1419299 - RNA, 19 nt, Artificial Sequence
  Description of Artificial Sequence: Synthetic oligonucleotide
  Antisense strand to SEQ ID NO: 1419298
aucccaccuaaacucuuca

SEQ ID NO: 1419300 - RNA, 19 nt, Artificial Sequence
  Description of Artificial Sequence: Synthetic oligonucleotide
  Sense strand starting at position 642 of SEQ ID NO: 1243488
gugggauugggugguguuu

SEQ ID NO: 1419301 - RNA, 19 nt, Artificial Sequence
  Description of Artificial Sequence: Synthetic oligonucleotide
  Antisense strand to SEQ ID NO: 1419300
aaacaccacccaaucccac

SEQ ID NO: 1419302 - RNA, 19 nt, Artificial Sequence
  Description of Artificial Sequence: Synthetic oligonucleotide
  Sense strand starting at position 737 of SEQ ID NO: 1243488
auacaagagcugugucaag

SEQ ID NO: 1419303 - RNA, 19 nt, Artificial Sequence
  Description of Artificial Sequence: Synthetic oligonucleotide
  Antisense strand to SEQ ID NO: 1419302
cuugacacagcucuuguau

SEQ ID NO: 1419304 - RNA, 19 nt, Artificial Sequence
  Description of Artificial Sequence: Synthetic oligonucleotide
  Sense strand starting at position 801 of SEQ ID NO: 1243488
ugggcuguaucauucccau

SEQ ID NO: 1419305 - RNA, 19 nt, Artificial Sequence
  Description of Artificial Sequence: Synthetic oligonucleotide
  Antisense strand to SEQ ID NO: 1419304
augggaaugauacagccca

SEQ ID NO: 1419306 - RNA, 19 nt, Artificial Sequence
  Description of Artificial Sequence: Synthetic oligonucleotide
  Sense strand starting at position 807 of SEQ ID NO: 1243488
guaucauucccauguuuga

SEQ ID NO: 1419307 - RNA, 19 nt, Artificial Sequence
  Description of Artificial Sequence: Synthetic oligonucleotide
  Antisense strand to SEQ ID NO: 1419306
ucaaacaugggaaugauac

SEQ ID NO: 1419308 - RNA, 19 nt, Artificial Sequence
  Description of Artificial Sequence: Synthetic oligonucleotide
  Sense strand starting at position 810 of SEQ ID NO: 1243488
ucauucccauguuugagau

SEQ ID NO: 1419309 - RNA, 19 nt, Artificial Sequence
  Description of Artificial Sequence: Synthetic oligonucleotide
  Antisense strand to SEQ ID NO: 1419308
aucucaaacaugggaauga

SEQ ID NO: 1419310 - RNA, 19 nt, Artificial Sequence
  Description of Artificial Sequence: Synthetic oligonucleotide
  Sense strand starting at position 820 of SEQ ID NO: 1243488
guuugagauauauaagcug

SEQ ID NO: 1419311 - RNA, 19 nt, Artificial Sequence
  Description of Artificial Sequence: Synthetic oligonucleotide
  Antisense strand to SEQ ID NO: 1419310
cagcuuauauaucucaaac

SEQ ID NO: 1419312 - RNA, 19 nt, Artificial Sequence
  Description of Artificial Sequence: Synthetic oligonucleotide
  Sense strand starting at position 933 of SEQ ID NO: 1243488
gcugauggagcuggucaua

SEQ ID NO: 1419313 - RNA, 19 nt, Artificial Sequence
  Description of Artificial Sequence: Synthetic oligonucleotide
  Antisense strand to SEQ ID NO: 1419312
uaugaccagcuccaucagc

SEQ ID NO: 1419314 - RNA, 19 nt, Artificial Sequence
  Description of Artificial Sequence: Synthetic oligonucleotide
  Sense strand starting at position 968 of SEQ ID NO: 1243488
ggcuauacaccugaguaca

SEQ ID NO: 1419315 - RNA, 19 nt, Artificial Sequence
  Description of Artificial Sequence: Synthetic oligonucleotide
  Antisense strand to SEQ ID NO: 1419314
uguacucagguguauagcc

SEQ ID NO: 1419316 - RNA, 19 nt, Artificial Sequence
  Description of Artificial Sequence: Synthetic oligonucleotide
  Sense strand starting at position 1004 of SEQ ID NO: 1243488
ggaugaucucuccaggcuu

SEQ ID NO: 1419317 - RNA, 19 nt, Artificial Sequence
  Description of Artificial Sequence: Synthetic oligonucleotide
  Antisense strand to SEQ ID NO: 1419316
aagccuggagagaucaucc

SEQ ID NO: 1419318 - RNA, 19 nt, Artificial Sequence
  Description of Artificial Sequence: Synthetic oligonucleotide
  Sense strand starting at position 1129 of SEQ ID NO: 1243488
cccaguuugagaggucgaa

SEQ ID NO: 1419319 - RNA, 19 nt, Artificial Sequence
  Description of Artificial Sequence: Synthetic oligonucleotide
  Antisense strand to SEQ ID NO: 1419318
uucgaccucucaaacuggg

SEQ ID NO: 1419320 - RNA, 19 nt, Artificial Sequence
  Description of Artificial Sequence: Synthetic oligonucleotide
  Sense strand starting at position 2092 of SEQ ID NO: 1243488
auggcugaggacgguuaua

SEQ ID NO: 1419321 - RNA, 19 nt, Artificial Sequence
  Description of Artificial Sequence: Synthetic oligonucleotide
  Antisense strand to SEQ ID NO: 1419320
uauaaccguccucagccau

SEQ ID NO: 1419322 - RNA, 19 nt, Artificial Sequence
  Description of Artificial Sequence: Synthetic oligonucleotide
  Sense strand starting at position 2174 of SEQ ID NO: 1243488
ggguauggaguucgaaaug

SEQ ID NO: 1419323 - RNA, 19 nt, Artificial Sequence
  Description of Artificial Sequence: Synthetic oligonucleotide
  Antisense strand to SEQ ID NO: 1419322
cauuucgaacuccauaccc

SEQ ID NO: 1419324 - RNA, 19 nt, Artificial Sequence
  Description of Artificial Sequence: Synthetic oligonucleotide
  Sense strand starting at position 2179 of SEQ ID NO: 1243488
uggaguucgaaauguggua

SEQ ID NO: 1419325 - RNA, 19 nt, Artificial Sequence
  Description of Artificial Sequence: Synthetic oligonucleotide
  Antisense strand to SEQ ID NO: 1419324
uaccacauuucgaacucca

SEQ ID NO: 1419326 - RNA, 19 nt, Artificial Sequence
  Description of Artificial Sequence: Synthetic oligonucleotide
  Sense strand starting at position 2748 of SEQ ID NO: 1243488
ccuguucucuguccugaga

SEQ ID NO: 1419327 - RNA, 19 nt, Artificial Sequence
  Description of Artificial Sequence: Synthetic oligonucleotide
  Antisense strand to SEQ ID NO: 1419326
ucucaggacagagaacagg

SEQ ID NO: 1419328 - RNA, 19 nt, Artificial Sequence
  Description of Artificial Sequence: Synthetic oligonucleotide
  Sense strand starting at position 2765 of SEQ ID NO: 1243488
gacaccugccgucaagaga

SEQ ID NO: 1419329 - RNA, 19 nt, Artificial Sequence
  Description of Artificial Sequence: Synthetic oligonucleotide
  Antisense strand to SEQ ID NO: 1419328
ucucuugacggcagguguc

SEQ ID NO: 1419330 - RNA, 19 nt, Artificial Sequence
  Description of Artificial Sequence: Synthetic oligonucleotide
  Sense strand starting at position 2914 of SEQ ID NO: 1243488
cuaccauuagcgugagacu

SEQ ID NO: 1419331 - RNA, 19 nt, Artificial Sequence
  Description of Artificial Sequence: Synthetic oligonucleotide
  Antisense strand to SEQ ID NO: 1419330
agucucacgcuaaugguag

SEQ ID NO: 1419332 - RNA, 19 nt, Artificial Sequence
  Description of Artificial Sequence: Synthetic oligonucleotide
  Sense strand starting at position 2974 of SEQ ID NO: 1243488
ggguuccgugcuagaguuu

SEQ ID NO: 1419333 - RNA, 19 nt, Artificial Sequence
  Description of Artificial Sequence: Synthetic oligonucleotide
  Antisense strand to SEQ ID NO: 1419332
aaacucuagcacggaaccc

SEQ ID NO: 1419334 - RNA, 19 nt, Artificial Sequence
  Description of Artificial Sequence: Synthetic oligonucleotide
  Sense strand starting at position 3042 of SEQ ID NO: 1243488
gugggcugccuggauucua

SEQ ID NO: 1419335 - RNA, 19 nt, Artificial Sequence
  Description of Artificial Sequence: Synthetic oligonucleotide
  Antisense strand to SEQ ID NO: 1419334
uagaauccaggcagcccac

SEQ ID NO: 1419336 - RNA, 19 nt, Artificial Sequence
  Description of Artificial Sequence: Synthetic oligonucleotide
  Sense strand starting at position 3078 of SEQ ID NO: 1243488
acuugaguaucucucacau

SEQ ID NO: 1419337 - RNA, 19 nt, Artificial Sequence
  Description of Artificial Sequence: Synthetic oligonucleotide
  Antisense strand to SEQ ID NO: 1419336
augugagagauacucaagu

SEQ ID NO: 1419338 - RNA, 19 nt, Artificial Sequence
  Description of Artificial Sequence: Synthetic oligonucleotide
  Sense strand starting at position 3203 of SEQ ID NO: 1243488
uaaugauuccucggccugu

SEQ ID NO: 1419339 - RNA, 19 nt, Artificial Sequence
  Description of Artificial Sequence: Synthetic oligonucleotide
  Antisense strand to SEQ ID NO: 1419338
acaggccgaggaaucauua

SEQ ID NO: 1419340 - RNA, 19 nt, Artificial Sequence
  Description of Artificial Sequence: Synthetic oligonucleotide
  Sense strand starting at position 3246 of SEQ ID NO: 1243488
ggaguggaguugucaugga

SEQ ID NO: 1419341 - RNA, 19 nt, Artificial Sequence
  Description of Artificial Sequence: Synthetic oligonucleotide
  Antisense strand to SEQ ID NO: 1419340
uccaugacaacuccacucc

SEQ ID NO: 1419342 - RNA, 19 nt, Artificial Sequence
  Description of Artificial Sequence: Synthetic oligonucleotide
  Sense strand starting at position 3251 of SEQ ID NO: 1243488
ggaguugucauggaggagu

SEQ ID NO: 1419343 - RNA, 19 nt, Artificial Sequence
  Description of Artificial Sequence: Synthetic oligonucleotide
  Antisense strand to SEQ ID NO: 1419342
acuccuccaugacaacucc

SEQ ID NO: 1419344 - RNA, 19 nt, Artificial Sequence
  Description of Artificial Sequence: Synthetic oligonucleotide
  Sense strand starting at position 3296 of SEQ ID NO: 1243488
gcauuuccuucugcugaaa

SEQ ID NO: 1419345 - RNA, 19 nt, Artificial Sequence
  Description of Artificial Sequence: Synthetic oligonucleotide
  Antisense strand to SEQ ID NO: 1419344
uuucagcagaaggaaaugc

SEQ ID NO: 1419346 - RNA, 19 nt, Artificial Sequence
  Description of Artificial Sequence: Synthetic oligonucleotide
  Sense strand starting at position 3421 of SEQ ID NO: 1243488
aagugaagauugucagcaa

SEQ ID NO: 1419347 - RNA, 19 nt, Artificial Sequence
  Description of Artificial Sequence: Synthetic oligonucleotide
  Antisense strand to SEQ ID NO: 1419346
uugcugacaaucuucacuu

SEQ ID NO: 1419348 - RNA, 19 nt, Artificial Sequence
  Description of Artificial Sequence: Synthetic oligonucleotide
  Sense strand starting at position 3424 of SEQ ID NO: 1243488
ugaagauugucagcaaagg

SEQ ID NO: 1419349 - RNA, 19 nt, Artificial Sequence
  Description of Artificial Sequence: Synthetic oligonucleotide
  Antisense strand to SEQ ID NO: 1419348
ccuuugcugacaaucuuca

SEQ ID NO: 1419350 - RNA, 19 nt, Artificial Sequence
  Description of Artificial Sequence: Synthetic oligonucleotide
  Sense strand starting at position 3472 of SEQ ID NO: 1243488
cucuuucccugaucaugga

SEQ ID NO: 1419351 - RNA, 19 nt, Artificial Sequence
  Description of Artificial Sequence: Synthetic oligonucleotide
  Antisense strand to SEQ ID NO: 1419350
uccaugaucagggaaagag

SEQ ID NO: 1419352 - RNA, 19 nt, Artificial Sequence
  Description of Artificial Sequence: Synthetic oligonucleotide
  Sense strand starting at position 3494 of SEQ ID NO: 1243488
gaucccuguggucagaguu

SEQ ID NO: 1419353 - RNA, 19 nt, Artificial Sequence
  Description of Artificial Sequence: Synthetic oligonucleotide
  Antisense strand to SEQ ID NO: 1419352
aacucugaccacagggauc

SEQ ID NO: 1419354 - RNA, 19 nt, Artificial Sequence
  Description of Artificial Sequence: Synthetic oligonucleotide
  Sense strand starting at position 3528 of SEQ ID NO: 1243488
gcacuuguugcugauguga

SEQ ID NO: 1419355 - RNA, 19 nt, Artificial Sequence
  Description of Artificial Sequence: Synthetic oligonucleotide
  Antisense strand to SEQ ID NO: 1419354
ucacaucagcaacaagugc

SEQ ID NO: 1419356 - RNA, 19 nt, Artificial Sequence
  Description of Artificial Sequence: Synthetic oligonucleotide
  Sense strand starting at position 3671 of SEQ ID NO: 1243488
gauguaauuugauaccuag

SEQ ID NO: 1419357 - RNA, 19 nt, Artificial Sequence
  Description of Artificial Sequence: Synthetic oligonucleotide
  Antisense strand to SEQ ID NO: 1419356
cuagguaucaaauuacauc

SEQ ID NO: 1419358 - RNA, 19 nt, Artificial Sequence
  Description of Artificial Sequence: Synthetic oligonucleotide
  Sense strand starting at position 3739 of SEQ ID NO: 1243488
aauggaguuucccucauga

SEQ ID NO: 1419359 - RNA, 19 nt, Artificial Sequence
  Description of Artificial Sequence: Synthetic oligonucleotide
  Antisense strand to SEQ ID NO: 1419358
ucaugagggaaacuccauu

SEQ ID NO: 1419360 - RNA, 19 nt, Artificial Sequence
  Description of Artificial Sequence: Synthetic oligonucleotide
  Sense strand starting at position 3741 of SEQ ID NO: 1243488
uggaguuucccucaugagc

SEQ ID NO: 1419361 - RNA, 19 nt, Artificial Sequence
  Description of Artificial Sequence: Synthetic oligonucleotide
  Antisense strand to SEQ ID NO: 1419360
gcucaugagggaaacucca

SEQ ID NO: 1419362 - RNA, 19 nt, Artificial Sequence
  Description of Artificial Sequence: Synthetic oligonucleotide
  Sense strand starting at position 3866 of SEQ ID NO: 1243488
aguagagucuuugcagcau

SEQ ID NO: 1419363 - RNA, 19 nt, Artificial Sequence
  Description of Artificial Sequence: Synthetic oligonucleotide
  Antisense strand to SEQ ID NO: 1419362
augcugcaaagacucuacu

SEQ ID NO: 1419364 - RNA, 19 nt, Artificial Sequence
  Description of Artificial Sequence: Synthetic oligonucleotide
  Sense strand starting at position 3911 of SEQ ID NO: 1243488
cugucaucucaggguaaac

SEQ ID NO: 1419365 - RNA, 19 nt, Artificial Sequence
  Description of Artificial Sequence: Synthetic oligonucleotide
  Antisense strand to SEQ ID NO: 1419364
guuuacccugagaugacag

SEQ ID NO: 1419366 - RNA, 19 nt, Artificial Sequence
  Description of Artificial Sequence: Synthetic oligonucleotide
  Sense strand starting at position 3931 of SEQ ID NO: 1243488
gcauacacaugaucagaau

SEQ ID NO: 1419367 - RNA, 19 nt, Artificial Sequence
  Description of Artificial Sequence: Synthetic oligonucleotide
  Antisense strand to SEQ ID NO: 1419366
auucugaucauguguaugc

SEQ ID NO: 1419368 - RNA, 19 nt, Artificial Sequence
  Description of Artificial Sequence: Synthetic oligonucleotide
  Sense strand starting at position 3954 of SEQ ID NO: 1243488
ugaccuugcugcucauaaa

SEQ ID NO: 1419369 - RNA, 19 nt, Artificial Sequence
  Description of Artificial Sequence: Synthetic oligonucleotide
  Antisense strand to SEQ ID NO: 1419368
uuuaugagcagcaagguca

SEQ ID NO: 1419370 - RNA, 19 nt, Artificial Sequence
  Description of Artificial Sequence: Synthetic oligonucleotide
  Sense strand starting at position 91 of SEQ ID NO: 1243489
agaggaaaguggccucuaa

SEQ ID NO: 1419371 - RNA, 19 nt, Artificial Sequence
  Description of Artificial Sequence: Synthetic oligonucleotide
  Antisense strand to SEQ ID NO: 1419370
uuagaggccacuuuccucu

SEQ ID NO: 1419372 - RNA, 19 nt, Artificial Sequence
  Description of Artificial Sequence: Synthetic oligonucleotide
  Sense strand starting at position 95 of SEQ ID NO: 1243489
gaaaguggccucuaaguga

SEQ ID NO: 1419373 - RNA, 19 nt, Artificial Sequence
  Description of Artificial Sequence: Synthetic oligonucleotide
  Antisense strand to SEQ ID NO: 1419372
ucacuuagaggccacuuuc

SEQ ID NO: 1419374 - RNA, 19 nt, Artificial Sequence
  Description of Artificial Sequence: Synthetic oligonucleotide
  Sense strand starting at position 102 of SEQ ID NO: 1243489
gccucuaagugagcucaga

SEQ ID NO: 1419375 - RNA, 19 nt, Artificial Sequence
  Description of Artificial Sequence: Synthetic oligonucleotide
  Antisense strand to SEQ ID NO: 1419374
ucugagcucacuuagaggc

SEQ ID NO: 1419376 - RNA, 19 nt, Artificial Sequence
  Description of Artificial Sequence: Synthetic oligonucleotide
  Sense strand starting at position 322 of SEQ ID NO: 1243489
uuuaaacuuccgcagcaaa

SEQ ID NO: 1419377 - RNA, 19 nt, Artificial Sequence
  Description of Artificial Sequence: Synthetic oligonucleotide
  Antisense strand to SEQ ID NO: 1419376
uuugcugcggaaguuuaaa

SEQ ID NO: 1419378 - RNA, 19 nt, Artificial Sequence
  Description of Artificial Sequence: Synthetic oligonucleotide
  Sense strand starting at position 566 of SEQ ID NO: 1243489
ccuccuuugcugcgaaaca

SEQ ID NO: 1419379 - RNA, 19 nt, Artificial Sequence
  Description of Artificial Sequence: Synthetic oligonucleotide
  Antisense strand to SEQ ID NO: 1419378
uguuucgcagcaaaggagg

SEQ ID NO: 1419380 - RNA, 19 nt, Artificial Sequence
  Description of Artificial Sequence: Synthetic oligonucleotide
  Sense strand starting at position 621 of SEQ ID NO: 1243489
gccucuuuagaucagcaau

SEQ ID NO: 1419381 - RNA, 19 nt, Artificial Sequence
  Description of Artificial Sequence: Synthetic oligonucleotide
  Antisense strand to SEQ ID NO: 1419380
auugcugaucuaaagaggc

SEQ ID NO: 1419382 - RNA, 19 nt, Artificial Sequence
  Description of Artificial Sequence: Synthetic oligonucleotide
  Sense strand starting at position 850 of SEQ ID NO: 1243489
gucugucggcaggaaacau

SEQ ID NO: 1419383 - RNA, 19 nt, Artificial Sequence
  Description of Artificial Sequence: Synthetic oligonucleotide
  Antisense strand to SEQ ID NO: 1419382
auguuuccugccgacagac

SEQ ID NO: 1419384 - RNA, 19 nt, Artificial Sequence
  Description of Artificial Sequence: Synthetic oligonucleotide
  Sense strand starting at position 865 of SEQ ID NO: 1243489
acaugaugcugggagcaua

SEQ ID NO: 1419385 - RNA, 19 nt, Artificial Sequence
  Description of Artificial Sequence: Synthetic oligonucleotide
  Antisense strand to SEQ ID NO: 1419384
uaugcucccagcaucaugu

SEQ ID NO: 1419386 - RNA, 19 nt, Artificial Sequence
  Description of Artificial Sequence: Synthetic oligonucleotide
  Sense strand starting at position 1145 of SEQ ID NO: 1243489
gggauaaguucaggagcca

SEQ ID NO: 1419387 - RNA, 19 nt, Artificial Sequence
  Description of Artificial Sequence: Synthetic oligonucleotide
  Antisense strand to SEQ ID NO: 1419386
uggcuccugaacuuauccc

SEQ ID NO: 1419388 - RNA, 19 nt, Artificial Sequence
  Description of Artificial Sequence: Synthetic oligonucleotide
  Sense strand starting at position 1189 of SEQ ID NO: 1243489
cggagaauggccuagcuaa

SEQ ID NO: 1419389 - RNA, 19 nt, Artificial Sequence
  Description of Artificial Sequence: Synthetic oligonucleotide
  Antisense strand to SEQ ID NO: 1419388
uuagcuaggccauucuccg

SEQ ID NO: 1419390 - RNA, 19 nt, Artificial Sequence
  Description of Artificial Sequence: Synthetic oligonucleotide
  Sense strand starting at position 1292 of SEQ ID NO: 1243489
ccuggagcauguguuuauu

SEQ ID NO: 1419391 - RNA, 19 nt, Artificial Sequence
  Description of Artificial Sequence: Synthetic oligonucleotide
  Antisense strand to SEQ ID NO: 1419390
aauaaacacaugcuccagg

SEQ ID NO: 1419392 - RNA, 19 nt, Artificial Sequence
  Description of Artificial Sequence: Synthetic oligonucleotide
  Sense strand starting at position 1410 of SEQ ID NO: 1243489
uggaugugggugcgacaua

SEQ ID NO: 1419393 - RNA, 19 nt, Artificial Sequence
  Description of Artificial Sequence: Synthetic oligonucleotide
  Antisense strand to SEQ ID NO: 1419392
uaugucgcacccacaucca

SEQ ID NO: 1419394 - RNA, 19 nt, Artificial Sequence
  Description of Artificial Sequence: Synthetic oligonucleotide
  Sense strand starting at position 2500 of SEQ ID NO: 1243489
augagugacccugagaguu

SEQ ID NO: 1419395 - RNA, 19 nt, Artificial Sequence
  Description of Artificial Sequence: Synthetic oligonucleotide
  Antisense strand to SEQ ID NO: 1419394
aacucucagggucacucau

SEQ ID NO: 1419396 - RNA, 19 nt, Artificial Sequence
  Description of Artificial Sequence: Synthetic oligonucleotide
  Sense strand starting at position 2529 of SEQ ID NO: 1243489
gucuaaagcauugguuugu

SEQ ID NO: 1419397 - RNA, 19 nt, Artificial Sequence
  Description of Artificial Sequence: Synthetic oligonucleotide
  Antisense strand to SEQ ID NO: 1419396
acaaaccaaugcuuuagac

SEQ ID NO: 1419398 - RNA, 19 nt, Artificial Sequence
  Description of Artificial Sequence: Synthetic oligonucleotide
  Sense strand starting at position 2593 of SEQ ID NO: 1243489
cguucuuguagcgaauuaa

SEQ ID NO: 1419399 - RNA, 19 nt, Artificial Sequence
  Description of Artificial Sequence: Synthetic oligonucleotide
  Antisense strand to SEQ ID NO: 1419398
uuaauucgcuacaagaacg

SEQ ID NO: 1419400 - RNA, 19 nt, Artificial Sequence
  Description of Artificial Sequence: Synthetic oligonucleotide
  Sense strand starting at position 2636 of SEQ ID NO: 1243489
uuuccuuuccgagagguaa

SEQ ID NO: 1419401 - RNA, 19 nt, Artificial Sequence
  Description of Artificial Sequence: Synthetic oligonucleotide
  Antisense strand to SEQ ID NO: 1419400
uuaccucucggaaaggaaa

SEQ ID NO: 1419402 - RNA, 19 nt, Artificial Sequence
  Description of Artificial Sequence: Synthetic oligonucleotide
  Sense strand starting at position 2638 of SEQ ID NO: 1243489
uccuuuccgagagguaacu

SEQ ID NO: 1419403 - RNA, 19 nt, Artificial Sequence
  Description of Artificial Sequence: Synthetic oligonucleotide
  Antisense strand to SEQ ID NO: 1419402
aguuaccucucggaaagga

SEQ ID NO: 1419404 - RNA, 19 nt, Artificial Sequence
  Description of Artificial Sequence: Synthetic oligonucleotide
  Sense strand starting at position 2737 of SEQ ID NO: 1243489
uuuguaaucuaaucgcuuu

SEQ ID NO: 1419405 - RNA, 19 nt, Artificial Sequence
  Description of Artificial Sequence: Synthetic oligonucleotide
  Antisense strand to SEQ ID NO: 1419404
aaagcgauuagauuacaaa

SEQ ID NO: 1419406 - RNA, 19 nt, Artificial Sequence
  Description of Artificial Sequence: Synthetic oligonucleotide
  Sense strand starting at position 2762 of SEQ ID NO: 1243489
aaaucaugcugcgcgagua

SEQ ID NO: 1419407 - RNA, 19 nt, Artificial Sequence
  Description of Artificial Sequence: Synthetic oligonucleotide
  Antisense strand to SEQ ID NO: 1419406
uacucgcgcagcaugauuu

SEQ ID NO: 1419408 - RNA, 19 nt, Artificial Sequence
  Description of Artificial Sequence: Synthetic oligonucleotide
  Sense strand starting at position 2786 of SEQ ID NO: 1243489
cugauuugucguugucacu

SEQ ID NO: 1419409 - RNA, 19 nt, Artificial Sequence
  Description of Artificial Sequence: Synthetic oligonucleotide
  Antisense strand to SEQ ID NO: 1419408
agugacaacgacaaaucag

SEQ ID NO: 1419410 - RNA, 19 nt, Artificial Sequence
  Description of Artificial Sequence: Synthetic oligonucleotide
  Sense strand starting at position 2821 of SEQ ID NO: 1243489
acgcuucauggugaugaua

SEQ ID NO: 1419411 - RNA, 19 nt, Artificial Sequence
  Description of Artificial Sequence: Synthetic oligonucleotide
  Antisense strand to SEQ ID NO: 1419410
uaucaucaccaugaagcgu

SEQ ID NO: 1419412 - RNA, 19 nt, Artificial Sequence
  Description of Artificial Sequence: Synthetic oligonucleotide
  Sense strand starting at position 2902 of SEQ ID NO: 1243489
guauuuagguucuugccau

SEQ ID NO: 1419413 - RNA, 19 nt, Artificial Sequence
  Description of Artificial Sequence: Synthetic oligonucleotide
  Antisense strand to SEQ ID NO: 1419412
auggcaagaaccuaaauac

SEQ ID NO: 1419414 - RNA, 19 nt, Artificial Sequence
  Description of Artificial Sequence: Synthetic oligonucleotide
  Sense strand starting at position 2933 of SEQ ID NO: 1243489
uagaaauaguucuguggag

SEQ ID NO: 1419415 - RNA, 19 nt, Artificial Sequence
  Description of Artificial Sequence: Synthetic oligonucleotide
  Antisense strand to SEQ ID NO: 1419414
cuccacagaacuauuucua

SEQ ID NO: 1419416 - RNA, 19 nt, Artificial Sequence
  Description of Artificial Sequence: Synthetic oligonucleotide
  Sense strand starting at position 2934 of SEQ ID NO: 1243489
agaaauaguucuguggaga

SEQ ID NO: 1419417 - RNA, 19 nt, Artificial Sequence
  Description of Artificial Sequence: Synthetic oligonucleotide
  Antisense strand to SEQ ID NO: 1419416
ucuccacagaacuauuucu

SEQ ID NO: 1419418 - RNA, 19 nt, Artificial Sequence
  Description of Artificial Sequence: Synthetic oligonucleotide
  Sense strand starting at position 2935 of SEQ ID NO: 1243489
gaaauaguucuguggagaa

SEQ ID NO: 1419419 - RNA, 19 nt, Artificial Sequence
  Description of Artificial Sequence: Synthetic oligonucleotide
  Antisense strand to SEQ ID NO: 1419418
uucuccacagaacuauuuc

SEQ ID NO: 1419420 - RNA, 19 nt, Artificial Sequence
  Description of Artificial Sequence: Synthetic oligonucleotide
  Sense strand starting at position 2971 of SEQ ID NO: 1243489
uugguuugcccucagguga

SEQ ID NO: 1419421 - RNA, 19 nt, Artificial Sequence
  Description of Artificial Sequence: Synthetic oligonucleotide
  Antisense strand to SEQ ID NO: 1419420
ucaccugagggcaaaccaa

SEQ ID NO: 1419422 - RNA, 19 nt, Artificial Sequence
  Description of Artificial Sequence: Synthetic oligonucleotide
  Sense strand starting at position 2990 of SEQ ID NO: 1243489
gcgguuucccagugcagga

SEQ ID NO: 1419423 - RNA, 19 nt, Artificial Sequence
  Description of Artificial Sequence: Synthetic oligonucleotide
  Antisense strand to SEQ ID NO: 1419422
uccugcacugggaaaccgc

SEQ ID NO: 1419424 - RNA, 19 nt, Artificial Sequence
  Description of Artificial Sequence: Synthetic oligonucleotide
  Sense strand starting at position 3018 of SEQ ID NO: 1243489
uggaauuggugggucauga

SEQ ID NO: 1419425 - RNA, 19 nt, Artificial Sequence
  Description of Artificial Sequence: Synthetic oligonucleotide
  Antisense strand to SEQ ID NO: 1419424
ucaugacccaccaauucca

SEQ ID NO: 1419426 - RNA, 19 nt, Artificial Sequence
  Description of Artificial Sequence: Synthetic oligonucleotide
  Sense strand starting at position 3026 of SEQ ID NO: 1243489
gugggucaugaguauauau

SEQ ID NO: 1419427 - RNA, 19 nt, Artificial Sequence
  Description of Artificial Sequence: Synthetic oligonucleotide
  Antisense strand to SEQ ID NO: 1419426
auauauacucaugacccac

SEQ ID NO: 1419428 - RNA, 19 nt, Artificial Sequence
  Description of Artificial Sequence: Synthetic oligonucleotide
  Sense strand starting at position 3053 of SEQ ID NO: 1243489
aacgcugaaugaguauuaa

SEQ ID NO: 1419429 - RNA, 19 nt, Artificial Sequence
  Description of Artificial Sequence: Synthetic oligonucleotide
  Antisense strand to SEQ ID NO: 1419428
uuaauacucauucagcguu

SEQ ID NO: 1419430 - RNA, 19 nt, Artificial Sequence
  Description of Artificial Sequence: Synthetic oligonucleotide
  Sense strand starting at position 3396 of SEQ ID NO: 1243489
cgcccagcuuuaguaauuu

SEQ ID NO: 1419431 - RNA, 19 nt, Artificial Sequence
  Description of Artificial Sequence: Synthetic oligonucleotide
  Antisense strand to SEQ ID NO: 1419430
aaauuacuaaagcugggcg

SEQ ID NO: 1419432 - RNA, 19 nt, Artificial Sequence
  Description of Artificial Sequence: Synthetic oligonucleotide
  Sense strand starting at position 3419 of SEQ ID NO: 1243489
aucgaauaccuuuaugugu

SEQ ID NO: 1419433 - RNA, 19 nt, Artificial Sequence
  Description of Artificial Sequence: Synthetic oligonucleotide
  Antisense strand to SEQ ID NO: 1419432
acacauaaagguauucgau

SEQ ID NO: 1419434 - RNA, 19 nt, Artificial Sequence
  Description of Artificial Sequence: Synthetic oligonucleotide
  Sense strand starting at position 3479 of SEQ ID NO: 1243489
caaugcuuguccucaugga

SEQ ID NO: 1419435 - RNA, 19 nt, Artificial Sequence
  Description of Artificial Sequence: Synthetic oligonucleotide
  Antisense strand to SEQ ID NO: 1419434
uccaugaggacaagcauug

SEQ ID NO: 1419436 - RNA, 19 nt, Artificial Sequence
  Description of Artificial Sequence: Synthetic oligonucleotide
  Sense strand starting at position 3584 of SEQ ID NO: 1243489
augccauguagauguguga

SEQ ID NO: 1419437 - RNA, 19 nt, Artificial Sequence
  Description of Artificial Sequence: Synthetic oligonucleotide
  Antisense strand to SEQ ID NO: 1419436
ucacacaucuacauggcau

SEQ ID NO: 1419438 - RNA, 19 nt, Artificial Sequence
  Description of Artificial Sequence: Synthetic oligonucleotide
  Sense strand starting at position 3588 of SEQ ID NO: 1243489
cauguagaugugugaagca

SEQ ID NO: 1419439 - RNA, 19 nt, Artificial Sequence
  Description of Artificial Sequence: Synthetic oligonucleotide
  Antisense strand to SEQ ID NO: 1419438
ugcuucacacaucuacaug

SEQ ID NO: 1419440 - RNA, 19 nt, Artificial Sequence
  Description of Artificial Sequence: Synthetic oligonucleotide
  Sense strand starting at position 3619 of SEQ ID NO: 1243489
uguguauguguguuagagu

SEQ ID NO: 1419441 - RNA, 19 nt, Artificial Sequence
  Description of Artificial Sequence: Synthetic oligonucleotide
  Antisense strand to SEQ ID NO: 1419440
acucuaacacacauacaca

SEQ ID NO: 1419442 - RNA, 19 nt, Artificial Sequence
  Description of Artificial Sequence: Synthetic oligonucleotide
  Sense strand starting at position 3817 of SEQ ID NO: 1243489
aauguuaaguguucuugua

SEQ ID NO: 1419443 - RNA, 19 nt, Artificial Sequence
  Description of Artificial Sequence: Synthetic oligonucleotide
  Antisense strand to SEQ ID NO: 1419442
uacaagaacacuuaacauu

SEQ ID NO: 1419444 - RNA, 19 nt, Artificial Sequence
  Description of Artificial Sequence: Synthetic oligonucleotide
  Sense strand starting at position 3819 of SEQ ID NO: 1243489
uguuaaguguucuuguaga

SEQ ID NO: 1419445 - RNA, 19 nt, Artificial Sequence
  Description of Artificial Sequence: Synthetic oligonucleotide
  Antisense strand to SEQ ID NO: 1419444
ucuacaagaacacuuaaca

SEQ ID NO: 1419446 - RNA, 19 nt, Artificial Sequence
  Description of Artificial Sequence: Synthetic oligonucleotide
  Sense strand starting at position 3826 of SEQ ID NO: 1243489
uguucuuguagagauggaa

SEQ ID NO: 1419447 - RNA, 19 nt, Artificial Sequence
  Description of Artificial Sequence: Synthetic oligonucleotide
  Antisense strand to SEQ ID NO: 1419446
uuccaucucuacaagaaca

SEQ ID NO: 1419448 - RNA, 19 nt, Artificial Sequence
  Description of Artificial Sequence: Synthetic oligonucleotide
  Sense strand starting at position 3982 of SEQ ID NO: 1243489
ggaguaaagcuguggcuau

SEQ ID NO: 1419449 - RNA, 19 nt, Artificial Sequence
  Description of Artificial Sequence: Synthetic oligonucleotide
  Antisense strand to SEQ ID NO: 1419448
auagccacagcuuuacucc

SEQ ID NO: 1419450 - RNA, 19 nt, Artificial Sequence
  Description of Artificial Sequence: Synthetic oligonucleotide
  Sense strand starting at position 1391 of SEQ ID NO: 1243490
ugcgcauccgugucaggaa

SEQ ID NO: 1419451 - RNA, 19 nt, Artificial Sequence
  Description of Artificial Sequence: Synthetic oligonucleotide
  Antisense strand to SEQ ID NO: 1419450
uuccugacacggaugcgca

SEQ ID NO: 1419452 - RNA, 19 nt, Artificial Sequence
  Description of Artificial Sequence: Synthetic oligonucleotide
  Sense strand starting at position 1392 of SEQ ID NO: 1243490
gcgcauccgugucaggaau

SEQ ID NO: 1419453 - RNA, 19 nt, Artificial Sequence
  Description of Artificial Sequence: Synthetic oligonucleotide
  Antisense strand to SEQ ID NO: 1419452
auuccugacacggaugcgc

SEQ ID NO: 1419454 - RNA, 19 nt, Artificial Sequence
  Description of Artificial Sequence: Synthetic oligonucleotide
  Sense strand starting at position 1399 of SEQ ID NO: 1243490
cgugucaggaauugucaca

SEQ ID NO: 1419455 - RNA, 19 nt, Artificial Sequence
  Description of Artificial Sequence: Synthetic oligonucleotide
  Antisense strand to SEQ ID NO: 1419454
ugugacaauuccugacacg

SEQ ID NO: 1419456 - RNA, 19 nt, Artificial Sequence
  Description of Artificial Sequence: Synthetic oligonucleotide
  Sense strand starting at position 1404 of SEQ ID NO: 1243490
caggaauugucacaaggac

SEQ ID NO: 1419457 - RNA, 19 nt, Artificial Sequence
  Description of Artificial Sequence: Synthetic oligonucleotide
  Antisense strand to SEQ ID NO: 1419456
guccuugugacaauuccug

SEQ ID NO: 1419458 - RNA, 19 nt, Artificial Sequence
  Description of Artificial Sequence: Synthetic oligonucleotide
  Sense strand starting at position 1468 of SEQ ID NO: 1243490
gcggcuucuaucugacuca

SEQ ID NO: 1419459 - RNA, 19 nt, Artificial Sequence
  Description of Artificial Sequence: Synthetic oligonucleotide
  Antisense strand to SEQ ID NO: 1419458
ugagucagauagaagccgc

SEQ ID NO: 1419460 - RNA, 19 nt, Artificial Sequence
  Description of Artificial Sequence: Synthetic oligonucleotide
  Sense strand starting at position 1534 of SEQ ID NO: 1243490
uggagaugcguuuacuggu

SEQ ID NO: 1419461 - RNA, 19 nt, Artificial Sequence
  Description of Artificial Sequence: Synthetic oligonucleotide
  Antisense strand to SEQ ID NO: 1419460
accaguaaacgcaucucca

SEQ ID NO: 1419462 - RNA, 19 nt, Artificial Sequence
  Description of Artificial Sequence: Synthetic oligonucleotide
  Sense strand starting at position 1540 of SEQ ID NO: 1243490
ugcguuuacuggucagaga

SEQ ID NO: 1419463 - RNA, 19 nt, Artificial Sequence
  Description of Artificial Sequence: Synthetic oligonucleotide
  Antisense strand to SEQ ID NO: 1419462
ucucugaccaguaaacgca

SEQ ID NO: 1419464 - RNA, 19 nt, Artificial Sequence
  Description of Artificial Sequence: Synthetic oligonucleotide
  Sense strand starting at position 1541 of SEQ ID NO: 1243490
gcguuuacuggucagagaa

SEQ ID NO: 1419465 - RNA, 19 nt, Artificial Sequence
  Description of Artificial Sequence: Synthetic oligonucleotide
  Antisense strand to SEQ ID NO: 1419464
uucucugaccaguaaacgc

SEQ ID NO: 1419466 - RNA, 19 nt, Artificial Sequence
  Description of Artificial Sequence: Synthetic oligonucleotide
  Sense strand starting at position 1598 of SEQ ID NO: 1243490
ccuccugggccagauauua

SEQ ID NO: 1419467 - RNA, 19 nt, Artificial Sequence
  Description of Artificial Sequence: Synthetic oligonucleotide
  Antisense strand to SEQ ID NO: 1419466
uaauaucuggcccaggagg

SEQ ID NO: 1419468 - RNA, 19 nt, Artificial Sequence
  Description of Artificial Sequence: Synthetic oligonucleotide
  Sense strand starting at position 1671 of SEQ ID NO: 1243490
ucaggaagggucugacagu

SEQ ID NO: 1419469 - RNA, 19 nt, Artificial Sequence
  Description of Artificial Sequence: Synthetic oligonucleotide
  Antisense strand to SEQ ID NO: 1419468
acugucagacccuuccuga

SEQ ID NO: 1419470 - RNA, 19 nt, Artificial Sequence
  Description of Artificial Sequence: Synthetic oligonucleotide
  Sense strand starting at position 2011 of SEQ ID NO: 1243490
cccugucuccacgagggaa

SEQ ID NO: 1419471 - RNA, 19 nt, Artificial Sequence
  Description of Artificial Sequence: Synthetic oligonucleotide
  Antisense strand to SEQ ID NO: 1419470
uucccucguggagacaggg

SEQ ID NO: 1419472 - RNA, 19 nt, Artificial Sequence
  Description of Artificial Sequence: Synthetic oligonucleotide
  Sense strand starting at position 2464 of SEQ ID NO: 1243490
ucaagcauuucccaggacu

SEQ ID NO: 1419473 - RNA, 19 nt, Artificial Sequence
  Description of Artificial Sequence: Synthetic oligonucleotide
  Antisense strand to SEQ ID NO: 1419472
aguccugggaaaugcuuga

SEQ ID NO: 1419474 - RNA, 19 nt, Artificial Sequence
  Description of Artificial Sequence: Synthetic oligonucleotide
  Sense strand starting at position 2810 of SEQ ID NO: 1243490
guuugucagcacggagaga

SEQ ID NO: 1419475 - RNA, 19 nt, Artificial Sequence
  Description of Artificial Sequence: Synthetic oligonucleotide
  Antisense strand to SEQ ID NO: 1419474
ucucuccgugcugacaaac

SEQ ID NO: 1419476 - RNA, 19 nt, Artificial Sequence
  Description of Artificial Sequence: Synthetic oligonucleotide
  Sense strand starting at position 48 of SEQ ID NO: 1243491
aacuaagagcuccaguguu

SEQ ID NO: 1419477 - RNA, 19 nt, Artificial Sequence
  Description of Artificial Sequence: Synthetic oligonucleotide
  Antisense strand to SEQ ID NO: 1419476
aacacuggagcucuuaguu

SEQ ID NO: 1419478 - RNA, 19 nt, Artificial Sequence
  Description of Artificial Sequence: Synthetic oligonucleotide
  Sense strand starting at position 174 of SEQ ID NO: 1243491
cccagcucuugccugacaa

SEQ ID NO: 1419479 - RNA, 19 nt, Artificial Sequence
  Description of Artificial Sequence: Synthetic oligonucleotide
  Antisense strand to SEQ ID NO: 1419478
uugucaggcaagagcuggg

SEQ ID NO: 1419480 - RNA, 19 nt, Artificial Sequence
  Description of Artificial Sequence: Synthetic oligonucleotide
  Sense strand starting at position 175 of SEQ ID NO: 1243491
ccagcucuugccugacaag

SEQ ID NO: 1419481 - RNA, 19 nt, Artificial Sequence
  Description of Artificial Sequence: Synthetic oligonucleotide
  Antisense strand to SEQ ID NO: 1419480
cuugucaggcaagagcugg

SEQ ID NO: 1419482 - RNA, 19 nt, Artificial Sequence
  Description of Artificial Sequence: Synthetic oligonucleotide
  Sense strand starting at position 176 of SEQ ID NO: 1243491
cagcucuugccugacaagu

SEQ ID NO: 1419483 - RNA, 19 nt, Artificial Sequence
  Description of Artificial Sequence: Synthetic oligonucleotide
  Antisense strand to SEQ ID NO: 1419482
acuugucaggcaagagcug

SEQ ID NO: 1419484 - RNA, 19 nt, Artificial Sequence
  Description of Artificial Sequence: Synthetic oligonucleotide
  Sense strand starting at position 187 of SEQ ID NO: 1243491
ugacaagugccuuguggga

SEQ ID NO: 1419485 - RNA, 19 nt, Artificial Sequence
  Description of Artificial Sequence: Synthetic oligonucleotide
  Antisense strand to SEQ ID NO: 1419484
ucccacaaggcacuuguca

SEQ ID NO: 1419486 - RNA, 19 nt, Artificial Sequence
  Description of Artificial Sequence: Synthetic oligonucleotide
  Sense strand starting at position 454 of SEQ ID NO: 1243491
gaguccugguuugauuuga

SEQ ID NO: 1419487 - RNA, 19 nt, Artificial Sequence
  Description of Artificial Sequence: Synthetic oligonucleotide
  Antisense strand to SEQ ID NO: 1419486
ucaaaucaaaccaggacuc

SEQ ID NO: 1419488 - RNA, 19 nt, Artificial Sequence
  Description of Artificial Sequence: Synthetic oligonucleotide
  Sense strand starting at position 523 of SEQ ID NO: 1243491
agcugucuccuugggugau

SEQ ID NO: 1419489 - RNA, 19 nt, Artificial Sequence
  Description of Artificial Sequence: Synthetic oligonucleotide
  Antisense strand to SEQ ID NO: 1419488
aucacccaaggagacagcu

SEQ ID NO: 1419490 - RNA, 19 nt, Artificial Sequence
  Description of Artificial Sequence: Synthetic oligonucleotide
  Sense strand starting at position 524 of SEQ ID NO: 1243491
gcugucuccuugggugauu

SEQ ID NO: 1419491 - RNA, 19 nt, Artificial Sequence
  Description of Artificial Sequence: Synthetic oligonucleotide
  Antisense strand to SEQ ID NO: 1419490
aaucacccaaggagacagc

SEQ ID NO: 1419492 - RNA, 19 nt, Artificial Sequence
  Description of Artificial Sequence: Synthetic oligonucleotide
  Sense strand starting at position 525 of SEQ ID NO: 1243491
cugucuccuugggugauua

SEQ ID NO: 1419493 - RNA, 19 nt, Artificial Sequence
  Description of Artificial Sequence: Synthetic oligonucleotide
  Antisense strand to SEQ ID NO: 1419492
uaaucacccaaggagacag

SEQ ID NO: 1419494 - RNA, 19 nt, Artificial Sequence
  Description of Artificial Sequence: Synthetic oligonucleotide
  Sense strand starting at position 527 of SEQ ID NO: 1243491
gucuccuugggugauuaga

SEQ ID NO: 1419495 - RNA, 19 nt, Artificial Sequence
  Description of Artificial Sequence: Synthetic oligonucleotide
  Antisense strand to SEQ ID NO: 1419494
ucuaaucacccaaggagac

SEQ ID NO: 1419496 - RNA, 19 nt, Artificial Sequence
  Description of Artificial Sequence: Synthetic oligonucleotide
  Sense strand starting at position 529 of SEQ ID NO: 1243491
cuccuugggugauuagagu

SEQ ID NO: 1419497 - RNA, 19 nt, Artificial Sequence
  Description of Artificial Sequence: Synthetic oligonucleotide
  Antisense strand to SEQ ID NO: 1419496
acucuaaucacccaaggag

SEQ ID NO: 1419498 - RNA, 19 nt, Artificial Sequence
  Description of Artificial Sequence: Synthetic oligonucleotide
  Sense strand starting at position 592 of SEQ ID NO: 1243491
gagccaaaguugcaauuua

SEQ ID NO: 1419499 - RNA, 19 nt, Artificial Sequence
  Description of Artificial Sequence: Synthetic oligonucleotide
  Antisense strand to SEQ ID NO: 1419498
uaaauugcaacuuuggcuc

SEQ ID NO: 1419500 - RNA, 19 nt, Artificial Sequence
  Description of Artificial Sequence: Synthetic oligonucleotide
  Sense strand starting at position 623 of SEQ ID NO: 1243491
guggcuggcccuguuguaa

SEQ ID NO: 1419501 - RNA, 19 nt, Artificial Sequence
  Description of Artificial Sequence: Synthetic oligonucleotide
  Antisense strand to SEQ ID NO: 1419500
uuacaacagggccagccac

SEQ ID NO: 1419502 - RNA, 19 nt, Artificial Sequence
  Description of Artificial Sequence: Synthetic oligonucleotide
  Sense strand starting at position 780 of SEQ ID NO: 1243491
uggccuugguccugacaaa

SEQ ID NO: 1419503 - RNA, 19 nt, Artificial Sequence
  Description of Artificial Sequence: Synthetic oligonucleotide
  Antisense strand to SEQ ID NO: 1419502
uuugucaggaccaaggcca

SEQ ID NO: 1419504 - RNA, 19 nt, Artificial Sequence
  Description of Artificial Sequence: Synthetic oligonucleotide
  Sense strand starting at position 781 of SEQ ID NO: 1243491
ggccuugguccugacaaag

SEQ ID NO: 1419505 - RNA, 19 nt, Artificial Sequence
  Description of Artificial Sequence: Synthetic oligonucleotide
  Antisense strand to SEQ ID NO: 1419504
cuuugucaggaccaaggcc

SEQ ID NO: 1419506 - RNA, 19 nt, Artificial Sequence
  Description of Artificial Sequence: Synthetic oligonucleotide
  Sense strand starting at position 2661 of SEQ ID NO: 1243491
ugcgcauccgugucaggaa

SEQ ID NO: 1419507 - RNA, 19 nt, Artificial Sequence
  Description of Artificial Sequence: Synthetic oligonucleotide
  Antisense strand to SEQ ID NO: 1419506
uuccugacacggaugcgca

SEQ ID NO: 1419508 - RNA, 19 nt, Artificial Sequence
  Description of Artificial Sequence: Synthetic oligonucleotide
  Sense strand starting at position 2662 of SEQ ID NO: 1243491
gcgcauccgugucaggaau

SEQ ID NO: 1419509 - RNA, 19 nt, Artificial Sequence
  Description of Artificial Sequence: Synthetic oligonucleotide
  Antisense strand to SEQ ID NO: 1419508
auuccugacacggaugcgc

SEQ ID NO: 1419510 - RNA, 19 nt, Artificial Sequence
  Description of Artificial Sequence: Synthetic oligonucleotide
  Sense strand starting at position 2669 of SEQ ID NO: 1243491
cgugucaggaauugucaca

SEQ ID NO: 1419511 - RNA, 19 nt, Artificial Sequence
  Description of Artificial Sequence: Synthetic oligonucleotide
  Antisense strand to SEQ ID NO: 1419510
ugugacaauuccugacacg

SEQ ID NO: 1419512 - RNA, 19 nt, Artificial Sequence
  Description of Artificial Sequence: Synthetic oligonucleotide
  Sense strand starting at position 2674 of SEQ ID NO: 1243491
caggaauugucacaaggac

SEQ ID NO: 1419513 - RNA, 19 nt, Artificial Sequence
  Description of Artificial Sequence: Synthetic oligonucleotide
  Antisense strand to SEQ ID NO: 1419512
guccuugugacaauuccug

SEQ ID NO: 1419514 - RNA, 19 nt, Artificial Sequence
  Description of Artificial Sequence: Synthetic oligonucleotide
  Sense strand starting at position 2738 of SEQ ID NO: 1243491
gcggcuucuaucugacuca

SEQ ID NO: 1419515 - RNA, 19 nt, Artificial Sequence
  Description of Artificial Sequence: Synthetic oligonucleotide
  Antisense strand to SEQ ID NO: 1419514
ugagucagauagaagccgc

SEQ ID NO: 1419516 - RNA, 19 nt, Artificial Sequence
  Description of Artificial Sequence: Synthetic oligonucleotide
  Sense strand starting at position 2804 of SEQ ID NO: 1243491
uggagaugcguuuacuggu

SEQ ID NO: 1419517 - RNA, 19 nt, Artificial Sequence
  Description of Artificial Sequence: Synthetic oligonucleotide
  Antisense strand to SEQ ID NO: 1419516
accaguaaacgcaucucca

SEQ ID NO: 1419518 - RNA, 19 nt, Artificial Sequence
  Description of Artificial Sequence: Synthetic oligonucleotide
  Sense strand starting at position 2810 of SEQ ID NO: 1243491
ugcguuuacuggucagaga

SEQ ID NO: 1419519 - RNA, 19 nt, Artificial Sequence
  Description of Artificial Sequence: Synthetic oligonucleotide
  Antisense strand to SEQ ID NO: 1419518
ucucugaccaguaaacgca

SEQ ID NO: 1419520 - RNA, 19 nt, Artificial Sequence
  Description of Artificial Sequence: Synthetic oligonucleotide
  Sense strand starting at position 2811 of SEQ ID NO: 1243491
gcguuuacuggucagagaa

SEQ ID NO: 1419521 - RNA, 19 nt, Artificial Sequence
  Description of Artificial Sequence: Synthetic oligonucleotide
  Antisense strand to SEQ ID NO: 1419520
uucucugaccaguaaacgc

SEQ ID NO: 1419522 - RNA, 19 nt, Artificial Sequence
  Description of Artificial Sequence: Synthetic oligonucleotide
  Sense strand starting at position 2868 of SEQ ID NO: 1243491
ccuccugggccagauauua

SEQ ID NO: 1419523 - RNA, 19 nt, Artificial Sequence
  Description of Artificial Sequence: Synthetic oligonucleotide
  Antisense strand to SEQ ID NO: 1419522
uaauaucuggcccaggagg

SEQ ID NO: 1419524 - RNA, 19 nt, Artificial Sequence
  Description of Artificial Sequence: Synthetic oligonucleotide
  Sense strand starting at position 2941 of SEQ ID NO: 1243491
ucaggaagggucugacagu

SEQ ID NO: 1419525 - RNA, 19 nt, Artificial Sequence
  Description of Artificial Sequence: Synthetic oligonucleotide
  Antisense strand to SEQ ID NO: 1419524
acugucagacccuuccuga

SEQ ID NO: 1419526 - RNA, 19 nt, Artificial Sequence
  Description of Artificial Sequence: Synthetic oligonucleotide
  Sense strand starting at position 3281 of SEQ ID NO: 1243491
cccugucuccacgagggaa

SEQ ID NO: 1419527 - RNA, 19 nt, Artificial Sequence
  Description of Artificial Sequence: Synthetic oligonucleotide
  Antisense strand to SEQ ID NO: 1419526
uucccucguggagacaggg

SEQ ID NO: 1419528 - RNA, 19 nt, Artificial Sequence
  Description of Artificial Sequence: Synthetic oligonucleotide
  Sense strand starting at position 3734 of SEQ ID NO: 1243491
ucaagcauuucccaggacu

SEQ ID NO: 1419529 - RNA, 19 nt, Artificial Sequence
  Description of Artificial Sequence: Synthetic oligonucleotide
  Antisense strand to SEQ ID NO: 1419528
aguccugggaaaugcuuga

SEQ ID NO: 1419530 - RNA, 19 nt, Artificial Sequence
  Description of Artificial Sequence: Synthetic oligonucleotide
  Sense strand starting at position 157 of SEQ ID NO: 1243492
gugccaggacucugaaauc

SEQ ID NO: 1419531 - RNA, 19 nt, Artificial Sequence
  Description of Artificial Sequence: Synthetic oligonucleotide
  Antisense strand to SEQ ID NO: 1419530
gauuucagaguccuggcac

SEQ ID NO: 1419532 - RNA, 19 nt, Artificial Sequence
  Description of Artificial Sequence: Synthetic oligonucleotide
  Sense strand starting at position 539 of SEQ ID NO: 1243492
guaccugucuggccaguaa

SEQ ID NO: 1419533 - RNA, 19 nt, Artificial Sequence
  Description of Artificial Sequence: Synthetic oligonucleotide
  Antisense strand to SEQ ID NO: 1419532
uuacuggccagacagguac

SEQ ID NO: 1419534 - RNA, 19 nt, Artificial Sequence
  Description of Artificial Sequence: Synthetic oligonucleotide
  Sense strand starting at position 543 of SEQ ID NO: 1243492
cugucuggccaguaauaag

SEQ ID NO: 1419535 - RNA, 19 nt, Artificial Sequence
  Description of Artificial Sequence: Synthetic oligonucleotide
  Antisense strand to SEQ ID NO: 1419534
cuuauuacuggccagacag

SEQ ID NO: 1419536 - RNA, 19 nt, Artificial Sequence
  Description of Artificial Sequence: Synthetic oligonucleotide
  Sense strand starting at position 629 of SEQ ID NO: 1243492
cagugccugugaucauauu

SEQ ID NO: 1419537 - RNA, 19 nt, Artificial Sequence
  Description of Artificial Sequence: Synthetic oligonucleotide
  Antisense strand to SEQ ID NO: 1419536
aauaugaucacaggcacug

SEQ ID NO: 1419538 - RNA, 19 nt, Artificial Sequence
  Description of Artificial Sequence: Synthetic oligonucleotide
  Sense strand starting at position 971 of SEQ ID NO: 1243492
ccacaugagccgcauugau

SEQ ID NO: 1419539 - RNA, 19 nt, Artificial Sequence
  Description of Artificial Sequence: Synthetic oligonucleotide
  Antisense strand to SEQ ID NO: 1419538
aucaaugcggcucaugugg

SEQ ID NO: 1419540 - RNA, 19 nt, Artificial Sequence
  Description of Artificial Sequence: Synthetic oligonucleotide
  Sense strand starting at position 978 of SEQ ID NO: 1243492
agccgcauugauggugaua

SEQ ID NO: 1419541 - RNA, 19 nt, Artificial Sequence
  Description of Artificial Sequence: Synthetic oligonucleotide
  Antisense strand to SEQ ID NO: 1419540
uaucaccaucaaugcggcu

SEQ ID NO: 1419542 - RNA, 19 nt, Artificial Sequence
  Description of Artificial Sequence: Synthetic oligonucleotide
  Sense strand starting at position 1021 of SEQ ID NO: 1243492
uugucaaucuccucguacu

SEQ ID NO: 1419543 - RNA, 19 nt, Artificial Sequence
  Description of Artificial Sequence: Synthetic oligonucleotide
  Antisense strand to SEQ ID NO: 1419542
aguacgaggagauugacaa

SEQ ID NO: 1419544 - RNA, 19 nt, Artificial Sequence
  Description of Artificial Sequence: Synthetic oligonucleotide
  Sense strand starting at position 1022 of SEQ ID NO: 1243492
ugucaaucuccucguacuu

SEQ ID NO: 1419545 - RNA, 19 nt, Artificial Sequence
  Description of Artificial Sequence: Synthetic oligonucleotide
  Antisense strand to SEQ ID NO: 1419544
aaguacgaggagauugaca

SEQ ID NO: 1419546 - RNA, 19 nt, Artificial Sequence
  Description of Artificial Sequence: Synthetic oligonucleotide
  Sense strand starting at position 1032 of SEQ ID NO: 1243492
cucguacuucuugaacuua

SEQ ID NO: 1419547 - RNA, 19 nt, Artificial Sequence
  Description of Artificial Sequence: Synthetic oligonucleotide
  Antisense strand to SEQ ID NO: 1419546
uaaguucaagaaguacgag

SEQ ID NO: 1419548 - RNA, 19 nt, Artificial Sequence
  Description of Artificial Sequence: Synthetic oligonucleotide
  Sense strand starting at position 1196 of SEQ ID NO: 1243492
gagagaacugugggucaga

SEQ ID NO: 1419549 - RNA, 19 nt, Artificial Sequence
  Description of Artificial Sequence: Synthetic oligonucleotide
  Antisense strand to SEQ ID NO: 1419548
ucugacccacaguucucuc

SEQ ID NO: 1419550 - RNA, 19 nt, Artificial Sequence
  Description of Artificial Sequence: Synthetic oligonucleotide
  Sense strand starting at position 1201 of SEQ ID NO: 1243492
aacugugggucagaaagaa

SEQ ID NO: 1419551 - RNA, 19 nt, Artificial Sequence
  Description of Artificial Sequence: Synthetic oligonucleotide
  Antisense strand to SEQ ID NO: 1419550
uucuuucugacccacaguu

SEQ ID NO: 1419552 - RNA, 19 nt, Artificial Sequence
  Description of Artificial Sequence: Synthetic oligonucleotide
  Sense strand starting at position 1246 of SEQ ID NO: 1243492
cugugacuucuuuagggua

SEQ ID NO: 1419553 - RNA, 19 nt, Artificial Sequence
  Description of Artificial Sequence: Synthetic oligonucleotide
  Antisense strand to SEQ ID NO: 1419552
uacccuaaagaagucacag

SEQ ID NO: 1419554 - RNA, 19 nt, Artificial Sequence
  Description of Artificial Sequence: Synthetic oligonucleotide
  Sense strand starting at position 1313 of SEQ ID NO: 1243492
auugguggaucacaaaguu

SEQ ID NO: 1419555 - RNA, 19 nt, Artificial Sequence
  Description of Artificial Sequence: Synthetic oligonucleotide
  Antisense strand to SEQ ID NO: 1419554
aacuuugugauccaccaau

SEQ ID NO: 1419556 - RNA, 19 nt, Artificial Sequence
  Description of Artificial Sequence: Synthetic oligonucleotide
  Sense strand starting at position 1322 of SEQ ID NO: 1243492
ucacaaaguucuuccuguu

SEQ ID NO: 1419557 - RNA, 19 nt, Artificial Sequence
  Description of Artificial Sequence: Synthetic oligonucleotide
  Antisense strand to SEQ ID NO: 1419556
aacaggaagaacuuuguga

SEQ ID NO: 1419558 - RNA, 19 nt, Artificial Sequence
  Description of Artificial Sequence: Synthetic oligonucleotide
  Sense strand starting at position 1454 of SEQ ID NO: 1243492
caggucccaucaguagaua

SEQ ID NO: 1419559 - RNA, 19 nt, Artificial Sequence
  Description of Artificial Sequence: Synthetic oligonucleotide
  Antisense strand to SEQ ID NO: 1419558
uaucuacugaugggaccug

SEQ ID NO: 1419560 - RNA, 19 nt, Artificial Sequence
  Description of Artificial Sequence: Synthetic oligonucleotide
  Sense strand starting at position 1495 of SEQ ID NO: 1243492
cccacucacucuucgugau

SEQ ID NO: 1419561 - RNA, 19 nt, Artificial Sequence
  Description of Artificial Sequence: Synthetic oligonucleotide
  Antisense strand to SEQ ID NO: 1419560
aucacgaagagugaguggg

SEQ ID NO: 1419562 - RNA, 19 nt, Artificial Sequence
  Description of Artificial Sequence: Synthetic oligonucleotide
  Sense strand starting at position 2069 of SEQ ID NO: 1243492
ggaguaugauggagagguu

SEQ ID NO: 1419563 - RNA, 19 nt, Artificial Sequence
  Description of Artificial Sequence: Synthetic oligonucleotide
  Antisense strand to SEQ ID NO: 1419562
aaccucuccaucauacucc

SEQ ID NO: 1419564 - RNA, 19 nt, Artificial Sequence
  Description of Artificial Sequence: Synthetic oligonucleotide
  Sense strand starting at position 2187 of SEQ ID NO: 1243492
ggcucaugggcguaguagu

SEQ ID NO: 1419565 - RNA, 19 nt, Artificial Sequence
  Description of Artificial Sequence: Synthetic oligonucleotide
  Antisense strand to SEQ ID NO: 1419564
acuacuacgcccaugagcc

SEQ ID NO: 1419566 - RNA, 19 nt, Artificial Sequence
  Description of Artificial Sequence: Synthetic oligonucleotide
  Sense strand starting at position 2188 of SEQ ID NO: 1243492
gcucaugggcguaguaguu

SEQ ID NO: 1419567 - RNA, 19 nt, Artificial Sequence
  Description of Artificial Sequence: Synthetic oligonucleotide
  Antisense strand to SEQ ID NO: 1419566
aacuacuacgcccaugagc

SEQ ID NO: 1419568 - RNA, 19 nt, Artificial Sequence
  Description of Artificial Sequence: Synthetic oligonucleotide
  Sense strand starting at position 2227 of SEQ ID NO: 1243492
aggugaucagagugggagu

SEQ ID NO: 1419569 - RNA, 19 nt, Artificial Sequence
  Description of Artificial Sequence: Synthetic oligonucleotide
  Antisense strand to SEQ ID NO: 1419568
acucccacucugaucaccu

SEQ ID NO: 1419570 - RNA, 19 nt, Artificial Sequence
  Description of Artificial Sequence: Synthetic oligonucleotide
  Sense strand starting at position 2377 of SEQ ID NO: 1243492
gcgggucuugcgagauauc

SEQ ID NO: 1419571 - RNA, 19 nt, Artificial Sequence
  Description of Artificial Sequence: Synthetic oligonucleotide
  Antisense strand to SEQ ID NO: 1419570
gauaucucgcaagacccgc

SEQ ID NO: 1419572 - RNA, 19 nt, Artificial Sequence
  Description of Artificial Sequence: Synthetic oligonucleotide
  Sense strand starting at position 2378 of SEQ ID NO: 1243492
cgggucuugcgagauaucu

SEQ ID NO: 1419573 - RNA, 19 nt, Artificial Sequence
  Description of Artificial Sequence: Synthetic oligonucleotide
  Antisense strand to SEQ ID NO: 1419572
agauaucucgcaagacccg

SEQ ID NO: 1419574 - RNA, 19 nt, Artificial Sequence
  Description of Artificial Sequence: Synthetic oligonucleotide
  Sense strand starting at position 2386 of SEQ ID NO: 1243492
gcgagauaucuggccgccu

SEQ ID NO: 1419575 - RNA, 19 nt, Artificial Sequence
  Description of Artificial Sequence: Synthetic oligonucleotide
  Antisense strand to SEQ ID NO: 1419574
aggcggccagauaucucgc

SEQ ID NO: 1419576 - RNA, 19 nt, Artificial Sequence
  Description of Artificial Sequence: Synthetic oligonucleotide
  Sense strand starting at position 2388 of SEQ ID NO: 1243492
gagauaucuggccgccucu

SEQ ID NO: 1419577 - RNA, 19 nt, Artificial Sequence
  Description of Artificial Sequence: Synthetic oligonucleotide
  Antisense strand to SEQ ID NO: 1419576
agaggcggccagauaucuc

SEQ ID NO: 1419578 - RNA, 19 nt, Artificial Sequence
  Description of Artificial Sequence: Synthetic oligonucleotide
  Sense strand starting at position 2470 of SEQ ID NO: 1243492
ucccucuucgcugagacuu

SEQ ID NO: 1419579 - RNA, 19 nt, Artificial Sequence
  Description of Artificial Sequence: Synthetic oligonucleotide
  Antisense strand to SEQ ID NO: 1419578
aagucucagcgaagaggga

SEQ ID NO: 1419580 - RNA, 19 nt, Artificial Sequence
  Description of Artificial Sequence: Synthetic oligonucleotide
  Sense strand starting at position 2792 of SEQ ID NO: 1243492
gagccugagucuccuuuaa

SEQ ID NO: 1419581 - RNA, 19 nt, Artificial Sequence
  Description of Artificial Sequence: Synthetic oligonucleotide
  Antisense strand to SEQ ID NO: 1419580
uuaaaggagacucaggcuc

SEQ ID NO: 1419582 - RNA, 19 nt, Artificial Sequence
  Description of Artificial Sequence: Synthetic oligonucleotide
  Sense strand starting at position 2794 of SEQ ID NO: 1243492
gccugagucuccuuuaauc

SEQ ID NO: 1419583 - RNA, 19 nt, Artificial Sequence
  Description of Artificial Sequence: Synthetic oligonucleotide
  Antisense strand to SEQ ID NO: 1419582
gauuaaaggagacucaggc

SEQ ID NO: 1419584 - RNA, 19 nt, Artificial Sequence
  Description of Artificial Sequence: Synthetic oligonucleotide
  Sense strand starting at position 2796 of SEQ ID NO: 1243492
cugagucuccuuuaaucug

SEQ ID NO: 1419585 - RNA, 19 nt, Artificial Sequence
  Description of Artificial Sequence: Synthetic oligonucleotide
  Antisense strand to SEQ ID NO: 1419584
cagauuaaaggagacucag

SEQ ID NO: 1419586 - RNA, 19 nt, Artificial Sequence
  Description of Artificial Sequence: Synthetic oligonucleotide
  Sense strand starting at position 2841 of SEQ ID NO: 1243492
ggagcaugcagugaauguu

SEQ ID NO: 1419587 - RNA, 19 nt, Artificial Sequence
  Description of Artificial Sequence: Synthetic oligonucleotide
  Antisense strand to SEQ ID NO: 1419586
aacauucacugcaugcucc

SEQ ID NO: 1419588 - RNA, 19 nt, Artificial Sequence
  Description of Artificial Sequence: Synthetic oligonucleotide
  Sense strand starting at position 2844 of SEQ ID NO: 1243492
gcaugcagugaauguugaa

SEQ ID NO: 1419589 - RNA, 19 nt, Artificial Sequence
  Description of Artificial Sequence: Synthetic oligonucleotide
  Antisense strand to SEQ ID NO: 1419588
uucaacauucacugcaugc

SEQ ID NO: 1419590 - RNA, 19 nt, Artificial Sequence
  Description of Artificial Sequence: Synthetic oligonucleotide
  Sense strand starting at position 2877 of SEQ ID NO: 1243492
gguagucaaugucccuuaa

SEQ ID NO: 1419591 - RNA, 19 nt, Artificial Sequence
  Description of Artificial Sequence: Synthetic oligonucleotide
  Antisense strand to SEQ ID NO: 1419590
uuaagggacauugacuacc

SEQ ID NO: 1419592 - RNA, 19 nt, Artificial Sequence
  Description of Artificial Sequence: Synthetic oligonucleotide
  Sense strand starting at position 2881 of SEQ ID NO: 1243492
gucaaugucccuuaacuuu

SEQ ID NO: 1419593 - RNA, 19 nt, Artificial Sequence
  Description of Artificial Sequence: Synthetic oligonucleotide
  Antisense strand to SEQ ID NO: 1419592
aaaguuaagggacauugac

SEQ ID NO: 1419594 - RNA, 19 nt, Artificial Sequence
  Description of Artificial Sequence: Synthetic oligonucleotide
  Sense strand starting at position 2934 of SEQ ID NO: 1243492
acuccaaaguguuaauuau

SEQ ID NO: 1419595 - RNA, 19 nt, Artificial Sequence
  Description of Artificial Sequence: Synthetic oligonucleotide
  Antisense strand to SEQ ID NO: 1419594
auaauuaacacuuuggagu

SEQ ID NO: 1419596 - RNA, 19 nt, Artificial Sequence
  Description of Artificial Sequence: Synthetic oligonucleotide
  Sense strand starting at position 2943 of SEQ ID NO: 1243492
uguuaauuauggcugcuua

SEQ ID NO: 1419597 - RNA, 19 nt, Artificial Sequence
  Description of Artificial Sequence: Synthetic oligonucleotide
  Antisense strand to SEQ ID NO: 1419596
uaagcagccauaauuaaca

SEQ ID NO: 1419598 - RNA, 19 nt, Artificial Sequence
  Description of Artificial Sequence: Synthetic oligonucleotide
  Sense strand starting at position 2944 of SEQ ID NO: 1243492
guuaauuauggcugcuuaa

SEQ ID NO: 1419599 - RNA, 19 nt, Artificial Sequence
  Description of Artificial Sequence: Synthetic oligonucleotide
  Antisense strand to SEQ ID NO: 1419598
uuaagcagccauaauuaac

SEQ ID NO: 1419600 - RNA, 19 nt, Artificial Sequence
  Description of Artificial Sequence: Synthetic oligonucleotide
  Sense strand starting at position 2954 of SEQ ID NO: 1243492
gcugcuuaacccuggcuaa

SEQ ID NO: 1419601 - RNA, 19 nt, Artificial Sequence
  Description of Artificial Sequence: Synthetic oligonucleotide
  Antisense strand to SEQ ID NO: 1419600
uuagccaggguuaagcagc

SEQ ID NO: 1419602 - RNA, 19 nt, Artificial Sequence
  Description of Artificial Sequence: Synthetic oligonucleotide
  Sense strand starting at position 2955 of SEQ ID NO: 1243492
cugcuuaacccuggcuaau

SEQ ID NO: 1419603 - RNA, 19 nt, Artificial Sequence
  Description of Artificial Sequence: Synthetic oligonucleotide
  Antisense strand to SEQ ID NO: 1419602
auuagccaggguuaagcag

SEQ ID NO: 1419604 - RNA, 19 nt, Artificial Sequence
  Description of Artificial Sequence: Synthetic oligonucleotide
  Sense strand starting at position 2968 of SEQ ID NO: 1243492
gcuaauguuucggaacuca

SEQ ID NO: 1419605 - RNA, 19 nt, Artificial Sequence
  Description of Artificial Sequence: Synthetic oligonucleotide
  Antisense strand to SEQ ID NO: 1419604
ugaguuccgaaacauuagc

SEQ ID NO: 1419606 - RNA, 19 nt, Artificial Sequence
  Description of Artificial Sequence: Synthetic oligonucleotide
  Sense strand starting at position 2983 of SEQ ID NO: 1243492
cucaucagauccugagacu

SEQ ID NO: 1419607 - RNA, 19 nt, Artificial Sequence
  Description of Artificial Sequence: Synthetic oligonucleotide
  Antisense strand to SEQ ID NO: 1419606
agucucaggaucugaugag

SEQ ID NO: 1419608 - RNA, 19 nt, Artificial Sequence
  Description of Artificial Sequence: Synthetic oligonucleotide
  Sense strand starting at position 3004 of SEQ ID NO: 1243492
guggacaguguuuguuuca

SEQ ID NO: 1419609 - RNA, 19 nt, Artificial Sequence
  Description of Artificial Sequence: Synthetic oligonucleotide
  Antisense strand to SEQ ID NO: 1419608
ugaaacaaacacuguccac

SEQ ID NO: 1419610 - RNA, 19 nt, Artificial Sequence
  Description of Artificial Sequence: Synthetic oligonucleotide
  Sense strand starting at position 227 of SEQ ID NO: 1243493
gugaacaugcuauaacacu

SEQ ID NO: 1419611 - RNA, 19 nt, Artificial Sequence
  Description of Artificial Sequence: Synthetic oligonucleotide
  Antisense strand to SEQ ID NO: 1419610
aguguuauagcauguucac

SEQ ID NO: 1419612 - RNA, 19 nt, Artificial Sequence
  Description of Artificial Sequence: Synthetic oligonucleotide
  Sense strand starting at position 438 of SEQ ID NO: 1243493
gucuuaagccaagaugaua

SEQ ID NO: 1419613 - RNA, 19 nt, Artificial Sequence
  Description of Artificial Sequence: Synthetic oligonucleotide
  Antisense strand to SEQ ID NO: 1419612
uaucaucuuggcuuaagac

SEQ ID NO: 1419614 - RNA, 19 nt, Artificial Sequence
  Description of Artificial Sequence: Synthetic oligonucleotide
  Sense strand starting at position 463 of SEQ ID NO: 1243493
auuuguucuagcggccaua

SEQ ID NO: 1419615 - RNA, 19 nt, Artificial Sequence
  Description of Artificial Sequence: Synthetic oligonucleotide
  Antisense strand to SEQ ID NO: 1419614
uauggccgcuagaacaaau

SEQ ID NO: 1419616 - RNA, 19 nt, Artificial Sequence
  Description of Artificial Sequence: Synthetic oligonucleotide
  Sense strand starting at position 512 of SEQ ID NO: 1243493
guuuauuagguuugaauca

SEQ ID NO: 1419617 - RNA, 19 nt, Artificial Sequence
  Description of Artificial Sequence: Synthetic oligonucleotide
  Antisense strand to SEQ ID NO: 1419616
ugauucaaaccuaauaaac

SEQ ID NO: 1419618 - RNA, 19 nt, Artificial Sequence
  Description of Artificial Sequence: Synthetic oligonucleotide
  Sense strand starting at position 521 of SEQ ID NO: 1243493
guuugaaucagagaguuug

SEQ ID NO: 1419619 - RNA, 19 nt, Artificial Sequence
  Description of Artificial Sequence: Synthetic oligonucleotide
  Antisense strand to SEQ ID NO: 1419618
caaacucucugauucaaac

SEQ ID NO: 1419620 - RNA, 19 nt, Artificial Sequence
  Description of Artificial Sequence: Synthetic oligonucleotide
  Sense strand starting at position 747 of SEQ ID NO: 1243493
agaggucucaggcaguuaa

SEQ ID NO: 1419621 - RNA, 19 nt, Artificial Sequence
  Description of Artificial Sequence: Synthetic oligonucleotide
  Antisense strand to SEQ ID NO: 1419620
uuaacugccugagaccucu

SEQ ID NO: 1419622 - RNA, 19 nt, Artificial Sequence
  Description of Artificial Sequence: Synthetic oligonucleotide
  Sense strand starting at position 779 of SEQ ID NO: 1243493
ggacaagucugucuagcua

SEQ ID NO: 1419623 - RNA, 19 nt, Artificial Sequence
  Description of Artificial Sequence: Synthetic oligonucleotide
  Antisense strand to SEQ ID NO: 1419622
uagcuagacagacuugucc

SEQ ID NO: 1419624 - RNA, 19 nt, Artificial Sequence
  Description of Artificial Sequence: Synthetic oligonucleotide
  Sense strand starting at position 795 of SEQ ID NO: 1243493
cuagacucagcagggauua

SEQ ID NO: 1419625 - RNA, 19 nt, Artificial Sequence
  Description of Artificial Sequence: Synthetic oligonucleotide
  Antisense strand to SEQ ID NO: 1419624
uaaucccugcugagucuag

SEQ ID NO: 1419626 - RNA, 19 nt, Artificial Sequence
  Description of Artificial Sequence: Synthetic oligonucleotide
  Sense strand starting at position 879 of SEQ ID NO: 1243493
aguggcuuucucugaucuu

SEQ ID NO: 1419627 - RNA, 19 nt, Artificial Sequence
  Description of Artificial Sequence: Synthetic oligonucleotide
  Antisense strand to SEQ ID NO: 1419626
aagaucagagaaagccacu

SEQ ID NO: 1419628 - RNA, 19 nt, Artificial Sequence
  Description of Artificial Sequence: Synthetic oligonucleotide
  Sense strand starting at position 882 of SEQ ID NO: 1243493
ggcuuucucugaucuuaca

SEQ ID NO: 1419629 - RNA, 19 nt, Artificial Sequence
  Description of Artificial Sequence: Synthetic oligonucleotide
  Antisense strand to SEQ ID NO: 1419628
uguaagaucagagaaagcc

SEQ ID NO: 1419630 - RNA, 19 nt, Artificial Sequence
  Description of Artificial Sequence: Synthetic oligonucleotide
  Sense strand starting at position 1189 of SEQ ID NO: 1243493
cagggacuuugucugaugu

SEQ ID NO: 1419631 - RNA, 19 nt, Artificial Sequence
  Description of Artificial Sequence: Synthetic oligonucleotide
  Antisense strand to SEQ ID NO: 1419630
acaucagacaaagucccug

SEQ ID NO: 1419632 - RNA, 19 nt, Artificial Sequence
  Description of Artificial Sequence: Synthetic oligonucleotide
  Sense strand starting at position 1199 of SEQ ID NO: 1243493
gucugauguguccacagau

SEQ ID NO: 1419633 - RNA, 19 nt, Artificial Sequence
  Description of Artificial Sequence: Synthetic oligonucleotide
  Antisense strand to SEQ ID NO: 1419632
aucuguggacacaucagac

SEQ ID NO: 1419634 - RNA, 19 nt, Artificial Sequence
  Description of Artificial Sequence: Synthetic oligonucleotide
  Sense strand starting at position 1387 of SEQ ID NO: 1243493
agggacacauccucgguau

SEQ ID NO: 1419635 - RNA, 19 nt, Artificial Sequence
  Description of Artificial Sequence: Synthetic oligonucleotide
  Antisense strand to SEQ ID NO: 1419634
auaccgaggaugugucccu

SEQ ID NO: 1419636 - RNA, 19 nt, Artificial Sequence
  Description of Artificial Sequence: Synthetic oligonucleotide
  Sense strand starting at position 1388 of SEQ ID NO: 1243493
gggacacauccucgguauc

SEQ ID NO: 1419637 - RNA, 19 nt, Artificial Sequence
  Description of Artificial Sequence: Synthetic oligonucleotide
  Antisense strand to SEQ ID NO: 1419636
gauaccgaggauguguccc

SEQ ID NO: 1419638 - RNA, 19 nt, Artificial Sequence
  Description of Artificial Sequence: Synthetic oligonucleotide
  Sense strand starting at position 2012 of SEQ ID NO: 1243493
cagagauagugggaggaau

SEQ ID NO: 1419639 - RNA, 19 nt, Artificial Sequence
  Description of Artificial Sequence: Synthetic oligonucleotide
  Antisense strand to SEQ ID NO: 1419638
auuccucccacuaucucug

SEQ ID NO: 1419640 - RNA, 19 nt, Artificial Sequence
  Description of Artificial Sequence: Synthetic oligonucleotide
  Sense strand starting at position 2086 of SEQ ID NO: 1243493
cguggauguagcgaaugau

SEQ ID NO: 1419641 - RNA, 19 nt, Artificial Sequence
  Description of Artificial Sequence: Synthetic oligonucleotide
  Antisense strand to SEQ ID NO: 1419640
aucauucgcuacauccacg

SEQ ID NO: 1419642 - RNA, 19 nt, Artificial Sequence
  Description of Artificial Sequence: Synthetic oligonucleotide
  Sense strand starting at position 2089 of SEQ ID NO: 1243493
ggauguagcgaaugauaag

SEQ ID NO: 1419643 - RNA, 19 nt, Artificial Sequence
  Description of Artificial Sequence: Synthetic oligonucleotide
  Antisense strand to SEQ ID NO: 1419642
cuuaucauucgcuacaucc

SEQ ID NO: 1419644 - RNA, 19 nt, Artificial Sequence
  Description of Artificial Sequence: Synthetic oligonucleotide
  Sense strand starting at position 2100 of SEQ ID NO: 1243493
augauaaggcagugaauga

SEQ ID NO: 1419645 - RNA, 19 nt, Artificial Sequence
  Description of Artificial Sequence: Synthetic oligonucleotide
  Antisense strand to SEQ ID NO: 1419644
ucauucacugccuuaucau

SEQ ID NO: 1419646 - RNA, 19 nt, Artificial Sequence
  Description of Artificial Sequence: Synthetic oligonucleotide
  Sense strand starting at position 2138 of SEQ ID NO: 1243493
gcauucaggguugggagaa

SEQ ID NO: 1419647 - RNA, 19 nt, Artificial Sequence
  Description of Artificial Sequence: Synthetic oligonucleotide
  Antisense strand to SEQ ID NO: 1419646
uucucccaacccugaaugc

SEQ ID NO: 1419648 - RNA, 19 nt, Artificial Sequence
  Description of Artificial Sequence: Synthetic oligonucleotide
  Sense strand starting at position 2150 of SEQ ID NO: 1243493
gggagaaggucaguguuuc

SEQ ID NO: 1419649 - RNA, 19 nt, Artificial Sequence
  Description of Artificial Sequence: Synthetic oligonucleotide
  Antisense strand to SEQ ID NO: 1419648
gaaacacugaccuucuccc

SEQ ID NO: 1419650 - RNA, 19 nt, Artificial Sequence
  Description of Artificial Sequence: Synthetic oligonucleotide
  Sense strand starting at position 2154 of SEQ ID NO: 1243493
gaaggucaguguuucccaa

SEQ ID NO: 1419651 - RNA, 19 nt, Artificial Sequence
  Description of Artificial Sequence: Synthetic oligonucleotide
  Antisense strand to SEQ ID NO: 1419650
uugggaaacacugaccuuc

SEQ ID NO: 1419652 - RNA, 19 nt, Artificial Sequence
  Description of Artificial Sequence: Synthetic oligonucleotide
  Sense strand starting at position 2156 of SEQ ID NO: 1243493
aggucaguguuucccaaca

SEQ ID NO: 1419653 - RNA, 19 nt, Artificial Sequence
  Description of Artificial Sequence: Synthetic oligonucleotide
  Antisense strand to SEQ ID NO: 1419652
uguugggaaacacugaccu

SEQ ID NO: 1419654 - RNA, 19 nt, Artificial Sequence
  Description of Artificial Sequence: Synthetic oligonucleotide
  Sense strand starting at position 2173 of SEQ ID NO: 1243493
cagucucugcgcgcaagaa

SEQ ID NO: 1419655 - RNA, 19 nt, Artificial Sequence
  Description of Artificial Sequence: Synthetic oligonucleotide
  Antisense strand to SEQ ID NO: 1419654
uucuugcgcgcagagacug

SEQ ID NO: 1419656 - RNA, 19 nt, Artificial Sequence
  Description of Artificial Sequence: Synthetic oligonucleotide
  Sense strand starting at position 2426 of SEQ ID NO: 1243493
caagguuccugggaauuuc

SEQ ID NO: 1419657 - RNA, 19 nt, Artificial Sequence
  Description of Artificial Sequence: Synthetic oligonucleotide
  Antisense strand to SEQ ID NO: 1419656
gaaauucccaggaaccuug

SEQ ID NO: 1419658 - RNA, 19 nt, Artificial Sequence
  Description of Artificial Sequence: Synthetic oligonucleotide
  Sense strand starting at position 2437 of SEQ ID NO: 1243493
ggaauuucuugcgugcaga

SEQ ID NO: 1419659 - RNA, 19 nt, Artificial Sequence
  Description of Artificial Sequence: Synthetic oligonucleotide
  Antisense strand to SEQ ID NO: 1419658
ucugcacgcaagaaauucc

SEQ ID NO: 1419660 - RNA, 19 nt, Artificial Sequence
  Description of Artificial Sequence: Synthetic oligonucleotide
  Sense strand starting at position 2438 of SEQ ID NO: 1243493
gaauuucuugcgugcagag

SEQ ID NO: 1419661 - RNA, 19 nt, Artificial Sequence
  Description of Artificial Sequence: Synthetic oligonucleotide
  Antisense strand to SEQ ID NO: 1419660
cucugcacgcaagaaauuc

SEQ ID NO: 1419662 - RNA, 19 nt, Artificial Sequence
  Description of Artificial Sequence: Synthetic oligonucleotide
  Sense strand starting at position 2440 of SEQ ID NO: 1243493
auuucuugcgugcagagau

SEQ ID NO: 1419663 - RNA, 19 nt, Artificial Sequence
  Description of Artificial Sequence: Synthetic oligonucleotide
  Antisense strand to SEQ ID NO: 1419662
aucucugcacgcaagaaau

SEQ ID NO: 1419664 - RNA, 19 nt, Artificial Sequence
  Description of Artificial Sequence: Synthetic oligonucleotide
  Sense strand starting at position 2464 of SEQ ID NO: 1243493
ggaacauucucugcaccua

SEQ ID NO: 1419665 - RNA, 19 nt, Artificial Sequence
  Description of Artificial Sequence: Synthetic oligonucleotide
  Antisense strand to SEQ ID NO: 1419664
uaggugcagagaauguucc

SEQ ID NO: 1419666 - RNA, 19 nt, Artificial Sequence
  Description of Artificial Sequence: Synthetic oligonucleotide
  Sense strand starting at position 2810 of SEQ ID NO: 1243493
gugccaggcacuuauuaag

SEQ ID NO: 1419667 - RNA, 19 nt, Artificial Sequence
  Description of Artificial Sequence: Synthetic oligonucleotide
  Antisense strand to SEQ ID NO: 1419666
cuuaauaagugccuggcac

SEQ ID NO: 1419668 - RNA, 19 nt, Artificial Sequence
  Description of Artificial Sequence: Synthetic oligonucleotide
  Sense strand starting at position 2816 of SEQ ID NO: 1243493
ggcacuuauuaagcgcaaa

SEQ ID NO: 1419669 - RNA, 19 nt, Artificial Sequence
  Description of Artificial Sequence: Synthetic oligonucleotide
  Antisense strand to SEQ ID NO: 1419668
uuugcgcuuaauaagugcc

SEQ ID NO: 1419670 - RNA, 19 nt, Artificial Sequence
  Description of Artificial Sequence: Synthetic oligonucleotide
  Sense strand starting at position 2819 of SEQ ID NO: 1243493
acuuauuaagcgcaaaguu

SEQ ID NO: 1419671 - RNA, 19 nt, Artificial Sequence
  Description of Artificial Sequence: Synthetic oligonucleotide
  Antisense strand to SEQ ID NO: 1419670
aacuuugcgcuuaauaagu

SEQ ID NO: 1419672 - RNA, 19 nt, Artificial Sequence
  Description of Artificial Sequence: Synthetic oligonucleotide
  Sense strand starting at position 2869 of SEQ ID NO: 1243493
auaguaguguuucuugaag

SEQ ID NO: 1419673 - RNA, 19 nt, Artificial Sequence
  Description of Artificial Sequence: Synthetic oligonucleotide
  Antisense strand to SEQ ID NO: 1419672
cuucaagaaacacuacuau

SEQ ID NO: 1419674 - RNA, 19 nt, Artificial Sequence
  Description of Artificial Sequence: Synthetic oligonucleotide
  Sense strand starting at position 2887 of SEQ ID NO: 1243493
gugaaagucuuccugggua

SEQ ID NO: 1419675 - RNA, 19 nt, Artificial Sequence
  Description of Artificial Sequence: Synthetic oligonucleotide
  Antisense strand to SEQ ID NO: 1419674
uacccaggaagacuuucac

SEQ ID NO: 1419676 - RNA, 19 nt, Artificial Sequence
  Description of Artificial Sequence: Synthetic oligonucleotide
  Sense strand starting at position 3020 of SEQ ID NO: 1243493
ugagcaucgagaugccaaa

SEQ ID NO: 1419677 - RNA, 19 nt, Artificial Sequence
  Description of Artificial Sequence: Synthetic oligonucleotide
  Antisense strand to SEQ ID NO: 1419676
uuuggcaucucgaugcuca

SEQ ID NO: 1419678 - RNA, 19 nt, Artificial Sequence
  Description of Artificial Sequence: Synthetic oligonucleotide
  Sense strand starting at position 3182 of SEQ ID NO: 1243493
ggagcugucucaucucuga

SEQ ID NO: 1419679 - RNA, 19 nt, Artificial Sequence
  Description of Artificial Sequence: Synthetic oligonucleotide
  Antisense strand to SEQ ID NO: 1419678
ucagagaugagacagcucc

SEQ ID NO: 1419680 - RNA, 19 nt, Artificial Sequence
  Description of Artificial Sequence: Synthetic oligonucleotide
  Sense strand starting at position 3292 of SEQ ID NO: 1243493
gaaagugcuuucuccuaug

SEQ ID NO: 1419681 - RNA, 19 nt, Artificial Sequence
  Description of Artificial Sequence: Synthetic oligonucleotide
  Antisense strand to SEQ ID NO: 1419680
cauaggagaaagcacuuuc

SEQ ID NO: 1419682 - RNA, 19 nt, Artificial Sequence
  Description of Artificial Sequence: Synthetic oligonucleotide
  Sense strand starting at position 3465 of SEQ ID NO: 1243493
cugacaucaacccggguaa

SEQ ID NO: 1419683 - RNA, 19 nt, Artificial Sequence
  Description of Artificial Sequence: Synthetic oligonucleotide
  Antisense strand to SEQ ID NO: 1419682
uuacccggguugaugucag

SEQ ID NO: 1419684 - RNA, 19 nt, Artificial Sequence
  Description of Artificial Sequence: Synthetic oligonucleotide
  Sense strand starting at position 3466 of SEQ ID NO: 1243493
ugacaucaacccggguaau

SEQ ID NO: 1419685 - RNA, 19 nt, Artificial Sequence
  Description of Artificial Sequence: Synthetic oligonucleotide
  Antisense strand to SEQ ID NO: 1419684
auuacccggguugauguca

SEQ ID NO: 1419686 - RNA, 19 nt, Artificial Sequence
  Description of Artificial Sequence: Synthetic oligonucleotide
  Sense strand starting at position 3467 of SEQ ID NO: 1243493
gacaucaacccggguaauu

SEQ ID NO: 1419687 - RNA, 19 nt, Artificial Sequence
  Description of Artificial Sequence: Synthetic oligonucleotide
  Antisense strand to SEQ ID NO: 1419686
aauuacccggguugauguc

SEQ ID NO: 1419688 - RNA, 19 nt, Artificial Sequence
  Description of Artificial Sequence: Synthetic oligonucleotide
  Sense strand starting at position 3807 of SEQ ID NO: 1243493
uguguuauggaccaauuaa

SEQ ID NO: 1419689 - RNA, 19 nt, Artificial Sequence
  Description of Artificial Sequence: Synthetic oligonucleotide
  Antisense strand to SEQ ID NO: 1419688
uuaauugguccauaacaca

SEQ ID NO: 1419690 - RNA, 19 nt, Artificial Sequence
  Description of Artificial Sequence: Synthetic oligonucleotide
  Sense strand starting at position 168 of SEQ ID NO: 1243494
agccauuguaguuguuaca

SEQ ID NO: 1419691 - RNA, 19 nt, Artificial Sequence
  Description of Artificial Sequence: Synthetic oligonucleotide
  Antisense strand to SEQ ID NO: 1419690
uguaacaacuacaauggcu

SEQ ID NO: 1419692 - RNA, 19 nt, Artificial Sequence
  Description of Artificial Sequence: Synthetic oligonucleotide
  Sense strand starting at position 237 of SEQ ID NO: 1243494
cuagacauccuacaguagu

SEQ ID NO: 1419693 - RNA, 19 nt, Artificial Sequence
  Description of Artificial Sequence: Synthetic oligonucleotide
  Antisense strand to SEQ ID NO: 1419692
acuacuguaggaugucuag

SEQ ID NO: 1419694 - RNA, 19 nt, Artificial Sequence
  Description of Artificial Sequence: Synthetic oligonucleotide
  Sense strand starting at position 412 of SEQ ID NO: 1243494
uugacaacuggccacauau

SEQ ID NO: 1419695 - RNA, 19 nt, Artificial Sequence
  Description of Artificial Sequence: Synthetic oligonucleotide
  Antisense strand to SEQ ID NO: 1419694
auauguggccaguugucaa

SEQ ID NO: 1419696 - RNA, 19 nt, Artificial Sequence
  Description of Artificial Sequence: Synthetic oligonucleotide
  Sense strand starting at position 820 of SEQ ID NO: 1243494
cguuucuaugcccugcaua

SEQ ID NO: 1419697 - RNA, 19 nt, Artificial Sequence
  Description of Artificial Sequence: Synthetic oligonucleotide
  Antisense strand to SEQ ID NO: 1419696
uaugcagggcauagaaacg

SEQ ID NO: 1419698 - RNA, 19 nt, Artificial Sequence
  Description of Artificial Sequence: Synthetic oligonucleotide
  Sense strand starting at position 928 of SEQ ID NO: 1243494
auaguaggugcagauaaau

SEQ ID NO: 1419699 - RNA, 19 nt, Artificial Sequence
  Description of Artificial Sequence: Synthetic oligonucleotide
  Antisense strand to SEQ ID NO: 1419698
auuuaucugcaccuacuau

SEQ ID NO: 1419700 - RNA, 19 nt, Artificial Sequence
  Description of Artificial Sequence: Synthetic oligonucleotide
  Sense strand starting at position 937 of SEQ ID NO: 1243494
gcagauaaauaaucguuag

SEQ ID NO: 1419701 - RNA, 19 nt, Artificial Sequence
  Description of Artificial Sequence: Synthetic oligonucleotide
  Antisense strand to SEQ ID NO: 1419700
cuaacgauuauuuaucugc

SEQ ID NO: 1419702 - RNA, 19 nt, Artificial Sequence
  Description of Artificial Sequence: Synthetic oligonucleotide
  Sense strand starting at position 940 of SEQ ID NO: 1243494
gauaaauaaucguuagauc

SEQ ID NO: 1419703 - RNA, 19 nt, Artificial Sequence
  Description of Artificial Sequence: Synthetic oligonucleotide
  Antisense strand to SEQ ID NO: 1419702
gaucuaacgauuauuuauc

SEQ ID NO: 1419704 - RNA, 19 nt, Artificial Sequence
  Description of Artificial Sequence: Synthetic oligonucleotide
  Sense strand starting at position 1259 of SEQ ID NO: 1243494
gaucaaugagugcgggaau

SEQ ID NO: 1419705 - RNA, 19 nt, Artificial Sequence
  Description of Artificial Sequence: Synthetic oligonucleotide
  Antisense strand to SEQ ID NO: 1419704
auucccgcacucauugauc

SEQ ID NO: 1419706 - RNA, 19 nt, Artificial Sequence
  Description of Artificial Sequence: Synthetic oligonucleotide
  Sense strand starting at position 1262 of SEQ ID NO: 1243494
caaugagugcgggaauucu

SEQ ID NO: 1419707 - RNA, 19 nt, Artificial Sequence
  Description of Artificial Sequence: Synthetic oligonucleotide
  Antisense strand to SEQ ID NO: 1419706
agaauucccgcacucauug

SEQ ID NO: 1419708 - RNA, 19 nt, Artificial Sequence
  Description of Artificial Sequence: Synthetic oligonucleotide
  Sense strand starting at position 1340 of SEQ ID NO: 1243494
ugaaaucggugagaaauga

SEQ ID NO: 1419709 - RNA, 19 nt, Artificial Sequence
  Description of Artificial Sequence: Synthetic oligonucleotide
  Antisense strand to SEQ ID NO: 1419708
ucauuucucaccgauuuca

SEQ ID NO: 1419710 - RNA, 19 nt, Artificial Sequence
  Description of Artificial Sequence: Synthetic oligonucleotide
  Sense strand starting at position 1348 of SEQ ID NO: 1243494
gugagaaaugaggguccua

SEQ ID NO: 1419711 - RNA, 19 nt, Artificial Sequence
  Description of Artificial Sequence: Synthetic oligonucleotide
  Antisense strand to SEQ ID NO: 1419710
uaggacccucauuucucac

SEQ ID NO: 1419712 - RNA, 19 nt, Artificial Sequence
  Description of Artificial Sequence: Synthetic oligonucleotide
  Sense strand starting at position 1442 of SEQ ID NO: 1243494
gcacuaaagcgggacgaua

SEQ ID NO: 1419713 - RNA, 19 nt, Artificial Sequence
  Description of Artificial Sequence: Synthetic oligonucleotide
  Antisense strand to SEQ ID NO: 1419712
uaucgucccgcuuuagugc

SEQ ID NO: 1419714 - RNA, 19 nt, Artificial Sequence
  Description of Artificial Sequence: Synthetic oligonucleotide
  Sense strand starting at position 1924 of SEQ ID NO: 1243494
uccgcauuccgacauuaca

SEQ ID NO: 1419715 - RNA, 19 nt, Artificial Sequence
  Description of Artificial Sequence: Synthetic oligonucleotide
  Antisense strand to SEQ ID NO: 1419714
uguaaugucggaaugcgga

SEQ ID NO: 1419716 - RNA, 19 nt, Artificial Sequence
  Description of Artificial Sequence: Synthetic oligonucleotide
  Sense strand starting at position 1947 of SEQ ID NO: 1243494
cccagucgccggcuuuaua

SEQ ID NO: 1419717 - RNA, 19 nt, Artificial Sequence
  Description of Artificial Sequence: Synthetic oligonucleotide
  Antisense strand to SEQ ID NO: 1419716
uauaaagccggcgacuggg

SEQ ID NO: 1419718 - RNA, 19 nt, Artificial Sequence
  Description of Artificial Sequence: Synthetic oligonucleotide
  Sense strand starting at position 2297 of SEQ ID NO: 1243494
agcugcucccuugggauaa

SEQ ID NO: 1419719 - RNA, 19 nt, Artificial Sequence
  Description of Artificial Sequence: Synthetic oligonucleotide
  Antisense strand to SEQ ID NO: 1419718
uuaucccaagggagcagcu

SEQ ID NO: 1419720 - RNA, 19 nt, Artificial Sequence
  Description of Artificial Sequence: Synthetic oligonucleotide
  Sense strand starting at position 2781 of SEQ ID NO: 1243494
aaggacuuguccuccaaug

SEQ ID NO: 1419721 - RNA, 19 nt, Artificial Sequence
  Description of Artificial Sequence: Synthetic oligonucleotide
  Antisense strand to SEQ ID NO: 1419720
cauuggaggacaaguccuu

SEQ ID NO: 1419722 - RNA, 19 nt, Artificial Sequence
  Description of Artificial Sequence: Synthetic oligonucleotide
  Sense strand starting at position 2783 of SEQ ID NO: 1243494
ggacuuguccuccaauguc

SEQ ID NO: 1419723 - RNA, 19 nt, Artificial Sequence
  Description of Artificial Sequence: Synthetic oligonucleotide
  Antisense strand to SEQ ID NO: 1419722
gacauuggaggacaagucc

SEQ ID NO: 1419724 - RNA, 19 nt, Artificial Sequence
  Description of Artificial Sequence: Synthetic oligonucleotide
  Sense strand starting at position 2786 of SEQ ID NO: 1243494
cuuguccuccaaugucaau

SEQ ID NO: 1419725 - RNA, 19 nt, Artificial Sequence
  Description of Artificial Sequence: Synthetic oligonucleotide
  Antisense strand to SEQ ID NO: 1419724
auugacauuggaggacaag

SEQ ID NO: 1419726 - RNA, 19 nt, Artificial Sequence
  Description of Artificial Sequence: Synthetic oligonucleotide
  Sense strand starting at position 2851 of SEQ ID NO: 1243494
gguguuaugccacaaacag

SEQ ID NO: 1419727 - RNA, 19 nt, Artificial Sequence
  Description of Artificial Sequence: Synthetic oligonucleotide
  Antisense strand to SEQ ID NO: 1419726
cuguuuguggcauaacacc

SEQ ID NO: 1419728 - RNA, 19 nt, Artificial Sequence
  Description of Artificial Sequence: Synthetic oligonucleotide
  Sense strand starting at position 2923 of SEQ ID NO: 1243494
augugacccacgugcaaau

SEQ ID NO: 1419729 - RNA, 19 nt, Artificial Sequence
  Description of Artificial Sequence: Synthetic oligonucleotide
  Antisense strand to SEQ ID NO: 1419728
auuugcacgugggucacau

SEQ ID NO: 1419730 - RNA, 19 nt, Artificial Sequence
  Description of Artificial Sequence: Synthetic oligonucleotide
  Sense strand starting at position 2964 of SEQ ID NO: 1243494
ugcuucuguggauguagaa

SEQ ID NO: 1419731 - RNA, 19 nt, Artificial Sequence
  Description of Artificial Sequence: Synthetic oligonucleotide
  Antisense strand to SEQ ID NO: 1419730
uucuacauccacagaagca

SEQ ID NO: 1419732 - RNA, 19 nt, Artificial Sequence
  Description of Artificial Sequence: Synthetic oligonucleotide
  Sense strand starting at position 3004 of SEQ ID NO: 1243494
ugcucaauuggccagacau

SEQ ID NO: 1419733 - RNA, 19 nt, Artificial Sequence
  Description of Artificial Sequence: Synthetic oligonucleotide
  Antisense strand to SEQ ID NO: 1419732
augucuggccaauugagca

SEQ ID NO: 1419734 - RNA, 19 nt, Artificial Sequence
  Description of Artificial Sequence: Synthetic oligonucleotide
  Sense strand starting at position 3015 of SEQ ID NO: 1243494
ccagacauuuaauguguca

SEQ ID NO: 1419735 - RNA, 19 nt, Artificial Sequence
  Description of Artificial Sequence: Synthetic oligonucleotide
  Antisense strand to SEQ ID NO: 1419734
ugacacauuaaaugucugg

SEQ ID NO: 1419736 - RNA, 19 nt, Artificial Sequence
  Description of Artificial Sequence: Synthetic oligonucleotide
  Sense strand starting at position 3170 of SEQ ID NO: 1243494
gcaaucauagcacacugaa

SEQ ID NO: 1419737 - RNA, 19 nt, Artificial Sequence
  Description of Artificial Sequence: Synthetic oligonucleotide
  Antisense strand to SEQ ID NO: 1419736
uucagugugcuaugauugc

SEQ ID NO: 1419738 - RNA, 19 nt, Artificial Sequence
  Description of Artificial Sequence: Synthetic oligonucleotide
  Sense strand starting at position 3368 of SEQ ID NO: 1243494
aagcguuaggauuauguaa

SEQ ID NO: 1419739 - RNA, 19 nt, Artificial Sequence
  Description of Artificial Sequence: Synthetic oligonucleotide
  Antisense strand to SEQ ID NO: 1419738
uuacauaauccuaacgcuu

SEQ ID NO: 1419740 - RNA, 19 nt, Artificial Sequence
  Description of Artificial Sequence: Synthetic oligonucleotide
  Sense strand starting at position 3517 of SEQ ID NO: 1243494
guguuauuauuacccuuau

SEQ ID NO: 1419741 - RNA, 19 nt, Artificial Sequence
  Description of Artificial Sequence: Synthetic oligonucleotide
  Antisense strand to SEQ ID NO: 1419740
auaaggguaauaauaacac

SEQ ID NO: 1419742 - RNA, 19 nt, Artificial Sequence
  Description of Artificial Sequence: Synthetic oligonucleotide
  Sense strand starting at position 3552 of SEQ ID NO: 1243494
ccaaccauacaguguuaau

SEQ ID NO: 1419743 - RNA, 19 nt, Artificial Sequence
  Description of Artificial Sequence: Synthetic oligonucleotide
  Antisense strand to SEQ ID NO: 1419742
auuaacacuguaugguugg

SEQ ID NO: 1419744 - RNA, 19 nt, Artificial Sequence
  Description of Artificial Sequence: Synthetic oligonucleotide
  Sense strand starting at position 3634 of SEQ ID NO: 1243494
acuuauacuucuguugauu

SEQ ID NO: 1419745 - RNA, 19 nt, Artificial Sequence
  Description of Artificial Sequence: Synthetic oligonucleotide
  Antisense strand to SEQ ID NO: 1419744
aaucaacagaaguauaagu

SEQ ID NO: 1419746 - RNA, 19 nt, Artificial Sequence
  Description of Artificial Sequence: Synthetic oligonucleotide
  Sense strand starting at position 3645 of SEQ ID NO: 1243494
uguugauuccuuuguguag

SEQ ID NO: 1419747 - RNA, 19 nt, Artificial Sequence
  Description of Artificial Sequence: Synthetic oligonucleotide
  Antisense strand to SEQ ID NO: 1419746
cuacacaaaggaaucaaca

SEQ ID NO: 1419748 - RNA, 19 nt, Artificial Sequence
  Description of Artificial Sequence: Synthetic oligonucleotide
  Sense strand starting at position 3646 of SEQ ID NO: 1243494
guugauuccuuuguguaga

SEQ ID NO: 1419749 - RNA, 19 nt, Artificial Sequence
  Description of Artificial Sequence: Synthetic oligonucleotide
  Antisense strand to SEQ ID NO: 1419748
ucuacacaaaggaaucaac

SEQ ID NO: 1419750 - RNA, 19 nt, Artificial Sequence
  Description of Artificial Sequence: Synthetic oligonucleotide
  Sense strand starting at position 3648 of SEQ ID NO: 1243494
ugauuccuuuguguagauu

SEQ ID NO: 1419751 - RNA, 19 nt, Artificial Sequence
  Description of Artificial Sequence: Synthetic oligonucleotide
  Antisense strand to SEQ ID NO: 1419750
aaucuacacaaaggaauca

SEQ ID NO: 1419752 - RNA, 19 nt, Artificial Sequence
  Description of Artificial Sequence: Synthetic oligonucleotide
  Sense strand starting at position 3649 of SEQ ID NO: 1243494
gauuccuuuguguagauua

SEQ ID NO: 1419753 - RNA, 19 nt, Artificial Sequence
  Description of Artificial Sequence: Synthetic oligonucleotide
  Antisense strand to SEQ ID NO: 1419752
uaaucuacacaaaggaauc

SEQ ID NO: 1419754 - RNA, 19 nt, Artificial Sequence
  Description of Artificial Sequence: Synthetic oligonucleotide
  Sense strand starting at position 3651 of SEQ ID NO: 1243494
uuccuuuguguagauuaga

SEQ ID NO: 1419755 - RNA, 19 nt, Artificial Sequence
  Description of Artificial Sequence: Synthetic oligonucleotide
  Antisense strand to SEQ ID NO: 1419754
ucuaaucuacacaaaggaa

SEQ ID NO: 1419756 - RNA, 19 nt, Artificial Sequence
  Description of Artificial Sequence: Synthetic oligonucleotide
  Sense strand starting at position 3654 of SEQ ID NO: 1243494
cuuuguguagauuagaguu

SEQ ID NO: 1419757 - RNA, 19 nt, Artificial Sequence
  Description of Artificial Sequence: Synthetic oligonucleotide
  Antisense strand to SEQ ID NO: 1419756
aacucuaaucuacacaaag

SEQ ID NO: 1419758 - RNA, 19 nt, Artificial Sequence
  Description of Artificial Sequence: Synthetic oligonucleotide
  Sense strand starting at position 3662 of SEQ ID NO: 1243494
agauuagaguuacacaauu

SEQ ID NO: 1419759 - RNA, 19 nt, Artificial Sequence
  Description of Artificial Sequence: Synthetic oligonucleotide
  Antisense strand to SEQ ID NO: 1419758
aauuguguaacucuaaucu

SEQ ID NO: 1419760 - RNA, 19 nt, Artificial Sequence
  Description of Artificial Sequence: Synthetic oligonucleotide
  Sense strand starting at position 3732 of SEQ ID NO: 1243494
uguagcuugcugcaacaga

SEQ ID NO: 1419761 - RNA, 19 nt, Artificial Sequence
  Description of Artificial Sequence: Synthetic oligonucleotide
  Antisense strand to SEQ ID NO: 1419760
ucuguugcagcaagcuaca

SEQ ID NO: 1419762 - RNA, 19 nt, Artificial Sequence
  Description of Artificial Sequence: Synthetic oligonucleotide
  Sense strand starting at position 3849 of SEQ ID NO: 1243494
aguccuuugugagcaaaug

SEQ ID NO: 1419763 - RNA, 19 nt, Artificial Sequence
  Description of Artificial Sequence: Synthetic oligonucleotide
  Antisense strand to SEQ ID NO: 1419762
cauuugcucacaaaggacu

SEQ ID NO: 1419764 - RNA, 19 nt, Artificial Sequence
  Description of Artificial Sequence: Synthetic oligonucleotide
  Sense strand starting at position 3871 of SEQ ID NO: 1243494
ggcagugucuuacugacca

SEQ ID NO: 1419765 - RNA, 19 nt, Artificial Sequence
  Description of Artificial Sequence: Synthetic oligonucleotide
  Antisense strand to SEQ ID NO: 1419764
uggucaguaagacacugcc

SEQ ID NO: 1419766 - RNA, 19 nt, Artificial Sequence
  Description of Artificial Sequence: Synthetic oligonucleotide
  Sense strand starting at position 3875 of SEQ ID NO: 1243494
gugucuuacugaccagaaa

SEQ ID NO: 1419767 - RNA, 19 nt, Artificial Sequence
  Description of Artificial Sequence: Synthetic oligonucleotide
  Antisense strand to SEQ ID NO: 1419766
uuucuggucaguaagacac

SEQ ID NO: 1419768 - RNA, 19 nt, Artificial Sequence
  Description of Artificial Sequence: Synthetic oligonucleotide
  Sense strand starting at position 3963 of SEQ ID NO: 1243494
gcagcagaauguucucuuu

SEQ ID NO: 1419769 - RNA, 19 nt, Artificial Sequence
  Description of Artificial Sequence: Synthetic oligonucleotide
  Antisense strand to SEQ ID NO: 1419768
aaagagaacauucugcugc

SEQ ID NO: 1419770 - RNA, 19 nt, Artificial Sequence
  Description of Artificial Sequence: Synthetic oligonucleotide
  Sense strand starting at position 605 of SEQ ID NO: 1243495
ccagcuauaggucauacuu

SEQ ID NO: 1419771 - RNA, 19 nt, Artificial Sequence
  Description of Artificial Sequence: Synthetic oligonucleotide
  Antisense strand to SEQ ID NO: 1419770
aaguaugaccuauagcugg

SEQ ID NO: 1419772 - RNA, 19 nt, Artificial Sequence
  Description of Artificial Sequence: Synthetic oligonucleotide
  Sense strand starting at position 754 of SEQ ID NO: 1243495
guguuacugaucgaaagga

SEQ ID NO: 1419773 - RNA, 19 nt, Artificial Sequence
  Description of Artificial Sequence: Synthetic oligonucleotide
  Antisense strand to SEQ ID NO: 1419772
uccuuucgaucaguaacac

SEQ ID NO: 1419774 - RNA, 19 nt, Artificial Sequence
  Description of Artificial Sequence: Synthetic oligonucleotide
  Sense strand starting at position 783 of SEQ ID NO: 1243495
ggagaacaaaguuguuagu

SEQ ID NO: 1419775 - RNA, 19 nt, Artificial Sequence
  Description of Artificial Sequence: Synthetic oligonucleotide
  Antisense strand to SEQ ID NO: 1419774
acuaacaacuuuguucucc

SEQ ID NO: 1419776 - RNA, 19 nt, Artificial Sequence
  Description of Artificial Sequence: Synthetic oligonucleotide
  Sense strand starting at position 945 of SEQ ID NO: 1243495
aguuaagcuuuaccaguaa

SEQ ID NO: 1419777 - RNA, 19 nt, Artificial Sequence
  Description of Artificial Sequence: Synthetic oligonucleotide
  Antisense strand to SEQ ID NO: 1419776
uuacugguaaagcuuaacu

SEQ ID NO: 1419778 - RNA, 19 nt, Artificial Sequence
  Description of Artificial Sequence: Synthetic oligonucleotide
  Sense strand starting at position 1338 of SEQ ID NO: 1243495
acuggaaaucaguggucau

SEQ ID NO: 1419779 - RNA, 19 nt, Artificial Sequence
  Description of Artificial Sequence: Synthetic oligonucleotide
  Antisense strand to SEQ ID NO: 1419778
augaccacugauuuccagu

SEQ ID NO: 1419780 - RNA, 19 nt, Artificial Sequence
  Description of Artificial Sequence: Synthetic oligonucleotide
  Sense strand starting at position 1339 of SEQ ID NO: 1243495
cuggaaaucaguggucauc

SEQ ID NO: 1419781 - RNA, 19 nt, Artificial Sequence
  Description of Artificial Sequence: Synthetic oligonucleotide
  Antisense strand to SEQ ID NO: 1419780
gaugaccacugauuuccag

SEQ ID NO: 1419782 - RNA, 19 nt, Artificial Sequence
  Description of Artificial Sequence: Synthetic oligonucleotide
  Sense strand starting at position 1341 of SEQ ID NO: 1243495
ggaaaucaguggucaucuc

SEQ ID NO: 1419783 - RNA, 19 nt, Artificial Sequence
  Description of Artificial Sequence: Synthetic oligonucleotide
  Antisense strand to SEQ ID NO: 1419782
gagaugaccacugauuucc

SEQ ID NO: 1419784 - RNA, 19 nt, Artificial Sequence
  Description of Artificial Sequence: Synthetic oligonucleotide
  Sense strand starting at position 1570 of SEQ ID NO: 1243495
cgcggacagcuccuuucau

SEQ ID NO: 1419785 - RNA, 19 nt, Artificial Sequence
  Description of Artificial Sequence: Synthetic oligonucleotide
  Antisense strand to SEQ ID NO: 1419784
augaaaggagcuguccgcg

SEQ ID NO: 1419786 - RNA, 19 nt, Artificial Sequence
  Description of Artificial Sequence: Synthetic oligonucleotide
  Sense strand starting at position 2603 of SEQ ID NO: 1243495
ucuuguucucuguugcuau

SEQ ID NO: 1419787 - RNA, 19 nt, Artificial Sequence
  Description of Artificial Sequence: Synthetic oligonucleotide
  Antisense strand to SEQ ID NO: 1419786
auagcaacagagaacaaga

SEQ ID NO: 1419788 - RNA, 19 nt, Artificial Sequence
  Description of Artificial Sequence: Synthetic oligonucleotide
  Sense strand starting at position 2645 of SEQ ID NO: 1243495
gggacacccucagugaaua

SEQ ID NO: 1419789 - RNA, 19 nt, Artificial Sequence
  Description of Artificial Sequence: Synthetic oligonucleotide
  Antisense strand to SEQ ID NO: 1419788
uauucacugaggguguccc

SEQ ID NO: 1419790 - RNA, 19 nt, Artificial Sequence
  Description of Artificial Sequence: Synthetic oligonucleotide
  Sense strand starting at position 2646 of SEQ ID NO: 1243495
ggacacccucagugaauaa

SEQ ID NO: 1419791 - RNA, 19 nt, Artificial Sequence
  Description of Artificial Sequence: Synthetic oligonucleotide
  Antisense strand to SEQ ID NO: 1419790
uuauucacugagggugucc

SEQ ID NO: 1419792 - RNA, 19 nt, Artificial Sequence
  Description of Artificial Sequence: Synthetic oligonucleotide
  Sense strand starting at position 2756 of SEQ ID NO: 1243495
ucuuuagcuccuuauuugu

SEQ ID NO: 1419793 - RNA, 19 nt, Artificial Sequence
  Description of Artificial Sequence: Synthetic oligonucleotide
  Antisense strand to SEQ ID NO: 1419792
acaaauaaggagcuaaaga

SEQ ID NO: 1419794 - RNA, 19 nt, Artificial Sequence
  Description of Artificial Sequence: Synthetic oligonucleotide
  Sense strand starting at position 2764 of SEQ ID NO: 1243495
uccuuauuuguucgucuca

SEQ ID NO: 1419795 - RNA, 19 nt, Artificial Sequence
  Description of Artificial Sequence: Synthetic oligonucleotide
  Antisense strand to SEQ ID NO: 1419794
ugagacgaacaaauaagga

SEQ ID NO: 1419796 - RNA, 19 nt, Artificial Sequence
  Description of Artificial Sequence: Synthetic oligonucleotide
  Sense strand starting at position 2838 of SEQ ID NO: 1243495
ccuugcugucuccagaaau

SEQ ID NO: 1419797 - RNA, 19 nt, Artificial Sequence
  Description of Artificial Sequence: Synthetic oligonucleotide
  Antisense strand to SEQ ID NO: 1419796
auuucuggagacagcaagg

SEQ ID NO: 1419798 - RNA, 19 nt, Artificial Sequence
  Description of Artificial Sequence: Synthetic oligonucleotide
  Sense strand starting at position 2848 of SEQ ID NO: 1243495
uccagaaauguuuggguuc

SEQ ID NO: 1419799 - RNA, 19 nt, Artificial Sequence
  Description of Artificial Sequence: Synthetic oligonucleotide
  Antisense strand to SEQ ID NO: 1419798
gaacccaaacauuucugga

SEQ ID NO: 1419800 - RNA, 19 nt, Artificial Sequence
  Description of Artificial Sequence: Synthetic oligonucleotide
  Sense strand starting at position 2963 of SEQ ID NO: 1243495
guguucucucaacugcgua

SEQ ID NO: 1419801 - RNA, 19 nt, Artificial Sequence
  Description of Artificial Sequence: Synthetic oligonucleotide
  Antisense strand to SEQ ID NO: 1419800
uacgcaguugagagaacac

SEQ ID NO: 1419802 - RNA, 19 nt, Artificial Sequence
  Description of Artificial Sequence: Synthetic oligonucleotide
  Sense strand starting at position 3044 of SEQ ID NO: 1243495
uaccuucuuguguggauuu

SEQ ID NO: 1419803 - RNA, 19 nt, Artificial Sequence
  Description of Artificial Sequence: Synthetic oligonucleotide
  Antisense strand to SEQ ID NO: 1419802
aaauccacacaagaaggua

SEQ ID NO: 1419804 - RNA, 19 nt, Artificial Sequence
  Description of Artificial Sequence: Synthetic oligonucleotide
  Sense strand starting at position 3179 of SEQ ID NO: 1243495
ggcaauacucuguagagcu

SEQ ID NO: 1419805 - RNA, 19 nt, Artificial Sequence
  Description of Artificial Sequence: Synthetic oligonucleotide
  Antisense strand to SEQ ID NO: 1419804
agcucuacagaguauugcc

SEQ ID NO: 1419806 - RNA, 19 nt, Artificial Sequence
  Description of Artificial Sequence: Synthetic oligonucleotide
  Sense strand starting at position 3196 of SEQ ID NO: 1243495
cugugcauuuaauuagagu

SEQ ID NO: 1419807 - RNA, 19 nt, Artificial Sequence
  Description of Artificial Sequence: Synthetic oligonucleotide
  Antisense strand to SEQ ID NO: 1419806
acucuaauuaaaugcacag

SEQ ID NO: 1419808 - RNA, 19 nt, Artificial Sequence
  Description of Artificial Sequence: Synthetic oligonucleotide
  Sense strand starting at position 3238 of SEQ ID NO: 1243495
guggcaucuccuuugcuuu

SEQ ID NO: 1419809 - RNA, 19 nt, Artificial Sequence
  Description of Artificial Sequence: Synthetic oligonucleotide
  Antisense strand to SEQ ID NO: 1419808
aaagcaaaggagaugccac

SEQ ID NO: 1419810 - RNA, 19 nt, Artificial Sequence
  Description of Artificial Sequence: Synthetic oligonucleotide
  Sense strand starting at position 3254 of SEQ ID NO: 1243495
uuugcuaacuuguuggaau

SEQ ID NO: 1419811 - RNA, 19 nt, Artificial Sequence
  Description of Artificial Sequence: Synthetic oligonucleotide
  Antisense strand to SEQ ID NO: 1419810
auuccaacaaguuagcaaa

SEQ ID NO: 1419812 - RNA, 19 nt, Artificial Sequence
  Description of Artificial Sequence: Synthetic oligonucleotide
  Sense strand starting at position 3256 of SEQ ID NO: 1243495
ugcuaacuuguuggaauga

SEQ ID NO: 1419813 - RNA, 19 nt, Artificial Sequence
  Description of Artificial Sequence: Synthetic oligonucleotide
  Antisense strand to SEQ ID NO: 1419812
ucauuccaacaaguuagca

SEQ ID NO: 1419814 - RNA, 19 nt, Artificial Sequence
  Description of Artificial Sequence: Synthetic oligonucleotide
  Sense strand starting at position 3299 of SEQ ID NO: 1243495
cugauauauguugaugagu

SEQ ID NO: 1419815 - RNA, 19 nt, Artificial Sequence
  Description of Artificial Sequence: Synthetic oligonucleotide
  Antisense strand to SEQ ID NO: 1419814
acucaucaacauauaucag

SEQ ID NO: 1419816 - RNA, 19 nt, Artificial Sequence
  Description of Artificial Sequence: Synthetic oligonucleotide
  Sense strand starting at position 3305 of SEQ ID NO: 1243495
uauguugaugaguggcaga

SEQ ID NO: 1419817 - RNA, 19 nt, Artificial Sequence
  Description of Artificial Sequence: Synthetic oligonucleotide
  Antisense strand to SEQ ID NO: 1419816
ucugccacucaucaacaua

SEQ ID NO: 1419818 - RNA, 19 nt, Artificial Sequence
  Description of Artificial Sequence: Synthetic oligonucleotide
  Sense strand starting at position 3324 of SEQ ID NO: 1243495
uguguagugagagguaaag

SEQ ID NO: 1419819 - RNA, 19 nt, Artificial Sequence
  Description of Artificial Sequence: Synthetic oligonucleotide
  Antisense strand to SEQ ID NO: 1419818
cuuuaccucucacuacaca

SEQ ID NO: 1419820 - RNA, 19 nt, Artificial Sequence
  Description of Artificial Sequence: Synthetic oligonucleotide
  Sense strand starting at position 3341 of SEQ ID NO: 1243495
agaggagcuuguuccaacu

SEQ ID NO: 1419821 - RNA, 19 nt, Artificial Sequence
  Description of Artificial Sequence: Synthetic oligonucleotide
  Antisense strand to SEQ ID NO: 1419820
aguuggaacaagcuccucu

SEQ ID NO: 1419822 - RNA, 19 nt, Artificial Sequence
  Description of Artificial Sequence: Synthetic oligonucleotide
  Sense strand starting at position 3357 of SEQ ID NO: 1243495
acuugagugccagaagucu

SEQ ID NO: 1419823 - RNA, 19 nt, Artificial Sequence
  Description of Artificial Sequence: Synthetic oligonucleotide
  Antisense strand to SEQ ID NO: 1419822
agacuucuggcacucaagu

SEQ ID NO: 1419824 - RNA, 19 nt, Artificial Sequence
  Description of Artificial Sequence: Synthetic oligonucleotide
  Sense strand starting at position 3442 of SEQ ID NO: 1243495
gugaacauggauuguuauu

SEQ ID NO: 1419825 - RNA, 19 nt, Artificial Sequence
  Description of Artificial Sequence: Synthetic oligonucleotide
  Antisense strand to SEQ ID NO: 1419824
aauaacaauccauguucac

SEQ ID NO: 1419826 - RNA, 19 nt, Artificial Sequence
  Description of Artificial Sequence: Synthetic oligonucleotide
  Sense strand starting at position 3444 of SEQ ID NO: 1243495
gaacauggauuguuauuaa

SEQ ID NO: 1419827 - RNA, 19 nt, Artificial Sequence
  Description of Artificial Sequence: Synthetic oligonucleotide
  Antisense strand to SEQ ID NO: 1419826
uuaauaacaauccauguuc

SEQ ID NO: 1419828 - RNA, 19 nt, Artificial Sequence
  Description of Artificial Sequence: Synthetic oligonucleotide
  Sense strand starting at position 3522 of SEQ ID NO: 1243495
gccacuaaaguauggagaa

SEQ ID NO: 1419829 - RNA, 19 nt, Artificial Sequence
  Description of Artificial Sequence: Synthetic oligonucleotide
  Antisense strand to SEQ ID NO: 1419828
uucuccauacuuuaguggc

SEQ ID NO: 1419830 - RNA, 19 nt, Artificial Sequence
  Description of Artificial Sequence: Synthetic oligonucleotide
  Sense strand starting at position 3578 of SEQ ID NO: 1243495
guaccuguuguuuaaagag

SEQ ID NO: 1419831 - RNA, 19 nt, Artificial Sequence
  Description of Artificial Sequence: Synthetic oligonucleotide
  Antisense strand to SEQ ID NO: 1419830
cucuuuaaacaacagguac

SEQ ID NO: 1419832 - RNA, 19 nt, Artificial Sequence
  Description of Artificial Sequence: Synthetic oligonucleotide
  Sense strand starting at position 3709 of SEQ ID NO: 1243495
aagagcuacucuuuauggu

SEQ ID NO: 1419833 - RNA, 19 nt, Artificial Sequence
  Description of Artificial Sequence: Synthetic oligonucleotide
  Antisense strand to SEQ ID NO: 1419832
accauaaagaguagcucuu

SEQ ID NO: 1419834 - RNA, 19 nt, Artificial Sequence
  Description of Artificial Sequence: Synthetic oligonucleotide
  Sense strand starting at position 3710 of SEQ ID NO: 1243495
agagcuacucuuuaugguu

SEQ ID NO: 1419835 - RNA, 19 nt, Artificial Sequence
  Description of Artificial Sequence: Synthetic oligonucleotide
  Antisense strand to SEQ ID NO: 1419834
aaccauaaagaguagcucu

SEQ ID NO: 1419836 - RNA, 19 nt, Artificial Sequence
  Description of Artificial Sequence: Synthetic oligonucleotide
  Sense strand starting at position 3833 of SEQ ID NO: 1243495
guuauuugcuuaccaucau

SEQ ID NO: 1419837 - RNA, 19 nt, Artificial Sequence
  Description of Artificial Sequence: Synthetic oligonucleotide
  Antisense strand to SEQ ID NO: 1419836
augaugguaagcaaauaac

SEQ ID NO: 1419838 - RNA, 19 nt, Artificial Sequence
  Description of Artificial Sequence: Synthetic oligonucleotide
  Sense strand starting at position 3866 of SEQ ID NO: 1243495
ucaagagccugguuucuaa

SEQ ID NO: 1419839 - RNA, 19 nt, Artificial Sequence
  Description of Artificial Sequence: Synthetic oligonucleotide
  Antisense strand to SEQ ID NO: 1419838
uuagaaaccaggcucuuga

SEQ ID NO: 1419840 - RNA, 19 nt, Artificial Sequence
  Description of Artificial Sequence: Synthetic oligonucleotide
  Sense strand starting at position 3873 of SEQ ID NO: 1243495
ccugguuucuaauugaggu

SEQ ID NO: 1419841 - RNA, 19 nt, Artificial Sequence
  Description of Artificial Sequence: Synthetic oligonucleotide
  Antisense strand to SEQ ID NO: 1419840
accucaauuagaaaccagg

SEQ ID NO: 1419842 - RNA, 19 nt, Artificial Sequence
  Description of Artificial Sequence: Synthetic oligonucleotide
  Sense strand starting at position 3874 of SEQ ID NO: 1243495
cugguuucuaauugagguu

SEQ ID NO: 1419843 - RNA, 19 nt, Artificial Sequence
  Description of Artificial Sequence: Synthetic oligonucleotide
  Antisense strand to SEQ ID NO: 1419842
aaccucaauuagaaaccag

SEQ ID NO: 1419844 - RNA, 19 nt, Artificial Sequence
  Description of Artificial Sequence: Synthetic oligonucleotide
  Sense strand starting at position 3875 of SEQ ID NO: 1243495
ugguuucuaauugagguuu

SEQ ID NO: 1419845 - RNA, 19 nt, Artificial Sequence
  Description of Artificial Sequence: Synthetic oligonucleotide
  Antisense strand to SEQ ID NO: 1419844
aaaccucaauuagaaacca

SEQ ID NO: 1419846 - RNA, 19 nt, Artificial Sequence
  Description of Artificial Sequence: Synthetic oligonucleotide
  Sense strand starting at position 3954 of SEQ ID NO: 1243495
uagaaagugucccuuagug

SEQ ID NO: 1419847 - RNA, 19 nt, Artificial Sequence
  Description of Artificial Sequence: Synthetic oligonucleotide
  Antisense strand to SEQ ID NO: 1419846
cacuaagggacacuuucua

SEQ ID NO: 1419848 - RNA, 19 nt, Artificial Sequence
  Description of Artificial Sequence: Synthetic oligonucleotide
  Sense strand starting at position 3956 of SEQ ID NO: 1243495
gaaagugucccuuagugag

SEQ ID NO: 1419849 - RNA, 19 nt, Artificial Sequence
  Description of Artificial Sequence: Synthetic oligonucleotide
  Antisense strand to SEQ ID NO: 1419848
cucacuaagggacacuuuc

SEQ ID NO: 1419850 - RNA, 19 nt, Artificial Sequence
  Description of Artificial Sequence: Synthetic oligonucleotide
  Sense strand starting at position 158 of SEQ ID NO: 1243496
ccagcuauaggucauacuu

SEQ ID NO: 1419851 - RNA, 19 nt, Artificial Sequence
  Description of Artificial Sequence: Synthetic oligonucleotide
  Antisense strand to SEQ ID NO: 1419850
aaguaugaccuauagcugg

SEQ ID NO: 1419852 - RNA, 19 nt, Artificial Sequence
  Description of Artificial Sequence: Synthetic oligonucleotide
  Sense strand starting at position 307 of SEQ ID NO: 1243496
guguuacugaucgaaagga

SEQ ID NO: 1419853 - RNA, 19 nt, Artificial Sequence
  Description of Artificial Sequence: Synthetic oligonucleotide
  Antisense strand to SEQ ID NO: 1419852
uccuuucgaucaguaacac

SEQ ID NO: 1419854 - RNA, 19 nt, Artificial Sequence
  Description of Artificial Sequence: Synthetic oligonucleotide
  Sense strand starting at position 336 of SEQ ID NO: 1243496
ggagaacaaaguuguuagu

SEQ ID NO: 1419855 - RNA, 19 nt, Artificial Sequence
  Description of Artificial Sequence: Synthetic oligonucleotide
  Antisense strand to SEQ ID NO: 1419854
acuaacaacuuuguucucc

SEQ ID NO: 1419856 - RNA, 19 nt, Artificial Sequence
  Description of Artificial Sequence: Synthetic oligonucleotide
  Sense strand starting at position 891 of SEQ ID NO: 1243496
acuggaaaucaguggucau

SEQ ID NO: 1419857 - RNA, 19 nt, Artificial Sequence
  Description of Artificial Sequence: Synthetic oligonucleotide
  Antisense strand to SEQ ID NO: 1419856
augaccacugauuuccagu

SEQ ID NO: 1419858 - RNA, 19 nt, Artificial Sequence
  Description of Artificial Sequence: Synthetic oligonucleotide
  Sense strand starting at position 892 of SEQ ID NO: 1243496
cuggaaaucaguggucauc

SEQ ID NO: 1419859 - RNA, 19 nt, Artificial Sequence
  Description of Artificial Sequence: Synthetic oligonucleotide
  Antisense strand to SEQ ID NO: 1419858
gaugaccacugauuuccag

SEQ ID NO: 1419860 - RNA, 19 nt, Artificial Sequence
  Description of Artificial Sequence: Synthetic oligonucleotide
  Sense strand starting at position 894 of SEQ ID NO: 1243496
ggaaaucaguggucaucuc

SEQ ID NO: 1419861 - RNA, 19 nt, Artificial Sequence
  Description of Artificial Sequence: Synthetic oligonucleotide
  Antisense strand to SEQ ID NO: 1419860
gagaugaccacugauuucc

SEQ ID NO: 1419862 - RNA, 19 nt, Artificial Sequence
  Description of Artificial Sequence: Synthetic oligonucleotide
  Sense strand starting at position 1123 of SEQ ID NO: 1243496
cgcggacagcuccuuucau

SEQ ID NO: 1419863 - RNA, 19 nt, Artificial Sequence
  Description of Artificial Sequence: Synthetic oligonucleotide
  Antisense strand to SEQ ID NO: 1419862
augaaaggagcuguccgcg

SEQ ID NO: 1419864 - RNA, 19 nt, Artificial Sequence
  Description of Artificial Sequence: Synthetic oligonucleotide
  Sense strand starting at position 2156 of SEQ ID NO: 1243496
ucuuguucucuguugcuau

SEQ ID NO: 1419865 - RNA, 19 nt, Artificial Sequence
  Description of Artificial Sequence: Synthetic oligonucleotide
  Antisense strand to SEQ ID NO: 1419864
auagcaacagagaacaaga

SEQ ID NO: 1419866 - RNA, 19 nt, Artificial Sequence
  Description of Artificial Sequence: Synthetic oligonucleotide
  Sense strand starting at position 2198 of SEQ ID NO: 1243496
gggacacccucagugaaua

SEQ ID NO: 1419867 - RNA, 19 nt, Artificial Sequence
  Description of Artificial Sequence: Synthetic oligonucleotide
  Antisense strand to SEQ ID NO: 1419866
uauucacugaggguguccc

SEQ ID NO: 1419868 - RNA, 19 nt, Artificial Sequence
  Description of Artificial Sequence: Synthetic oligonucleotide
  Sense strand starting at position 2199 of SEQ ID NO: 1243496
ggacacccucagugaauaa

SEQ ID NO: 1419869 - RNA, 19 nt, Artificial Sequence
  Description of Artificial Sequence: Synthetic oligonucleotide
  Antisense strand to SEQ ID NO: 1419868
uuauucacugagggugucc

SEQ ID NO: 1419870 - RNA, 19 nt, Artificial Sequence
  Description of Artificial Sequence: Synthetic oligonucleotide
  Sense strand starting at position 2309 of SEQ ID NO: 1243496
ucuuuagcuccuuauuugu

SEQ ID NO: 1419871 - RNA, 19 nt, Artificial Sequence
  Description of Artificial Sequence: Synthetic oligonucleotide
  Antisense strand to SEQ ID NO: 1419870
acaaauaaggagcuaaaga

SEQ ID NO: 1419872 - RNA, 19 nt, Artificial Sequence
  Description of Artificial Sequence: Synthetic oligonucleotide
  Sense strand starting at position 2317 of SEQ ID NO: 1243496
uccuuauuuguucgucuca

SEQ ID NO: 1419873 - RNA, 19 nt, Artificial Sequence
  Description of Artificial Sequence: Synthetic oligonucleotide
  Antisense strand to SEQ ID NO: 1419872
ugagacgaacaaauaagga

SEQ ID NO: 1419874 - RNA, 19 nt, Artificial Sequence
  Description of Artificial Sequence: Synthetic oligonucleotide
  Sense strand starting at position 2391 of SEQ ID NO: 1243496
ccuugcugucuccagaaau

SEQ ID NO: 1419875 - RNA, 19 nt, Artificial Sequence
  Description of Artificial Sequence: Synthetic oligonucleotide
  Antisense strand to SEQ ID NO: 1419874
auuucuggagacagcaagg

SEQ ID NO: 1419876 - RNA, 19 nt, Artificial Sequence
  Description of Artificial Sequence: Synthetic oligonucleotide
  Sense strand starting at position 2401 of SEQ ID NO: 1243496
uccagaaauguuuggguuc

SEQ ID NO: 1419877 - RNA, 19 nt, Artificial Sequence
  Description of Artificial Sequence: Synthetic oligonucleotide
  Antisense strand to SEQ ID NO: 1419876
gaacccaaacauuucugga

SEQ ID NO: 1419878 - RNA, 19 nt, Artificial Sequence
  Description of Artificial Sequence: Synthetic oligonucleotide
  Sense strand starting at position 2516 of SEQ ID NO: 1243496
guguucucucaacugcgua

SEQ ID NO: 1419879 - RNA, 19 nt, Artificial Sequence
  Description of Artificial Sequence: Synthetic oligonucleotide
  Antisense strand to SEQ ID NO: 1419878
uacgcaguugagagaacac

SEQ ID NO: 1419880 - RNA, 19 nt, Artificial Sequence
  Description of Artificial Sequence: Synthetic oligonucleotide
  Sense strand starting at position 2597 of SEQ ID NO: 1243496
uaccuucuuguguggauuu

SEQ ID NO: 1419881 - RNA, 19 nt, Artificial Sequence
  Description of Artificial Sequence: Synthetic oligonucleotide
  Antisense strand to SEQ ID NO: 1419880
aaauccacacaagaaggua

SEQ ID NO: 1419882 - RNA, 19 nt, Artificial Sequence
  Description of Artificial Sequence: Synthetic oligonucleotide
  Sense strand starting at position 2732 of SEQ ID NO: 1243496
ggcaauacucuguagagcu

SEQ ID NO: 1419883 - RNA, 19 nt, Artificial Sequence
  Description of Artificial Sequence: Synthetic oligonucleotide
  Antisense strand to SEQ ID NO: 1419882
agcucuacagaguauugcc

SEQ ID NO: 1419884 - RNA, 19 nt, Artificial Sequence
  Description of Artificial Sequence: Synthetic oligonucleotide
  Sense strand starting at position 2749 of SEQ ID NO: 1243496
cugugcauuuaauuagagu

SEQ ID NO: 1419885 - RNA, 19 nt, Artificial Sequence
  Description of Artificial Sequence: Synthetic oligonucleotide
  Antisense strand to SEQ ID NO: 1419884
acucuaauuaaaugcacag

SEQ ID NO: 1419886 - RNA, 19 nt, Artificial Sequence
  Description of Artificial Sequence: Synthetic oligonucleotide
  Sense strand starting at position 2791 of SEQ ID NO: 1243496
guggcaucuccuuugcuuu

SEQ ID NO: 1419887 - RNA, 19 nt, Artificial Sequence
  Description of Artificial Sequence: Synthetic oligonucleotide
  Antisense strand to SEQ ID NO: 1419886
aaagcaaaggagaugccac

SEQ ID NO: 1419888 - RNA, 19 nt, Artificial Sequence
  Description of Artificial Sequence: Synthetic oligonucleotide
  Sense strand starting at position 2809 of SEQ ID NO: 1243496
ugcuaacuuguuggaauga

SEQ ID NO: 1419889 - RNA, 19 nt, Artificial Sequence
  Description of Artificial Sequence: Synthetic oligonucleotide
  Antisense strand to SEQ ID NO: 1419888
ucauuccaacaaguuagca

SEQ ID NO: 1419890 - RNA, 19 nt, Artificial Sequence
  Description of Artificial Sequence: Synthetic oligonucleotide
  Sense strand starting at position 2852 of SEQ ID NO: 1243496
cugauauauguugaugagu

SEQ ID NO: 1419891 - RNA, 19 nt, Artificial Sequence
  Description of Artificial Sequence: Synthetic oligonucleotide
  Antisense strand to SEQ ID NO: 1419890
acucaucaacauauaucag

SEQ ID NO: 1419892 - RNA, 19 nt, Artificial Sequence
  Description of Artificial Sequence: Synthetic oligonucleotide
  Sense strand starting at position 2858 of SEQ ID NO: 1243496
uauguugaugaguggcaga

SEQ ID NO: 1419893 - RNA, 19 nt, Artificial Sequence
  Description of Artificial Sequence: Synthetic oligonucleotide
  Antisense strand to SEQ ID NO: 1419892
ucugccacucaucaacaua

SEQ ID NO: 1419894 - RNA, 19 nt, Artificial Sequence
  Description of Artificial Sequence: Synthetic oligonucleotide
  Sense strand starting at position 2877 of SEQ ID NO: 1243496
uguguagugagagguaaag

SEQ ID NO: 1419895 - RNA, 19 nt, Artificial Sequence
  Description of Artificial Sequence: Synthetic oligonucleotide
  Antisense strand to SEQ ID NO: 1419894
cuuuaccucucacuacaca

SEQ ID NO: 1419896 - RNA, 19 nt, Artificial Sequence
  Description of Artificial Sequence: Synthetic oligonucleotide
  Sense strand starting at position 2894 of SEQ ID NO: 1243496
agaggagcuuguuccaacu

SEQ ID NO: 1419897 - RNA, 19 nt, Artificial Sequence
  Description of Artificial Sequence: Synthetic oligonucleotide
  Antisense strand to SEQ ID NO: 1419896
aguuggaacaagcuccucu

SEQ ID NO: 1419898 - RNA, 19 nt, Artificial Sequence
  Description of Artificial Sequence: Synthetic oligonucleotide
  Sense strand starting at position 2910 of SEQ ID NO: 1243496
acuugagugccagaagucu

SEQ ID NO: 1419899 - RNA, 19 nt, Artificial Sequence
  Description of Artificial Sequence: Synthetic oligonucleotide
  Antisense strand to SEQ ID NO: 1419898
agacuucuggcacucaagu

SEQ ID NO: 1419900 - RNA, 19 nt, Artificial Sequence
  Description of Artificial Sequence: Synthetic oligonucleotide
  Sense strand starting at position 2995 of SEQ ID NO: 1243496
gugaacauggauuguuauu

SEQ ID NO: 1419901 - RNA, 19 nt, Artificial Sequence
  Description of Artificial Sequence: Synthetic oligonucleotide
  Antisense strand to SEQ ID NO: 1419900
aauaacaauccauguucac

SEQ ID NO: 1419902 - RNA, 19 nt, Artificial Sequence
  Description of Artificial Sequence: Synthetic oligonucleotide
  Sense strand starting at position 2997 of SEQ ID NO: 1243496
gaacauggauuguuauuaa

SEQ ID NO: 1419903 - RNA, 19 nt, Artificial Sequence
  Description of Artificial Sequence: Synthetic oligonucleotide
  Antisense strand to SEQ ID NO: 1419902
uuaauaacaauccauguuc

SEQ ID NO: 1419904 - RNA, 19 nt, Artificial Sequence
  Description of Artificial Sequence: Synthetic oligonucleotide
  Sense strand starting at position 3075 of SEQ ID NO: 1243496
gccacuaaaguauggagaa

SEQ ID NO: 1419905 - RNA, 19 nt, Artificial Sequence
  Description of Artificial Sequence: Synthetic oligonucleotide
  Antisense strand to SEQ ID NO: 1419904
uucuccauacuuuaguggc

SEQ ID NO: 1419906 - RNA, 19 nt, Artificial Sequence
  Description of Artificial Sequence: Synthetic oligonucleotide
  Sense strand starting at position 3131 of SEQ ID NO: 1243496
guaccuguuguuuaaagag

SEQ ID NO: 1419907 - RNA, 19 nt, Artificial Sequence
  Description of Artificial Sequence: Synthetic oligonucleotide
  Antisense strand to SEQ ID NO: 1419906
cucuuuaaacaacagguac

SEQ ID NO: 1419908 - RNA, 19 nt, Artificial Sequence
  Description of Artificial Sequence: Synthetic oligonucleotide
  Sense strand starting at position 3262 of SEQ ID NO: 1243496
aagagcuacucuuuauggu

SEQ ID NO: 1419909 - RNA, 19 nt, Artificial Sequence
  Description of Artificial Sequence: Synthetic oligonucleotide
  Antisense strand to SEQ ID NO: 1419908
accauaaagaguagcucuu

SEQ ID NO: 1419910 - RNA, 19 nt, Artificial Sequence
  Description of Artificial Sequence: Synthetic oligonucleotide
  Sense strand starting at position 3263 of SEQ ID NO: 1243496
agagcuacucuuuaugguu

SEQ ID NO: 1419911 - RNA, 19 nt, Artificial Sequence
  Description of Artificial Sequence: Synthetic oligonucleotide
  Antisense strand to SEQ ID NO: 1419910
aaccauaaagaguagcucu

SEQ ID NO: 1419912 - RNA, 19 nt, Artificial Sequence
  Description of Artificial Sequence: Synthetic oligonucleotide
  Sense strand starting at position 3386 of SEQ ID NO: 1243496
guuauuugcuuaccaucau

SEQ ID NO: 1419913 - RNA, 19 nt, Artificial Sequence
  Description of Artificial Sequence: Synthetic oligonucleotide
  Antisense strand to SEQ ID NO: 1419912
augaugguaagcaaauaac

SEQ ID NO: 1419914 - RNA, 19 nt, Artificial Sequence
  Description of Artificial Sequence: Synthetic oligonucleotide
  Sense strand starting at position 3419 of SEQ ID NO: 1243496
ucaagagccugguuucuaa

SEQ ID NO: 1419915 - RNA, 19 nt, Artificial Sequence
  Description of Artificial Sequence: Synthetic oligonucleotide
  Antisense strand to SEQ ID NO: 1419914
uuagaaaccaggcucuuga

SEQ ID NO: 1419916 - RNA, 19 nt, Artificial Sequence
  Description of Artificial Sequence: Synthetic oligonucleotide
  Sense strand starting at position 3426 of SEQ ID NO: 1243496
ccugguuucuaauugaggu

SEQ ID NO: 1419917 - RNA, 19 nt, Artificial Sequence
  Description of Artificial Sequence: Synthetic oligonucleotide
  Antisense strand to SEQ ID NO: 1419916
accucaauuagaaaccagg

SEQ ID NO: 1419918 - RNA, 19 nt, Artificial Sequence
  Description of Artificial Sequence: Synthetic oligonucleotide
  Sense strand starting at position 3428 of SEQ ID NO: 1243496
ugguuucuaauugagguuu

SEQ ID NO: 1419919 - RNA, 19 nt, Artificial Sequence
  Description of Artificial Sequence: Synthetic oligonucleotide
  Antisense strand to SEQ ID NO: 1419918
aaaccucaauuagaaacca

SEQ ID NO: 1419920 - RNA, 19 nt, Artificial Sequence
  Description of Artificial Sequence: Synthetic oligonucleotide
  Sense strand starting at position 3507 of SEQ ID NO: 1243496
uagaaagugucccuuagug

SEQ ID NO: 1419921 - RNA, 19 nt, Artificial Sequence
  Description of Artificial Sequence: Synthetic oligonucleotide
  Antisense strand to SEQ ID NO: 1419920
cacuaagggacacuuucua

SEQ ID NO: 1419922 - RNA, 19 nt, Artificial Sequence
  Description of Artificial Sequence: Synthetic oligonucleotide
  Sense strand starting at position 3509 of SEQ ID NO: 1243496
gaaagugucccuuagugag

SEQ ID NO: 1419923 - RNA, 19 nt, Artificial Sequence
  Description of Artificial Sequence: Synthetic oligonucleotide
  Antisense strand to SEQ ID NO: 1419922
cucacuaagggacacuuuc

SEQ ID NO: 1419924 - RNA, 19 nt, Artificial Sequence
  Description of Artificial Sequence: Synthetic oligonucleotide
  Sense strand starting at position 3758 of SEQ ID NO: 1243496
cauuuauugugggauauag

SEQ ID NO: 1419925 - RNA, 19 nt, Artificial Sequence
  Description of Artificial Sequence: Synthetic oligonucleotide
  Antisense strand to SEQ ID NO: 1419924
cuauaucccacaauaaaug

SEQ ID NO: 1419926 - RNA, 19 nt, Artificial Sequence
  Description of Artificial Sequence: Synthetic oligonucleotide
  Sense strand starting at position 3760 of SEQ ID NO: 1243496
uuuauugugggauauagua

SEQ ID NO: 1419927 - RNA, 19 nt, Artificial Sequence
  Description of Artificial Sequence: Synthetic oligonucleotide
  Antisense strand to SEQ ID NO: 1419926
uacuauaucccacaauaaa

SEQ ID NO: 1419928 - RNA, 19 nt, Artificial Sequence
  Description of Artificial Sequence: Synthetic oligonucleotide
  Sense strand starting at position 3810 of SEQ ID NO: 1243496
gccuuccuuccagagaaau

SEQ ID NO: 1419929 - RNA, 19 nt, Artificial Sequence
  Description of Artificial Sequence: Synthetic oligonucleotide
  Antisense strand to SEQ ID NO: 1419928
auuucucuggaaggaaggc

SEQ ID NO: 1419930 - RNA, 19 nt, Artificial Sequence
  Description of Artificial Sequence: Synthetic oligonucleotide
  Sense strand starting at position 51 of SEQ ID NO: 1243497
auuacaaguccuggcuuaa

SEQ ID NO: 1419931 - RNA, 19 nt, Artificial Sequence
  Description of Artificial Sequence: Synthetic oligonucleotide
  Antisense strand to SEQ ID NO: 1419930
uuaagccaggacuuguaau

SEQ ID NO: 1419932 - RNA, 19 nt, Artificial Sequence
  Description of Artificial Sequence: Synthetic oligonucleotide
  Sense strand starting at position 55 of SEQ ID NO: 1243497
caaguccuggcuuaaagau

SEQ ID NO: 1419933 - RNA, 19 nt, Artificial Sequence
  Description of Artificial Sequence: Synthetic oligonucleotide
  Antisense strand to SEQ ID NO: 1419932
aucuuuaagccaggacuug

SEQ ID NO: 1419934 - RNA, 19 nt, Artificial Sequence
  Description of Artificial Sequence: Synthetic oligonucleotide
  Sense strand starting at position 394 of SEQ ID NO: 1243497
cauugagauggucgguauu

SEQ ID NO: 1419935 - RNA, 19 nt, Artificial Sequence
  Description of Artificial Sequence: Synthetic oligonucleotide
  Antisense strand to SEQ ID NO: 1419934
aauaccgaccaucucaaug

SEQ ID NO: 1419936 - RNA, 19 nt, Artificial Sequence
  Description of Artificial Sequence: Synthetic oligonucleotide
  Sense strand starting at position 834 of SEQ ID NO: 1243497
ccagcuauaggucauacuu

SEQ ID NO: 1419937 - RNA, 19 nt, Artificial Sequence
  Description of Artificial Sequence: Synthetic oligonucleotide
  Antisense strand to SEQ ID NO: 1419936
aaguaugaccuauagcugg

SEQ ID NO: 1419938 - RNA, 19 nt, Artificial Sequence
  Description of Artificial Sequence: Synthetic oligonucleotide
  Sense strand starting at position 983 of SEQ ID NO: 1243497
guguuacugaucgaaagga

SEQ ID NO: 1419939 - RNA, 19 nt, Artificial Sequence
  Description of Artificial Sequence: Synthetic oligonucleotide
  Antisense strand to SEQ ID NO: 1419938
uccuuucgaucaguaacac

SEQ ID NO: 1419940 - RNA, 19 nt, Artificial Sequence
  Description of Artificial Sequence: Synthetic oligonucleotide
  Sense strand starting at position 1012 of SEQ ID NO: 1243497
ggagaacaaaguuguuagu

SEQ ID NO: 1419941 - RNA, 19 nt, Artificial Sequence
  Description of Artificial Sequence: Synthetic oligonucleotide
  Antisense strand to SEQ ID NO: 1419940
acuaacaacuuuguucucc

SEQ ID NO: 1419942 - RNA, 19 nt, Artificial Sequence
  Description of Artificial Sequence: Synthetic oligonucleotide
  Sense strand starting at position 1174 of SEQ ID NO: 1243497
aguuaagcuuuaccaguaa

SEQ ID NO: 1419943 - RNA, 19 nt, Artificial Sequence
  Description of Artificial Sequence: Synthetic oligonucleotide
  Antisense strand to SEQ ID NO: 1419942
uuacugguaaagcuuaacu

SEQ ID NO: 1419944 - RNA, 19 nt, Artificial Sequence
  Description of Artificial Sequence: Synthetic oligonucleotide
  Sense strand starting at position 1567 of SEQ ID NO: 1243497
acuggaaaucaguggucau

SEQ ID NO: 1419945 - RNA, 19 nt, Artificial Sequence
  Description of Artificial Sequence: Synthetic oligonucleotide
  Antisense strand to SEQ ID NO: 1419944
augaccacugauuuccagu

SEQ ID NO: 1419946 - RNA, 19 nt, Artificial Sequence
  Description of Artificial Sequence: Synthetic oligonucleotide
  Sense strand starting at position 1568 of SEQ ID NO: 1243497
cuggaaaucaguggucauc

SEQ ID NO: 1419947 - RNA, 19 nt, Artificial Sequence
  Description of Artificial Sequence: Synthetic oligonucleotide
  Antisense strand to SEQ ID NO: 1419946
gaugaccacugauuuccag

SEQ ID NO: 1419948 - RNA, 19 nt, Artificial Sequence
  Description of Artificial Sequence: Synthetic oligonucleotide
  Sense strand starting at position 1570 of SEQ ID NO: 1243497
ggaaaucaguggucaucuc

SEQ ID NO: 1419949 - RNA, 19 nt, Artificial Sequence
  Description of Artificial Sequence: Synthetic oligonucleotide
  Antisense strand to SEQ ID NO: 1419948
gagaugaccacugauuucc

SEQ ID NO: 1419950 - RNA, 19 nt, Artificial Sequence
  Description of Artificial Sequence: Synthetic oligonucleotide
  Sense strand starting at position 1799 of SEQ ID NO: 1243497
cgcggacagcuccuuucau

SEQ ID NO: 1419951 - RNA, 19 nt, Artificial Sequence
  Description of Artificial Sequence: Synthetic oligonucleotide
  Antisense strand to SEQ ID NO: 1419950
augaaaggagcuguccgcg

SEQ ID NO: 1419952 - RNA, 19 nt, Artificial Sequence
  Description of Artificial Sequence: Synthetic oligonucleotide
  Sense strand starting at position 2832 of SEQ ID NO: 1243497
ucuuguucucuguugcuau

SEQ ID NO: 1419953 - RNA, 19 nt, Artificial Sequence
  Description of Artificial Sequence: Synthetic oligonucleotide
  Antisense strand to SEQ ID NO: 1419952
auagcaacagagaacaaga

SEQ ID NO: 1419954 - RNA, 19 nt, Artificial Sequence
  Description of Artificial Sequence: Synthetic oligonucleotide
  Sense strand starting at position 2874 of SEQ ID NO: 1243497
gggacacccucagugaaua

SEQ ID NO: 1419955 - RNA, 19 nt, Artificial Sequence
  Description of Artificial Sequence: Synthetic oligonucleotide
  Antisense strand to SEQ ID NO: 1419954
uauucacugaggguguccc

SEQ ID NO: 1419956 - RNA, 19 nt, Artificial Sequence
  Description of Artificial Sequence: Synthetic oligonucleotide
  Sense strand starting at position 2875 of SEQ ID NO: 1243497
ggacacccucagugaauaa

SEQ ID NO: 1419957 - RNA, 19 nt, Artificial Sequence
  Description of Artificial Sequence: Synthetic oligonucleotide
  Antisense strand to SEQ ID NO: 1419956
uuauucacugagggugucc

SEQ ID NO: 1419958 - RNA, 19 nt, Artificial Sequence
  Description of Artificial Sequence: Synthetic oligonucleotide
  Sense strand starting at position 2985 of SEQ ID NO: 1243497
ucuuuagcuccuuauuugu

SEQ ID NO: 1419959 - RNA, 19 nt, Artificial Sequence
  Description of Artificial Sequence: Synthetic oligonucleotide
  Antisense strand to SEQ ID NO: 1419958
acaaauaaggagcuaaaga

SEQ ID NO: 1419960 - RNA, 19 nt, Artificial Sequence
  Description of Artificial Sequence: Synthetic oligonucleotide
  Sense strand starting at position 2993 of SEQ ID NO: 1243497
uccuuauuuguucgucuca

SEQ ID NO: 1419961 - RNA, 19 nt, Artificial Sequence
  Description of Artificial Sequence: Synthetic oligonucleotide
  Antisense strand to SEQ ID NO: 1419960
ugagacgaacaaauaagga

SEQ ID NO: 1419962 - RNA, 19 nt, Artificial Sequence
  Description of Artificial Sequence: Synthetic oligonucleotide
  Sense strand starting at position 3005 of SEQ ID NO: 1243497
cgucucagcagcuaaugaa

SEQ ID NO: 1419963 - RNA, 19 nt, Artificial Sequence
  Description of Artificial Sequence: Synthetic oligonucleotide
  Antisense strand to SEQ ID NO: 1419962
uucauuagcugcugagacg

SEQ ID NO: 1419964 - RNA, 19 nt, Artificial Sequence
  Description of Artificial Sequence: Synthetic oligonucleotide
  Sense strand starting at position 3067 of SEQ ID NO: 1243497
ccuugcugucuccagaaau

SEQ ID NO: 1419965 - RNA, 19 nt, Artificial Sequence
  Description of Artificial Sequence: Synthetic oligonucleotide
  Antisense strand to SEQ ID NO: 1419964
auuucuggagacagcaagg

SEQ ID NO: 1419966 - RNA, 19 nt, Artificial Sequence
  Description of Artificial Sequence: Synthetic oligonucleotide
  Sense strand starting at position 3077 of SEQ ID NO: 1243497
uccagaaauguuuggguuc

SEQ ID NO: 1419967 - RNA, 19 nt, Artificial Sequence
  Description of Artificial Sequence: Synthetic oligonucleotide
  Antisense strand to SEQ ID NO: 1419966
gaacccaaacauuucugga

SEQ ID NO: 1419968 - RNA, 19 nt, Artificial Sequence
  Description of Artificial Sequence: Synthetic oligonucleotide
  Sense strand starting at position 3152 of SEQ ID NO: 1243497
uuugcuagacauugagcua

SEQ ID NO: 1419969 - RNA, 19 nt, Artificial Sequence
  Description of Artificial Sequence: Synthetic oligonucleotide
  Antisense strand to SEQ ID NO: 1419968
uagcucaaugucuagcaaa

SEQ ID NO: 1419970 - RNA, 19 nt, Artificial Sequence
  Description of Artificial Sequence: Synthetic oligonucleotide
  Sense strand starting at position 3192 of SEQ ID NO: 1243497
guguucucucaacugcgua

SEQ ID NO: 1419971 - RNA, 19 nt, Artificial Sequence
  Description of Artificial Sequence: Synthetic oligonucleotide
  Antisense strand to SEQ ID NO: 1419970
uacgcaguugagagaacac

SEQ ID NO: 1419972 - RNA, 19 nt, Artificial Sequence
  Description of Artificial Sequence: Synthetic oligonucleotide
  Sense strand starting at position 3273 of SEQ ID NO: 1243497
uaccuucuuguguggauuu

SEQ ID NO: 1419973 - RNA, 19 nt, Artificial Sequence
  Description of Artificial Sequence: Synthetic oligonucleotide
  Antisense strand to SEQ ID NO: 1419972
aaauccacacaagaaggua

SEQ ID NO: 1419974 - RNA, 19 nt, Artificial Sequence
  Description of Artificial Sequence: Synthetic oligonucleotide
  Sense strand starting at position 3408 of SEQ ID NO: 1243497
ggcaauacucuguagagcu

SEQ ID NO: 1419975 - RNA, 19 nt, Artificial Sequence
  Description of Artificial Sequence: Synthetic oligonucleotide
  Antisense strand to SEQ ID NO: 1419974
agcucuacagaguauugcc

SEQ ID NO: 1419976 - RNA, 19 nt, Artificial Sequence
  Description of Artificial Sequence: Synthetic oligonucleotide
  Sense strand starting at position 3425 of SEQ ID NO: 1243497
cugugcauuuaauuagagu

SEQ ID NO: 1419977 - RNA, 19 nt, Artificial Sequence
  Description of Artificial Sequence: Synthetic oligonucleotide
  Antisense strand to SEQ ID NO: 1419976
acucuaauuaaaugcacag

SEQ ID NO: 1419978 - RNA, 19 nt, Artificial Sequence
  Description of Artificial Sequence: Synthetic oligonucleotide
  Sense strand starting at position 3467 of SEQ ID NO: 1243497
guggcaucuccuuugcuuu

SEQ ID NO: 1419979 - RNA, 19 nt, Artificial Sequence
  Description of Artificial Sequence: Synthetic oligonucleotide
  Antisense strand to SEQ ID NO: 1419978
aaagcaaaggagaugccac

SEQ ID NO: 1419980 - RNA, 19 nt, Artificial Sequence
  Description of Artificial Sequence: Synthetic oligonucleotide
  Sense strand starting at position 3483 of SEQ ID NO: 1243497
uuugcuaacuuguuggaau

SEQ ID NO: 1419981 - RNA, 19 nt, Artificial Sequence
  Description of Artificial Sequence: Synthetic oligonucleotide
  Antisense strand to SEQ ID NO: 1419980
auuccaacaaguuagcaaa

SEQ ID NO: 1419982 - RNA, 19 nt, Artificial Sequence
  Description of Artificial Sequence: Synthetic oligonucleotide
  Sense strand starting at position 3485 of SEQ ID NO: 1243497
ugcuaacuuguuggaauga

SEQ ID NO: 1419983 - RNA, 19 nt, Artificial Sequence
  Description of Artificial Sequence: Synthetic oligonucleotide
  Antisense strand to SEQ ID NO: 1419982
ucauuccaacaaguuagca

SEQ ID NO: 1419984 - RNA, 19 nt, Artificial Sequence
  Description of Artificial Sequence: Synthetic oligonucleotide
  Sense strand starting at position 3528 of SEQ ID NO: 1243497
cugauauauguugaugagu

SEQ ID NO: 1419985 - RNA, 19 nt, Artificial Sequence
  Description of Artificial Sequence: Synthetic oligonucleotide
  Antisense strand to SEQ ID NO: 1419984
acucaucaacauauaucag

SEQ ID NO: 1419986 - RNA, 19 nt, Artificial Sequence
  Description of Artificial Sequence: Synthetic oligonucleotide
  Sense strand starting at position 3534 of SEQ ID NO: 1243497
uauguugaugaguggcaga

SEQ ID NO: 1419987 - RNA, 19 nt, Artificial Sequence
  Description of Artificial Sequence: Synthetic oligonucleotide
  Antisense strand to SEQ ID NO: 1419986
ucugccacucaucaacaua

SEQ ID NO: 1419988 - RNA, 19 nt, Artificial Sequence
  Description of Artificial Sequence: Synthetic oligonucleotide
  Sense strand starting at position 3553 of SEQ ID NO: 1243497
uguguagugagagguaaag

SEQ ID NO: 1419989 - RNA, 19 nt, Artificial Sequence
  Description of Artificial Sequence: Synthetic oligonucleotide
  Antisense strand to SEQ ID NO: 1419988
cuuuaccucucacuacaca

SEQ ID NO: 1419990 - RNA, 19 nt, Artificial Sequence
  Description of Artificial Sequence: Synthetic oligonucleotide
  Sense strand starting at position 3570 of SEQ ID NO: 1243497
agaggagcuuguuccaacu

SEQ ID NO: 1419991 - RNA, 19 nt, Artificial Sequence
  Description of Artificial Sequence: Synthetic oligonucleotide
  Antisense strand to SEQ ID NO: 1419990
aguuggaacaagcuccucu

SEQ ID NO: 1419992 - RNA, 19 nt, Artificial Sequence
  Description of Artificial Sequence: Synthetic oligonucleotide
  Sense strand starting at position 3586 of SEQ ID NO: 1243497
acuugagugccagaagucu

SEQ ID NO: 1419993 - RNA, 19 nt, Artificial Sequence
  Description of Artificial Sequence: Synthetic oligonucleotide
  Antisense strand to SEQ ID NO: 1419992
agacuucuggcacucaagu

SEQ ID NO: 1419994 - RNA, 19 nt, Artificial Sequence
  Description of Artificial Sequence: Synthetic oligonucleotide
  Sense strand starting at position 3671 of SEQ ID NO: 1243497
gugaacauggauuguuauu

SEQ ID NO: 1419995 - RNA, 19 nt, Artificial Sequence
  Description of Artificial Sequence: Synthetic oligonucleotide
  Antisense strand to SEQ ID NO: 1419994
aauaacaauccauguucac

SEQ ID NO: 1419996 - RNA, 19 nt, Artificial Sequence
  Description of Artificial Sequence: Synthetic oligonucleotide
  Sense strand starting at position 3673 of SEQ ID NO: 1243497
gaacauggauuguuauuaa

SEQ ID NO: 1419997 - RNA, 19 nt, Artificial Sequence
  Description of Artificial Sequence: Synthetic oligonucleotide
  Antisense strand to SEQ ID NO: 1419996
uuaauaacaauccauguuc

SEQ ID NO: 1419998 - RNA, 19 nt, Artificial Sequence
  Description of Artificial Sequence: Synthetic oligonucleotide
  Sense strand starting at position 3751 of SEQ ID NO: 1243497
gccacuaaaguauggagaa

SEQ ID NO: 1419999 - RNA, 19 nt, Artificial Sequence
  Description of Artificial Sequence: Synthetic oligonucleotide
  Antisense strand to SEQ ID NO: 1419998
uucuccauacuuuaguggc

SEQ ID NO: 1420000 - RNA, 19 nt, Artificial Sequence
  Description of Artificial Sequence: Synthetic oligonucleotide
  Sense strand starting at position 3806 of SEQ ID NO: 1243497
uguaccuguuguuuaaaga

SEQ ID NO: 1420001 - RNA, 19 nt, Artificial Sequence
  Description of Artificial Sequence: Synthetic oligonucleotide
  Antisense strand to SEQ ID NO: 1420000
ucuuuaaacaacagguaca

SEQ ID NO: 1420002 - RNA, 19 nt, Artificial Sequence
  Description of Artificial Sequence: Synthetic oligonucleotide
  Sense strand starting at position 3807 of SEQ ID NO: 1243497
guaccuguuguuuaaagag

SEQ ID NO: 1420003 - RNA, 19 nt, Artificial Sequence
  Description of Artificial Sequence: Synthetic oligonucleotide
  Antisense strand to SEQ ID NO: 1420002
cucuuuaaacaacagguac

SEQ ID NO: 1420004 - RNA, 19 nt, Artificial Sequence
  Description of Artificial Sequence: Synthetic oligonucleotide
  Sense strand starting at position 3867 of SEQ ID NO: 1243497
aacaguauauaggaggaua

SEQ ID NO: 1420005 - RNA, 19 nt, Artificial Sequence
  Description of Artificial Sequence: Synthetic oligonucleotide
  Antisense strand to SEQ ID NO: 1420004
uauccuccuauauacuguu

SEQ ID NO: 1420006 - RNA, 19 nt, Artificial Sequence
  Description of Artificial Sequence: Synthetic oligonucleotide
  Sense strand starting at position 3938 of SEQ ID NO: 1243497
aagagcuacucuuuauggu

SEQ ID NO: 1420007 - RNA, 19 nt, Artificial Sequence
  Description of Artificial Sequence: Synthetic oligonucleotide
  Antisense strand to SEQ ID NO: 1420006
accauaaagaguagcucuu

SEQ ID NO: 1420008 - RNA, 19 nt, Artificial Sequence
  Description of Artificial Sequence: Synthetic oligonucleotide
  Sense strand starting at position 3939 of SEQ ID NO: 1243497
agagcuacucuuuaugguu

SEQ ID NO: 1420009 - RNA, 19 nt, Artificial Sequence
  Description of Artificial Sequence: Synthetic oligonucleotide
  Antisense strand to SEQ ID NO: 1420008
aaccauaaagaguagcucu

SEQ ID NO: 1420010 - RNA, 19 nt, Artificial Sequence
  Description of Artificial Sequence: Synthetic oligonucleotide
  Sense strand starting at position 194 of SEQ ID NO: 1243498
gcagauguguaacugccau

SEQ ID NO: 1420011 - RNA, 19 nt, Artificial Sequence
  Description of Artificial Sequence: Synthetic oligonucleotide
  Antisense strand to SEQ ID NO: 1420010
auggcaguuacacaucugc

SEQ ID NO: 1420012 - RNA, 19 nt, Artificial Sequence
  Description of Artificial Sequence: Synthetic oligonucleotide
  Sense strand starting at position 198 of SEQ ID NO: 1243498
auguguaacugccaugaau

SEQ ID NO: 1420013 - RNA, 19 nt, Artificial Sequence
  Description of Artificial Sequence: Synthetic oligonucleotide
  Antisense strand to SEQ ID NO: 1420012
auucauggcaguuacacau

SEQ ID NO: 1420014 - RNA, 19 nt, Artificial Sequence
  Description of Artificial Sequence: Synthetic oligonucleotide
  Sense strand starting at position 546 of SEQ ID NO: 1243498
gucccaagcuugggacauu

SEQ ID NO: 1420015 - RNA, 19 nt, Artificial Sequence
  Description of Artificial Sequence: Synthetic oligonucleotide
  Antisense strand to SEQ ID NO: 1420014
aaugucccaagcuugggac

SEQ ID NO: 1420016 - RNA, 19 nt, Artificial Sequence
  Description of Artificial Sequence: Synthetic oligonucleotide
  Sense strand starting at position 635 of SEQ ID NO: 1243498
ugggauggcuccucaugga

SEQ ID NO: 1420017 - RNA, 19 nt, Artificial Sequence
  Description of Artificial Sequence: Synthetic oligonucleotide
  Antisense strand to SEQ ID NO: 1420016
uccaugaggagccauccca

SEQ ID NO: 1420018 - RNA, 19 nt, Artificial Sequence
  Description of Artificial Sequence: Synthetic oligonucleotide
  Sense strand starting at position 638 of SEQ ID NO: 1243498
gauggcuccucauggagaa

SEQ ID NO: 1420019 - RNA, 19 nt, Artificial Sequence
  Description of Artificial Sequence: Synthetic oligonucleotide
  Antisense strand to SEQ ID NO: 1420018
uucuccaugaggagccauc

SEQ ID NO: 1420020 - RNA, 19 nt, Artificial Sequence
  Description of Artificial Sequence: Synthetic oligonucleotide
  Sense strand starting at position 639 of SEQ ID NO: 1243498
auggcuccucauggagaaa

SEQ ID NO: 1420021 - RNA, 19 nt, Artificial Sequence
  Description of Artificial Sequence: Synthetic oligonucleotide
  Antisense strand to SEQ ID NO: 1420020
uuucuccaugaggagccau

SEQ ID NO: 1420022 - RNA, 19 nt, Artificial Sequence
  Description of Artificial Sequence: Synthetic oligonucleotide
  Sense strand starting at position 843 of SEQ ID NO: 1243498
gcacuacuguccuaugggu

SEQ ID NO: 1420023 - RNA, 19 nt, Artificial Sequence
  Description of Artificial Sequence: Synthetic oligonucleotide
  Antisense strand to SEQ ID NO: 1420022
acccauaggacaguagugc

SEQ ID NO: 1420024 - RNA, 19 nt, Artificial Sequence
  Description of Artificial Sequence: Synthetic oligonucleotide
  Sense strand starting at position 845 of SEQ ID NO: 1243498
acuacuguccuauggguua

SEQ ID NO: 1420025 - RNA, 19 nt, Artificial Sequence
  Description of Artificial Sequence: Synthetic oligonucleotide
  Antisense strand to SEQ ID NO: 1420024
uaacccauaggacaguagu

SEQ ID NO: 1420026 - RNA, 19 nt, Artificial Sequence
  Description of Artificial Sequence: Synthetic oligonucleotide
  Sense strand starting at position 850 of SEQ ID NO: 1243498
uguccuauggguuaggaga

SEQ ID NO: 1420027 - RNA, 19 nt, Artificial Sequence
  Description of Artificial Sequence: Synthetic oligonucleotide
  Antisense strand to SEQ ID NO: 1420026
ucuccuaacccauaggaca

SEQ ID NO: 1420028 - RNA, 19 nt, Artificial Sequence
  Description of Artificial Sequence: Synthetic oligonucleotide
  Sense strand starting at position 1050 of SEQ ID NO: 1243498
cgcucaucccuguggugua

SEQ ID NO: 1420029 - RNA, 19 nt, Artificial Sequence
  Description of Artificial Sequence: Synthetic oligonucleotide
  Antisense strand to SEQ ID NO: 1420028
uacaccacagggaugagcg

SEQ ID NO: 1420030 - RNA, 19 nt, Artificial Sequence
  Description of Artificial Sequence: Synthetic oligonucleotide
  Sense strand starting at position 1817 of SEQ ID NO: 1243498
gcacgaacugguugaucau

SEQ ID NO: 1420031 - RNA, 19 nt, Artificial Sequence
  Description of Artificial Sequence: Synthetic oligonucleotide
  Antisense strand to SEQ ID NO: 1420030
augaucaaccaguucgugc

SEQ ID NO: 1420032 - RNA, 19 nt, Artificial Sequence
  Description of Artificial Sequence: Synthetic oligonucleotide
  Sense strand starting at position 1844 of SEQ ID NO: 1243498
gcuugagcucguccauguu

SEQ ID NO: 1420033 - RNA, 19 nt, Artificial Sequence
  Description of Artificial Sequence: Synthetic oligonucleotide
  Antisense strand to SEQ ID NO: 1420032
aacauggacgagcucaagc

SEQ ID NO: 1420034 - RNA, 19 nt, Artificial Sequence
  Description of Artificial Sequence: Synthetic oligonucleotide
  Sense strand starting at position 2583 of SEQ ID NO: 1243498
ccugcucuggcgggaauua

SEQ ID NO: 1420035 - RNA, 19 nt, Artificial Sequence
  Description of Artificial Sequence: Synthetic oligonucleotide
  Antisense strand to SEQ ID NO: 1420034
uaauucccgccagagcagg

SEQ ID NO: 1420036 - RNA, 19 nt, Artificial Sequence
  Description of Artificial Sequence: Synthetic oligonucleotide
  Sense strand starting at position 2617 of SEQ ID NO: 1243498
gggccacagaucugugcau

SEQ ID NO: 1420037 - RNA, 19 nt, Artificial Sequence
  Description of Artificial Sequence: Synthetic oligonucleotide
  Antisense strand to SEQ ID NO: 1420036
augcacagaucuguggccc

SEQ ID NO: 1420038 - RNA, 19 nt, Artificial Sequence
  Description of Artificial Sequence: Synthetic oligonucleotide
  Sense strand starting at position 2816 of SEQ ID NO: 1243498
ggcauacagaucugugcau

SEQ ID NO: 1420039 - RNA, 19 nt, Artificial Sequence
  Description of Artificial Sequence: Synthetic oligonucleotide
  Antisense strand to SEQ ID NO: 1420038
augcacagaucuguaugcc

SEQ ID NO: 1420040 - RNA, 19 nt, Artificial Sequence
  Description of Artificial Sequence: Synthetic oligonucleotide
  Sense strand starting at position 2853 of SEQ ID NO: 1243498
acaggcgucuuugcuaaga

SEQ ID NO: 1420041 - RNA, 19 nt, Artificial Sequence
  Description of Artificial Sequence: Synthetic oligonucleotide
  Antisense strand to SEQ ID NO: 1420040
ucuuagcaaagacgccugu

SEQ ID NO: 1420042 - RNA, 19 nt, Artificial Sequence
  Description of Artificial Sequence: Synthetic oligonucleotide
  Sense strand starting at position 2892 of SEQ ID NO: 1243498
cugugauuggcaucgcucu

SEQ ID NO: 1420043 - RNA, 19 nt, Artificial Sequence
  Description of Artificial Sequence: Synthetic oligonucleotide
  Antisense strand to SEQ ID NO: 1420042
agagcgaugccaaucacag

SEQ ID NO: 1420044 - RNA, 19 nt, Artificial Sequence
  Description of Artificial Sequence: Synthetic oligonucleotide
  Sense strand starting at position 2898 of SEQ ID NO: 1243498
uuggcaucgcucuguguua

SEQ ID NO: 1420045 - RNA, 19 nt, Artificial Sequence
  Description of Artificial Sequence: Synthetic oligonucleotide
  Antisense strand to SEQ ID NO: 1420044
uaacacagagcgaugccaa

SEQ ID NO: 1420046 - RNA, 19 nt, Artificial Sequence
  Description of Artificial Sequence: Synthetic oligonucleotide
  Sense strand starting at position 2899 of SEQ ID NO: 1243498
uggcaucgcucuguguuaa

SEQ ID NO: 1420047 - RNA, 19 nt, Artificial Sequence
  Description of Artificial Sequence: Synthetic oligonucleotide
  Antisense strand to SEQ ID NO: 1420046
uuaacacagagcgaugcca

SEQ ID NO: 1420048 - RNA, 19 nt, Artificial Sequence
  Description of Artificial Sequence: Synthetic oligonucleotide
  Sense strand starting at position 2900 of SEQ ID NO: 1243498
ggcaucgcucuguguuaaa

SEQ ID NO: 1420049 - RNA, 19 nt, Artificial Sequence
  Description of Artificial Sequence: Synthetic oligonucleotide
  Antisense strand to SEQ ID NO: 1420048
uuuaacacagagcgaugcc

SEQ ID NO: 1420050 - RNA, 19 nt, Artificial Sequence
  Description of Artificial Sequence: Synthetic oligonucleotide
  Sense strand starting at position 2960 of SEQ ID NO: 1243498
gcccaaaucggcuggucua

SEQ ID NO: 1420051 - RNA, 19 nt, Artificial Sequence
  Description of Artificial Sequence: Synthetic oligonucleotide
  Antisense strand to SEQ ID NO: 1420050
uagaccagccgauuugggc

SEQ ID NO: 1420052 - RNA, 19 nt, Artificial Sequence
  Description of Artificial Sequence: Synthetic oligonucleotide
  Sense strand starting at position 2997 of SEQ ID NO: 1243498
acuguaggcgccgacaaau

SEQ ID NO: 1420053 - RNA, 19 nt, Artificial Sequence
  Description of Artificial Sequence: Synthetic oligonucleotide
  Antisense strand to SEQ ID NO: 1420052
auuugucggcgccuacagu

SEQ ID NO: 1420054 - RNA, 19 nt, Artificial Sequence
  Description of Artificial Sequence: Synthetic oligonucleotide
  Sense strand starting at position 3018 of SEQ ID NO: 1243498
ucguucagugaaugaauga

SEQ ID NO: 1420055 - RNA, 19 nt, Artificial Sequence
  Description of Artificial Sequence: Synthetic oligonucleotide
  Antisense strand to SEQ ID NO: 1420054
ucauucauucacugaacga

SEQ ID NO: 1420056 - RNA, 19 nt, Artificial Sequence
  Description of Artificial Sequence: Synthetic oligonucleotide
  Sense strand starting at position 3274 of SEQ ID NO: 1243498
ucgugcucuuugccggaaa

SEQ ID NO: 1420057 - RNA, 19 nt, Artificial Sequence
  Description of Artificial Sequence: Synthetic oligonucleotide
  Antisense strand to SEQ ID NO: 1420056
uuuccggcaaagagcacga

SEQ ID NO: 1420058 - RNA, 19 nt, Artificial Sequence
  Description of Artificial Sequence: Synthetic oligonucleotide
  Sense strand starting at position 3276 of SEQ ID NO: 1243498
gugcucuuugccggaaauc

SEQ ID NO: 1420059 - RNA, 19 nt, Artificial Sequence
  Description of Artificial Sequence: Synthetic oligonucleotide
  Antisense strand to SEQ ID NO: 1420058
gauuuccggcaaagagcac

SEQ ID NO: 1420060 - RNA, 19 nt, Artificial Sequence
  Description of Artificial Sequence: Synthetic oligonucleotide
  Sense strand starting at position 3277 of SEQ ID NO: 1243498
ugcucuuugccggaaaucu

SEQ ID NO: 1420061 - RNA, 19 nt, Artificial Sequence
  Description of Artificial Sequence: Synthetic oligonucleotide
  Antisense strand to SEQ ID NO: 1420060
agauuuccggcaaagagca

SEQ ID NO: 1420062 - RNA, 19 nt, Artificial Sequence
  Description of Artificial Sequence: Synthetic oligonucleotide
  Sense strand starting at position 3285 of SEQ ID NO: 1243498
gccggaaaucucggcccuu

SEQ ID NO: 1420063 - RNA, 19 nt, Artificial Sequence
  Description of Artificial Sequence: Synthetic oligonucleotide
  Antisense strand to SEQ ID NO: 1420062
aagggccgagauuuccggc

SEQ ID NO: 1420064 - RNA, 19 nt, Artificial Sequence
  Description of Artificial Sequence: Synthetic oligonucleotide
  Sense strand starting at position 3286 of SEQ ID NO: 1243498
ccggaaaucucggcccuua

SEQ ID NO: 1420065 - RNA, 19 nt, Artificial Sequence
  Description of Artificial Sequence: Synthetic oligonucleotide
  Antisense strand to SEQ ID NO: 1420064
uaagggccgagauuuccgg

SEQ ID NO: 1420066 - RNA, 19 nt, Artificial Sequence
  Description of Artificial Sequence: Synthetic oligonucleotide
  Sense strand starting at position 3362 of SEQ ID NO: 1243498
cccagaaugccucgguuua

SEQ ID NO: 1420067 - RNA, 19 nt, Artificial Sequence
  Description of Artificial Sequence: Synthetic oligonucleotide
  Antisense strand to SEQ ID NO: 1420066
uaaaccgaggcauucuggg

SEQ ID NO: 1420068 - RNA, 19 nt, Artificial Sequence
  Description of Artificial Sequence: Synthetic oligonucleotide
  Sense strand starting at position 3363 of SEQ ID NO: 1243498
ccagaaugccucgguuuau

SEQ ID NO: 1420069 - RNA, 19 nt, Artificial Sequence
  Description of Artificial Sequence: Synthetic oligonucleotide
  Antisense strand to SEQ ID NO: 1420068
auaaaccgaggcauucugg

SEQ ID NO: 1420070 - RNA, 19 nt, Artificial Sequence
  Description of Artificial Sequence: Synthetic oligonucleotide
  Sense strand starting at position 3364 of SEQ ID NO: 1243498
cagaaugccucgguuuauu

SEQ ID NO: 1420071 - RNA, 19 nt, Artificial Sequence
  Description of Artificial Sequence: Synthetic oligonucleotide
  Antisense strand to SEQ ID NO: 1420070
aauaaaccgaggcauucug

SEQ ID NO: 1420072 - RNA, 19 nt, Artificial Sequence
  Description of Artificial Sequence: Synthetic oligonucleotide
  Sense strand starting at position 3385 of SEQ ID NO: 1243498
caucguuuggucccgguga

SEQ ID NO: 1420073 - RNA, 19 nt, Artificial Sequence
  Description of Artificial Sequence: Synthetic oligonucleotide
  Antisense strand to SEQ ID NO: 1420072
ucaccgggaccaaacgaug

SEQ ID NO: 1420074 - RNA, 19 nt, Artificial Sequence
  Description of Artificial Sequence: Synthetic oligonucleotide
  Sense strand starting at position 3449 of SEQ ID NO: 1243498
guguuaggaccuggccaua

SEQ ID NO: 1420075 - RNA, 19 nt, Artificial Sequence
  Description of Artificial Sequence: Synthetic oligonucleotide
  Antisense strand to SEQ ID NO: 1420074
uauggccagguccuaacac

SEQ ID NO: 1420076 - RNA, 19 nt, Artificial Sequence
  Description of Artificial Sequence: Synthetic oligonucleotide
  Sense strand starting at position 3646 of SEQ ID NO: 1243498
ggcgguaaggcgcgaucau

SEQ ID NO: 1420077 - RNA, 19 nt, Artificial Sequence
  Description of Artificial Sequence: Synthetic oligonucleotide
  Antisense strand to SEQ ID NO: 1420076
augaucgcgccuuaccgcc

SEQ ID NO: 1420078 - RNA, 19 nt, Artificial Sequence
  Description of Artificial Sequence: Synthetic oligonucleotide
  Sense strand starting at position 3647 of SEQ ID NO: 1243498
gcgguaaggcgcgaucaua

SEQ ID NO: 1420079 - RNA, 19 nt, Artificial Sequence
  Description of Artificial Sequence: Synthetic oligonucleotide
  Antisense strand to SEQ ID NO: 1420078
uaugaucgcgccuuaccgc

SEQ ID NO: 1420080 - RNA, 19 nt, Artificial Sequence
  Description of Artificial Sequence: Synthetic oligonucleotide
  Sense strand starting at position 3712 of SEQ ID NO: 1243498
agccuccuucguugagaca

SEQ ID NO: 1420081 - RNA, 19 nt, Artificial Sequence
  Description of Artificial Sequence: Synthetic oligonucleotide
  Antisense strand to SEQ ID NO: 1420080
ugucucaacgaaggaggcu

SEQ ID NO: 1420082 - RNA, 19 nt, Artificial Sequence
  Description of Artificial Sequence: Synthetic oligonucleotide
  Sense strand starting at position 3727 of SEQ ID NO: 1243498
gacacuauuuguugagucu

SEQ ID NO: 1420083 - RNA, 19 nt, Artificial Sequence
  Description of Artificial Sequence: Synthetic oligonucleotide
  Antisense strand to SEQ ID NO: 1420082
agacucaacaaauaguguc

SEQ ID NO: 1420084 - RNA, 19 nt, Artificial Sequence
  Description of Artificial Sequence: Synthetic oligonucleotide
  Sense strand starting at position 3736 of SEQ ID NO: 1243498
uguugagucuuuccucuuu

SEQ ID NO: 1420085 - RNA, 19 nt, Artificial Sequence
  Description of Artificial Sequence: Synthetic oligonucleotide
  Antisense strand to SEQ ID NO: 1420084
aaagaggaaagacucaaca

SEQ ID NO: 1420086 - RNA, 19 nt, Artificial Sequence
  Description of Artificial Sequence: Synthetic oligonucleotide
  Sense strand starting at position 3854 of SEQ ID NO: 1243498
cgaguauagccuugcaaga

SEQ ID NO: 1420087 - RNA, 19 nt, Artificial Sequence
  Description of Artificial Sequence: Synthetic oligonucleotide
  Antisense strand to SEQ ID NO: 1420086
ucuugcaaggcuauacucg

SEQ ID NO: 1420088 - RNA, 19 nt, Artificial Sequence
  Description of Artificial Sequence: Synthetic oligonucleotide
  Sense strand starting at position 3856 of SEQ ID NO: 1243498
aguauagccuugcaagaug

SEQ ID NO: 1420089 - RNA, 19 nt, Artificial Sequence
  Description of Artificial Sequence: Synthetic oligonucleotide
  Antisense strand to SEQ ID NO: 1420088
caucuugcaaggcuauacu

SEQ ID NO: 1420090 - RNA, 19 nt, Artificial Sequence
  Description of Artificial Sequence: Synthetic oligonucleotide
  Sense strand starting at position 72 of SEQ ID NO: 1243499
ugcugucucaggugugaga

SEQ ID NO: 1420091 - RNA, 19 nt, Artificial Sequence
  Description of Artificial Sequence: Synthetic oligonucleotide
  Antisense strand to SEQ ID NO: 1420090
ucucacaccugagacagca

SEQ ID NO: 1420092 - RNA, 19 nt, Artificial Sequence
  Description of Artificial Sequence: Synthetic oligonucleotide
  Sense strand starting at position 230 of SEQ ID NO: 1243499
caccgugucccagacagaa

SEQ ID NO: 1420093 - RNA, 19 nt, Artificial Sequence
  Description of Artificial Sequence: Synthetic oligonucleotide
  Antisense strand to SEQ ID NO: 1420092
uucugucugggacacggug

SEQ ID NO: 1420094 - RNA, 19 nt, Artificial Sequence
  Description of Artificial Sequence: Synthetic oligonucleotide
  Sense strand starting at position 297 of SEQ ID NO: 1243499
cggccaaucuguuacaaug

SEQ ID NO: 1420095 - RNA, 19 nt, Artificial Sequence
  Description of Artificial Sequence: Synthetic oligonucleotide
  Antisense strand to SEQ ID NO: 1420094
cauuguaacagauuggccg

SEQ ID NO: 1420096 - RNA, 19 nt, Artificial Sequence
  Description of Artificial Sequence: Synthetic oligonucleotide
  Sense strand starting at position 299 of SEQ ID NO: 1243499
gccaaucuguuacaaugua

SEQ ID NO: 1420097 - RNA, 19 nt, Artificial Sequence
  Description of Artificial Sequence: Synthetic oligonucleotide
  Antisense strand to SEQ ID NO: 1420096
uacauuguaacagauuggc

SEQ ID NO: 1420098 - RNA, 19 nt, Artificial Sequence
  Description of Artificial Sequence: Synthetic oligonucleotide
  Sense strand starting at position 398 of SEQ ID NO: 1243499
acggcuaguaguuacuaaa

SEQ ID NO: 1420099 - RNA, 19 nt, Artificial Sequence
  Description of Artificial Sequence: Synthetic oligonucleotide
  Antisense strand to SEQ ID NO: 1420098
uuuaguaacuacuagccgu

SEQ ID NO: 1420100 - RNA, 19 nt, Artificial Sequence
  Description of Artificial Sequence: Synthetic oligonucleotide
  Sense strand starting at position 534 of SEQ ID NO: 1243499
ccgaaagucugccuucugu

SEQ ID NO: 1420101 - RNA, 19 nt, Artificial Sequence
  Description of Artificial Sequence: Synthetic oligonucleotide
  Antisense strand to SEQ ID NO: 1420100
acagaaggcagacuuucgg

SEQ ID NO: 1420102 - RNA, 19 nt, Artificial Sequence
  Description of Artificial Sequence: Synthetic oligonucleotide
  Sense strand starting at position 582 of SEQ ID NO: 1243499
gcuuuagcuucucggauca

SEQ ID NO: 1420103 - RNA, 19 nt, Artificial Sequence
  Description of Artificial Sequence: Synthetic oligonucleotide
  Antisense strand to SEQ ID NO: 1420102
ugauccgagaagcuaaagc

SEQ ID NO: 1420104 - RNA, 19 nt, Artificial Sequence
  Description of Artificial Sequence: Synthetic oligonucleotide
  Sense strand starting at position 788 of SEQ ID NO: 1243499
gguauucccuucugcaaga

SEQ ID NO: 1420105 - RNA, 19 nt, Artificial Sequence
  Description of Artificial Sequence: Synthetic oligonucleotide
  Antisense strand to SEQ ID NO: 1420104
ucuugcagaagggaauacc

SEQ ID NO: 1420106 - RNA, 19 nt, Artificial Sequence
  Description of Artificial Sequence: Synthetic oligonucleotide
  Sense strand starting at position 864 of SEQ ID NO: 1243499
ccgagaauguuucugaagc

SEQ ID NO: 1420107 - RNA, 19 nt, Artificial Sequence
  Description of Artificial Sequence: Synthetic oligonucleotide
  Antisense strand to SEQ ID NO: 1420106
gcuucagaaacauucucgg

SEQ ID NO: 1420108 - RNA, 19 nt, Artificial Sequence
  Description of Artificial Sequence: Synthetic oligonucleotide
  Sense strand starting at position 865 of SEQ ID NO: 1243499
cgagaauguuucugaagca

SEQ ID NO: 1420109 - RNA, 19 nt, Artificial Sequence
  Description of Artificial Sequence: Synthetic oligonucleotide
  Antisense strand to SEQ ID NO: 1420108
ugcuucagaaacauucucg

SEQ ID NO: 1420110 - RNA, 19 nt, Artificial Sequence
  Description of Artificial Sequence: Synthetic oligonucleotide
  Sense strand starting at position 866 of SEQ ID NO: 1243499
gagaauguuucugaagcaa

SEQ ID NO: 1420111 - RNA, 19 nt, Artificial Sequence
  Description of Artificial Sequence: Synthetic oligonucleotide
  Antisense strand to SEQ ID NO: 1420110
uugcuucagaaacauucuc

SEQ ID NO: 1420112 - RNA, 19 nt, Artificial Sequence
  Description of Artificial Sequence: Synthetic oligonucleotide
  Sense strand starting at position 944 of SEQ ID NO: 1243499
aacggaccucucugaauga

SEQ ID NO: 1420113 - RNA, 19 nt, Artificial Sequence
  Description of Artificial Sequence: Synthetic oligonucleotide
  Antisense strand to SEQ ID NO: 1420112
ucauucagagagguccguu

SEQ ID NO: 1420114 - RNA, 19 nt, Artificial Sequence
  Description of Artificial Sequence: Synthetic oligonucleotide
  Sense strand starting at position 988 of SEQ ID NO: 1243499
ucccgucuuccguugcaua

SEQ ID NO: 1420115 - RNA, 19 nt, Artificial Sequence
  Description of Artificial Sequence: Synthetic oligonucleotide
  Antisense strand to SEQ ID NO: 1420114
uaugcaacggaagacggga

SEQ ID NO: 1420116 - RNA, 19 nt, Artificial Sequence
  Description of Artificial Sequence: Synthetic oligonucleotide
  Sense strand starting at position 1021 of SEQ ID NO: 1243499
aggcaacguuucuugaaga

SEQ ID NO: 1420117 - RNA, 19 nt, Artificial Sequence
  Description of Artificial Sequence: Synthetic oligonucleotide
  Antisense strand to SEQ ID NO: 1420116
ucuucaagaaacguugccu

SEQ ID NO: 1420118 - RNA, 19 nt, Artificial Sequence
  Description of Artificial Sequence: Synthetic oligonucleotide
  Sense strand starting at position 1022 of SEQ ID NO: 1243499
ggcaacguuucuugaagag

SEQ ID NO: 1420119 - RNA, 19 nt, Artificial Sequence
  Description of Artificial Sequence: Synthetic oligonucleotide
  Antisense strand to SEQ ID NO: 1420118
cucuucaagaaacguugcc

SEQ ID NO: 1420120 - RNA, 19 nt, Artificial Sequence
  Description of Artificial Sequence: Synthetic oligonucleotide
  Sense strand starting at position 1112 of SEQ ID NO: 1243499
agagaaacuaagcguaacu

SEQ ID NO: 1420121 - RNA, 19 nt, Artificial Sequence
  Description of Artificial Sequence: Synthetic oligonucleotide
  Antisense strand to SEQ ID NO: 1420120
aguuacgcuuaguuucucu

SEQ ID NO: 1420122 - RNA, 19 nt, Artificial Sequence
  Description of Artificial Sequence: Synthetic oligonucleotide
  Sense strand starting at position 1162 of SEQ ID NO: 1243499
gcgauucaagcgugacuac

SEQ ID NO: 1420123 - RNA, 19 nt, Artificial Sequence
  Description of Artificial Sequence: Synthetic oligonucleotide
  Antisense strand to SEQ ID NO: 1420122
guagucacgcuugaaucgc

SEQ ID NO: 1420124 - RNA, 19 nt, Artificial Sequence
  Description of Artificial Sequence: Synthetic oligonucleotide
  Sense strand starting at position 1163 of SEQ ID NO: 1243499
cgauucaagcgugacuaca

SEQ ID NO: 1420125 - RNA, 19 nt, Artificial Sequence
  Description of Artificial Sequence: Synthetic oligonucleotide
  Antisense strand to SEQ ID NO: 1420124
uguagucacgcuugaaucg

SEQ ID NO: 1420126 - RNA, 19 nt, Artificial Sequence
  Description of Artificial Sequence: Synthetic oligonucleotide
  Sense strand starting at position 2472 of SEQ ID NO: 1243499
aguucagcgcccugugaaa

SEQ ID NO: 1420127 - RNA, 19 nt, Artificial Sequence
  Description of Artificial Sequence: Synthetic oligonucleotide
  Antisense strand to SEQ ID NO: 1420126
uuucacagggcgcugaacu

SEQ ID NO: 1420128 - RNA, 19 nt, Artificial Sequence
  Description of Artificial Sequence: Synthetic oligonucleotide
  Sense strand starting at position 60 of SEQ ID NO: 1243500
ccgaaagucugccuucugu

SEQ ID NO: 1420129 - RNA, 19 nt, Artificial Sequence
  Description of Artificial Sequence: Synthetic oligonucleotide
  Antisense strand to SEQ ID NO: 1420128
acagaaggcagacuuucgg

SEQ ID NO: 1420130 - RNA, 19 nt, Artificial Sequence
  Description of Artificial Sequence: Synthetic oligonucleotide
  Sense strand starting at position 108 of SEQ ID NO: 1243500
gcuuuagcuucucggauca

SEQ ID NO: 1420131 - RNA, 19 nt, Artificial Sequence
  Description of Artificial Sequence: Synthetic oligonucleotide
  Antisense strand to SEQ ID NO: 1420130
ugauccgagaagcuaaagc

SEQ ID NO: 1420132 - RNA, 19 nt, Artificial Sequence
  Description of Artificial Sequence: Synthetic oligonucleotide
  Sense strand starting at position 314 of SEQ ID NO: 1243500
gguauucccuucugcaaga

SEQ ID NO: 1420133 - RNA, 19 nt, Artificial Sequence
  Description of Artificial Sequence: Synthetic oligonucleotide
  Antisense strand to SEQ ID NO: 1420132
ucuugcagaagggaauacc

SEQ ID NO: 1420134 - RNA, 19 nt, Artificial Sequence
  Description of Artificial Sequence: Synthetic oligonucleotide
  Sense strand starting at position 390 of SEQ ID NO: 1243500
ccgagaauguuucugaagc

SEQ ID NO: 1420135 - RNA, 19 nt, Artificial Sequence
  Description of Artificial Sequence: Synthetic oligonucleotide
  Antisense strand to SEQ ID NO: 1420134
gcuucagaaacauucucgg

SEQ ID NO: 1420136 - RNA, 19 nt, Artificial Sequence
  Description of Artificial Sequence: Synthetic oligonucleotide
  Sense strand starting at position 391 of SEQ ID NO: 1243500
cgagaauguuucugaagca

SEQ ID NO: 1420137 - RNA, 19 nt, Artificial Sequence
  Description of Artificial Sequence: Synthetic oligonucleotide
  Antisense strand to SEQ ID NO: 1420136
ugcuucagaaacauucucg

SEQ ID NO: 1420138 - RNA, 19 nt, Artificial Sequence
  Description of Artificial Sequence: Synthetic oligonucleotide
  Sense strand starting at position 392 of SEQ ID NO: 1243500
gagaauguuucugaagcaa

SEQ ID NO: 1420139 - RNA, 19 nt, Artificial Sequence
  Description of Artificial Sequence: Synthetic oligonucleotide
  Antisense strand to SEQ ID NO: 1420138
uugcuucagaaacauucuc

SEQ ID NO: 1420140 - RNA, 19 nt, Artificial Sequence
  Description of Artificial Sequence: Synthetic oligonucleotide
  Sense strand starting at position 470 of SEQ ID NO: 1243500
aacggaccucucugaauga

SEQ ID NO: 1420141 - RNA, 19 nt, Artificial Sequence
  Description of Artificial Sequence: Synthetic oligonucleotide
  Antisense strand to SEQ ID NO: 1420140
ucauucagagagguccguu

SEQ ID NO: 1420142 - RNA, 19 nt, Artificial Sequence
  Description of Artificial Sequence: Synthetic oligonucleotide
  Sense strand starting at position 514 of SEQ ID NO: 1243500
ucccgucuuccguugcaua

SEQ ID NO: 1420143 - RNA, 19 nt, Artificial Sequence
  Description of Artificial Sequence: Synthetic oligonucleotide
  Antisense strand to SEQ ID NO: 1420142
uaugcaacggaagacggga

SEQ ID NO: 1420144 - RNA, 19 nt, Artificial Sequence
  Description of Artificial Sequence: Synthetic oligonucleotide
  Sense strand starting at position 547 of SEQ ID NO: 1243500
aggcaacguuucuugaaga

SEQ ID NO: 1420145 - RNA, 19 nt, Artificial Sequence
  Description of Artificial Sequence: Synthetic oligonucleotide
  Antisense strand to SEQ ID NO: 1420144
ucuucaagaaacguugccu

SEQ ID NO: 1420146 - RNA, 19 nt, Artificial Sequence
  Description of Artificial Sequence: Synthetic oligonucleotide
  Sense strand starting at position 548 of SEQ ID NO: 1243500
ggcaacguuucuugaagag

SEQ ID NO: 1420147 - RNA, 19 nt, Artificial Sequence
  Description of Artificial Sequence: Synthetic oligonucleotide
  Antisense strand to SEQ ID NO: 1420146
cucuucaagaaacguugcc

SEQ ID NO: 1420148 - RNA, 19 nt, Artificial Sequence
  Description of Artificial Sequence: Synthetic oligonucleotide
  Sense strand starting at position 638 of SEQ ID NO: 1243500
agagaaacuaagcguaacu

SEQ ID NO: 1420149 - RNA, 19 nt, Artificial Sequence
  Description of Artificial Sequence: Synthetic oligonucleotide
  Antisense strand to SEQ ID NO: 1420148
aguuacgcuuaguuucucu

SEQ ID NO: 1420150 - RNA, 19 nt, Artificial Sequence
  Description of Artificial Sequence: Synthetic oligonucleotide
  Sense strand starting at position 688 of SEQ ID NO: 1243500
gcgauucaagcgugacuac

SEQ ID NO: 1420151 - RNA, 19 nt, Artificial Sequence
  Description of Artificial Sequence: Synthetic oligonucleotide
  Antisense strand to SEQ ID NO: 1420150
guagucacgcuugaaucgc

SEQ ID NO: 1420152 - RNA, 19 nt, Artificial Sequence
  Description of Artificial Sequence: Synthetic oligonucleotide
  Sense strand starting at position 689 of SEQ ID NO: 1243500
cgauucaagcgugacuaca

SEQ ID NO: 1420153 - RNA, 19 nt, Artificial Sequence
  Description of Artificial Sequence: Synthetic oligonucleotide
  Antisense strand to SEQ ID NO: 1420152
uguagucacgcuugaaucg

SEQ ID NO: 1420154 - RNA, 19 nt, Artificial Sequence
  Description of Artificial Sequence: Synthetic oligonucleotide
  Sense strand starting at position 1998 of SEQ ID NO: 1243500
aguucagcgcccugugaaa

SEQ ID NO: 1420155 - RNA, 19 nt, Artificial Sequence
  Description of Artificial Sequence: Synthetic oligonucleotide
  Antisense strand to SEQ ID NO: 1420154
uuucacagggcgcugaacu

SEQ ID NO: 1420156 - RNA, 19 nt, Artificial Sequence
  Description of Artificial Sequence: Synthetic oligonucleotide
  Sense strand starting at position 135 of SEQ ID NO: 1243501
cuacacagcucuuugguaa

SEQ ID NO: 1420157 - RNA, 19 nt, Artificial Sequence
  Description of Artificial Sequence: Synthetic oligonucleotide
  Antisense strand to SEQ ID NO: 1420156
uuaccaaagagcuguguag

SEQ ID NO: 1420158 - RNA, 19 nt, Artificial Sequence
  Description of Artificial Sequence: Synthetic oligonucleotide
  Sense strand starting at position 183 of SEQ ID NO: 1243501
accuauuagcuuugugaac

SEQ ID NO: 1420159 - RNA, 19 nt, Artificial Sequence
  Description of Artificial Sequence: Synthetic oligonucleotide
  Antisense strand to SEQ ID NO: 1420158
guucacaaagcuaauaggu

SEQ ID NO: 1420160 - RNA, 19 nt, Artificial Sequence
  Description of Artificial Sequence: Synthetic oligonucleotide
  Sense strand starting at position 192 of SEQ ID NO: 1243501
cuuugugaacuugggagau

SEQ ID NO: 1420161 - RNA, 19 nt, Artificial Sequence
  Description of Artificial Sequence: Synthetic oligonucleotide
  Antisense strand to SEQ ID NO: 1420160
aucucccaaguucacaaag

SEQ ID NO: 1420162 - RNA, 19 nt, Artificial Sequence
  Description of Artificial Sequence: Synthetic oligonucleotide
  Sense strand starting at position 194 of SEQ ID NO: 1243501
uugugaacuugggagauuu

SEQ ID NO: 1420163 - RNA, 19 nt, Artificial Sequence
  Description of Artificial Sequence: Synthetic oligonucleotide
  Antisense strand to SEQ ID NO: 1420162
aaaucucccaaguucacaa

SEQ ID NO: 1420164 - RNA, 19 nt, Artificial Sequence
  Description of Artificial Sequence: Synthetic oligonucleotide
  Sense strand starting at position 245 of SEQ ID NO: 1243501
gaagauuuauuagaguaag

SEQ ID NO: 1420165 - RNA, 19 nt, Artificial Sequence
  Description of Artificial Sequence: Synthetic oligonucleotide
  Antisense strand to SEQ ID NO: 1420164
cuuacucuaauaaaucuuc

SEQ ID NO: 1420166 - RNA, 19 nt, Artificial Sequence
  Description of Artificial Sequence: Synthetic oligonucleotide
  Sense strand starting at position 255 of SEQ ID NO: 1243501
uagaguaaguccuucugua

SEQ ID NO: 1420167 - RNA, 19 nt, Artificial Sequence
  Description of Artificial Sequence: Synthetic oligonucleotide
  Antisense strand to SEQ ID NO: 1420166
uacagaaggacuuacucua

SEQ ID NO: 1420168 - RNA, 19 nt, Artificial Sequence
  Description of Artificial Sequence: Synthetic oligonucleotide
  Sense strand starting at position 259 of SEQ ID NO: 1243501
guaaguccuucuguacaga

SEQ ID NO: 1420169 - RNA, 19 nt, Artificial Sequence
  Description of Artificial Sequence: Synthetic oligonucleotide
  Antisense strand to SEQ ID NO: 1420168
ucuguacagaaggacuuac

SEQ ID NO: 1420170 - RNA, 19 nt, Artificial Sequence
  Description of Artificial Sequence: Synthetic oligonucleotide
  Sense strand starting at position 320 of SEQ ID NO: 1243501
gguggcuagcauugaauaa

SEQ ID NO: 1420171 - RNA, 19 nt, Artificial Sequence
  Description of Artificial Sequence: Synthetic oligonucleotide
  Antisense strand to SEQ ID NO: 1420170
uuauucaaugcuagccacc

SEQ ID NO: 1420172 - RNA, 19 nt, Artificial Sequence
  Description of Artificial Sequence: Synthetic oligonucleotide
  Sense strand starting at position 321 of SEQ ID NO: 1243501
guggcuagcauugaauaau

SEQ ID NO: 1420173 - RNA, 19 nt, Artificial Sequence
  Description of Artificial Sequence: Synthetic oligonucleotide
  Antisense strand to SEQ ID NO: 1420172
auuauucaaugcuagccac

SEQ ID NO: 1420174 - RNA, 19 nt, Artificial Sequence
  Description of Artificial Sequence: Synthetic oligonucleotide
  Sense strand starting at position 324 of SEQ ID NO: 1243501
gcuagcauugaauaauugu

SEQ ID NO: 1420175 - RNA, 19 nt, Artificial Sequence
  Description of Artificial Sequence: Synthetic oligonucleotide
  Antisense strand to SEQ ID NO: 1420174
acaauuauucaaugcuagc

SEQ ID NO: 1420176 - RNA, 19 nt, Artificial Sequence
  Description of Artificial Sequence: Synthetic oligonucleotide
  Sense strand starting at position 376 of SEQ ID NO: 1243501
guuccucagucaucuaaau

SEQ ID NO: 1420177 - RNA, 19 nt, Artificial Sequence
  Description of Artificial Sequence: Synthetic oligonucleotide
  Antisense strand to SEQ ID NO: 1420176
auuuagaugacugaggaac

SEQ ID NO: 1420178 - RNA, 19 nt, Artificial Sequence
  Description of Artificial Sequence: Synthetic oligonucleotide
  Sense strand starting at position 469 of SEQ ID NO: 1243501
uggagauuacaaggcuaca

SEQ ID NO: 1420179 - RNA, 19 nt, Artificial Sequence
  Description of Artificial Sequence: Synthetic oligonucleotide
  Antisense strand to SEQ ID NO: 1420178
uguagccuuguaaucucca

SEQ ID NO: 1420180 - RNA, 19 nt, Artificial Sequence
  Description of Artificial Sequence: Synthetic oligonucleotide
  Sense strand starting at position 515 of SEQ ID NO: 1243501
guucaaggccaggagugau

SEQ ID NO: 1420181 - RNA, 19 nt, Artificial Sequence
  Description of Artificial Sequence: Synthetic oligonucleotide
  Antisense strand to SEQ ID NO: 1420180
aucacuccuggccuugaac

SEQ ID NO: 1420182 - RNA, 19 nt, Artificial Sequence
  Description of Artificial Sequence: Synthetic oligonucleotide
  Sense strand starting at position 785 of SEQ ID NO: 1243501
ggcaaagagcuaugaacaa

SEQ ID NO: 1420183 - RNA, 19 nt, Artificial Sequence
  Description of Artificial Sequence: Synthetic oligonucleotide
  Antisense strand to SEQ ID NO: 1420182
uuguucauagcucuuugcc

SEQ ID NO: 1420184 - RNA, 19 nt, Artificial Sequence
  Description of Artificial Sequence: Synthetic oligonucleotide
  Sense strand starting at position 817 of SEQ ID NO: 1243501
aacagaaucgacugugaag

SEQ ID NO: 1420185 - RNA, 19 nt, Artificial Sequence
  Description of Artificial Sequence: Synthetic oligonucleotide
  Antisense strand to SEQ ID NO: 1420184
cuucacagucgauucuguu

SEQ ID NO: 1420186 - RNA, 19 nt, Artificial Sequence
  Description of Artificial Sequence: Synthetic oligonucleotide
  Sense strand starting at position 819 of SEQ ID NO: 1243501
cagaaucgacugugaagaa

SEQ ID NO: 1420187 - RNA, 19 nt, Artificial Sequence
  Description of Artificial Sequence: Synthetic oligonucleotide
  Antisense strand to SEQ ID NO: 1420186
uucuucacagucgauucug

SEQ ID NO: 1420188 - RNA, 19 nt, Artificial Sequence
  Description of Artificial Sequence: Synthetic oligonucleotide
  Sense strand starting at position 1008 of SEQ ID NO: 1243501
auguuagagcaacaucaau

SEQ ID NO: 1420189 - RNA, 19 nt, Artificial Sequence
  Description of Artificial Sequence: Synthetic oligonucleotide
  Antisense strand to SEQ ID NO: 1420188
auugauguugcucuaacau

SEQ ID NO: 1420190 - RNA, 19 nt, Artificial Sequence
  Description of Artificial Sequence: Synthetic oligonucleotide
  Sense strand starting at position 1036 of SEQ ID NO: 1243501
gggccuaaacgucagacuu

SEQ ID NO: 1420191 - RNA, 19 nt, Artificial Sequence
  Description of Artificial Sequence: Synthetic oligonucleotide
  Antisense strand to SEQ ID NO: 1420190
aagucugacguuuaggccc

SEQ ID NO: 1420192 - RNA, 19 nt, Artificial Sequence
  Description of Artificial Sequence: Synthetic oligonucleotide
  Sense strand starting at position 1114 of SEQ ID NO: 1243501
cugaguaaugggcauccaa

SEQ ID NO: 1420193 - RNA, 19 nt, Artificial Sequence
  Description of Artificial Sequence: Synthetic oligonucleotide
  Antisense strand to SEQ ID NO: 1420192
uuggaugcccauuacucag

SEQ ID NO: 1420194 - RNA, 19 nt, Artificial Sequence
  Description of Artificial Sequence: Synthetic oligonucleotide
  Sense strand starting at position 2392 of SEQ ID NO: 1243501
ccacgaauguucccgaaug

SEQ ID NO: 1420195 - RNA, 19 nt, Artificial Sequence
  Description of Artificial Sequence: Synthetic oligonucleotide
  Antisense strand to SEQ ID NO: 1420194
cauucgggaacauucgugg

SEQ ID NO: 1420196 - RNA, 19 nt, Artificial Sequence
  Description of Artificial Sequence: Synthetic oligonucleotide
  Sense strand starting at position 2394 of SEQ ID NO: 1243501
acgaauguucccgaaugaa

SEQ ID NO: 1420197 - RNA, 19 nt, Artificial Sequence
  Description of Artificial Sequence: Synthetic oligonucleotide
  Antisense strand to SEQ ID NO: 1420196
uucauucgggaacauucgu

SEQ ID NO: 1420198 - RNA, 19 nt, Artificial Sequence
  Description of Artificial Sequence: Synthetic oligonucleotide
  Sense strand starting at position 2571 of SEQ ID NO: 1243501
ucaugcauuccauacaugu

SEQ ID NO: 1420199 - RNA, 19 nt, Artificial Sequence
  Description of Artificial Sequence: Synthetic oligonucleotide
  Antisense strand to SEQ ID NO: 1420198
acauguauggaaugcauga

SEQ ID NO: 1420200 - RNA, 19 nt, Artificial Sequence
  Description of Artificial Sequence: Synthetic oligonucleotide
  Sense strand starting at position 2579 of SEQ ID NO: 1243501
uccauacaugugcauugau

SEQ ID NO: 1420201 - RNA, 19 nt, Artificial Sequence
  Description of Artificial Sequence: Synthetic oligonucleotide
  Antisense strand to SEQ ID NO: 1420200
aucaaugcacauguaugga

SEQ ID NO: 1420202 - RNA, 19 nt, Artificial Sequence
  Description of Artificial Sequence: Synthetic oligonucleotide
  Sense strand starting at position 2595 of SEQ ID NO: 1243501
gaugacaaccuguguaaca

SEQ ID NO: 1420203 - RNA, 19 nt, Artificial Sequence
  Description of Artificial Sequence: Synthetic oligonucleotide
  Antisense strand to SEQ ID NO: 1420202
uguuacacagguugucauc

SEQ ID NO: 1420204 - RNA, 19 nt, Artificial Sequence
  Description of Artificial Sequence: Synthetic oligonucleotide
  Sense strand starting at position 2668 of SEQ ID NO: 1243501
uguggaagucugcauucua

SEQ ID NO: 1420205 - RNA, 19 nt, Artificial Sequence
  Description of Artificial Sequence: Synthetic oligonucleotide
  Antisense strand to SEQ ID NO: 1420204
uagaaugcagacuuccaca

SEQ ID NO: 1420206 - RNA, 19 nt, Artificial Sequence
  Description of Artificial Sequence: Synthetic oligonucleotide
  Sense strand starting at position 2795 of SEQ ID NO: 1243501
aggcuuuacugagcaggua

SEQ ID NO: 1420207 - RNA, 19 nt, Artificial Sequence
  Description of Artificial Sequence: Synthetic oligonucleotide
  Antisense strand to SEQ ID NO: 1420206
uaccugcucaguaaagccu

SEQ ID NO: 1420208 - RNA, 19 nt, Artificial Sequence
  Description of Artificial Sequence: Synthetic oligonucleotide
  Sense strand starting at position 2796 of SEQ ID NO: 1243501
ggcuuuacugagcagguaa

SEQ ID NO: 1420209 - RNA, 19 nt, Artificial Sequence
  Description of Artificial Sequence: Synthetic oligonucleotide
  Antisense strand to SEQ ID NO: 1420208
uuaccugcucaguaaagcc

SEQ ID NO: 1420210 - RNA, 19 nt, Artificial Sequence
  Description of Artificial Sequence: Synthetic oligonucleotide
  Sense strand starting at position 2852 of SEQ ID NO: 1243501
cuaugugaagccuauagaa

SEQ ID NO: 1420211 - RNA, 19 nt, Artificial Sequence
  Description of Artificial Sequence: Synthetic oligonucleotide
  Antisense strand to SEQ ID NO: 1420210
uucuauaggcuucacauag

SEQ ID NO: 1420212 - RNA, 19 nt, Artificial Sequence
  Description of Artificial Sequence: Synthetic oligonucleotide
  Sense strand starting at position 2954 of SEQ ID NO: 1243501
ucaaguggaucacuugaga

SEQ ID NO: 1420213 - RNA, 19 nt, Artificial Sequence
  Description of Artificial Sequence: Synthetic oligonucleotide
  Antisense strand to SEQ ID NO: 1420212
ucucaagugauccacuuga

SEQ ID NO: 1420214 - RNA, 19 nt, Artificial Sequence
  Description of Artificial Sequence: Synthetic oligonucleotide
  Sense strand starting at position 2967 of SEQ ID NO: 1243501
uugagagccgucugaccaa

SEQ ID NO: 1420215 - RNA, 19 nt, Artificial Sequence
  Description of Artificial Sequence: Synthetic oligonucleotide
  Antisense strand to SEQ ID NO: 1420214
uuggucagacggcucucaa

SEQ ID NO: 1420216 - RNA, 19 nt, Artificial Sequence
  Description of Artificial Sequence: Synthetic oligonucleotide
  Sense strand starting at position 3262 of SEQ ID NO: 1243501
gugacagaggcccauugua

SEQ ID NO: 1420217 - RNA, 19 nt, Artificial Sequence
  Description of Artificial Sequence: Synthetic oligonucleotide
  Antisense strand to SEQ ID NO: 1420216
uacaaugggccucugucac

SEQ ID NO: 1420218 - RNA, 19 nt, Artificial Sequence
  Description of Artificial Sequence: Synthetic oligonucleotide
  Sense strand starting at position 3386 of SEQ ID NO: 1243501
auacaaagaucuuuguagu

SEQ ID NO: 1420219 - RNA, 19 nt, Artificial Sequence
  Description of Artificial Sequence: Synthetic oligonucleotide
  Antisense strand to SEQ ID NO: 1420218
acuacaaagaucuuuguau

SEQ ID NO: 1420220 - RNA, 19 nt, Artificial Sequence
  Description of Artificial Sequence: Synthetic oligonucleotide
  Sense strand starting at position 3441 of SEQ ID NO: 1243501
ggcaguauagccuagagca

SEQ ID NO: 1420221 - RNA, 19 nt, Artificial Sequence
  Description of Artificial Sequence: Synthetic oligonucleotide
  Antisense strand to SEQ ID NO: 1420220
ugcucuaggcuauacugcc

SEQ ID NO: 1420222 - RNA, 19 nt, Artificial Sequence
  Description of Artificial Sequence: Synthetic oligonucleotide
  Sense strand starting at position 3620 of SEQ ID NO: 1243501
aucauucugccagauugcu

SEQ ID NO: 1420223 - RNA, 19 nt, Artificial Sequence
  Description of Artificial Sequence: Synthetic oligonucleotide
  Antisense strand to SEQ ID NO: 1420222
agcaaucuggcagaaugau

SEQ ID NO: 1420224 - RNA, 19 nt, Artificial Sequence
  Description of Artificial Sequence: Synthetic oligonucleotide
  Sense strand starting at position 3875 of SEQ ID NO: 1243501
ucuguacuugauugugaac

SEQ ID NO: 1420225 - RNA, 19 nt, Artificial Sequence
  Description of Artificial Sequence: Synthetic oligonucleotide
  Antisense strand to SEQ ID NO: 1420224
guucacaaucaaguacaga

SEQ ID NO: 1420226 - RNA, 19 nt, Artificial Sequence
  Description of Artificial Sequence: Synthetic oligonucleotide
  Sense strand starting at position 3932 of SEQ ID NO: 1243501
ugcuuugaagagcacuuau

SEQ ID NO: 1420227 - RNA, 19 nt, Artificial Sequence
  Description of Artificial Sequence: Synthetic oligonucleotide
  Antisense strand to SEQ ID NO: 1420226
auaagugcucuucaaagca

SEQ ID NO: 1420228 - RNA, 19 nt, Artificial Sequence
  Description of Artificial Sequence: Synthetic oligonucleotide
  Sense strand starting at position 3939 of SEQ ID NO: 1243501
aagagcacuuauguagaau

SEQ ID NO: 1420229 - RNA, 19 nt, Artificial Sequence
  Description of Artificial Sequence: Synthetic oligonucleotide
  Antisense strand to SEQ ID NO: 1420228
auucuacauaagugcucuu

SEQ ID NO: 1420230 - RNA, 19 nt, Artificial Sequence
  Description of Artificial Sequence: Synthetic oligonucleotide
  Sense strand starting at position 3945 of SEQ ID NO: 1243501
acuuauguagaaugccaaa

SEQ ID NO: 1420231 - RNA, 19 nt, Artificial Sequence
  Description of Artificial Sequence: Synthetic oligonucleotide
  Antisense strand to SEQ ID NO: 1420230
uuuggcauucuacauaagu

SEQ ID NO: 1420232 - RNA, 19 nt, Artificial Sequence
  Description of Artificial Sequence: Synthetic oligonucleotide
  Sense strand starting at position 3967 of SEQ ID NO: 1243501
ugggauugccuggguccaa

SEQ ID NO: 1420233 - RNA, 19 nt, Artificial Sequence
  Description of Artificial Sequence: Synthetic oligonucleotide
  Antisense strand to SEQ ID NO: 1420232
uuggacccaggcaauccca

SEQ ID NO: 1420234 - RNA, 19 nt, Artificial Sequence
  Description of Artificial Sequence: Synthetic oligonucleotide
  Sense strand starting at position 3968 of SEQ ID NO: 1243501
gggauugccuggguccaaa

SEQ ID NO: 1420235 - RNA, 19 nt, Artificial Sequence
  Description of Artificial Sequence: Synthetic oligonucleotide
  Antisense strand to SEQ ID NO: 1420234
uuuggacccaggcaauccc

SEQ ID NO: 1420236 - RNA, 19 nt, Artificial Sequence
  Description of Artificial Sequence: Synthetic oligonucleotide
  Sense strand starting at position 106 of SEQ ID NO: 1243502
cuugguuauccucagcaau

SEQ ID NO: 1420237 - RNA, 19 nt, Artificial Sequence
  Description of Artificial Sequence: Synthetic oligonucleotide
  Antisense strand to SEQ ID NO: 1420236
auugcugaggauaaccaag

SEQ ID NO: 1420238 - RNA, 19 nt, Artificial Sequence
  Description of Artificial Sequence: Synthetic oligonucleotide
  Sense strand starting at position 108 of SEQ ID NO: 1243502
ugguuauccucagcaauuu

SEQ ID NO: 1420239 - RNA, 19 nt, Artificial Sequence
  Description of Artificial Sequence: Synthetic oligonucleotide
  Antisense strand to SEQ ID NO: 1420238
aaauugcugaggauaacca

SEQ ID NO: 1420240 - RNA, 19 nt, Artificial Sequence
  Description of Artificial Sequence: Synthetic oligonucleotide
  Sense strand starting at position 178 of SEQ ID NO: 1243502
ucaaacugguuauugauga

SEQ ID NO: 1420241 - RNA, 19 nt, Artificial Sequence
  Description of Artificial Sequence: Synthetic oligonucleotide
  Antisense strand to SEQ ID NO: 1420240
ucaucaauaaccaguuuga

SEQ ID NO: 1420242 - RNA, 19 nt, Artificial Sequence
  Description of Artificial Sequence: Synthetic oligonucleotide
  Sense strand starting at position 232 of SEQ ID NO: 1243502
ugaguacccuuccugaauu

SEQ ID NO: 1420243 - RNA, 19 nt, Artificial Sequence
  Description of Artificial Sequence: Synthetic oligonucleotide
  Antisense strand to SEQ ID NO: 1420242
aauucaggaaggguacuca

SEQ ID NO: 1420244 - RNA, 19 nt, Artificial Sequence
  Description of Artificial Sequence: Synthetic oligonucleotide
  Sense strand starting at position 301 of SEQ ID NO: 1243502
accuaucauccacggaaau

SEQ ID NO: 1420245 - RNA, 19 nt, Artificial Sequence
  Description of Artificial Sequence: Synthetic oligonucleotide
  Antisense strand to SEQ ID NO: 1420244
auuuccguggaugauaggu

SEQ ID NO: 1420246 - RNA, 19 nt, Artificial Sequence
  Description of Artificial Sequence: Synthetic oligonucleotide
  Sense strand starting at position 302 of SEQ ID NO: 1243502
ccuaucauccacggaaaug

SEQ ID NO: 1420247 - RNA, 19 nt, Artificial Sequence
  Description of Artificial Sequence: Synthetic oligonucleotide
  Antisense strand to SEQ ID NO: 1420246
cauuuccguggaugauagg

SEQ ID NO: 1420248 - RNA, 19 nt, Artificial Sequence
  Description of Artificial Sequence: Synthetic oligonucleotide
  Sense strand starting at position 425 of SEQ ID NO: 1243502
cuaauagugguagaaaugu

SEQ ID NO: 1420249 - RNA, 19 nt, Artificial Sequence
  Description of Artificial Sequence: Synthetic oligonucleotide
  Antisense strand to SEQ ID NO: 1420248
acauuucuaccacuauuag

SEQ ID NO: 1420250 - RNA, 19 nt, Artificial Sequence
  Description of Artificial Sequence: Synthetic oligonucleotide
  Sense strand starting at position 693 of SEQ ID NO: 1243502
aguagaguacuggguuuga

SEQ ID NO: 1420251 - RNA, 19 nt, Artificial Sequence
  Description of Artificial Sequence: Synthetic oligonucleotide
  Antisense strand to SEQ ID NO: 1420250
ucaaacccaguacucuacu

SEQ ID NO: 1420252 - RNA, 19 nt, Artificial Sequence
  Description of Artificial Sequence: Synthetic oligonucleotide
  Sense strand starting at position 2349 of SEQ ID NO: 1243502
cggugguugggugguaaga

SEQ ID NO: 1420253 - RNA, 19 nt, Artificial Sequence
  Description of Artificial Sequence: Synthetic oligonucleotide
  Antisense strand to SEQ ID NO: 1420252
ucuuaccacccaaccaccg

SEQ ID NO: 1420254 - RNA, 19 nt, Artificial Sequence
  Description of Artificial Sequence: Synthetic oligonucleotide
  Sense strand starting at position 3082 of SEQ ID NO: 1243502
aggucuccuguugaauuaa

SEQ ID NO: 1420255 - RNA, 19 nt, Artificial Sequence
  Description of Artificial Sequence: Synthetic oligonucleotide
  Antisense strand to SEQ ID NO: 1420254
uuaauucaacaggagaccu

SEQ ID NO: 1420256 - RNA, 19 nt, Artificial Sequence
  Description of Artificial Sequence: Synthetic oligonucleotide
  Sense strand starting at position 3113 of SEQ ID NO: 1243502
gagggaaagucuguguuua

SEQ ID NO: 1420257 - RNA, 19 nt, Artificial Sequence
  Description of Artificial Sequence: Synthetic oligonucleotide
  Antisense strand to SEQ ID NO: 1420256
uaaacacagacuuucccuc

SEQ ID NO: 1420258 - RNA, 19 nt, Artificial Sequence
  Description of Artificial Sequence: Synthetic oligonucleotide
  Sense strand starting at position 3114 of SEQ ID NO: 1243502
agggaaagucuguguuuac

SEQ ID NO: 1420259 - RNA, 19 nt, Artificial Sequence
  Description of Artificial Sequence: Synthetic oligonucleotide
  Antisense strand to SEQ ID NO: 1420258
guaaacacagacuuucccu

SEQ ID NO: 1420260 - RNA, 19 nt, Artificial Sequence
  Description of Artificial Sequence: Synthetic oligonucleotide
  Sense strand starting at position 3115 of SEQ ID NO: 1243502
gggaaagucuguguuuaca

SEQ ID NO: 1420261 - RNA, 19 nt, Artificial Sequence
  Description of Artificial Sequence: Synthetic oligonucleotide
  Antisense strand to SEQ ID NO: 1420260
uguaaacacagacuuuccc

SEQ ID NO: 1420262 - RNA, 19 nt, Artificial Sequence
  Description of Artificial Sequence: Synthetic oligonucleotide
  Sense strand starting at position 3117 of SEQ ID NO: 1243502
gaaagucuguguuuacaga

SEQ ID NO: 1420263 - RNA, 19 nt, Artificial Sequence
  Description of Artificial Sequence: Synthetic oligonucleotide
  Antisense strand to SEQ ID NO: 1420262
ucuguaaacacagacuuuc

SEQ ID NO: 1420264 - RNA, 19 nt, Artificial Sequence
  Description of Artificial Sequence: Synthetic oligonucleotide
  Sense strand starting at position 3124 of SEQ ID NO: 1243502
uguguuuacagaggaagcu

SEQ ID NO: 1420265 - RNA, 19 nt, Artificial Sequence
  Description of Artificial Sequence: Synthetic oligonucleotide
  Antisense strand to SEQ ID NO: 1420264
agcuuccucuguaaacaca

SEQ ID NO: 1420266 - RNA, 19 nt, Artificial Sequence
  Description of Artificial Sequence: Synthetic oligonucleotide
  Sense strand starting at position 3188 of SEQ ID NO: 1243502
gacaguuguguuguucugu

SEQ ID NO: 1420267 - RNA, 19 nt, Artificial Sequence
  Description of Artificial Sequence: Synthetic oligonucleotide
  Antisense strand to SEQ ID NO: 1420266
acagaacaacacaacuguc

SEQ ID NO: 1420268 - RNA, 19 nt, Artificial Sequence
  Description of Artificial Sequence: Synthetic oligonucleotide
  Sense strand starting at position 3191 of SEQ ID NO: 1243502
aguuguguuguucuguauu

SEQ ID NO: 1420269 - RNA, 19 nt, Artificial Sequence
  Description of Artificial Sequence: Synthetic oligonucleotide
  Antisense strand to SEQ ID NO: 1420268
aauacagaacaacacaacu

SEQ ID NO: 1420270 - RNA, 19 nt, Artificial Sequence
  Description of Artificial Sequence: Synthetic oligonucleotide
  Sense strand starting at position 3201 of SEQ ID NO: 1243502
uucuguauuccuugucaac

SEQ ID NO: 1420271 - RNA, 19 nt, Artificial Sequence
  Description of Artificial Sequence: Synthetic oligonucleotide
  Antisense strand to SEQ ID NO: 1420270
guugacaaggaauacagaa

SEQ ID NO: 1420272 - RNA, 19 nt, Artificial Sequence
  Description of Artificial Sequence: Synthetic oligonucleotide
  Sense strand starting at position 3203 of SEQ ID NO: 1243502
cuguauuccuugucaacag

SEQ ID NO: 1420273 - RNA, 19 nt, Artificial Sequence
  Description of Artificial Sequence: Synthetic oligonucleotide
  Antisense strand to SEQ ID NO: 1420272
cuguugacaaggaauacag

SEQ ID NO: 1420274 - RNA, 19 nt, Artificial Sequence
  Description of Artificial Sequence: Synthetic oligonucleotide
  Sense strand starting at position 3276 of SEQ ID NO: 1243502
ggguguugggcccagcuau

SEQ ID NO: 1420275 - RNA, 19 nt, Artificial Sequence
  Description of Artificial Sequence: Synthetic oligonucleotide
  Antisense strand to SEQ ID NO: 1420274
auagcugggcccaacaccc

SEQ ID NO: 1420276 - RNA, 19 nt, Artificial Sequence
  Description of Artificial Sequence: Synthetic oligonucleotide
  Sense strand starting at position 3304 of SEQ ID NO: 1243502
uguuucggcauuugaggau

SEQ ID NO: 1420277 - RNA, 19 nt, Artificial Sequence
  Description of Artificial Sequence: Synthetic oligonucleotide
  Antisense strand to SEQ ID NO: 1420276
auccucaaaugccgaaaca

SEQ ID NO: 1420278 - RNA, 19 nt, Artificial Sequence
  Description of Artificial Sequence: Synthetic oligonucleotide
  Sense strand starting at position 3316 of SEQ ID NO: 1243502
ugaggaugccagcagagau

SEQ ID NO: 1420279 - RNA, 19 nt, Artificial Sequence
  Description of Artificial Sequence: Synthetic oligonucleotide
  Antisense strand to SEQ ID NO: 1420278
aucucugcuggcauccuca

SEQ ID NO: 1420280 - RNA, 19 nt, Artificial Sequence
  Description of Artificial Sequence: Synthetic oligonucleotide
  Sense strand starting at position 3341 of SEQ ID NO: 1243502
aaauaaauugcguauugag

SEQ ID NO: 1420281 - RNA, 19 nt, Artificial Sequence
  Description of Artificial Sequence: Synthetic oligonucleotide
  Antisense strand to SEQ ID NO: 1420280
cucaauacgcaauuuauuu

SEQ ID NO: 1420282 - RNA, 19 nt, Artificial Sequence
  Description of Artificial Sequence: Synthetic oligonucleotide
  Sense strand starting at position 3423 of SEQ ID NO: 1243502
gggaaacucggccgauauc

SEQ ID NO: 1420283 - RNA, 19 nt, Artificial Sequence
  Description of Artificial Sequence: Synthetic oligonucleotide
  Antisense strand to SEQ ID NO: 1420282
gauaucggccgaguuuccc

SEQ ID NO: 1420284 - RNA, 19 nt, Artificial Sequence
  Description of Artificial Sequence: Synthetic oligonucleotide
  Sense strand starting at position 3455 of SEQ ID NO: 1243502
aaaggugagugucuugcua

SEQ ID NO: 1420285 - RNA, 19 nt, Artificial Sequence
  Description of Artificial Sequence: Synthetic oligonucleotide
  Antisense strand to SEQ ID NO: 1420284
uagcaagacacucaccuuu

SEQ ID NO: 1420286 - RNA, 19 nt, Artificial Sequence
  Description of Artificial Sequence: Synthetic oligonucleotide
  Sense strand starting at position 3483 of SEQ ID NO: 1243502
gagaucugaaguuggguuu

SEQ ID NO: 1420287 - RNA, 19 nt, Artificial Sequence
  Description of Artificial Sequence: Synthetic oligonucleotide
  Antisense strand to SEQ ID NO: 1420286
aaacccaacuucagaucuc

SEQ ID NO: 1420288 - RNA, 19 nt, Artificial Sequence
  Description of Artificial Sequence: Synthetic oligonucleotide
  Sense strand starting at position 3486 of SEQ ID NO: 1243502
aucugaaguuggguuugaa

SEQ ID NO: 1420289 - RNA, 19 nt, Artificial Sequence
  Description of Artificial Sequence: Synthetic oligonucleotide
  Antisense strand to SEQ ID NO: 1420288
uucaaacccaacuucagau

SEQ ID NO: 1420290 - RNA, 19 nt, Artificial Sequence
  Description of Artificial Sequence: Synthetic oligonucleotide
  Sense strand starting at position 3498 of SEQ ID NO: 1243502
guuugaagagguggagaau

SEQ ID NO: 1420291 - RNA, 19 nt, Artificial Sequence
  Description of Artificial Sequence: Synthetic oligonucleotide
  Antisense strand to SEQ ID NO: 1420290
auucuccaccucuucaaac

SEQ ID NO: 1420292 - RNA, 19 nt, Artificial Sequence
  Description of Artificial Sequence: Synthetic oligonucleotide
  Sense strand starting at position 3524 of SEQ ID NO: 1243502
gcauuccucucaguuucua

SEQ ID NO: 1420293 - RNA, 19 nt, Artificial Sequence
  Description of Artificial Sequence: Synthetic oligonucleotide
  Antisense strand to SEQ ID NO: 1420292
uagaaacugagaggaaugc

SEQ ID NO: 1420294 - RNA, 19 nt, Artificial Sequence
  Description of Artificial Sequence: Synthetic oligonucleotide
  Sense strand starting at position 3536 of SEQ ID NO: 1243502
guuucuaguauugaguuaa

SEQ ID NO: 1420295 - RNA, 19 nt, Artificial Sequence
  Description of Artificial Sequence: Synthetic oligonucleotide
  Antisense strand to SEQ ID NO: 1420294
uuaacucaauacuagaaac

SEQ ID NO: 1420296 - RNA, 19 nt, Artificial Sequence
  Description of Artificial Sequence: Synthetic oligonucleotide
  Sense strand starting at position 3548 of SEQ ID NO: 1243502
gaguuaaauugggcucauu

SEQ ID NO: 1420297 - RNA, 19 nt, Artificial Sequence
  Description of Artificial Sequence: Synthetic oligonucleotide
  Antisense strand to SEQ ID NO: 1420296
aaugagcccaauuuaacuc

SEQ ID NO: 1420298 - RNA, 19 nt, Artificial Sequence
  Description of Artificial Sequence: Synthetic oligonucleotide
  Sense strand starting at position 3728 of SEQ ID NO: 1243502
uuagcuuuaugcuuaaaug

SEQ ID NO: 1420299 - RNA, 19 nt, Artificial Sequence
  Description of Artificial Sequence: Synthetic oligonucleotide
  Antisense strand to SEQ ID NO: 1420298
cauuuaagcauaaagcuaa

SEQ ID NO: 1420300 - RNA, 19 nt, Artificial Sequence
  Description of Artificial Sequence: Synthetic oligonucleotide
  Sense strand starting at position 3786 of SEQ ID NO: 1243502
agucuaaauguagguuagu

SEQ ID NO: 1420301 - RNA, 19 nt, Artificial Sequence
  Description of Artificial Sequence: Synthetic oligonucleotide
  Antisense strand to SEQ ID NO: 1420300
acuaaccuacauuuagacu

SEQ ID NO: 1420302 - RNA, 19 nt, Artificial Sequence
  Description of Artificial Sequence: Synthetic oligonucleotide
  Sense strand starting at position 3789 of SEQ ID NO: 1243502
cuaaauguagguuagugaa

SEQ ID NO: 1420303 - RNA, 19 nt, Artificial Sequence
  Description of Artificial Sequence: Synthetic oligonucleotide
  Antisense strand to SEQ ID NO: 1420302
uucacuaaccuacauuuag

SEQ ID NO: 1420304 - RNA, 19 nt, Artificial Sequence
  Description of Artificial Sequence: Synthetic oligonucleotide
  Sense strand starting at position 3915 of SEQ ID NO: 1243502
ggugauccaucauugcuuu

SEQ ID NO: 1420305 - RNA, 19 nt, Artificial Sequence
  Description of Artificial Sequence: Synthetic oligonucleotide
  Antisense strand to SEQ ID NO: 1420304
aaagcaaugauggaucacc

SEQ ID NO: 1420306 - RNA, 19 nt, Artificial Sequence
  Description of Artificial Sequence: Synthetic oligonucleotide
  Sense strand starting at position 3948 of SEQ ID NO: 1243502
uuuauauucuugcuuggag

SEQ ID NO: 1420307 - RNA, 19 nt, Artificial Sequence
  Description of Artificial Sequence: Synthetic oligonucleotide
  Antisense strand to SEQ ID NO: 1420306
cuccaagcaagaauauaaa

SEQ ID NO: 1420308 - RNA, 19 nt, Artificial Sequence
  Description of Artificial Sequence: Synthetic oligonucleotide
  Sense strand starting at position 3969 of SEQ ID NO: 1243502
cgggaggugucuuuagaug

SEQ ID NO: 1420309 - RNA, 19 nt, Artificial Sequence
  Description of Artificial Sequence: Synthetic oligonucleotide
  Antisense strand to SEQ ID NO: 1420308
caucuaaagacaccucccg

SEQ ID NO: 1420310 - RNA, 19 nt, Artificial Sequence
  Description of Artificial Sequence: Synthetic oligonucleotide
  Sense strand starting at position 3971 of SEQ ID NO: 1243502
ggaggugucuuuagauggu

SEQ ID NO: 1420311 - RNA, 19 nt, Artificial Sequence
  Description of Artificial Sequence: Synthetic oligonucleotide
  Antisense strand to SEQ ID NO: 1420310
accaucuaaagacaccucc

SEQ ID NO: 1420312 - RNA, 19 nt, Artificial Sequence
  Description of Artificial Sequence: Synthetic oligonucleotide
  Sense strand starting at position 3977 of SEQ ID NO: 1243502
gucuuuagauggucucuuu

SEQ ID NO: 1420313 - RNA, 19 nt, Artificial Sequence
  Description of Artificial Sequence: Synthetic oligonucleotide
  Antisense strand to SEQ ID NO: 1420312
aaagagaccaucuaaagac

SEQ ID NO: 1420314 - RNA, 19 nt, Artificial Sequence
  Description of Artificial Sequence: Synthetic oligonucleotide
  Sense strand starting at position 3980 of SEQ ID NO: 1243502
uuuagauggucucuuugca

SEQ ID NO: 1420315 - RNA, 19 nt, Artificial Sequence
  Description of Artificial Sequence: Synthetic oligonucleotide
  Antisense strand to SEQ ID NO: 1420314
ugcaaagagaccaucuaaa

SEQ ID NO: 1420316 - RNA, 19 nt, Artificial Sequence
  Description of Artificial Sequence: Synthetic oligonucleotide
  Sense strand starting at position 148 of SEQ ID NO: 1243503
ugagucaaaucuguacucu

SEQ ID NO: 1420317 - RNA, 19 nt, Artificial Sequence
  Description of Artificial Sequence: Synthetic oligonucleotide
  Antisense strand to SEQ ID NO: 1420316
agaguacagauuugacuca

SEQ ID NO: 1420318 - RNA, 19 nt, Artificial Sequence
  Description of Artificial Sequence: Synthetic oligonucleotide
  Sense strand starting at position 201 of SEQ ID NO: 1243503
uuauaauguucugcuguua

SEQ ID NO: 1420319 - RNA, 19 nt, Artificial Sequence
  Description of Artificial Sequence: Synthetic oligonucleotide
  Antisense strand to SEQ ID NO: 1420318
uaacagcagaacauuauaa

SEQ ID NO: 1420320 - RNA, 19 nt, Artificial Sequence
  Description of Artificial Sequence: Synthetic oligonucleotide
  Sense strand starting at position 212 of SEQ ID NO: 1243503
ugcuguuacuaagccauuu

SEQ ID NO: 1420321 - RNA, 19 nt, Artificial Sequence
  Description of Artificial Sequence: Synthetic oligonucleotide
  Antisense strand to SEQ ID NO: 1420320
aaauggcuuaguaacagca

SEQ ID NO: 1420322 - RNA, 19 nt, Artificial Sequence
  Description of Artificial Sequence: Synthetic oligonucleotide
  Sense strand starting at position 255 of SEQ ID NO: 1243503
auuuaacaaugguacguua

SEQ ID NO: 1420323 - RNA, 19 nt, Artificial Sequence
  Description of Artificial Sequence: Synthetic oligonucleotide
  Antisense strand to SEQ ID NO: 1420322
uaacguaccauuguuaaau

SEQ ID NO: 1420324 - RNA, 19 nt, Artificial Sequence
  Description of Artificial Sequence: Synthetic oligonucleotide
  Sense strand starting at position 257 of SEQ ID NO: 1243503
uuaacaaugguacguuaga

SEQ ID NO: 1420325 - RNA, 19 nt, Artificial Sequence
  Description of Artificial Sequence: Synthetic oligonucleotide
  Antisense strand to SEQ ID NO: 1420324
ucuaacguaccauuguuaa

SEQ ID NO: 1420326 - RNA, 19 nt, Artificial Sequence
  Description of Artificial Sequence: Synthetic oligonucleotide
  Sense strand starting at position 268 of SEQ ID NO: 1243503
acguuagacuuacaaucau

SEQ ID NO: 1420327 - RNA, 19 nt, Artificial Sequence
  Description of Artificial Sequence: Synthetic oligonucleotide
  Antisense strand to SEQ ID NO: 1420326
augauuguaagucuaacgu

SEQ ID NO: 1420328 - RNA, 19 nt, Artificial Sequence
  Description of Artificial Sequence: Synthetic oligonucleotide
  Sense strand starting at position 367 of SEQ ID NO: 1243503
uuacgagaguugccuaagu

SEQ ID NO: 1420329 - RNA, 19 nt, Artificial Sequence
  Description of Artificial Sequence: Synthetic oligonucleotide
  Antisense strand to SEQ ID NO: 1420328
acuuaggcaacucucguaa

SEQ ID NO: 1420330 - RNA, 19 nt, Artificial Sequence
  Description of Artificial Sequence: Synthetic oligonucleotide
  Sense strand starting at position 376 of SEQ ID NO: 1243503
uugccuaaguccuuggaaa

SEQ ID NO: 1420331 - RNA, 19 nt, Artificial Sequence
  Description of Artificial Sequence: Synthetic oligonucleotide
  Antisense strand to SEQ ID NO: 1420330
uuuccaaggacuuaggcaa

SEQ ID NO: 1420332 - RNA, 19 nt, Artificial Sequence
  Description of Artificial Sequence: Synthetic oligonucleotide
  Sense strand starting at position 377 of SEQ ID NO: 1243503
ugccuaaguccuuggaaag

SEQ ID NO: 1420333 - RNA, 19 nt, Artificial Sequence
  Description of Artificial Sequence: Synthetic oligonucleotide
  Antisense strand to SEQ ID NO: 1420332
cuuuccaaggacuuaggca

SEQ ID NO: 1420334 - RNA, 19 nt, Artificial Sequence
  Description of Artificial Sequence: Synthetic oligonucleotide
  Sense strand starting at position 378 of SEQ ID NO: 1243503
gccuaaguccuuggaaaga

SEQ ID NO: 1420335 - RNA, 19 nt, Artificial Sequence
  Description of Artificial Sequence: Synthetic oligonucleotide
  Antisense strand to SEQ ID NO: 1420334
ucuuuccaaggacuuaggc

SEQ ID NO: 1420336 - RNA, 19 nt, Artificial Sequence
  Description of Artificial Sequence: Synthetic oligonucleotide
  Sense strand starting at position 675 of SEQ ID NO: 1243503
gugggaggauggcuuuaga

SEQ ID NO: 1420337 - RNA, 19 nt, Artificial Sequence
  Description of Artificial Sequence: Synthetic oligonucleotide
  Antisense strand to SEQ ID NO: 1420336
ucuaaagccauccucccac

SEQ ID NO: 1420338 - RNA, 19 nt, Artificial Sequence
  Description of Artificial Sequence: Synthetic oligonucleotide
  Sense strand starting at position 685 of SEQ ID NO: 1243503
ggcuuuagacugggaaggu

SEQ ID NO: 1420339 - RNA, 19 nt, Artificial Sequence
  Description of Artificial Sequence: Synthetic oligonucleotide
  Antisense strand to SEQ ID NO: 1420338
accuucccagucuaaagcc

SEQ ID NO: 1420340 - RNA, 19 nt, Artificial Sequence
  Description of Artificial Sequence: Synthetic oligonucleotide
  Sense strand starting at position 845 of SEQ ID NO: 1243503
uuccuugucccuugguuau

SEQ ID NO: 1420341 - RNA, 19 nt, Artificial Sequence
  Description of Artificial Sequence: Synthetic oligonucleotide
  Antisense strand to SEQ ID NO: 1420340
auaaccaagggacaaggaa

SEQ ID NO: 1420342 - RNA, 19 nt, Artificial Sequence
  Description of Artificial Sequence: Synthetic oligonucleotide
  Sense strand starting at position 855 of SEQ ID NO: 1243503
cuugguuauccucagcaau

SEQ ID NO: 1420343 - RNA, 19 nt, Artificial Sequence
  Description of Artificial Sequence: Synthetic oligonucleotide
  Antisense strand to SEQ ID NO: 1420342
auugcugaggauaaccaag

SEQ ID NO: 1420344 - RNA, 19 nt, Artificial Sequence
  Description of Artificial Sequence: Synthetic oligonucleotide
  Sense strand starting at position 857 of SEQ ID NO: 1243503
ugguuauccucagcaauuu

SEQ ID NO: 1420345 - RNA, 19 nt, Artificial Sequence
  Description of Artificial Sequence: Synthetic oligonucleotide
  Antisense strand to SEQ ID NO: 1420344
aaauugcugaggauaacca

SEQ ID NO: 1420346 - RNA, 19 nt, Artificial Sequence
  Description of Artificial Sequence: Synthetic oligonucleotide
  Sense strand starting at position 927 of SEQ ID NO: 1243503
ucaaacugguuauugauga

SEQ ID NO: 1420347 - RNA, 19 nt, Artificial Sequence
  Description of Artificial Sequence: Synthetic oligonucleotide
  Antisense strand to SEQ ID NO: 1420346
ucaucaauaaccaguuuga

SEQ ID NO: 1420348 - RNA, 19 nt, Artificial Sequence
  Description of Artificial Sequence: Synthetic oligonucleotide
  Sense strand starting at position 928 of SEQ ID NO: 1243503
caaacugguuauugaugaa

SEQ ID NO: 1420349 - RNA, 19 nt, Artificial Sequence
  Description of Artificial Sequence: Synthetic oligonucleotide
  Antisense strand to SEQ ID NO: 1420348
uucaucaauaaccaguuug

SEQ ID NO: 1420350 - RNA, 19 nt, Artificial Sequence
  Description of Artificial Sequence: Synthetic oligonucleotide
  Sense strand starting at position 931 of SEQ ID NO: 1243503
acugguuauugaugaaaca

SEQ ID NO: 1420351 - RNA, 19 nt, Artificial Sequence
  Description of Artificial Sequence: Synthetic oligonucleotide
  Antisense strand to SEQ ID NO: 1420350
uguuucaucaauaaccagu

SEQ ID NO: 1420352 - RNA, 19 nt, Artificial Sequence
  Description of Artificial Sequence: Synthetic oligonucleotide
  Sense strand starting at position 981 of SEQ ID NO: 1243503
ugaguacccuuccugaauu

SEQ ID NO: 1420353 - RNA, 19 nt, Artificial Sequence
  Description of Artificial Sequence: Synthetic oligonucleotide
  Antisense strand to SEQ ID NO: 1420352
aauucaggaaggguacuca

SEQ ID NO: 1420354 - RNA, 19 nt, Artificial Sequence
  Description of Artificial Sequence: Synthetic oligonucleotide
  Sense strand starting at position 1050 of SEQ ID NO: 1243503
accuaucauccacggaaau

SEQ ID NO: 1420355 - RNA, 19 nt, Artificial Sequence
  Description of Artificial Sequence: Synthetic oligonucleotide
  Antisense strand to SEQ ID NO: 1420354
auuuccguggaugauaggu

SEQ ID NO: 1420356 - RNA, 19 nt, Artificial Sequence
  Description of Artificial Sequence: Synthetic oligonucleotide
  Sense strand starting at position 1051 of SEQ ID NO: 1243503
ccuaucauccacggaaaug

SEQ ID NO: 1420357 - RNA, 19 nt, Artificial Sequence
  Description of Artificial Sequence: Synthetic oligonucleotide
  Antisense strand to SEQ ID NO: 1420356
cauuuccguggaugauagg

SEQ ID NO: 1420358 - RNA, 19 nt, Artificial Sequence
  Description of Artificial Sequence: Synthetic oligonucleotide
  Sense strand starting at position 1172 of SEQ ID NO: 1243503
aucuaauagugguagaaau

SEQ ID NO: 1420359 - RNA, 19 nt, Artificial Sequence
  Description of Artificial Sequence: Synthetic oligonucleotide
  Antisense strand to SEQ ID NO: 1420358
auuucuaccacuauuagau

SEQ ID NO: 1420360 - RNA, 19 nt, Artificial Sequence
  Description of Artificial Sequence: Synthetic oligonucleotide
  Sense strand starting at position 1174 of SEQ ID NO: 1243503
cuaauagugguagaaaugu

SEQ ID NO: 1420361 - RNA, 19 nt, Artificial Sequence
  Description of Artificial Sequence: Synthetic oligonucleotide
  Antisense strand to SEQ ID NO: 1420360
acauuucuaccacuauuag

SEQ ID NO: 1420362 - RNA, 19 nt, Artificial Sequence
  Description of Artificial Sequence: Synthetic oligonucleotide
  Sense strand starting at position 1442 of SEQ ID NO: 1243503
aguagaguacuggguuuga

SEQ ID NO: 1420363 - RNA, 19 nt, Artificial Sequence
  Description of Artificial Sequence: Synthetic oligonucleotide
  Antisense strand to SEQ ID NO: 1420362
ucaaacccaguacucuacu

SEQ ID NO: 1420364 - RNA, 19 nt, Artificial Sequence
  Description of Artificial Sequence: Synthetic oligonucleotide
  Sense strand starting at position 2980 of SEQ ID NO: 1243503
gcgcggugacgucagagua

SEQ ID NO: 1420365 - RNA, 19 nt, Artificial Sequence
  Description of Artificial Sequence: Synthetic oligonucleotide
  Antisense strand to SEQ ID NO: 1420364
uacucugacgucaccgcgc

SEQ ID NO: 1420366 - RNA, 19 nt, Artificial Sequence
  Description of Artificial Sequence: Synthetic oligonucleotide
  Sense strand starting at position 3098 of SEQ ID NO: 1243503
cggugguugggugguaaga

SEQ ID NO: 1420367 - RNA, 19 nt, Artificial Sequence
  Description of Artificial Sequence: Synthetic oligonucleotide
  Antisense strand to SEQ ID NO: 1420366
ucuuaccacccaaccaccg

SEQ ID NO: 1420368 - RNA, 19 nt, Artificial Sequence
  Description of Artificial Sequence: Synthetic oligonucleotide
  Sense strand starting at position 3831 of SEQ ID NO: 1243503
aggucuccuguugaauuaa

SEQ ID NO: 1420369 - RNA, 19 nt, Artificial Sequence
  Description of Artificial Sequence: Synthetic oligonucleotide
  Antisense strand to SEQ ID NO: 1420368
uuaauucaacaggagaccu

SEQ ID NO: 1420370 - RNA, 19 nt, Artificial Sequence
  Description of Artificial Sequence: Synthetic oligonucleotide
  Sense strand starting at position 3862 of SEQ ID NO: 1243503
gagggaaagucuguguuua

SEQ ID NO: 1420371 - RNA, 19 nt, Artificial Sequence
  Description of Artificial Sequence: Synthetic oligonucleotide
  Antisense strand to SEQ ID NO: 1420370
uaaacacagacuuucccuc

SEQ ID NO: 1420372 - RNA, 19 nt, Artificial Sequence
  Description of Artificial Sequence: Synthetic oligonucleotide
  Sense strand starting at position 3863 of SEQ ID NO: 1243503
agggaaagucuguguuuac

SEQ ID NO: 1420373 - RNA, 19 nt, Artificial Sequence
  Description of Artificial Sequence: Synthetic oligonucleotide
  Antisense strand to SEQ ID NO: 1420372
guaaacacagacuuucccu

SEQ ID NO: 1420374 - RNA, 19 nt, Artificial Sequence
  Description of Artificial Sequence: Synthetic oligonucleotide
  Sense strand starting at position 3864 of SEQ ID NO: 1243503
gggaaagucuguguuuaca

SEQ ID NO: 1420375 - RNA, 19 nt, Artificial Sequence
  Description of Artificial Sequence: Synthetic oligonucleotide
  Antisense strand to SEQ ID NO: 1420374
uguaaacacagacuuuccc

SEQ ID NO: 1420376 - RNA, 19 nt, Artificial Sequence
  Description of Artificial Sequence: Synthetic oligonucleotide
  Sense strand starting at position 3866 of SEQ ID NO: 1243503
gaaagucuguguuuacaga

SEQ ID NO: 1420377 - RNA, 19 nt, Artificial Sequence
  Description of Artificial Sequence: Synthetic oligonucleotide
  Antisense strand to SEQ ID NO: 1420376
ucuguaaacacagacuuuc

SEQ ID NO: 1420378 - RNA, 19 nt, Artificial Sequence
  Description of Artificial Sequence: Synthetic oligonucleotide
  Sense strand starting at position 3873 of SEQ ID NO: 1243503
uguguuuacagaggaagcu

SEQ ID NO: 1420379 - RNA, 19 nt, Artificial Sequence
  Description of Artificial Sequence: Synthetic oligonucleotide
  Antisense strand to SEQ ID NO: 1420378
agcuuccucuguaaacaca

SEQ ID NO: 1420380 - RNA, 19 nt, Artificial Sequence
  Description of Artificial Sequence: Synthetic oligonucleotide
  Sense strand starting at position 3937 of SEQ ID NO: 1243503
gacaguuguguuguucugu

SEQ ID NO: 1420381 - RNA, 19 nt, Artificial Sequence
  Description of Artificial Sequence: Synthetic oligonucleotide
  Antisense strand to SEQ ID NO: 1420380
acagaacaacacaacuguc

SEQ ID NO: 1420382 - RNA, 19 nt, Artificial Sequence
  Description of Artificial Sequence: Synthetic oligonucleotide
  Sense strand starting at position 3938 of SEQ ID NO: 1243503
acaguuguguuguucugua

SEQ ID NO: 1420383 - RNA, 19 nt, Artificial Sequence
  Description of Artificial Sequence: Synthetic oligonucleotide
  Antisense strand to SEQ ID NO: 1420382
uacagaacaacacaacugu

SEQ ID NO: 1420384 - RNA, 19 nt, Artificial Sequence
  Description of Artificial Sequence: Synthetic oligonucleotide
  Sense strand starting at position 3940 of SEQ ID NO: 1243503
aguuguguuguucuguauu

SEQ ID NO: 1420385 - RNA, 19 nt, Artificial Sequence
  Description of Artificial Sequence: Synthetic oligonucleotide
  Antisense strand to SEQ ID NO: 1420384
aauacagaacaacacaacu

SEQ ID NO: 1420386 - RNA, 19 nt, Artificial Sequence
  Description of Artificial Sequence: Synthetic oligonucleotide
  Sense strand starting at position 3943 of SEQ ID NO: 1243503
uguguuguucuguauuccu

SEQ ID NO: 1420387 - RNA, 19 nt, Artificial Sequence
  Description of Artificial Sequence: Synthetic oligonucleotide
  Antisense strand to SEQ ID NO: 1420386
aggaauacagaacaacaca

SEQ ID NO: 1420388 - RNA, 19 nt, Artificial Sequence
  Description of Artificial Sequence: Synthetic oligonucleotide
  Sense strand starting at position 3950 of SEQ ID NO: 1243503
uucuguauuccuugucaac

SEQ ID NO: 1420389 - RNA, 19 nt, Artificial Sequence
  Description of Artificial Sequence: Synthetic oligonucleotide
  Antisense strand to SEQ ID NO: 1420388
guugacaaggaauacagaa

SEQ ID NO: 1420390 - RNA, 19 nt, Artificial Sequence
  Description of Artificial Sequence: Synthetic oligonucleotide
  Sense strand starting at position 3952 of SEQ ID NO: 1243503
cuguauuccuugucaacag

SEQ ID NO: 1420391 - RNA, 19 nt, Artificial Sequence
  Description of Artificial Sequence: Synthetic oligonucleotide
  Antisense strand to SEQ ID NO: 1420390
cuguugacaaggaauacag

SEQ ID NO: 1420392 - RNA, 19 nt, Artificial Sequence
  Description of Artificial Sequence: Synthetic oligonucleotide
  Sense strand starting at position 3953 of SEQ ID NO: 1243503
uguauuccuugucaacaga

SEQ ID NO: 1420393 - RNA, 19 nt, Artificial Sequence
  Description of Artificial Sequence: Synthetic oligonucleotide
  Antisense strand to SEQ ID NO: 1420392
ucuguugacaaggaauaca

SEQ ID NO: 1420394 - RNA, 19 nt, Artificial Sequence
  Description of Artificial Sequence: Synthetic oligonucleotide
  Sense strand starting at position 3981 of SEQ ID NO: 1243503
augcguugugcacauaagu

SEQ ID NO: 1420395 - RNA, 19 nt, Artificial Sequence
  Description of Artificial Sequence: Synthetic oligonucleotide
  Antisense strand to SEQ ID NO: 1420394
acuuaugugcacaacgcau

SEQ ID NO: 1420396 - RNA, 19 nt, Artificial Sequence
  Description of Artificial Sequence: Synthetic oligonucleotide
  Sense strand starting at position 53 of SEQ ID NO: 1243504
ggaggugucacuuauaugg

SEQ ID NO: 1420397 - RNA, 19 nt, Artificial Sequence
  Description of Artificial Sequence: Synthetic oligonucleotide
  Antisense strand to SEQ ID NO: 1420396
ccauauaagugacaccucc

SEQ ID NO: 1420398 - RNA, 19 nt, Artificial Sequence
  Description of Artificial Sequence: Synthetic oligonucleotide
  Sense strand starting at position 229 of SEQ ID NO: 1243504
auggaauaguguucuggac

SEQ ID NO: 1420399 - RNA, 19 nt, Artificial Sequence
  Description of Artificial Sequence: Synthetic oligonucleotide
  Antisense strand to SEQ ID NO: 1420398
guccagaacacuauuccau

SEQ ID NO: 1420400 - RNA, 19 nt, Artificial Sequence
  Description of Artificial Sequence: Synthetic oligonucleotide
  Sense strand starting at position 282 of SEQ ID NO: 1243504
cugauccucugccuggaaa

SEQ ID NO: 1420401 - RNA, 19 nt, Artificial Sequence
  Description of Artificial Sequence: Synthetic oligonucleotide
  Antisense strand to SEQ ID NO: 1420400
uuuccaggcagaggaucag

SEQ ID NO: 1420402 - RNA, 19 nt, Artificial Sequence
  Description of Artificial Sequence: Synthetic oligonucleotide
  Sense strand starting at position 285 of SEQ ID NO: 1243504
auccucugccuggaaacuu

SEQ ID NO: 1420403 - RNA, 19 nt, Artificial Sequence
  Description of Artificial Sequence: Synthetic oligonucleotide
  Antisense strand to SEQ ID NO: 1420402
aaguuuccaggcagaggau

SEQ ID NO: 1420404 - RNA, 19 nt, Artificial Sequence
  Description of Artificial Sequence: Synthetic oligonucleotide
  Sense strand starting at position 340 of SEQ ID NO: 1243504
ucuauugaguagcuacauu

SEQ ID NO: 1420405 - RNA, 19 nt, Artificial Sequence
  Description of Artificial Sequence: Synthetic oligonucleotide
  Antisense strand to SEQ ID NO: 1420404
aauguagcuacucaauaga

SEQ ID NO: 1420406 - RNA, 19 nt, Artificial Sequence
  Description of Artificial Sequence: Synthetic oligonucleotide
  Sense strand starting at position 454 of SEQ ID NO: 1243504
agcaacuugagagguaauu

SEQ ID NO: 1420407 - RNA, 19 nt, Artificial Sequence
  Description of Artificial Sequence: Synthetic oligonucleotide
  Antisense strand to SEQ ID NO: 1420406
aauuaccucucaaguugcu

SEQ ID NO: 1420408 - RNA, 19 nt, Artificial Sequence
  Description of Artificial Sequence: Synthetic oligonucleotide
  Sense strand starting at position 590 of SEQ ID NO: 1243504
uggcauguugguuaaguau

SEQ ID NO: 1420409 - RNA, 19 nt, Artificial Sequence
  Description of Artificial Sequence: Synthetic oligonucleotide
  Antisense strand to SEQ ID NO: 1420408
auacuuaaccaacaugcca

SEQ ID NO: 1420410 - RNA, 19 nt, Artificial Sequence
  Description of Artificial Sequence: Synthetic oligonucleotide
  Sense strand starting at position 663 of SEQ ID NO: 1243504
cacugugauguggguauuu

SEQ ID NO: 1420411 - RNA, 19 nt, Artificial Sequence
  Description of Artificial Sequence: Synthetic oligonucleotide
  Antisense strand to SEQ ID NO: 1420410
aaauacccacaucacagug

SEQ ID NO: 1420412 - RNA, 19 nt, Artificial Sequence
  Description of Artificial Sequence: Synthetic oligonucleotide
  Sense strand starting at position 668 of SEQ ID NO: 1243504
ugauguggguauuucaguu

SEQ ID NO: 1420413 - RNA, 19 nt, Artificial Sequence
  Description of Artificial Sequence: Synthetic oligonucleotide
  Antisense strand to SEQ ID NO: 1420412
aacugaaauacccacauca

SEQ ID NO: 1420414 - RNA, 19 nt, Artificial Sequence
  Description of Artificial Sequence: Synthetic oligonucleotide
  Sense strand starting at position 817 of SEQ ID NO: 1243504
agaucuucgugaccaugau

SEQ ID NO: 1420415 - RNA, 19 nt, Artificial Sequence
  Description of Artificial Sequence: Synthetic oligonucleotide
  Antisense strand to SEQ ID NO: 1420414
aucauggucacgaagaucu

SEQ ID NO: 1420416 - RNA, 19 nt, Artificial Sequence
  Description of Artificial Sequence: Synthetic oligonucleotide
  Sense strand starting at position 1294 of SEQ ID NO: 1243504
agauaaguauuauccuagu

SEQ ID NO: 1420417 - RNA, 19 nt, Artificial Sequence
  Description of Artificial Sequence: Synthetic oligonucleotide
  Antisense strand to SEQ ID NO: 1420416
acuaggauaauacuuaucu

SEQ ID NO: 1420418 - RNA, 19 nt, Artificial Sequence
  Description of Artificial Sequence: Synthetic oligonucleotide
  Sense strand starting at position 1473 of SEQ ID NO: 1243504
ugcauauugucacugggau

SEQ ID NO: 1420419 - RNA, 19 nt, Artificial Sequence
  Description of Artificial Sequence: Synthetic oligonucleotide
  Antisense strand to SEQ ID NO: 1420418
aucccagugacaauaugca

SEQ ID NO: 1420420 - RNA, 19 nt, Artificial Sequence
  Description of Artificial Sequence: Synthetic oligonucleotide
  Sense strand starting at position 1474 of SEQ ID NO: 1243504
gcauauugucacugggauu

SEQ ID NO: 1420421 - RNA, 19 nt, Artificial Sequence
  Description of Artificial Sequence: Synthetic oligonucleotide
  Antisense strand to SEQ ID NO: 1420420
aaucccagugacaauaugc

SEQ ID NO: 1420422 - RNA, 19 nt, Artificial Sequence
  Description of Artificial Sequence: Synthetic oligonucleotide
  Sense strand starting at position 1487 of SEQ ID NO: 1243504
gggauuaacuaagaugaca

SEQ ID NO: 1420423 - RNA, 19 nt, Artificial Sequence
  Description of Artificial Sequence: Synthetic oligonucleotide
  Antisense strand to SEQ ID NO: 1420422
ugucaucuuaguuaauccc

SEQ ID NO: 1420424 - RNA, 19 nt, Artificial Sequence
  Description of Artificial Sequence: Synthetic oligonucleotide
  Sense strand starting at position 1571 of SEQ ID NO: 1243504
auaggugcauaacuaauau

SEQ ID NO: 1420425 - RNA, 19 nt, Artificial Sequence
  Description of Artificial Sequence: Synthetic oligonucleotide
  Antisense strand to SEQ ID NO: 1420424
auauuaguuaugcaccuau

SEQ ID NO: 1420426 - RNA, 19 nt, Artificial Sequence
  Description of Artificial Sequence: Synthetic oligonucleotide
  Sense strand starting at position 1676 of SEQ ID NO: 1243504
agccaauaauuggcagaau

SEQ ID NO: 1420427 - RNA, 19 nt, Artificial Sequence
  Description of Artificial Sequence: Synthetic oligonucleotide
  Antisense strand to SEQ ID NO: 1420426
auucugccaauuauuggcu

SEQ ID NO: 1420428 - RNA, 19 nt, Artificial Sequence
  Description of Artificial Sequence: Synthetic oligonucleotide
  Sense strand starting at position 1828 of SEQ ID NO: 1243504
gaguuagucuggucaugau

SEQ ID NO: 1420429 - RNA, 19 nt, Artificial Sequence
  Description of Artificial Sequence: Synthetic oligonucleotide
  Antisense strand to SEQ ID NO: 1420428
aucaugaccagacuaacuc

SEQ ID NO: 1420430 - RNA, 19 nt, Artificial Sequence
  Description of Artificial Sequence: Synthetic oligonucleotide
  Sense strand starting at position 1897 of SEQ ID NO: 1243504
ccaauuagucucuaguucu

SEQ ID NO: 1420431 - RNA, 19 nt, Artificial Sequence
  Description of Artificial Sequence: Synthetic oligonucleotide
  Antisense strand to SEQ ID NO: 1420430
agaacuagagacuaauugg

SEQ ID NO: 1420432 - RNA, 19 nt, Artificial Sequence
  Description of Artificial Sequence: Synthetic oligonucleotide
  Sense strand starting at position 2154 of SEQ ID NO: 1243504
ucuucuuggucacugacaa

SEQ ID NO: 1420433 - RNA, 19 nt, Artificial Sequence
  Description of Artificial Sequence: Synthetic oligonucleotide
  Antisense strand to SEQ ID NO: 1420432
uugucagugaccaagaaga

SEQ ID NO: 1420434 - RNA, 19 nt, Artificial Sequence
  Description of Artificial Sequence: Synthetic oligonucleotide
  Sense strand starting at position 2197 of SEQ ID NO: 1243504
ggcagaagccaguaucuga

SEQ ID NO: 1420435 - RNA, 19 nt, Artificial Sequence
  Description of Artificial Sequence: Synthetic oligonucleotide
  Antisense strand to SEQ ID NO: 1420434
ucagauacuggcuucugcc

SEQ ID NO: 1420436 - RNA, 19 nt, Artificial Sequence
  Description of Artificial Sequence: Synthetic oligonucleotide
  Sense strand starting at position 2448 of SEQ ID NO: 1243504
ucccuuuggaggcgaaaua

SEQ ID NO: 1420437 - RNA, 19 nt, Artificial Sequence
  Description of Artificial Sequence: Synthetic oligonucleotide
  Antisense strand to SEQ ID NO: 1420436
uauuucgccuccaaaggga

SEQ ID NO: 1420438 - RNA, 19 nt, Artificial Sequence
  Description of Artificial Sequence: Synthetic oligonucleotide
  Sense strand starting at position 2449 of SEQ ID NO: 1243504
cccuuuggaggcgaaauaa

SEQ ID NO: 1420439 - RNA, 19 nt, Artificial Sequence
  Description of Artificial Sequence: Synthetic oligonucleotide
  Antisense strand to SEQ ID NO: 1420438
uuauuucgccuccaaaggg

SEQ ID NO: 1420440 - RNA, 19 nt, Artificial Sequence
  Description of Artificial Sequence: Synthetic oligonucleotide
  Sense strand starting at position 2569 of SEQ ID NO: 1243504
ggucaauuuccuugucuau

SEQ ID NO: 1420441 - RNA, 19 nt, Artificial Sequence
  Description of Artificial Sequence: Synthetic oligonucleotide
  Antisense strand to SEQ ID NO: 1420440
auagacaaggaaauugacc

SEQ ID NO: 1420442 - RNA, 19 nt, Artificial Sequence
  Description of Artificial Sequence: Synthetic oligonucleotide
  Sense strand starting at position 2723 of SEQ ID NO: 1243504
aaugacagagccugaguua

SEQ ID NO: 1420443 - RNA, 19 nt, Artificial Sequence
  Description of Artificial Sequence: Synthetic oligonucleotide
  Antisense strand to SEQ ID NO: 1420442
uaacucaggcucugucauu

SEQ ID NO: 1420444 - RNA, 19 nt, Artificial Sequence
  Description of Artificial Sequence: Synthetic oligonucleotide
  Sense strand starting at position 2863 of SEQ ID NO: 1243504
ccaugaucacugcauugau

SEQ ID NO: 1420445 - RNA, 19 nt, Artificial Sequence
  Description of Artificial Sequence: Synthetic oligonucleotide
  Antisense strand to SEQ ID NO: 1420444
aucaaugcagugaucaugg

SEQ ID NO: 1420446 - RNA, 19 nt, Artificial Sequence
  Description of Artificial Sequence: Synthetic oligonucleotide
  Sense strand starting at position 2866 of SEQ ID NO: 1243504
ugaucacugcauugaucuu

SEQ ID NO: 1420447 - RNA, 19 nt, Artificial Sequence
  Description of Artificial Sequence: Synthetic oligonucleotide
  Antisense strand to SEQ ID NO: 1420446
aagaucaaugcagugauca

SEQ ID NO: 1420448 - RNA, 19 nt, Artificial Sequence
  Description of Artificial Sequence: Synthetic oligonucleotide
  Sense strand starting at position 3386 of SEQ ID NO: 1243504
uugucaucuccucaggauu

SEQ ID NO: 1420449 - RNA, 19 nt, Artificial Sequence
  Description of Artificial Sequence: Synthetic oligonucleotide
  Antisense strand to SEQ ID NO: 1420448
aauccugaggagaugacaa

SEQ ID NO: 1420450 - RNA, 19 nt, Artificial Sequence
  Description of Artificial Sequence: Synthetic oligonucleotide
  Sense strand starting at position 3397 of SEQ ID NO: 1243504
ucaggauuauguccaagga

SEQ ID NO: 1420451 - RNA, 19 nt, Artificial Sequence
  Description of Artificial Sequence: Synthetic oligonucleotide
  Antisense strand to SEQ ID NO: 1420450
uccuuggacauaauccuga

SEQ ID NO: 1420452 - RNA, 19 nt, Artificial Sequence
  Description of Artificial Sequence: Synthetic oligonucleotide
  Sense strand starting at position 3406 of SEQ ID NO: 1243504
uguccaaggaguggaaauu

SEQ ID NO: 1420453 - RNA, 19 nt, Artificial Sequence
  Description of Artificial Sequence: Synthetic oligonucleotide
  Antisense strand to SEQ ID NO: 1420452
aauuuccacuccuuggaca

SEQ ID NO: 1420454 - RNA, 19 nt, Artificial Sequence
  Description of Artificial Sequence: Synthetic oligonucleotide
  Sense strand starting at position 3438 of SEQ ID NO: 1243504
guagcacagcuguaggaau

SEQ ID NO: 1420455 - RNA, 19 nt, Artificial Sequence
  Description of Artificial Sequence: Synthetic oligonucleotide
  Antisense strand to SEQ ID NO: 1420454
auuccuacagcugugcuac

SEQ ID NO: 1420456 - RNA, 19 nt, Artificial Sequence
  Description of Artificial Sequence: Synthetic oligonucleotide
  Sense strand starting at position 3534 of SEQ ID NO: 1243504
uucugagcauugguaacuu

SEQ ID NO: 1420457 - RNA, 19 nt, Artificial Sequence
  Description of Artificial Sequence: Synthetic oligonucleotide
  Antisense strand to SEQ ID NO: 1420456
aaguuaccaaugcucagaa

SEQ ID NO: 1420458 - RNA, 19 nt, Artificial Sequence
  Description of Artificial Sequence: Synthetic oligonucleotide
  Sense strand starting at position 3800 of SEQ ID NO: 1243504
gggaguuuggguuggaauc

SEQ ID NO: 1420459 - RNA, 19 nt, Artificial Sequence
  Description of Artificial Sequence: Synthetic oligonucleotide
  Antisense strand to SEQ ID NO: 1420458
gauuccaacccaaacuccc

SEQ ID NO: 1420460 - RNA, 19 nt, Artificial Sequence
  Description of Artificial Sequence: Synthetic oligonucleotide
  Sense strand starting at position 3801 of SEQ ID NO: 1243504
ggaguuuggguuggaaucu

SEQ ID NO: 1420461 - RNA, 19 nt, Artificial Sequence
  Description of Artificial Sequence: Synthetic oligonucleotide
  Antisense strand to SEQ ID NO: 1420460
agauuccaacccaaacucc

SEQ ID NO: 1420462 - RNA, 19 nt, Artificial Sequence
  Description of Artificial Sequence: Synthetic oligonucleotide
  Sense strand starting at position 3822 of SEQ ID NO: 1243504
ucauaaguguaaucaccau

SEQ ID NO: 1420463 - RNA, 19 nt, Artificial Sequence
  Description of Artificial Sequence: Synthetic oligonucleotide
  Antisense strand to SEQ ID NO: 1420462
auggugauuacacuuauga

SEQ ID NO: 1420464 - RNA, 19 nt, Artificial Sequence
  Description of Artificial Sequence: Synthetic oligonucleotide
  Sense strand starting at position 3854 of SEQ ID NO: 1243504
uguauuuggugcuuguaca

SEQ ID NO: 1420465 - RNA, 19 nt, Artificial Sequence
  Description of Artificial Sequence: Synthetic oligonucleotide
  Antisense strand to SEQ ID NO: 1420464
uguacaagcaccaaauaca

SEQ ID NO: 1420466 - RNA, 19 nt, Artificial Sequence
  Description of Artificial Sequence: Synthetic oligonucleotide
  Sense strand starting at position 3855 of SEQ ID NO: 1243504
guauuuggugcuuguacau

SEQ ID NO: 1420467 - RNA, 19 nt, Artificial Sequence
  Description of Artificial Sequence: Synthetic oligonucleotide
  Antisense strand to SEQ ID NO: 1420466
auguacaagcaccaaauac

SEQ ID NO: 1420468 - RNA, 19 nt, Artificial Sequence
  Description of Artificial Sequence: Synthetic oligonucleotide
  Sense strand starting at position 3878 of SEQ ID NO: 1243504
gggccuuacugaucaugga

SEQ ID NO: 1420469 - RNA, 19 nt, Artificial Sequence
  Description of Artificial Sequence: Synthetic oligonucleotide
  Antisense strand to SEQ ID NO: 1420468
uccaugaucaguaaggccc

SEQ ID NO: 1420470 - RNA, 19 nt, Artificial Sequence
  Description of Artificial Sequence: Synthetic oligonucleotide
  Sense strand starting at position 3906 of SEQ ID NO: 1243504
ccucccagggcucaauaau

SEQ ID NO: 1420471 - RNA, 19 nt, Artificial Sequence
  Description of Artificial Sequence: Synthetic oligonucleotide
  Antisense strand to SEQ ID NO: 1420470
auuauugagcccugggagg

SEQ ID NO: 1420472 - RNA, 19 nt, Artificial Sequence
  Description of Artificial Sequence: Synthetic oligonucleotide
  Sense strand starting at position 3915 of SEQ ID NO: 1243504
gcucaauaauuacuagaga

SEQ ID NO: 1420473 - RNA, 19 nt, Artificial Sequence
  Description of Artificial Sequence: Synthetic oligonucleotide
  Antisense strand to SEQ ID NO: 1420472
ucucuaguaauuauugagc

SEQ ID NO: 1420474 - RNA, 19 nt, Artificial Sequence
  Description of Artificial Sequence: Synthetic oligonucleotide
  Sense strand starting at position 3939 of SEQ ID NO: 1243504
aacgacuuaucugugaaug

SEQ ID NO: 1420475 - RNA, 19 nt, Artificial Sequence
  Description of Artificial Sequence: Synthetic oligonucleotide
  Antisense strand to SEQ ID NO: 1420474
cauucacagauaagucguu

SEQ ID NO: 1420476 - RNA, 19 nt, Artificial Sequence
  Description of Artificial Sequence: Synthetic oligonucleotide
  Sense strand starting at position 4 of SEQ ID NO: 1243505
acaagcucucuguguggaa

SEQ ID NO: 1420477 - RNA, 19 nt, Artificial Sequence
  Description of Artificial Sequence: Synthetic oligonucleotide
  Antisense strand to SEQ ID NO: 1420476
uuccacacagagagcuugu

SEQ ID NO: 1420478 - RNA, 19 nt, Artificial Sequence
  Description of Artificial Sequence: Synthetic oligonucleotide
  Sense strand starting at position 5 of SEQ ID NO: 1243505
caagcucucuguguggaaa

SEQ ID NO: 1420479 - RNA, 19 nt, Artificial Sequence
  Description of Artificial Sequence: Synthetic oligonucleotide
  Antisense strand to SEQ ID NO: 1420478
uuuccacacagagagcuug

SEQ ID NO: 1420480 - RNA, 19 nt, Artificial Sequence
  Description of Artificial Sequence: Synthetic oligonucleotide
  Sense strand starting at position 196 of SEQ ID NO: 1243505
gccagagguugguucucau

SEQ ID NO: 1420481 - RNA, 19 nt, Artificial Sequence
  Description of Artificial Sequence: Synthetic oligonucleotide
  Antisense strand to SEQ ID NO: 1420480
augagaaccaaccucuggc

SEQ ID NO: 1420482 - RNA, 19 nt, Artificial Sequence
  Description of Artificial Sequence: Synthetic oligonucleotide
  Sense strand starting at position 199 of SEQ ID NO: 1243505
agagguugguucucaugca

SEQ ID NO: 1420483 - RNA, 19 nt, Artificial Sequence
  Description of Artificial Sequence: Synthetic oligonucleotide
  Antisense strand to SEQ ID NO: 1420482
ugcaugagaaccaaccucu

SEQ ID NO: 1420484 - RNA, 19 nt, Artificial Sequence
  Description of Artificial Sequence: Synthetic oligonucleotide
  Sense strand starting at position 216 of SEQ ID NO: 1243505
caggaacugugucaaauca

SEQ ID NO: 1420485 - RNA, 19 nt, Artificial Sequence
  Description of Artificial Sequence: Synthetic oligonucleotide
  Antisense strand to SEQ ID NO: 1420484
ugauuugacacaguuccug

SEQ ID NO: 1420486 - RNA, 19 nt, Artificial Sequence
  Description of Artificial Sequence: Synthetic oligonucleotide
  Sense strand starting at position 463 of SEQ ID NO: 1243505
ugcagugagccguauccua

SEQ ID NO: 1420487 - RNA, 19 nt, Artificial Sequence
  Description of Artificial Sequence: Synthetic oligonucleotide
  Antisense strand to SEQ ID NO: 1420486
uaggauacggcucacugca

SEQ ID NO: 1420488 - RNA, 19 nt, Artificial Sequence
  Description of Artificial Sequence: Synthetic oligonucleotide
  Sense strand starting at position 468 of SEQ ID NO: 1243505
ugagccguauccuaucauu

SEQ ID NO: 1420489 - RNA, 19 nt, Artificial Sequence
  Description of Artificial Sequence: Synthetic oligonucleotide
  Antisense strand to SEQ ID NO: 1420488
aaugauaggauacggcuca

SEQ ID NO: 1420490 - RNA, 19 nt, Artificial Sequence
  Description of Artificial Sequence: Synthetic oligonucleotide
  Sense strand starting at position 471 of SEQ ID NO: 1243505
gccguauccuaucauugca

SEQ ID NO: 1420491 - RNA, 19 nt, Artificial Sequence
  Description of Artificial Sequence: Synthetic oligonucleotide
  Antisense strand to SEQ ID NO: 1420490
ugcaaugauaggauacggc

SEQ ID NO: 1420492 - RNA, 19 nt, Artificial Sequence
  Description of Artificial Sequence: Synthetic oligonucleotide
  Sense strand starting at position 889 of SEQ ID NO: 1243505
guuugagucacacaagggu

SEQ ID NO: 1420493 - RNA, 19 nt, Artificial Sequence
  Description of Artificial Sequence: Synthetic oligonucleotide
  Antisense strand to SEQ ID NO: 1420492
acccuugugugacucaaac

SEQ ID NO: 1420494 - RNA, 19 nt, Artificial Sequence
  Description of Artificial Sequence: Synthetic oligonucleotide
  Sense strand starting at position 922 of SEQ ID NO: 1243505
acauaaucccucgggaacu

SEQ ID NO: 1420495 - RNA, 19 nt, Artificial Sequence
  Description of Artificial Sequence: Synthetic oligonucleotide
  Antisense strand to SEQ ID NO: 1420494
aguucccgagggauuaugu

SEQ ID NO: 1420496 - RNA, 19 nt, Artificial Sequence
  Description of Artificial Sequence: Synthetic oligonucleotide
  Sense strand starting at position 933 of SEQ ID NO: 1243505
cgggaacuggccugagaau

SEQ ID NO: 1420497 - RNA, 19 nt, Artificial Sequence
  Description of Artificial Sequence: Synthetic oligonucleotide
  Antisense strand to SEQ ID NO: 1420496
auucucaggccaguucccg

SEQ ID NO: 1420498 - RNA, 19 nt, Artificial Sequence
  Description of Artificial Sequence: Synthetic oligonucleotide
  Sense strand starting at position 1278 of SEQ ID NO: 1243505
cgcgcacuugugcugugaa

SEQ ID NO: 1420499 - RNA, 19 nt, Artificial Sequence
  Description of Artificial Sequence: Synthetic oligonucleotide
  Antisense strand to SEQ ID NO: 1420498
uucacagcacaagugcgcg

SEQ ID NO: 1420500 - RNA, 19 nt, Artificial Sequence
  Description of Artificial Sequence: Synthetic oligonucleotide
  Sense strand starting at position 1279 of SEQ ID NO: 1243505
gcgcacuugugcugugaaa

SEQ ID NO: 1420501 - RNA, 19 nt, Artificial Sequence
  Description of Artificial Sequence: Synthetic oligonucleotide
  Antisense strand to SEQ ID NO: 1420500
uuucacagcacaagugcgc

SEQ ID NO: 1420502 - RNA, 19 nt, Artificial Sequence
  Description of Artificial Sequence: Synthetic oligonucleotide
  Sense strand starting at position 2277 of SEQ ID NO: 1243505
ugugacaugacccgacaua

SEQ ID NO: 1420503 - RNA, 19 nt, Artificial Sequence
  Description of Artificial Sequence: Synthetic oligonucleotide
  Antisense strand to SEQ ID NO: 1420502
uaugucgggucaugucaca

SEQ ID NO: 1420504 - RNA, 19 nt, Artificial Sequence
  Description of Artificial Sequence: Synthetic oligonucleotide
  Sense strand starting at position 2288 of SEQ ID NO: 1243505
ccgacauaaccguguauuu

SEQ ID NO: 1420505 - RNA, 19 nt, Artificial Sequence
  Description of Artificial Sequence: Synthetic oligonucleotide
  Antisense strand to SEQ ID NO: 1420504
aaauacacgguuaugucgg

SEQ ID NO: 1420506 - RNA, 19 nt, Artificial Sequence
  Description of Artificial Sequence: Synthetic oligonucleotide
  Sense strand starting at position 2310 of SEQ ID NO: 1243505
augaauuaaucacaagagu

SEQ ID NO: 1420507 - RNA, 19 nt, Artificial Sequence
  Description of Artificial Sequence: Synthetic oligonucleotide
  Antisense strand to SEQ ID NO: 1420506
acucuugugauuaauucau

SEQ ID NO: 1420508 - RNA, 19 nt, Artificial Sequence
  Description of Artificial Sequence: Synthetic oligonucleotide
  Sense strand starting at position 2319 of SEQ ID NO: 1243505
ucacaagaguuguaucuca

SEQ ID NO: 1420509 - RNA, 19 nt, Artificial Sequence
  Description of Artificial Sequence: Synthetic oligonucleotide
  Antisense strand to SEQ ID NO: 1420508
ugagauacaacucuuguga

SEQ ID NO: 1420510 - RNA, 19 nt, Artificial Sequence
  Description of Artificial Sequence: Synthetic oligonucleotide
  Sense strand starting at position 2324 of SEQ ID NO: 1243505
agaguuguaucucaauaga

SEQ ID NO: 1420511 - RNA, 19 nt, Artificial Sequence
  Description of Artificial Sequence: Synthetic oligonucleotide
  Antisense strand to SEQ ID NO: 1420510
ucuauugagauacaacucu

SEQ ID NO: 1420512 - RNA, 19 nt, Artificial Sequence
  Description of Artificial Sequence: Synthetic oligonucleotide
  Sense strand starting at position 2327 of SEQ ID NO: 1243505
guuguaucucaauagagcu

SEQ ID NO: 1420513 - RNA, 19 nt, Artificial Sequence
  Description of Artificial Sequence: Synthetic oligonucleotide
  Antisense strand to SEQ ID NO: 1420512
agcucuauugagauacaac

SEQ ID NO: 1420514 - RNA, 19 nt, Artificial Sequence
  Description of Artificial Sequence: Synthetic oligonucleotide
  Sense strand starting at position 2343 of SEQ ID NO: 1243505
gcugcucuuccacaaacga

SEQ ID NO: 1420515 - RNA, 19 nt, Artificial Sequence
  Description of Artificial Sequence: Synthetic oligonucleotide
  Antisense strand to SEQ ID NO: 1420514
ucguuuguggaagagcagc

SEQ ID NO: 1420516 - RNA, 19 nt, Artificial Sequence
  Description of Artificial Sequence: Synthetic oligonucleotide
  Sense strand starting at position 2413 of SEQ ID NO: 1243505
gguccuggccuuuguagaa

SEQ ID NO: 1420517 - RNA, 19 nt, Artificial Sequence
  Description of Artificial Sequence: Synthetic oligonucleotide
  Antisense strand to SEQ ID NO: 1420516
uucuacaaaggccaggacc

SEQ ID NO: 1420518 - RNA, 19 nt, Artificial Sequence
  Description of Artificial Sequence: Synthetic oligonucleotide
  Sense strand starting at position 2493 of SEQ ID NO: 1243505
agguaauuaucacaguuau

SEQ ID NO: 1420519 - RNA, 19 nt, Artificial Sequence
  Description of Artificial Sequence: Synthetic oligonucleotide
  Antisense strand to SEQ ID NO: 1420518
auaacugugauaauuaccu

SEQ ID NO: 1420520 - RNA, 19 nt, Artificial Sequence
  Description of Artificial Sequence: Synthetic oligonucleotide
  Sense strand starting at position 2571 of SEQ ID NO: 1243505
cucuaagugcucugcguga

SEQ ID NO: 1420521 - RNA, 19 nt, Artificial Sequence
  Description of Artificial Sequence: Synthetic oligonucleotide
  Antisense strand to SEQ ID NO: 1420520
ucacgcagagcacuuagag

SEQ ID NO: 1420522 - RNA, 19 nt, Artificial Sequence
  Description of Artificial Sequence: Synthetic oligonucleotide
  Sense strand starting at position 2573 of SEQ ID NO: 1243505
cuaagugcucugcgugauu

SEQ ID NO: 1420523 - RNA, 19 nt, Artificial Sequence
  Description of Artificial Sequence: Synthetic oligonucleotide
  Antisense strand to SEQ ID NO: 1420522
aaucacgcagagcacuuag

SEQ ID NO: 1420524 - RNA, 19 nt, Artificial Sequence
  Description of Artificial Sequence: Synthetic oligonucleotide
  Sense strand starting at position 2576 of SEQ ID NO: 1243505
agugcucugcgugauuuga

SEQ ID NO: 1420525 - RNA, 19 nt, Artificial Sequence
  Description of Artificial Sequence: Synthetic oligonucleotide
  Antisense strand to SEQ ID NO: 1420524
ucaaaucacgcagagcacu

SEQ ID NO: 1420526 - RNA, 19 nt, Artificial Sequence
  Description of Artificial Sequence: Synthetic oligonucleotide
  Sense strand starting at position 2578 of SEQ ID NO: 1243505
ugcucugcgugauuugaaa

SEQ ID NO: 1420527 - RNA, 19 nt, Artificial Sequence
  Description of Artificial Sequence: Synthetic oligonucleotide
  Antisense strand to SEQ ID NO: 1420526
uuucaaaucacgcagagca

SEQ ID NO: 1420528 - RNA, 19 nt, Artificial Sequence
  Description of Artificial Sequence: Synthetic oligonucleotide
  Sense strand starting at position 2580 of SEQ ID NO: 1243505
cucugcgugauuugaaaca

SEQ ID NO: 1420529 - RNA, 19 nt, Artificial Sequence
  Description of Artificial Sequence: Synthetic oligonucleotide
  Antisense strand to SEQ ID NO: 1420528
uguuucaaaucacgcagag

SEQ ID NO: 1420530 - RNA, 19 nt, Artificial Sequence
  Description of Artificial Sequence: Synthetic oligonucleotide
  Sense strand starting at position 2591 of SEQ ID NO: 1243505
uugaaacagugcuuccgaa

SEQ ID NO: 1420531 - RNA, 19 nt, Artificial Sequence
  Description of Artificial Sequence: Synthetic oligonucleotide
  Antisense strand to SEQ ID NO: 1420530
uucggaagcacuguuucaa

SEQ ID NO: 1420532 - RNA, 19 nt, Artificial Sequence
  Description of Artificial Sequence: Synthetic oligonucleotide
  Sense strand starting at position 2595 of SEQ ID NO: 1243505
aacagugcuuccgaagaau

SEQ ID NO: 1420533 - RNA, 19 nt, Artificial Sequence
  Description of Artificial Sequence: Synthetic oligonucleotide
  Antisense strand to SEQ ID NO: 1420532
auucuucggaagcacuguu

SEQ ID NO: 1420534 - RNA, 19 nt, Artificial Sequence
  Description of Artificial Sequence: Synthetic oligonucleotide
  Sense strand starting at position 2839 of SEQ ID NO: 1243505
ggcggagguuuaguaguga

SEQ ID NO: 1420535 - RNA, 19 nt, Artificial Sequence
  Description of Artificial Sequence: Synthetic oligonucleotide
  Antisense strand to SEQ ID NO: 1420534
ucacuacuaaaccuccgcc

SEQ ID NO: 1420536 - RNA, 19 nt, Artificial Sequence
  Description of Artificial Sequence: Synthetic oligonucleotide
  Sense strand starting at position 2848 of SEQ ID NO: 1243505
uuaguagugagccgagauu

SEQ ID NO: 1420537 - RNA, 19 nt, Artificial Sequence
  Description of Artificial Sequence: Synthetic oligonucleotide
  Antisense strand to SEQ ID NO: 1420536
aaucucggcucacuacuaa

SEQ ID NO: 1420538 - RNA, 19 nt, Artificial Sequence
  Description of Artificial Sequence: Synthetic oligonucleotide
  Sense strand starting at position 3326 of SEQ ID NO: 1243505
acagauuuguuccaaguau

SEQ ID NO: 1420539 - RNA, 19 nt, Artificial Sequence
  Description of Artificial Sequence: Synthetic oligonucleotide
  Antisense strand to SEQ ID NO: 1420538
auacuuggaacaaaucugu

SEQ ID NO: 1420540 - RNA, 19 nt, Artificial Sequence
  Description of Artificial Sequence: Synthetic oligonucleotide
  Sense strand starting at position 3335 of SEQ ID NO: 1243505
uuccaaguaucucaggguu

SEQ ID NO: 1420541 - RNA, 19 nt, Artificial Sequence
  Description of Artificial Sequence: Synthetic oligonucleotide
  Antisense strand to SEQ ID NO: 1420540
aacccugagauacuuggaa

SEQ ID NO: 1420542 - RNA, 19 nt, Artificial Sequence
  Description of Artificial Sequence: Synthetic oligonucleotide
  Sense strand starting at position 3389 of SEQ ID NO: 1243505
aucauuugcugguaggaua

SEQ ID NO: 1420543 - RNA, 19 nt, Artificial Sequence
  Description of Artificial Sequence: Synthetic oligonucleotide
  Antisense strand to SEQ ID NO: 1420542
uauccuaccagcaaaugau

SEQ ID NO: 1420544 - RNA, 19 nt, Artificial Sequence
  Description of Artificial Sequence: Synthetic oligonucleotide
  Sense strand starting at position 3392 of SEQ ID NO: 1243505
auuugcugguaggauaaau

SEQ ID NO: 1420545 - RNA, 19 nt, Artificial Sequence
  Description of Artificial Sequence: Synthetic oligonucleotide
  Antisense strand to SEQ ID NO: 1420544
auuuauccuaccagcaaau

SEQ ID NO: 1420546 - RNA, 19 nt, Artificial Sequence
  Description of Artificial Sequence: Synthetic oligonucleotide
  Sense strand starting at position 3639 of SEQ ID NO: 1243505
ccacauuaguuaggcugau

SEQ ID NO: 1420547 - RNA, 19 nt, Artificial Sequence
  Description of Artificial Sequence: Synthetic oligonucleotide
  Antisense strand to SEQ ID NO: 1420546
aucagccuaacuaaugugg

SEQ ID NO: 1420548 - RNA, 19 nt, Artificial Sequence
  Description of Artificial Sequence: Synthetic oligonucleotide
  Sense strand starting at position 3945 of SEQ ID NO: 1243505
ccaggucucucgcuugcaa

SEQ ID NO: 1420549 - RNA, 19 nt, Artificial Sequence
  Description of Artificial Sequence: Synthetic oligonucleotide
  Antisense strand to SEQ ID NO: 1420548
uugcaagcgagagaccugg

SEQ ID NO: 1420550 - RNA, 19 nt, Artificial Sequence
  Description of Artificial Sequence: Synthetic oligonucleotide
  Sense strand starting at position 3949 of SEQ ID NO: 1243505
gucucucgcuugcaaggau

SEQ ID NO: 1420551 - RNA, 19 nt, Artificial Sequence
  Description of Artificial Sequence: Synthetic oligonucleotide
  Antisense strand to SEQ ID NO: 1420550
auccuugcaagcgagagac

SEQ ID NO: 1420552 - RNA, 19 nt, Artificial Sequence
  Description of Artificial Sequence: Synthetic oligonucleotide
  Sense strand starting at position 73 of SEQ ID NO: 1243506
ggcaaaggaucccuugcuu

SEQ ID NO: 1420553 - RNA, 19 nt, Artificial Sequence
  Description of Artificial Sequence: Synthetic oligonucleotide
  Antisense strand to SEQ ID NO: 1420552
aagcaagggauccuuugcc

SEQ ID NO: 1420554 - RNA, 19 nt, Artificial Sequence
  Description of Artificial Sequence: Synthetic oligonucleotide
  Sense strand starting at position 275 of SEQ ID NO: 1243506
ccugaauccugaccugcaa

SEQ ID NO: 1420555 - RNA, 19 nt, Artificial Sequence
  Description of Artificial Sequence: Synthetic oligonucleotide
  Antisense strand to SEQ ID NO: 1420554
uugcaggucaggauucagg

SEQ ID NO: 1420556 - RNA, 19 nt, Artificial Sequence
  Description of Artificial Sequence: Synthetic oligonucleotide
  Sense strand starting at position 489 of SEQ ID NO: 1243506
aggugucagccugaaccau

SEQ ID NO: 1420557 - RNA, 19 nt, Artificial Sequence
  Description of Artificial Sequence: Synthetic oligonucleotide
  Antisense strand to SEQ ID NO: 1420556
augguucaggcugacaccu

SEQ ID NO: 1420558 - RNA, 19 nt, Artificial Sequence
  Description of Artificial Sequence: Synthetic oligonucleotide
  Sense strand starting at position 977 of SEQ ID NO: 1243506
ccaagucaccugugcugaa

SEQ ID NO: 1420559 - RNA, 19 nt, Artificial Sequence
  Description of Artificial Sequence: Synthetic oligonucleotide
  Antisense strand to SEQ ID NO: 1420558
uucagcacaggugacuugg

SEQ ID NO: 1420560 - RNA, 19 nt, Artificial Sequence
  Description of Artificial Sequence: Synthetic oligonucleotide
  Sense strand starting at position 1144 of SEQ ID NO: 1243506
agggcucacucccagaaau

SEQ ID NO: 1420561 - RNA, 19 nt, Artificial Sequence
  Description of Artificial Sequence: Synthetic oligonucleotide
  Antisense strand to SEQ ID NO: 1420560
auuucugggagugagcccu

SEQ ID NO: 1420562 - RNA, 19 nt, Artificial Sequence
  Description of Artificial Sequence: Synthetic oligonucleotide
  Sense strand starting at position 1146 of SEQ ID NO: 1243506
ggcucacucccagaaauca

SEQ ID NO: 1420563 - RNA, 19 nt, Artificial Sequence
  Description of Artificial Sequence: Synthetic oligonucleotide
  Antisense strand to SEQ ID NO: 1420562
ugauuucugggagugagcc

SEQ ID NO: 1420564 - RNA, 19 nt, Artificial Sequence
  Description of Artificial Sequence: Synthetic oligonucleotide
  Sense strand starting at position 1530 of SEQ ID NO: 1243506
cagggaaauucccguacca

SEQ ID NO: 1420565 - RNA, 19 nt, Artificial Sequence
  Description of Artificial Sequence: Synthetic oligonucleotide
  Antisense strand to SEQ ID NO: 1420564
ugguacgggaauuucccug

SEQ ID NO: 1420566 - RNA, 19 nt, Artificial Sequence
  Description of Artificial Sequence: Synthetic oligonucleotide
  Sense strand starting at position 2270 of SEQ ID NO: 1243506
ggcggacucaggugaaaca

SEQ ID NO: 1420567 - RNA, 19 nt, Artificial Sequence
  Description of Artificial Sequence: Synthetic oligonucleotide
  Antisense strand to SEQ ID NO: 1420566
uguuucaccugaguccgcc

SEQ ID NO: 1420568 - RNA, 19 nt, Artificial Sequence
  Description of Artificial Sequence: Synthetic oligonucleotide
  Sense strand starting at position 2416 of SEQ ID NO: 1243506
gcucgcaggucucucuuaa

SEQ ID NO: 1420569 - RNA, 19 nt, Artificial Sequence
  Description of Artificial Sequence: Synthetic oligonucleotide
  Antisense strand to SEQ ID NO: 1420568
uuaagagagaccugcgagc

SEQ ID NO: 1420570 - RNA, 19 nt, Artificial Sequence
  Description of Artificial Sequence: Synthetic oligonucleotide
  Sense strand starting at position 2420 of SEQ ID NO: 1243506
gcaggucucucuuaaucug

SEQ ID NO: 1420571 - RNA, 19 nt, Artificial Sequence
  Description of Artificial Sequence: Synthetic oligonucleotide
  Antisense strand to SEQ ID NO: 1420570
cagauuaagagagaccugc

SEQ ID NO: 1420572 - RNA, 19 nt, Artificial Sequence
  Description of Artificial Sequence: Synthetic oligonucleotide
  Sense strand starting at position 2423 of SEQ ID NO: 1243506
ggucucucuuaaucugaaa

SEQ ID NO: 1420573 - RNA, 19 nt, Artificial Sequence
  Description of Artificial Sequence: Synthetic oligonucleotide
  Antisense strand to SEQ ID NO: 1420572
uuucagauuaagagagacc

SEQ ID NO: 1420574 - RNA, 19 nt, Artificial Sequence
  Description of Artificial Sequence: Synthetic oligonucleotide
  Sense strand starting at position 2435 of SEQ ID NO: 1243506
ucugaaaccuguuccuaug

SEQ ID NO: 1420575 - RNA, 19 nt, Artificial Sequence
  Description of Artificial Sequence: Synthetic oligonucleotide
  Antisense strand to SEQ ID NO: 1420574
cauaggaacagguuucaga

SEQ ID NO: 1420576 - RNA, 19 nt, Artificial Sequence
  Description of Artificial Sequence: Synthetic oligonucleotide
  Sense strand starting at position 2437 of SEQ ID NO: 1243506
ugaaaccuguuccuaugaa

SEQ ID NO: 1420577 - RNA, 19 nt, Artificial Sequence
  Description of Artificial Sequence: Synthetic oligonucleotide
  Antisense strand to SEQ ID NO: 1420576
uucauaggaacagguuuca

SEQ ID NO: 1420578 - RNA, 19 nt, Artificial Sequence
  Description of Artificial Sequence: Synthetic oligonucleotide
  Sense strand starting at position 2438 of SEQ ID NO: 1243506
gaaaccuguuccuaugaag

SEQ ID NO: 1420579 - RNA, 19 nt, Artificial Sequence
  Description of Artificial Sequence: Synthetic oligonucleotide
  Antisense strand to SEQ ID NO: 1420578
cuucauaggaacagguuuc

SEQ ID NO: 1420580 - RNA, 19 nt, Artificial Sequence
  Description of Artificial Sequence: Synthetic oligonucleotide
  Sense strand starting at position 2441 of SEQ ID NO: 1243506
accuguuccuaugaagugu

SEQ ID NO: 1420581 - RNA, 19 nt, Artificial Sequence
  Description of Artificial Sequence: Synthetic oligonucleotide
  Antisense strand to SEQ ID NO: 1420580
acacuucauaggaacaggu

SEQ ID NO: 1420582 - RNA, 19 nt, Artificial Sequence
  Description of Artificial Sequence: Synthetic oligonucleotide
  Sense strand starting at position 2445 of SEQ ID NO: 1243506
guuccuaugaaguguaaga

SEQ ID NO: 1420583 - RNA, 19 nt, Artificial Sequence
  Description of Artificial Sequence: Synthetic oligonucleotide
  Antisense strand to SEQ ID NO: 1420582
ucuuacacuucauaggaac

SEQ ID NO: 1420584 - RNA, 19 nt, Artificial Sequence
  Description of Artificial Sequence: Synthetic oligonucleotide
  Sense strand starting at position 2483 of SEQ ID NO: 1243506
ucagaugggucugaaauga

SEQ ID NO: 1420585 - RNA, 19 nt, Artificial Sequence
  Description of Artificial Sequence: Synthetic oligonucleotide
  Antisense strand to SEQ ID NO: 1420584
ucauuucagacccaucuga

SEQ ID NO: 1420586 - RNA, 19 nt, Artificial Sequence
  Description of Artificial Sequence: Synthetic oligonucleotide
  Sense strand starting at position 2540 of SEQ ID NO: 1243506
ucuucuauuccgugcucca

SEQ ID NO: 1420587 - RNA, 19 nt, Artificial Sequence
  Description of Artificial Sequence: Synthetic oligonucleotide
  Antisense strand to SEQ ID NO: 1420586
uggagcacggaauagaaga

SEQ ID NO: 1420588 - RNA, 19 nt, Artificial Sequence
  Description of Artificial Sequence: Synthetic oligonucleotide
  Sense strand starting at position 2582 of SEQ ID NO: 1243506
aggaaacuguacuauuaac

SEQ ID NO: 1420589 - RNA, 19 nt, Artificial Sequence
  Description of Artificial Sequence: Synthetic oligonucleotide
  Antisense strand to SEQ ID NO: 1420588
guuaauaguacaguuuccu

SEQ ID NO: 1420590 - RNA, 19 nt, Artificial Sequence
  Description of Artificial Sequence: Synthetic oligonucleotide
  Sense strand starting at position 2808 of SEQ ID NO: 1243506
gauguaacuuuacagcgau

SEQ ID NO: 1420591 - RNA, 19 nt, Artificial Sequence
  Description of Artificial Sequence: Synthetic oligonucleotide
  Antisense strand to SEQ ID NO: 1420590
aucgcuguaaaguuacauc

SEQ ID NO: 1420592 - RNA, 19 nt, Artificial Sequence
  Description of Artificial Sequence: Synthetic oligonucleotide
  Sense strand starting at position 2814 of SEQ ID NO: 1243506
acuuuacagcgaugucuca

SEQ ID NO: 1420593 - RNA, 19 nt, Artificial Sequence
  Description of Artificial Sequence: Synthetic oligonucleotide
  Antisense strand to SEQ ID NO: 1420592
ugagacaucgcuguaaagu

SEQ ID NO: 1420594 - RNA, 19 nt, Artificial Sequence
  Description of Artificial Sequence: Synthetic oligonucleotide
  Sense strand starting at position 2823 of SEQ ID NO: 1243506
cgaugucucagacauggac

SEQ ID NO: 1420595 - RNA, 19 nt, Artificial Sequence
  Description of Artificial Sequence: Synthetic oligonucleotide
  Antisense strand to SEQ ID NO: 1420594
guccaugucugagacaucg

SEQ ID NO: 1420596 - RNA, 19 nt, Artificial Sequence
  Description of Artificial Sequence: Synthetic oligonucleotide
  Sense strand starting at position 2868 of SEQ ID NO: 1243506
gguggcaaagcucacaauu

SEQ ID NO: 1420597 - RNA, 19 nt, Artificial Sequence
  Description of Artificial Sequence: Synthetic oligonucleotide
  Antisense strand to SEQ ID NO: 1420596
aauugugagcuuugccacc

SEQ ID NO: 1420598 - RNA, 19 nt, Artificial Sequence
  Description of Artificial Sequence: Synthetic oligonucleotide
  Sense strand starting at position 3322 of SEQ ID NO: 1243506
gcuucaagaucgcgaguga

SEQ ID NO: 1420599 - RNA, 19 nt, Artificial Sequence
  Description of Artificial Sequence: Synthetic oligonucleotide
  Antisense strand to SEQ ID NO: 1420598
ucacucgcgaucuugaagc

SEQ ID NO: 1420600 - RNA, 19 nt, Artificial Sequence
  Description of Artificial Sequence: Synthetic oligonucleotide
  Sense strand starting at position 3326 of SEQ ID NO: 1243506
caagaucgcgagugacaua

SEQ ID NO: 1420601 - RNA, 19 nt, Artificial Sequence
  Description of Artificial Sequence: Synthetic oligonucleotide
  Antisense strand to SEQ ID NO: 1420600
uaugucacucgcgaucuug

SEQ ID NO: 1420602 - RNA, 19 nt, Artificial Sequence
  Description of Artificial Sequence: Synthetic oligonucleotide
  Sense strand starting at position 3331 of SEQ ID NO: 1243506
ucgcgagugacauacuaaa

SEQ ID NO: 1420603 - RNA, 19 nt, Artificial Sequence
  Description of Artificial Sequence: Synthetic oligonucleotide
  Antisense strand to SEQ ID NO: 1420602
uuuaguaugucacucgcga

SEQ ID NO: 1420604 - RNA, 19 nt, Artificial Sequence
  Description of Artificial Sequence: Synthetic oligonucleotide
  Sense strand starting at position 3359 of SEQ ID NO: 1243506
aaacguaccucagauacga

SEQ ID NO: 1420605 - RNA, 19 nt, Artificial Sequence
  Description of Artificial Sequence: Synthetic oligonucleotide
  Antisense strand to SEQ ID NO: 1420604
ucguaucugagguacguuu

SEQ ID NO: 1420606 - RNA, 19 nt, Artificial Sequence
  Description of Artificial Sequence: Synthetic oligonucleotide
  Sense strand starting at position 3361 of SEQ ID NO: 1243506
acguaccucagauacgaaa

SEQ ID NO: 1420607 - RNA, 19 nt, Artificial Sequence
  Description of Artificial Sequence: Synthetic oligonucleotide
  Antisense strand to SEQ ID NO: 1420606
uuucguaucugagguacgu

SEQ ID NO: 1420608 - RNA, 19 nt, Artificial Sequence
  Description of Artificial Sequence: Synthetic oligonucleotide
  Sense strand starting at position 3482 of SEQ ID NO: 1243506
cgacuuuccacccgaguga

SEQ ID NO: 1420609 - RNA, 19 nt, Artificial Sequence
  Description of Artificial Sequence: Synthetic oligonucleotide
  Antisense strand to SEQ ID NO: 1420608
ucacucggguggaaagucg

SEQ ID NO: 1420610 - RNA, 19 nt, Artificial Sequence
  Description of Artificial Sequence: Synthetic oligonucleotide
  Sense strand starting at position 3508 of SEQ ID NO: 1243506
ccaagauggucucucuugu

SEQ ID NO: 1420611 - RNA, 19 nt, Artificial Sequence
  Description of Artificial Sequence: Synthetic oligonucleotide
  Antisense strand to SEQ ID NO: 1420610
acaagagagaccaucuugg

SEQ ID NO: 1420612 - RNA, 19 nt, Artificial Sequence
  Description of Artificial Sequence: Synthetic oligonucleotide
  Sense strand starting at position 3514 of SEQ ID NO: 1243506
uggucucucuuguuuggga

SEQ ID NO: 1420613 - RNA, 19 nt, Artificial Sequence
  Description of Artificial Sequence: Synthetic oligonucleotide
  Antisense strand to SEQ ID NO: 1420612
ucccaaacaagagagacca

SEQ ID NO: 1420614 - RNA, 19 nt, Artificial Sequence
  Description of Artificial Sequence: Synthetic oligonucleotide
  Sense strand starting at position 3515 of SEQ ID NO: 1243506
ggucucucuuguuugggau

SEQ ID NO: 1420615 - RNA, 19 nt, Artificial Sequence
  Description of Artificial Sequence: Synthetic oligonucleotide
  Antisense strand to SEQ ID NO: 1420614
aucccaaacaagagagacc

SEQ ID NO: 1420616 - RNA, 19 nt, Artificial Sequence
  Description of Artificial Sequence: Synthetic oligonucleotide
  Sense strand starting at position 3516 of SEQ ID NO: 1243506
gucucucuuguuugggauu

SEQ ID NO: 1420617 - RNA, 19 nt, Artificial Sequence
  Description of Artificial Sequence: Synthetic oligonucleotide
  Antisense strand to SEQ ID NO: 1420616
aaucccaaacaagagagac

SEQ ID NO: 1420618 - RNA, 19 nt, Artificial Sequence
  Description of Artificial Sequence: Synthetic oligonucleotide
  Sense strand starting at position 3518 of SEQ ID NO: 1243506
cucucuuguuugggauuua

SEQ ID NO: 1420619 - RNA, 19 nt, Artificial Sequence
  Description of Artificial Sequence: Synthetic oligonucleotide
  Antisense strand to SEQ ID NO: 1420618
uaaaucccaaacaagagag

SEQ ID NO: 1420620 - RNA, 19 nt, Artificial Sequence
  Description of Artificial Sequence: Synthetic oligonucleotide
  Sense strand starting at position 3519 of SEQ ID NO: 1243506
ucucuuguuugggauuuaa

SEQ ID NO: 1420621 - RNA, 19 nt, Artificial Sequence
  Description of Artificial Sequence: Synthetic oligonucleotide
  Antisense strand to SEQ ID NO: 1420620
uuaaaucccaaacaagaga

SEQ ID NO: 1420622 - RNA, 19 nt, Artificial Sequence
  Description of Artificial Sequence: Synthetic oligonucleotide
  Sense strand starting at position 3620 of SEQ ID NO: 1243506
augugugcuuauuuguuua

SEQ ID NO: 1420623 - RNA, 19 nt, Artificial Sequence
  Description of Artificial Sequence: Synthetic oligonucleotide
  Antisense strand to SEQ ID NO: 1420622
uaaacaaauaagcacacau

SEQ ID NO: 1420624 - RNA, 19 nt, Artificial Sequence
  Description of Artificial Sequence: Synthetic oligonucleotide
  Sense strand starting at position 3622 of SEQ ID NO: 1243506
gugugcuuauuuguuuaaa

SEQ ID NO: 1420625 - RNA, 19 nt, Artificial Sequence
  Description of Artificial Sequence: Synthetic oligonucleotide
  Antisense strand to SEQ ID NO: 1420624
uuuaaacaaauaagcacac

SEQ ID NO: 1420626 - RNA, 19 nt, Artificial Sequence
  Description of Artificial Sequence: Synthetic oligonucleotide
  Sense strand starting at position 25 of SEQ ID NO: 1243507
caauuuaguuugcugggua

SEQ ID NO: 1420627 - RNA, 19 nt, Artificial Sequence
  Description of Artificial Sequence: Synthetic oligonucleotide
  Antisense strand to SEQ ID NO: 1420626
uacccagcaaacuaaauug

SEQ ID NO: 1420628 - RNA, 19 nt, Artificial Sequence
  Description of Artificial Sequence: Synthetic oligonucleotide
  Sense strand starting at position 37 of SEQ ID NO: 1243507
cuggguaugguauaguuaa

SEQ ID NO: 1420629 - RNA, 19 nt, Artificial Sequence
  Description of Artificial Sequence: Synthetic oligonucleotide
  Antisense strand to SEQ ID NO: 1420628
uuaacuauaccauacccag

SEQ ID NO: 1420630 - RNA, 19 nt, Artificial Sequence
  Description of Artificial Sequence: Synthetic oligonucleotide
  Sense strand starting at position 104 of SEQ ID NO: 1243507
gauauaugggcauagcaau

SEQ ID NO: 1420631 - RNA, 19 nt, Artificial Sequence
  Description of Artificial Sequence: Synthetic oligonucleotide
  Antisense strand to SEQ ID NO: 1420630
auugcuaugcccauauauc

SEQ ID NO: 1420632 - RNA, 19 nt, Artificial Sequence
  Description of Artificial Sequence: Synthetic oligonucleotide
  Sense strand starting at position 138 of SEQ ID NO: 1243507
cuauaauuccguuaccaag

SEQ ID NO: 1420633 - RNA, 19 nt, Artificial Sequence
  Description of Artificial Sequence: Synthetic oligonucleotide
  Antisense strand to SEQ ID NO: 1420632
cuugguaacggaauuauag

SEQ ID NO: 1420634 - RNA, 19 nt, Artificial Sequence
  Description of Artificial Sequence: Synthetic oligonucleotide
  Sense strand starting at position 525 of SEQ ID NO: 1243507
gccgguaaugugcuucuua

SEQ ID NO: 1420635 - RNA, 19 nt, Artificial Sequence
  Description of Artificial Sequence: Synthetic oligonucleotide
  Antisense strand to SEQ ID NO: 1420634
uaagaagcacauuaccggc

SEQ ID NO: 1420636 - RNA, 19 nt, Artificial Sequence
  Description of Artificial Sequence: Synthetic oligonucleotide
  Sense strand starting at position 825 of SEQ ID NO: 1243507
cuagguauaccuggaaggu

SEQ ID NO: 1420637 - RNA, 19 nt, Artificial Sequence
  Description of Artificial Sequence: Synthetic oligonucleotide
  Antisense strand to SEQ ID NO: 1420636
accuuccagguauaccuag

SEQ ID NO: 1420638 - RNA, 19 nt, Artificial Sequence
  Description of Artificial Sequence: Synthetic oligonucleotide
  Sense strand starting at position 826 of SEQ ID NO: 1243507
uagguauaccuggaagguu

SEQ ID NO: 1420639 - RNA, 19 nt, Artificial Sequence
  Description of Artificial Sequence: Synthetic oligonucleotide
  Antisense strand to SEQ ID NO: 1420638
aaccuuccagguauaccua

SEQ ID NO: 1420640 - RNA, 19 nt, Artificial Sequence
  Description of Artificial Sequence: Synthetic oligonucleotide
  Sense strand starting at position 829 of SEQ ID NO: 1243507
guauaccuggaagguuaau

SEQ ID NO: 1420641 - RNA, 19 nt, Artificial Sequence
  Description of Artificial Sequence: Synthetic oligonucleotide
  Antisense strand to SEQ ID NO: 1420640
auuaaccuuccagguauac

SEQ ID NO: 1420642 - RNA, 19 nt, Artificial Sequence
  Description of Artificial Sequence: Synthetic oligonucleotide
  Sense strand starting at position 1003 of SEQ ID NO: 1243507
gcuguaaggcgaaguuuag

SEQ ID NO: 1420643 - RNA, 19 nt, Artificial Sequence
  Description of Artificial Sequence: Synthetic oligonucleotide
  Antisense strand to SEQ ID NO: 1420642
cuaaacuucgccuuacagc

SEQ ID NO: 1420644 - RNA, 19 nt, Artificial Sequence
  Description of Artificial Sequence: Synthetic oligonucleotide
  Sense strand starting at position 1114 of SEQ ID NO: 1243507
gcauucugucccucgcuau

SEQ ID NO: 1420645 - RNA, 19 nt, Artificial Sequence
  Description of Artificial Sequence: Synthetic oligonucleotide
  Antisense strand to SEQ ID NO: 1420644
auagcgagggacagaaugc

SEQ ID NO: 1420646 - RNA, 19 nt, Artificial Sequence
  Description of Artificial Sequence: Synthetic oligonucleotide
  Sense strand starting at position 1168 of SEQ ID NO: 1243507
accacugucccacagugau

SEQ ID NO: 1420647 - RNA, 19 nt, Artificial Sequence
  Description of Artificial Sequence: Synthetic oligonucleotide
  Antisense strand to SEQ ID NO: 1420646
aucacugugggacaguggu

SEQ ID NO: 1420648 - RNA, 19 nt, Artificial Sequence
  Description of Artificial Sequence: Synthetic oligonucleotide
  Sense strand starting at position 1182 of SEQ ID NO: 1243507
gugauauaacccugaugug

SEQ ID NO: 1420649 - RNA, 19 nt, Artificial Sequence
  Description of Artificial Sequence: Synthetic oligonucleotide
  Antisense strand to SEQ ID NO: 1420648
cacaucaggguuauaucac

SEQ ID NO: 1420650 - RNA, 19 nt, Artificial Sequence
  Description of Artificial Sequence: Synthetic oligonucleotide
  Sense strand starting at position 1183 of SEQ ID NO: 1243507
ugauauaacccugaugugu

SEQ ID NO: 1420651 - RNA, 19 nt, Artificial Sequence
  Description of Artificial Sequence: Synthetic oligonucleotide
  Antisense strand to SEQ ID NO: 1420650
acacaucaggguuauauca

SEQ ID NO: 1420652 - RNA, 19 nt, Artificial Sequence
  Description of Artificial Sequence: Synthetic oligonucleotide
  Sense strand starting at position 1278 of SEQ ID NO: 1243507
cagagacgucuuggaggaa

SEQ ID NO: 1420653 - RNA, 19 nt, Artificial Sequence
  Description of Artificial Sequence: Synthetic oligonucleotide
  Antisense strand to SEQ ID NO: 1420652
uuccuccaagacgucucug

SEQ ID NO: 1420654 - RNA, 19 nt, Artificial Sequence
  Description of Artificial Sequence: Synthetic oligonucleotide
  Sense strand starting at position 1359 of SEQ ID NO: 1243507
ugaaguuccagguacugua

SEQ ID NO: 1420655 - RNA, 19 nt, Artificial Sequence
  Description of Artificial Sequence: Synthetic oligonucleotide
  Antisense strand to SEQ ID NO: 1420654
uacaguaccuggaacuuca

SEQ ID NO: 1420656 - RNA, 19 nt, Artificial Sequence
  Description of Artificial Sequence: Synthetic oligonucleotide
  Sense strand starting at position 1555 of SEQ ID NO: 1243507
cggagugaccuucagaagu

SEQ ID NO: 1420657 - RNA, 19 nt, Artificial Sequence
  Description of Artificial Sequence: Synthetic oligonucleotide
  Antisense strand to SEQ ID NO: 1420656
acuucugaaggucacuccg

SEQ ID NO: 1420658 - RNA, 19 nt, Artificial Sequence
  Description of Artificial Sequence: Synthetic oligonucleotide
  Sense strand starting at position 1566 of SEQ ID NO: 1243507
ucagaagucucuccaagga

SEQ ID NO: 1420659 - RNA, 19 nt, Artificial Sequence
  Description of Artificial Sequence: Synthetic oligonucleotide
  Antisense strand to SEQ ID NO: 1420658
uccuuggagagacuucuga

SEQ ID NO: 1420660 - RNA, 19 nt, Artificial Sequence
  Description of Artificial Sequence: Synthetic oligonucleotide
  Sense strand starting at position 1634 of SEQ ID NO: 1243507
guguuaggucucuugugcu

SEQ ID NO: 1420661 - RNA, 19 nt, Artificial Sequence
  Description of Artificial Sequence: Synthetic oligonucleotide
  Antisense strand to SEQ ID NO: 1420660
agcacaagagaccuaacac

SEQ ID NO: 1420662 - RNA, 19 nt, Artificial Sequence
  Description of Artificial Sequence: Synthetic oligonucleotide
  Sense strand starting at position 1821 of SEQ ID NO: 1243507
accugagcucaccgagaaa

SEQ ID NO: 1420663 - RNA, 19 nt, Artificial Sequence
  Description of Artificial Sequence: Synthetic oligonucleotide
  Antisense strand to SEQ ID NO: 1420662
uuucucggugagcucaggu

SEQ ID NO: 1420664 - RNA, 19 nt, Artificial Sequence
  Description of Artificial Sequence: Synthetic oligonucleotide
  Sense strand starting at position 2001 of SEQ ID NO: 1243507
cgcucuacugcucucuuua

SEQ ID NO: 1420665 - RNA, 19 nt, Artificial Sequence
  Description of Artificial Sequence: Synthetic oligonucleotide
  Antisense strand to SEQ ID NO: 1420664
uaaagagagcaguagagcg

SEQ ID NO: 1420666 - RNA, 19 nt, Artificial Sequence
  Description of Artificial Sequence: Synthetic oligonucleotide
  Sense strand starting at position 2206 of SEQ ID NO: 1243507
gggcucuuccgcucagcau

SEQ ID NO: 1420667 - RNA, 19 nt, Artificial Sequence
  Description of Artificial Sequence: Synthetic oligonucleotide
  Antisense strand to SEQ ID NO: 1420666
augcugagcggaagagccc

SEQ ID NO: 1420668 - RNA, 19 nt, Artificial Sequence
  Description of Artificial Sequence: Synthetic oligonucleotide
  Sense strand starting at position 2346 of SEQ ID NO: 1243507
caccuuucugcagagguau

SEQ ID NO: 1420669 - RNA, 19 nt, Artificial Sequence
  Description of Artificial Sequence: Synthetic oligonucleotide
  Antisense strand to SEQ ID NO: 1420668
auaccucugcagaaaggug

SEQ ID NO: 1420670 - RNA, 19 nt, Artificial Sequence
  Description of Artificial Sequence: Synthetic oligonucleotide
  Sense strand starting at position 2357 of SEQ ID NO: 1243507
agagguauuggguaucgaa

SEQ ID NO: 1420671 - RNA, 19 nt, Artificial Sequence
  Description of Artificial Sequence: Synthetic oligonucleotide
  Antisense strand to SEQ ID NO: 1420670
uucgauacccaauaccucu

SEQ ID NO: 1420672 - RNA, 19 nt, Artificial Sequence
  Description of Artificial Sequence: Synthetic oligonucleotide
  Sense strand starting at position 2399 of SEQ ID NO: 1243507
gggugaaguccuuacugga

SEQ ID NO: 1420673 - RNA, 19 nt, Artificial Sequence
  Description of Artificial Sequence: Synthetic oligonucleotide
  Antisense strand to SEQ ID NO: 1420672
uccaguaaggacuucaccc

SEQ ID NO: 1420674 - RNA, 19 nt, Artificial Sequence
  Description of Artificial Sequence: Synthetic oligonucleotide
  Sense strand starting at position 2632 of SEQ ID NO: 1243507
guguguuaugugagccgaa

SEQ ID NO: 1420675 - RNA, 19 nt, Artificial Sequence
  Description of Artificial Sequence: Synthetic oligonucleotide
  Antisense strand to SEQ ID NO: 1420674
uucggcucacauaacacac

SEQ ID NO: 1420676 - RNA, 19 nt, Artificial Sequence
  Description of Artificial Sequence: Synthetic oligonucleotide
  Sense strand starting at position 2662 of SEQ ID NO: 1243507
gagaaagucagucacguga

SEQ ID NO: 1420677 - RNA, 19 nt, Artificial Sequence
  Description of Artificial Sequence: Synthetic oligonucleotide
  Antisense strand to SEQ ID NO: 1420676
ucacgugacugacuuucuc

SEQ ID NO: 1420678 - RNA, 19 nt, Artificial Sequence
  Description of Artificial Sequence: Synthetic oligonucleotide
  Sense strand starting at position 2718 of SEQ ID NO: 1243507
aguguuaacccagaaagug

SEQ ID NO: 1420679 - RNA, 19 nt, Artificial Sequence
  Description of Artificial Sequence: Synthetic oligonucleotide
  Antisense strand to SEQ ID NO: 1420678
cacuuucuggguuaacacu

SEQ ID NO: 1420680 - RNA, 19 nt, Artificial Sequence
  Description of Artificial Sequence: Synthetic oligonucleotide
  Sense strand starting at position 2849 of SEQ ID NO: 1243507
aauaucauuuaggaguuga

SEQ ID NO: 1420681 - RNA, 19 nt, Artificial Sequence
  Description of Artificial Sequence: Synthetic oligonucleotide
  Antisense strand to SEQ ID NO: 1420680
ucaacuccuaaaugauauu

SEQ ID NO: 1420682 - RNA, 19 nt, Artificial Sequence
  Description of Artificial Sequence: Synthetic oligonucleotide
  Sense strand starting at position 2863 of SEQ ID NO: 1243507
guugauuagaaauguauga

SEQ ID NO: 1420683 - RNA, 19 nt, Artificial Sequence
  Description of Artificial Sequence: Synthetic oligonucleotide
  Antisense strand to SEQ ID NO: 1420682
ucauacauuucuaaucaac

SEQ ID NO: 1420684 - RNA, 19 nt, Artificial Sequence
  Description of Artificial Sequence: Synthetic oligonucleotide
  Sense strand starting at position 3048 of SEQ ID NO: 1243507
ugggcucucuaauuaagau

SEQ ID NO: 1420685 - RNA, 19 nt, Artificial Sequence
  Description of Artificial Sequence: Synthetic oligonucleotide
  Antisense strand to SEQ ID NO: 1420684
aucuuaauuagagagccca

SEQ ID NO: 1420686 - RNA, 19 nt, Artificial Sequence
  Description of Artificial Sequence: Synthetic oligonucleotide
  Sense strand starting at position 3255 of SEQ ID NO: 1243507
gcgcaaguacaguuauguu

SEQ ID NO: 1420687 - RNA, 19 nt, Artificial Sequence
  Description of Artificial Sequence: Synthetic oligonucleotide
  Antisense strand to SEQ ID NO: 1420686
aacauaacuguacuugcgc

SEQ ID NO: 1420688 - RNA, 19 nt, Artificial Sequence
  Description of Artificial Sequence: Synthetic oligonucleotide
  Sense strand starting at position 3279 of SEQ ID NO: 1243507
gauauauugcaguaauggu

SEQ ID NO: 1420689 - RNA, 19 nt, Artificial Sequence
  Description of Artificial Sequence: Synthetic oligonucleotide
  Antisense strand to SEQ ID NO: 1420688
accauuacugcaauauauc

SEQ ID NO: 1420690 - RNA, 19 nt, Artificial Sequence
  Description of Artificial Sequence: Synthetic oligonucleotide
  Sense strand starting at position 3327 of SEQ ID NO: 1243507
ccgaauaauguacauggua

SEQ ID NO: 1420691 - RNA, 19 nt, Artificial Sequence
  Description of Artificial Sequence: Synthetic oligonucleotide
  Antisense strand to SEQ ID NO: 1420690
uaccauguacauuauucgg

SEQ ID NO: 1420692 - RNA, 19 nt, Artificial Sequence
  Description of Artificial Sequence: Synthetic oligonucleotide
  Sense strand starting at position 3436 of SEQ ID NO: 1243507
guguacaccuuauuuagca

SEQ ID NO: 1420693 - RNA, 19 nt, Artificial Sequence
  Description of Artificial Sequence: Synthetic oligonucleotide
  Antisense strand to SEQ ID NO: 1420692
ugcuaaauaagguguacac

SEQ ID NO: 1420694 - RNA, 19 nt, Artificial Sequence
  Description of Artificial Sequence: Synthetic oligonucleotide
  Sense strand starting at position 3444 of SEQ ID NO: 1243507
cuuauuuagcacuguucca

SEQ ID NO: 1420695 - RNA, 19 nt, Artificial Sequence
  Description of Artificial Sequence: Synthetic oligonucleotide
  Antisense strand to SEQ ID NO: 1420694
uggaacagugcuaaauaag

SEQ ID NO: 1420696 - RNA, 19 nt, Artificial Sequence
  Description of Artificial Sequence: Synthetic oligonucleotide
  Sense strand starting at position 3604 of SEQ ID NO: 1243507
guguuauacagguaccauu

SEQ ID NO: 1420697 - RNA, 19 nt, Artificial Sequence
  Description of Artificial Sequence: Synthetic oligonucleotide
  Antisense strand to SEQ ID NO: 1420696
aaugguaccuguauaacac

SEQ ID NO: 1420698 - RNA, 19 nt, Artificial Sequence
  Description of Artificial Sequence: Synthetic oligonucleotide
  Sense strand starting at position 3613 of SEQ ID NO: 1243507
agguaccauugagugaaau

SEQ ID NO: 1420699 - RNA, 19 nt, Artificial Sequence
  Description of Artificial Sequence: Synthetic oligonucleotide
  Antisense strand to SEQ ID NO: 1420698
auuucacucaaugguaccu

SEQ ID NO: 1420700 - RNA, 19 nt, Artificial Sequence
  Description of Artificial Sequence: Synthetic oligonucleotide
  Sense strand starting at position 3614 of SEQ ID NO: 1243507
gguaccauugagugaaauc

SEQ ID NO: 1420701 - RNA, 19 nt, Artificial Sequence
  Description of Artificial Sequence: Synthetic oligonucleotide
  Antisense strand to SEQ ID NO: 1420700
gauuucacucaaugguacc

SEQ ID NO: 1420702 - RNA, 19 nt, Artificial Sequence
  Description of Artificial Sequence: Synthetic oligonucleotide
  Sense strand starting at position 3623 of SEQ ID NO: 1243507
gagugaaaucugggaagca

SEQ ID NO: 1420703 - RNA, 19 nt, Artificial Sequence
  Description of Artificial Sequence: Synthetic oligonucleotide
  Antisense strand to SEQ ID NO: 1420702
ugcuucccagauuucacuc

SEQ ID NO: 1420704 - RNA, 19 nt, Artificial Sequence
  Description of Artificial Sequence: Synthetic oligonucleotide
  Sense strand starting at position 3913 of SEQ ID NO: 1243507
ucucauucuuagguuauga

SEQ ID NO: 1420705 - RNA, 19 nt, Artificial Sequence
  Description of Artificial Sequence: Synthetic oligonucleotide
  Antisense strand to SEQ ID NO: 1420704
ucauaaccuaagaaugaga

SEQ ID NO: 1420706 - RNA, 19 nt, Artificial Sequence
  Description of Artificial Sequence: Synthetic oligonucleotide
  Sense strand starting at position 268 of SEQ ID NO: 1243508
cucugagaagucuaguauc

SEQ ID NO: 1420707 - RNA, 19 nt, Artificial Sequence
  Description of Artificial Sequence: Synthetic oligonucleotide
  Antisense strand to SEQ ID NO: 1420706
gauacuagacuucucagag

SEQ ID NO: 1420708 - RNA, 19 nt, Artificial Sequence
  Description of Artificial Sequence: Synthetic oligonucleotide
  Sense strand starting at position 271 of SEQ ID NO: 1243508
ugagaagucuaguaucuua

SEQ ID NO: 1420709 - RNA, 19 nt, Artificial Sequence
  Description of Artificial Sequence: Synthetic oligonucleotide
  Antisense strand to SEQ ID NO: 1420708
uaagauacuagacuucuca

SEQ ID NO: 1420710 - RNA, 19 nt, Artificial Sequence
  Description of Artificial Sequence: Synthetic oligonucleotide
  Sense strand starting at position 276 of SEQ ID NO: 1243508
agucuaguaucuuauaaag

SEQ ID NO: 1420711 - RNA, 19 nt, Artificial Sequence
  Description of Artificial Sequence: Synthetic oligonucleotide
  Antisense strand to SEQ ID NO: 1420710
cuuuauaagauacuagacu

SEQ ID NO: 1420712 - RNA, 19 nt, Artificial Sequence
  Description of Artificial Sequence: Synthetic oligonucleotide
  Sense strand starting at position 413 of SEQ ID NO: 1243508
agggcccucucagaaauaa

SEQ ID NO: 1420713 - RNA, 19 nt, Artificial Sequence
  Description of Artificial Sequence: Synthetic oligonucleotide
  Antisense strand to SEQ ID NO: 1420712
uuauuucugagagggcccu

SEQ ID NO: 1420714 - RNA, 19 nt, Artificial Sequence
  Description of Artificial Sequence: Synthetic oligonucleotide
  Sense strand starting at position 425 of SEQ ID NO: 1243508
gaaauaaagugccuggcau

SEQ ID NO: 1420715 - RNA, 19 nt, Artificial Sequence
  Description of Artificial Sequence: Synthetic oligonucleotide
  Antisense strand to SEQ ID NO: 1420714
augccaggcacuuuauuuc

SEQ ID NO: 1420716 - RNA, 19 nt, Artificial Sequence
  Description of Artificial Sequence: Synthetic oligonucleotide
  Sense strand starting at position 483 of SEQ ID NO: 1243508
ccucgugaacagggagaau

SEQ ID NO: 1420717 - RNA, 19 nt, Artificial Sequence
  Description of Artificial Sequence: Synthetic oligonucleotide
  Antisense strand to SEQ ID NO: 1420716
auucucccuguucacgagg

SEQ ID NO: 1420718 - RNA, 19 nt, Artificial Sequence
  Description of Artificial Sequence: Synthetic oligonucleotide
  Sense strand starting at position 591 of SEQ ID NO: 1243508
cugcuaagucaaugacuuu

SEQ ID NO: 1420719 - RNA, 19 nt, Artificial Sequence
  Description of Artificial Sequence: Synthetic oligonucleotide
  Antisense strand to SEQ ID NO: 1420718
aaagucauugacuuagcag

SEQ ID NO: 1420720 - RNA, 19 nt, Artificial Sequence
  Description of Artificial Sequence: Synthetic oligonucleotide
  Sense strand starting at position 716 of SEQ ID NO: 1243508
acacaucacucacauggua

SEQ ID NO: 1420721 - RNA, 19 nt, Artificial Sequence
  Description of Artificial Sequence: Synthetic oligonucleotide
  Antisense strand to SEQ ID NO: 1420720
uaccaugugagugaugugu

SEQ ID NO: 1420722 - RNA, 19 nt, Artificial Sequence
  Description of Artificial Sequence: Synthetic oligonucleotide
  Sense strand starting at position 921 of SEQ ID NO: 1243508
guacauuuauccuguuagc

SEQ ID NO: 1420723 - RNA, 19 nt, Artificial Sequence
  Description of Artificial Sequence: Synthetic oligonucleotide
  Antisense strand to SEQ ID NO: 1420722
gcuaacaggauaaauguac

SEQ ID NO: 1420724 - RNA, 19 nt, Artificial Sequence
  Description of Artificial Sequence: Synthetic oligonucleotide
  Sense strand starting at position 934 of SEQ ID NO: 1243508
guuagcauucucuaccuuu

SEQ ID NO: 1420725 - RNA, 19 nt, Artificial Sequence
  Description of Artificial Sequence: Synthetic oligonucleotide
  Antisense strand to SEQ ID NO: 1420724
aaagguagagaaugcuaac

SEQ ID NO: 1420726 - RNA, 19 nt, Artificial Sequence
  Description of Artificial Sequence: Synthetic oligonucleotide
  Sense strand starting at position 937 of SEQ ID NO: 1243508
agcauucucuaccuuugua

SEQ ID NO: 1420727 - RNA, 19 nt, Artificial Sequence
  Description of Artificial Sequence: Synthetic oligonucleotide
  Antisense strand to SEQ ID NO: 1420726
uacaaagguagagaaugcu

SEQ ID NO: 1420728 - RNA, 19 nt, Artificial Sequence
  Description of Artificial Sequence: Synthetic oligonucleotide
  Sense strand starting at position 1025 of SEQ ID NO: 1243508
gcagcuucuagauagcgaa

SEQ ID NO: 1420729 - RNA, 19 nt, Artificial Sequence
  Description of Artificial Sequence: Synthetic oligonucleotide
  Antisense strand to SEQ ID NO: 1420728
uucgcuaucuagaagcugc

SEQ ID NO: 1420730 - RNA, 19 nt, Artificial Sequence
  Description of Artificial Sequence: Synthetic oligonucleotide
  Sense strand starting at position 1037 of SEQ ID NO: 1243508
uagcgaaauuguuucucca

SEQ ID NO: 1420731 - RNA, 19 nt, Artificial Sequence
  Description of Artificial Sequence: Synthetic oligonucleotide
  Antisense strand to SEQ ID NO: 1420730
uggagaaacaauuucgcua

SEQ ID NO: 1420732 - RNA, 19 nt, Artificial Sequence
  Description of Artificial Sequence: Synthetic oligonucleotide
  Sense strand starting at position 1039 of SEQ ID NO: 1243508
gcgaaauuguuucuccagu

SEQ ID NO: 1420733 - RNA, 19 nt, Artificial Sequence
  Description of Artificial Sequence: Synthetic oligonucleotide
  Antisense strand to SEQ ID NO: 1420732
acuggagaaacaauuucgc

SEQ ID NO: 1420734 - RNA, 19 nt, Artificial Sequence
  Description of Artificial Sequence: Synthetic oligonucleotide
  Sense strand starting at position 1040 of SEQ ID NO: 1243508
cgaaauuguuucuccagua

SEQ ID NO: 1420735 - RNA, 19 nt, Artificial Sequence
  Description of Artificial Sequence: Synthetic oligonucleotide
  Antisense strand to SEQ ID NO: 1420734
uacuggagaaacaauuucg

SEQ ID NO: 1420736 - RNA, 19 nt, Artificial Sequence
  Description of Artificial Sequence: Synthetic oligonucleotide
  Sense strand starting at position 1050 of SEQ ID NO: 1243508
ucuccaguauugucucauu

SEQ ID NO: 1420737 - RNA, 19 nt, Artificial Sequence
  Description of Artificial Sequence: Synthetic oligonucleotide
  Antisense strand to SEQ ID NO: 1420736
aaugagacaauacuggaga

SEQ ID NO: 1420738 - RNA, 19 nt, Artificial Sequence
  Description of Artificial Sequence: Synthetic oligonucleotide
  Sense strand starting at position 1244 of SEQ ID NO: 1243508
guauaugucuaccugauag

SEQ ID NO: 1420739 - RNA, 19 nt, Artificial Sequence
  Description of Artificial Sequence: Synthetic oligonucleotide
  Antisense strand to SEQ ID NO: 1420738
cuaucagguagacauauac

SEQ ID NO: 1420740 - RNA, 19 nt, Artificial Sequence
  Description of Artificial Sequence: Synthetic oligonucleotide
  Sense strand starting at position 1248 of SEQ ID NO: 1243508
augucuaccugauagagca

SEQ ID NO: 1420741 - RNA, 19 nt, Artificial Sequence
  Description of Artificial Sequence: Synthetic oligonucleotide
  Antisense strand to SEQ ID NO: 1420740
ugcucuaucagguagacau

SEQ ID NO: 1420742 - RNA, 19 nt, Artificial Sequence
  Description of Artificial Sequence: Synthetic oligonucleotide
  Sense strand starting at position 1261 of SEQ ID NO: 1243508
agagcaauugugggaucaa

SEQ ID NO: 1420743 - RNA, 19 nt, Artificial Sequence
  Description of Artificial Sequence: Synthetic oligonucleotide
  Antisense strand to SEQ ID NO: 1420742
uugaucccacaauugcucu

SEQ ID NO: 1420744 - RNA, 19 nt, Artificial Sequence
  Description of Artificial Sequence: Synthetic oligonucleotide
  Sense strand starting at position 1262 of SEQ ID NO: 1243508
gagcaauugugggaucaac

SEQ ID NO: 1420745 - RNA, 19 nt, Artificial Sequence
  Description of Artificial Sequence: Synthetic oligonucleotide
  Antisense strand to SEQ ID NO: 1420744
guugaucccacaauugcuc

SEQ ID NO: 1420746 - RNA, 19 nt, Artificial Sequence
  Description of Artificial Sequence: Synthetic oligonucleotide
  Sense strand starting at position 1280 of SEQ ID NO: 1243508
cugagcuacugcuuguaaa

SEQ ID NO: 1420747 - RNA, 19 nt, Artificial Sequence
  Description of Artificial Sequence: Synthetic oligonucleotide
  Antisense strand to SEQ ID NO: 1420746
uuuacaagcaguagcucag

SEQ ID NO: 1420748 - RNA, 19 nt, Artificial Sequence
  Description of Artificial Sequence: Synthetic oligonucleotide
  Sense strand starting at position 1281 of SEQ ID NO: 1243508
ugagcuacugcuuguaaag

SEQ ID NO: 1420749 - RNA, 19 nt, Artificial Sequence
  Description of Artificial Sequence: Synthetic oligonucleotide
  Antisense strand to SEQ ID NO: 1420748
cuuuacaagcaguagcuca

SEQ ID NO: 1420750 - RNA, 19 nt, Artificial Sequence
  Description of Artificial Sequence: Synthetic oligonucleotide
  Sense strand starting at position 1400 of SEQ ID NO: 1243508
ggagugggugcucagugaa

SEQ ID NO: 1420751 - RNA, 19 nt, Artificial Sequence
  Description of Artificial Sequence: Synthetic oligonucleotide
  Antisense strand to SEQ ID NO: 1420750
uucacugagcacccacucc

SEQ ID NO: 1420752 - RNA, 19 nt, Artificial Sequence
  Description of Artificial Sequence: Synthetic oligonucleotide
  Sense strand starting at position 1403 of SEQ ID NO: 1243508
gugggugcucagugaauau

SEQ ID NO: 1420753 - RNA, 19 nt, Artificial Sequence
  Description of Artificial Sequence: Synthetic oligonucleotide
  Antisense strand to SEQ ID NO: 1420752
auauucacugagcacccac

SEQ ID NO: 1420754 - RNA, 19 nt, Artificial Sequence
  Description of Artificial Sequence: Synthetic oligonucleotide
  Sense strand starting at position 1414 of SEQ ID NO: 1243508
gugaauauuuacuggauga

SEQ ID NO: 1420755 - RNA, 19 nt, Artificial Sequence
  Description of Artificial Sequence: Synthetic oligonucleotide
  Antisense strand to SEQ ID NO: 1420754
ucauccaguaaauauucac

SEQ ID NO: 1420756 - RNA, 19 nt, Artificial Sequence
  Description of Artificial Sequence: Synthetic oligonucleotide
  Sense strand starting at position 1515 of SEQ ID NO: 1243508
ggaugugugccaggcgaua

SEQ ID NO: 1420757 - RNA, 19 nt, Artificial Sequence
  Description of Artificial Sequence: Synthetic oligonucleotide
  Antisense strand to SEQ ID NO: 1420756
uaucgccuggcacacaucc

SEQ ID NO: 1420758 - RNA, 19 nt, Artificial Sequence
  Description of Artificial Sequence: Synthetic oligonucleotide
  Sense strand starting at position 2372 of SEQ ID NO: 1243508
gaucaauuguggcagacca

SEQ ID NO: 1420759 - RNA, 19 nt, Artificial Sequence
  Description of Artificial Sequence: Synthetic oligonucleotide
  Antisense strand to SEQ ID NO: 1420758
uggucugccacaauugauc

SEQ ID NO: 1420760 - RNA, 19 nt, Artificial Sequence
  Description of Artificial Sequence: Synthetic oligonucleotide
  Sense strand starting at position 3293 of SEQ ID NO: 1243508
ucgguuucucagggaggaa

SEQ ID NO: 1420761 - RNA, 19 nt, Artificial Sequence
  Description of Artificial Sequence: Synthetic oligonucleotide
  Antisense strand to SEQ ID NO: 1420760
uuccucccugagaaaccga

SEQ ID NO: 1420762 - RNA, 19 nt, Artificial Sequence
  Description of Artificial Sequence: Synthetic oligonucleotide
  Sense strand starting at position 3581 of SEQ ID NO: 1243508
gugguaccugcuugcucaa

SEQ ID NO: 1420763 - RNA, 19 nt, Artificial Sequence
  Description of Artificial Sequence: Synthetic oligonucleotide
  Antisense strand to SEQ ID NO: 1420762
uugagcaagcagguaccac

SEQ ID NO: 1420764 - RNA, 19 nt, Artificial Sequence
  Description of Artificial Sequence: Synthetic oligonucleotide
  Sense strand starting at position 3689 of SEQ ID NO: 1243508
acauuucuuuggcagagca

SEQ ID NO: 1420765 - RNA, 19 nt, Artificial Sequence
  Description of Artificial Sequence: Synthetic oligonucleotide
  Antisense strand to SEQ ID NO: 1420764
ugcucugccaaagaaaugu

SEQ ID NO: 1420766 - RNA, 19 nt, Artificial Sequence
  Description of Artificial Sequence: Synthetic oligonucleotide
  Sense strand starting at position 3819 of SEQ ID NO: 1243508
gguugcaucugacucugaa

SEQ ID NO: 1420767 - RNA, 19 nt, Artificial Sequence
  Description of Artificial Sequence: Synthetic oligonucleotide
  Antisense strand to SEQ ID NO: 1420766
uucagagucagaugcaacc

SEQ ID NO: 1420768 - RNA, 19 nt, Artificial Sequence
  Description of Artificial Sequence: Synthetic oligonucleotide
  Sense strand starting at position 3822 of SEQ ID NO: 1243508
ugcaucugacucugaaagu

SEQ ID NO: 1420769 - RNA, 19 nt, Artificial Sequence
  Description of Artificial Sequence: Synthetic oligonucleotide
  Antisense strand to SEQ ID NO: 1420768
acuuucagagucagaugca

SEQ ID NO: 1420770 - RNA, 19 nt, Artificial Sequence
  Description of Artificial Sequence: Synthetic oligonucleotide
  Sense strand starting at position 3823 of SEQ ID NO: 1243508
gcaucugacucugaaaguu

SEQ ID NO: 1420771 - RNA, 19 nt, Artificial Sequence
  Description of Artificial Sequence: Synthetic oligonucleotide
  Antisense strand to SEQ ID NO: 1420770
aacuuucagagucagaugc

SEQ ID NO: 1420772 - RNA, 19 nt, Artificial Sequence
  Description of Artificial Sequence: Synthetic oligonucleotide
  Sense strand starting at position 3878 of SEQ ID NO: 1243508
aguggugaguuagagauuu

SEQ ID NO: 1420773 - RNA, 19 nt, Artificial Sequence
  Description of Artificial Sequence: Synthetic oligonucleotide
  Antisense strand to SEQ ID NO: 1420772
aaaucucuaacucaccacu

SEQ ID NO: 1420774 - RNA, 19 nt, Artificial Sequence
  Description of Artificial Sequence: Synthetic oligonucleotide
  Sense strand starting at position 3938 of SEQ ID NO: 1243508
acuuuauaggcuuggagua

SEQ ID NO: 1420775 - RNA, 19 nt, Artificial Sequence
  Description of Artificial Sequence: Synthetic oligonucleotide
  Antisense strand to SEQ ID NO: 1420774
uacuccaagccuauaaagu

SEQ ID NO: 1420776 - RNA, 19 nt, Artificial Sequence
  Description of Artificial Sequence: Synthetic oligonucleotide
  Sense strand starting at position 3939 of SEQ ID NO: 1243508
cuuuauaggcuuggaguaa

SEQ ID NO: 1420777 - RNA, 19 nt, Artificial Sequence
  Description of Artificial Sequence: Synthetic oligonucleotide
  Antisense strand to SEQ ID NO: 1420776
uuacuccaagccuauaaag

SEQ ID NO: 1420778 - RNA, 19 nt, Artificial Sequence
  Description of Artificial Sequence: Synthetic oligonucleotide
  Sense strand starting at position 3957 of SEQ ID NO: 1243508
agggaauggaguugucucu

SEQ ID NO: 1420779 - RNA, 19 nt, Artificial Sequence
  Description of Artificial Sequence: Synthetic oligonucleotide
  Antisense strand to SEQ ID NO: 1420778
agagacaacuccauucccu

SEQ ID NO: 1420780 - RNA, 19 nt, Artificial Sequence
  Description of Artificial Sequence: Synthetic oligonucleotide
  Sense strand starting at position 3963 of SEQ ID NO: 1243508
uggaguugucucuagagag

SEQ ID NO: 1420781 - RNA, 19 nt, Artificial Sequence
  Description of Artificial Sequence: Synthetic oligonucleotide
  Antisense strand to SEQ ID NO: 1420780
cucucuagagacaacucca

SEQ ID NO: 1420782 - RNA, 19 nt, Artificial Sequence
  Description of Artificial Sequence: Synthetic oligonucleotide
  Sense strand starting at position 3964 of SEQ ID NO: 1243508
ggaguugucucuagagagg

SEQ ID NO: 1420783 - RNA, 19 nt, Artificial Sequence
  Description of Artificial Sequence: Synthetic oligonucleotide
  Antisense strand to SEQ ID NO: 1420782
ccucucuagagacaacucc

SEQ ID NO: 1420784 - RNA, 19 nt, Artificial Sequence
  Description of Artificial Sequence: Synthetic oligonucleotide
  Sense strand starting at position 3967 of SEQ ID NO: 1243508
guugucucuagagagguga

SEQ ID NO: 1420785 - RNA, 19 nt, Artificial Sequence
  Description of Artificial Sequence: Synthetic oligonucleotide
  Antisense strand to SEQ ID NO: 1420784
ucaccucucuagagacaac

SEQ ID NO: 1420786 - RNA, 19 nt, Artificial Sequence
  Description of Artificial Sequence: Synthetic oligonucleotide
  Sense strand starting at position 157 of SEQ ID NO: 1243509
uucuaaagauguguauaac

SEQ ID NO: 1420787 - RNA, 19 nt, Artificial Sequence
  Description of Artificial Sequence: Synthetic oligonucleotide
  Antisense strand to SEQ ID NO: 1420786
guuauacacaucuuuagaa

SEQ ID NO: 1420788 - RNA, 19 nt, Artificial Sequence
  Description of Artificial Sequence: Synthetic oligonucleotide
  Sense strand starting at position 160 of SEQ ID NO: 1243509
uaaagauguguauaacgcu

SEQ ID NO: 1420789 - RNA, 19 nt, Artificial Sequence
  Description of Artificial Sequence: Synthetic oligonucleotide
  Antisense strand to SEQ ID NO: 1420788
agcguuauacacaucuuua

SEQ ID NO: 1420790 - RNA, 19 nt, Artificial Sequence
  Description of Artificial Sequence: Synthetic oligonucleotide
  Sense strand starting at position 168 of SEQ ID NO: 1243509
uguauaacgcuuuagacug

SEQ ID NO: 1420791 - RNA, 19 nt, Artificial Sequence
  Description of Artificial Sequence: Synthetic oligonucleotide
  Antisense strand to SEQ ID NO: 1420790
cagucuaaagcguuauaca

SEQ ID NO: 1420792 - RNA, 19 nt, Artificial Sequence
  Description of Artificial Sequence: Synthetic oligonucleotide
  Sense strand starting at position 196 of SEQ ID NO: 1243509
acguaaauacugggacaau

SEQ ID NO: 1420793 - RNA, 19 nt, Artificial Sequence
  Description of Artificial Sequence: Synthetic oligonucleotide
  Antisense strand to SEQ ID NO: 1420792
auugucccaguauuuacgu

SEQ ID NO: 1420794 - RNA, 19 nt, Artificial Sequence
  Description of Artificial Sequence: Synthetic oligonucleotide
  Sense strand starting at position 284 of SEQ ID NO: 1243509
ugaauugugauugaugcuu

SEQ ID NO: 1420795 - RNA, 19 nt, Artificial Sequence
  Description of Artificial Sequence: Synthetic oligonucleotide
  Antisense strand to SEQ ID NO: 1420794
aagcaucaaucacaauuca

SEQ ID NO: 1420796 - RNA, 19 nt, Artificial Sequence
  Description of Artificial Sequence: Synthetic oligonucleotide
  Sense strand starting at position 289 of SEQ ID NO: 1243509
ugugauugaugcuuauuaa

SEQ ID NO: 1420797 - RNA, 19 nt, Artificial Sequence
  Description of Artificial Sequence: Synthetic oligonucleotide
  Antisense strand to SEQ ID NO: 1420796
uuaauaagcaucaaucaca

SEQ ID NO: 1420798 - RNA, 19 nt, Artificial Sequence
  Description of Artificial Sequence: Synthetic oligonucleotide
  Sense strand starting at position 290 of SEQ ID NO: 1243509
gugauugaugcuuauuaaa

SEQ ID NO: 1420799 - RNA, 19 nt, Artificial Sequence
  Description of Artificial Sequence: Synthetic oligonucleotide
  Antisense strand to SEQ ID NO: 1420798
uuuaauaagcaucaaucac

SEQ ID NO: 1420800 - RNA, 19 nt, Artificial Sequence
  Description of Artificial Sequence: Synthetic oligonucleotide
  Sense strand starting at position 313 of SEQ ID NO: 1243509
ggaagugagcuaugccuaa

SEQ ID NO: 1420801 - RNA, 19 nt, Artificial Sequence
  Description of Artificial Sequence: Synthetic oligonucleotide
  Antisense strand to SEQ ID NO: 1420800
uuaggcauagcucacuucc

SEQ ID NO: 1420802 - RNA, 19 nt, Artificial Sequence
  Description of Artificial Sequence: Synthetic oligonucleotide
  Sense strand starting at position 317 of SEQ ID NO: 1243509
gugagcuaugccuaaagau

SEQ ID NO: 1420803 - RNA, 19 nt, Artificial Sequence
  Description of Artificial Sequence: Synthetic oligonucleotide
  Antisense strand to SEQ ID NO: 1420802
aucuuuaggcauagcucac

SEQ ID NO: 1420804 - RNA, 19 nt, Artificial Sequence
  Description of Artificial Sequence: Synthetic oligonucleotide
  Sense strand starting at position 415 of SEQ ID NO: 1243509
uaagcuaguuaauuaggau

SEQ ID NO: 1420805 - RNA, 19 nt, Artificial Sequence
  Description of Artificial Sequence: Synthetic oligonucleotide
  Antisense strand to SEQ ID NO: 1420804
auccuaauuaacuagcuua

SEQ ID NO: 1420806 - RNA, 19 nt, Artificial Sequence
  Description of Artificial Sequence: Synthetic oligonucleotide
  Sense strand starting at position 1113 of SEQ ID NO: 1243509
uuuccaccacgggauuauu

SEQ ID NO: 1420807 - RNA, 19 nt, Artificial Sequence
  Description of Artificial Sequence: Synthetic oligonucleotide
  Antisense strand to SEQ ID NO: 1420806
aauaaucccgugguggaaa

SEQ ID NO: 1420808 - RNA, 19 nt, Artificial Sequence
  Description of Artificial Sequence: Synthetic oligonucleotide
  Sense strand starting at position 1191 of SEQ ID NO: 1243509
cugggauggauucgugcaa

SEQ ID NO: 1420809 - RNA, 19 nt, Artificial Sequence
  Description of Artificial Sequence: Synthetic oligonucleotide
  Antisense strand to SEQ ID NO: 1420808
uugcacgaauccaucccag

SEQ ID NO: 1420810 - RNA, 19 nt, Artificial Sequence
  Description of Artificial Sequence: Synthetic oligonucleotide
  Sense strand starting at position 1195 of SEQ ID NO: 1243509
gauggauucgugcaaggga

SEQ ID NO: 1420811 - RNA, 19 nt, Artificial Sequence
  Description of Artificial Sequence: Synthetic oligonucleotide
  Antisense strand to SEQ ID NO: 1420810
ucccuugcacgaauccauc

SEQ ID NO: 1420812 - RNA, 19 nt, Artificial Sequence
  Description of Artificial Sequence: Synthetic oligonucleotide
  Sense strand starting at position 1196 of SEQ ID NO: 1243509
auggauucgugcaagggau

SEQ ID NO: 1420813 - RNA, 19 nt, Artificial Sequence
  Description of Artificial Sequence: Synthetic oligonucleotide
  Antisense strand to SEQ ID NO: 1420812
aucccuugcacgaauccau

SEQ ID NO: 1420814 - RNA, 19 nt, Artificial Sequence
  Description of Artificial Sequence: Synthetic oligonucleotide
  Sense strand starting at position 2355 of SEQ ID NO: 1243509
ccgaggagggucugguuua

SEQ ID NO: 1420815 - RNA, 19 nt, Artificial Sequence
  Description of Artificial Sequence: Synthetic oligonucleotide
  Antisense strand to SEQ ID NO: 1420814
uaaaccagacccuccucgg

SEQ ID NO: 1420816 - RNA, 19 nt, Artificial Sequence
  Description of Artificial Sequence: Synthetic oligonucleotide
  Sense strand starting at position 2519 of SEQ ID NO: 1243509
acgcguaaagugcuugaca

SEQ ID NO: 1420817 - RNA, 19 nt, Artificial Sequence
  Description of Artificial Sequence: Synthetic oligonucleotide
  Antisense strand to SEQ ID NO: 1420816
ugucaagcacuuuacgcgu

SEQ ID NO: 1420818 - RNA, 19 nt, Artificial Sequence
  Description of Artificial Sequence: Synthetic oligonucleotide
  Sense strand starting at position 2522 of SEQ ID NO: 1243509
cguaaagugcuugacauga

SEQ ID NO: 1420819 - RNA, 19 nt, Artificial Sequence
  Description of Artificial Sequence: Synthetic oligonucleotide
  Antisense strand to SEQ ID NO: 1420818
ucaugucaagcacuuuacg

SEQ ID NO: 1420820 - RNA, 19 nt, Artificial Sequence
  Description of Artificial Sequence: Synthetic oligonucleotide
  Sense strand starting at position 2796 of SEQ ID NO: 1243509
cgcguaagauuucugugag

SEQ ID NO: 1420821 - RNA, 19 nt, Artificial Sequence
  Description of Artificial Sequence: Synthetic oligonucleotide
  Antisense strand to SEQ ID NO: 1420820
cucacagaaaucuuacgcg

SEQ ID NO: 1420822 - RNA, 19 nt, Artificial Sequence
  Description of Artificial Sequence: Synthetic oligonucleotide
  Sense strand starting at position 2821 of SEQ ID NO: 1243509
auuagauuaacgugagcac

SEQ ID NO: 1420823 - RNA, 19 nt, Artificial Sequence
  Description of Artificial Sequence: Synthetic oligonucleotide
  Antisense strand to SEQ ID NO: 1420822
gugcucacguuaaucuaau

SEQ ID NO: 1420824 - RNA, 19 nt, Artificial Sequence
  Description of Artificial Sequence: Synthetic oligonucleotide
  Sense strand starting at position 2822 of SEQ ID NO: 1243509
uuagauuaacgugagcaca

SEQ ID NO: 1420825 - RNA, 19 nt, Artificial Sequence
  Description of Artificial Sequence: Synthetic oligonucleotide
  Antisense strand to SEQ ID NO: 1420824
ugugcucacguuaaucuaa

SEQ ID NO: 1420826 - RNA, 19 nt, Artificial Sequence
  Description of Artificial Sequence: Synthetic oligonucleotide
  Sense strand starting at position 2824 of SEQ ID NO: 1243509
agauuaacgugagcacacu

SEQ ID NO: 1420827 - RNA, 19 nt, Artificial Sequence
  Description of Artificial Sequence: Synthetic oligonucleotide
  Antisense strand to SEQ ID NO: 1420826
agugugcucacguuaaucu

SEQ ID NO: 1420828 - RNA, 19 nt, Artificial Sequence
  Description of Artificial Sequence: Synthetic oligonucleotide
  Sense strand starting at position 2869 of SEQ ID NO: 1243509
ggcuacugggauuguuauu

SEQ ID NO: 1420829 - RNA, 19 nt, Artificial Sequence
  Description of Artificial Sequence: Synthetic oligonucleotide
  Antisense strand to SEQ ID NO: 1420828
aauaacaaucccaguagcc

SEQ ID NO: 1420830 - RNA, 19 nt, Artificial Sequence
  Description of Artificial Sequence: Synthetic oligonucleotide
  Sense strand starting at position 2874 of SEQ ID NO: 1243509
cugggauuguuauuaauaa

SEQ ID NO: 1420831 - RNA, 19 nt, Artificial Sequence
  Description of Artificial Sequence: Synthetic oligonucleotide
  Antisense strand to SEQ ID NO: 1420830
uuauuaauaacaaucccag

SEQ ID NO: 1420832 - RNA, 19 nt, Artificial Sequence
  Description of Artificial Sequence: Synthetic oligonucleotide
  Sense strand starting at position 3523 of SEQ ID NO: 1243509
auuggauaugggugaucuu

SEQ ID NO: 1420833 - RNA, 19 nt, Artificial Sequence
  Description of Artificial Sequence: Synthetic oligonucleotide
  Antisense strand to SEQ ID NO: 1420832
aagaucacccauauccaau

SEQ ID NO: 1420834 - RNA, 19 nt, Artificial Sequence
  Description of Artificial Sequence: Synthetic oligonucleotide
  Sense strand starting at position 3526 of SEQ ID NO: 1243509
ggauaugggugaucuucgu

SEQ ID NO: 1420835 - RNA, 19 nt, Artificial Sequence
  Description of Artificial Sequence: Synthetic oligonucleotide
  Antisense strand to SEQ ID NO: 1420834
acgaagaucacccauaucc

SEQ ID NO: 1420836 - RNA, 19 nt, Artificial Sequence
  Description of Artificial Sequence: Synthetic oligonucleotide
  Sense strand starting at position 3530 of SEQ ID NO: 1243509
augggugaucuucgugaau

SEQ ID NO: 1420837 - RNA, 19 nt, Artificial Sequence
  Description of Artificial Sequence: Synthetic oligonucleotide
  Antisense strand to SEQ ID NO: 1420836
auucacgaagaucacccau

SEQ ID NO: 1420838 - RNA, 19 nt, Artificial Sequence
  Description of Artificial Sequence: Synthetic oligonucleotide
  Sense strand starting at position 3533 of SEQ ID NO: 1243509
ggugaucuucgugaauuau

SEQ ID NO: 1420839 - RNA, 19 nt, Artificial Sequence
  Description of Artificial Sequence: Synthetic oligonucleotide
  Antisense strand to SEQ ID NO: 1420838
auaauucacgaagaucacc

SEQ ID NO: 1420840 - RNA, 19 nt, Artificial Sequence
  Description of Artificial Sequence: Synthetic oligonucleotide
  Sense strand starting at position 3539 of SEQ ID NO: 1243509
cuucgugaauuauugguaa

SEQ ID NO: 1420841 - RNA, 19 nt, Artificial Sequence
  Description of Artificial Sequence: Synthetic oligonucleotide
  Antisense strand to SEQ ID NO: 1420840
uuaccaauaauucacgaag

SEQ ID NO: 1420842 - RNA, 19 nt, Artificial Sequence
  Description of Artificial Sequence: Synthetic oligonucleotide
  Sense strand starting at position 3541 of SEQ ID NO: 1243509
ucgugaauuauugguaauu

SEQ ID NO: 1420843 - RNA, 19 nt, Artificial Sequence
  Description of Artificial Sequence: Synthetic oligonucleotide
  Antisense strand to SEQ ID NO: 1420842
aauuaccaauaauucacga

SEQ ID NO: 1420844 - RNA, 19 nt, Artificial Sequence
  Description of Artificial Sequence: Synthetic oligonucleotide
  Sense strand starting at position 3573 of SEQ ID NO: 1243509
auuauacugugcucacuga

SEQ ID NO: 1420845 - RNA, 19 nt, Artificial Sequence
  Description of Artificial Sequence: Synthetic oligonucleotide
  Antisense strand to SEQ ID NO: 1420844
ucagugagcacaguauaau

SEQ ID NO: 1420846 - RNA, 19 nt, Artificial Sequence
  Description of Artificial Sequence: Synthetic oligonucleotide
  Sense strand starting at position 3577 of SEQ ID NO: 1243509
uacugugcucacugagaga

SEQ ID NO: 1420847 - RNA, 19 nt, Artificial Sequence
  Description of Artificial Sequence: Synthetic oligonucleotide
  Antisense strand to SEQ ID NO: 1420846
ucucucagugagcacagua

SEQ ID NO: 1420848 - RNA, 19 nt, Artificial Sequence
  Description of Artificial Sequence: Synthetic oligonucleotide
  Sense strand starting at position 3588 of SEQ ID NO: 1243509
cugagagaauguccuuauu

SEQ ID NO: 1420849 - RNA, 19 nt, Artificial Sequence
  Description of Artificial Sequence: Synthetic oligonucleotide
  Antisense strand to SEQ ID NO: 1420848
aauaaggacauucucucag

SEQ ID NO: 1420850 - RNA, 19 nt, Artificial Sequence
  Description of Artificial Sequence: Synthetic oligonucleotide
  Sense strand starting at position 3590 of SEQ ID NO: 1243509
gagagaauguccuuauugu

SEQ ID NO: 1420851 - RNA, 19 nt, Artificial Sequence
  Description of Artificial Sequence: Synthetic oligonucleotide
  Antisense strand to SEQ ID NO: 1420850
acaauaaggacauucucuc

SEQ ID NO: 1420852 - RNA, 19 nt, Artificial Sequence
  Description of Artificial Sequence: Synthetic oligonucleotide
  Sense strand starting at position 3591 of SEQ ID NO: 1243509
agagaauguccuuauugug

SEQ ID NO: 1420853 - RNA, 19 nt, Artificial Sequence
  Description of Artificial Sequence: Synthetic oligonucleotide
  Antisense strand to SEQ ID NO: 1420852
cacaauaaggacauucucu

SEQ ID NO: 1420854 - RNA, 19 nt, Artificial Sequence
  Description of Artificial Sequence: Synthetic oligonucleotide
  Sense strand starting at position 3615 of SEQ ID NO: 1243509
augcauucugaagaguuga

SEQ ID NO: 1420855 - RNA, 19 nt, Artificial Sequence
  Description of Artificial Sequence: Synthetic oligonucleotide
  Antisense strand to SEQ ID NO: 1420854
ucaacucuucagaaugcau

SEQ ID NO: 1420856 - RNA, 19 nt, Artificial Sequence
  Description of Artificial Sequence: Synthetic oligonucleotide
  Sense strand starting at position 3641 of SEQ ID NO: 1243509
aggccauaaugccuguaaa

SEQ ID NO: 1420857 - RNA, 19 nt, Artificial Sequence
  Description of Artificial Sequence: Synthetic oligonucleotide
  Antisense strand to SEQ ID NO: 1420856
uuuacaggcauuauggccu

SEQ ID NO: 1420858 - RNA, 19 nt, Artificial Sequence
  Description of Artificial Sequence: Synthetic oligonucleotide
  Sense strand starting at position 3746 of SEQ ID NO: 1243509
uauuguuggcucuaaguag

SEQ ID NO: 1420859 - RNA, 19 nt, Artificial Sequence
  Description of Artificial Sequence: Synthetic oligonucleotide
  Antisense strand to SEQ ID NO: 1420858
cuacuuagagccaacaaua

SEQ ID NO: 1420860 - RNA, 19 nt, Artificial Sequence
  Description of Artificial Sequence: Synthetic oligonucleotide
  Sense strand starting at position 3872 of SEQ ID NO: 1243509
auaucugcacuuggauaga

SEQ ID NO: 1420861 - RNA, 19 nt, Artificial Sequence
  Description of Artificial Sequence: Synthetic oligonucleotide
  Antisense strand to SEQ ID NO: 1420860
ucuauccaagugcagauau

SEQ ID NO: 1420862 - RNA, 19 nt, Artificial Sequence
  Description of Artificial Sequence: Synthetic oligonucleotide
  Sense strand starting at position 3916 of SEQ ID NO: 1243509
gugauuuaugguugucucu

SEQ ID NO: 1420863 - RNA, 19 nt, Artificial Sequence
  Description of Artificial Sequence: Synthetic oligonucleotide
  Antisense strand to SEQ ID NO: 1420862
agagacaaccauaaaucac

SEQ ID NO: 1420864 - RNA, 19 nt, Artificial Sequence
  Description of Artificial Sequence: Synthetic oligonucleotide
  Sense strand starting at position 3918 of SEQ ID NO: 1243509
gauuuaugguugucucucu

SEQ ID NO: 1420865 - RNA, 19 nt, Artificial Sequence
  Description of Artificial Sequence: Synthetic oligonucleotide
  Antisense strand to SEQ ID NO: 1420864
agagagacaaccauaaauc

SEQ ID NO: 1420866 - RNA, 19 nt, Artificial Sequence
  Description of Artificial Sequence: Synthetic oligonucleotide
  Sense strand starting at position 136 of SEQ ID NO: 1243510
gcccgauuccaugcuguuu

SEQ ID NO: 1420867 - RNA, 19 nt, Artificial Sequence
  Description of Artificial Sequence: Synthetic oligonucleotide
  Antisense strand to SEQ ID NO: 1420866
aaacagcauggaaucgggc

SEQ ID NO: 1420868 - RNA, 19 nt, Artificial Sequence
  Description of Artificial Sequence: Synthetic oligonucleotide
  Sense strand starting at position 553 of SEQ ID NO: 1243510
gcuauuaaauacucuggaa

SEQ ID NO: 1420869 - RNA, 19 nt, Artificial Sequence
  Description of Artificial Sequence: Synthetic oligonucleotide
  Antisense strand to SEQ ID NO: 1420868
uuccagaguauuuaauagc

SEQ ID NO: 1420870 - RNA, 19 nt, Artificial Sequence
  Description of Artificial Sequence: Synthetic oligonucleotide
  Sense strand starting at position 738 of SEQ ID NO: 1243510
aucugauauuaucucguua

SEQ ID NO: 1420871 - RNA, 19 nt, Artificial Sequence
  Description of Artificial Sequence: Synthetic oligonucleotide
  Antisense strand to SEQ ID NO: 1420870
uaacgagauaauaucagau

SEQ ID NO: 1420872 - RNA, 19 nt, Artificial Sequence
  Description of Artificial Sequence: Synthetic oligonucleotide
  Sense strand starting at position 844 of SEQ ID NO: 1243510
agugccaaucuguaaauaa

SEQ ID NO: 1420873 - RNA, 19 nt, Artificial Sequence
  Description of Artificial Sequence: Synthetic oligonucleotide
  Antisense strand to SEQ ID NO: 1420872
uuauuuacagauuggcacu

SEQ ID NO: 1420874 - RNA, 19 nt, Artificial Sequence
  Description of Artificial Sequence: Synthetic oligonucleotide
  Sense strand starting at position 867 of SEQ ID NO: 1243510
cgguuaaauauggguaauu

SEQ ID NO: 1420875 - RNA, 19 nt, Artificial Sequence
  Description of Artificial Sequence: Synthetic oligonucleotide
  Antisense strand to SEQ ID NO: 1420874
aauuacccauauuuaaccg

SEQ ID NO: 1420876 - RNA, 19 nt, Artificial Sequence
  Description of Artificial Sequence: Synthetic oligonucleotide
  Sense strand starting at position 868 of SEQ ID NO: 1243510
gguuaaauauggguaauuc

SEQ ID NO: 1420877 - RNA, 19 nt, Artificial Sequence
  Description of Artificial Sequence: Synthetic oligonucleotide
  Antisense strand to SEQ ID NO: 1420876
gaauuacccauauuuaacc

SEQ ID NO: 1420878 - RNA, 19 nt, Artificial Sequence
  Description of Artificial Sequence: Synthetic oligonucleotide
  Sense strand starting at position 877 of SEQ ID NO: 1243510
uggguaauuccacaguguu

SEQ ID NO: 1420879 - RNA, 19 nt, Artificial Sequence
  Description of Artificial Sequence: Synthetic oligonucleotide
  Antisense strand to SEQ ID NO: 1420878
aacacuguggaauuaccca

SEQ ID NO: 1420880 - RNA, 19 nt, Artificial Sequence
  Description of Artificial Sequence: Synthetic oligonucleotide
  Sense strand starting at position 880 of SEQ ID NO: 1243510
guaauuccacaguguucga

SEQ ID NO: 1420881 - RNA, 19 nt, Artificial Sequence
  Description of Artificial Sequence: Synthetic oligonucleotide
  Antisense strand to SEQ ID NO: 1420880
ucgaacacuguggaauuac

SEQ ID NO: 1420882 - RNA, 19 nt, Artificial Sequence
  Description of Artificial Sequence: Synthetic oligonucleotide
  Sense strand starting at position 883 of SEQ ID NO: 1243510
auuccacaguguucgauuu

SEQ ID NO: 1420883 - RNA, 19 nt, Artificial Sequence
  Description of Artificial Sequence: Synthetic oligonucleotide
  Antisense strand to SEQ ID NO: 1420882
aaaucgaacacuguggaau

SEQ ID NO: 1420884 - RNA, 19 nt, Artificial Sequence
  Description of Artificial Sequence: Synthetic oligonucleotide
  Sense strand starting at position 884 of SEQ ID NO: 1243510
uuccacaguguucgauuua

SEQ ID NO: 1420885 - RNA, 19 nt, Artificial Sequence
  Description of Artificial Sequence: Synthetic oligonucleotide
  Antisense strand to SEQ ID NO: 1420884
uaaaucgaacacuguggaa

SEQ ID NO: 1420886 - RNA, 19 nt, Artificial Sequence
  Description of Artificial Sequence: Synthetic oligonucleotide
  Sense strand starting at position 885 of SEQ ID NO: 1243510
uccacaguguucgauuuaa

SEQ ID NO: 1420887 - RNA, 19 nt, Artificial Sequence
  Description of Artificial Sequence: Synthetic oligonucleotide
  Antisense strand to SEQ ID NO: 1420886
uuaaaucgaacacugugga

SEQ ID NO: 1420888 - RNA, 19 nt, Artificial Sequence
  Description of Artificial Sequence: Synthetic oligonucleotide
  Sense strand starting at position 973 of SEQ ID NO: 1243510
cagagaggcugcuuaacuu

SEQ ID NO: 1420889 - RNA, 19 nt, Artificial Sequence
  Description of Artificial Sequence: Synthetic oligonucleotide
  Antisense strand to SEQ ID NO: 1420888
aaguuaagcagccucucug

SEQ ID NO: 1420890 - RNA, 19 nt, Artificial Sequence
  Description of Artificial Sequence: Synthetic oligonucleotide
  Sense strand starting at position 986 of SEQ ID NO: 1243510
uaacuuacccgacgucaca

SEQ ID NO: 1420891 - RNA, 19 nt, Artificial Sequence
  Description of Artificial Sequence: Synthetic oligonucleotide
  Antisense strand to SEQ ID NO: 1420890
ugugacgucggguaaguua

SEQ ID NO: 1420892 - RNA, 19 nt, Artificial Sequence
  Description of Artificial Sequence: Synthetic oligonucleotide
  Sense strand starting at position 996 of SEQ ID NO: 1243510
gacgucacauugcuaguaa

SEQ ID NO: 1420893 - RNA, 19 nt, Artificial Sequence
  Description of Artificial Sequence: Synthetic oligonucleotide
  Antisense strand to SEQ ID NO: 1420892
uuacuagcaaugugacguc

SEQ ID NO: 1420894 - RNA, 19 nt, Artificial Sequence
  Description of Artificial Sequence: Synthetic oligonucleotide
  Sense strand starting at position 1083 of SEQ ID NO: 1243510
cggauagucuuguucauug

SEQ ID NO: 1420895 - RNA, 19 nt, Artificial Sequence
  Description of Artificial Sequence: Synthetic oligonucleotide
  Antisense strand to SEQ ID NO: 1420894
caaugaacaagacuauccg

SEQ ID NO: 1420896 - RNA, 19 nt, Artificial Sequence
  Description of Artificial Sequence: Synthetic oligonucleotide
  Sense strand starting at position 1146 of SEQ ID NO: 1243510
uguaguaaguucucaauaa

SEQ ID NO: 1420897 - RNA, 19 nt, Artificial Sequence
  Description of Artificial Sequence: Synthetic oligonucleotide
  Antisense strand to SEQ ID NO: 1420896
uuauugagaacuuacuaca

SEQ ID NO: 1420898 - RNA, 19 nt, Artificial Sequence
  Description of Artificial Sequence: Synthetic oligonucleotide
  Sense strand starting at position 1162 of SEQ ID NO: 1243510
uaaauacauguuugaguga

SEQ ID NO: 1420899 - RNA, 19 nt, Artificial Sequence
  Description of Artificial Sequence: Synthetic oligonucleotide
  Antisense strand to SEQ ID NO: 1420898
ucacucaaacauguauuua

SEQ ID NO: 1420900 - RNA, 19 nt, Artificial Sequence
  Description of Artificial Sequence: Synthetic oligonucleotide
  Sense strand starting at position 2255 of SEQ ID NO: 1243510
cgccauguucacuguggga

SEQ ID NO: 1420901 - RNA, 19 nt, Artificial Sequence
  Description of Artificial Sequence: Synthetic oligonucleotide
  Antisense strand to SEQ ID NO: 1420900
ucccacagugaacauggcg

SEQ ID NO: 1420902 - RNA, 19 nt, Artificial Sequence
  Description of Artificial Sequence: Synthetic oligonucleotide
  Sense strand starting at position 2429 of SEQ ID NO: 1243510
ucugucuuugcuggucaga

SEQ ID NO: 1420903 - RNA, 19 nt, Artificial Sequence
  Description of Artificial Sequence: Synthetic oligonucleotide
  Antisense strand to SEQ ID NO: 1420902
ucugaccagcaaagacaga

SEQ ID NO: 1420904 - RNA, 19 nt, Artificial Sequence
  Description of Artificial Sequence: Synthetic oligonucleotide
  Sense strand starting at position 2431 of SEQ ID NO: 1243510
ugucuuugcuggucagaug

SEQ ID NO: 1420905 - RNA, 19 nt, Artificial Sequence
  Description of Artificial Sequence: Synthetic oligonucleotide
  Antisense strand to SEQ ID NO: 1420904
caucugaccagcaaagaca

SEQ ID NO: 1420906 - RNA, 19 nt, Artificial Sequence
  Description of Artificial Sequence: Synthetic oligonucleotide
  Sense strand starting at position 2887 of SEQ ID NO: 1243510
ccuacuggguguuuacaau

SEQ ID NO: 1420907 - RNA, 19 nt, Artificial Sequence
  Description of Artificial Sequence: Synthetic oligonucleotide
  Antisense strand to SEQ ID NO: 1420906
auuguaaacacccaguagg

SEQ ID NO: 1420908 - RNA, 19 nt, Artificial Sequence
  Description of Artificial Sequence: Synthetic oligonucleotide
  Sense strand starting at position 2893 of SEQ ID NO: 1243510
ggguguuuacaauagcugu

SEQ ID NO: 1420909 - RNA, 19 nt, Artificial Sequence
  Description of Artificial Sequence: Synthetic oligonucleotide
  Antisense strand to SEQ ID NO: 1420908
acagcuauuguaaacaccc

SEQ ID NO: 1420910 - RNA, 19 nt, Artificial Sequence
  Description of Artificial Sequence: Synthetic oligonucleotide
  Sense strand starting at position 2909 of SEQ ID NO: 1243510
uguuguguuccacacauua

SEQ ID NO: 1420911 - RNA, 19 nt, Artificial Sequence
  Description of Artificial Sequence: Synthetic oligonucleotide
  Antisense strand to SEQ ID NO: 1420910
uaauguguggaacacaaca

SEQ ID NO: 1420912 - RNA, 19 nt, Artificial Sequence
  Description of Artificial Sequence: Synthetic oligonucleotide
  Sense strand starting at position 2966 of SEQ ID NO: 1243510
cgucuuugagauugguaca

SEQ ID NO: 1420913 - RNA, 19 nt, Artificial Sequence
  Description of Artificial Sequence: Synthetic oligonucleotide
  Antisense strand to SEQ ID NO: 1420912
uguaccaaucucaaagacg

SEQ ID NO: 1420914 - RNA, 19 nt, Artificial Sequence
  Description of Artificial Sequence: Synthetic oligonucleotide
  Sense strand starting at position 2967 of SEQ ID NO: 1243510
gucuuugagauugguacag

SEQ ID NO: 1420915 - RNA, 19 nt, Artificial Sequence
  Description of Artificial Sequence: Synthetic oligonucleotide
  Antisense strand to SEQ ID NO: 1420914
cuguaccaaucucaaagac

SEQ ID NO: 1420916 - RNA, 19 nt, Artificial Sequence
  Description of Artificial Sequence: Synthetic oligonucleotide
  Sense strand starting at position 2971 of SEQ ID NO: 1243510
uugagauugguacaguucu

SEQ ID NO: 1420917 - RNA, 19 nt, Artificial Sequence
  Description of Artificial Sequence: Synthetic oligonucleotide
  Antisense strand to SEQ ID NO: 1420916
agaacuguaccaaucucaa

SEQ ID NO: 1420918 - RNA, 19 nt, Artificial Sequence
  Description of Artificial Sequence: Synthetic oligonucleotide
  Sense strand starting at position 3096 of SEQ ID NO: 1243510
gaauccugguguuugaauc

SEQ ID NO: 1420919 - RNA, 19 nt, Artificial Sequence
  Description of Artificial Sequence: Synthetic oligonucleotide
  Antisense strand to SEQ ID NO: 1420918
gauucaaacaccaggauuc

SEQ ID NO: 1420920 - RNA, 19 nt, Artificial Sequence
  Description of Artificial Sequence: Synthetic oligonucleotide
  Sense strand starting at position 3097 of SEQ ID NO: 1243510
aauccugguguuugaauca

SEQ ID NO: 1420921 - RNA, 19 nt, Artificial Sequence
  Description of Artificial Sequence: Synthetic oligonucleotide
  Antisense strand to SEQ ID NO: 1420920
ugauucaaacaccaggauu

SEQ ID NO: 1420922 - RNA, 19 nt, Artificial Sequence
  Description of Artificial Sequence: Synthetic oligonucleotide
  Sense strand starting at position 3104 of SEQ ID NO: 1243510
guguuugaaucaucauauu

SEQ ID NO: 1420923 - RNA, 19 nt, Artificial Sequence
  Description of Artificial Sequence: Synthetic oligonucleotide
  Antisense strand to SEQ ID NO: 1420922
aauaugaugauucaaacac

SEQ ID NO: 1420924 - RNA, 19 nt, Artificial Sequence
  Description of Artificial Sequence: Synthetic oligonucleotide
  Sense strand starting at position 3238 of SEQ ID NO: 1243510
guuguucccaugugagaac

SEQ ID NO: 1420925 - RNA, 19 nt, Artificial Sequence
  Description of Artificial Sequence: Synthetic oligonucleotide
  Antisense strand to SEQ ID NO: 1420924
guucucacaugggaacaac

SEQ ID NO: 1420926 - RNA, 19 nt, Artificial Sequence
  Description of Artificial Sequence: Synthetic oligonucleotide
  Sense strand starting at position 3258 of SEQ ID NO: 1243510
ggagcucagcguuaccaga

SEQ ID NO: 1420927 - RNA, 19 nt, Artificial Sequence
  Description of Artificial Sequence: Synthetic oligonucleotide
  Antisense strand to SEQ ID NO: 1420926
ucugguaacgcugagcucc

SEQ ID NO: 1420928 - RNA, 19 nt, Artificial Sequence
  Description of Artificial Sequence: Synthetic oligonucleotide
  Sense strand starting at position 3359 of SEQ ID NO: 1243510
aauaguacaucuuugggau

SEQ ID NO: 1420929 - RNA, 19 nt, Artificial Sequence
  Description of Artificial Sequence: Synthetic oligonucleotide
  Antisense strand to SEQ ID NO: 1420928
aucccaaagauguacuauu

SEQ ID NO: 1420930 - RNA, 19 nt, Artificial Sequence
  Description of Artificial Sequence: Synthetic oligonucleotide
  Sense strand starting at position 3360 of SEQ ID NO: 1243510
auaguacaucuuugggaug

SEQ ID NO: 1420931 - RNA, 19 nt, Artificial Sequence
  Description of Artificial Sequence: Synthetic oligonucleotide
  Antisense strand to SEQ ID NO: 1420930
caucccaaagauguacuau

SEQ ID NO: 1420932 - RNA, 19 nt, Artificial Sequence
  Description of Artificial Sequence: Synthetic oligonucleotide
  Sense strand starting at position 3371 of SEQ ID NO: 1243510
uugggaugccuuuagucca

SEQ ID NO: 1420933 - RNA, 19 nt, Artificial Sequence
  Description of Artificial Sequence: Synthetic oligonucleotide
  Antisense strand to SEQ ID NO: 1420932
uggacuaaaggcaucccaa

SEQ ID NO: 1420934 - RNA, 19 nt, Artificial Sequence
  Description of Artificial Sequence: Synthetic oligonucleotide
  Sense strand starting at position 3439 of SEQ ID NO: 1243510
gggcuagucugaguccuga

SEQ ID NO: 1420935 - RNA, 19 nt, Artificial Sequence
  Description of Artificial Sequence: Synthetic oligonucleotide
  Antisense strand to SEQ ID NO: 1420934
ucaggacucagacuagccc

SEQ ID NO: 1420936 - RNA, 19 nt, Artificial Sequence
  Description of Artificial Sequence: Synthetic oligonucleotide
  Sense strand starting at position 3573 of SEQ ID NO: 1243510
uaaguagggcucuaugaug

SEQ ID NO: 1420937 - RNA, 19 nt, Artificial Sequence
  Description of Artificial Sequence: Synthetic oligonucleotide
  Antisense strand to SEQ ID NO: 1420936
caucauagagcccuacuua

SEQ ID NO: 1420938 - RNA, 19 nt, Artificial Sequence
  Description of Artificial Sequence: Synthetic oligonucleotide
  Sense strand starting at position 3724 of SEQ ID NO: 1243510
ugggcaguuugaucuagac

SEQ ID NO: 1420939 - RNA, 19 nt, Artificial Sequence
  Description of Artificial Sequence: Synthetic oligonucleotide
  Antisense strand to SEQ ID NO: 1420938
gucuagaucaaacugccca

SEQ ID NO: 1420940 - RNA, 19 nt, Artificial Sequence
  Description of Artificial Sequence: Synthetic oligonucleotide
  Sense strand starting at position 3726 of SEQ ID NO: 1243510
ggcaguuugaucuagacuc

SEQ ID NO: 1420941 - RNA, 19 nt, Artificial Sequence
  Description of Artificial Sequence: Synthetic oligonucleotide
  Antisense strand to SEQ ID NO: 1420940
gagucuagaucaaacugcc

SEQ ID NO: 1420942 - RNA, 19 nt, Artificial Sequence
  Description of Artificial Sequence: Synthetic oligonucleotide
  Sense strand starting at position 3728 of SEQ ID NO: 1243510
caguuugaucuagacucga

SEQ ID NO: 1420943 - RNA, 19 nt, Artificial Sequence
  Description of Artificial Sequence: Synthetic oligonucleotide
  Antisense strand to SEQ ID NO: 1420942
ucgagucuagaucaaacug

SEQ ID NO: 1420944 - RNA, 19 nt, Artificial Sequence
  Description of Artificial Sequence: Synthetic oligonucleotide
  Sense strand starting at position 3912 of SEQ ID NO: 1243510
cugacuugaccauauugca

SEQ ID NO: 1420945 - RNA, 19 nt, Artificial Sequence
  Description of Artificial Sequence: Synthetic oligonucleotide
  Antisense strand to SEQ ID NO: 1420944
ugcaauauggucaagucag

SEQ ID NO: 1420946 - RNA, 19 nt, Artificial Sequence
  Description of Artificial Sequence: Synthetic oligonucleotide
  Sense strand starting at position 164 of SEQ ID NO: 1243511
ccucauaaaugaguuaguu

SEQ ID NO: 1420947 - RNA, 19 nt, Artificial Sequence
  Description of Artificial Sequence: Synthetic oligonucleotide
  Antisense strand to SEQ ID NO: 1420946
aacuaacucauuuaugagg

SEQ ID NO: 1420948 - RNA, 19 nt, Artificial Sequence
  Description of Artificial Sequence: Synthetic oligonucleotide
  Sense strand starting at position 174 of SEQ ID NO: 1243511
gaguuaguuccgcaagagg

SEQ ID NO: 1420949 - RNA, 19 nt, Artificial Sequence
  Description of Artificial Sequence: Synthetic oligonucleotide
  Antisense strand to SEQ ID NO: 1420948
ccucuugcggaacuaacuc

SEQ ID NO: 1420950 - RNA, 19 nt, Artificial Sequence
  Description of Artificial Sequence: Synthetic oligonucleotide
  Sense strand starting at position 177 of SEQ ID NO: 1243511
uuaguuccgcaagaggauu

SEQ ID NO: 1420951 - RNA, 19 nt, Artificial Sequence
  Description of Artificial Sequence: Synthetic oligonucleotide
  Antisense strand to SEQ ID NO: 1420950
aauccucuugcggaacuaa

SEQ ID NO: 1420952 - RNA, 19 nt, Artificial Sequence
  Description of Artificial Sequence: Synthetic oligonucleotide
  Sense strand starting at position 213 of SEQ ID NO: 1243511
augguaaaucccuagucca

SEQ ID NO: 1420953 - RNA, 19 nt, Artificial Sequence
  Description of Artificial Sequence: Synthetic oligonucleotide
  Antisense strand to SEQ ID NO: 1420952
uggacuagggauuuaccau

SEQ ID NO: 1420954 - RNA, 19 nt, Artificial Sequence
  Description of Artificial Sequence: Synthetic oligonucleotide
  Sense strand starting at position 216 of SEQ ID NO: 1243511
guaaaucccuaguccagaa

SEQ ID NO: 1420955 - RNA, 19 nt, Artificial Sequence
  Description of Artificial Sequence: Synthetic oligonucleotide
  Antisense strand to SEQ ID NO: 1420954
uucuggacuagggauuuac

SEQ ID NO: 1420956 - RNA, 19 nt, Artificial Sequence
  Description of Artificial Sequence: Synthetic oligonucleotide
  Sense strand starting at position 220 of SEQ ID NO: 1243511
aucccuaguccagaaguaa

SEQ ID NO: 1420957 - RNA, 19 nt, Artificial Sequence
  Description of Artificial Sequence: Synthetic oligonucleotide
  Antisense strand to SEQ ID NO: 1420956
uuacuucuggacuagggau

SEQ ID NO: 1420958 - RNA, 19 nt, Artificial Sequence
  Description of Artificial Sequence: Synthetic oligonucleotide
  Sense strand starting at position 343 of SEQ ID NO: 1243511
acaacauuggcaugcacau

SEQ ID NO: 1420959 - RNA, 19 nt, Artificial Sequence
  Description of Artificial Sequence: Synthetic oligonucleotide
  Antisense strand to SEQ ID NO: 1420958
augugcaugccaauguugu

SEQ ID NO: 1420960 - RNA, 19 nt, Artificial Sequence
  Description of Artificial Sequence: Synthetic oligonucleotide
  Sense strand starting at position 372 of SEQ ID NO: 1243511
ccauguaagagugauguaa

SEQ ID NO: 1420961 - RNA, 19 nt, Artificial Sequence
  Description of Artificial Sequence: Synthetic oligonucleotide
  Antisense strand to SEQ ID NO: 1420960
uuacaucacucuuacaugg

SEQ ID NO: 1420962 - RNA, 19 nt, Artificial Sequence
  Description of Artificial Sequence: Synthetic oligonucleotide
  Sense strand starting at position 376 of SEQ ID NO: 1243511
guaagagugauguaauacc

SEQ ID NO: 1420963 - RNA, 19 nt, Artificial Sequence
  Description of Artificial Sequence: Synthetic oligonucleotide
  Antisense strand to SEQ ID NO: 1420962
gguauuacaucacucuuac

SEQ ID NO: 1420964 - RNA, 19 nt, Artificial Sequence
  Description of Artificial Sequence: Synthetic oligonucleotide
  Sense strand starting at position 548 of SEQ ID NO: 1243511
uggaaacuccuggguuaga

SEQ ID NO: 1420965 - RNA, 19 nt, Artificial Sequence
  Description of Artificial Sequence: Synthetic oligonucleotide
  Antisense strand to SEQ ID NO: 1420964
ucuaacccaggaguuucca

SEQ ID NO: 1420966 - RNA, 19 nt, Artificial Sequence
  Description of Artificial Sequence: Synthetic oligonucleotide
  Sense strand starting at position 640 of SEQ ID NO: 1243511
ccagcuaauuugucuguau

SEQ ID NO: 1420967 - RNA, 19 nt, Artificial Sequence
  Description of Artificial Sequence: Synthetic oligonucleotide
  Antisense strand to SEQ ID NO: 1420966
auacagacaaauuagcugg

SEQ ID NO: 1420968 - RNA, 19 nt, Artificial Sequence
  Description of Artificial Sequence: Synthetic oligonucleotide
  Sense strand starting at position 824 of SEQ ID NO: 1243511
gggacauguuuggcaaaca

SEQ ID NO: 1420969 - RNA, 19 nt, Artificial Sequence
  Description of Artificial Sequence: Synthetic oligonucleotide
  Antisense strand to SEQ ID NO: 1420968
uguuugccaaacauguccc

SEQ ID NO: 1420970 - RNA, 19 nt, Artificial Sequence
  Description of Artificial Sequence: Synthetic oligonucleotide
  Sense strand starting at position 946 of SEQ ID NO: 1243511
agaagacagucuccauuau

SEQ ID NO: 1420971 - RNA, 19 nt, Artificial Sequence
  Description of Artificial Sequence: Synthetic oligonucleotide
  Antisense strand to SEQ ID NO: 1420970
auaauggagacugucuucu

SEQ ID NO: 1420972 - RNA, 19 nt, Artificial Sequence
  Description of Artificial Sequence: Synthetic oligonucleotide
  Sense strand starting at position 950 of SEQ ID NO: 1243511
gacagucuccauuauuggu

SEQ ID NO: 1420973 - RNA, 19 nt, Artificial Sequence
  Description of Artificial Sequence: Synthetic oligonucleotide
  Antisense strand to SEQ ID NO: 1420972
accaauaauggagacuguc

SEQ ID NO: 1420974 - RNA, 19 nt, Artificial Sequence
  Description of Artificial Sequence: Synthetic oligonucleotide
  Sense strand starting at position 986 of SEQ ID NO: 1243511
acgcaauauguauaugaaa

SEQ ID NO: 1420975 - RNA, 19 nt, Artificial Sequence
  Description of Artificial Sequence: Synthetic oligonucleotide
  Antisense strand to SEQ ID NO: 1420974
uuucauauacauauugcgu

SEQ ID NO: 1420976 - RNA, 19 nt, Artificial Sequence
  Description of Artificial Sequence: Synthetic oligonucleotide
  Sense strand starting at position 1169 of SEQ ID NO: 1243511
ccucccaaucgcuauggaa

SEQ ID NO: 1420977 - RNA, 19 nt, Artificial Sequence
  Description of Artificial Sequence: Synthetic oligonucleotide
  Antisense strand to SEQ ID NO: 1420976
uuccauagcgauugggagg

SEQ ID NO: 1420978 - RNA, 19 nt, Artificial Sequence
  Description of Artificial Sequence: Synthetic oligonucleotide
  Sense strand starting at position 1173 of SEQ ID NO: 1243511
ccaaucgcuauggaaguua

SEQ ID NO: 1420979 - RNA, 19 nt, Artificial Sequence
  Description of Artificial Sequence: Synthetic oligonucleotide
  Antisense strand to SEQ ID NO: 1420978
uaacuuccauagcgauugg

SEQ ID NO: 1420980 - RNA, 19 nt, Artificial Sequence
  Description of Artificial Sequence: Synthetic oligonucleotide
  Sense strand starting at position 1184 of SEQ ID NO: 1243511
ggaaguuacguagaccacu

SEQ ID NO: 1420981 - RNA, 19 nt, Artificial Sequence
  Description of Artificial Sequence: Synthetic oligonucleotide
  Antisense strand to SEQ ID NO: 1420980
aguggucuacguaacuucc

SEQ ID NO: 1420982 - RNA, 19 nt, Artificial Sequence
  Description of Artificial Sequence: Synthetic oligonucleotide
  Sense strand starting at position 1356 of SEQ ID NO: 1243511
guguguugaaacuaagagu

SEQ ID NO: 1420983 - RNA, 19 nt, Artificial Sequence
  Description of Artificial Sequence: Synthetic oligonucleotide
  Antisense strand to SEQ ID NO: 1420982
acucuuaguuucaacacac

SEQ ID NO: 1420984 - RNA, 19 nt, Artificial Sequence
  Description of Artificial Sequence: Synthetic oligonucleotide
  Sense strand starting at position 1498 of SEQ ID NO: 1243511
cuguuauuacggcagauac

SEQ ID NO: 1420985 - RNA, 19 nt, Artificial Sequence
  Description of Artificial Sequence: Synthetic oligonucleotide
  Antisense strand to SEQ ID NO: 1420984
guaucugccguaauaacag

SEQ ID NO: 1420986 - RNA, 19 nt, Artificial Sequence
  Description of Artificial Sequence: Synthetic oligonucleotide
  Sense strand starting at position 1701 of SEQ ID NO: 1243511
acuagaaagcagugaucuu

SEQ ID NO: 1420987 - RNA, 19 nt, Artificial Sequence
  Description of Artificial Sequence: Synthetic oligonucleotide
  Antisense strand to SEQ ID NO: 1420986
aagaucacugcuuucuagu

SEQ ID NO: 1420988 - RNA, 19 nt, Artificial Sequence
  Description of Artificial Sequence: Synthetic oligonucleotide
  Sense strand starting at position 1708 of SEQ ID NO: 1243511
agcagugaucuuuauauaa

SEQ ID NO: 1420989 - RNA, 19 nt, Artificial Sequence
  Description of Artificial Sequence: Synthetic oligonucleotide
  Antisense strand to SEQ ID NO: 1420988
uuauauaaagaucacugcu

SEQ ID NO: 1420990 - RNA, 19 nt, Artificial Sequence
  Description of Artificial Sequence: Synthetic oligonucleotide
  Sense strand starting at position 1733 of SEQ ID NO: 1243511
cugauacaaugucuagaug

SEQ ID NO: 1420991 - RNA, 19 nt, Artificial Sequence
  Description of Artificial Sequence: Synthetic oligonucleotide
  Antisense strand to SEQ ID NO: 1420990
caucuagacauuguaucag

SEQ ID NO: 1420992 - RNA, 19 nt, Artificial Sequence
  Description of Artificial Sequence: Synthetic oligonucleotide
  Sense strand starting at position 1734 of SEQ ID NO: 1243511
ugauacaaugucuagaugu

SEQ ID NO: 1420993 - RNA, 19 nt, Artificial Sequence
  Description of Artificial Sequence: Synthetic oligonucleotide
  Antisense strand to SEQ ID NO: 1420992
acaucuagacauuguauca

SEQ ID NO: 1420994 - RNA, 19 nt, Artificial Sequence
  Description of Artificial Sequence: Synthetic oligonucleotide
  Sense strand starting at position 1784 of SEQ ID NO: 1243511
gagacaugucaguauuggu

SEQ ID NO: 1420995 - RNA, 19 nt, Artificial Sequence
  Description of Artificial Sequence: Synthetic oligonucleotide
  Antisense strand to SEQ ID NO: 1420994
accaauacugacaugucuc

SEQ ID NO: 1420996 - RNA, 19 nt, Artificial Sequence
  Description of Artificial Sequence: Synthetic oligonucleotide
  Sense strand starting at position 1797 of SEQ ID NO: 1243511
auugguuaucuccauccau

SEQ ID NO: 1420997 - RNA, 19 nt, Artificial Sequence
  Description of Artificial Sequence: Synthetic oligonucleotide
  Antisense strand to SEQ ID NO: 1420996
auggauggagauaaccaau

SEQ ID NO: 1420998 - RNA, 19 nt, Artificial Sequence
  Description of Artificial Sequence: Synthetic oligonucleotide
  Sense strand starting at position 1940 of SEQ ID NO: 1243511
acaucagagugacugcaua

SEQ ID NO: 1420999 - RNA, 19 nt, Artificial Sequence
  Description of Artificial Sequence: Synthetic oligonucleotide
  Antisense strand to SEQ ID NO: 1420998
uaugcagucacucugaugu

SEQ ID NO: 1421000 - RNA, 19 nt, Artificial Sequence
  Description of Artificial Sequence: Synthetic oligonucleotide
  Sense strand starting at position 1968 of SEQ ID NO: 1243511
ggagcucuaccucagcauu

SEQ ID NO: 1421001 - RNA, 19 nt, Artificial Sequence
  Description of Artificial Sequence: Synthetic oligonucleotide
  Antisense strand to SEQ ID NO: 1421000
aaugcugagguagagcucc

SEQ ID NO: 1421002 - RNA, 19 nt, Artificial Sequence
  Description of Artificial Sequence: Synthetic oligonucleotide
  Sense strand starting at position 2079 of SEQ ID NO: 1243511
agaagaggauauuaaugga

SEQ ID NO: 1421003 - RNA, 19 nt, Artificial Sequence
  Description of Artificial Sequence: Synthetic oligonucleotide
  Antisense strand to SEQ ID NO: 1421002
uccauuaauauccucuucu

SEQ ID NO: 1421004 - RNA, 19 nt, Artificial Sequence
  Description of Artificial Sequence: Synthetic oligonucleotide
  Sense strand starting at position 2118 of SEQ ID NO: 1243511
agaaucugacuuugguuaa

SEQ ID NO: 1421005 - RNA, 19 nt, Artificial Sequence
  Description of Artificial Sequence: Synthetic oligonucleotide
  Antisense strand to SEQ ID NO: 1421004
uuaaccaaagucagauucu

SEQ ID NO: 1421006 - RNA, 19 nt, Artificial Sequence
  Description of Artificial Sequence: Synthetic oligonucleotide
  Sense strand starting at position 2121 of SEQ ID NO: 1243511
aucugacuuugguuaacaa

SEQ ID NO: 1421007 - RNA, 19 nt, Artificial Sequence
  Description of Artificial Sequence: Synthetic oligonucleotide
  Antisense strand to SEQ ID NO: 1421006
uuguuaaccaaagucagau

SEQ ID NO: 1421008 - RNA, 19 nt, Artificial Sequence
  Description of Artificial Sequence: Synthetic oligonucleotide
  Sense strand starting at position 2437 of SEQ ID NO: 1243511
ggaagaucccuuuagccug

SEQ ID NO: 1421009 - RNA, 19 nt, Artificial Sequence
  Description of Artificial Sequence: Synthetic oligonucleotide
  Antisense strand to SEQ ID NO: 1421008
caggcuaaagggaucuucc

SEQ ID NO: 1421010 - RNA, 19 nt, Artificial Sequence
  Description of Artificial Sequence: Synthetic oligonucleotide
  Sense strand starting at position 2504 of SEQ ID NO: 1243511
cgaaacaacguguauaaga

SEQ ID NO: 1421011 - RNA, 19 nt, Artificial Sequence
  Description of Artificial Sequence: Synthetic oligonucleotide
  Antisense strand to SEQ ID NO: 1421010
ucuuauacacguuguuucg

SEQ ID NO: 1421012 - RNA, 19 nt, Artificial Sequence
  Description of Artificial Sequence: Synthetic oligonucleotide
  Sense strand starting at position 3003 of SEQ ID NO: 1243511
cuaaauagagcauggcuua

SEQ ID NO: 1421013 - RNA, 19 nt, Artificial Sequence
  Description of Artificial Sequence: Synthetic oligonucleotide
  Antisense strand to SEQ ID NO: 1421012
uaagccaugcucuauuuag

SEQ ID NO: 1421014 - RNA, 19 nt, Artificial Sequence
  Description of Artificial Sequence: Synthetic oligonucleotide
  Sense strand starting at position 3184 of SEQ ID NO: 1243511
aaauacugaccacgugaga

SEQ ID NO: 1421015 - RNA, 19 nt, Artificial Sequence
  Description of Artificial Sequence: Synthetic oligonucleotide
  Antisense strand to SEQ ID NO: 1421014
ucucacguggucaguauuu

SEQ ID NO: 1421016 - RNA, 19 nt, Artificial Sequence
  Description of Artificial Sequence: Synthetic oligonucleotide
  Sense strand starting at position 3317 of SEQ ID NO: 1243511
ggcagaauauccucccuau

SEQ ID NO: 1421017 - RNA, 19 nt, Artificial Sequence
  Description of Artificial Sequence: Synthetic oligonucleotide
  Antisense strand to SEQ ID NO: 1421016
auagggaggauauucugcc

SEQ ID NO: 1421018 - RNA, 19 nt, Artificial Sequence
  Description of Artificial Sequence: Synthetic oligonucleotide
  Sense strand starting at position 3385 of SEQ ID NO: 1243511
ggcccuaggcaggaagaau

SEQ ID NO: 1421019 - RNA, 19 nt, Artificial Sequence
  Description of Artificial Sequence: Synthetic oligonucleotide
  Antisense strand to SEQ ID NO: 1421018
auucuuccugccuagggcc

SEQ ID NO: 1421020 - RNA, 19 nt, Artificial Sequence
  Description of Artificial Sequence: Synthetic oligonucleotide
  Sense strand starting at position 3495 of SEQ ID NO: 1243511
ccuggauuccuguaggacu

SEQ ID NO: 1421021 - RNA, 19 nt, Artificial Sequence
  Description of Artificial Sequence: Synthetic oligonucleotide
  Antisense strand to SEQ ID NO: 1421020
aguccuacaggaauccagg

SEQ ID NO: 1421022 - RNA, 19 nt, Artificial Sequence
  Description of Artificial Sequence: Synthetic oligonucleotide
  Sense strand starting at position 3644 of SEQ ID NO: 1243511
acagucaagucuuccacau

SEQ ID NO: 1421023 - RNA, 19 nt, Artificial Sequence
  Description of Artificial Sequence: Synthetic oligonucleotide
  Antisense strand to SEQ ID NO: 1421022
auguggaagacuugacugu

SEQ ID NO: 1421024 - RNA, 19 nt, Artificial Sequence
  Description of Artificial Sequence: Synthetic oligonucleotide
  Sense strand starting at position 3648 of SEQ ID NO: 1243511
ucaagucuuccacaucugu

SEQ ID NO: 1421025 - RNA, 19 nt, Artificial Sequence
  Description of Artificial Sequence: Synthetic oligonucleotide
  Antisense strand to SEQ ID NO: 1421024
acagauguggaagacuuga

SEQ ID NO: 1421026 - RNA, 19 nt, Artificial Sequence
  Description of Artificial Sequence: Synthetic oligonucleotide
  Sense strand starting at position 30 of SEQ ID NO: 1243512
gggcaaauaccuugaaauu

SEQ ID NO: 1421027 - RNA, 19 nt, Artificial Sequence
  Description of Artificial Sequence: Synthetic oligonucleotide
  Antisense strand to SEQ ID NO: 1421026
aauuucaagguauuugccc

SEQ ID NO: 1421028 - RNA, 19 nt, Artificial Sequence
  Description of Artificial Sequence: Synthetic oligonucleotide
  Sense strand starting at position 39 of SEQ ID NO: 1243512
ccuugaaauuuguggaccu

SEQ ID NO: 1421029 - RNA, 19 nt, Artificial Sequence
  Description of Artificial Sequence: Synthetic oligonucleotide
  Antisense strand to SEQ ID NO: 1421028
agguccacaaauuucaagg

SEQ ID NO: 1421030 - RNA, 19 nt, Artificial Sequence
  Description of Artificial Sequence: Synthetic oligonucleotide
  Sense strand starting at position 71 of SEQ ID NO: 1243512
aagauacaggucuguaaca

SEQ ID NO: 1421031 - RNA, 19 nt, Artificial Sequence
  Description of Artificial Sequence: Synthetic oligonucleotide
  Antisense strand to SEQ ID NO: 1421030
uguuacagaccuguaucuu

SEQ ID NO: 1421032 - RNA, 19 nt, Artificial Sequence
  Description of Artificial Sequence: Synthetic oligonucleotide
  Sense strand starting at position 89 of SEQ ID NO: 1243512
acacaugcucugcaguaau

SEQ ID NO: 1421033 - RNA, 19 nt, Artificial Sequence
  Description of Artificial Sequence: Synthetic oligonucleotide
  Antisense strand to SEQ ID NO: 1421032
auuacugcagagcaugugu

SEQ ID NO: 1421034 - RNA, 19 nt, Artificial Sequence
  Description of Artificial Sequence: Synthetic oligonucleotide
  Sense strand starting at position 156 of SEQ ID NO: 1243512
aggacaaugucaugggaaa

SEQ ID NO: 1421035 - RNA, 19 nt, Artificial Sequence
  Description of Artificial Sequence: Synthetic oligonucleotide
  Antisense strand to SEQ ID NO: 1421034
uuucccaugacauuguccu

SEQ ID NO: 1421036 - RNA, 19 nt, Artificial Sequence
  Description of Artificial Sequence: Synthetic oligonucleotide
  Sense strand starting at position 169 of SEQ ID NO: 1243512
gggaaauccauaugcucgu

SEQ ID NO: 1421037 - RNA, 19 nt, Artificial Sequence
  Description of Artificial Sequence: Synthetic oligonucleotide
  Antisense strand to SEQ ID NO: 1421036
acgagcauauggauuuccc

SEQ ID NO: 1421038 - RNA, 19 nt, Artificial Sequence
  Description of Artificial Sequence: Synthetic oligonucleotide
  Sense strand starting at position 173 of SEQ ID NO: 1243512
aauccauaugcucguguua

SEQ ID NO: 1421039 - RNA, 19 nt, Artificial Sequence
  Description of Artificial Sequence: Synthetic oligonucleotide
  Antisense strand to SEQ ID NO: 1421038
uaacacgagcauauggauu

SEQ ID NO: 1421040 - RNA, 19 nt, Artificial Sequence
  Description of Artificial Sequence: Synthetic oligonucleotide
  Sense strand starting at position 180 of SEQ ID NO: 1243512
augcucguguuauuggaua

SEQ ID NO: 1421041 - RNA, 19 nt, Artificial Sequence
  Description of Artificial Sequence: Synthetic oligonucleotide
  Antisense strand to SEQ ID NO: 1421040
uauccaauaacacgagcau

SEQ ID NO: 1421042 - RNA, 19 nt, Artificial Sequence
  Description of Artificial Sequence: Synthetic oligonucleotide
  Sense strand starting at position 182 of SEQ ID NO: 1243512
gcucguguuauuggauauu

SEQ ID NO: 1421043 - RNA, 19 nt, Artificial Sequence
  Description of Artificial Sequence: Synthetic oligonucleotide
  Antisense strand to SEQ ID NO: 1421042
aauauccaauaacacgagc

SEQ ID NO: 1421044 - RNA, 19 nt, Artificial Sequence
  Description of Artificial Sequence: Synthetic oligonucleotide
  Sense strand starting at position 185 of SEQ ID NO: 1243512
cguguuauuggauauuugu

SEQ ID NO: 1421045 - RNA, 19 nt, Artificial Sequence
  Description of Artificial Sequence: Synthetic oligonucleotide
  Antisense strand to SEQ ID NO: 1421044
acaaauauccaauaacacg

SEQ ID NO: 1421046 - RNA, 19 nt, Artificial Sequence
  Description of Artificial Sequence: Synthetic oligonucleotide
  Sense strand starting at position 322 of SEQ ID NO: 1243512
ucagcuauuugguuuaauc

SEQ ID NO: 1421047 - RNA, 19 nt, Artificial Sequence
  Description of Artificial Sequence: Synthetic oligonucleotide
  Antisense strand to SEQ ID NO: 1421046
gauuaaaccaaauagcuga

SEQ ID NO: 1421048 - RNA, 19 nt, Artificial Sequence
  Description of Artificial Sequence: Synthetic oligonucleotide
  Sense strand starting at position 483 of SEQ ID NO: 1243512
gccacuuugucauuugcaa

SEQ ID NO: 1421049 - RNA, 19 nt, Artificial Sequence
  Description of Artificial Sequence: Synthetic oligonucleotide
  Antisense strand to SEQ ID NO: 1421048
uugcaaaugacaaaguggc

SEQ ID NO: 1421050 - RNA, 19 nt, Artificial Sequence
  Description of Artificial Sequence: Synthetic oligonucleotide
  Sense strand starting at position 539 of SEQ ID NO: 1243512
ggaaguaaguuauucuauu

SEQ ID NO: 1421051 - RNA, 19 nt, Artificial Sequence
  Description of Artificial Sequence: Synthetic oligonucleotide
  Antisense strand to SEQ ID NO: 1421050
aauagaauaacuuacuucc

SEQ ID NO: 1421052 - RNA, 19 nt, Artificial Sequence
  Description of Artificial Sequence: Synthetic oligonucleotide
  Sense strand starting at position 578 of SEQ ID NO: 1243512
gcuuaaguguucccaccaa

SEQ ID NO: 1421053 - RNA, 19 nt, Artificial Sequence
  Description of Artificial Sequence: Synthetic oligonucleotide
  Antisense strand to SEQ ID NO: 1421052
uuggugggaacacuuaagc

SEQ ID NO: 1421054 - RNA, 19 nt, Artificial Sequence
  Description of Artificial Sequence: Synthetic oligonucleotide
  Sense strand starting at position 769 of SEQ ID NO: 1243512
gaacucgucacguagguaa

SEQ ID NO: 1421055 - RNA, 19 nt, Artificial Sequence
  Description of Artificial Sequence: Synthetic oligonucleotide
  Antisense strand to SEQ ID NO: 1421054
uuaccuacgugacgaguuc

SEQ ID NO: 1421056 - RNA, 19 nt, Artificial Sequence
  Description of Artificial Sequence: Synthetic oligonucleotide
  Sense strand starting at position 771 of SEQ ID NO: 1243512
acucgucacguagguaaga

SEQ ID NO: 1421057 - RNA, 19 nt, Artificial Sequence
  Description of Artificial Sequence: Synthetic oligonucleotide
  Antisense strand to SEQ ID NO: 1421056
ucuuaccuacgugacgagu

SEQ ID NO: 1421058 - RNA, 19 nt, Artificial Sequence
  Description of Artificial Sequence: Synthetic oligonucleotide
  Sense strand starting at position 773 of SEQ ID NO: 1243512
ucgucacguagguaagaaa

SEQ ID NO: 1421059 - RNA, 19 nt, Artificial Sequence
  Description of Artificial Sequence: Synthetic oligonucleotide
  Antisense strand to SEQ ID NO: 1421058
uuucuuaccuacgugacga

SEQ ID NO: 1421060 - RNA, 19 nt, Artificial Sequence
  Description of Artificial Sequence: Synthetic oligonucleotide
  Sense strand starting at position 827 of SEQ ID NO: 1243512
agugaaaugggucgugaga

SEQ ID NO: 1421061 - RNA, 19 nt, Artificial Sequence
  Description of Artificial Sequence: Synthetic oligonucleotide
  Antisense strand to SEQ ID NO: 1421060
ucucacgacccauuucacu

SEQ ID NO: 1421062 - RNA, 19 nt, Artificial Sequence
  Description of Artificial Sequence: Synthetic oligonucleotide
  Sense strand starting at position 995 of SEQ ID NO: 1243512
ucgagucagguuugauucu

SEQ ID NO: 1421063 - RNA, 19 nt, Artificial Sequence
  Description of Artificial Sequence: Synthetic oligonucleotide
  Antisense strand to SEQ ID NO: 1421062
agaaucaaaccugacucga

SEQ ID NO: 1421064 - RNA, 19 nt, Artificial Sequence
  Description of Artificial Sequence: Synthetic oligonucleotide
  Sense strand starting at position 1148 of SEQ ID NO: 1243512
gucagaacucugggccagu

SEQ ID NO: 1421065 - RNA, 19 nt, Artificial Sequence
  Description of Artificial Sequence: Synthetic oligonucleotide
  Antisense strand to SEQ ID NO: 1421064
acuggcccagaguucugac

SEQ ID NO: 1421066 - RNA, 19 nt, Artificial Sequence
  Description of Artificial Sequence: Synthetic oligonucleotide
  Sense strand starting at position 1436 of SEQ ID NO: 1243512
cugccugagcgcucgaauu

SEQ ID NO: 1421067 - RNA, 19 nt, Artificial Sequence
  Description of Artificial Sequence: Synthetic oligonucleotide
  Antisense strand to SEQ ID NO: 1421066
aauucgagcgcucaggcag

SEQ ID NO: 1421068 - RNA, 19 nt, Artificial Sequence
  Description of Artificial Sequence: Synthetic oligonucleotide
  Sense strand starting at position 1438 of SEQ ID NO: 1243512
gccugagcgcucgaauuua

SEQ ID NO: 1421069 - RNA, 19 nt, Artificial Sequence
  Description of Artificial Sequence: Synthetic oligonucleotide
  Antisense strand to SEQ ID NO: 1421068
uaaauucgagcgcucaggc

SEQ ID NO: 1421070 - RNA, 19 nt, Artificial Sequence
  Description of Artificial Sequence: Synthetic oligonucleotide
  Sense strand starting at position 2870 of SEQ ID NO: 1243512
gggucagcgccuagaaguu

SEQ ID NO: 1421071 - RNA, 19 nt, Artificial Sequence
  Description of Artificial Sequence: Synthetic oligonucleotide
  Antisense strand to SEQ ID NO: 1421070
aacuucuaggcgcugaccc

SEQ ID NO: 1421072 - RNA, 19 nt, Artificial Sequence
  Description of Artificial Sequence: Synthetic oligonucleotide
  Sense strand starting at position 2886 of SEQ ID NO: 1243512
guuccuguuauugucguua

SEQ ID NO: 1421073 - RNA, 19 nt, Artificial Sequence
  Description of Artificial Sequence: Synthetic oligonucleotide
  Antisense strand to SEQ ID NO: 1421072
uaacgacaauaacaggaac

SEQ ID NO: 1421074 - RNA, 19 nt, Artificial Sequence
  Description of Artificial Sequence: Synthetic oligonucleotide
  Sense strand starting at position 2889 of SEQ ID NO: 1243512
ccuguuauugucguuacuu

SEQ ID NO: 1421075 - RNA, 19 nt, Artificial Sequence
  Description of Artificial Sequence: Synthetic oligonucleotide
  Antisense strand to SEQ ID NO: 1421074
aaguaacgacaauaacagg

SEQ ID NO: 1421076 - RNA, 19 nt, Artificial Sequence
  Description of Artificial Sequence: Synthetic oligonucleotide
  Sense strand starting at position 2890 of SEQ ID NO: 1243512
cuguuauugucguuacuua

SEQ ID NO: 1421077 - RNA, 19 nt, Artificial Sequence
  Description of Artificial Sequence: Synthetic oligonucleotide
  Antisense strand to SEQ ID NO: 1421076
uaaguaacgacaauaacag

SEQ ID NO: 1421078 - RNA, 19 nt, Artificial Sequence
  Description of Artificial Sequence: Synthetic oligonucleotide
  Sense strand starting at position 2891 of SEQ ID NO: 1243512
uguuauugucguuacuuac

SEQ ID NO: 1421079 - RNA, 19 nt, Artificial Sequence
  Description of Artificial Sequence: Synthetic oligonucleotide
  Antisense strand to SEQ ID NO: 1421078
guaaguaacgacaauaaca

SEQ ID NO: 1421080 - RNA, 19 nt, Artificial Sequence
  Description of Artificial Sequence: Synthetic oligonucleotide
  Sense strand starting at position 2939 of SEQ ID NO: 1243512
caguaucuaccguggaaga

SEQ ID NO: 1421081 - RNA, 19 nt, Artificial Sequence
  Description of Artificial Sequence: Synthetic oligonucleotide
  Antisense strand to SEQ ID NO: 1421080
ucuuccacgguagauacug

SEQ ID NO: 1421082 - RNA, 19 nt, Artificial Sequence
  Description of Artificial Sequence: Synthetic oligonucleotide
  Sense strand starting at position 2940 of SEQ ID NO: 1243512
aguaucuaccguggaagaa

SEQ ID NO: 1421083 - RNA, 19 nt, Artificial Sequence
  Description of Artificial Sequence: Synthetic oligonucleotide
  Antisense strand to SEQ ID NO: 1421082
uucuuccacgguagauacu

SEQ ID NO: 1421084 - RNA, 19 nt, Artificial Sequence
  Description of Artificial Sequence: Synthetic oligonucleotide
  Sense strand starting at position 2941 of SEQ ID NO: 1243512
guaucuaccguggaagaau

SEQ ID NO: 1421085 - RNA, 19 nt, Artificial Sequence
  Description of Artificial Sequence: Synthetic oligonucleotide
  Antisense strand to SEQ ID NO: 1421084
auucuuccacgguagauac

SEQ ID NO: 1421086 - RNA, 19 nt, Artificial Sequence
  Description of Artificial Sequence: Synthetic oligonucleotide
  Sense strand starting at position 2990 of SEQ ID NO: 1243512
aaguuuggcuccucaagag

SEQ ID NO: 1421087 - RNA, 19 nt, Artificial Sequence
  Description of Artificial Sequence: Synthetic oligonucleotide
  Antisense strand to SEQ ID NO: 1421086
cucuugaggagccaaacuu

SEQ ID NO: 1421088 - RNA, 19 nt, Artificial Sequence
  Description of Artificial Sequence: Synthetic oligonucleotide
  Sense strand starting at position 3241 of SEQ ID NO: 1243512
ggcugcagugaucaaagau

SEQ ID NO: 1421089 - RNA, 19 nt, Artificial Sequence
  Description of Artificial Sequence: Synthetic oligonucleotide
  Antisense strand to SEQ ID NO: 1421088
aucuuugaucacugcagcc

SEQ ID NO: 1421090 - RNA, 19 nt, Artificial Sequence
  Description of Artificial Sequence: Synthetic oligonucleotide
  Sense strand starting at position 3393 of SEQ ID NO: 1243512
aacccagucugggaucauu

SEQ ID NO: 1421091 - RNA, 19 nt, Artificial Sequence
  Description of Artificial Sequence: Synthetic oligonucleotide
  Antisense strand to SEQ ID NO: 1421090
aaugaucccagacuggguu

SEQ ID NO: 1421092 - RNA, 19 nt, Artificial Sequence
  Description of Artificial Sequence: Synthetic oligonucleotide
  Sense strand starting at position 3422 of SEQ ID NO: 1243512
cucccuauuccaggagaca

SEQ ID NO: 1421093 - RNA, 19 nt, Artificial Sequence
  Description of Artificial Sequence: Synthetic oligonucleotide
  Antisense strand to SEQ ID NO: 1421092
ugucuccuggaauagggag

SEQ ID NO: 1421094 - RNA, 19 nt, Artificial Sequence
  Description of Artificial Sequence: Synthetic oligonucleotide
  Sense strand starting at position 3434 of SEQ ID NO: 1243512
ggagacauuuggugaauau

SEQ ID NO: 1421095 - RNA, 19 nt, Artificial Sequence
  Description of Artificial Sequence: Synthetic oligonucleotide
  Antisense strand to SEQ ID NO: 1421094
auauucaccaaaugucucc

SEQ ID NO: 1421096 - RNA, 19 nt, Artificial Sequence
  Description of Artificial Sequence: Synthetic oligonucleotide
  Sense strand starting at position 3521 of SEQ ID NO: 1243512
aaggcagugugggucaaua

SEQ ID NO: 1421097 - RNA, 19 nt, Artificial Sequence
  Description of Artificial Sequence: Synthetic oligonucleotide
  Antisense strand to SEQ ID NO: 1421096
uauugacccacacugccuu

SEQ ID NO: 1421098 - RNA, 19 nt, Artificial Sequence
  Description of Artificial Sequence: Synthetic oligonucleotide
  Sense strand starting at position 3523 of SEQ ID NO: 1243512
ggcagugugggucaauaaa

SEQ ID NO: 1421099 - RNA, 19 nt, Artificial Sequence
  Description of Artificial Sequence: Synthetic oligonucleotide
  Antisense strand to SEQ ID NO: 1421098
uuuauugacccacacugcc

SEQ ID NO: 1421100 - RNA, 19 nt, Artificial Sequence
  Description of Artificial Sequence: Synthetic oligonucleotide
  Sense strand starting at position 3604 of SEQ ID NO: 1243512
aggccagaagauuguggua

SEQ ID NO: 1421101 - RNA, 19 nt, Artificial Sequence
  Description of Artificial Sequence: Synthetic oligonucleotide
  Antisense strand to SEQ ID NO: 1421100
uaccacaaucuucuggccu

SEQ ID NO: 1421102 - RNA, 19 nt, Artificial Sequence
  Description of Artificial Sequence: Synthetic oligonucleotide
  Sense strand starting at position 3620 of SEQ ID NO: 1243512
guaccugucuucucuccau

SEQ ID NO: 1421103 - RNA, 19 nt, Artificial Sequence
  Description of Artificial Sequence: Synthetic oligonucleotide
  Antisense strand to SEQ ID NO: 1421102
auggagagaagacagguac

SEQ ID NO: 1421104 - RNA, 19 nt, Artificial Sequence
  Description of Artificial Sequence: Synthetic oligonucleotide
  Sense strand starting at position 3728 of SEQ ID NO: 1243512
aucacaaaugccugggaua

SEQ ID NO: 1421105 - RNA, 19 nt, Artificial Sequence
  Description of Artificial Sequence: Synthetic oligonucleotide
  Antisense strand to SEQ ID NO: 1421104
uaucccaggcauuugugau

SEQ ID NO: 1421106 - RNA, 19 nt, Artificial Sequence
  Description of Artificial Sequence: Synthetic oligonucleotide
  Sense strand starting at position 76 of SEQ ID NO: 1243513
cggaaccaugccuauauau

SEQ ID NO: 1421107 - RNA, 19 nt, Artificial Sequence
  Description of Artificial Sequence: Synthetic oligonucleotide
  Antisense strand to SEQ ID NO: 1421106
auauauaggcaugguuccg

SEQ ID NO: 1421108 - RNA, 19 nt, Artificial Sequence
  Description of Artificial Sequence: Synthetic oligonucleotide
  Sense strand starting at position 121 of SEQ ID NO: 1243513
ggcaaugugcaauaagacu

SEQ ID NO: 1421109 - RNA, 19 nt, Artificial Sequence
  Description of Artificial Sequence: Synthetic oligonucleotide
  Antisense strand to SEQ ID NO: 1421108
agucuuauugcacauugcc

SEQ ID NO: 1421110 - RNA, 19 nt, Artificial Sequence
  Description of Artificial Sequence: Synthetic oligonucleotide
  Sense strand starting at position 151 of SEQ ID NO: 1243513
gugagagucaggcauaaac

SEQ ID NO: 1421111 - RNA, 19 nt, Artificial Sequence
  Description of Artificial Sequence: Synthetic oligonucleotide
  Antisense strand to SEQ ID NO: 1421110
guuuaugccugacucucac

SEQ ID NO: 1421112 - RNA, 19 nt, Artificial Sequence
  Description of Artificial Sequence: Synthetic oligonucleotide
  Sense strand starting at position 197 of SEQ ID NO: 1243513
gaaaguggugucugaugag

SEQ ID NO: 1421113 - RNA, 19 nt, Artificial Sequence
  Description of Artificial Sequence: Synthetic oligonucleotide
  Antisense strand to SEQ ID NO: 1421112
cucaucagacaccacuuuc

SEQ ID NO: 1421114 - RNA, 19 nt, Artificial Sequence
  Description of Artificial Sequence: Synthetic oligonucleotide
  Sense strand starting at position 301 of SEQ ID NO: 1243513
uuuaguuuaggaggaaacu

SEQ ID NO: 1421115 - RNA, 19 nt, Artificial Sequence
  Description of Artificial Sequence: Synthetic oligonucleotide
  Antisense strand to SEQ ID NO: 1421114
aguuuccuccuaaacuaaa

SEQ ID NO: 1421116 - RNA, 19 nt, Artificial Sequence
  Description of Artificial Sequence: Synthetic oligonucleotide
  Sense strand starting at position 421 of SEQ ID NO: 1243513
gauuguuacaacggaugga

SEQ ID NO: 1421117 - RNA, 19 nt, Artificial Sequence
  Description of Artificial Sequence: Synthetic oligonucleotide
  Antisense strand to SEQ ID NO: 1421116
uccauccguuguaacaauc

SEQ ID NO: 1421118 - RNA, 19 nt, Artificial Sequence
  Description of Artificial Sequence: Synthetic oligonucleotide
  Sense strand starting at position 728 of SEQ ID NO: 1243513
gguagugugacugagaaac

SEQ ID NO: 1421119 - RNA, 19 nt, Artificial Sequence
  Description of Artificial Sequence: Synthetic oligonucleotide
  Antisense strand to SEQ ID NO: 1421118
guuucucagucacacuacc

SEQ ID NO: 1421120 - RNA, 19 nt, Artificial Sequence
  Description of Artificial Sequence: Synthetic oligonucleotide
  Sense strand starting at position 798 of SEQ ID NO: 1243513
ggcuacucuacuggacaga

SEQ ID NO: 1421121 - RNA, 19 nt, Artificial Sequence
  Description of Artificial Sequence: Synthetic oligonucleotide
  Antisense strand to SEQ ID NO: 1421120
ucuguccaguagaguagcc

SEQ ID NO: 1421122 - RNA, 19 nt, Artificial Sequence
  Description of Artificial Sequence: Synthetic oligonucleotide
  Sense strand starting at position 1038 of SEQ ID NO: 1243513
auaucagaucauuguuaca

SEQ ID NO: 1421123 - RNA, 19 nt, Artificial Sequence
  Description of Artificial Sequence: Synthetic oligonucleotide
  Antisense strand to SEQ ID NO: 1421122
uguaacaaugaucugauau

SEQ ID NO: 1421124 - RNA, 19 nt, Artificial Sequence
  Description of Artificial Sequence: Synthetic oligonucleotide
  Sense strand starting at position 1040 of SEQ ID NO: 1243513
aucagaucauuguuacaca

SEQ ID NO: 1421125 - RNA, 19 nt, Artificial Sequence
  Description of Artificial Sequence: Synthetic oligonucleotide
  Antisense strand to SEQ ID NO: 1421124
uguguaacaaugaucugau

SEQ ID NO: 1421126 - RNA, 19 nt, Artificial Sequence
  Description of Artificial Sequence: Synthetic oligonucleotide
  Sense strand starting at position 1157 of SEQ ID NO: 1243513
gagccuugagaucacgagu

SEQ ID NO: 1421127 - RNA, 19 nt, Artificial Sequence
  Description of Artificial Sequence: Synthetic oligonucleotide
  Antisense strand to SEQ ID NO: 1421126
acucgugaucucaaggcuc

SEQ ID NO: 1421128 - RNA, 19 nt, Artificial Sequence
  Description of Artificial Sequence: Synthetic oligonucleotide
  Sense strand starting at position 1223 of SEQ ID NO: 1243513
cucagaagcuggguaagaa

SEQ ID NO: 1421129 - RNA, 19 nt, Artificial Sequence
  Description of Artificial Sequence: Synthetic oligonucleotide
  Antisense strand to SEQ ID NO: 1421128
uucuuacccagcuucugag

SEQ ID NO: 1421130 - RNA, 19 nt, Artificial Sequence
  Description of Artificial Sequence: Synthetic oligonucleotide
  Sense strand starting at position 1354 of SEQ ID NO: 1243513
gugccaugcacugugcaaa

SEQ ID NO: 1421131 - RNA, 19 nt, Artificial Sequence
  Description of Artificial Sequence: Synthetic oligonucleotide
  Antisense strand to SEQ ID NO: 1421130
uuugcacagugcauggcac

SEQ ID NO: 1421132 - RNA, 19 nt, Artificial Sequence
  Description of Artificial Sequence: Synthetic oligonucleotide
  Sense strand starting at position 1455 of SEQ ID NO: 1243513
acagccagucaggaguaaa

SEQ ID NO: 1421133 - RNA, 19 nt, Artificial Sequence
  Description of Artificial Sequence: Synthetic oligonucleotide
  Antisense strand to SEQ ID NO: 1421132
uuuacuccugacuggcugu

SEQ ID NO: 1421134 - RNA, 19 nt, Artificial Sequence
  Description of Artificial Sequence: Synthetic oligonucleotide
  Sense strand starting at position 1628 of SEQ ID NO: 1243513
gcggcucuuacuucucgau

SEQ ID NO: 1421135 - RNA, 19 nt, Artificial Sequence
  Description of Artificial Sequence: Synthetic oligonucleotide
  Antisense strand to SEQ ID NO: 1421134
aucgagaaguaagagccgc

SEQ ID NO: 1421136 - RNA, 19 nt, Artificial Sequence
  Description of Artificial Sequence: Synthetic oligonucleotide
  Sense strand starting at position 2483 of SEQ ID NO: 1243513
ugaguuugaauagguauau

SEQ ID NO: 1421137 - RNA, 19 nt, Artificial Sequence
  Description of Artificial Sequence: Synthetic oligonucleotide
  Antisense strand to SEQ ID NO: 1421136
auauaccuauucaaacuca

SEQ ID NO: 1421138 - RNA, 19 nt, Artificial Sequence
  Description of Artificial Sequence: Synthetic oligonucleotide
  Sense strand starting at position 2484 of SEQ ID NO: 1243513
gaguuugaauagguauauu

SEQ ID NO: 1421139 - RNA, 19 nt, Artificial Sequence
  Description of Artificial Sequence: Synthetic oligonucleotide
  Antisense strand to SEQ ID NO: 1421138
aauauaccuauucaaacuc

SEQ ID NO: 1421140 - RNA, 19 nt, Artificial Sequence
  Description of Artificial Sequence: Synthetic oligonucleotide
  Sense strand starting at position 2731 of SEQ ID NO: 1243513
aucacauuacauggugaga

SEQ ID NO: 1421141 - RNA, 19 nt, Artificial Sequence
  Description of Artificial Sequence: Synthetic oligonucleotide
  Antisense strand to SEQ ID NO: 1421140
ucucaccauguaaugugau

SEQ ID NO: 1421142 - RNA, 19 nt, Artificial Sequence
  Description of Artificial Sequence: Synthetic oligonucleotide
  Sense strand starting at position 2783 of SEQ ID NO: 1243513
agcaauuuauggccggagu

SEQ ID NO: 1421143 - RNA, 19 nt, Artificial Sequence
  Description of Artificial Sequence: Synthetic oligonucleotide
  Antisense strand to SEQ ID NO: 1421142
acuccggccauaaauugcu

SEQ ID NO: 1421144 - RNA, 19 nt, Artificial Sequence
  Description of Artificial Sequence: Synthetic oligonucleotide
  Sense strand starting at position 2785 of SEQ ID NO: 1243513
caauuuauggccggagugu

SEQ ID NO: 1421145 - RNA, 19 nt, Artificial Sequence
  Description of Artificial Sequence: Synthetic oligonucleotide
  Antisense strand to SEQ ID NO: 1421144
acacuccggccauaaauug

SEQ ID NO: 1421146 - RNA, 19 nt, Artificial Sequence
  Description of Artificial Sequence: Synthetic oligonucleotide
  Sense strand starting at position 3043 of SEQ ID NO: 1243513
ggcagaauucuaggaugac

SEQ ID NO: 1421147 - RNA, 19 nt, Artificial Sequence
  Description of Artificial Sequence: Synthetic oligonucleotide
  Antisense strand to SEQ ID NO: 1421146
gucauccuagaauucugcc

SEQ ID NO: 1421148 - RNA, 19 nt, Artificial Sequence
  Description of Artificial Sequence: Synthetic oligonucleotide
  Sense strand starting at position 3082 of SEQ ID NO: 1243513
cguguucaugcccuguauu

SEQ ID NO: 1421149 - RNA, 19 nt, Artificial Sequence
  Description of Artificial Sequence: Synthetic oligonucleotide
  Antisense strand to SEQ ID NO: 1421148
aauacagggcaugaacacg

SEQ ID NO: 1421150 - RNA, 19 nt, Artificial Sequence
  Description of Artificial Sequence: Synthetic oligonucleotide
  Sense strand starting at position 3128 of SEQ ID NO: 1243513
uguaaauaugaugggcuau

SEQ ID NO: 1421151 - RNA, 19 nt, Artificial Sequence
  Description of Artificial Sequence: Synthetic oligonucleotide
  Antisense strand to SEQ ID NO: 1421150
auagcccaucauauuuaca

SEQ ID NO: 1421152 - RNA, 19 nt, Artificial Sequence
  Description of Artificial Sequence: Synthetic oligonucleotide
  Sense strand starting at position 3170 of SEQ ID NO: 1243513
uguaauaucgcagaagaga

SEQ ID NO: 1421153 - RNA, 19 nt, Artificial Sequence
  Description of Artificial Sequence: Synthetic oligonucleotide
  Antisense strand to SEQ ID NO: 1421152
ucucuucugcgauauuaca

SEQ ID NO: 1421154 - RNA, 19 nt, Artificial Sequence
  Description of Artificial Sequence: Synthetic oligonucleotide
  Sense strand starting at position 3208 of SEQ ID NO: 1243513
gucccuaaucagcagacau

SEQ ID NO: 1421155 - RNA, 19 nt, Artificial Sequence
  Description of Artificial Sequence: Synthetic oligonucleotide
  Antisense strand to SEQ ID NO: 1421154
augucugcugauuagggac

SEQ ID NO: 1421156 - RNA, 19 nt, Artificial Sequence
  Description of Artificial Sequence: Synthetic oligonucleotide
  Sense strand starting at position 3215 of SEQ ID NO: 1243513
aucagcagacauugaauua

SEQ ID NO: 1421157 - RNA, 19 nt, Artificial Sequence
  Description of Artificial Sequence: Synthetic oligonucleotide
  Antisense strand to SEQ ID NO: 1421156
uaauucaaugucugcugau

SEQ ID NO: 1421158 - RNA, 19 nt, Artificial Sequence
  Description of Artificial Sequence: Synthetic oligonucleotide
  Sense strand starting at position 3241 of SEQ ID NO: 1243513
gagagauuaacuugagucg

SEQ ID NO: 1421159 - RNA, 19 nt, Artificial Sequence
  Description of Artificial Sequence: Synthetic oligonucleotide
  Antisense strand to SEQ ID NO: 1421158
cgacucaaguuaaucucuc

SEQ ID NO: 1421160 - RNA, 19 nt, Artificial Sequence
  Description of Artificial Sequence: Synthetic oligonucleotide
  Sense strand starting at position 3313 of SEQ ID NO: 1243513
aagagagacucuccuguaa

SEQ ID NO: 1421161 - RNA, 19 nt, Artificial Sequence
  Description of Artificial Sequence: Synthetic oligonucleotide
  Antisense strand to SEQ ID NO: 1421160
uuacaggagagucucucuu

SEQ ID NO: 1421162 - RNA, 19 nt, Artificial Sequence
  Description of Artificial Sequence: Synthetic oligonucleotide
  Sense strand starting at position 3326 of SEQ ID NO: 1243513
cuguaaggaguuuagucau

SEQ ID NO: 1421163 - RNA, 19 nt, Artificial Sequence
  Description of Artificial Sequence: Synthetic oligonucleotide
  Antisense strand to SEQ ID NO: 1421162
augacuaaacuccuuacag

SEQ ID NO: 1421164 - RNA, 19 nt, Artificial Sequence
  Description of Artificial Sequence: Synthetic oligonucleotide
  Sense strand starting at position 3329 of SEQ ID NO: 1243513
uaaggaguuuagucauaug

SEQ ID NO: 1421165 - RNA, 19 nt, Artificial Sequence
  Description of Artificial Sequence: Synthetic oligonucleotide
  Antisense strand to SEQ ID NO: 1421164
cauaugacuaaacuccuua

SEQ ID NO: 1421166 - RNA, 19 nt, Artificial Sequence
  Description of Artificial Sequence: Synthetic oligonucleotide
  Sense strand starting at position 3337 of SEQ ID NO: 1243513
uuagucauauggccacaaa

SEQ ID NO: 1421167 - RNA, 19 nt, Artificial Sequence
  Description of Artificial Sequence: Synthetic oligonucleotide
  Antisense strand to SEQ ID NO: 1421166
uuuguggccauaugacuaa

SEQ ID NO: 1421168 - RNA, 19 nt, Artificial Sequence
  Description of Artificial Sequence: Synthetic oligonucleotide
  Sense strand starting at position 3338 of SEQ ID NO: 1243513
uagucauauggccacaaag

SEQ ID NO: 1421169 - RNA, 19 nt, Artificial Sequence
  Description of Artificial Sequence: Synthetic oligonucleotide
  Antisense strand to SEQ ID NO: 1421168
cuuuguggccauaugacua

SEQ ID NO: 1421170 - RNA, 19 nt, Artificial Sequence
  Description of Artificial Sequence: Synthetic oligonucleotide
  Sense strand starting at position 3461 of SEQ ID NO: 1243513
ggaacccugagcugagaau

SEQ ID NO: 1421171 - RNA, 19 nt, Artificial Sequence
  Description of Artificial Sequence: Synthetic oligonucleotide
  Antisense strand to SEQ ID NO: 1421170
auucucagcucaggguucc

SEQ ID NO: 1421172 - RNA, 19 nt, Artificial Sequence
  Description of Artificial Sequence: Synthetic oligonucleotide
  Sense strand starting at position 3608 of SEQ ID NO: 1243513
cggcaagucauggauauau

SEQ ID NO: 1421173 - RNA, 19 nt, Artificial Sequence
  Description of Artificial Sequence: Synthetic oligonucleotide
  Antisense strand to SEQ ID NO: 1421172
auauauccaugacuugccg

SEQ ID NO: 1421174 - RNA, 19 nt, Artificial Sequence
  Description of Artificial Sequence: Synthetic oligonucleotide
  Sense strand starting at position 3610 of SEQ ID NO: 1243513
gcaagucauggauauauca

SEQ ID NO: 1421175 - RNA, 19 nt, Artificial Sequence
  Description of Artificial Sequence: Synthetic oligonucleotide
  Antisense strand to SEQ ID NO: 1421174
ugauauauccaugacuugc

SEQ ID NO: 1421176 - RNA, 19 nt, Artificial Sequence
  Description of Artificial Sequence: Synthetic oligonucleotide
  Sense strand starting at position 3652 of SEQ ID NO: 1243513
uguauucuccuauacaggu

SEQ ID NO: 1421177 - RNA, 19 nt, Artificial Sequence
  Description of Artificial Sequence: Synthetic oligonucleotide
  Antisense strand to SEQ ID NO: 1421176
accuguauaggagaauaca

SEQ ID NO: 1421178 - RNA, 19 nt, Artificial Sequence
  Description of Artificial Sequence: Synthetic oligonucleotide
  Sense strand starting at position 3796 of SEQ ID NO: 1243513
uuugaugaugguugaugaa

SEQ ID NO: 1421179 - RNA, 19 nt, Artificial Sequence
  Description of Artificial Sequence: Synthetic oligonucleotide
  Antisense strand to SEQ ID NO: 1421178
uucaucaaccaucaucaaa

SEQ ID NO: 1421180 - RNA, 19 nt, Artificial Sequence
  Description of Artificial Sequence: Synthetic oligonucleotide
  Sense strand starting at position 3844 of SEQ ID NO: 1243513
augauuugguucuauuucu

SEQ ID NO: 1421181 - RNA, 19 nt, Artificial Sequence
  Description of Artificial Sequence: Synthetic oligonucleotide
  Antisense strand to SEQ ID NO: 1421180
agaaauagaaccaaaucau

SEQ ID NO: 1421182 - RNA, 19 nt, Artificial Sequence
  Description of Artificial Sequence: Synthetic oligonucleotide
  Sense strand starting at position 3851 of SEQ ID NO: 1243513
gguucuauuucuccaaugu

SEQ ID NO: 1421183 - RNA, 19 nt, Artificial Sequence
  Description of Artificial Sequence: Synthetic oligonucleotide
  Antisense strand to SEQ ID NO: 1421182
acauuggagaaauagaacc

SEQ ID NO: 1421184 - RNA, 19 nt, Artificial Sequence
  Description of Artificial Sequence: Synthetic oligonucleotide
  Sense strand starting at position 3855 of SEQ ID NO: 1243513
cuauuucuccaaugugugu

SEQ ID NO: 1421185 - RNA, 19 nt, Artificial Sequence
  Description of Artificial Sequence: Synthetic oligonucleotide
  Antisense strand to SEQ ID NO: 1421184
acacacauuggagaaauag

SEQ ID NO: 1421186 - RNA, 19 nt, Artificial Sequence
  Description of Artificial Sequence: Synthetic oligonucleotide
  Sense strand starting at position 105 of SEQ ID NO: 1243514
uguguugggacccacuuau

SEQ ID NO: 1421187 - RNA, 19 nt, Artificial Sequence
  Description of Artificial Sequence: Synthetic oligonucleotide
  Antisense strand to SEQ ID NO: 1421186
auaagugggucccaacaca

SEQ ID NO: 1421188 - RNA, 19 nt, Artificial Sequence
  Description of Artificial Sequence: Synthetic oligonucleotide
  Sense strand starting at position 150 of SEQ ID NO: 1243514
guacuugggacuuguccca

SEQ ID NO: 1421189 - RNA, 19 nt, Artificial Sequence
  Description of Artificial Sequence: Synthetic oligonucleotide
  Antisense strand to SEQ ID NO: 1421188
ugggacaagucccaaguac

SEQ ID NO: 1421190 - RNA, 19 nt, Artificial Sequence
  Description of Artificial Sequence: Synthetic oligonucleotide
  Sense strand starting at position 374 of SEQ ID NO: 1243514
agaggugccaucuggacaa

SEQ ID NO: 1421191 - RNA, 19 nt, Artificial Sequence
  Description of Artificial Sequence: Synthetic oligonucleotide
  Antisense strand to SEQ ID NO: 1421190
uuguccagauggcaccucu

SEQ ID NO: 1421192 - RNA, 19 nt, Artificial Sequence
  Description of Artificial Sequence: Synthetic oligonucleotide
  Sense strand starting at position 376 of SEQ ID NO: 1243514
aggugccaucuggacaaau

SEQ ID NO: 1421193 - RNA, 19 nt, Artificial Sequence
  Description of Artificial Sequence: Synthetic oligonucleotide
  Antisense strand to SEQ ID NO: 1421192
auuuguccagauggcaccu

SEQ ID NO: 1421194 - RNA, 19 nt, Artificial Sequence
  Description of Artificial Sequence: Synthetic oligonucleotide
  Sense strand starting at position 563 of SEQ ID NO: 1243514
gcuagauaauggucuggag

SEQ ID NO: 1421195 - RNA, 19 nt, Artificial Sequence
  Description of Artificial Sequence: Synthetic oligonucleotide
  Antisense strand to SEQ ID NO: 1421194
cuccagaccauuaucuagc

SEQ ID NO: 1421196 - RNA, 19 nt, Artificial Sequence
  Description of Artificial Sequence: Synthetic oligonucleotide
  Sense strand starting at position 623 of SEQ ID NO: 1243514
cucugacacucuguuuaca

SEQ ID NO: 1421197 - RNA, 19 nt, Artificial Sequence
  Description of Artificial Sequence: Synthetic oligonucleotide
  Antisense strand to SEQ ID NO: 1421196
uguaaacagagugucagag

SEQ ID NO: 1421198 - RNA, 19 nt, Artificial Sequence
  Description of Artificial Sequence: Synthetic oligonucleotide
  Sense strand starting at position 625 of SEQ ID NO: 1243514
cugacacucuguuuacaga

SEQ ID NO: 1421199 - RNA, 19 nt, Artificial Sequence
  Description of Artificial Sequence: Synthetic oligonucleotide
  Antisense strand to SEQ ID NO: 1421198
ucuguaaacagagugucag

SEQ ID NO: 1421200 - RNA, 19 nt, Artificial Sequence
  Description of Artificial Sequence: Synthetic oligonucleotide
  Sense strand starting at position 950 of SEQ ID NO: 1243514
ucaccuguccuuggugcaa

SEQ ID NO: 1421201 - RNA, 19 nt, Artificial Sequence
  Description of Artificial Sequence: Synthetic oligonucleotide
  Antisense strand to SEQ ID NO: 1421200
uugcaccaaggacagguga

SEQ ID NO: 1421202 - RNA, 19 nt, Artificial Sequence
  Description of Artificial Sequence: Synthetic oligonucleotide
  Sense strand starting at position 1065 of SEQ ID NO: 1243514
ugguguggcaaucguuaac

SEQ ID NO: 1421203 - RNA, 19 nt, Artificial Sequence
  Description of Artificial Sequence: Synthetic oligonucleotide
  Antisense strand to SEQ ID NO: 1421202
guuaacgauugccacacca

SEQ ID NO: 1421204 - RNA, 19 nt, Artificial Sequence
  Description of Artificial Sequence: Synthetic oligonucleotide
  Sense strand starting at position 1068 of SEQ ID NO: 1243514
uguggcaaucguuaacgaa

SEQ ID NO: 1421205 - RNA, 19 nt, Artificial Sequence
  Description of Artificial Sequence: Synthetic oligonucleotide
  Antisense strand to SEQ ID NO: 1421204
uucguuaacgauugccaca

SEQ ID NO: 1421206 - RNA, 19 nt, Artificial Sequence
  Description of Artificial Sequence: Synthetic oligonucleotide
  Sense strand starting at position 1097 of SEQ ID NO: 1243514
gcagaaugguuggcaccaa

SEQ ID NO: 1421207 - RNA, 19 nt, Artificial Sequence
  Description of Artificial Sequence: Synthetic oligonucleotide
  Antisense strand to SEQ ID NO: 1421206
uuggugccaaccauucugc

SEQ ID NO: 1421208 - RNA, 19 nt, Artificial Sequence
  Description of Artificial Sequence: Synthetic oligonucleotide
  Sense strand starting at position 1393 of SEQ ID NO: 1243514
ccagcugugcuuugaguga

SEQ ID NO: 1421209 - RNA, 19 nt, Artificial Sequence
  Description of Artificial Sequence: Synthetic oligonucleotide
  Antisense strand to SEQ ID NO: 1421208
ucacucaaagcacagcugg

SEQ ID NO: 1421210 - RNA, 19 nt, Artificial Sequence
  Description of Artificial Sequence: Synthetic oligonucleotide
  Sense strand starting at position 1397 of SEQ ID NO: 1243514
cugugcuuugagugacaag

SEQ ID NO: 1421211 - RNA, 19 nt, Artificial Sequence
  Description of Artificial Sequence: Synthetic oligonucleotide
  Antisense strand to SEQ ID NO: 1421210
cuugucacucaaagcacag

SEQ ID NO: 1421212 - RNA, 19 nt, Artificial Sequence
  Description of Artificial Sequence: Synthetic oligonucleotide
  Sense strand starting at position 2015 of SEQ ID NO: 1243514
caggucgcgccuuaagagu

SEQ ID NO: 1421213 - RNA, 19 nt, Artificial Sequence
  Description of Artificial Sequence: Synthetic oligonucleotide
  Antisense strand to SEQ ID NO: 1421212
acucuuaaggcgcgaccug

SEQ ID NO: 1421214 - RNA, 19 nt, Artificial Sequence
  Description of Artificial Sequence: Synthetic oligonucleotide
  Sense strand starting at position 2196 of SEQ ID NO: 1243514
guggguuugccggaugaca

SEQ ID NO: 1421215 - RNA, 19 nt, Artificial Sequence
  Description of Artificial Sequence: Synthetic oligonucleotide
  Antisense strand to SEQ ID NO: 1421214
ugucauccggcaaacccac

SEQ ID NO: 1421216 - RNA, 19 nt, Artificial Sequence
  Description of Artificial Sequence: Synthetic oligonucleotide
  Sense strand starting at position 2198 of SEQ ID NO: 1243514
ggguuugccggaugacacu

SEQ ID NO: 1421217 - RNA, 19 nt, Artificial Sequence
  Description of Artificial Sequence: Synthetic oligonucleotide
  Antisense strand to SEQ ID NO: 1421216
agugucauccggcaaaccc

SEQ ID NO: 1421218 - RNA, 19 nt, Artificial Sequence
  Description of Artificial Sequence: Synthetic oligonucleotide
  Sense strand starting at position 2458 of SEQ ID NO: 1243514
ggugaaaucucucaaugug

SEQ ID NO: 1421219 - RNA, 19 nt, Artificial Sequence
  Description of Artificial Sequence: Synthetic oligonucleotide
  Antisense strand to SEQ ID NO: 1421218
cacauugagagauuucacc

SEQ ID NO: 1421220 - RNA, 19 nt, Artificial Sequence
  Description of Artificial Sequence: Synthetic oligonucleotide
  Sense strand starting at position 2474 of SEQ ID NO: 1243514
guguuauuguugguagcua

SEQ ID NO: 1421221 - RNA, 19 nt, Artificial Sequence
  Description of Artificial Sequence: Synthetic oligonucleotide
  Antisense strand to SEQ ID NO: 1421220
uagcuaccaacaauaacac

SEQ ID NO: 1421222 - RNA, 19 nt, Artificial Sequence
  Description of Artificial Sequence: Synthetic oligonucleotide
  Sense strand starting at position 2482 of SEQ ID NO: 1243514
guugguagcuaaucccaau

SEQ ID NO: 1421223 - RNA, 19 nt, Artificial Sequence
  Description of Artificial Sequence: Synthetic oligonucleotide
  Antisense strand to SEQ ID NO: 1421222
auugggauuagcuaccaac

SEQ ID NO: 1421224 - RNA, 19 nt, Artificial Sequence
  Description of Artificial Sequence: Synthetic oligonucleotide
  Sense strand starting at position 2536 of SEQ ID NO: 1243514
ucaagagccuccuaaguau

SEQ ID NO: 1421225 - RNA, 19 nt, Artificial Sequence
  Description of Artificial Sequence: Synthetic oligonucleotide
  Antisense strand to SEQ ID NO: 1421224
auacuuaggaggcucuuga

SEQ ID NO: 1421226 - RNA, 19 nt, Artificial Sequence
  Description of Artificial Sequence: Synthetic oligonucleotide
  Sense strand starting at position 2539 of SEQ ID NO: 1243514
agagccuccuaaguauaaa

SEQ ID NO: 1421227 - RNA, 19 nt, Artificial Sequence
  Description of Artificial Sequence: Synthetic oligonucleotide
  Antisense strand to SEQ ID NO: 1421226
uuuauacuuaggaggcucu

SEQ ID NO: 1421228 - RNA, 19 nt, Artificial Sequence
  Description of Artificial Sequence: Synthetic oligonucleotide
  Sense strand starting at position 2593 of SEQ ID NO: 1243514
ccacgacagccuuaagagu

SEQ ID NO: 1421229 - RNA, 19 nt, Artificial Sequence
  Description of Artificial Sequence: Synthetic oligonucleotide
  Antisense strand to SEQ ID NO: 1421228
acucuuaaggcugucgugg

SEQ ID NO: 1421230 - RNA, 19 nt, Artificial Sequence
  Description of Artificial Sequence: Synthetic oligonucleotide
  Sense strand starting at position 2637 of SEQ ID NO: 1243514
ccaccauauuaugagauga

SEQ ID NO: 1421231 - RNA, 19 nt, Artificial Sequence
  Description of Artificial Sequence: Synthetic oligonucleotide
  Antisense strand to SEQ ID NO: 1421230
ucaucucauaauauggugg

SEQ ID NO: 1421232 - RNA, 19 nt, Artificial Sequence
  Description of Artificial Sequence: Synthetic oligonucleotide
  Sense strand starting at position 2639 of SEQ ID NO: 1243514
accauauuaugagaugaag

SEQ ID NO: 1421233 - RNA, 19 nt, Artificial Sequence
  Description of Artificial Sequence: Synthetic oligonucleotide
  Antisense strand to SEQ ID NO: 1421232
cuucaucucauaauauggu

SEQ ID NO: 1421234 - RNA, 19 nt, Artificial Sequence
  Description of Artificial Sequence: Synthetic oligonucleotide
  Sense strand starting at position 2849 of SEQ ID NO: 1243514
cuuggaggauuccaggaaa

SEQ ID NO: 1421235 - RNA, 19 nt, Artificial Sequence
  Description of Artificial Sequence: Synthetic oligonucleotide
  Antisense strand to SEQ ID NO: 1421234
uuuccuggaauccuccaag

SEQ ID NO: 1421236 - RNA, 19 nt, Artificial Sequence
  Description of Artificial Sequence: Synthetic oligonucleotide
  Sense strand starting at position 2891 of SEQ ID NO: 1243514
gcguuuguggucagucaug

SEQ ID NO: 1421237 - RNA, 19 nt, Artificial Sequence
  Description of Artificial Sequence: Synthetic oligonucleotide
  Antisense strand to SEQ ID NO: 1421236
caugacugaccacaaacgc

SEQ ID NO: 1421238 - RNA, 19 nt, Artificial Sequence
  Description of Artificial Sequence: Synthetic oligonucleotide
  Sense strand starting at position 3039 of SEQ ID NO: 1243514
ggcuuaucccugggaggcu

SEQ ID NO: 1421239 - RNA, 19 nt, Artificial Sequence
  Description of Artificial Sequence: Synthetic oligonucleotide
  Antisense strand to SEQ ID NO: 1421238
agccucccagggauaagcc

SEQ ID NO: 1421240 - RNA, 19 nt, Artificial Sequence
  Description of Artificial Sequence: Synthetic oligonucleotide
  Sense strand starting at position 3078 of SEQ ID NO: 1243514
uuuccuagucucuggagga

SEQ ID NO: 1421241 - RNA, 19 nt, Artificial Sequence
  Description of Artificial Sequence: Synthetic oligonucleotide
  Antisense strand to SEQ ID NO: 1421240
uccuccagagacuaggaaa

SEQ ID NO: 1421242 - RNA, 19 nt, Artificial Sequence
  Description of Artificial Sequence: Synthetic oligonucleotide
  Sense strand starting at position 3094 of SEQ ID NO: 1243514
ggacucaguuaucuccaga

SEQ ID NO: 1421243 - RNA, 19 nt, Artificial Sequence
  Description of Artificial Sequence: Synthetic oligonucleotide
  Antisense strand to SEQ ID NO: 1421242
ucuggagauaacugagucc

SEQ ID NO: 1421244 - RNA, 19 nt, Artificial Sequence
  Description of Artificial Sequence: Synthetic oligonucleotide
  Sense strand starting at position 3099 of SEQ ID NO: 1243514
caguuaucuccagaaggca

SEQ ID NO: 1421245 - RNA, 19 nt, Artificial Sequence
  Description of Artificial Sequence: Synthetic oligonucleotide
  Antisense strand to SEQ ID NO: 1421244
ugccuucuggagauaacug

SEQ ID NO: 1421246 - RNA, 19 nt, Artificial Sequence
  Description of Artificial Sequence: Synthetic oligonucleotide
  Sense strand starting at position 3125 of SEQ ID NO: 1243514
cucugugucuagccgucaa

SEQ ID NO: 1421247 - RNA, 19 nt, Artificial Sequence
  Description of Artificial Sequence: Synthetic oligonucleotide
  Antisense strand to SEQ ID NO: 1421246
uugacggcuagacacagag

SEQ ID NO: 1421248 - RNA, 19 nt, Artificial Sequence
  Description of Artificial Sequence: Synthetic oligonucleotide
  Sense strand starting at position 3248 of SEQ ID NO: 1243514
auacguuucucggucuaca

SEQ ID NO: 1421249 - RNA, 19 nt, Artificial Sequence
  Description of Artificial Sequence: Synthetic oligonucleotide
  Antisense strand to SEQ ID NO: 1421248
uguagaccgagaaacguau

SEQ ID NO: 1421250 - RNA, 19 nt, Artificial Sequence
  Description of Artificial Sequence: Synthetic oligonucleotide
  Sense strand starting at position 3323 of SEQ ID NO: 1243514
gcauuuagugcaggcuuua

SEQ ID NO: 1421251 - RNA, 19 nt, Artificial Sequence
  Description of Artificial Sequence: Synthetic oligonucleotide
  Antisense strand to SEQ ID NO: 1421250
uaaagccugcacuaaaugc

SEQ ID NO: 1421252 - RNA, 19 nt, Artificial Sequence
  Description of Artificial Sequence: Synthetic oligonucleotide
  Sense strand starting at position 3332 of SEQ ID NO: 1243514
gcaggcuuuaugggaguuu

SEQ ID NO: 1421253 - RNA, 19 nt, Artificial Sequence
  Description of Artificial Sequence: Synthetic oligonucleotide
  Antisense strand to SEQ ID NO: 1421252
aaacucccauaaagccugc

SEQ ID NO: 1421254 - RNA, 19 nt, Artificial Sequence
  Description of Artificial Sequence: Synthetic oligonucleotide
  Sense strand starting at position 3458 of SEQ ID NO: 1243514
gguugcucccucugccaaa

SEQ ID NO: 1421255 - RNA, 19 nt, Artificial Sequence
  Description of Artificial Sequence: Synthetic oligonucleotide
  Antisense strand to SEQ ID NO: 1421254
uuuggcagagggagcaacc

SEQ ID NO: 1421256 - RNA, 19 nt, Artificial Sequence
  Description of Artificial Sequence: Synthetic oligonucleotide
  Sense strand starting at position 3713 of SEQ ID NO: 1243514
ccuggcuuuccucaaggaa

SEQ ID NO: 1421257 - RNA, 19 nt, Artificial Sequence
  Description of Artificial Sequence: Synthetic oligonucleotide
  Antisense strand to SEQ ID NO: 1421256
uuccuugaggaaagccagg

SEQ ID NO: 1421258 - RNA, 19 nt, Artificial Sequence
  Description of Artificial Sequence: Synthetic oligonucleotide
  Sense strand starting at position 3739 of SEQ ID NO: 1243514
uccugauguccuugaagcu

SEQ ID NO: 1421259 - RNA, 19 nt, Artificial Sequence
  Description of Artificial Sequence: Synthetic oligonucleotide
  Antisense strand to SEQ ID NO: 1421258
agcuucaaggacaucagga

SEQ ID NO: 1421260 - RNA, 19 nt, Artificial Sequence
  Description of Artificial Sequence: Synthetic oligonucleotide
  Sense strand starting at position 3740 of SEQ ID NO: 1243514
ccugauguccuugaagcuu

SEQ ID NO: 1421261 - RNA, 19 nt, Artificial Sequence
  Description of Artificial Sequence: Synthetic oligonucleotide
  Antisense strand to SEQ ID NO: 1421260
aagcuucaaggacaucagg

SEQ ID NO: 1421262 - RNA, 19 nt, Artificial Sequence
  Description of Artificial Sequence: Synthetic oligonucleotide
  Sense strand starting at position 3771 of SEQ ID NO: 1243514
gcagguucuuguagacgga

SEQ ID NO: 1421263 - RNA, 19 nt, Artificial Sequence
  Description of Artificial Sequence: Synthetic oligonucleotide
  Antisense strand to SEQ ID NO: 1421262
uccgucuacaagaaccugc

SEQ ID NO: 1421264 - RNA, 19 nt, Artificial Sequence
  Description of Artificial Sequence: Synthetic oligonucleotide
  Sense strand starting at position 3775 of SEQ ID NO: 1243514
guucuuguagacggagaga

SEQ ID NO: 1421265 - RNA, 19 nt, Artificial Sequence
  Description of Artificial Sequence: Synthetic oligonucleotide
  Antisense strand to SEQ ID NO: 1421264
ucucuccgucuacaagaac

SEQ ID NO: 1421266 - RNA, 19 nt, Artificial Sequence
  Description of Artificial Sequence: Synthetic oligonucleotide
  Sense strand starting at position 205 of SEQ ID NO: 1243515
ugcgaaagggcagauauaa

SEQ ID NO: 1421267 - RNA, 19 nt, Artificial Sequence
  Description of Artificial Sequence: Synthetic oligonucleotide
  Antisense strand to SEQ ID NO: 1421266
uuauaucugcccuuucgca

SEQ ID NO: 1421268 - RNA, 19 nt, Artificial Sequence
  Description of Artificial Sequence: Synthetic oligonucleotide
  Sense strand starting at position 260 of SEQ ID NO: 1243515
gaguuuauuguacaggauc

SEQ ID NO: 1421269 - RNA, 19 nt, Artificial Sequence
  Description of Artificial Sequence: Synthetic oligonucleotide
  Antisense strand to SEQ ID NO: 1421268
gauccuguacaauaaacuc

SEQ ID NO: 1421270 - RNA, 19 nt, Artificial Sequence
  Description of Artificial Sequence: Synthetic oligonucleotide
  Sense strand starting at position 354 of SEQ ID NO: 1243515
ugaccagcugcauauauga

SEQ ID NO: 1421271 - RNA, 19 nt, Artificial Sequence
  Description of Artificial Sequence: Synthetic oligonucleotide
  Antisense strand to SEQ ID NO: 1421270
ucauauaugcagcugguca

SEQ ID NO: 1421272 - RNA, 19 nt, Artificial Sequence
  Description of Artificial Sequence: Synthetic oligonucleotide
  Sense strand starting at position 416 of SEQ ID NO: 1243515
uucuaaucuggccgaugaa

SEQ ID NO: 1421273 - RNA, 19 nt, Artificial Sequence
  Description of Artificial Sequence: Synthetic oligonucleotide
  Antisense strand to SEQ ID NO: 1421272
uucaucggccagauuagaa

SEQ ID NO: 1421274 - RNA, 19 nt, Artificial Sequence
  Description of Artificial Sequence: Synthetic oligonucleotide
  Sense strand starting at position 417 of SEQ ID NO: 1243515
ucuaaucuggccgaugaaa

SEQ ID NO: 1421275 - RNA, 19 nt, Artificial Sequence
  Description of Artificial Sequence: Synthetic oligonucleotide
  Antisense strand to SEQ ID NO: 1421274
uuucaucggccagauuaga

SEQ ID NO: 1421276 - RNA, 19 nt, Artificial Sequence
  Description of Artificial Sequence: Synthetic oligonucleotide
  Sense strand starting at position 468 of SEQ ID NO: 1243515
gggacccucguuuguauuu

SEQ ID NO: 1421277 - RNA, 19 nt, Artificial Sequence
  Description of Artificial Sequence: Synthetic oligonucleotide
  Antisense strand to SEQ ID NO: 1421276
aaauacaaacgaggguccc

SEQ ID NO: 1421278 - RNA, 19 nt, Artificial Sequence
  Description of Artificial Sequence: Synthetic oligonucleotide
  Sense strand starting at position 482 of SEQ ID NO: 1243515
uauuucucgugccucuaga

SEQ ID NO: 1421279 - RNA, 19 nt, Artificial Sequence
  Description of Artificial Sequence: Synthetic oligonucleotide
  Antisense strand to SEQ ID NO: 1421278
ucuagaggcacgagaaaua

SEQ ID NO: 1421280 - RNA, 19 nt, Artificial Sequence
  Description of Artificial Sequence: Synthetic oligonucleotide
  Sense strand starting at position 509 of SEQ ID NO: 1243515
gauauuggguuucugaucu

SEQ ID NO: 1421281 - RNA, 19 nt, Artificial Sequence
  Description of Artificial Sequence: Synthetic oligonucleotide
  Antisense strand to SEQ ID NO: 1421280
agaucagaaacccaauauc

SEQ ID NO: 1421282 - RNA, 19 nt, Artificial Sequence
  Description of Artificial Sequence: Synthetic oligonucleotide
  Sense strand starting at position 610 of SEQ ID NO: 1243515
gcucgucucaccgugauua

SEQ ID NO: 1421283 - RNA, 19 nt, Artificial Sequence
  Description of Artificial Sequence: Synthetic oligonucleotide
  Antisense strand to SEQ ID NO: 1421282
uaaucacggugagacgagc

SEQ ID NO: 1421284 - RNA, 19 nt, Artificial Sequence
  Description of Artificial Sequence: Synthetic oligonucleotide
  Sense strand starting at position 1147 of SEQ ID NO: 1243515
cugacugaucuugggcaaa

SEQ ID NO: 1421285 - RNA, 19 nt, Artificial Sequence
  Description of Artificial Sequence: Synthetic oligonucleotide
  Antisense strand to SEQ ID NO: 1421284
uuugcccaagaucagucag

SEQ ID NO: 1421286 - RNA, 19 nt, Artificial Sequence
  Description of Artificial Sequence: Synthetic oligonucleotide
  Sense strand starting at position 1149 of SEQ ID NO: 1243515
gacugaucuugggcaaauc

SEQ ID NO: 1421287 - RNA, 19 nt, Artificial Sequence
  Description of Artificial Sequence: Synthetic oligonucleotide
  Antisense strand to SEQ ID NO: 1421286
gauuugcccaagaucaguc

SEQ ID NO: 1421288 - RNA, 19 nt, Artificial Sequence
  Description of Artificial Sequence: Synthetic oligonucleotide
  Sense strand starting at position 1214 of SEQ ID NO: 1243515
gauggcaccugacucauua

SEQ ID NO: 1421289 - RNA, 19 nt, Artificial Sequence
  Description of Artificial Sequence: Synthetic oligonucleotide
  Antisense strand to SEQ ID NO: 1421288
uaaugagucaggugccauc

SEQ ID NO: 1421290 - RNA, 19 nt, Artificial Sequence
  Description of Artificial Sequence: Synthetic oligonucleotide
  Sense strand starting at position 1294 of SEQ ID NO: 1243515
gugggcuugcgguucuuaa

SEQ ID NO: 1421291 - RNA, 19 nt, Artificial Sequence
  Description of Artificial Sequence: Synthetic oligonucleotide
  Antisense strand to SEQ ID NO: 1421290
uuaagaaccgcaagcccac

SEQ ID NO: 1421292 - RNA, 19 nt, Artificial Sequence
  Description of Artificial Sequence: Synthetic oligonucleotide
  Sense strand starting at position 1351 of SEQ ID NO: 1243515
gugcgaaagcugaguuguc

SEQ ID NO: 1421293 - RNA, 19 nt, Artificial Sequence
  Description of Artificial Sequence: Synthetic oligonucleotide
  Antisense strand to SEQ ID NO: 1421292
gacaacucagcuuucgcac

SEQ ID NO: 1421294 - RNA, 19 nt, Artificial Sequence
  Description of Artificial Sequence: Synthetic oligonucleotide
  Sense strand starting at position 2005 of SEQ ID NO: 1243515
ggaugcucggcugugcaau

SEQ ID NO: 1421295 - RNA, 19 nt, Artificial Sequence
  Description of Artificial Sequence: Synthetic oligonucleotide
  Antisense strand to SEQ ID NO: 1421294
auugcacagccgagcaucc

SEQ ID NO: 1421296 - RNA, 19 nt, Artificial Sequence
  Description of Artificial Sequence: Synthetic oligonucleotide
  Sense strand starting at position 2232 of SEQ ID NO: 1243515
gagagaccacccugucauc

SEQ ID NO: 1421297 - RNA, 19 nt, Artificial Sequence
  Description of Artificial Sequence: Synthetic oligonucleotide
  Antisense strand to SEQ ID NO: 1421296
gaugacaggguggucucuc

SEQ ID NO: 1421298 - RNA, 19 nt, Artificial Sequence
  Description of Artificial Sequence: Synthetic oligonucleotide
  Sense strand starting at position 2265 of SEQ ID NO: 1243515
cccaguacuugguuauaua

SEQ ID NO: 1421299 - RNA, 19 nt, Artificial Sequence
  Description of Artificial Sequence: Synthetic oligonucleotide
  Antisense strand to SEQ ID NO: 1421298
uauauaaccaaguacuggg

SEQ ID NO: 1421300 - RNA, 19 nt, Artificial Sequence
  Description of Artificial Sequence: Synthetic oligonucleotide
  Sense strand starting at position 2266 of SEQ ID NO: 1243515
ccaguacuugguuauauac

SEQ ID NO: 1421301 - RNA, 19 nt, Artificial Sequence
  Description of Artificial Sequence: Synthetic oligonucleotide
  Antisense strand to SEQ ID NO: 1421300
guauauaaccaaguacugg

SEQ ID NO: 1421302 - RNA, 19 nt, Artificial Sequence
  Description of Artificial Sequence: Synthetic oligonucleotide
  Sense strand starting at position 2302 of SEQ ID NO: 1243515
cuugaaauggaccgagacu

SEQ ID NO: 1421303 - RNA, 19 nt, Artificial Sequence
  Description of Artificial Sequence: Synthetic oligonucleotide
  Antisense strand to SEQ ID NO: 1421302
agucucgguccauuucaag

SEQ ID NO: 1421304 - RNA, 19 nt, Artificial Sequence
  Description of Artificial Sequence: Synthetic oligonucleotide
  Sense strand starting at position 2391 of SEQ ID NO: 1243515
cgggauagucgggaaauug

SEQ ID NO: 1421305 - RNA, 19 nt, Artificial Sequence
  Description of Artificial Sequence: Synthetic oligonucleotide
  Antisense strand to SEQ ID NO: 1421304
caauuucccgacuaucccg

SEQ ID NO: 1421306 - RNA, 19 nt, Artificial Sequence
  Description of Artificial Sequence: Synthetic oligonucleotide
  Sense strand starting at position 2749 of SEQ ID NO: 1243515
uuaucaggcucuuugagaa

SEQ ID NO: 1421307 - RNA, 19 nt, Artificial Sequence
  Description of Artificial Sequence: Synthetic oligonucleotide
  Antisense strand to SEQ ID NO: 1421306
uucucaaagagccugauaa

SEQ ID NO: 1421308 - RNA, 19 nt, Artificial Sequence
  Description of Artificial Sequence: Synthetic oligonucleotide
  Sense strand starting at position 2786 of SEQ ID NO: 1243515
cuuggaauuucugaaauaa

SEQ ID NO: 1421309 - RNA, 19 nt, Artificial Sequence
  Description of Artificial Sequence: Synthetic oligonucleotide
  Antisense strand to SEQ ID NO: 1421308
uuauuucagaaauuccaag

SEQ ID NO: 1421310 - RNA, 19 nt, Artificial Sequence
  Description of Artificial Sequence: Synthetic oligonucleotide
  Sense strand starting at position 2864 of SEQ ID NO: 1243515
gaaguaggucuauauucua

SEQ ID NO: 1421311 - RNA, 19 nt, Artificial Sequence
  Description of Artificial Sequence: Synthetic oligonucleotide
  Antisense strand to SEQ ID NO: 1421310
uagaauauagaccuacuuc

SEQ ID NO: 1421312 - RNA, 19 nt, Artificial Sequence
  Description of Artificial Sequence: Synthetic oligonucleotide
  Sense strand starting at position 2867 of SEQ ID NO: 1243515
guaggucuauauucuauua

SEQ ID NO: 1421313 - RNA, 19 nt, Artificial Sequence
  Description of Artificial Sequence: Synthetic oligonucleotide
  Antisense strand to SEQ ID NO: 1421312
uaauagaauauagaccuac

SEQ ID NO: 1421314 - RNA, 19 nt, Artificial Sequence
  Description of Artificial Sequence: Synthetic oligonucleotide
  Sense strand starting at position 2907 of SEQ ID NO: 1243515
ccuugagaucuugggcaac

SEQ ID NO: 1421315 - RNA, 19 nt, Artificial Sequence
  Description of Artificial Sequence: Synthetic oligonucleotide
  Antisense strand to SEQ ID NO: 1421314
guugcccaagaucucaagg

SEQ ID NO: 1421316 - RNA, 19 nt, Artificial Sequence
  Description of Artificial Sequence: Synthetic oligonucleotide
  Sense strand starting at position 2958 of SEQ ID NO: 1243515
ucuauaaauuggguacauu

SEQ ID NO: 1421317 - RNA, 19 nt, Artificial Sequence
  Description of Artificial Sequence: Synthetic oligonucleotide
  Antisense strand to SEQ ID NO: 1421316
aauguacccaauuuauaga

SEQ ID NO: 1421318 - RNA, 19 nt, Artificial Sequence
  Description of Artificial Sequence: Synthetic oligonucleotide
  Sense strand starting at position 3027 of SEQ ID NO: 1243515
gagacaugguccuuauauu

SEQ ID NO: 1421319 - RNA, 19 nt, Artificial Sequence
  Description of Artificial Sequence: Synthetic oligonucleotide
  Antisense strand to SEQ ID NO: 1421318
aauauaaggaccaugucuc

SEQ ID NO: 1421320 - RNA, 19 nt, Artificial Sequence
  Description of Artificial Sequence: Synthetic oligonucleotide
  Sense strand starting at position 3097 of SEQ ID NO: 1243515
ugguacaaugaaugaugua

SEQ ID NO: 1421321 - RNA, 19 nt, Artificial Sequence
  Description of Artificial Sequence: Synthetic oligonucleotide
  Antisense strand to SEQ ID NO: 1421320
uacaucauucauuguacca

SEQ ID NO: 1421322 - RNA, 19 nt, Artificial Sequence
  Description of Artificial Sequence: Synthetic oligonucleotide
  Sense strand starting at position 3365 of SEQ ID NO: 1243515
gguguccucccugacuaua

SEQ ID NO: 1421323 - RNA, 19 nt, Artificial Sequence
  Description of Artificial Sequence: Synthetic oligonucleotide
  Antisense strand to SEQ ID NO: 1421322
uauagucagggaggacacc

SEQ ID NO: 1421324 - RNA, 19 nt, Artificial Sequence
  Description of Artificial Sequence: Synthetic oligonucleotide
  Sense strand starting at position 3367 of SEQ ID NO: 1243515
uguccucccugacuauaga

SEQ ID NO: 1421325 - RNA, 19 nt, Artificial Sequence
  Description of Artificial Sequence: Synthetic oligonucleotide
  Antisense strand to SEQ ID NO: 1421324
ucuauagucagggaggaca

SEQ ID NO: 1421326 - RNA, 19 nt, Artificial Sequence
  Description of Artificial Sequence: Synthetic oligonucleotide
  Sense strand starting at position 3460 of SEQ ID NO: 1243515
ucaugugagcaggagcuau

SEQ ID NO: 1421327 - RNA, 19 nt, Artificial Sequence
  Description of Artificial Sequence: Synthetic oligonucleotide
  Antisense strand to SEQ ID NO: 1421326
auagcuccugcucacauga

SEQ ID NO: 1421328 - RNA, 19 nt, Artificial Sequence
  Description of Artificial Sequence: Synthetic oligonucleotide
  Sense strand starting at position 3509 of SEQ ID NO: 1243515
ggcuuaauacaugauuggu

SEQ ID NO: 1421329 - RNA, 19 nt, Artificial Sequence
  Description of Artificial Sequence: Synthetic oligonucleotide
  Antisense strand to SEQ ID NO: 1421328
accaaucauguauuaagcc

SEQ ID NO: 1421330 - RNA, 19 nt, Artificial Sequence
  Description of Artificial Sequence: Synthetic oligonucleotide
  Sense strand starting at position 3512 of SEQ ID NO: 1243515
uuaauacaugauugguaca

SEQ ID NO: 1421331 - RNA, 19 nt, Artificial Sequence
  Description of Artificial Sequence: Synthetic oligonucleotide
  Antisense strand to SEQ ID NO: 1421330
uguaccaaucauguauuaa

SEQ ID NO: 1421332 - RNA, 19 nt, Artificial Sequence
  Description of Artificial Sequence: Synthetic oligonucleotide
  Sense strand starting at position 3610 of SEQ ID NO: 1243515
ugggcuagaccuugaagga

SEQ ID NO: 1421333 - RNA, 19 nt, Artificial Sequence
  Description of Artificial Sequence: Synthetic oligonucleotide
  Antisense strand to SEQ ID NO: 1421332
uccuucaaggucuagccca

SEQ ID NO: 1421334 - RNA, 19 nt, Artificial Sequence
  Description of Artificial Sequence: Synthetic oligonucleotide
  Sense strand starting at position 3719 of SEQ ID NO: 1243515
guucuauguaggcagaaca

SEQ ID NO: 1421335 - RNA, 19 nt, Artificial Sequence
  Description of Artificial Sequence: Synthetic oligonucleotide
  Antisense strand to SEQ ID NO: 1421334
uguucugccuacauagaac

SEQ ID NO: 1421336 - RNA, 19 nt, Artificial Sequence
  Description of Artificial Sequence: Synthetic oligonucleotide
  Sense strand starting at position 3747 of SEQ ID NO: 1243515
uuuagcaaucauuggagau

SEQ ID NO: 1421337 - RNA, 19 nt, Artificial Sequence
  Description of Artificial Sequence: Synthetic oligonucleotide
  Antisense strand to SEQ ID NO: 1421336
aucuccaaugauugcuaaa

SEQ ID NO: 1421338 - RNA, 19 nt, Artificial Sequence
  Description of Artificial Sequence: Synthetic oligonucleotide
  Sense strand starting at position 3748 of SEQ ID NO: 1243515
uuagcaaucauuggagaug

SEQ ID NO: 1421339 - RNA, 19 nt, Artificial Sequence
  Description of Artificial Sequence: Synthetic oligonucleotide
  Antisense strand to SEQ ID NO: 1421338
caucuccaaugauugcuaa

SEQ ID NO: 1421340 - RNA, 19 nt, Artificial Sequence
  Description of Artificial Sequence: Synthetic oligonucleotide
  Sense strand starting at position 3803 of SEQ ID NO: 1243515
ucucacauaccagguuaua

SEQ ID NO: 1421341 - RNA, 19 nt, Artificial Sequence
  Description of Artificial Sequence: Synthetic oligonucleotide
  Antisense strand to SEQ ID NO: 1421340
uauaaccugguaugugaga

SEQ ID NO: 1421342 - RNA, 19 nt, Artificial Sequence
  Description of Artificial Sequence: Synthetic oligonucleotide
  Sense strand starting at position 3911 of SEQ ID NO: 1243515
ggauaauaacuuugacagu

SEQ ID NO: 1421343 - RNA, 19 nt, Artificial Sequence
  Description of Artificial Sequence: Synthetic oligonucleotide
  Antisense strand to SEQ ID NO: 1421342
acugucaaaguuauuaucc

SEQ ID NO: 1421344 - RNA, 19 nt, Artificial Sequence
  Description of Artificial Sequence: Synthetic oligonucleotide
  Sense strand starting at position 3926 of SEQ ID NO: 1243515
caguaagugggugauggau

SEQ ID NO: 1421345 - RNA, 19 nt, Artificial Sequence
  Description of Artificial Sequence: Synthetic oligonucleotide
  Antisense strand to SEQ ID NO: 1421344
auccaucacccacuuacug

SEQ ID NO: 1421346 - RNA, 19 nt, Artificial Sequence
  Description of Artificial Sequence: Synthetic oligonucleotide
  Sense strand starting at position 131 of SEQ ID NO: 1243516
gaccuaggaugucuuuaag

SEQ ID NO: 1421347 - RNA, 19 nt, Artificial Sequence
  Description of Artificial Sequence: Synthetic oligonucleotide
  Antisense strand to SEQ ID NO: 1421346
cuuaaagacauccuagguc

SEQ ID NO: 1421348 - RNA, 19 nt, Artificial Sequence
  Description of Artificial Sequence: Synthetic oligonucleotide
  Sense strand starting at position 251 of SEQ ID NO: 1243516
ggcugucagcuguguggau

SEQ ID NO: 1421349 - RNA, 19 nt, Artificial Sequence
  Description of Artificial Sequence: Synthetic oligonucleotide
  Antisense strand to SEQ ID NO: 1421348
auccacacagcugacagcc

SEQ ID NO: 1421350 - RNA, 19 nt, Artificial Sequence
  Description of Artificial Sequence: Synthetic oligonucleotide
  Sense strand starting at position 260 of SEQ ID NO: 1243516
cuguguggaucaccaagau

SEQ ID NO: 1421351 - RNA, 19 nt, Artificial Sequence
  Description of Artificial Sequence: Synthetic oligonucleotide
  Antisense strand to SEQ ID NO: 1421350
aucuuggugauccacacag

SEQ ID NO: 1421352 - RNA, 19 nt, Artificial Sequence
  Description of Artificial Sequence: Synthetic oligonucleotide
  Sense strand starting at position 363 of SEQ ID NO: 1243516
auagcuguaguguguagaa

SEQ ID NO: 1421353 - RNA, 19 nt, Artificial Sequence
  Description of Artificial Sequence: Synthetic oligonucleotide
  Antisense strand to SEQ ID NO: 1421352
uucuacacacuacagcuau

SEQ ID NO: 1421354 - RNA, 19 nt, Artificial Sequence
  Description of Artificial Sequence: Synthetic oligonucleotide
  Sense strand starting at position 365 of SEQ ID NO: 1243516
agcuguaguguguagaaga

SEQ ID NO: 1421355 - RNA, 19 nt, Artificial Sequence
  Description of Artificial Sequence: Synthetic oligonucleotide
  Antisense strand to SEQ ID NO: 1421354
ucuucuacacacuacagcu

SEQ ID NO: 1421356 - RNA, 19 nt, Artificial Sequence
  Description of Artificial Sequence: Synthetic oligonucleotide
  Sense strand starting at position 366 of SEQ ID NO: 1243516
gcuguaguguguagaagau

SEQ ID NO: 1421357 - RNA, 19 nt, Artificial Sequence
  Description of Artificial Sequence: Synthetic oligonucleotide
  Antisense strand to SEQ ID NO: 1421356
aucuucuacacacuacagc

SEQ ID NO: 1421358 - RNA, 19 nt, Artificial Sequence
  Description of Artificial Sequence: Synthetic oligonucleotide
  Sense strand starting at position 390 of SEQ ID NO: 1243516
cgaauaugcuguuggauug

SEQ ID NO: 1421359 - RNA, 19 nt, Artificial Sequence
  Description of Artificial Sequence: Synthetic oligonucleotide
  Antisense strand to SEQ ID NO: 1421358
caauccaacagcauauucg

SEQ ID NO: 1421360 - RNA, 19 nt, Artificial Sequence
  Description of Artificial Sequence: Synthetic oligonucleotide
  Sense strand starting at position 391 of SEQ ID NO: 1243516
gaauaugcuguuggauuga

SEQ ID NO: 1421361 - RNA, 19 nt, Artificial Sequence
  Description of Artificial Sequence: Synthetic oligonucleotide
  Antisense strand to SEQ ID NO: 1421360
ucaauccaacagcauauuc

SEQ ID NO: 1421362 - RNA, 19 nt, Artificial Sequence
  Description of Artificial Sequence: Synthetic oligonucleotide
  Sense strand starting at position 537 of SEQ ID NO: 1243516
aaaggugauuuccaagaag

SEQ ID NO: 1421363 - RNA, 19 nt, Artificial Sequence
  Description of Artificial Sequence: Synthetic oligonucleotide
  Antisense strand to SEQ ID NO: 1421362
cuucuuggaaaucaccuuu

SEQ ID NO: 1421364 - RNA, 19 nt, Artificial Sequence
  Description of Artificial Sequence: Synthetic oligonucleotide
  Sense strand starting at position 900 of SEQ ID NO: 1243516
cgccauagcgcccgauuaa

SEQ ID NO: 1421365 - RNA, 19 nt, Artificial Sequence
  Description of Artificial Sequence: Synthetic oligonucleotide
  Antisense strand to SEQ ID NO: 1421364
uuaaucgggcgcuauggcg

SEQ ID NO: 1421366 - RNA, 19 nt, Artificial Sequence
  Description of Artificial Sequence: Synthetic oligonucleotide
  Sense strand starting at position 901 of SEQ ID NO: 1243516
gccauagcgcccgauuaau

SEQ ID NO: 1421367 - RNA, 19 nt, Artificial Sequence
  Description of Artificial Sequence: Synthetic oligonucleotide
  Antisense strand to SEQ ID NO: 1421366
auuaaucgggcgcuauggc

SEQ ID NO: 1421368 - RNA, 19 nt, Artificial Sequence
  Description of Artificial Sequence: Synthetic oligonucleotide
  Sense strand starting at position 1122 of SEQ ID NO: 1243516
ggcagauuaucuuugcccu

SEQ ID NO: 1421369 - RNA, 19 nt, Artificial Sequence
  Description of Artificial Sequence: Synthetic oligonucleotide
  Antisense strand to SEQ ID NO: 1421368
agggcaaagauaaucugcc

SEQ ID NO: 1421370 - RNA, 19 nt, Artificial Sequence
  Description of Artificial Sequence: Synthetic oligonucleotide
  Sense strand starting at position 1180 of SEQ ID NO: 1243516
uccucuguauuccgucauu

SEQ ID NO: 1421371 - RNA, 19 nt, Artificial Sequence
  Description of Artificial Sequence: Synthetic oligonucleotide
  Antisense strand to SEQ ID NO: 1421370
aaugacggaauacagagga

SEQ ID NO: 1421372 - RNA, 19 nt, Artificial Sequence
  Description of Artificial Sequence: Synthetic oligonucleotide
  Sense strand starting at position 1183 of SEQ ID NO: 1243516
ucuguauuccgucauuaug

SEQ ID NO: 1421373 - RNA, 19 nt, Artificial Sequence
  Description of Artificial Sequence: Synthetic oligonucleotide
  Antisense strand to SEQ ID NO: 1421372
cauaaugacggaauacaga

SEQ ID NO: 1421374 - RNA, 19 nt, Artificial Sequence
  Description of Artificial Sequence: Synthetic oligonucleotide
  Sense strand starting at position 1186 of SEQ ID NO: 1243516
guauuccgucauuaugcua

SEQ ID NO: 1421375 - RNA, 19 nt, Artificial Sequence
  Description of Artificial Sequence: Synthetic oligonucleotide
  Antisense strand to SEQ ID NO: 1421374
uagcauaaugacggaauac

SEQ ID NO: 1421376 - RNA, 19 nt, Artificial Sequence
  Description of Artificial Sequence: Synthetic oligonucleotide
  Sense strand starting at position 1336 of SEQ ID NO: 1243516
uuuccuggucaccguuauu

SEQ ID NO: 1421377 - RNA, 19 nt, Artificial Sequence
  Description of Artificial Sequence: Synthetic oligonucleotide
  Antisense strand to SEQ ID NO: 1421376
aauaacggugaccaggaaa

SEQ ID NO: 1421378 - RNA, 19 nt, Artificial Sequence
  Description of Artificial Sequence: Synthetic oligonucleotide
  Sense strand starting at position 1345 of SEQ ID NO: 1243516
caccguuauuccuuggcau

SEQ ID NO: 1421379 - RNA, 19 nt, Artificial Sequence
  Description of Artificial Sequence: Synthetic oligonucleotide
  Antisense strand to SEQ ID NO: 1421378
augccaaggaauaacggug

SEQ ID NO: 1421380 - RNA, 19 nt, Artificial Sequence
  Description of Artificial Sequence: Synthetic oligonucleotide
  Sense strand starting at position 1346 of SEQ ID NO: 1243516
accguuauuccuuggcauc

SEQ ID NO: 1421381 - RNA, 19 nt, Artificial Sequence
  Description of Artificial Sequence: Synthetic oligonucleotide
  Antisense strand to SEQ ID NO: 1421380
gaugccaaggaauaacggu

SEQ ID NO: 1421382 - RNA, 19 nt, Artificial Sequence
  Description of Artificial Sequence: Synthetic oligonucleotide
  Sense strand starting at position 1348 of SEQ ID NO: 1243516
cguuauuccuuggcaucca

SEQ ID NO: 1421383 - RNA, 19 nt, Artificial Sequence
  Description of Artificial Sequence: Synthetic oligonucleotide
  Antisense strand to SEQ ID NO: 1421382
uggaugccaaggaauaacg

SEQ ID NO: 1421384 - RNA, 19 nt, Artificial Sequence
  Description of Artificial Sequence: Synthetic oligonucleotide
  Sense strand starting at position 1349 of SEQ ID NO: 1243516
guuauuccuuggcauccaa

SEQ ID NO: 1421385 - RNA, 19 nt, Artificial Sequence
  Description of Artificial Sequence: Synthetic oligonucleotide
  Antisense strand to SEQ ID NO: 1421384
uuggaugccaaggaauaac

SEQ ID NO: 1421386 - RNA, 19 nt, Artificial Sequence
  Description of Artificial Sequence: Synthetic oligonucleotide
  Sense strand starting at position 1423 of SEQ ID NO: 1243516
cucgcacucuuauuucgaa

SEQ ID NO: 1421387 - RNA, 19 nt, Artificial Sequence
  Description of Artificial Sequence: Synthetic oligonucleotide
  Antisense strand to SEQ ID NO: 1421386
uucgaaauaagagugcgag

SEQ ID NO: 1421388 - RNA, 19 nt, Artificial Sequence
  Description of Artificial Sequence: Synthetic oligonucleotide
  Sense strand starting at position 1534 of SEQ ID NO: 1243516
ccagaauaaucaucuggca

SEQ ID NO: 1421389 - RNA, 19 nt, Artificial Sequence
  Description of Artificial Sequence: Synthetic oligonucleotide
  Antisense strand to SEQ ID NO: 1421388
ugccagaugauuauucugg

SEQ ID NO: 1421390 - RNA, 19 nt, Artificial Sequence
  Description of Artificial Sequence: Synthetic oligonucleotide
  Sense strand starting at position 1768 of SEQ ID NO: 1243516
ugcccauuaucuccagguu

SEQ ID NO: 1421391 - RNA, 19 nt, Artificial Sequence
  Description of Artificial Sequence: Synthetic oligonucleotide
  Antisense strand to SEQ ID NO: 1421390
aaccuggagauaaugggca

SEQ ID NO: 1421392 - RNA, 19 nt, Artificial Sequence
  Description of Artificial Sequence: Synthetic oligonucleotide
  Sense strand starting at position 1926 of SEQ ID NO: 1243516
uagucaagcgggcgaguua

SEQ ID NO: 1421393 - RNA, 19 nt, Artificial Sequence
  Description of Artificial Sequence: Synthetic oligonucleotide
  Antisense strand to SEQ ID NO: 1421392
uaacucgcccgcuugacua

SEQ ID NO: 1421394 - RNA, 19 nt, Artificial Sequence
  Description of Artificial Sequence: Synthetic oligonucleotide
  Sense strand starting at position 1955 of SEQ ID NO: 1243516
gaagaaugccgggacuagu

SEQ ID NO: 1421395 - RNA, 19 nt, Artificial Sequence
  Description of Artificial Sequence: Synthetic oligonucleotide
  Antisense strand to SEQ ID NO: 1421394
acuagucccggcauucuuc

SEQ ID NO: 1421396 - RNA, 19 nt, Artificial Sequence
  Description of Artificial Sequence: Synthetic oligonucleotide
  Sense strand starting at position 1966 of SEQ ID NO: 1243516
ggacuagugaagcggguaa

SEQ ID NO: 1421397 - RNA, 19 nt, Artificial Sequence
  Description of Artificial Sequence: Synthetic oligonucleotide
  Antisense strand to SEQ ID NO: 1421396
uuacccgcuucacuagucc

SEQ ID NO: 1421398 - RNA, 19 nt, Artificial Sequence
  Description of Artificial Sequence: Synthetic oligonucleotide
  Sense strand starting at position 2402 of SEQ ID NO: 1243516
guguuagugugguuaacag

SEQ ID NO: 1421399 - RNA, 19 nt, Artificial Sequence
  Description of Artificial Sequence: Synthetic oligonucleotide
  Antisense strand to SEQ ID NO: 1421398
cuguuaaccacacuaacac

SEQ ID NO: 1421400 - RNA, 19 nt, Artificial Sequence
  Description of Artificial Sequence: Synthetic oligonucleotide
  Sense strand starting at position 2436 of SEQ ID NO: 1243516
uaugccaaguccuguugua

SEQ ID NO: 1421401 - RNA, 19 nt, Artificial Sequence
  Description of Artificial Sequence: Synthetic oligonucleotide
  Antisense strand to SEQ ID NO: 1421400
uacaacaggacuuggcaua

SEQ ID NO: 1421402 - RNA, 19 nt, Artificial Sequence
  Description of Artificial Sequence: Synthetic oligonucleotide
  Sense strand starting at position 2441 of SEQ ID NO: 1243516
caaguccuguuguaagaau

SEQ ID NO: 1421403 - RNA, 19 nt, Artificial Sequence
  Description of Artificial Sequence: Synthetic oligonucleotide
  Antisense strand to SEQ ID NO: 1421402
auucuuacaacaggacuug

SEQ ID NO: 1421404 - RNA, 19 nt, Artificial Sequence
  Description of Artificial Sequence: Synthetic oligonucleotide
  Sense strand starting at position 2448 of SEQ ID NO: 1243516
uguuguaagaauugcagca

SEQ ID NO: 1421405 - RNA, 19 nt, Artificial Sequence
  Description of Artificial Sequence: Synthetic oligonucleotide
  Antisense strand to SEQ ID NO: 1421404
ugcugcaauucuuacaaca

SEQ ID NO: 1421406 - RNA, 19 nt, Artificial Sequence
  Description of Artificial Sequence: Synthetic oligonucleotide
  Sense strand starting at position 2745 of SEQ ID NO: 1243516
gucagucucuccuuuccaa

SEQ ID NO: 1421407 - RNA, 19 nt, Artificial Sequence
  Description of Artificial Sequence: Synthetic oligonucleotide
  Antisense strand to SEQ ID NO: 1421406
uuggaaaggagagacugac

SEQ ID NO: 1421408 - RNA, 19 nt, Artificial Sequence
  Description of Artificial Sequence: Synthetic oligonucleotide
  Sense strand starting at position 3431 of SEQ ID NO: 1243516
caggucuucucuugcuuga

SEQ ID NO: 1421409 - RNA, 19 nt, Artificial Sequence
  Description of Artificial Sequence: Synthetic oligonucleotide
  Antisense strand to SEQ ID NO: 1421408
ucaagcaagagaagaccug

SEQ ID NO: 1421410 - RNA, 19 nt, Artificial Sequence
  Description of Artificial Sequence: Synthetic oligonucleotide
  Sense strand starting at position 3500 of SEQ ID NO: 1243516
uccucuggcgucugugaua

SEQ ID NO: 1421411 - RNA, 19 nt, Artificial Sequence
  Description of Artificial Sequence: Synthetic oligonucleotide
  Antisense strand to SEQ ID NO: 1421410
uaucacagacgccagagga

SEQ ID NO: 1421412 - RNA, 19 nt, Artificial Sequence
  Description of Artificial Sequence: Synthetic oligonucleotide
  Sense strand starting at position 3503 of SEQ ID NO: 1243516
ucuggcgucugugauauuu

SEQ ID NO: 1421413 - RNA, 19 nt, Artificial Sequence
  Description of Artificial Sequence: Synthetic oligonucleotide
  Antisense strand to SEQ ID NO: 1421412
aaauaucacagacgccaga

SEQ ID NO: 1421414 - RNA, 19 nt, Artificial Sequence
  Description of Artificial Sequence: Synthetic oligonucleotide
  Sense strand starting at position 3573 of SEQ ID NO: 1243516
ucuucuagagaguguggua

SEQ ID NO: 1421415 - RNA, 19 nt, Artificial Sequence
  Description of Artificial Sequence: Synthetic oligonucleotide
  Antisense strand to SEQ ID NO: 1421414
uaccacacucucuagaaga

SEQ ID NO: 1421416 - RNA, 19 nt, Artificial Sequence
  Description of Artificial Sequence: Synthetic oligonucleotide
  Sense strand starting at position 3609 of SEQ ID NO: 1243516
caaagaugucccugcauga

SEQ ID NO: 1421417 - RNA, 19 nt, Artificial Sequence
  Description of Artificial Sequence: Synthetic oligonucleotide
  Antisense strand to SEQ ID NO: 1421416
ucaugcagggacaucuuug

SEQ ID NO: 1421418 - RNA, 19 nt, Artificial Sequence
  Description of Artificial Sequence: Synthetic oligonucleotide
  Sense strand starting at position 3622 of SEQ ID NO: 1243516
gcaugaaucccuggaacuu

SEQ ID NO: 1421419 - RNA, 19 nt, Artificial Sequence
  Description of Artificial Sequence: Synthetic oligonucleotide
  Antisense strand to SEQ ID NO: 1421418
aaguuccagggauucaugc

SEQ ID NO: 1421420 - RNA, 19 nt, Artificial Sequence
  Description of Artificial Sequence: Synthetic oligonucleotide
  Sense strand starting at position 3639 of SEQ ID NO: 1243516
uugugaauaugauagguua

SEQ ID NO: 1421421 - RNA, 19 nt, Artificial Sequence
  Description of Artificial Sequence: Synthetic oligonucleotide
  Antisense strand to SEQ ID NO: 1421420
uaaccuaucauauucacaa

SEQ ID NO: 1421422 - RNA, 19 nt, Artificial Sequence
  Description of Artificial Sequence: Synthetic oligonucleotide
  Sense strand starting at position 3641 of SEQ ID NO: 1243516
gugaauaugauagguuaaa

SEQ ID NO: 1421423 - RNA, 19 nt, Artificial Sequence
  Description of Artificial Sequence: Synthetic oligonucleotide
  Antisense strand to SEQ ID NO: 1421422
uuuaaccuaucauauucac

SEQ ID NO: 1421424 - RNA, 19 nt, Artificial Sequence
  Description of Artificial Sequence: Synthetic oligonucleotide
  Sense strand starting at position 3696 of SEQ ID NO: 1243516
gcugaccaaucuccugauu

SEQ ID NO: 1421425 - RNA, 19 nt, Artificial Sequence
  Description of Artificial Sequence: Synthetic oligonucleotide
  Antisense strand to SEQ ID NO: 1421424
aaucaggagauuggucagc

SEQ ID NO: 1421426 - RNA, 19 nt, Artificial Sequence
  Description of Artificial Sequence: Synthetic oligonucleotide
  Sense strand starting at position 154 of SEQ ID NO: 1243517
caagaauccucugauggag

SEQ ID NO: 1421427 - RNA, 19 nt, Artificial Sequence
  Description of Artificial Sequence: Synthetic oligonucleotide
  Antisense strand to SEQ ID NO: 1421426
cuccaucagaggauucuug

SEQ ID NO: 1421428 - RNA, 19 nt, Artificial Sequence
  Description of Artificial Sequence: Synthetic oligonucleotide
  Sense strand starting at position 212 of SEQ ID NO: 1243517
uucuuuccaccuggagaau

SEQ ID NO: 1421429 - RNA, 19 nt, Artificial Sequence
  Description of Artificial Sequence: Synthetic oligonucleotide
  Antisense strand to SEQ ID NO: 1421428
auucuccagguggaaagaa

SEQ ID NO: 1421430 - RNA, 19 nt, Artificial Sequence
  Description of Artificial Sequence: Synthetic oligonucleotide
  Sense strand starting at position 326 of SEQ ID NO: 1243517
cugaguugacaauguuagu

SEQ ID NO: 1421431 - RNA, 19 nt, Artificial Sequence
  Description of Artificial Sequence: Synthetic oligonucleotide
  Antisense strand to SEQ ID NO: 1421430
acuaacauugucaacucag

SEQ ID NO: 1421432 - RNA, 19 nt, Artificial Sequence
  Description of Artificial Sequence: Synthetic oligonucleotide
  Sense strand starting at position 369 of SEQ ID NO: 1243517
aguuaaguucuacaagcgu

SEQ ID NO: 1421433 - RNA, 19 nt, Artificial Sequence
  Description of Artificial Sequence: Synthetic oligonucleotide
  Antisense strand to SEQ ID NO: 1421432
acgcuuguagaacuuaacu

SEQ ID NO: 1421434 - RNA, 19 nt, Artificial Sequence
  Description of Artificial Sequence: Synthetic oligonucleotide
  Sense strand starting at position 404 of SEQ ID NO: 1243517
ucuuaaguucgacauuggu

SEQ ID NO: 1421435 - RNA, 19 nt, Artificial Sequence
  Description of Artificial Sequence: Synthetic oligonucleotide
  Antisense strand to SEQ ID NO: 1421434
accaaugucgaacuuaaga

SEQ ID NO: 1421436 - RNA, 19 nt, Artificial Sequence
  Description of Artificial Sequence: Synthetic oligonucleotide
  Sense strand starting at position 565 of SEQ ID NO: 1243517
aagcgagcugccuaaauua

SEQ ID NO: 1421437 - RNA, 19 nt, Artificial Sequence
  Description of Artificial Sequence: Synthetic oligonucleotide
  Antisense strand to SEQ ID NO: 1421436
uaauuuaggcagcucgcuu

SEQ ID NO: 1421438 - RNA, 19 nt, Artificial Sequence
  Description of Artificial Sequence: Synthetic oligonucleotide
  Sense strand starting at position 583 of SEQ ID NO: 1243517
auagacagugacugugaaa

SEQ ID NO: 1421439 - RNA, 19 nt, Artificial Sequence
  Description of Artificial Sequence: Synthetic oligonucleotide
  Antisense strand to SEQ ID NO: 1421438
uuucacagucacugucuau

SEQ ID NO: 1421440 - RNA, 19 nt, Artificial Sequence
  Description of Artificial Sequence: Synthetic oligonucleotide
  Sense strand starting at position 690 of SEQ ID NO: 1243517
aaagaaucggaguguguaa

SEQ ID NO: 1421441 - RNA, 19 nt, Artificial Sequence
  Description of Artificial Sequence: Synthetic oligonucleotide
  Antisense strand to SEQ ID NO: 1421440
uuacacacuccgauucuuu

SEQ ID NO: 1421442 - RNA, 19 nt, Artificial Sequence
  Description of Artificial Sequence: Synthetic oligonucleotide
  Sense strand starting at position 692 of SEQ ID NO: 1243517
agaaucggaguguguaaua

SEQ ID NO: 1421443 - RNA, 19 nt, Artificial Sequence
  Description of Artificial Sequence: Synthetic oligonucleotide
  Antisense strand to SEQ ID NO: 1421442
uauuacacacuccgauucu

SEQ ID NO: 1421444 - RNA, 19 nt, Artificial Sequence
  Description of Artificial Sequence: Synthetic oligonucleotide
  Sense strand starting at position 757 of SEQ ID NO: 1243517
uccauaaacgcuggaaaca

SEQ ID NO: 1421445 - RNA, 19 nt, Artificial Sequence
  Description of Artificial Sequence: Synthetic oligonucleotide
  Antisense strand to SEQ ID NO: 1421444
uguuuccagcguuuaugga

SEQ ID NO: 1421446 - RNA, 19 nt, Artificial Sequence
  Description of Artificial Sequence: Synthetic oligonucleotide
  Sense strand starting at position 861 of SEQ ID NO: 1243517
acggcaacacguuauauga

SEQ ID NO: 1421447 - RNA, 19 nt, Artificial Sequence
  Description of Artificial Sequence: Synthetic oligonucleotide
  Antisense strand to SEQ ID NO: 1421446
ucauauaacguguugccgu

SEQ ID NO: 1421448 - RNA, 19 nt, Artificial Sequence
  Description of Artificial Sequence: Synthetic oligonucleotide
  Sense strand starting at position 905 of SEQ ID NO: 1243517
ccuuucuggcauuaagaca

SEQ ID NO: 1421449 - RNA, 19 nt, Artificial Sequence
  Description of Artificial Sequence: Synthetic oligonucleotide
  Antisense strand to SEQ ID NO: 1421448
ugucuuaaugccagaaagg

SEQ ID NO: 1421450 - RNA, 19 nt, Artificial Sequence
  Description of Artificial Sequence: Synthetic oligonucleotide
  Sense strand starting at position 929 of SEQ ID NO: 1243517
agugaaaucuguuuccagg

SEQ ID NO: 1421451 - RNA, 19 nt, Artificial Sequence
  Description of Artificial Sequence: Synthetic oligonucleotide
  Antisense strand to SEQ ID NO: 1421450
ccuggaaacagauuucacu

SEQ ID NO: 1421452 - RNA, 19 nt, Artificial Sequence
  Description of Artificial Sequence: Synthetic oligonucleotide
  Sense strand starting at position 938 of SEQ ID NO: 1243517
uguuuccaggcuuacagau

SEQ ID NO: 1421453 - RNA, 19 nt, Artificial Sequence
  Description of Artificial Sequence: Synthetic oligonucleotide
  Antisense strand to SEQ ID NO: 1421452
aucuguaagccuggaaaca

SEQ ID NO: 1421454 - RNA, 19 nt, Artificial Sequence
  Description of Artificial Sequence: Synthetic oligonucleotide
  Sense strand starting at position 987 of SEQ ID NO: 1243517
agguaauuaaagcggacau

SEQ ID NO: 1421455 - RNA, 19 nt, Artificial Sequence
  Description of Artificial Sequence: Synthetic oligonucleotide
  Antisense strand to SEQ ID NO: 1421454
auguccgcuuuaauuaccu

SEQ ID NO: 1421456 - RNA, 19 nt, Artificial Sequence
  Description of Artificial Sequence: Synthetic oligonucleotide
  Sense strand starting at position 988 of SEQ ID NO: 1243517
gguaauuaaagcggacaua

SEQ ID NO: 1421457 - RNA, 19 nt, Artificial Sequence
  Description of Artificial Sequence: Synthetic oligonucleotide
  Antisense strand to SEQ ID NO: 1421456
uauguccgcuuuaauuacc

SEQ ID NO: 1421458 - RNA, 19 nt, Artificial Sequence
  Description of Artificial Sequence: Synthetic oligonucleotide
  Sense strand starting at position 1074 of SEQ ID NO: 1243517
caacuugccuuugugggaa

SEQ ID NO: 1421459 - RNA, 19 nt, Artificial Sequence
  Description of Artificial Sequence: Synthetic oligonucleotide
  Antisense strand to SEQ ID NO: 1421458
uucccacaaaggcaaguug

SEQ ID NO: 1421460 - RNA, 19 nt, Artificial Sequence
  Description of Artificial Sequence: Synthetic oligonucleotide
  Sense strand starting at position 1219 of SEQ ID NO: 1243517
uuuaucaauggcgagacaa

SEQ ID NO: 1421461 - RNA, 19 nt, Artificial Sequence
  Description of Artificial Sequence: Synthetic oligonucleotide
  Antisense strand to SEQ ID NO: 1421460
uugucucgccauugauaaa

SEQ ID NO: 1421462 - RNA, 19 nt, Artificial Sequence
  Description of Artificial Sequence: Synthetic oligonucleotide
  Sense strand starting at position 1319 of SEQ ID NO: 1243517
ugaguccuuccaggaaauu

SEQ ID NO: 1421463 - RNA, 19 nt, Artificial Sequence
  Description of Artificial Sequence: Synthetic oligonucleotide
  Antisense strand to SEQ ID NO: 1421462
aauuuccuggaaggacuca

SEQ ID NO: 1421464 - RNA, 19 nt, Artificial Sequence
  Description of Artificial Sequence: Synthetic oligonucleotide
  Sense strand starting at position 1352 of SEQ ID NO: 1243517
cccagaacucgcugacaaa

SEQ ID NO: 1421465 - RNA, 19 nt, Artificial Sequence
  Description of Artificial Sequence: Synthetic oligonucleotide
  Antisense strand to SEQ ID NO: 1421464
uuugucagcgaguucuggg

SEQ ID NO: 1421466 - RNA, 19 nt, Artificial Sequence
  Description of Artificial Sequence: Synthetic oligonucleotide
  Sense strand starting at position 1353 of SEQ ID NO: 1243517
ccagaacucgcugacaaac

SEQ ID NO: 1421467 - RNA, 19 nt, Artificial Sequence
  Description of Artificial Sequence: Synthetic oligonucleotide
  Antisense strand to SEQ ID NO: 1421466
guuugucagcgaguucugg

SEQ ID NO: 1421468 - RNA, 19 nt, Artificial Sequence
  Description of Artificial Sequence: Synthetic oligonucleotide
  Sense strand starting at position 1386 of SEQ ID NO: 1243517
cggguaugaggccaagaaa

SEQ ID NO: 1421469 - RNA, 19 nt, Artificial Sequence
  Description of Artificial Sequence: Synthetic oligonucleotide
  Antisense strand to SEQ ID NO: 1421468
uuucuuggccucauacccg

SEQ ID NO: 1421470 - RNA, 19 nt, Artificial Sequence
  Description of Artificial Sequence: Synthetic oligonucleotide
  Sense strand starting at position 1779 of SEQ ID NO: 1243517
ggucuuaaucccgaacggu

SEQ ID NO: 1421471 - RNA, 19 nt, Artificial Sequence
  Description of Artificial Sequence: Synthetic oligonucleotide
  Antisense strand to SEQ ID NO: 1421470
accguucgggauuaagacc

SEQ ID NO: 1421472 - RNA, 19 nt, Artificial Sequence
  Description of Artificial Sequence: Synthetic oligonucleotide
  Sense strand starting at position 2053 of SEQ ID NO: 1243517
cgagucucgcgugcuuauu

SEQ ID NO: 1421473 - RNA, 19 nt, Artificial Sequence
  Description of Artificial Sequence: Synthetic oligonucleotide
  Antisense strand to SEQ ID NO: 1421472
aauaagcacgcgagacucg

SEQ ID NO: 1421474 - RNA, 19 nt, Artificial Sequence
  Description of Artificial Sequence: Synthetic oligonucleotide
  Sense strand starting at position 2063 of SEQ ID NO: 1243517
gugcuuauuggcccuguca

SEQ ID NO: 1421475 - RNA, 19 nt, Artificial Sequence
  Description of Artificial Sequence: Synthetic oligonucleotide
  Antisense strand to SEQ ID NO: 1421474
ugacagggccaauaagcac

SEQ ID NO: 1421476 - RNA, 19 nt, Artificial Sequence
  Description of Artificial Sequence: Synthetic oligonucleotide
  Sense strand starting at position 2209 of SEQ ID NO: 1243517
gugugaugaguuugucaag

SEQ ID NO: 1421477 - RNA, 19 nt, Artificial Sequence
  Description of Artificial Sequence: Synthetic oligonucleotide
  Antisense strand to SEQ ID NO: 1421476
cuugacaaacucaucacac

SEQ ID NO: 1421478 - RNA, 19 nt, Artificial Sequence
  Description of Artificial Sequence: Synthetic oligonucleotide
  Sense strand starting at position 2210 of SEQ ID NO: 1243517
ugugaugaguuugucaaga

SEQ ID NO: 1421479 - RNA, 19 nt, Artificial Sequence
  Description of Artificial Sequence: Synthetic oligonucleotide
  Antisense strand to SEQ ID NO: 1421478
ucuugacaaacucaucaca

SEQ ID NO: 1421480 - RNA, 19 nt, Artificial Sequence
  Description of Artificial Sequence: Synthetic oligonucleotide
  Sense strand starting at position 2312 of SEQ ID NO: 1243517
ggaagacccugauugguuu

SEQ ID NO: 1421481 - RNA, 19 nt, Artificial Sequence
  Description of Artificial Sequence: Synthetic oligonucleotide
  Antisense strand to SEQ ID NO: 1421480
aaaccaaucagggucuucc

SEQ ID NO: 1421482 - RNA, 19 nt, Artificial Sequence
  Description of Artificial Sequence: Synthetic oligonucleotide
  Sense strand starting at position 2318 of SEQ ID NO: 1243517
cccugauugguuuguggga

SEQ ID NO: 1421483 - RNA, 19 nt, Artificial Sequence
  Description of Artificial Sequence: Synthetic oligonucleotide
  Antisense strand to SEQ ID NO: 1421482
ucccacaaaccaaucaggg

SEQ ID NO: 1421484 - RNA, 19 nt, Artificial Sequence
  Description of Artificial Sequence: Synthetic oligonucleotide
  Sense strand starting at position 2704 of SEQ ID NO: 1243517
gcuugaaugagauggcaag

SEQ ID NO: 1421485 - RNA, 19 nt, Artificial Sequence
  Description of Artificial Sequence: Synthetic oligonucleotide
  Antisense strand to SEQ ID NO: 1421484
cuugccaucucauucaagc

SEQ ID NO: 1421486 - RNA, 19 nt, Artificial Sequence
  Description of Artificial Sequence: Synthetic oligonucleotide
  Sense strand starting at position 2770 of SEQ ID NO: 1243517
cccuguccguggguagaaa

SEQ ID NO: 1421487 - RNA, 19 nt, Artificial Sequence
  Description of Artificial Sequence: Synthetic oligonucleotide
  Antisense strand to SEQ ID NO: 1421486
uuucuacccacggacaggg

SEQ ID NO: 1421488 - RNA, 19 nt, Artificial Sequence
  Description of Artificial Sequence: Synthetic oligonucleotide
  Sense strand starting at position 3228 of SEQ ID NO: 1243517
gguagucauuuagaacagu

SEQ ID NO: 1421489 - RNA, 19 nt, Artificial Sequence
  Description of Artificial Sequence: Synthetic oligonucleotide
  Antisense strand to SEQ ID NO: 1421488
acuguucuaaaugacuacc

SEQ ID NO: 1421490 - RNA, 19 nt, Artificial Sequence
  Description of Artificial Sequence: Synthetic oligonucleotide
  Sense strand starting at position 3285 of SEQ ID NO: 1243517
aucaucuugucacuuguua

SEQ ID NO: 1421491 - RNA, 19 nt, Artificial Sequence
  Description of Artificial Sequence: Synthetic oligonucleotide
  Antisense strand to SEQ ID NO: 1421490
uaacaagugacaagaugau

SEQ ID NO: 1421492 - RNA, 19 nt, Artificial Sequence
  Description of Artificial Sequence: Synthetic oligonucleotide
  Sense strand starting at position 3289 of SEQ ID NO: 1243517
ucuugucacuuguuagaaa

SEQ ID NO: 1421493 - RNA, 19 nt, Artificial Sequence
  Description of Artificial Sequence: Synthetic oligonucleotide
  Antisense strand to SEQ ID NO: 1421492
uuucuaacaagugacaaga

SEQ ID NO: 1421494 - RNA, 19 nt, Artificial Sequence
  Description of Artificial Sequence: Synthetic oligonucleotide
  Sense strand starting at position 3330 of SEQ ID NO: 1243517
caagccugcugaucaguaa

SEQ ID NO: 1421495 - RNA, 19 nt, Artificial Sequence
  Description of Artificial Sequence: Synthetic oligonucleotide
  Antisense strand to SEQ ID NO: 1421494
uuacugaucagcaggcuug

SEQ ID NO: 1421496 - RNA, 19 nt, Artificial Sequence
  Description of Artificial Sequence: Synthetic oligonucleotide
  Sense strand starting at position 3472 of SEQ ID NO: 1243517
cugauaguucgugcuuguu

SEQ ID NO: 1421497 - RNA, 19 nt, Artificial Sequence
  Description of Artificial Sequence: Synthetic oligonucleotide
  Antisense strand to SEQ ID NO: 1421496
aacaagcacgaacuaucag

SEQ ID NO: 1421498 - RNA, 19 nt, Artificial Sequence
  Description of Artificial Sequence: Synthetic oligonucleotide
  Sense strand starting at position 3655 of SEQ ID NO: 1243517
gaguuaggcuuagugugaa

SEQ ID NO: 1421499 - RNA, 19 nt, Artificial Sequence
  Description of Artificial Sequence: Synthetic oligonucleotide
  Antisense strand to SEQ ID NO: 1421498
uucacacuaagccuaacuc

SEQ ID NO: 1421500 - RNA, 19 nt, Artificial Sequence
  Description of Artificial Sequence: Synthetic oligonucleotide
  Sense strand starting at position 3701 of SEQ ID NO: 1243517
caacguguugagcaaacuu

SEQ ID NO: 1421501 - RNA, 19 nt, Artificial Sequence
  Description of Artificial Sequence: Synthetic oligonucleotide
  Antisense strand to SEQ ID NO: 1421500
aaguuugcucaacacguug

SEQ ID NO: 1421502 - RNA, 19 nt, Artificial Sequence
  Description of Artificial Sequence: Synthetic oligonucleotide
  Sense strand starting at position 3724 of SEQ ID NO: 1243517
auaaguuguagcgaacaca

SEQ ID NO: 1421503 - RNA, 19 nt, Artificial Sequence
  Description of Artificial Sequence: Synthetic oligonucleotide
  Antisense strand to SEQ ID NO: 1421502
uguguucgcuacaacuuau

SEQ ID NO: 1421504 - RNA, 19 nt, Artificial Sequence
  Description of Artificial Sequence: Synthetic oligonucleotide
  Sense strand starting at position 3912 of SEQ ID NO: 1243517
ugaauaauccagugcaaca

SEQ ID NO: 1421505 - RNA, 19 nt, Artificial Sequence
  Description of Artificial Sequence: Synthetic oligonucleotide
  Antisense strand to SEQ ID NO: 1421504
uguugcacuggauuauuca

SEQ ID NO: 1421506 - RNA, 19 nt, Artificial Sequence
  Description of Artificial Sequence: Synthetic oligonucleotide
  Sense strand starting at position 325 of SEQ ID NO: 1243518
gccgcaaugaguugagauu

SEQ ID NO: 1421507 - RNA, 19 nt, Artificial Sequence
  Description of Artificial Sequence: Synthetic oligonucleotide
  Antisense strand to SEQ ID NO: 1421506
aaucucaacucauugcggc

SEQ ID NO: 1421508 - RNA, 19 nt, Artificial Sequence
  Description of Artificial Sequence: Synthetic oligonucleotide
  Sense strand starting at position 413 of SEQ ID NO: 1243518
auauauaacgggugaguua

SEQ ID NO: 1421509 - RNA, 19 nt, Artificial Sequence
  Description of Artificial Sequence: Synthetic oligonucleotide
  Antisense strand to SEQ ID NO: 1421508
uaacucacccguuauauau

SEQ ID NO: 1421510 - RNA, 19 nt, Artificial Sequence
  Description of Artificial Sequence: Synthetic oligonucleotide
  Sense strand starting at position 414 of SEQ ID NO: 1243518
uauauaacgggugaguuau

SEQ ID NO: 1421511 - RNA, 19 nt, Artificial Sequence
  Description of Artificial Sequence: Synthetic oligonucleotide
  Antisense strand to SEQ ID NO: 1421510
auaacucacccguuauaua

SEQ ID NO: 1421512 - RNA, 19 nt, Artificial Sequence
  Description of Artificial Sequence: Synthetic oligonucleotide
  Sense strand starting at position 416 of SEQ ID NO: 1243518
uauaacgggugaguuauau

SEQ ID NO: 1421513 - RNA, 19 nt, Artificial Sequence
  Description of Artificial Sequence: Synthetic oligonucleotide
  Antisense strand to SEQ ID NO: 1421512
auauaacucacccguuaua

SEQ ID NO: 1421514 - RNA, 19 nt, Artificial Sequence
  Description of Artificial Sequence: Synthetic oligonucleotide
  Sense strand starting at position 422 of SEQ ID NO: 1243518
gggugaguuauaugguaag

SEQ ID NO: 1421515 - RNA, 19 nt, Artificial Sequence
  Description of Artificial Sequence: Synthetic oligonucleotide
  Antisense strand to SEQ ID NO: 1421514
cuuaccauauaacucaccc

SEQ ID NO: 1421516 - RNA, 19 nt, Artificial Sequence
  Description of Artificial Sequence: Synthetic oligonucleotide
  Sense strand starting at position 433 of SEQ ID NO: 1243518
augguaagcacgcaaguua

SEQ ID NO: 1421517 - RNA, 19 nt, Artificial Sequence
  Description of Artificial Sequence: Synthetic oligonucleotide
  Antisense strand to SEQ ID NO: 1421516
uaacuugcgugcuuaccau

SEQ ID NO: 1421518 - RNA, 19 nt, Artificial Sequence
  Description of Artificial Sequence: Synthetic oligonucleotide
  Sense strand starting at position 456 of SEQ ID NO: 1243518
uuaauaaagcuguguuuag

SEQ ID NO: 1421519 - RNA, 19 nt, Artificial Sequence
  Description of Artificial Sequence: Synthetic oligonucleotide
  Antisense strand to SEQ ID NO: 1421518
cuaaacacagcuuuauuaa

SEQ ID NO: 1421520 - RNA, 19 nt, Artificial Sequence
  Description of Artificial Sequence: Synthetic oligonucleotide
  Sense strand starting at position 1015 of SEQ ID NO: 1243518
ugaagucuugccuaacucu

SEQ ID NO: 1421521 - RNA, 19 nt, Artificial Sequence
  Description of Artificial Sequence: Synthetic oligonucleotide
  Antisense strand to SEQ ID NO: 1421520
agaguuaggcaagacuuca

SEQ ID NO: 1421522 - RNA, 19 nt, Artificial Sequence
  Description of Artificial Sequence: Synthetic oligonucleotide
  Sense strand starting at position 1047 of SEQ ID NO: 1243518
uuggcugucacuuaaugga

SEQ ID NO: 1421523 - RNA, 19 nt, Artificial Sequence
  Description of Artificial Sequence: Synthetic oligonucleotide
  Antisense strand to SEQ ID NO: 1421522
uccauuaagugacagccaa

SEQ ID NO: 1421524 - RNA, 19 nt, Artificial Sequence
  Description of Artificial Sequence: Synthetic oligonucleotide
  Sense strand starting at position 1087 of SEQ ID NO: 1243518
acaagaaugcuuuaccgua

SEQ ID NO: 1421525 - RNA, 19 nt, Artificial Sequence
  Description of Artificial Sequence: Synthetic oligonucleotide
  Antisense strand to SEQ ID NO: 1421524
uacgguaaagcauucuugu

SEQ ID NO: 1421526 - RNA, 19 nt, Artificial Sequence
  Description of Artificial Sequence: Synthetic oligonucleotide
  Sense strand starting at position 1250 of SEQ ID NO: 1243518
cggaaugaggccugagcau

SEQ ID NO: 1421527 - RNA, 19 nt, Artificial Sequence
  Description of Artificial Sequence: Synthetic oligonucleotide
  Antisense strand to SEQ ID NO: 1421526
augcucaggccucauuccg

SEQ ID NO: 1421528 - RNA, 19 nt, Artificial Sequence
  Description of Artificial Sequence: Synthetic oligonucleotide
  Sense strand starting at position 1502 of SEQ ID NO: 1243518
gcgagcaucgcugucugaa

SEQ ID NO: 1421529 - RNA, 19 nt, Artificial Sequence
  Description of Artificial Sequence: Synthetic oligonucleotide
  Antisense strand to SEQ ID NO: 1421528
uucagacagcgaugcucgc

SEQ ID NO: 1421530 - RNA, 19 nt, Artificial Sequence
  Description of Artificial Sequence: Synthetic oligonucleotide
  Sense strand starting at position 1503 of SEQ ID NO: 1243518
cgagcaucgcugucugaac

SEQ ID NO: 1421531 - RNA, 19 nt, Artificial Sequence
  Description of Artificial Sequence: Synthetic oligonucleotide
  Antisense strand to SEQ ID NO: 1421530
guucagacagcgaugcucg

SEQ ID NO: 1421532 - RNA, 19 nt, Artificial Sequence
  Description of Artificial Sequence: Synthetic oligonucleotide
  Sense strand starting at position 2304 of SEQ ID NO: 1243518
ccugaccucgcuuggaaua

SEQ ID NO: 1421533 - RNA, 19 nt, Artificial Sequence
  Description of Artificial Sequence: Synthetic oligonucleotide
  Antisense strand to SEQ ID NO: 1421532
uauuccaagcgaggucagg

SEQ ID NO: 1421534 - RNA, 19 nt, Artificial Sequence
  Description of Artificial Sequence: Synthetic oligonucleotide
  Sense strand starting at position 2305 of SEQ ID NO: 1243518
cugaccucgcuuggaauaa

SEQ ID NO: 1421535 - RNA, 19 nt, Artificial Sequence
  Description of Artificial Sequence: Synthetic oligonucleotide
  Antisense strand to SEQ ID NO: 1421534
uuauuccaagcgaggucag

SEQ ID NO: 1421536 - RNA, 19 nt, Artificial Sequence
  Description of Artificial Sequence: Synthetic oligonucleotide
  Sense strand starting at position 2379 of SEQ ID NO: 1243518
guuucuccauguuuaauau

SEQ ID NO: 1421537 - RNA, 19 nt, Artificial Sequence
  Description of Artificial Sequence: Synthetic oligonucleotide
  Antisense strand to SEQ ID NO: 1421536
auauuaaacauggagaaac

SEQ ID NO: 1421538 - RNA, 19 nt, Artificial Sequence
  Description of Artificial Sequence: Synthetic oligonucleotide
  Sense strand starting at position 2390 of SEQ ID NO: 1243518
uuuaauaucgcacgaucau

SEQ ID NO: 1421539 - RNA, 19 nt, Artificial Sequence
  Description of Artificial Sequence: Synthetic oligonucleotide
  Antisense strand to SEQ ID NO: 1421538
augaucgugcgauauuaaa

SEQ ID NO: 1421540 - RNA, 19 nt, Artificial Sequence
  Description of Artificial Sequence: Synthetic oligonucleotide
  Sense strand starting at position 2391 of SEQ ID NO: 1243518
uuaauaucgcacgaucaua

SEQ ID NO: 1421541 - RNA, 19 nt, Artificial Sequence
  Description of Artificial Sequence: Synthetic oligonucleotide
  Antisense strand to SEQ ID NO: 1421540
uaugaucgugcgauauuaa

SEQ ID NO: 1421542 - RNA, 19 nt, Artificial Sequence
  Description of Artificial Sequence: Synthetic oligonucleotide
  Sense strand starting at position 2399 of SEQ ID NO: 1243518
gcacgaucauaauuaguac

SEQ ID NO: 1421543 - RNA, 19 nt, Artificial Sequence
  Description of Artificial Sequence: Synthetic oligonucleotide
  Antisense strand to SEQ ID NO: 1421542
guacuaauuaugaucgugc

SEQ ID NO: 1421544 - RNA, 19 nt, Artificial Sequence
  Description of Artificial Sequence: Synthetic oligonucleotide
  Sense strand starting at position 2486 of SEQ ID NO: 1243518
ggcucaaucccugguggga

SEQ ID NO: 1421545 - RNA, 19 nt, Artificial Sequence
  Description of Artificial Sequence: Synthetic oligonucleotide
  Antisense strand to SEQ ID NO: 1421544
ucccaccagggauugagcc

SEQ ID NO: 1421546 - RNA, 19 nt, Artificial Sequence
  Description of Artificial Sequence: Synthetic oligonucleotide
  Sense strand starting at position 2554 of SEQ ID NO: 1243518
gauugauugauacggaguc

SEQ ID NO: 1421547 - RNA, 19 nt, Artificial Sequence
  Description of Artificial Sequence: Synthetic oligonucleotide
  Antisense strand to SEQ ID NO: 1421546
gacuccguaucaaucaauc

SEQ ID NO: 1421548 - RNA, 19 nt, Artificial Sequence
  Description of Artificial Sequence: Synthetic oligonucleotide
  Sense strand starting at position 2556 of SEQ ID NO: 1243518
uugauugauacggagucuu

SEQ ID NO: 1421549 - RNA, 19 nt, Artificial Sequence
  Description of Artificial Sequence: Synthetic oligonucleotide
  Antisense strand to SEQ ID NO: 1421548
aagacuccguaucaaucaa

SEQ ID NO: 1421550 - RNA, 19 nt, Artificial Sequence
  Description of Artificial Sequence: Synthetic oligonucleotide
  Sense strand starting at position 2707 of SEQ ID NO: 1243518
cagcguugugugcuaguuu

SEQ ID NO: 1421551 - RNA, 19 nt, Artificial Sequence
  Description of Artificial Sequence: Synthetic oligonucleotide
  Antisense strand to SEQ ID NO: 1421550
aaacuagcacacaacgcug

SEQ ID NO: 1421552 - RNA, 19 nt, Artificial Sequence
  Description of Artificial Sequence: Synthetic oligonucleotide
  Sense strand starting at position 2855 of SEQ ID NO: 1243518
guaagaccucgucgcuaaa

SEQ ID NO: 1421553 - RNA, 19 nt, Artificial Sequence
  Description of Artificial Sequence: Synthetic oligonucleotide
  Antisense strand to SEQ ID NO: 1421552
uuuagcgacgaggucuuac

SEQ ID NO: 1421554 - RNA, 19 nt, Artificial Sequence
  Description of Artificial Sequence: Synthetic oligonucleotide
  Sense strand starting at position 2857 of SEQ ID NO: 1243518
aagaccucgucgcuaaauu

SEQ ID NO: 1421555 - RNA, 19 nt, Artificial Sequence
  Description of Artificial Sequence: Synthetic oligonucleotide
  Antisense strand to SEQ ID NO: 1421554
aauuuagcgacgaggucuu

SEQ ID NO: 1421556 - RNA, 19 nt, Artificial Sequence
  Description of Artificial Sequence: Synthetic oligonucleotide
  Sense strand starting at position 2858 of SEQ ID NO: 1243518
agaccucgucgcuaaauua

SEQ ID NO: 1421557 - RNA, 19 nt, Artificial Sequence
  Description of Artificial Sequence: Synthetic oligonucleotide
  Antisense strand to SEQ ID NO: 1421556
uaauuuagcgacgaggucu

SEQ ID NO: 1421558 - RNA, 19 nt, Artificial Sequence
  Description of Artificial Sequence: Synthetic oligonucleotide
  Sense strand starting at position 2866 of SEQ ID NO: 1243518
ucgcuaaauuaagaaacaa

SEQ ID NO: 1421559 - RNA, 19 nt, Artificial Sequence
  Description of Artificial Sequence: Synthetic oligonucleotide
  Antisense strand to SEQ ID NO: 1421558
uuguuucuuaauuuagcga

SEQ ID NO: 1421560 - RNA, 19 nt, Artificial Sequence
  Description of Artificial Sequence: Synthetic oligonucleotide
  Sense strand starting at position 2935 of SEQ ID NO: 1243518
ccacaagucuauccuguga

SEQ ID NO: 1421561 - RNA, 19 nt, Artificial Sequence
  Description of Artificial Sequence: Synthetic oligonucleotide
  Antisense strand to SEQ ID NO: 1421560
ucacaggauagacuugugg

SEQ ID NO: 1421562 - RNA, 19 nt, Artificial Sequence
  Description of Artificial Sequence: Synthetic oligonucleotide
  Sense strand starting at position 2939 of SEQ ID NO: 1243518
aagucuauccugugagaga

SEQ ID NO: 1421563 - RNA, 19 nt, Artificial Sequence
  Description of Artificial Sequence: Synthetic oligonucleotide
  Antisense strand to SEQ ID NO: 1421562
ucucucacaggauagacuu

SEQ ID NO: 1421564 - RNA, 19 nt, Artificial Sequence
  Description of Artificial Sequence: Synthetic oligonucleotide
  Sense strand starting at position 3049 of SEQ ID NO: 1243518
gauugcuugggccgaggaa

SEQ ID NO: 1421565 - RNA, 19 nt, Artificial Sequence
  Description of Artificial Sequence: Synthetic oligonucleotide
  Antisense strand to SEQ ID NO: 1421564
uuccucggcccaagcaauc

SEQ ID NO: 1421566 - RNA, 19 nt, Artificial Sequence
  Description of Artificial Sequence: Synthetic oligonucleotide
  Sense strand starting at position 3693 of SEQ ID NO: 1243518
aggacauuagcuugacuac

SEQ ID NO: 1421567 - RNA, 19 nt, Artificial Sequence
  Description of Artificial Sequence: Synthetic oligonucleotide
  Antisense strand to SEQ ID NO: 1421566
guagucaagcuaauguccu

SEQ ID NO: 1421568 - RNA, 19 nt, Artificial Sequence
  Description of Artificial Sequence: Synthetic oligonucleotide
  Sense strand starting at position 3756 of SEQ ID NO: 1243518
ugugucucuccacaugaua

SEQ ID NO: 1421569 - RNA, 19 nt, Artificial Sequence
  Description of Artificial Sequence: Synthetic oligonucleotide
  Antisense strand to SEQ ID NO: 1421568
uaucauguggagagacaca

SEQ ID NO: 1421570 - RNA, 19 nt, Artificial Sequence
  Description of Artificial Sequence: Synthetic oligonucleotide
  Sense strand starting at position 3795 of SEQ ID NO: 1243518
cguggcaucucugccaaga

SEQ ID NO: 1421571 - RNA, 19 nt, Artificial Sequence
  Description of Artificial Sequence: Synthetic oligonucleotide
  Antisense strand to SEQ ID NO: 1421570
ucuuggcagagaugccacg

SEQ ID NO: 1421572 - RNA, 19 nt, Artificial Sequence
  Description of Artificial Sequence: Synthetic oligonucleotide
  Sense strand starting at position 3858 of SEQ ID NO: 1243518
gcuggagagcugugcugaa

SEQ ID NO: 1421573 - RNA, 19 nt, Artificial Sequence
  Description of Artificial Sequence: Synthetic oligonucleotide
  Antisense strand to SEQ ID NO: 1421572
uucagcacagcucuccagc

SEQ ID NO: 1421574 - RNA, 19 nt, Artificial Sequence
  Description of Artificial Sequence: Synthetic oligonucleotide
  Sense strand starting at position 3862 of SEQ ID NO: 1243518
gagagcugugcugaacaau

SEQ ID NO: 1421575 - RNA, 19 nt, Artificial Sequence
  Description of Artificial Sequence: Synthetic oligonucleotide
  Antisense strand to SEQ ID NO: 1421574
auuguucagcacagcucuc

SEQ ID NO: 1421576 - RNA, 19 nt, Artificial Sequence
  Description of Artificial Sequence: Synthetic oligonucleotide
  Sense strand starting at position 3865 of SEQ ID NO: 1243518
agcugugcugaacaaucaa

SEQ ID NO: 1421577 - RNA, 19 nt, Artificial Sequence
  Description of Artificial Sequence: Synthetic oligonucleotide
  Antisense strand to SEQ ID NO: 1421576
uugauuguucagcacagcu

SEQ ID NO: 1421578 - RNA, 19 nt, Artificial Sequence
  Description of Artificial Sequence: Synthetic oligonucleotide
  Sense strand starting at position 3904 of SEQ ID NO: 1243518
gcacaugcgaauuagagua

SEQ ID NO: 1421579 - RNA, 19 nt, Artificial Sequence
  Description of Artificial Sequence: Synthetic oligonucleotide
  Antisense strand to SEQ ID NO: 1421578
uacucuaauucgcaugugc

SEQ ID NO: 1421580 - RNA, 19 nt, Artificial Sequence
  Description of Artificial Sequence: Synthetic oligonucleotide
  Sense strand starting at position 3918 of SEQ ID NO: 1243518
gaguaaggccgaggaacau

SEQ ID NO: 1421581 - RNA, 19 nt, Artificial Sequence
  Description of Artificial Sequence: Synthetic oligonucleotide
  Antisense strand to SEQ ID NO: 1421580
auguuccucggccuuacuc

SEQ ID NO: 1421582 - RNA, 19 nt, Artificial Sequence
  Description of Artificial Sequence: Synthetic oligonucleotide
  Sense strand starting at position 3980 of SEQ ID NO: 1243518
ugguauuggccaggaucca

SEQ ID NO: 1421583 - RNA, 19 nt, Artificial Sequence
  Description of Artificial Sequence: Synthetic oligonucleotide
  Antisense strand to SEQ ID NO: 1421582
uggauccuggccaauacca

SEQ ID NO: 1421584 - RNA, 19 nt, Artificial Sequence
  Description of Artificial Sequence: Synthetic oligonucleotide
  Sense strand starting at position 3981 of SEQ ID NO: 1243518
gguauuggccaggauccaa

SEQ ID NO: 1421585 - RNA, 19 nt, Artificial Sequence
  Description of Artificial Sequence: Synthetic oligonucleotide
  Antisense strand to SEQ ID NO: 1421584
uuggauccuggccaauacc

SEQ ID NO: 1421586 - RNA, 19 nt, Artificial Sequence
  Description of Artificial Sequence: Synthetic oligonucleotide
  Sense strand starting at position 49 of SEQ ID NO: 1243519
guuuccacuucuucuagua

SEQ ID NO: 1421587 - RNA, 19 nt, Artificial Sequence
  Description of Artificial Sequence: Synthetic oligonucleotide
  Antisense strand to SEQ ID NO: 1421586
uacuagaagaaguggaaac

SEQ ID NO: 1421588 - RNA, 19 nt, Artificial Sequence
  Description of Artificial Sequence: Synthetic oligonucleotide
  Sense strand starting at position 61 of SEQ ID NO: 1243519
ucuaguaacaccugggaga

SEQ ID NO: 1421589 - RNA, 19 nt, Artificial Sequence
  Description of Artificial Sequence: Synthetic oligonucleotide
  Antisense strand to SEQ ID NO: 1421588
ucucccagguguuacuaga

SEQ ID NO: 1421590 - RNA, 19 nt, Artificial Sequence
  Description of Artificial Sequence: Synthetic oligonucleotide
  Sense strand starting at position 62 of SEQ ID NO: 1243519
cuaguaacaccugggagau

SEQ ID NO: 1421591 - RNA, 19 nt, Artificial Sequence
  Description of Artificial Sequence: Synthetic oligonucleotide
  Antisense strand to SEQ ID NO: 1421590
aucucccagguguuacuag

SEQ ID NO: 1421592 - RNA, 19 nt, Artificial Sequence
  Description of Artificial Sequence: Synthetic oligonucleotide
  Sense strand starting at position 64 of SEQ ID NO: 1243519
aguaacaccugggagauau

SEQ ID NO: 1421593 - RNA, 19 nt, Artificial Sequence
  Description of Artificial Sequence: Synthetic oligonucleotide
  Antisense strand to SEQ ID NO: 1421592
auaucucccagguguuacu

SEQ ID NO: 1421594 - RNA, 19 nt, Artificial Sequence
  Description of Artificial Sequence: Synthetic oligonucleotide
  Sense strand starting at position 74 of SEQ ID NO: 1243519
gggagauauaguggaugcu

SEQ ID NO: 1421595 - RNA, 19 nt, Artificial Sequence
  Description of Artificial Sequence: Synthetic oligonucleotide
  Antisense strand to SEQ ID NO: 1421594
agcauccacuauaucuccc

SEQ ID NO: 1421596 - RNA, 19 nt, Artificial Sequence
  Description of Artificial Sequence: Synthetic oligonucleotide
  Sense strand starting at position 83 of SEQ ID NO: 1243519
aguggaugcuccucaggua

SEQ ID NO: 1421597 - RNA, 19 nt, Artificial Sequence
  Description of Artificial Sequence: Synthetic oligonucleotide
  Antisense strand to SEQ ID NO: 1421596
uaccugaggagcauccacu

SEQ ID NO: 1421598 - RNA, 19 nt, Artificial Sequence
  Description of Artificial Sequence: Synthetic oligonucleotide
  Sense strand starting at position 84 of SEQ ID NO: 1243519
guggaugcuccucagguau

SEQ ID NO: 1421599 - RNA, 19 nt, Artificial Sequence
  Description of Artificial Sequence: Synthetic oligonucleotide
  Antisense strand to SEQ ID NO: 1421598
auaccugaggagcauccac

SEQ ID NO: 1421600 - RNA, 19 nt, Artificial Sequence
  Description of Artificial Sequence: Synthetic oligonucleotide
  Sense strand starting at position 112 of SEQ ID NO: 1243519
gccuccuguguccaggaaa

SEQ ID NO: 1421601 - RNA, 19 nt, Artificial Sequence
  Description of Artificial Sequence: Synthetic oligonucleotide
  Antisense strand to SEQ ID NO: 1421600
uuuccuggacacaggaggc

SEQ ID NO: 1421602 - RNA, 19 nt, Artificial Sequence
  Description of Artificial Sequence: Synthetic oligonucleotide
  Sense strand starting at position 187 of SEQ ID NO: 1243519
gcccuugugggauaagcaa

SEQ ID NO: 1421603 - RNA, 19 nt, Artificial Sequence
  Description of Artificial Sequence: Synthetic oligonucleotide
  Antisense strand to SEQ ID NO: 1421602
uugcuuaucccacaagggc

SEQ ID NO: 1421604 - RNA, 19 nt, Artificial Sequence
  Description of Artificial Sequence: Synthetic oligonucleotide
  Sense strand starting at position 217 of SEQ ID NO: 1243519
accugcuuaucucugagau

SEQ ID NO: 1421605 - RNA, 19 nt, Artificial Sequence
  Description of Artificial Sequence: Synthetic oligonucleotide
  Antisense strand to SEQ ID NO: 1421604
aucucagagauaagcaggu

SEQ ID NO: 1421606 - RNA, 19 nt, Artificial Sequence
  Description of Artificial Sequence: Synthetic oligonucleotide
  Sense strand starting at position 218 of SEQ ID NO: 1243519
ccugcuuaucucugagaua

SEQ ID NO: 1421607 - RNA, 19 nt, Artificial Sequence
  Description of Artificial Sequence: Synthetic oligonucleotide
  Antisense strand to SEQ ID NO: 1421606
uaucucagagauaagcagg

SEQ ID NO: 1421608 - RNA, 19 nt, Artificial Sequence
  Description of Artificial Sequence: Synthetic oligonucleotide
  Sense strand starting at position 219 of SEQ ID NO: 1243519
cugcuuaucucugagauac

SEQ ID NO: 1421609 - RNA, 19 nt, Artificial Sequence
  Description of Artificial Sequence: Synthetic oligonucleotide
  Antisense strand to SEQ ID NO: 1421608
guaucucagagauaagcag

SEQ ID NO: 1421610 - RNA, 19 nt, Artificial Sequence
  Description of Artificial Sequence: Synthetic oligonucleotide
  Sense strand starting at position 221 of SEQ ID NO: 1243519
gcuuaucucugagauacac

SEQ ID NO: 1421611 - RNA, 19 nt, Artificial Sequence
  Description of Artificial Sequence: Synthetic oligonucleotide
  Antisense strand to SEQ ID NO: 1421610
guguaucucagagauaagc

SEQ ID NO: 1421612 - RNA, 19 nt, Artificial Sequence
  Description of Artificial Sequence: Synthetic oligonucleotide
  Sense strand starting at position 456 of SEQ ID NO: 1243519
ucagcaguuugcugucauu

SEQ ID NO: 1421613 - RNA, 19 nt, Artificial Sequence
  Description of Artificial Sequence: Synthetic oligonucleotide
  Antisense strand to SEQ ID NO: 1421612
aaugacagcaaacugcuga

SEQ ID NO: 1421614 - RNA, 19 nt, Artificial Sequence
  Description of Artificial Sequence: Synthetic oligonucleotide
  Sense strand starting at position 489 of SEQ ID NO: 1243519
auguuuccuucuugugcaa

SEQ ID NO: 1421615 - RNA, 19 nt, Artificial Sequence
  Description of Artificial Sequence: Synthetic oligonucleotide
  Antisense strand to SEQ ID NO: 1421614
uugcacaagaaggaaacau

SEQ ID NO: 1421616 - RNA, 19 nt, Artificial Sequence
  Description of Artificial Sequence: Synthetic oligonucleotide
  Sense strand starting at position 491 of SEQ ID NO: 1243519
guuuccuucuugugcaacu

SEQ ID NO: 1421617 - RNA, 19 nt, Artificial Sequence
  Description of Artificial Sequence: Synthetic oligonucleotide
  Antisense strand to SEQ ID NO: 1421616
aguugcacaagaaggaaac

SEQ ID NO: 1421618 - RNA, 19 nt, Artificial Sequence
  Description of Artificial Sequence: Synthetic oligonucleotide
  Sense strand starting at position 502 of SEQ ID NO: 1243519
gugcaacucaagggugauu

SEQ ID NO: 1421619 - RNA, 19 nt, Artificial Sequence
  Description of Artificial Sequence: Synthetic oligonucleotide
  Antisense strand to SEQ ID NO: 1421618
aaucacccuugaguugcac

SEQ ID NO: 1421620 - RNA, 19 nt, Artificial Sequence
  Description of Artificial Sequence: Synthetic oligonucleotide
  Sense strand starting at position 561 of SEQ ID NO: 1243519
gggagugauacuggaaguu

SEQ ID NO: 1421621 - RNA, 19 nt, Artificial Sequence
  Description of Artificial Sequence: Synthetic oligonucleotide
  Antisense strand to SEQ ID NO: 1421620
aacuuccaguaucacuccc

SEQ ID NO: 1421622 - RNA, 19 nt, Artificial Sequence
  Description of Artificial Sequence: Synthetic oligonucleotide
  Sense strand starting at position 594 of SEQ ID NO: 1243519
cgguuuaaguuccgagaaa

SEQ ID NO: 1421623 - RNA, 19 nt, Artificial Sequence
  Description of Artificial Sequence: Synthetic oligonucleotide
  Antisense strand to SEQ ID NO: 1421622
uuucucggaacuuaaaccg

SEQ ID NO: 1421624 - RNA, 19 nt, Artificial Sequence
  Description of Artificial Sequence: Synthetic oligonucleotide
  Sense strand starting at position 595 of SEQ ID NO: 1243519
gguuuaaguuccgagaaau

SEQ ID NO: 1421625 - RNA, 19 nt, Artificial Sequence
  Description of Artificial Sequence: Synthetic oligonucleotide
  Antisense strand to SEQ ID NO: 1421624
auuucucggaacuuaaacc

SEQ ID NO: 1421626 - RNA, 19 nt, Artificial Sequence
  Description of Artificial Sequence: Synthetic oligonucleotide
  Sense strand starting at position 624 of SEQ ID NO: 1243519
gaaccugcgaguuacguau

SEQ ID NO: 1421627 - RNA, 19 nt, Artificial Sequence
  Description of Artificial Sequence: Synthetic oligonucleotide
  Antisense strand to SEQ ID NO: 1421626
auacguaacucgcagguuc

SEQ ID NO: 1421628 - RNA, 19 nt, Artificial Sequence
  Description of Artificial Sequence: Synthetic oligonucleotide
  Sense strand starting at position 631 of SEQ ID NO: 1243519
cgaguuacguauuuccagu

SEQ ID NO: 1421629 - RNA, 19 nt, Artificial Sequence
  Description of Artificial Sequence: Synthetic oligonucleotide
  Antisense strand to SEQ ID NO: 1421628
acuggaaauacguaacucg

SEQ ID NO: 1421630 - RNA, 19 nt, Artificial Sequence
  Description of Artificial Sequence: Synthetic oligonucleotide
  Sense strand starting at position 1026 of SEQ ID NO: 1243519
ccagcaauaugcuauguuu

SEQ ID NO: 1421631 - RNA, 19 nt, Artificial Sequence
  Description of Artificial Sequence: Synthetic oligonucleotide
  Antisense strand to SEQ ID NO: 1421630
aaacauagcauauugcugg

SEQ ID NO: 1421632 - RNA, 19 nt, Artificial Sequence
  Description of Artificial Sequence: Synthetic oligonucleotide
  Sense strand starting at position 1061 of SEQ ID NO: 1243519
gcuguuaaguuuccuaucu

SEQ ID NO: 1421633 - RNA, 19 nt, Artificial Sequence
  Description of Artificial Sequence: Synthetic oligonucleotide
  Antisense strand to SEQ ID NO: 1421632
agauaggaaacuuaacagc

SEQ ID NO: 1421634 - RNA, 19 nt, Artificial Sequence
  Description of Artificial Sequence: Synthetic oligonucleotide
  Sense strand starting at position 1062 of SEQ ID NO: 1243519
cuguuaaguuuccuaucuu

SEQ ID NO: 1421635 - RNA, 19 nt, Artificial Sequence
  Description of Artificial Sequence: Synthetic oligonucleotide
  Antisense strand to SEQ ID NO: 1421634
aagauaggaaacuuaacag

SEQ ID NO: 1421636 - RNA, 19 nt, Artificial Sequence
  Description of Artificial Sequence: Synthetic oligonucleotide
  Sense strand starting at position 1063 of SEQ ID NO: 1243519
uguuaaguuuccuaucuuu

SEQ ID NO: 1421637 - RNA, 19 nt, Artificial Sequence
  Description of Artificial Sequence: Synthetic oligonucleotide
  Antisense strand to SEQ ID NO: 1421636
aaagauaggaaacuuaaca

SEQ ID NO: 1421638 - RNA, 19 nt, Artificial Sequence
  Description of Artificial Sequence: Synthetic oligonucleotide
  Sense strand starting at position 1069 of SEQ ID NO: 1243519
guuuccuaucuuuaagucu

SEQ ID NO: 1421639 - RNA, 19 nt, Artificial Sequence
  Description of Artificial Sequence: Synthetic oligonucleotide
  Antisense strand to SEQ ID NO: 1421638
agacuuaaagauaggaaac

SEQ ID NO: 1421640 - RNA, 19 nt, Artificial Sequence
  Description of Artificial Sequence: Synthetic oligonucleotide
  Sense strand starting at position 1082 of SEQ ID NO: 1243519
aagucuaugccucagagag

SEQ ID NO: 1421641 - RNA, 19 nt, Artificial Sequence
  Description of Artificial Sequence: Synthetic oligonucleotide
  Antisense strand to SEQ ID NO: 1421640
cucucugaggcauagacuu

SEQ ID NO: 1421642 - RNA, 19 nt, Artificial Sequence
  Description of Artificial Sequence: Synthetic oligonucleotide
  Sense strand starting at position 1084 of SEQ ID NO: 1243519
gucuaugccucagagagaa

SEQ ID NO: 1421643 - RNA, 19 nt, Artificial Sequence
  Description of Artificial Sequence: Synthetic oligonucleotide
  Antisense strand to SEQ ID NO: 1421642
uucucucugaggcauagac

SEQ ID NO: 1421644 - RNA, 19 nt, Artificial Sequence
  Description of Artificial Sequence: Synthetic oligonucleotide
  Sense strand starting at position 3281 of SEQ ID NO: 1243519
ggugcaguuccagguuuca

SEQ ID NO: 1421645 - RNA, 19 nt, Artificial Sequence
  Description of Artificial Sequence: Synthetic oligonucleotide
  Antisense strand to SEQ ID NO: 1421644
ugaaaccuggaacugcacc

SEQ ID NO: 1421646 - RNA, 19 nt, Artificial Sequence
  Description of Artificial Sequence: Synthetic oligonucleotide
  Sense strand starting at position 3305 of SEQ ID NO: 1243519
gaaguugcuucgcuggaga

SEQ ID NO: 1421647 - RNA, 19 nt, Artificial Sequence
  Description of Artificial Sequence: Synthetic oligonucleotide
  Antisense strand to SEQ ID NO: 1421646
ucuccagcgaagcaacuuc

SEQ ID NO: 1421648 - RNA, 19 nt, Artificial Sequence
  Description of Artificial Sequence: Synthetic oligonucleotide
  Sense strand starting at position 3327 of SEQ ID NO: 1243519
cuuagaggccuuugaaauu

SEQ ID NO: 1421649 - RNA, 19 nt, Artificial Sequence
  Description of Artificial Sequence: Synthetic oligonucleotide
  Antisense strand to SEQ ID NO: 1421648
aauuucaaaggccucuaag

SEQ ID NO: 1421650 - RNA, 19 nt, Artificial Sequence
  Description of Artificial Sequence: Synthetic oligonucleotide
  Sense strand starting at position 3385 of SEQ ID NO: 1243519
gcggcuugucccgccgaga

SEQ ID NO: 1421651 - RNA, 19 nt, Artificial Sequence
  Description of Artificial Sequence: Synthetic oligonucleotide
  Antisense strand to SEQ ID NO: 1421650
ucucggcgggacaagccgc

SEQ ID NO: 1421652 - RNA, 19 nt, Artificial Sequence
  Description of Artificial Sequence: Synthetic oligonucleotide
  Sense strand starting at position 3833 of SEQ ID NO: 1243519
ggaagccuugugcaaagua

SEQ ID NO: 1421653 - RNA, 19 nt, Artificial Sequence
  Description of Artificial Sequence: Synthetic oligonucleotide
  Antisense strand to SEQ ID NO: 1421652
uacuuugcacaaggcuucc

SEQ ID NO: 1421654 - RNA, 19 nt, Artificial Sequence
  Description of Artificial Sequence: Synthetic oligonucleotide
  Sense strand starting at position 100 of SEQ ID NO: 1243520
cuaauaaugguuuggcaac

SEQ ID NO: 1421655 - RNA, 19 nt, Artificial Sequence
  Description of Artificial Sequence: Synthetic oligonucleotide
  Antisense strand to SEQ ID NO: 1421654
guugccaaaccauuauuag

SEQ ID NO: 1421656 - RNA, 19 nt, Artificial Sequence
  Description of Artificial Sequence: Synthetic oligonucleotide
  Sense strand starting at position 235 of SEQ ID NO: 1243520
caagcuuuccugggagacu

SEQ ID NO: 1421657 - RNA, 19 nt, Artificial Sequence
  Description of Artificial Sequence: Synthetic oligonucleotide
  Antisense strand to SEQ ID NO: 1421656
agucucccaggaaagcuug

SEQ ID NO: 1421658 - RNA, 19 nt, Artificial Sequence
  Description of Artificial Sequence: Synthetic oligonucleotide
  Sense strand starting at position 362 of SEQ ID NO: 1243520
aggacugcauggcuagauu

SEQ ID NO: 1421659 - RNA, 19 nt, Artificial Sequence
  Description of Artificial Sequence: Synthetic oligonucleotide
  Antisense strand to SEQ ID NO: 1421658
aaucuagccaugcaguccu

SEQ ID NO: 1421660 - RNA, 19 nt, Artificial Sequence
  Description of Artificial Sequence: Synthetic oligonucleotide
  Sense strand starting at position 849 of SEQ ID NO: 1243520
ugcuguuaucaagaggauc

SEQ ID NO: 1421661 - RNA, 19 nt, Artificial Sequence
  Description of Artificial Sequence: Synthetic oligonucleotide
  Antisense strand to SEQ ID NO: 1421660
gauccucuugauaacagca

SEQ ID NO: 1421662 - RNA, 19 nt, Artificial Sequence
  Description of Artificial Sequence: Synthetic oligonucleotide
  Sense strand starting at position 885 of SEQ ID NO: 1243520
uagaacugcuuugugaaau

SEQ ID NO: 1421663 - RNA, 19 nt, Artificial Sequence
  Description of Artificial Sequence: Synthetic oligonucleotide
  Antisense strand to SEQ ID NO: 1421662
auuucacaaagcaguucua

SEQ ID NO: 1421664 - RNA, 19 nt, Artificial Sequence
  Description of Artificial Sequence: Synthetic oligonucleotide
  Sense strand starting at position 891 of SEQ ID NO: 1243520
ugcuuugugaaauaugaag

SEQ ID NO: 1421665 - RNA, 19 nt, Artificial Sequence
  Description of Artificial Sequence: Synthetic oligonucleotide
  Antisense strand to SEQ ID NO: 1421664
cuucauauuucacaaagca

SEQ ID NO: 1421666 - RNA, 19 nt, Artificial Sequence
  Description of Artificial Sequence: Synthetic oligonucleotide
  Sense strand starting at position 1117 of SEQ ID NO: 1243520
cugugaguaccuuaacuca

SEQ ID NO: 1421667 - RNA, 19 nt, Artificial Sequence
  Description of Artificial Sequence: Synthetic oligonucleotide
  Antisense strand to SEQ ID NO: 1421666
ugaguuaagguacucacag

SEQ ID NO: 1421668 - RNA, 19 nt, Artificial Sequence
  Description of Artificial Sequence: Synthetic oligonucleotide
  Sense strand starting at position 1433 of SEQ ID NO: 1243520
agagcagguccagaguuua

SEQ ID NO: 1421669 - RNA, 19 nt, Artificial Sequence
  Description of Artificial Sequence: Synthetic oligonucleotide
  Antisense strand to SEQ ID NO: 1421668
uaaacucuggaccugcucu

SEQ ID NO: 1421670 - RNA, 19 nt, Artificial Sequence
  Description of Artificial Sequence: Synthetic oligonucleotide
  Sense strand starting at position 1451 of SEQ ID NO: 1243520
aggcaaaggugagcugaau

SEQ ID NO: 1421671 - RNA, 19 nt, Artificial Sequence
  Description of Artificial Sequence: Synthetic oligonucleotide
  Antisense strand to SEQ ID NO: 1421670
auucagcucaccuuugccu

SEQ ID NO: 1421672 - RNA, 19 nt, Artificial Sequence
  Description of Artificial Sequence: Synthetic oligonucleotide
  Sense strand starting at position 1464 of SEQ ID NO: 1243520
cugaauuacccugggaggu

SEQ ID NO: 1421673 - RNA, 19 nt, Artificial Sequence
  Description of Artificial Sequence: Synthetic oligonucleotide
  Antisense strand to SEQ ID NO: 1421672
accucccaggguaauucag

SEQ ID NO: 1421674 - RNA, 19 nt, Artificial Sequence
  Description of Artificial Sequence: Synthetic oligonucleotide
  Sense strand starting at position 1585 of SEQ ID NO: 1243520
auaggagucuuuccugaau

SEQ ID NO: 1421675 - RNA, 19 nt, Artificial Sequence
  Description of Artificial Sequence: Synthetic oligonucleotide
  Antisense strand to SEQ ID NO: 1421674
auucaggaaagacuccuau

SEQ ID NO: 1421676 - RNA, 19 nt, Artificial Sequence
  Description of Artificial Sequence: Synthetic oligonucleotide
  Sense strand starting at position 1807 of SEQ ID NO: 1243520
ucacucaguccagagcuua

SEQ ID NO: 1421677 - RNA, 19 nt, Artificial Sequence
  Description of Artificial Sequence: Synthetic oligonucleotide
  Antisense strand to SEQ ID NO: 1421676
uaagcucuggacugaguga

SEQ ID NO: 1421678 - RNA, 19 nt, Artificial Sequence
  Description of Artificial Sequence: Synthetic oligonucleotide
  Sense strand starting at position 2028 of SEQ ID NO: 1243520
uuagcuggucuccaaggua

SEQ ID NO: 1421679 - RNA, 19 nt, Artificial Sequence
  Description of Artificial Sequence: Synthetic oligonucleotide
  Antisense strand to SEQ ID NO: 1421678
uaccuuggagaccagcuaa

SEQ ID NO: 1421680 - RNA, 19 nt, Artificial Sequence
  Description of Artificial Sequence: Synthetic oligonucleotide
  Sense strand starting at position 2103 of SEQ ID NO: 1243520
ggaagaagucaccagcugu

SEQ ID NO: 1421681 - RNA, 19 nt, Artificial Sequence
  Description of Artificial Sequence: Synthetic oligonucleotide
  Antisense strand to SEQ ID NO: 1421680
acagcuggugacuucuucc

SEQ ID NO: 1421682 - RNA, 19 nt, Artificial Sequence
  Description of Artificial Sequence: Synthetic oligonucleotide
  Sense strand starting at position 2225 of SEQ ID NO: 1243520
agcacagaacuaugguuua

SEQ ID NO: 1421683 - RNA, 19 nt, Artificial Sequence
  Description of Artificial Sequence: Synthetic oligonucleotide
  Antisense strand to SEQ ID NO: 1421682
uaaaccauaguucugugcu

SEQ ID NO: 1421684 - RNA, 19 nt, Artificial Sequence
  Description of Artificial Sequence: Synthetic oligonucleotide
  Sense strand starting at position 2235 of SEQ ID NO: 1243520
uaugguuuaggccaguaca

SEQ ID NO: 1421685 - RNA, 19 nt, Artificial Sequence
  Description of Artificial Sequence: Synthetic oligonucleotide
  Antisense strand to SEQ ID NO: 1421684
uguacuggccuaaaccaua

SEQ ID NO: 1421686 - RNA, 19 nt, Artificial Sequence
  Description of Artificial Sequence: Synthetic oligonucleotide
  Sense strand starting at position 2303 of SEQ ID NO: 1243520
uccagagaacucugccaca

SEQ ID NO: 1421687 - RNA, 19 nt, Artificial Sequence
  Description of Artificial Sequence: Synthetic oligonucleotide
  Antisense strand to SEQ ID NO: 1421686
uguggcagaguucucugga

SEQ ID NO: 1421688 - RNA, 19 nt, Artificial Sequence
  Description of Artificial Sequence: Synthetic oligonucleotide
  Sense strand starting at position 2463 of SEQ ID NO: 1243520
accucuucgcaucagaaga

SEQ ID NO: 1421689 - RNA, 19 nt, Artificial Sequence
  Description of Artificial Sequence: Synthetic oligonucleotide
  Antisense strand to SEQ ID NO: 1421688
ucuucugaugcgaagaggu

SEQ ID NO: 1421690 - RNA, 19 nt, Artificial Sequence
  Description of Artificial Sequence: Synthetic oligonucleotide
  Sense strand starting at position 2508 of SEQ ID NO: 1243520
cccggaugcccaugagaau

SEQ ID NO: 1421691 - RNA, 19 nt, Artificial Sequence
  Description of Artificial Sequence: Synthetic oligonucleotide
  Antisense strand to SEQ ID NO: 1421690
auucucaugggcauccggg

SEQ ID NO: 1421692 - RNA, 19 nt, Artificial Sequence
  Description of Artificial Sequence: Synthetic oligonucleotide
  Sense strand starting at position 2530 of SEQ ID NO: 1243520
cuggauuguuugcuaggaa

SEQ ID NO: 1421693 - RNA, 19 nt, Artificial Sequence
  Description of Artificial Sequence: Synthetic oligonucleotide
  Antisense strand to SEQ ID NO: 1421692
uuccuagcaaacaauccag

SEQ ID NO: 1421694 - RNA, 19 nt, Artificial Sequence
  Description of Artificial Sequence: Synthetic oligonucleotide
  Sense strand starting at position 2702 of SEQ ID NO: 1243520
aagugaugucaccaaaguc

SEQ ID NO: 1421695 - RNA, 19 nt, Artificial Sequence
  Description of Artificial Sequence: Synthetic oligonucleotide
  Antisense strand to SEQ ID NO: 1421694
gacuuuggugacaucacuu

SEQ ID NO: 1421696 - RNA, 19 nt, Artificial Sequence
  Description of Artificial Sequence: Synthetic oligonucleotide
  Sense strand starting at position 2727 of SEQ ID NO: 1243520
cuuguaagucgcuaaagga

SEQ ID NO: 1421697 - RNA, 19 nt, Artificial Sequence
  Description of Artificial Sequence: Synthetic oligonucleotide
  Antisense strand to SEQ ID NO: 1421696
uccuuuagcgacuuacaag

SEQ ID NO: 1421698 - RNA, 19 nt, Artificial Sequence
  Description of Artificial Sequence: Synthetic oligonucleotide
  Sense strand starting at position 2737 of SEQ ID NO: 1243520
gcuaaaggaucuguacuua

SEQ ID NO: 1421699 - RNA, 19 nt, Artificial Sequence
  Description of Artificial Sequence: Synthetic oligonucleotide
  Antisense strand to SEQ ID NO: 1421698
uaaguacagauccuuuagc

SEQ ID NO: 1421700 - RNA, 19 nt, Artificial Sequence
  Description of Artificial Sequence: Synthetic oligonucleotide
  Sense strand starting at position 2741 of SEQ ID NO: 1243520
aaggaucuguacuuaguuu

SEQ ID NO: 1421701 - RNA, 19 nt, Artificial Sequence
  Description of Artificial Sequence: Synthetic oligonucleotide
  Antisense strand to SEQ ID NO: 1421700
aaacuaaguacagauccuu

SEQ ID NO: 1421702 - RNA, 19 nt, Artificial Sequence
  Description of Artificial Sequence: Synthetic oligonucleotide
  Sense strand starting at position 2836 of SEQ ID NO: 1243520
ucaguuagaacaugagguu

SEQ ID NO: 1421703 - RNA, 19 nt, Artificial Sequence
  Description of Artificial Sequence: Synthetic oligonucleotide
  Antisense strand to SEQ ID NO: 1421702
aaccucauguucuaacuga

SEQ ID NO: 1421704 - RNA, 19 nt, Artificial Sequence
  Description of Artificial Sequence: Synthetic oligonucleotide
  Sense strand starting at position 3158 of SEQ ID NO: 1243520
acuugugguagucaucaua

SEQ ID NO: 1421705 - RNA, 19 nt, Artificial Sequence
  Description of Artificial Sequence: Synthetic oligonucleotide
  Antisense strand to SEQ ID NO: 1421704
uaugaugacuaccacaagu

SEQ ID NO: 1421706 - RNA, 19 nt, Artificial Sequence
  Description of Artificial Sequence: Synthetic oligonucleotide
  Sense strand starting at position 3287 of SEQ ID NO: 1243520
gguugagagcaccauguau

SEQ ID NO: 1421707 - RNA, 19 nt, Artificial Sequence
  Description of Artificial Sequence: Synthetic oligonucleotide
  Antisense strand to SEQ ID NO: 1421706
auacauggugcucucaacc

SEQ ID NO: 1421708 - RNA, 19 nt, Artificial Sequence
  Description of Artificial Sequence: Synthetic oligonucleotide
  Sense strand starting at position 3289 of SEQ ID NO: 1243520
uugagagcaccauguauaa

SEQ ID NO: 1421709 - RNA, 19 nt, Artificial Sequence
  Description of Artificial Sequence: Synthetic oligonucleotide
  Antisense strand to SEQ ID NO: 1421708
uuauacauggugcucucaa

SEQ ID NO: 1421710 - RNA, 19 nt, Artificial Sequence
  Description of Artificial Sequence: Synthetic oligonucleotide
  Sense strand starting at position 3301 of SEQ ID NO: 1243520
uguauaagaccacagcauu

SEQ ID NO: 1421711 - RNA, 19 nt, Artificial Sequence
  Description of Artificial Sequence: Synthetic oligonucleotide
  Antisense strand to SEQ ID NO: 1421710
aaugcuguggucuuauaca

SEQ ID NO: 1421712 - RNA, 19 nt, Artificial Sequence
  Description of Artificial Sequence: Synthetic oligonucleotide
  Sense strand starting at position 3402 of SEQ ID NO: 1243520
aauggcuacucggugaaca

SEQ ID NO: 1421713 - RNA, 19 nt, Artificial Sequence
  Description of Artificial Sequence: Synthetic oligonucleotide
  Antisense strand to SEQ ID NO: 1421712
uguucaccgaguagccauu

SEQ ID NO: 1421714 - RNA, 19 nt, Artificial Sequence
  Description of Artificial Sequence: Synthetic oligonucleotide
  Sense strand starting at position 3439 of SEQ ID NO: 1243520
gcccaucuugauggaaauu

SEQ ID NO: 1421715 - RNA, 19 nt, Artificial Sequence
  Description of Artificial Sequence: Synthetic oligonucleotide
  Antisense strand to SEQ ID NO: 1421714
aauuuccaucaagaugggc

SEQ ID NO: 1421716 - RNA, 19 nt, Artificial Sequence
  Description of Artificial Sequence: Synthetic oligonucleotide
  Sense strand starting at position 3575 of SEQ ID NO: 1243520
caacacugugcauagaagu

SEQ ID NO: 1421717 - RNA, 19 nt, Artificial Sequence
  Description of Artificial Sequence: Synthetic oligonucleotide
  Antisense strand to SEQ ID NO: 1421716
acuucuaugcacaguguug

SEQ ID NO: 1421718 - RNA, 19 nt, Artificial Sequence
  Description of Artificial Sequence: Synthetic oligonucleotide
  Sense strand starting at position 3605 of SEQ ID NO: 1243520
cuggaaacucuuuguuccu

SEQ ID NO: 1421719 - RNA, 19 nt, Artificial Sequence
  Description of Artificial Sequence: Synthetic oligonucleotide
  Antisense strand to SEQ ID NO: 1421718
aggaacaaagaguuuccag

SEQ ID NO: 1421720 - RNA, 19 nt, Artificial Sequence
  Description of Artificial Sequence: Synthetic oligonucleotide
  Sense strand starting at position 3631 of SEQ ID NO: 1243520
uguacuugagccuacacaa

SEQ ID NO: 1421721 - RNA, 19 nt, Artificial Sequence
  Description of Artificial Sequence: Synthetic oligonucleotide
  Antisense strand to SEQ ID NO: 1421720
uuguguaggcucaaguaca

SEQ ID NO: 1421722 - RNA, 19 nt, Artificial Sequence
  Description of Artificial Sequence: Synthetic oligonucleotide
  Sense strand starting at position 3664 of SEQ ID NO: 1243520
agaucucugccagguggau

SEQ ID NO: 1421723 - RNA, 19 nt, Artificial Sequence
  Description of Artificial Sequence: Synthetic oligonucleotide
  Antisense strand to SEQ ID NO: 1421722
auccaccuggcagagaucu

SEQ ID NO: 1421724 - RNA, 19 nt, Artificial Sequence
  Description of Artificial Sequence: Synthetic oligonucleotide
  Sense strand starting at position 3666 of SEQ ID NO: 1243520
aucucugccagguggauaa

SEQ ID NO: 1421725 - RNA, 19 nt, Artificial Sequence
  Description of Artificial Sequence: Synthetic oligonucleotide
  Antisense strand to SEQ ID NO: 1421724
uuauccaccuggcagagau

SEQ ID NO: 1421726 - RNA, 19 nt, Artificial Sequence
  Description of Artificial Sequence: Synthetic oligonucleotide
  Sense strand starting at position 3705 of SEQ ID NO: 1243520
cuguaugacucaucaagag

SEQ ID NO: 1421727 - RNA, 19 nt, Artificial Sequence
  Description of Artificial Sequence: Synthetic oligonucleotide
  Antisense strand to SEQ ID NO: 1421726
cucuugaugagucauacag

SEQ ID NO: 1421728 - RNA, 19 nt, Artificial Sequence
  Description of Artificial Sequence: Synthetic oligonucleotide
  Sense strand starting at position 3826 of SEQ ID NO: 1243520
ggcucuuggaaauggauca

SEQ ID NO: 1421729 - RNA, 19 nt, Artificial Sequence
  Description of Artificial Sequence: Synthetic oligonucleotide
  Antisense strand to SEQ ID NO: 1421728
ugauccauuuccaagagcc

SEQ ID NO: 1421730 - RNA, 19 nt, Artificial Sequence
  Description of Artificial Sequence: Synthetic oligonucleotide
  Sense strand starting at position 3884 of SEQ ID NO: 1243520
cguggucccauccaggaau

SEQ ID NO: 1421731 - RNA, 19 nt, Artificial Sequence
  Description of Artificial Sequence: Synthetic oligonucleotide
  Antisense strand to SEQ ID NO: 1421730
auuccuggaugggaccacg

SEQ ID NO: 1421732 - RNA, 19 nt, Artificial Sequence
  Description of Artificial Sequence: Synthetic oligonucleotide
  Sense strand starting at position 3886 of SEQ ID NO: 1243520
uggucccauccaggaauau

SEQ ID NO: 1421733 - RNA, 19 nt, Artificial Sequence
  Description of Artificial Sequence: Synthetic oligonucleotide
  Antisense strand to SEQ ID NO: 1421732
auauuccuggaugggacca

SEQ ID NO: 1421734 - RNA, 19 nt, Artificial Sequence
  Description of Artificial Sequence: Synthetic oligonucleotide
  Sense strand starting at position 187 of SEQ ID NO: 1243521
cugccaggaucugucuuaa

SEQ ID NO: 1421735 - RNA, 19 nt, Artificial Sequence
  Description of Artificial Sequence: Synthetic oligonucleotide
  Antisense strand to SEQ ID NO: 1421734
uuaagacagauccuggcag

SEQ ID NO: 1421736 - RNA, 19 nt, Artificial Sequence
  Description of Artificial Sequence: Synthetic oligonucleotide
  Sense strand starting at position 198 of SEQ ID NO: 1243521
ugucuuaaguggccugaaa

SEQ ID NO: 1421737 - RNA, 19 nt, Artificial Sequence
  Description of Artificial Sequence: Synthetic oligonucleotide
  Antisense strand to SEQ ID NO: 1421736
uuucaggccacuuaagaca

SEQ ID NO: 1421738 - RNA, 19 nt, Artificial Sequence
  Description of Artificial Sequence: Synthetic oligonucleotide
  Sense strand starting at position 529 of SEQ ID NO: 1243521
ucaauuucugcuggucuca

SEQ ID NO: 1421739 - RNA, 19 nt, Artificial Sequence
  Description of Artificial Sequence: Synthetic oligonucleotide
  Antisense strand to SEQ ID NO: 1421738
ugagaccagcagaaauuga

SEQ ID NO: 1421740 - RNA, 19 nt, Artificial Sequence
  Description of Artificial Sequence: Synthetic oligonucleotide
  Sense strand starting at position 779 of SEQ ID NO: 1243521
guccuuucugcggagguca

SEQ ID NO: 1421741 - RNA, 19 nt, Artificial Sequence
  Description of Artificial Sequence: Synthetic oligonucleotide
  Antisense strand to SEQ ID NO: 1421740
ugaccuccgcagaaaggac

SEQ ID NO: 1421742 - RNA, 19 nt, Artificial Sequence
  Description of Artificial Sequence: Synthetic oligonucleotide
  Sense strand starting at position 781 of SEQ ID NO: 1243521
ccuuucugcggaggucaaa

SEQ ID NO: 1421743 - RNA, 19 nt, Artificial Sequence
  Description of Artificial Sequence: Synthetic oligonucleotide
  Antisense strand to SEQ ID NO: 1421742
uuugaccuccgcagaaagg

SEQ ID NO: 1421744 - RNA, 19 nt, Artificial Sequence
  Description of Artificial Sequence: Synthetic oligonucleotide
  Sense strand starting at position 877 of SEQ ID NO: 1243521
ugcgcuuguguucugugaa

SEQ ID NO: 1421745 - RNA, 19 nt, Artificial Sequence
  Description of Artificial Sequence: Synthetic oligonucleotide
  Antisense strand to SEQ ID NO: 1421744
uucacagaacacaagcgca

SEQ ID NO: 1421746 - RNA, 19 nt, Artificial Sequence
  Description of Artificial Sequence: Synthetic oligonucleotide
  Sense strand starting at position 880 of SEQ ID NO: 1243521
gcuuguguucugugaacag

SEQ ID NO: 1421747 - RNA, 19 nt, Artificial Sequence
  Description of Artificial Sequence: Synthetic oligonucleotide
  Antisense strand to SEQ ID NO: 1421746
cuguucacagaacacaagc

SEQ ID NO: 1421748 - RNA, 19 nt, Artificial Sequence
  Description of Artificial Sequence: Synthetic oligonucleotide
  Sense strand starting at position 1069 of SEQ ID NO: 1243521
guuccuccucgauggcaua

SEQ ID NO: 1421749 - RNA, 19 nt, Artificial Sequence
  Description of Artificial Sequence: Synthetic oligonucleotide
  Antisense strand to SEQ ID NO: 1421748
uaugccaucgaggaggaac

SEQ ID NO: 1421750 - RNA, 19 nt, Artificial Sequence
  Description of Artificial Sequence: Synthetic oligonucleotide
  Sense strand starting at position 1362 of SEQ ID NO: 1243521
cgggcuggucagucuuagu

SEQ ID NO: 1421751 - RNA, 19 nt, Artificial Sequence
  Description of Artificial Sequence: Synthetic oligonucleotide
  Antisense strand to SEQ ID NO: 1421750
acuaagacugaccagcccg

SEQ ID NO: 1421752 - RNA, 19 nt, Artificial Sequence
  Description of Artificial Sequence: Synthetic oligonucleotide
  Sense strand starting at position 1369 of SEQ ID NO: 1243521
gucagucuuagugagccaa

SEQ ID NO: 1421753 - RNA, 19 nt, Artificial Sequence
  Description of Artificial Sequence: Synthetic oligonucleotide
  Antisense strand to SEQ ID NO: 1421752
uuggcucacuaagacugac

SEQ ID NO: 1421754 - RNA, 19 nt, Artificial Sequence
  Description of Artificial Sequence: Synthetic oligonucleotide
  Sense strand starting at position 1371 of SEQ ID NO: 1243521
cagucuuagugagccaauc

SEQ ID NO: 1421755 - RNA, 19 nt, Artificial Sequence
  Description of Artificial Sequence: Synthetic oligonucleotide
  Antisense strand to SEQ ID NO: 1421754
gauuggcucacuaagacug

SEQ ID NO: 1421756 - RNA, 19 nt, Artificial Sequence
  Description of Artificial Sequence: Synthetic oligonucleotide
  Sense strand starting at position 1518 of SEQ ID NO: 1243521
gucugacuuccacggaaga

SEQ ID NO: 1421757 - RNA, 19 nt, Artificial Sequence
  Description of Artificial Sequence: Synthetic oligonucleotide
  Antisense strand to SEQ ID NO: 1421756
ucuuccguggaagucagac

SEQ ID NO: 1421758 - RNA, 19 nt, Artificial Sequence
  Description of Artificial Sequence: Synthetic oligonucleotide
  Sense strand starting at position 1531 of SEQ ID NO: 1243521
ggaagacucuagcuggaca

SEQ ID NO: 1421759 - RNA, 19 nt, Artificial Sequence
  Description of Artificial Sequence: Synthetic oligonucleotide
  Antisense strand to SEQ ID NO: 1421758
uguccagcuagagucuucc

SEQ ID NO: 1421760 - RNA, 19 nt, Artificial Sequence
  Description of Artificial Sequence: Synthetic oligonucleotide
  Sense strand starting at position 2178 of SEQ ID NO: 1243521
ggugcugugcuugugugau

SEQ ID NO: 1421761 - RNA, 19 nt, Artificial Sequence
  Description of Artificial Sequence: Synthetic oligonucleotide
  Antisense strand to SEQ ID NO: 1421760
aucacacaagcacagcacc

SEQ ID NO: 1421762 - RNA, 19 nt, Artificial Sequence
  Description of Artificial Sequence: Synthetic oligonucleotide
  Sense strand starting at position 2186 of SEQ ID NO: 1243521
gcuugugugauugguuuau

SEQ ID NO: 1421763 - RNA, 19 nt, Artificial Sequence
  Description of Artificial Sequence: Synthetic oligonucleotide
  Antisense strand to SEQ ID NO: 1421762
auaaaccaaucacacaagc

SEQ ID NO: 1421764 - RNA, 19 nt, Artificial Sequence
  Description of Artificial Sequence: Synthetic oligonucleotide
  Sense strand starting at position 2188 of SEQ ID NO: 1243521
uugugugauugguuuauuu

SEQ ID NO: 1421765 - RNA, 19 nt, Artificial Sequence
  Description of Artificial Sequence: Synthetic oligonucleotide
  Antisense strand to SEQ ID NO: 1421764
aaauaaaccaaucacacaa

SEQ ID NO: 1421766 - RNA, 19 nt, Artificial Sequence
  Description of Artificial Sequence: Synthetic oligonucleotide
  Sense strand starting at position 2359 of SEQ ID NO: 1243521
ccggcuaauuuggcuaauu

SEQ ID NO: 1421767 - RNA, 19 nt, Artificial Sequence
  Description of Artificial Sequence: Synthetic oligonucleotide
  Antisense strand to SEQ ID NO: 1421766
aauuagccaaauuagccgg

SEQ ID NO: 1421768 - RNA, 19 nt, Artificial Sequence
  Description of Artificial Sequence: Synthetic oligonucleotide
  Sense strand starting at position 2578 of SEQ ID NO: 1243521
ucuggucaucccuagacaa

SEQ ID NO: 1421769 - RNA, 19 nt, Artificial Sequence
  Description of Artificial Sequence: Synthetic oligonucleotide
  Antisense strand to SEQ ID NO: 1421768
uugucuagggaugaccaga

SEQ ID NO: 1421770 - RNA, 19 nt, Artificial Sequence
  Description of Artificial Sequence: Synthetic oligonucleotide
  Sense strand starting at position 2580 of SEQ ID NO: 1243521
uggucaucccuagacaagu

SEQ ID NO: 1421771 - RNA, 19 nt, Artificial Sequence
  Description of Artificial Sequence: Synthetic oligonucleotide
  Antisense strand to SEQ ID NO: 1421770
acuugucuagggaugacca

SEQ ID NO: 1421772 - RNA, 19 nt, Artificial Sequence
  Description of Artificial Sequence: Synthetic oligonucleotide
  Sense strand starting at position 2748 of SEQ ID NO: 1243521
cccacuaugcugugaauga

SEQ ID NO: 1421773 - RNA, 19 nt, Artificial Sequence
  Description of Artificial Sequence: Synthetic oligonucleotide
  Antisense strand to SEQ ID NO: 1421772
ucauucacagcauaguggg

SEQ ID NO: 1421774 - RNA, 19 nt, Artificial Sequence
  Description of Artificial Sequence: Synthetic oligonucleotide
  Sense strand starting at position 2876 of SEQ ID NO: 1243521
gugcgaugccuccuccaca

SEQ ID NO: 1421775 - RNA, 19 nt, Artificial Sequence
  Description of Artificial Sequence: Synthetic oligonucleotide
  Antisense strand to SEQ ID NO: 1421774
uguggaggaggcaucgcac

SEQ ID NO: 1421776 - RNA, 19 nt, Artificial Sequence
  Description of Artificial Sequence: Synthetic oligonucleotide
  Sense strand starting at position 2994 of SEQ ID NO: 1243521
gucacauacgagugugaau

SEQ ID NO: 1421777 - RNA, 19 nt, Artificial Sequence
  Description of Artificial Sequence: Synthetic oligonucleotide
  Antisense strand to SEQ ID NO: 1421776
auucacacucguaugugac

SEQ ID NO: 1421778 - RNA, 19 nt, Artificial Sequence
  Description of Artificial Sequence: Synthetic oligonucleotide
  Sense strand starting at position 3006 of SEQ ID NO: 1243521
ugugaauuccaccaaggca

SEQ ID NO: 1421779 - RNA, 19 nt, Artificial Sequence
  Description of Artificial Sequence: Synthetic oligonucleotide
  Antisense strand to SEQ ID NO: 1421778
ugccuugguggaauucaca

SEQ ID NO: 1421780 - RNA, 19 nt, Artificial Sequence
  Description of Artificial Sequence: Synthetic oligonucleotide
  Sense strand starting at position 3730 of SEQ ID NO: 1243521
ugagccauugucugcuauu

SEQ ID NO: 1421781 - RNA, 19 nt, Artificial Sequence
  Description of Artificial Sequence: Synthetic oligonucleotide
  Antisense strand to SEQ ID NO: 1421780
aauagcagacaauggcuca

SEQ ID NO: 1421782 - RNA, 19 nt, Artificial Sequence
  Description of Artificial Sequence: Synthetic oligonucleotide
  Sense strand starting at position 3731 of SEQ ID NO: 1243521
gagccauugucugcuauug

SEQ ID NO: 1421783 - RNA, 19 nt, Artificial Sequence
  Description of Artificial Sequence: Synthetic oligonucleotide
  Antisense strand to SEQ ID NO: 1421782
caauagcagacaauggcuc

SEQ ID NO: 1421784 - RNA, 19 nt, Artificial Sequence
  Description of Artificial Sequence: Synthetic oligonucleotide
  Sense strand starting at position 3786 of SEQ ID NO: 1243521
gccuguuacuguguauaga

SEQ ID NO: 1421785 - RNA, 19 nt, Artificial Sequence
  Description of Artificial Sequence: Synthetic oligonucleotide
  Antisense strand to SEQ ID NO: 1421784
ucuauacacaguaacaggc

SEQ ID NO: 1421786 - RNA, 19 nt, Artificial Sequence
  Description of Artificial Sequence: Synthetic oligonucleotide
  Sense strand starting at position 3787 of SEQ ID NO: 1243521
ccuguuacuguguauagaa

SEQ ID NO: 1421787 - RNA, 19 nt, Artificial Sequence
  Description of Artificial Sequence: Synthetic oligonucleotide
  Antisense strand to SEQ ID NO: 1421786
uucuauacacaguaacagg

SEQ ID NO: 1421788 - RNA, 19 nt, Artificial Sequence
  Description of Artificial Sequence: Synthetic oligonucleotide
  Sense strand starting at position 3789 of SEQ ID NO: 1243521
uguuacuguguauagaaca

SEQ ID NO: 1421789 - RNA, 19 nt, Artificial Sequence
  Description of Artificial Sequence: Synthetic oligonucleotide
  Antisense strand to SEQ ID NO: 1421788
uguucuauacacaguaaca

SEQ ID NO: 1421790 - RNA, 19 nt, Artificial Sequence
  Description of Artificial Sequence: Synthetic oligonucleotide
  Sense strand starting at position 3796 of SEQ ID NO: 1243521
guguauagaacaggguuua

SEQ ID NO: 1421791 - RNA, 19 nt, Artificial Sequence
  Description of Artificial Sequence: Synthetic oligonucleotide
  Antisense strand to SEQ ID NO: 1421790
uaaacccuguucuauacac

SEQ ID NO: 1421792 - RNA, 19 nt, Artificial Sequence
  Description of Artificial Sequence: Synthetic oligonucleotide
  Sense strand starting at position 3797 of SEQ ID NO: 1243521
uguauagaacaggguuuau

SEQ ID NO: 1421793 - RNA, 19 nt, Artificial Sequence
  Description of Artificial Sequence: Synthetic oligonucleotide
  Antisense strand to SEQ ID NO: 1421792
auaaacccuguucuauaca

SEQ ID NO: 1421794 - RNA, 19 nt, Artificial Sequence
  Description of Artificial Sequence: Synthetic oligonucleotide
  Sense strand starting at position 3835 of SEQ ID NO: 1243521
ugggcuagagucuggauau

SEQ ID NO: 1421795 - RNA, 19 nt, Artificial Sequence
  Description of Artificial Sequence: Synthetic oligonucleotide
  Antisense strand to SEQ ID NO: 1421794
auauccagacucuagccca

SEQ ID NO: 1421796 - RNA, 19 nt, Artificial Sequence
  Description of Artificial Sequence: Synthetic oligonucleotide
  Sense strand starting at position 3845 of SEQ ID NO: 1243521
ucuggauauguuggaggga

SEQ ID NO: 1421797 - RNA, 19 nt, Artificial Sequence
  Description of Artificial Sequence: Synthetic oligonucleotide
  Antisense strand to SEQ ID NO: 1421796
ucccuccaacauauccaga

SEQ ID NO: 1421798 - RNA, 19 nt, Artificial Sequence
  Description of Artificial Sequence: Synthetic oligonucleotide
  Sense strand starting at position 3846 of SEQ ID NO: 1243521
cuggauauguuggagggaa

SEQ ID NO: 1421799 - RNA, 19 nt, Artificial Sequence
  Description of Artificial Sequence: Synthetic oligonucleotide
  Antisense strand to SEQ ID NO: 1421798
uucccuccaacauauccag

SEQ ID NO: 1421800 - RNA, 19 nt, Artificial Sequence
  Description of Artificial Sequence: Synthetic oligonucleotide
  Sense strand starting at position 3847 of SEQ ID NO: 1243521
uggauauguuggagggaau

SEQ ID NO: 1421801 - RNA, 19 nt, Artificial Sequence
  Description of Artificial Sequence: Synthetic oligonucleotide
  Antisense strand to SEQ ID NO: 1421800
auucccuccaacauaucca

SEQ ID NO: 1421802 - RNA, 19 nt, Artificial Sequence
  Description of Artificial Sequence: Synthetic oligonucleotide
  Sense strand starting at position 3859 of SEQ ID NO: 1243521
agggaauauuauguguagu

SEQ ID NO: 1421803 - RNA, 19 nt, Artificial Sequence
  Description of Artificial Sequence: Synthetic oligonucleotide
  Antisense strand to SEQ ID NO: 1421802
acuacacauaauauucccu

SEQ ID NO: 1421804 - RNA, 19 nt, Artificial Sequence
  Description of Artificial Sequence: Synthetic oligonucleotide
  Sense strand starting at position 3860 of SEQ ID NO: 1243521
gggaauauuauguguagug

SEQ ID NO: 1421805 - RNA, 19 nt, Artificial Sequence
  Description of Artificial Sequence: Synthetic oligonucleotide
  Antisense strand to SEQ ID NO: 1421804
cacuacacauaauauuccc

SEQ ID NO: 1421806 - RNA, 19 nt, Artificial Sequence
  Description of Artificial Sequence: Synthetic oligonucleotide
  Sense strand starting at position 3861 of SEQ ID NO: 1243521
ggaauauuauguguaguga

SEQ ID NO: 1421807 - RNA, 19 nt, Artificial Sequence
  Description of Artificial Sequence: Synthetic oligonucleotide
  Antisense strand to SEQ ID NO: 1421806
ucacuacacauaauauucc

SEQ ID NO: 1421808 - RNA, 19 nt, Artificial Sequence
  Description of Artificial Sequence: Synthetic oligonucleotide
  Sense strand starting at position 3862 of SEQ ID NO: 1243521
gaauauuauguguagugac

SEQ ID NO: 1421809 - RNA, 19 nt, Artificial Sequence
  Description of Artificial Sequence: Synthetic oligonucleotide
  Antisense strand to SEQ ID NO: 1421808
gucacuacacauaauauuc

SEQ ID NO: 1421810 - RNA, 19 nt, Artificial Sequence
  Description of Artificial Sequence: Synthetic oligonucleotide
  Sense strand starting at position 3884 of SEQ ID NO: 1243521
aguguugucucucccuuua

SEQ ID NO: 1421811 - RNA, 19 nt, Artificial Sequence
  Description of Artificial Sequence: Synthetic oligonucleotide
  Antisense strand to SEQ ID NO: 1421810
uaaagggagagacaacacu

SEQ ID NO: 1421812 - RNA, 19 nt, Artificial Sequence
  Description of Artificial Sequence: Synthetic oligonucleotide
  Sense strand starting at position 3889 of SEQ ID NO: 1243521
ugucucucccuuuaaggaa

SEQ ID NO: 1421813 - RNA, 19 nt, Artificial Sequence
  Description of Artificial Sequence: Synthetic oligonucleotide
  Antisense strand to SEQ ID NO: 1421812
uuccuuaaagggagagaca

SEQ ID NO: 1421814 - RNA, 19 nt, Artificial Sequence
  Description of Artificial Sequence: Synthetic oligonucleotide
  Sense strand starting at position 318 of SEQ ID NO: 1243522
cacuacagucugggucaua

SEQ ID NO: 1421815 - RNA, 19 nt, Artificial Sequence
  Description of Artificial Sequence: Synthetic oligonucleotide
  Antisense strand to SEQ ID NO: 1421814
uaugacccagacuguagug

SEQ ID NO: 1421816 - RNA, 19 nt, Artificial Sequence
  Description of Artificial Sequence: Synthetic oligonucleotide
  Sense strand starting at position 444 of SEQ ID NO: 1243522
agagcuacccacuaugagu

SEQ ID NO: 1421817 - RNA, 19 nt, Artificial Sequence
  Description of Artificial Sequence: Synthetic oligonucleotide
  Antisense strand to SEQ ID NO: 1421816
acucauaguggguagcucu

SEQ ID NO: 1421818 - RNA, 19 nt, Artificial Sequence
  Description of Artificial Sequence: Synthetic oligonucleotide
  Sense strand starting at position 458 of SEQ ID NO: 1243522
ugaguaaaguaguccaaug

SEQ ID NO: 1421819 - RNA, 19 nt, Artificial Sequence
  Description of Artificial Sequence: Synthetic oligonucleotide
  Antisense strand to SEQ ID NO: 1421818
cauuggacuacuuuacuca

SEQ ID NO: 1421820 - RNA, 19 nt, Artificial Sequence
  Description of Artificial Sequence: Synthetic oligonucleotide
  Sense strand starting at position 463 of SEQ ID NO: 1243522
aaaguaguccaaugagcua

SEQ ID NO: 1421821 - RNA, 19 nt, Artificial Sequence
  Description of Artificial Sequence: Synthetic oligonucleotide
  Antisense strand to SEQ ID NO: 1421820
uagcucauuggacuacuuu

SEQ ID NO: 1421822 - RNA, 19 nt, Artificial Sequence
  Description of Artificial Sequence: Synthetic oligonucleotide
  Sense strand starting at position 572 of SEQ ID NO: 1243522
cgaggcugugcucagugaa

SEQ ID NO: 1421823 - RNA, 19 nt, Artificial Sequence
  Description of Artificial Sequence: Synthetic oligonucleotide
  Antisense strand to SEQ ID NO: 1421822
uucacugagcacagccucg

SEQ ID NO: 1421824 - RNA, 19 nt, Artificial Sequence
  Description of Artificial Sequence: Synthetic oligonucleotide
  Sense strand starting at position 575 of SEQ ID NO: 1243522
ggcugugcucagugaauca

SEQ ID NO: 1421825 - RNA, 19 nt, Artificial Sequence
  Description of Artificial Sequence: Synthetic oligonucleotide
  Antisense strand to SEQ ID NO: 1421824
ugauucacugagcacagcc

SEQ ID NO: 1421826 - RNA, 19 nt, Artificial Sequence
  Description of Artificial Sequence: Synthetic oligonucleotide
  Sense strand starting at position 796 of SEQ ID NO: 1243522
gcugaacugagcggugauu

SEQ ID NO: 1421827 - RNA, 19 nt, Artificial Sequence
  Description of Artificial Sequence: Synthetic oligonucleotide
  Antisense strand to SEQ ID NO: 1421826
aaucaccgcucaguucagc

SEQ ID NO: 1421828 - RNA, 19 nt, Artificial Sequence
  Description of Artificial Sequence: Synthetic oligonucleotide
  Sense strand starting at position 798 of SEQ ID NO: 1243522
ugaacugagcggugauuca

SEQ ID NO: 1421829 - RNA, 19 nt, Artificial Sequence
  Description of Artificial Sequence: Synthetic oligonucleotide
  Antisense strand to SEQ ID NO: 1421828
ugaaucaccgcucaguuca

SEQ ID NO: 1421830 - RNA, 19 nt, Artificial Sequence
  Description of Artificial Sequence: Synthetic oligonucleotide
  Sense strand starting at position 1258 of SEQ ID NO: 1243522
ugacguguacggagugaug

SEQ ID NO: 1421831 - RNA, 19 nt, Artificial Sequence
  Description of Artificial Sequence: Synthetic oligonucleotide
  Antisense strand to SEQ ID NO: 1421830
caucacuccguacacguca

SEQ ID NO: 1421832 - RNA, 19 nt, Artificial Sequence
  Description of Artificial Sequence: Synthetic oligonucleotide
  Sense strand starting at position 1698 of SEQ ID NO: 1243522
ggccuaagaggucggcuaa

SEQ ID NO: 1421833 - RNA, 19 nt, Artificial Sequence
  Description of Artificial Sequence: Synthetic oligonucleotide
  Antisense strand to SEQ ID NO: 1421832
uuagccgaccucuuaggcc

SEQ ID NO: 1421834 - RNA, 19 nt, Artificial Sequence
  Description of Artificial Sequence: Synthetic oligonucleotide
  Sense strand starting at position 2028 of SEQ ID NO: 1243522
agcucaagccauugguuga

SEQ ID NO: 1421835 - RNA, 19 nt, Artificial Sequence
  Description of Artificial Sequence: Synthetic oligonucleotide
  Antisense strand to SEQ ID NO: 1421834
ucaaccaauggcuugagcu

SEQ ID NO: 1421836 - RNA, 19 nt, Artificial Sequence
  Description of Artificial Sequence: Synthetic oligonucleotide
  Sense strand starting at position 2133 of SEQ ID NO: 1243522
cgucacuugguuugaguca

SEQ ID NO: 1421837 - RNA, 19 nt, Artificial Sequence
  Description of Artificial Sequence: Synthetic oligonucleotide
  Antisense strand to SEQ ID NO: 1421836
ugacucaaaccaagugacg

SEQ ID NO: 1421838 - RNA, 19 nt, Artificial Sequence
  Description of Artificial Sequence: Synthetic oligonucleotide
  Sense strand starting at position 2191 of SEQ ID NO: 1243522
agcucugccgggaguugua

SEQ ID NO: 1421839 - RNA, 19 nt, Artificial Sequence
  Description of Artificial Sequence: Synthetic oligonucleotide
  Antisense strand to SEQ ID NO: 1421838
uacaacucccggcagagcu

SEQ ID NO: 1421840 - RNA, 19 nt, Artificial Sequence
  Description of Artificial Sequence: Synthetic oligonucleotide
  Sense strand starting at position 2678 of SEQ ID NO: 1243522
ugccuaucccaucgagaua

SEQ ID NO: 1421841 - RNA, 19 nt, Artificial Sequence
  Description of Artificial Sequence: Synthetic oligonucleotide
  Antisense strand to SEQ ID NO: 1421840
uaucucgaugggauaggca

SEQ ID NO: 1421842 - RNA, 19 nt, Artificial Sequence
  Description of Artificial Sequence: Synthetic oligonucleotide
  Sense strand starting at position 2740 of SEQ ID NO: 1243522
cagcgccucccguaacaau

SEQ ID NO: 1421843 - RNA, 19 nt, Artificial Sequence
  Description of Artificial Sequence: Synthetic oligonucleotide
  Antisense strand to SEQ ID NO: 1421842
auuguuacgggaggcgcug

SEQ ID NO: 1421844 - RNA, 19 nt, Artificial Sequence
  Description of Artificial Sequence: Synthetic oligonucleotide
  Sense strand starting at position 2747 of SEQ ID NO: 1243522
ucccguaacaaugaaggua

SEQ ID NO: 1421845 - RNA, 19 nt, Artificial Sequence
  Description of Artificial Sequence: Synthetic oligonucleotide
  Antisense strand to SEQ ID NO: 1421844
uaccuucauuguuacggga

SEQ ID NO: 1421846 - RNA, 19 nt, Artificial Sequence
  Description of Artificial Sequence: Synthetic oligonucleotide
  Sense strand starting at position 2762 of SEQ ID NO: 1243522
gguagacuuaaaugugaga

SEQ ID NO: 1421847 - RNA, 19 nt, Artificial Sequence
  Description of Artificial Sequence: Synthetic oligonucleotide
  Antisense strand to SEQ ID NO: 1421846
ucucacauuuaagucuacc

SEQ ID NO: 1421848 - RNA, 19 nt, Artificial Sequence
  Description of Artificial Sequence: Synthetic oligonucleotide
  Sense strand starting at position 2765 of SEQ ID NO: 1243522
agacuuaaaugugagaauc

SEQ ID NO: 1421849 - RNA, 19 nt, Artificial Sequence
  Description of Artificial Sequence: Synthetic oligonucleotide
  Antisense strand to SEQ ID NO: 1421848
gauucucacauuuaagucu

SEQ ID NO: 1421850 - RNA, 19 nt, Artificial Sequence
  Description of Artificial Sequence: Synthetic oligonucleotide
  Sense strand starting at position 2767 of SEQ ID NO: 1243522
acuuaaaugugagaaucca

SEQ ID NO: 1421851 - RNA, 19 nt, Artificial Sequence
  Description of Artificial Sequence: Synthetic oligonucleotide
  Antisense strand to SEQ ID NO: 1421850
uggauucucacauuuaagu

SEQ ID NO: 1421852 - RNA, 19 nt, Artificial Sequence
  Description of Artificial Sequence: Synthetic oligonucleotide
  Sense strand starting at position 2791 of SEQ ID NO: 1243522
uuucuugaucuguagucca

SEQ ID NO: 1421853 - RNA, 19 nt, Artificial Sequence
  Description of Artificial Sequence: Synthetic oligonucleotide
  Antisense strand to SEQ ID NO: 1421852
uggacuacagaucaagaaa

SEQ ID NO: 1421854 - RNA, 19 nt, Artificial Sequence
  Description of Artificial Sequence: Synthetic oligonucleotide
  Sense strand starting at position 2799 of SEQ ID NO: 1243522
ucuguaguccaaugcucua

SEQ ID NO: 1421855 - RNA, 19 nt, Artificial Sequence
  Description of Artificial Sequence: Synthetic oligonucleotide
  Antisense strand to SEQ ID NO: 1421854
uagagcauuggacuacaga

SEQ ID NO: 1421856 - RNA, 19 nt, Artificial Sequence
  Description of Artificial Sequence: Synthetic oligonucleotide
  Sense strand starting at position 3278 of SEQ ID NO: 1243522
ugugaagggccuuaauguu

SEQ ID NO: 1421857 - RNA, 19 nt, Artificial Sequence
  Description of Artificial Sequence: Synthetic oligonucleotide
  Antisense strand to SEQ ID NO: 1421856
aacauuaaggcccuucaca

SEQ ID NO: 1421858 - RNA, 19 nt, Artificial Sequence
  Description of Artificial Sequence: Synthetic oligonucleotide
  Sense strand starting at position 3284 of SEQ ID NO: 1243522
gggccuuaauguuuaaaug

SEQ ID NO: 1421859 - RNA, 19 nt, Artificial Sequence
  Description of Artificial Sequence: Synthetic oligonucleotide
  Antisense strand to SEQ ID NO: 1421858
cauuuaaacauuaaggccc

SEQ ID NO: 1421860 - RNA, 19 nt, Artificial Sequence
  Description of Artificial Sequence: Synthetic oligonucleotide
  Sense strand starting at position 3285 of SEQ ID NO: 1243522
ggccuuaauguuuaaauga

SEQ ID NO: 1421861 - RNA, 19 nt, Artificial Sequence
  Description of Artificial Sequence: Synthetic oligonucleotide
  Antisense strand to SEQ ID NO: 1421860
ucauuuaaacauuaaggcc

SEQ ID NO: 1421862 - RNA, 19 nt, Artificial Sequence
  Description of Artificial Sequence: Synthetic oligonucleotide
  Sense strand starting at position 3442 of SEQ ID NO: 1243522
guaagcuaggaucacauua

SEQ ID NO: 1421863 - RNA, 19 nt, Artificial Sequence
  Description of Artificial Sequence: Synthetic oligonucleotide
  Antisense strand to SEQ ID NO: 1421862
uaaugugauccuagcuuac

SEQ ID NO: 1421864 - RNA, 19 nt, Artificial Sequence
  Description of Artificial Sequence: Synthetic oligonucleotide
  Sense strand starting at position 3597 of SEQ ID NO: 1243522
gguggguggugauuaaguu

SEQ ID NO: 1421865 - RNA, 19 nt, Artificial Sequence
  Description of Artificial Sequence: Synthetic oligonucleotide
  Antisense strand to SEQ ID NO: 1421864
aacuuaaucaccacccacc

SEQ ID NO: 1421866 - RNA, 19 nt, Artificial Sequence
  Description of Artificial Sequence: Synthetic oligonucleotide
  Sense strand starting at position 3598 of SEQ ID NO: 1243522
guggguggugauuaaguuu

SEQ ID NO: 1421867 - RNA, 19 nt, Artificial Sequence
  Description of Artificial Sequence: Synthetic oligonucleotide
  Antisense strand to SEQ ID NO: 1421866
aaacuuaaucaccacccac

SEQ ID NO: 1421868 - RNA, 19 nt, Artificial Sequence
  Description of Artificial Sequence: Synthetic oligonucleotide
  Sense strand starting at position 3688 of SEQ ID NO: 1243522
uggcuuaccucauuggauu

SEQ ID NO: 1421869 - RNA, 19 nt, Artificial Sequence
  Description of Artificial Sequence: Synthetic oligonucleotide
  Antisense strand to SEQ ID NO: 1421868
aauccaaugagguaagcca

SEQ ID NO: 1421870 - RNA, 19 nt, Artificial Sequence
  Description of Artificial Sequence: Synthetic oligonucleotide
  Sense strand starting at position 3812 of SEQ ID NO: 1243522
cuguuauuguuguuguuaa

SEQ ID NO: 1421871 - RNA, 19 nt, Artificial Sequence
  Description of Artificial Sequence: Synthetic oligonucleotide
  Antisense strand to SEQ ID NO: 1421870
uuaacaacaacaauaacag

SEQ ID NO: 1421872 - RNA, 19 nt, Artificial Sequence
  Description of Artificial Sequence: Synthetic oligonucleotide
  Sense strand starting at position 3838 of SEQ ID NO: 1243522
acuauuuguaugugcaagu

SEQ ID NO: 1421873 - RNA, 19 nt, Artificial Sequence
  Description of Artificial Sequence: Synthetic oligonucleotide
  Antisense strand to SEQ ID NO: 1421872
acuugcacauacaaauagu

SEQ ID NO: 1421874 - RNA, 19 nt, Artificial Sequence
  Description of Artificial Sequence: Synthetic oligonucleotide
  Sense strand starting at position 3845 of SEQ ID NO: 1243522
guaugugcaagucauugua

SEQ ID NO: 1421875 - RNA, 19 nt, Artificial Sequence
  Description of Artificial Sequence: Synthetic oligonucleotide
  Antisense strand to SEQ ID NO: 1421874
uacaaugacuugcacauac

SEQ ID NO: 1421876 - RNA, 19 nt, Artificial Sequence
  Description of Artificial Sequence: Synthetic oligonucleotide
  Sense strand starting at position 3848 of SEQ ID NO: 1243522
ugugcaagucauuguauga

SEQ ID NO: 1421877 - RNA, 19 nt, Artificial Sequence
  Description of Artificial Sequence: Synthetic oligonucleotide
  Antisense strand to SEQ ID NO: 1421876
ucauacaaugacuugcaca

SEQ ID NO: 1421878 - RNA, 19 nt, Artificial Sequence
  Description of Artificial Sequence: Synthetic oligonucleotide
  Sense strand starting at position 3852 of SEQ ID NO: 1243522
caagucauuguaugaauag

SEQ ID NO: 1421879 - RNA, 19 nt, Artificial Sequence
  Description of Artificial Sequence: Synthetic oligonucleotide
  Antisense strand to SEQ ID NO: 1421878
cuauucauacaaugacuug

SEQ ID NO: 1421880 - RNA, 19 nt, Artificial Sequence
  Description of Artificial Sequence: Synthetic oligonucleotide
  Sense strand starting at position 3853 of SEQ ID NO: 1243522
aagucauuguaugaauaga

SEQ ID NO: 1421881 - RNA, 19 nt, Artificial Sequence
  Description of Artificial Sequence: Synthetic oligonucleotide
  Antisense strand to SEQ ID NO: 1421880
ucuauucauacaaugacuu

SEQ ID NO: 1421882 - RNA, 19 nt, Artificial Sequence
  Description of Artificial Sequence: Synthetic oligonucleotide
  Sense strand starting at position 3875 of SEQ ID NO: 1243522
aagaaaguguggucucuuc

SEQ ID NO: 1421883 - RNA, 19 nt, Artificial Sequence
  Description of Artificial Sequence: Synthetic oligonucleotide
  Antisense strand to SEQ ID NO: 1421882
gaagagaccacacuuucuu

SEQ ID NO: 1421884 - RNA, 19 nt, Artificial Sequence
  Description of Artificial Sequence: Synthetic oligonucleotide
  Sense strand starting at position 3889 of SEQ ID NO: 1243522
ucuucccuccuggaguauu

SEQ ID NO: 1421885 - RNA, 19 nt, Artificial Sequence
  Description of Artificial Sequence: Synthetic oligonucleotide
  Antisense strand to SEQ ID NO: 1421884
aauacuccaggagggaaga

SEQ ID NO: 1421886 - RNA, 19 nt, Artificial Sequence
  Description of Artificial Sequence: Synthetic oligonucleotide
  Sense strand starting at position 3897 of SEQ ID NO: 1243522
ccuggaguauuggcuauaa

SEQ ID NO: 1421887 - RNA, 19 nt, Artificial Sequence
  Description of Artificial Sequence: Synthetic oligonucleotide
  Antisense strand to SEQ ID NO: 1421886
uuauagccaauacuccagg

SEQ ID NO: 1421888 - RNA, 19 nt, Artificial Sequence
  Description of Artificial Sequence: Synthetic oligonucleotide
  Sense strand starting at position 3899 of SEQ ID NO: 1243522
uggaguauuggcuauaagg

SEQ ID NO: 1421889 - RNA, 19 nt, Artificial Sequence
  Description of Artificial Sequence: Synthetic oligonucleotide
  Antisense strand to SEQ ID NO: 1421888
ccuuauagccaauacucca

SEQ ID NO: 1421890 - RNA, 19 nt, Artificial Sequence
  Description of Artificial Sequence: Synthetic oligonucleotide
  Sense strand starting at position 3925 of SEQ ID NO: 1243522
cagacuuguugacagauua

SEQ ID NO: 1421891 - RNA, 19 nt, Artificial Sequence
  Description of Artificial Sequence: Synthetic oligonucleotide
  Antisense strand to SEQ ID NO: 1421890
uaaucugucaacaagucug

SEQ ID NO: 1421892 - RNA, 19 nt, Artificial Sequence
  Description of Artificial Sequence: Synthetic oligonucleotide
  Sense strand starting at position 3935 of SEQ ID NO: 1243522
gacagauuacggugacuaa

SEQ ID NO: 1421893 - RNA, 19 nt, Artificial Sequence
  Description of Artificial Sequence: Synthetic oligonucleotide
  Antisense strand to SEQ ID NO: 1421892
uuagucaccguaaucuguc

SEQ ID NO: 1421894 - RNA, 19 nt, Artificial Sequence
  Description of Artificial Sequence: Synthetic oligonucleotide
  Sense strand starting at position 227 of SEQ ID NO: 1243523
cgaggccucccucgaaaga

SEQ ID NO: 1421895 - RNA, 19 nt, Artificial Sequence
  Description of Artificial Sequence: Synthetic oligonucleotide
  Antisense strand to SEQ ID NO: 1421894
ucuuucgagggaggccucg

SEQ ID NO: 1421896 - RNA, 19 nt, Artificial Sequence
  Description of Artificial Sequence: Synthetic oligonucleotide
  Sense strand starting at position 228 of SEQ ID NO: 1243523
gaggccucccucgaaagaa

SEQ ID NO: 1421897 - RNA, 19 nt, Artificial Sequence
  Description of Artificial Sequence: Synthetic oligonucleotide
  Antisense strand to SEQ ID NO: 1421896
uucuuucgagggaggccuc

SEQ ID NO: 1421898 - RNA, 19 nt, Artificial Sequence
  Description of Artificial Sequence: Synthetic oligonucleotide
  Sense strand starting at position 381 of SEQ ID NO: 1243523
aggguuguuccaggucaag

SEQ ID NO: 1421899 - RNA, 19 nt, Artificial Sequence
  Description of Artificial Sequence: Synthetic oligonucleotide
  Antisense strand to SEQ ID NO: 1421898
cuugaccuggaacaacccu

SEQ ID NO: 1421900 - RNA, 19 nt, Artificial Sequence
  Description of Artificial Sequence: Synthetic oligonucleotide
  Sense strand starting at position 876 of SEQ ID NO: 1243523
cucccagaacugugagcuu

SEQ ID NO: 1421901 - RNA, 19 nt, Artificial Sequence
  Description of Artificial Sequence: Synthetic oligonucleotide
  Antisense strand to SEQ ID NO: 1421900
aagcucacaguucugggag

SEQ ID NO: 1421902 - RNA, 19 nt, Artificial Sequence
  Description of Artificial Sequence: Synthetic oligonucleotide
  Sense strand starting at position 961 of SEQ ID NO: 1243523
gccaccuguccuggaucau

SEQ ID NO: 1421903 - RNA, 19 nt, Artificial Sequence
  Description of Artificial Sequence: Synthetic oligonucleotide
  Antisense strand to SEQ ID NO: 1421902
augauccaggacagguggc

SEQ ID NO: 1421904 - RNA, 19 nt, Artificial Sequence
  Description of Artificial Sequence: Synthetic oligonucleotide
  Sense strand starting at position 1363 of SEQ ID NO: 1243523
agggucuuguccuggagaa

SEQ ID NO: 1421905 - RNA, 19 nt, Artificial Sequence
  Description of Artificial Sequence: Synthetic oligonucleotide
  Antisense strand to SEQ ID NO: 1421904
uucuccaggacaagacccu

SEQ ID NO: 1421906 - RNA, 19 nt, Artificial Sequence
  Description of Artificial Sequence: Synthetic oligonucleotide
  Sense strand starting at position 1364 of SEQ ID NO: 1243523
gggucuuguccuggagaag

SEQ ID NO: 1421907 - RNA, 19 nt, Artificial Sequence
  Description of Artificial Sequence: Synthetic oligonucleotide
  Antisense strand to SEQ ID NO: 1421906
cuucuccaggacaagaccc

SEQ ID NO: 1421908 - RNA, 19 nt, Artificial Sequence
  Description of Artificial Sequence: Synthetic oligonucleotide
  Sense strand starting at position 1365 of SEQ ID NO: 1243523
ggucuuguccuggagaagc

SEQ ID NO: 1421909 - RNA, 19 nt, Artificial Sequence
  Description of Artificial Sequence: Synthetic oligonucleotide
  Antisense strand to SEQ ID NO: 1421908
gcuucuccaggacaagacc

SEQ ID NO: 1421910 - RNA, 19 nt, Artificial Sequence
  Description of Artificial Sequence: Synthetic oligonucleotide
  Sense strand starting at position 2049 of SEQ ID NO: 1243523
ccauuacuuccgccgucau

SEQ ID NO: 1421911 - RNA, 19 nt, Artificial Sequence
  Description of Artificial Sequence: Synthetic oligonucleotide
  Antisense strand to SEQ ID NO: 1421910
augacggcggaaguaaugg

SEQ ID NO: 1421912 - RNA, 19 nt, Artificial Sequence
  Description of Artificial Sequence: Synthetic oligonucleotide
  Sense strand starting at position 2623 of SEQ ID NO: 1243523
gucuuuaggccuugagucu

SEQ ID NO: 1421913 - RNA, 19 nt, Artificial Sequence
  Description of Artificial Sequence: Synthetic oligonucleotide
  Antisense strand to SEQ ID NO: 1421912
agacucaaggccuaaagac

SEQ ID NO: 1421914 - RNA, 19 nt, Artificial Sequence
  Description of Artificial Sequence: Synthetic oligonucleotide
  Sense strand starting at position 288 of SEQ ID NO: 1243524
acugcagccgcucauaauu

SEQ ID NO: 1421915 - RNA, 19 nt, Artificial Sequence
  Description of Artificial Sequence: Synthetic oligonucleotide
  Antisense strand to SEQ ID NO: 1421914
aauuaugagcggcugcagu

SEQ ID NO: 1421916 - RNA, 19 nt, Artificial Sequence
  Description of Artificial Sequence: Synthetic oligonucleotide
  Sense strand starting at position 353 of SEQ ID NO: 1243524
ggcacacauuagugaaaca

SEQ ID NO: 1421917 - RNA, 19 nt, Artificial Sequence
  Description of Artificial Sequence: Synthetic oligonucleotide
  Antisense strand to SEQ ID NO: 1421916
uguuucacuaaugugugcc

SEQ ID NO: 1421918 - RNA, 19 nt, Artificial Sequence
  Description of Artificial Sequence: Synthetic oligonucleotide
  Sense strand starting at position 554 of SEQ ID NO: 1243524
agcccucugugugcugaua

SEQ ID NO: 1421919 - RNA, 19 nt, Artificial Sequence
  Description of Artificial Sequence: Synthetic oligonucleotide
  Antisense strand to SEQ ID NO: 1421918
uaucagcacacagagggcu

SEQ ID NO: 1421920 - RNA, 19 nt, Artificial Sequence
  Description of Artificial Sequence: Synthetic oligonucleotide
  Sense strand starting at position 555 of SEQ ID NO: 1243524
gcccucugugugcugauau

SEQ ID NO: 1421921 - RNA, 19 nt, Artificial Sequence
  Description of Artificial Sequence: Synthetic oligonucleotide
  Antisense strand to SEQ ID NO: 1421920
auaucagcacacagagggc

SEQ ID NO: 1421922 - RNA, 19 nt, Artificial Sequence
  Description of Artificial Sequence: Synthetic oligonucleotide
  Sense strand starting at position 837 of SEQ ID NO: 1243524
cccagacauaguuguguga

SEQ ID NO: 1421923 - RNA, 19 nt, Artificial Sequence
  Description of Artificial Sequence: Synthetic oligonucleotide
  Antisense strand to SEQ ID NO: 1421922
ucacacaacuaugucuggg

SEQ ID NO: 1421924 - RNA, 19 nt, Artificial Sequence
  Description of Artificial Sequence: Synthetic oligonucleotide
  Sense strand starting at position 840 of SEQ ID NO: 1243524
agacauaguugugugaaga

SEQ ID NO: 1421925 - RNA, 19 nt, Artificial Sequence
  Description of Artificial Sequence: Synthetic oligonucleotide
  Antisense strand to SEQ ID NO: 1421924
ucuucacacaacuaugucu

SEQ ID NO: 1421926 - RNA, 19 nt, Artificial Sequence
  Description of Artificial Sequence: Synthetic oligonucleotide
  Sense strand starting at position 841 of SEQ ID NO: 1243524
gacauaguugugugaagaa

SEQ ID NO: 1421927 - RNA, 19 nt, Artificial Sequence
  Description of Artificial Sequence: Synthetic oligonucleotide
  Antisense strand to SEQ ID NO: 1421926
uucuucacacaacuauguc

SEQ ID NO: 1421928 - RNA, 19 nt, Artificial Sequence
  Description of Artificial Sequence: Synthetic oligonucleotide
  Sense strand starting at position 911 of SEQ ID NO: 1243524
agcagcuugccugagagaa

SEQ ID NO: 1421929 - RNA, 19 nt, Artificial Sequence
  Description of Artificial Sequence: Synthetic oligonucleotide
  Antisense strand to SEQ ID NO: 1421928
uucucucaggcaagcugcu

SEQ ID NO: 1421930 - RNA, 19 nt, Artificial Sequence
  Description of Artificial Sequence: Synthetic oligonucleotide
  Sense strand starting at position 988 of SEQ ID NO: 1243524
auguguuucuugccacuca

SEQ ID NO: 1421931 - RNA, 19 nt, Artificial Sequence
  Description of Artificial Sequence: Synthetic oligonucleotide
  Antisense strand to SEQ ID NO: 1421930
ugaguggcaagaaacacau

SEQ ID NO: 1421932 - RNA, 19 nt, Artificial Sequence
  Description of Artificial Sequence: Synthetic oligonucleotide
  Sense strand starting at position 1091 of SEQ ID NO: 1243524
gcugguaccuccuuuaucu

SEQ ID NO: 1421933 - RNA, 19 nt, Artificial Sequence
  Description of Artificial Sequence: Synthetic oligonucleotide
  Antisense strand to SEQ ID NO: 1421932
agauaaaggagguaccagc

SEQ ID NO: 1421934 - RNA, 19 nt, Artificial Sequence
  Description of Artificial Sequence: Synthetic oligonucleotide
  Sense strand starting at position 1155 of SEQ ID NO: 1243524
gcuaaauucuguuuaacag

SEQ ID NO: 1421935 - RNA, 19 nt, Artificial Sequence
  Description of Artificial Sequence: Synthetic oligonucleotide
  Antisense strand to SEQ ID NO: 1421934
cuguuaaacagaauuuagc

SEQ ID NO: 1421936 - RNA, 19 nt, Artificial Sequence
  Description of Artificial Sequence: Synthetic oligonucleotide
  Sense strand starting at position 1161 of SEQ ID NO: 1243524
uucuguuuaacagagugua

SEQ ID NO: 1421937 - RNA, 19 nt, Artificial Sequence
  Description of Artificial Sequence: Synthetic oligonucleotide
  Antisense strand to SEQ ID NO: 1421936
uacacucuguuaaacagaa

SEQ ID NO: 1421938 - RNA, 19 nt, Artificial Sequence
  Description of Artificial Sequence: Synthetic oligonucleotide
  Sense strand starting at position 1164 of SEQ ID NO: 1243524
uguuuaacagaguguauuc

SEQ ID NO: 1421939 - RNA, 19 nt, Artificial Sequence
  Description of Artificial Sequence: Synthetic oligonucleotide
  Antisense strand to SEQ ID NO: 1421938
gaauacacucuguuaaaca

SEQ ID NO: 1421940 - RNA, 19 nt, Artificial Sequence
  Description of Artificial Sequence: Synthetic oligonucleotide
  Sense strand starting at position 1234 of SEQ ID NO: 1243524
acaaacauuugguacugau

SEQ ID NO: 1421941 - RNA, 19 nt, Artificial Sequence
  Description of Artificial Sequence: Synthetic oligonucleotide
  Antisense strand to SEQ ID NO: 1421940
aucaguaccaaauguuugu

SEQ ID NO: 1421942 - RNA, 19 nt, Artificial Sequence
  Description of Artificial Sequence: Synthetic oligonucleotide
  Sense strand starting at position 1259 of SEQ ID NO: 1243524
gacggaaugcuccguuuaa

SEQ ID NO: 1421943 - RNA, 19 nt, Artificial Sequence
  Description of Artificial Sequence: Synthetic oligonucleotide
  Antisense strand to SEQ ID NO: 1421942
uuaaacggagcauuccguc

SEQ ID NO: 1421944 - RNA, 19 nt, Artificial Sequence
  Description of Artificial Sequence: Synthetic oligonucleotide
  Sense strand starting at position 1260 of SEQ ID NO: 1243524
acggaaugcuccguuuaaa

SEQ ID NO: 1421945 - RNA, 19 nt, Artificial Sequence
  Description of Artificial Sequence: Synthetic oligonucleotide
  Antisense strand to SEQ ID NO: 1421944
uuuaaacggagcauuccgu

SEQ ID NO: 1421946 - RNA, 19 nt, Artificial Sequence
  Description of Artificial Sequence: Synthetic oligonucleotide
  Sense strand starting at position 1349 of SEQ ID NO: 1243524
cacgauucuuuggcacauu

SEQ ID NO: 1421947 - RNA, 19 nt, Artificial Sequence
  Description of Artificial Sequence: Synthetic oligonucleotide
  Antisense strand to SEQ ID NO: 1421946
aaugugccaaagaaucgug

SEQ ID NO: 1421948 - RNA, 19 nt, Artificial Sequence
  Description of Artificial Sequence: Synthetic oligonucleotide
  Sense strand starting at position 1350 of SEQ ID NO: 1243524
acgauucuuuggcacauuu

SEQ ID NO: 1421949 - RNA, 19 nt, Artificial Sequence
  Description of Artificial Sequence: Synthetic oligonucleotide
  Antisense strand to SEQ ID NO: 1421948
aaaugugccaaagaaucgu

SEQ ID NO: 1421950 - RNA, 19 nt, Artificial Sequence
  Description of Artificial Sequence: Synthetic oligonucleotide
  Sense strand starting at position 1363 of SEQ ID NO: 1243524
acauuugugaugugucuuu

SEQ ID NO: 1421951 - RNA, 19 nt, Artificial Sequence
  Description of Artificial Sequence: Synthetic oligonucleotide
  Antisense strand to SEQ ID NO: 1421950
aaagacacaucacaaaugu

SEQ ID NO: 1421952 - RNA, 19 nt, Artificial Sequence
  Description of Artificial Sequence: Synthetic oligonucleotide
  Sense strand starting at position 2366 of SEQ ID NO: 1243524
guguguuuccugugagauu

SEQ ID NO: 1421953 - RNA, 19 nt, Artificial Sequence
  Description of Artificial Sequence: Synthetic oligonucleotide
  Antisense strand to SEQ ID NO: 1421952
aaucucacaggaaacacac

SEQ ID NO: 1421954 - RNA, 19 nt, Artificial Sequence
  Description of Artificial Sequence: Synthetic oligonucleotide
  Sense strand starting at position 2367 of SEQ ID NO: 1243524
uguguuuccugugagauuu

SEQ ID NO: 1421955 - RNA, 19 nt, Artificial Sequence
  Description of Artificial Sequence: Synthetic oligonucleotide
  Antisense strand to SEQ ID NO: 1421954
aaaucucacaggaaacaca

SEQ ID NO: 1421956 - RNA, 19 nt, Artificial Sequence
  Description of Artificial Sequence: Synthetic oligonucleotide
  Sense strand starting at position 2369 of SEQ ID NO: 1243524
uguuuccugugagauuuaa

SEQ ID NO: 1421957 - RNA, 19 nt, Artificial Sequence
  Description of Artificial Sequence: Synthetic oligonucleotide
  Antisense strand to SEQ ID NO: 1421956
uuaaaucucacaggaaaca

SEQ ID NO: 1421958 - RNA, 19 nt, Artificial Sequence
  Description of Artificial Sequence: Synthetic oligonucleotide
  Sense strand starting at position 3084 of SEQ ID NO: 1243524
aguucagccucugcgagau

SEQ ID NO: 1421959 - RNA, 19 nt, Artificial Sequence
  Description of Artificial Sequence: Synthetic oligonucleotide
  Antisense strand to SEQ ID NO: 1421958
aucucgcagaggcugaacu

SEQ ID NO: 1421960 - RNA, 19 nt, Artificial Sequence
  Description of Artificial Sequence: Synthetic oligonucleotide
  Sense strand starting at position 3142 of SEQ ID NO: 1243524
cugugaaaugggcauguga

SEQ ID NO: 1421961 - RNA, 19 nt, Artificial Sequence
  Description of Artificial Sequence: Synthetic oligonucleotide
  Antisense strand to SEQ ID NO: 1421960
ucacaugcccauuucacag

SEQ ID NO: 1421962 - RNA, 19 nt, Artificial Sequence
  Description of Artificial Sequence: Synthetic oligonucleotide
  Sense strand starting at position 3144 of SEQ ID NO: 1243524
gugaaaugggcaugugaaa

SEQ ID NO: 1421963 - RNA, 19 nt, Artificial Sequence
  Description of Artificial Sequence: Synthetic oligonucleotide
  Antisense strand to SEQ ID NO: 1421962
uuucacaugcccauuucac

SEQ ID NO: 1421964 - RNA, 19 nt, Artificial Sequence
  Description of Artificial Sequence: Synthetic oligonucleotide
  Sense strand starting at position 3156 of SEQ ID NO: 1243524
ugugaaagucucugccucu

SEQ ID NO: 1421965 - RNA, 19 nt, Artificial Sequence
  Description of Artificial Sequence: Synthetic oligonucleotide
  Antisense strand to SEQ ID NO: 1421964
agaggcagagacuuucaca

SEQ ID NO: 1421966 - RNA, 19 nt, Artificial Sequence
  Description of Artificial Sequence: Synthetic oligonucleotide
  Sense strand starting at position 3157 of SEQ ID NO: 1243524
gugaaagucucugccucuu

SEQ ID NO: 1421967 - RNA, 19 nt, Artificial Sequence
  Description of Artificial Sequence: Synthetic oligonucleotide
  Antisense strand to SEQ ID NO: 1421966
aagaggcagagacuuucac

SEQ ID NO: 1421968 - RNA, 19 nt, Artificial Sequence
  Description of Artificial Sequence: Synthetic oligonucleotide
  Sense strand starting at position 3230 of SEQ ID NO: 1243524
gagugagugcuccagaaag

SEQ ID NO: 1421969 - RNA, 19 nt, Artificial Sequence
  Description of Artificial Sequence: Synthetic oligonucleotide
  Antisense strand to SEQ ID NO: 1421968
cuuucuggagcacucacuc

SEQ ID NO: 1421970 - RNA, 19 nt, Artificial Sequence
  Description of Artificial Sequence: Synthetic oligonucleotide
  Sense strand starting at position 3232 of SEQ ID NO: 1243524
gugagugcuccagaaagau

SEQ ID NO: 1421971 - RNA, 19 nt, Artificial Sequence
  Description of Artificial Sequence: Synthetic oligonucleotide
  Antisense strand to SEQ ID NO: 1421970
aucuuucuggagcacucac

SEQ ID NO: 1421972 - RNA, 19 nt, Artificial Sequence
  Description of Artificial Sequence: Synthetic oligonucleotide
  Sense strand starting at position 3346 of SEQ ID NO: 1243524
uuuagugaaugacaauagu

SEQ ID NO: 1421973 - RNA, 19 nt, Artificial Sequence
  Description of Artificial Sequence: Synthetic oligonucleotide
  Antisense strand to SEQ ID NO: 1421972
acuauugucauucacuaaa

SEQ ID NO: 1421974 - RNA, 19 nt, Artificial Sequence
  Description of Artificial Sequence: Synthetic oligonucleotide
  Sense strand starting at position 3352 of SEQ ID NO: 1243524
gaaugacaauaguggcaaa

SEQ ID NO: 1421975 - RNA, 19 nt, Artificial Sequence
  Description of Artificial Sequence: Synthetic oligonucleotide
  Antisense strand to SEQ ID NO: 1421974
uuugccacuauugucauuc

SEQ ID NO: 1421976 - RNA, 19 nt, Artificial Sequence
  Description of Artificial Sequence: Synthetic oligonucleotide
  Sense strand starting at position 3372 of SEQ ID NO: 1243524
acauauagucuguguaggu

SEQ ID NO: 1421977 - RNA, 19 nt, Artificial Sequence
  Description of Artificial Sequence: Synthetic oligonucleotide
  Antisense strand to SEQ ID NO: 1421976
accuacacagacuauaugu

SEQ ID NO: 1421978 - RNA, 19 nt, Artificial Sequence
  Description of Artificial Sequence: Synthetic oligonucleotide
  Sense strand starting at position 3690 of SEQ ID NO: 1243524
gccauacagucuguguguu

SEQ ID NO: 1421979 - RNA, 19 nt, Artificial Sequence
  Description of Artificial Sequence: Synthetic oligonucleotide
  Antisense strand to SEQ ID NO: 1421978
aacacacagacuguauggc

SEQ ID NO: 1421980 - RNA, 19 nt, Artificial Sequence
  Description of Artificial Sequence: Synthetic oligonucleotide
  Sense strand starting at position 3696 of SEQ ID NO: 1243524
cagucuguguguucggcaa

SEQ ID NO: 1421981 - RNA, 19 nt, Artificial Sequence
  Description of Artificial Sequence: Synthetic oligonucleotide
  Antisense strand to SEQ ID NO: 1421980
uugccgaacacacagacug

SEQ ID NO: 1421982 - RNA, 19 nt, Artificial Sequence
  Description of Artificial Sequence: Synthetic oligonucleotide
  Sense strand starting at position 3700 of SEQ ID NO: 1243524
cuguguguucggcaauguu

SEQ ID NO: 1421983 - RNA, 19 nt, Artificial Sequence
  Description of Artificial Sequence: Synthetic oligonucleotide
  Antisense strand to SEQ ID NO: 1421982
aacauugccgaacacacag

SEQ ID NO: 1421984 - RNA, 19 nt, Artificial Sequence
  Description of Artificial Sequence: Synthetic oligonucleotide
  Sense strand starting at position 3703 of SEQ ID NO: 1243524
uguguucggcaauguuuga

SEQ ID NO: 1421985 - RNA, 19 nt, Artificial Sequence
  Description of Artificial Sequence: Synthetic oligonucleotide
  Antisense strand to SEQ ID NO: 1421984
ucaaacauugccgaacaca

SEQ ID NO: 1421986 - RNA, 19 nt, Artificial Sequence
  Description of Artificial Sequence: Synthetic oligonucleotide
  Sense strand starting at position 3749 of SEQ ID NO: 1243524
ggucucauauuagccuuau

SEQ ID NO: 1421987 - RNA, 19 nt, Artificial Sequence
  Description of Artificial Sequence: Synthetic oligonucleotide
  Antisense strand to SEQ ID NO: 1421986
auaaggcuaauaugagacc

SEQ ID NO: 1421988 - RNA, 19 nt, Artificial Sequence
  Description of Artificial Sequence: Synthetic oligonucleotide
  Sense strand starting at position 3750 of SEQ ID NO: 1243524
gucucauauuagccuuaua

SEQ ID NO: 1421989 - RNA, 19 nt, Artificial Sequence
  Description of Artificial Sequence: Synthetic oligonucleotide
  Antisense strand to SEQ ID NO: 1421988
uauaaggcuaauaugagac

SEQ ID NO: 1421990 - RNA, 19 nt, Artificial Sequence
  Description of Artificial Sequence: Synthetic oligonucleotide
  Sense strand starting at position 3809 of SEQ ID NO: 1243524
acacuugcccagugagcaa

SEQ ID NO: 1421991 - RNA, 19 nt, Artificial Sequence
  Description of Artificial Sequence: Synthetic oligonucleotide
  Antisense strand to SEQ ID NO: 1421990
uugcucacugggcaagugu

SEQ ID NO: 1421992 - RNA, 19 nt, Artificial Sequence
  Description of Artificial Sequence: Synthetic oligonucleotide
  Sense strand starting at position 3952 of SEQ ID NO: 1243524
ugcccuagauucuagaaua

SEQ ID NO: 1421993 - RNA, 19 nt, Artificial Sequence
  Description of Artificial Sequence: Synthetic oligonucleotide
  Antisense strand to SEQ ID NO: 1421992
uauucuagaaucuagggca

SEQ ID NO: 1421994 - RNA, 19 nt, Artificial Sequence
  Description of Artificial Sequence: Synthetic oligonucleotide
  Sense strand starting at position 571 of SEQ ID NO: 1243525
uuuccauccugugugagga

SEQ ID NO: 1421995 - RNA, 19 nt, Artificial Sequence
  Description of Artificial Sequence: Synthetic oligonucleotide
  Antisense strand to SEQ ID NO: 1421994
uccucacacaggauggaaa

SEQ ID NO: 1421996 - RNA, 19 nt, Artificial Sequence
  Description of Artificial Sequence: Synthetic oligonucleotide
  Sense strand starting at position 613 of SEQ ID NO: 1243525
uggcuuaccuuccagaauc

SEQ ID NO: 1421997 - RNA, 19 nt, Artificial Sequence
  Description of Artificial Sequence: Synthetic oligonucleotide
  Antisense strand to SEQ ID NO: 1421996
gauucuggaagguaagcca

SEQ ID NO: 1421998 - RNA, 19 nt, Artificial Sequence
  Description of Artificial Sequence: Synthetic oligonucleotide
  Sense strand starting at position 641 of SEQ ID NO: 1243525
acaagcaaguuccguuauu

SEQ ID NO: 1421999 - RNA, 19 nt, Artificial Sequence
  Description of Artificial Sequence: Synthetic oligonucleotide
  Antisense strand to SEQ ID NO: 1421998
aauaacggaacuugcuugu

SEQ ID NO: 1422000 - RNA, 19 nt, Artificial Sequence
  Description of Artificial Sequence: Synthetic oligonucleotide
  Sense strand starting at position 642 of SEQ ID NO: 1243525
caagcaaguuccguuauuc

SEQ ID NO: 1422001 - RNA, 19 nt, Artificial Sequence
  Description of Artificial Sequence: Synthetic oligonucleotide
  Antisense strand to SEQ ID NO: 1422000
gaauaacggaacuugcuug

SEQ ID NO: 1422002 - RNA, 19 nt, Artificial Sequence
  Description of Artificial Sequence: Synthetic oligonucleotide
  Sense strand starting at position 650 of SEQ ID NO: 1243525
uuccguuauucuuuacguu

SEQ ID NO: 1422003 - RNA, 19 nt, Artificial Sequence
  Description of Artificial Sequence: Synthetic oligonucleotide
  Antisense strand to SEQ ID NO: 1422002
aacguaaagaauaacggaa

SEQ ID NO: 1422004 - RNA, 19 nt, Artificial Sequence
  Description of Artificial Sequence: Synthetic oligonucleotide
  Sense strand starting at position 653 of SEQ ID NO: 1243525
cguuauucuuuacguugua

SEQ ID NO: 1422005 - RNA, 19 nt, Artificial Sequence
  Description of Artificial Sequence: Synthetic oligonucleotide
  Antisense strand to SEQ ID NO: 1422004
uacaacguaaagaauaacg

SEQ ID NO: 1422006 - RNA, 19 nt, Artificial Sequence
  Description of Artificial Sequence: Synthetic oligonucleotide
  Sense strand starting at position 1409 of SEQ ID NO: 1243525
gagggcucuuauucuuaag

SEQ ID NO: 1422007 - RNA, 19 nt, Artificial Sequence
  Description of Artificial Sequence: Synthetic oligonucleotide
  Antisense strand to SEQ ID NO: 1422006
cuuaagaauaagagcccuc

SEQ ID NO: 1422008 - RNA, 19 nt, Artificial Sequence
  Description of Artificial Sequence: Synthetic oligonucleotide
  Sense strand starting at position 1411 of SEQ ID NO: 1243525
gggcucuuauucuuaagac

SEQ ID NO: 1422009 - RNA, 19 nt, Artificial Sequence
  Description of Artificial Sequence: Synthetic oligonucleotide
  Antisense strand to SEQ ID NO: 1422008
gucuuaagaauaagagccc

SEQ ID NO: 1422010 - RNA, 19 nt, Artificial Sequence
  Description of Artificial Sequence: Synthetic oligonucleotide
  Sense strand starting at position 1412 of SEQ ID NO: 1243525
ggcucuuauucuuaagaca

SEQ ID NO: 1422011 - RNA, 19 nt, Artificial Sequence
  Description of Artificial Sequence: Synthetic oligonucleotide
  Antisense strand to SEQ ID NO: 1422010
ugucuuaagaauaagagcc

SEQ ID NO: 1422012 - RNA, 19 nt, Artificial Sequence
  Description of Artificial Sequence: Synthetic oligonucleotide
  Sense strand starting at position 2220 of SEQ ID NO: 1243525
agaucaaucuccuugacga

SEQ ID NO: 1422013 - RNA, 19 nt, Artificial Sequence
  Description of Artificial Sequence: Synthetic oligonucleotide
  Antisense strand to SEQ ID NO: 1422012
ucgucaaggagauugaucu

SEQ ID NO: 1422014 - RNA, 19 nt, Artificial Sequence
  Description of Artificial Sequence: Synthetic oligonucleotide
  Sense strand starting at position 3216 of SEQ ID NO: 1243525
cggacaugcccacgaaaca

SEQ ID NO: 1422015 - RNA, 19 nt, Artificial Sequence
  Description of Artificial Sequence: Synthetic oligonucleotide
  Antisense strand to SEQ ID NO: 1422014
uguuucgugggcauguccg

SEQ ID NO: 1422016 - RNA, 19 nt, Artificial Sequence
  Description of Artificial Sequence: Synthetic oligonucleotide
  Sense strand starting at position 3653 of SEQ ID NO: 1243525
aggucaguuugccggguau

SEQ ID NO: 1422017 - RNA, 19 nt, Artificial Sequence
  Description of Artificial Sequence: Synthetic oligonucleotide
  Antisense strand to SEQ ID NO: 1422016
auacccggcaaacugaccu

SEQ ID NO: 1422018 - RNA, 19 nt, Artificial Sequence
  Description of Artificial Sequence: Synthetic oligonucleotide
  Sense strand starting at position 3655 of SEQ ID NO: 1243525
gucaguuugccggguauga

SEQ ID NO: 1422019 - RNA, 19 nt, Artificial Sequence
  Description of Artificial Sequence: Synthetic oligonucleotide
  Antisense strand to SEQ ID NO: 1422018
ucauacccggcaaacugac

SEQ ID NO: 1422020 - RNA, 19 nt, Artificial Sequence
  Description of Artificial Sequence: Synthetic oligonucleotide
  Sense strand starting at position 512 of SEQ ID NO: 1243526
uugagagucggcuacagua

SEQ ID NO: 1422021 - RNA, 19 nt, Artificial Sequence
  Description of Artificial Sequence: Synthetic oligonucleotide
  Antisense strand to SEQ ID NO: 1422020
uacuguagccgacucucaa

SEQ ID NO: 1422022 - RNA, 19 nt, Artificial Sequence
  Description of Artificial Sequence: Synthetic oligonucleotide
  Sense strand starting at position 525 of SEQ ID NO: 1243526
acaguagguucucuaugga

SEQ ID NO: 1422023 - RNA, 19 nt, Artificial Sequence
  Description of Artificial Sequence: Synthetic oligonucleotide
  Antisense strand to SEQ ID NO: 1422022
uccauagagaaccuacugu

SEQ ID NO: 1422024 - RNA, 19 nt, Artificial Sequence
  Description of Artificial Sequence: Synthetic oligonucleotide
  Sense strand starting at position 528 of SEQ ID NO: 1243526
guagguucucuauggagac

SEQ ID NO: 1422025 - RNA, 19 nt, Artificial Sequence
  Description of Artificial Sequence: Synthetic oligonucleotide
  Antisense strand to SEQ ID NO: 1422024
gucuccauagagaaccuac

SEQ ID NO: 1422026 - RNA, 19 nt, Artificial Sequence
  Description of Artificial Sequence: Synthetic oligonucleotide
  Sense strand starting at position 552 of SEQ ID NO: 1243526
acguguauuuaggacauuu

SEQ ID NO: 1422027 - RNA, 19 nt, Artificial Sequence
  Description of Artificial Sequence: Synthetic oligonucleotide
  Antisense strand to SEQ ID NO: 1422026
aaauguccuaaauacacgu

SEQ ID NO: 1422028 - RNA, 19 nt, Artificial Sequence
  Description of Artificial Sequence: Synthetic oligonucleotide
  Sense strand starting at position 561 of SEQ ID NO: 1243526
uaggacauuuccuagguga

SEQ ID NO: 1422029 - RNA, 19 nt, Artificial Sequence
  Description of Artificial Sequence: Synthetic oligonucleotide
  Antisense strand to SEQ ID NO: 1422028
ucaccuaggaaauguccua

SEQ ID NO: 1422030 - RNA, 19 nt, Artificial Sequence
  Description of Artificial Sequence: Synthetic oligonucleotide
  Sense strand starting at position 580 of SEQ ID NO: 1243526
uucuaaggugccgauauaa

SEQ ID NO: 1422031 - RNA, 19 nt, Artificial Sequence
  Description of Artificial Sequence: Synthetic oligonucleotide
  Antisense strand to SEQ ID NO: 1422030
uuauaucggcaccuuagaa

SEQ ID NO: 1422032 - RNA, 19 nt, Artificial Sequence
  Description of Artificial Sequence: Synthetic oligonucleotide
  Sense strand starting at position 610 of SEQ ID NO: 1243526
guaucuuaagagcaaucaa

SEQ ID NO: 1422033 - RNA, 19 nt, Artificial Sequence
  Description of Artificial Sequence: Synthetic oligonucleotide
  Antisense strand to SEQ ID NO: 1422032
uugauugcucuuaagauac

SEQ ID NO: 1422034 - RNA, 19 nt, Artificial Sequence
  Description of Artificial Sequence: Synthetic oligonucleotide
  Sense strand starting at position 669 of SEQ ID NO: 1243526
gugcuaugugcuuuacgca

SEQ ID NO: 1422035 - RNA, 19 nt, Artificial Sequence
  Description of Artificial Sequence: Synthetic oligonucleotide
  Antisense strand to SEQ ID NO: 1422034
ugcguaaagcacauagcac

SEQ ID NO: 1422036 - RNA, 19 nt, Artificial Sequence
  Description of Artificial Sequence: Synthetic oligonucleotide
  Sense strand starting at position 695 of SEQ ID NO: 1243526
ugaacugacccucguauca

SEQ ID NO: 1422037 - RNA, 19 nt, Artificial Sequence
  Description of Artificial Sequence: Synthetic oligonucleotide
  Antisense strand to SEQ ID NO: 1422036
ugauacgagggucaguuca

SEQ ID NO: 1422038 - RNA, 19 nt, Artificial Sequence
  Description of Artificial Sequence: Synthetic oligonucleotide
  Sense strand starting at position 826 of SEQ ID NO: 1243526
agugaagcuaucuaggacu

SEQ ID NO: 1422039 - RNA, 19 nt, Artificial Sequence
  Description of Artificial Sequence: Synthetic oligonucleotide
  Antisense strand to SEQ ID NO: 1422038
aguccuagauagcuucacu

SEQ ID NO: 1422040 - RNA, 19 nt, Artificial Sequence
  Description of Artificial Sequence: Synthetic oligonucleotide
  Sense strand starting at position 965 of SEQ ID NO: 1243526
cgacccuagucucuacaaa

SEQ ID NO: 1422041 - RNA, 19 nt, Artificial Sequence
  Description of Artificial Sequence: Synthetic oligonucleotide
  Antisense strand to SEQ ID NO: 1422040
uuuguagagacuagggucg

SEQ ID NO: 1422042 - RNA, 19 nt, Artificial Sequence
  Description of Artificial Sequence: Synthetic oligonucleotide
  Sense strand starting at position 1129 of SEQ ID NO: 1243526
gcaauaccggucuggacaa

SEQ ID NO: 1422043 - RNA, 19 nt, Artificial Sequence
  Description of Artificial Sequence: Synthetic oligonucleotide
  Antisense strand to SEQ ID NO: 1422042
uuguccagaccgguauugc

SEQ ID NO: 1422044 - RNA, 19 nt, Artificial Sequence
  Description of Artificial Sequence: Synthetic oligonucleotide
  Sense strand starting at position 2184 of SEQ ID NO: 1243526
gugaaaguccgugaucaca

SEQ ID NO: 1422045 - RNA, 19 nt, Artificial Sequence
  Description of Artificial Sequence: Synthetic oligonucleotide
  Antisense strand to SEQ ID NO: 1422044
ugugaucacggacuuucac

SEQ ID NO: 1422046 - RNA, 19 nt, Artificial Sequence
  Description of Artificial Sequence: Synthetic oligonucleotide
  Sense strand starting at position 2186 of SEQ ID NO: 1243526
gaaaguccgugaucacaaa

SEQ ID NO: 1422047 - RNA, 19 nt, Artificial Sequence
  Description of Artificial Sequence: Synthetic oligonucleotide
  Antisense strand to SEQ ID NO: 1422046
uuugugaucacggacuuuc

SEQ ID NO: 1422048 - RNA, 19 nt, Artificial Sequence
  Description of Artificial Sequence: Synthetic oligonucleotide
  Sense strand starting at position 2218 of SEQ ID NO: 1243526
gccagcauucgugcugauu

SEQ ID NO: 1422049 - RNA, 19 nt, Artificial Sequence
  Description of Artificial Sequence: Synthetic oligonucleotide
  Antisense strand to SEQ ID NO: 1422048
aaucagcacgaaugcuggc

SEQ ID NO: 1422050 - RNA, 19 nt, Artificial Sequence
  Description of Artificial Sequence: Synthetic oligonucleotide
  Sense strand starting at position 2219 of SEQ ID NO: 1243526
ccagcauucgugcugauuc

SEQ ID NO: 1422051 - RNA, 19 nt, Artificial Sequence
  Description of Artificial Sequence: Synthetic oligonucleotide
  Antisense strand to SEQ ID NO: 1422050
gaaucagcacgaaugcugg

SEQ ID NO: 1422052 - RNA, 19 nt, Artificial Sequence
  Description of Artificial Sequence: Synthetic oligonucleotide
  Sense strand starting at position 2361 of SEQ ID NO: 1243526
gauaauagagacuguuguu

SEQ ID NO: 1422053 - RNA, 19 nt, Artificial Sequence
  Description of Artificial Sequence: Synthetic oligonucleotide
  Antisense strand to SEQ ID NO: 1422052
aacaacagucucuauuauc

SEQ ID NO: 1422054 - RNA, 19 nt, Artificial Sequence
  Description of Artificial Sequence: Synthetic oligonucleotide
  Sense strand starting at position 2366 of SEQ ID NO: 1243526
uagagacuguuguuuaaua

SEQ ID NO: 1422055 - RNA, 19 nt, Artificial Sequence
  Description of Artificial Sequence: Synthetic oligonucleotide
  Antisense strand to SEQ ID NO: 1422054
uauuaaacaacagucucua

SEQ ID NO: 1422056 - RNA, 19 nt, Artificial Sequence
  Description of Artificial Sequence: Synthetic oligonucleotide
  Sense strand starting at position 2367 of SEQ ID NO: 1243526
agagacuguuguuuaauag

SEQ ID NO: 1422057 - RNA, 19 nt, Artificial Sequence
  Description of Artificial Sequence: Synthetic oligonucleotide
  Antisense strand to SEQ ID NO: 1422056
cuauuaaacaacagucucu

SEQ ID NO: 1422058 - RNA, 19 nt, Artificial Sequence
  Description of Artificial Sequence: Synthetic oligonucleotide
  Sense strand starting at position 2384 of SEQ ID NO: 1243526
agagacucaugauaauaga

SEQ ID NO: 1422059 - RNA, 19 nt, Artificial Sequence
  Description of Artificial Sequence: Synthetic oligonucleotide
  Antisense strand to SEQ ID NO: 1422058
ucuauuaucaugagucucu

SEQ ID NO: 1422060 - RNA, 19 nt, Artificial Sequence
  Description of Artificial Sequence: Synthetic oligonucleotide
  Sense strand starting at position 2400 of SEQ ID NO: 1243526
agagacugaugauaauaga

SEQ ID NO: 1422061 - RNA, 19 nt, Artificial Sequence
  Description of Artificial Sequence: Synthetic oligonucleotide
  Antisense strand to SEQ ID NO: 1422060
ucuauuaucaucagucucu

SEQ ID NO: 1422062 - RNA, 19 nt, Artificial Sequence
  Description of Artificial Sequence: Synthetic oligonucleotide
  Sense strand starting at position 2417 of SEQ ID NO: 1243526
gagacugauugauaauaga

SEQ ID NO: 1422063 - RNA, 19 nt, Artificial Sequence
  Description of Artificial Sequence: Synthetic oligonucleotide
  Antisense strand to SEQ ID NO: 1422062
ucuauuaucaaucagucuc

SEQ ID NO: 1422064 - RNA, 19 nt, Artificial Sequence
  Description of Artificial Sequence: Synthetic oligonucleotide
  Sense strand starting at position 2457 of SEQ ID NO: 1243526
auguuuacggagcacuuaa

SEQ ID NO: 1422065 - RNA, 19 nt, Artificial Sequence
  Description of Artificial Sequence: Synthetic oligonucleotide
  Antisense strand to SEQ ID NO: 1422064
uuaagugcuccguaaacau

SEQ ID NO: 1422066 - RNA, 19 nt, Artificial Sequence
  Description of Artificial Sequence: Synthetic oligonucleotide
  Sense strand starting at position 2488 of SEQ ID NO: 1243526
gccagaaaugcacagacau

SEQ ID NO: 1422067 - RNA, 19 nt, Artificial Sequence
  Description of Artificial Sequence: Synthetic oligonucleotide
  Antisense strand to SEQ ID NO: 1422066
augucugugcauuucuggc

SEQ ID NO: 1422068 - RNA, 19 nt, Artificial Sequence
  Description of Artificial Sequence: Synthetic oligonucleotide
  Sense strand starting at position 2857 of SEQ ID NO: 1243526
cugccucaccuuuagagaa

SEQ ID NO: 1422069 - RNA, 19 nt, Artificial Sequence
  Description of Artificial Sequence: Synthetic oligonucleotide
  Antisense strand to SEQ ID NO: 1422068
uucucuaaaggugaggcag

SEQ ID NO: 1422070 - RNA, 19 nt, Artificial Sequence
  Description of Artificial Sequence: Synthetic oligonucleotide
  Sense strand starting at position 3021 of SEQ ID NO: 1243526
auagcuaauuaccugaaga

SEQ ID NO: 1422071 - RNA, 19 nt, Artificial Sequence
  Description of Artificial Sequence: Synthetic oligonucleotide
  Antisense strand to SEQ ID NO: 1422070
ucuucagguaauuagcuau

SEQ ID NO: 1422072 - RNA, 19 nt, Artificial Sequence
  Description of Artificial Sequence: Synthetic oligonucleotide
  Sense strand starting at position 3086 of SEQ ID NO: 1243526
gcaucacuccacuacaguu

SEQ ID NO: 1422073 - RNA, 19 nt, Artificial Sequence
  Description of Artificial Sequence: Synthetic oligonucleotide
  Antisense strand to SEQ ID NO: 1422072
aacuguaguggagugaugc

SEQ ID NO: 1422074 - RNA, 19 nt, Artificial Sequence
  Description of Artificial Sequence: Synthetic oligonucleotide
  Sense strand starting at position 3102 of SEQ ID NO: 1243526
guuauugacucauuugugu

SEQ ID NO: 1422075 - RNA, 19 nt, Artificial Sequence
  Description of Artificial Sequence: Synthetic oligonucleotide
  Antisense strand to SEQ ID NO: 1422074
acacaaaugagucaauaac

SEQ ID NO: 1422076 - RNA, 19 nt, Artificial Sequence
  Description of Artificial Sequence: Synthetic oligonucleotide
  Sense strand starting at position 3223 of SEQ ID NO: 1243526
ugaugugauuccuuagguu

SEQ ID NO: 1422077 - RNA, 19 nt, Artificial Sequence
  Description of Artificial Sequence: Synthetic oligonucleotide
  Antisense strand to SEQ ID NO: 1422076
aaccuaaggaaucacauca

SEQ ID NO: 1422078 - RNA, 19 nt, Artificial Sequence
  Description of Artificial Sequence: Synthetic oligonucleotide
  Sense strand starting at position 3326 of SEQ ID NO: 1243526
uccuauaaauguucuguau

SEQ ID NO: 1422079 - RNA, 19 nt, Artificial Sequence
  Description of Artificial Sequence: Synthetic oligonucleotide
  Antisense strand to SEQ ID NO: 1422078
auacagaacauuuauagga

SEQ ID NO: 1422080 - RNA, 19 nt, Artificial Sequence
  Description of Artificial Sequence: Synthetic oligonucleotide
  Sense strand starting at position 3435 of SEQ ID NO: 1243526
gaaaucuacugaccgugau

SEQ ID NO: 1422081 - RNA, 19 nt, Artificial Sequence
  Description of Artificial Sequence: Synthetic oligonucleotide
  Antisense strand to SEQ ID NO: 1422080
aucacggucaguagauuuc

SEQ ID NO: 1422082 - RNA, 19 nt, Artificial Sequence
  Description of Artificial Sequence: Synthetic oligonucleotide
  Sense strand starting at position 3436 of SEQ ID NO: 1243526
aaaucuacugaccgugauu

SEQ ID NO: 1422083 - RNA, 19 nt, Artificial Sequence
  Description of Artificial Sequence: Synthetic oligonucleotide
  Antisense strand to SEQ ID NO: 1422082
aaucacggucaguagauuu

SEQ ID NO: 1422084 - RNA, 19 nt, Artificial Sequence
  Description of Artificial Sequence: Synthetic oligonucleotide
  Sense strand starting at position 3479 of SEQ ID NO: 1243526
gcaagccuccaucagaaua

SEQ ID NO: 1422085 - RNA, 19 nt, Artificial Sequence
  Description of Artificial Sequence: Synthetic oligonucleotide
  Antisense strand to SEQ ID NO: 1422084
uauucugauggaggcuugc

SEQ ID NO: 1422086 - RNA, 19 nt, Artificial Sequence
  Description of Artificial Sequence: Synthetic oligonucleotide
  Sense strand starting at position 3507 of SEQ ID NO: 1243526
auuugauucuucugagaga

SEQ ID NO: 1422087 - RNA, 19 nt, Artificial Sequence
  Description of Artificial Sequence: Synthetic oligonucleotide
  Antisense strand to SEQ ID NO: 1422086
ucucucagaagaaucaaau

SEQ ID NO: 1422088 - RNA, 19 nt, Artificial Sequence
  Description of Artificial Sequence: Synthetic oligonucleotide
  Sense strand starting at position 3613 of SEQ ID NO: 1243526
auguucugaaauggaugau

SEQ ID NO: 1422089 - RNA, 19 nt, Artificial Sequence
  Description of Artificial Sequence: Synthetic oligonucleotide
  Antisense strand to SEQ ID NO: 1422088
aucauccauuucagaacau

SEQ ID NO: 1422090 - RNA, 19 nt, Artificial Sequence
  Description of Artificial Sequence: Synthetic oligonucleotide
  Sense strand starting at position 3619 of SEQ ID NO: 1243526
ugaaauggaugauugcuua

SEQ ID NO: 1422091 - RNA, 19 nt, Artificial Sequence
  Description of Artificial Sequence: Synthetic oligonucleotide
  Antisense strand to SEQ ID NO: 1422090
uaagcaaucauccauuuca

SEQ ID NO: 1422092 - RNA, 19 nt, Artificial Sequence
  Description of Artificial Sequence: Synthetic oligonucleotide
  Sense strand starting at position 3622 of SEQ ID NO: 1243526
aauggaugauugcuuagga

SEQ ID NO: 1422093 - RNA, 19 nt, Artificial Sequence
  Description of Artificial Sequence: Synthetic oligonucleotide
  Antisense strand to SEQ ID NO: 1422092
uccuaagcaaucauccauu

SEQ ID NO: 1422094 - RNA, 19 nt, Artificial Sequence
  Description of Artificial Sequence: Synthetic oligonucleotide
  Sense strand starting at position 3623 of SEQ ID NO: 1243526
auggaugauugcuuaggau

SEQ ID NO: 1422095 - RNA, 19 nt, Artificial Sequence
  Description of Artificial Sequence: Synthetic oligonucleotide
  Antisense strand to SEQ ID NO: 1422094
auccuaagcaaucauccau

SEQ ID NO: 1422096 - RNA, 19 nt, Artificial Sequence
  Description of Artificial Sequence: Synthetic oligonucleotide
  Sense strand starting at position 3653 of SEQ ID NO: 1243526
guacucauuagcggagaca

SEQ ID NO: 1422097 - RNA, 19 nt, Artificial Sequence
  Description of Artificial Sequence: Synthetic oligonucleotide
  Antisense strand to SEQ ID NO: 1422096
ugucuccgcuaaugaguac

SEQ ID NO: 1422098 - RNA, 19 nt, Artificial Sequence
  Description of Artificial Sequence: Synthetic oligonucleotide
  Sense strand starting at position 3665 of SEQ ID NO: 1243526
ggagacaccugccuuucua

SEQ ID NO: 1422099 - RNA, 19 nt, Artificial Sequence
  Description of Artificial Sequence: Synthetic oligonucleotide
  Antisense strand to SEQ ID NO: 1422098
uagaaaggcaggugucucc

SEQ ID NO: 1422100 - RNA, 19 nt, Artificial Sequence
  Description of Artificial Sequence: Synthetic oligonucleotide
  Sense strand starting at position 64 of SEQ ID NO: 1243527
uguguaucucuagaagaac

SEQ ID NO: 1422101 - RNA, 19 nt, Artificial Sequence
  Description of Artificial Sequence: Synthetic oligonucleotide
  Antisense strand to SEQ ID NO: 1422100
guucuucuagagauacaca

SEQ ID NO: 1422102 - RNA, 19 nt, Artificial Sequence
  Description of Artificial Sequence: Synthetic oligonucleotide
  Sense strand starting at position 169 of SEQ ID NO: 1243527
gggccaaagucacauuuga

SEQ ID NO: 1422103 - RNA, 19 nt, Artificial Sequence
  Description of Artificial Sequence: Synthetic oligonucleotide
  Antisense strand to SEQ ID NO: 1422102
ucaaaugugacuuuggccc

SEQ ID NO: 1422104 - RNA, 19 nt, Artificial Sequence
  Description of Artificial Sequence: Synthetic oligonucleotide
  Sense strand starting at position 176 of SEQ ID NO: 1243527
agucacauuugauaaagau

SEQ ID NO: 1422105 - RNA, 19 nt, Artificial Sequence
  Description of Artificial Sequence: Synthetic oligonucleotide
  Antisense strand to SEQ ID NO: 1422104
aucuuuaucaaaugugacu

SEQ ID NO: 1422106 - RNA, 19 nt, Artificial Sequence
  Description of Artificial Sequence: Synthetic oligonucleotide
  Sense strand starting at position 714 of SEQ ID NO: 1243527
gggaaugcuuucuccacau

SEQ ID NO: 1422107 - RNA, 19 nt, Artificial Sequence
  Description of Artificial Sequence: Synthetic oligonucleotide
  Antisense strand to SEQ ID NO: 1422106
auguggagaaagcauuccc

SEQ ID NO: 1422108 - RNA, 19 nt, Artificial Sequence
  Description of Artificial Sequence: Synthetic oligonucleotide
  Sense strand starting at position 847 of SEQ ID NO: 1243527
cugggucagcaccauaauu

SEQ ID NO: 1422109 - RNA, 19 nt, Artificial Sequence
  Description of Artificial Sequence: Synthetic oligonucleotide
  Antisense strand to SEQ ID NO: 1422108
aauuauggugcugacccag

SEQ ID NO: 1422110 - RNA, 19 nt, Artificial Sequence
  Description of Artificial Sequence: Synthetic oligonucleotide
  Sense strand starting at position 897 of SEQ ID NO: 1243527
cuugcaggacugugagaaa

SEQ ID NO: 1422111 - RNA, 19 nt, Artificial Sequence
  Description of Artificial Sequence: Synthetic oligonucleotide
  Antisense strand to SEQ ID NO: 1422110
uuucucacaguccugcaag

SEQ ID NO: 1422112 - RNA, 19 nt, Artificial Sequence
  Description of Artificial Sequence: Synthetic oligonucleotide
  Sense strand starting at position 943 of SEQ ID NO: 1243527
cgaagaaauuaguugcaag

SEQ ID NO: 1422113 - RNA, 19 nt, Artificial Sequence
  Description of Artificial Sequence: Synthetic oligonucleotide
  Antisense strand to SEQ ID NO: 1422112
cuugcaacuaauuucuucg

SEQ ID NO: 1422114 - RNA, 19 nt, Artificial Sequence
  Description of Artificial Sequence: Synthetic oligonucleotide
  Sense strand starting at position 1245 of SEQ ID NO: 1243527
gauucaguccuguggguga

SEQ ID NO: 1422115 - RNA, 19 nt, Artificial Sequence
  Description of Artificial Sequence: Synthetic oligonucleotide
  Antisense strand to SEQ ID NO: 1422114
ucacccacaggacugaauc

SEQ ID NO: 1422116 - RNA, 19 nt, Artificial Sequence
  Description of Artificial Sequence: Synthetic oligonucleotide
  Sense strand starting at position 1359 of SEQ ID NO: 1243527
ugaacuuggcugugcugaa

SEQ ID NO: 1422117 - RNA, 19 nt, Artificial Sequence
  Description of Artificial Sequence: Synthetic oligonucleotide
  Antisense strand to SEQ ID NO: 1422116
uucagcacagccaaguuca

SEQ ID NO: 1422118 - RNA, 19 nt, Artificial Sequence
  Description of Artificial Sequence: Synthetic oligonucleotide
  Sense strand starting at position 1360 of SEQ ID NO: 1243527
gaacuuggcugugcugaau

SEQ ID NO: 1422119 - RNA, 19 nt, Artificial Sequence
  Description of Artificial Sequence: Synthetic oligonucleotide
  Antisense strand to SEQ ID NO: 1422118
auucagcacagccaaguuc

SEQ ID NO: 1422120 - RNA, 19 nt, Artificial Sequence
  Description of Artificial Sequence: Synthetic oligonucleotide
  Sense strand starting at position 1374 of SEQ ID NO: 1243527
ugaauagcuucugucuagu

SEQ ID NO: 1422121 - RNA, 19 nt, Artificial Sequence
  Description of Artificial Sequence: Synthetic oligonucleotide
  Antisense strand to SEQ ID NO: 1422120
acuagacagaagcuauuca

SEQ ID NO: 1422122 - RNA, 19 nt, Artificial Sequence
  Description of Artificial Sequence: Synthetic oligonucleotide
  Sense strand starting at position 1377 of SEQ ID NO: 1243527
auagcuucugucuaguuaa

SEQ ID NO: 1422123 - RNA, 19 nt, Artificial Sequence
  Description of Artificial Sequence: Synthetic oligonucleotide
  Antisense strand to SEQ ID NO: 1422122
uuaacuagacagaagcuau

SEQ ID NO: 1422124 - RNA, 19 nt, Artificial Sequence
  Description of Artificial Sequence: Synthetic oligonucleotide
  Sense strand starting at position 1385 of SEQ ID NO: 1243527
ugucuaguuaaguguuuag

SEQ ID NO: 1422125 - RNA, 19 nt, Artificial Sequence
  Description of Artificial Sequence: Synthetic oligonucleotide
  Antisense strand to SEQ ID NO: 1422124
cuaaacacuuaacuagaca

SEQ ID NO: 1422126 - RNA, 19 nt, Artificial Sequence
  Description of Artificial Sequence: Synthetic oligonucleotide
  Sense strand starting at position 1389 of SEQ ID NO: 1243527
uaguuaaguguuuagucca

SEQ ID NO: 1422127 - RNA, 19 nt, Artificial Sequence
  Description of Artificial Sequence: Synthetic oligonucleotide
  Antisense strand to SEQ ID NO: 1422126
uggacuaaacacuuaacua

SEQ ID NO: 1422128 - RNA, 19 nt, Artificial Sequence
  Description of Artificial Sequence: Synthetic oligonucleotide
  Sense strand starting at position 1396 of SEQ ID NO: 1243527
guguuuaguccacacugaa

SEQ ID NO: 1422129 - RNA, 19 nt, Artificial Sequence
  Description of Artificial Sequence: Synthetic oligonucleotide
  Antisense strand to SEQ ID NO: 1422128
uucaguguggacuaaacac

SEQ ID NO: 1422130 - RNA, 19 nt, Artificial Sequence
  Description of Artificial Sequence: Synthetic oligonucleotide
  Sense strand starting at position 1469 of SEQ ID NO: 1243527
gccguuuaauaauuaccaa

SEQ ID NO: 1422131 - RNA, 19 nt, Artificial Sequence
  Description of Artificial Sequence: Synthetic oligonucleotide
  Antisense strand to SEQ ID NO: 1422130
uugguaauuauuaaacggc

SEQ ID NO: 1422132 - RNA, 19 nt, Artificial Sequence
  Description of Artificial Sequence: Synthetic oligonucleotide
  Sense strand starting at position 1611 of SEQ ID NO: 1243527
uugcuacugcaugauuaua

SEQ ID NO: 1422133 - RNA, 19 nt, Artificial Sequence
  Description of Artificial Sequence: Synthetic oligonucleotide
  Antisense strand to SEQ ID NO: 1422132
uauaaucaugcaguagcaa

SEQ ID NO: 1422134 - RNA, 19 nt, Artificial Sequence
  Description of Artificial Sequence: Synthetic oligonucleotide
  Sense strand starting at position 1619 of SEQ ID NO: 1243527
gcaugauuauaagcuaucu

SEQ ID NO: 1422135 - RNA, 19 nt, Artificial Sequence
  Description of Artificial Sequence: Synthetic oligonucleotide
  Antisense strand to SEQ ID NO: 1422134
agauagcuuauaaucaugc

SEQ ID NO: 1422136 - RNA, 19 nt, Artificial Sequence
  Description of Artificial Sequence: Synthetic oligonucleotide
  Sense strand starting at position 1642 of SEQ ID NO: 1243527
ugucuucuagaacaaggua

SEQ ID NO: 1422137 - RNA, 19 nt, Artificial Sequence
  Description of Artificial Sequence: Synthetic oligonucleotide
  Antisense strand to SEQ ID NO: 1422136
uaccuuguucuagaagaca

SEQ ID NO: 1422138 - RNA, 19 nt, Artificial Sequence
  Description of Artificial Sequence: Synthetic oligonucleotide
  Sense strand starting at position 2250 of SEQ ID NO: 1243527
aucguaaguguugauuauu

SEQ ID NO: 1422139 - RNA, 19 nt, Artificial Sequence
  Description of Artificial Sequence: Synthetic oligonucleotide
  Antisense strand to SEQ ID NO: 1422138
aauaaucaacacuuacgau

SEQ ID NO: 1422140 - RNA, 19 nt, Artificial Sequence
  Description of Artificial Sequence: Synthetic oligonucleotide
  Sense strand starting at position 2303 of SEQ ID NO: 1243527
gggucucccuccucuauua

SEQ ID NO: 1422141 - RNA, 19 nt, Artificial Sequence
  Description of Artificial Sequence: Synthetic oligonucleotide
  Antisense strand to SEQ ID NO: 1422140
uaauagaggagggagaccc

SEQ ID NO: 1422142 - RNA, 19 nt, Artificial Sequence
  Description of Artificial Sequence: Synthetic oligonucleotide
  Sense strand starting at position 2313 of SEQ ID NO: 1243527
ccucuauuacgccaagauc

SEQ ID NO: 1422143 - RNA, 19 nt, Artificial Sequence
  Description of Artificial Sequence: Synthetic oligonucleotide
  Antisense strand to SEQ ID NO: 1422142
gaucuuggcguaauagagg

SEQ ID NO: 1422144 - RNA, 19 nt, Artificial Sequence
  Description of Artificial Sequence: Synthetic oligonucleotide
  Sense strand starting at position 2334 of SEQ ID NO: 1243527
guaccuaagucucuggcaa

SEQ ID NO: 1422145 - RNA, 19 nt, Artificial Sequence
  Description of Artificial Sequence: Synthetic oligonucleotide
  Antisense strand to SEQ ID NO: 1422144
uugccagagacuuagguac

SEQ ID NO: 1422146 - RNA, 19 nt, Artificial Sequence
  Description of Artificial Sequence: Synthetic oligonucleotide
  Sense strand starting at position 2415 of SEQ ID NO: 1243527
guucuagucccugagagcu

SEQ ID NO: 1422147 - RNA, 19 nt, Artificial Sequence
  Description of Artificial Sequence: Synthetic oligonucleotide
  Antisense strand to SEQ ID NO: 1422146
agcucucagggacuagaac

SEQ ID NO: 1422148 - RNA, 19 nt, Artificial Sequence
  Description of Artificial Sequence: Synthetic oligonucleotide
  Sense strand starting at position 2513 of SEQ ID NO: 1243527
agaggacucuugcaaagaa

SEQ ID NO: 1422149 - RNA, 19 nt, Artificial Sequence
  Description of Artificial Sequence: Synthetic oligonucleotide
  Antisense strand to SEQ ID NO: 1422148
uucuuugcaagaguccucu

SEQ ID NO: 1422150 - RNA, 19 nt, Artificial Sequence
  Description of Artificial Sequence: Synthetic oligonucleotide
  Sense strand starting at position 2542 of SEQ ID NO: 1243527
ccuaccgaguuccuaauaa

SEQ ID NO: 1422151 - RNA, 19 nt, Artificial Sequence
  Description of Artificial Sequence: Synthetic oligonucleotide
  Antisense strand to SEQ ID NO: 1422150
uuauuaggaacucgguagg

SEQ ID NO: 1422152 - RNA, 19 nt, Artificial Sequence
  Description of Artificial Sequence: Synthetic oligonucleotide
  Sense strand starting at position 2570 of SEQ ID NO: 1243527
uuuaucaucucccuguuga

SEQ ID NO: 1422153 - RNA, 19 nt, Artificial Sequence
  Description of Artificial Sequence: Synthetic oligonucleotide
  Antisense strand to SEQ ID NO: 1422152
ucaacagggagaugauaaa

SEQ ID NO: 1422154 - RNA, 19 nt, Artificial Sequence
  Description of Artificial Sequence: Synthetic oligonucleotide
  Sense strand starting at position 2571 of SEQ ID NO: 1243527
uuaucaucucccuguugac

SEQ ID NO: 1422155 - RNA, 19 nt, Artificial Sequence
  Description of Artificial Sequence: Synthetic oligonucleotide
  Antisense strand to SEQ ID NO: 1422154
gucaacagggagaugauaa

SEQ ID NO: 1422156 - RNA, 19 nt, Artificial Sequence
  Description of Artificial Sequence: Synthetic oligonucleotide
  Sense strand starting at position 2584 of SEQ ID NO: 1243527
guugacuuccuguguuuag

SEQ ID NO: 1422157 - RNA, 19 nt, Artificial Sequence
  Description of Artificial Sequence: Synthetic oligonucleotide
  Antisense strand to SEQ ID NO: 1422156
cuaaacacaggaagucaac

SEQ ID NO: 1422158 - RNA, 19 nt, Artificial Sequence
  Description of Artificial Sequence: Synthetic oligonucleotide
  Sense strand starting at position 2587 of SEQ ID NO: 1243527
gacuuccuguguuuaggaa

SEQ ID NO: 1422159 - RNA, 19 nt, Artificial Sequence
  Description of Artificial Sequence: Synthetic oligonucleotide
  Antisense strand to SEQ ID NO: 1422158
uuccuaaacacaggaaguc

SEQ ID NO: 1422160 - RNA, 19 nt, Artificial Sequence
  Description of Artificial Sequence: Synthetic oligonucleotide
  Sense strand starting at position 2813 of SEQ ID NO: 1243527
agucauucuucucuugauc

SEQ ID NO: 1422161 - RNA, 19 nt, Artificial Sequence
  Description of Artificial Sequence: Synthetic oligonucleotide
  Antisense strand to SEQ ID NO: 1422160
gaucaagagaagaaugacu

SEQ ID NO: 1422162 - RNA, 19 nt, Artificial Sequence
  Description of Artificial Sequence: Synthetic oligonucleotide
  Sense strand starting at position 3012 of SEQ ID NO: 1243527
ccggaaggcuccuugauuc

SEQ ID NO: 1422163 - RNA, 19 nt, Artificial Sequence
  Description of Artificial Sequence: Synthetic oligonucleotide
  Antisense strand to SEQ ID NO: 1422162
gaaucaaggagccuuccgg

SEQ ID NO: 1422164 - RNA, 19 nt, Artificial Sequence
  Description of Artificial Sequence: Synthetic oligonucleotide
  Sense strand starting at position 3023 of SEQ ID NO: 1243527
cuugauuccuguccugaua

SEQ ID NO: 1422165 - RNA, 19 nt, Artificial Sequence
  Description of Artificial Sequence: Synthetic oligonucleotide
  Antisense strand to SEQ ID NO: 1422164
uaucaggacaggaaucaag

SEQ ID NO: 1422166 - RNA, 19 nt, Artificial Sequence
  Description of Artificial Sequence: Synthetic oligonucleotide
  Sense strand starting at position 3064 of SEQ ID NO: 1243527
aauggaguguuggcacuuu

SEQ ID NO: 1422167 - RNA, 19 nt, Artificial Sequence
  Description of Artificial Sequence: Synthetic oligonucleotide
  Antisense strand to SEQ ID NO: 1422166
aaagugccaacacuccauu

SEQ ID NO: 1422168 - RNA, 19 nt, Artificial Sequence
  Description of Artificial Sequence: Synthetic oligonucleotide
  Sense strand starting at position 3139 of SEQ ID NO: 1243527
ggccucuuguugcuaauuu

SEQ ID NO: 1422169 - RNA, 19 nt, Artificial Sequence
  Description of Artificial Sequence: Synthetic oligonucleotide
  Antisense strand to SEQ ID NO: 1422168
aaauuagcaacaagaggcc

SEQ ID NO: 1422170 - RNA, 19 nt, Artificial Sequence
  Description of Artificial Sequence: Synthetic oligonucleotide
  Sense strand starting at position 3233 of SEQ ID NO: 1243527
gucucaucucagggaucca

SEQ ID NO: 1422171 - RNA, 19 nt, Artificial Sequence
  Description of Artificial Sequence: Synthetic oligonucleotide
  Antisense strand to SEQ ID NO: 1422170
uggaucccugagaugagac

SEQ ID NO: 1422172 - RNA, 19 nt, Artificial Sequence
  Description of Artificial Sequence: Synthetic oligonucleotide
  Sense strand starting at position 3268 of SEQ ID NO: 1243527
ugguuuaucuacucauugu

SEQ ID NO: 1422173 - RNA, 19 nt, Artificial Sequence
  Description of Artificial Sequence: Synthetic oligonucleotide
  Antisense strand to SEQ ID NO: 1422172
acaaugaguagauaaacca

SEQ ID NO: 1422174 - RNA, 19 nt, Artificial Sequence
  Description of Artificial Sequence: Synthetic oligonucleotide
  Sense strand starting at position 3278 of SEQ ID NO: 1243527
acucauugucuccagugga

SEQ ID NO: 1422175 - RNA, 19 nt, Artificial Sequence
  Description of Artificial Sequence: Synthetic oligonucleotide
  Antisense strand to SEQ ID NO: 1422174
uccacuggagacaaugagu

SEQ ID NO: 1422176 - RNA, 19 nt, Artificial Sequence
  Description of Artificial Sequence: Synthetic oligonucleotide
  Sense strand starting at position 3281 of SEQ ID NO: 1243527
cauugucuccaguggaauc

SEQ ID NO: 1422177 - RNA, 19 nt, Artificial Sequence
  Description of Artificial Sequence: Synthetic oligonucleotide
  Antisense strand to SEQ ID NO: 1422176
gauuccacuggagacaaug

SEQ ID NO: 1422178 - RNA, 19 nt, Artificial Sequence
  Description of Artificial Sequence: Synthetic oligonucleotide
  Sense strand starting at position 3451 of SEQ ID NO: 1243527
ucaagacaagcaugaguaa

SEQ ID NO: 1422179 - RNA, 19 nt, Artificial Sequence
  Description of Artificial Sequence: Synthetic oligonucleotide
  Antisense strand to SEQ ID NO: 1422178
uuacucaugcuugucuuga

SEQ ID NO: 1422180 - RNA, 19 nt, Artificial Sequence
  Description of Artificial Sequence: Synthetic oligonucleotide
  Sense strand starting at position 127 of SEQ ID NO: 1243528
ggauuaagggucugggcuu

SEQ ID NO: 1422181 - RNA, 19 nt, Artificial Sequence
  Description of Artificial Sequence: Synthetic oligonucleotide
  Antisense strand to SEQ ID NO: 1422180
aagcccagacccuuaaucc

SEQ ID NO: 1422182 - RNA, 19 nt, Artificial Sequence
  Description of Artificial Sequence: Synthetic oligonucleotide
  Sense strand starting at position 140 of SEQ ID NO: 1243528
gggcuugagucccuacuca

SEQ ID NO: 1422183 - RNA, 19 nt, Artificial Sequence
  Description of Artificial Sequence: Synthetic oligonucleotide
  Antisense strand to SEQ ID NO: 1422182
ugaguagggacucaagccc

SEQ ID NO: 1422184 - RNA, 19 nt, Artificial Sequence
  Description of Artificial Sequence: Synthetic oligonucleotide
  Sense strand starting at position 255 of SEQ ID NO: 1243528
gguuaagugagauguuggu

SEQ ID NO: 1422185 - RNA, 19 nt, Artificial Sequence
  Description of Artificial Sequence: Synthetic oligonucleotide
  Antisense strand to SEQ ID NO: 1422184
accaacaucucacuuaacc

SEQ ID NO: 1422186 - RNA, 19 nt, Artificial Sequence
  Description of Artificial Sequence: Synthetic oligonucleotide
  Sense strand starting at position 259 of SEQ ID NO: 1243528
aagugagauguugguauac

SEQ ID NO: 1422187 - RNA, 19 nt, Artificial Sequence
  Description of Artificial Sequence: Synthetic oligonucleotide
  Antisense strand to SEQ ID NO: 1422186
guauaccaacaucucacuu

SEQ ID NO: 1422188 - RNA, 19 nt, Artificial Sequence
  Description of Artificial Sequence: Synthetic oligonucleotide
  Sense strand starting at position 278 of SEQ ID NO: 1243528
gcucuuuguaaaugggaaa

SEQ ID NO: 1422189 - RNA, 19 nt, Artificial Sequence
  Description of Artificial Sequence: Synthetic oligonucleotide
  Antisense strand to SEQ ID NO: 1422188
uuucccauuuacaaagagc

SEQ ID NO: 1422190 - RNA, 19 nt, Artificial Sequence
  Description of Artificial Sequence: Synthetic oligonucleotide
  Sense strand starting at position 407 of SEQ ID NO: 1243528
aguagaagacuuggguuca

SEQ ID NO: 1422191 - RNA, 19 nt, Artificial Sequence
  Description of Artificial Sequence: Synthetic oligonucleotide
  Antisense strand to SEQ ID NO: 1422190
ugaacccaagucuucuacu

SEQ ID NO: 1422192 - RNA, 19 nt, Artificial Sequence
  Description of Artificial Sequence: Synthetic oligonucleotide
  Sense strand starting at position 539 of SEQ ID NO: 1243528
gaaaccugcccuugaagga

SEQ ID NO: 1422193 - RNA, 19 nt, Artificial Sequence
  Description of Artificial Sequence: Synthetic oligonucleotide
  Antisense strand to SEQ ID NO: 1422192
uccuucaagggcagguuuc

SEQ ID NO: 1422194 - RNA, 19 nt, Artificial Sequence
  Description of Artificial Sequence: Synthetic oligonucleotide
  Sense strand starting at position 629 of SEQ ID NO: 1243528
cucguaagucuguuuguuc

SEQ ID NO: 1422195 - RNA, 19 nt, Artificial Sequence
  Description of Artificial Sequence: Synthetic oligonucleotide
  Antisense strand to SEQ ID NO: 1422194
gaacaaacagacuuacgag

SEQ ID NO: 1422196 - RNA, 19 nt, Artificial Sequence
  Description of Artificial Sequence: Synthetic oligonucleotide
  Sense strand starting at position 806 of SEQ ID NO: 1243528
gaauguccaguuugaacau

SEQ ID NO: 1422197 - RNA, 19 nt, Artificial Sequence
  Description of Artificial Sequence: Synthetic oligonucleotide
  Antisense strand to SEQ ID NO: 1422196
auguucaaacuggacauuc

SEQ ID NO: 1422198 - RNA, 19 nt, Artificial Sequence
  Description of Artificial Sequence: Synthetic oligonucleotide
  Sense strand starting at position 991 of SEQ ID NO: 1243528
uaguuacaguucgucaaga

SEQ ID NO: 1422199 - RNA, 19 nt, Artificial Sequence
  Description of Artificial Sequence: Synthetic oligonucleotide
  Antisense strand to SEQ ID NO: 1422198
ucuugacgaacuguaacua

SEQ ID NO: 1422200 - RNA, 19 nt, Artificial Sequence
  Description of Artificial Sequence: Synthetic oligonucleotide
  Sense strand starting at position 992 of SEQ ID NO: 1243528
aguuacaguucgucaagau

SEQ ID NO: 1422201 - RNA, 19 nt, Artificial Sequence
  Description of Artificial Sequence: Synthetic oligonucleotide
  Antisense strand to SEQ ID NO: 1422200
aucuugacgaacuguaacu

SEQ ID NO: 1422202 - RNA, 19 nt, Artificial Sequence
  Description of Artificial Sequence: Synthetic oligonucleotide
  Sense strand starting at position 993 of SEQ ID NO: 1243528
guuacaguucgucaagaua

SEQ ID NO: 1422203 - RNA, 19 nt, Artificial Sequence
  Description of Artificial Sequence: Synthetic oligonucleotide
  Antisense strand to SEQ ID NO: 1422202
uaucuugacgaacuguaac

SEQ ID NO: 1422204 - RNA, 19 nt, Artificial Sequence
  Description of Artificial Sequence: Synthetic oligonucleotide
  Sense strand starting at position 1074 of SEQ ID NO: 1243528
aaagcagucuagguagaca

SEQ ID NO: 1422205 - RNA, 19 nt, Artificial Sequence
  Description of Artificial Sequence: Synthetic oligonucleotide
  Antisense strand to SEQ ID NO: 1422204
ugucuaccuagacugcuuu

SEQ ID NO: 1422206 - RNA, 19 nt, Artificial Sequence
  Description of Artificial Sequence: Synthetic oligonucleotide
  Sense strand starting at position 1118 of SEQ ID NO: 1243528
cacuauguugcugagguaa

SEQ ID NO: 1422207 - RNA, 19 nt, Artificial Sequence
  Description of Artificial Sequence: Synthetic oligonucleotide
  Antisense strand to SEQ ID NO: 1422206
uuaccucagcaacauagug

SEQ ID NO: 1422208 - RNA, 19 nt, Artificial Sequence
  Description of Artificial Sequence: Synthetic oligonucleotide
  Sense strand starting at position 1141 of SEQ ID NO: 1243528
gggcuaggucaacagugua

SEQ ID NO: 1422209 - RNA, 19 nt, Artificial Sequence
  Description of Artificial Sequence: Synthetic oligonucleotide
  Antisense strand to SEQ ID NO: 1422208
uacacuguugaccuagccc

SEQ ID NO: 1422210 - RNA, 19 nt, Artificial Sequence
  Description of Artificial Sequence: Synthetic oligonucleotide
  Sense strand starting at position 1362 of SEQ ID NO: 1243528
gugaucccuccugaaguuu

SEQ ID NO: 1422211 - RNA, 19 nt, Artificial Sequence
  Description of Artificial Sequence: Synthetic oligonucleotide
  Antisense strand to SEQ ID NO: 1422210
aaacuucaggagggaucac

SEQ ID NO: 1422212 - RNA, 19 nt, Artificial Sequence
  Description of Artificial Sequence: Synthetic oligonucleotide
  Sense strand starting at position 1390 of SEQ ID NO: 1243528
augggaccgucaucaaagu

SEQ ID NO: 1422213 - RNA, 19 nt, Artificial Sequence
  Description of Artificial Sequence: Synthetic oligonucleotide
  Antisense strand to SEQ ID NO: 1422212
acuuugaugacggucccau

SEQ ID NO: 1422214 - RNA, 19 nt, Artificial Sequence
  Description of Artificial Sequence: Synthetic oligonucleotide
  Sense strand starting at position 1403 of SEQ ID NO: 1243528
caaagucucggguaacaau

SEQ ID NO: 1422215 - RNA, 19 nt, Artificial Sequence
  Description of Artificial Sequence: Synthetic oligonucleotide
  Antisense strand to SEQ ID NO: 1422214
auuguuacccgagacuuug

SEQ ID NO: 1422216 - RNA, 19 nt, Artificial Sequence
  Description of Artificial Sequence: Synthetic oligonucleotide
  Sense strand starting at position 2234 of SEQ ID NO: 1243528
acuguuaagucagcaaaua

SEQ ID NO: 1422217 - RNA, 19 nt, Artificial Sequence
  Description of Artificial Sequence: Synthetic oligonucleotide
  Antisense strand to SEQ ID NO: 1422216
uauuugcugacuuaacagu

SEQ ID NO: 1422218 - RNA, 19 nt, Artificial Sequence
  Description of Artificial Sequence: Synthetic oligonucleotide
  Sense strand starting at position 2235 of SEQ ID NO: 1243528
cuguuaagucagcaaauac

SEQ ID NO: 1422219 - RNA, 19 nt, Artificial Sequence
  Description of Artificial Sequence: Synthetic oligonucleotide
  Antisense strand to SEQ ID NO: 1422218
guauuugcugacuuaacag

SEQ ID NO: 1422220 - RNA, 19 nt, Artificial Sequence
  Description of Artificial Sequence: Synthetic oligonucleotide
  Sense strand starting at position 2332 of SEQ ID NO: 1243528
uguaauauguaugucccaa

SEQ ID NO: 1422221 - RNA, 19 nt, Artificial Sequence
  Description of Artificial Sequence: Synthetic oligonucleotide
  Antisense strand to SEQ ID NO: 1422220
uugggacauacauauuaca

SEQ ID NO: 1422222 - RNA, 19 nt, Artificial Sequence
  Description of Artificial Sequence: Synthetic oligonucleotide
  Sense strand starting at position 2408 of SEQ ID NO: 1243528
aauugaauugaguaucugu

SEQ ID NO: 1422223 - RNA, 19 nt, Artificial Sequence
  Description of Artificial Sequence: Synthetic oligonucleotide
  Antisense strand to SEQ ID NO: 1422222
acagauacucaauucaauu

SEQ ID NO: 1422224 - RNA, 19 nt, Artificial Sequence
  Description of Artificial Sequence: Synthetic oligonucleotide
  Sense strand starting at position 2411 of SEQ ID NO: 1243528
ugaauugaguaucuguauu

SEQ ID NO: 1422225 - RNA, 19 nt, Artificial Sequence
  Description of Artificial Sequence: Synthetic oligonucleotide
  Antisense strand to SEQ ID NO: 1422224
aauacagauacucaauuca

SEQ ID NO: 1422226 - RNA, 19 nt, Artificial Sequence
  Description of Artificial Sequence: Synthetic oligonucleotide
  Sense strand starting at position 2519 of SEQ ID NO: 1243528
guccuugugacaugaagca

SEQ ID NO: 1422227 - RNA, 19 nt, Artificial Sequence
  Description of Artificial Sequence: Synthetic oligonucleotide
  Antisense strand to SEQ ID NO: 1422226
ugcuucaugucacaaggac

SEQ ID NO: 1422228 - RNA, 19 nt, Artificial Sequence
  Description of Artificial Sequence: Synthetic oligonucleotide
  Sense strand starting at position 2645 of SEQ ID NO: 1243528
aauuauaauccagguaggu

SEQ ID NO: 1422229 - RNA, 19 nt, Artificial Sequence
  Description of Artificial Sequence: Synthetic oligonucleotide
  Antisense strand to SEQ ID NO: 1422228
accuaccuggauuauaauu

SEQ ID NO: 1422230 - RNA, 19 nt, Artificial Sequence
  Description of Artificial Sequence: Synthetic oligonucleotide
  Sense strand starting at position 2985 of SEQ ID NO: 1243528
gcaccuggcagagaaauau

SEQ ID NO: 1422231 - RNA, 19 nt, Artificial Sequence
  Description of Artificial Sequence: Synthetic oligonucleotide
  Antisense strand to SEQ ID NO: 1422230
auauuucucugccaggugc

SEQ ID NO: 1422232 - RNA, 19 nt, Artificial Sequence
  Description of Artificial Sequence: Synthetic oligonucleotide
  Sense strand starting at position 3118 of SEQ ID NO: 1243528
gugccugcccaauaacuuu

SEQ ID NO: 1422233 - RNA, 19 nt, Artificial Sequence
  Description of Artificial Sequence: Synthetic oligonucleotide
  Antisense strand to SEQ ID NO: 1422232
aaaguuauugggcaggcac

SEQ ID NO: 1422234 - RNA, 19 nt, Artificial Sequence
  Description of Artificial Sequence: Synthetic oligonucleotide
  Sense strand starting at position 3158 of SEQ ID NO: 1243528
uuuauuugcuugcuugaga

SEQ ID NO: 1422235 - RNA, 19 nt, Artificial Sequence
  Description of Artificial Sequence: Synthetic oligonucleotide
  Antisense strand to SEQ ID NO: 1422234
ucucaagcaagcaaauaaa

SEQ ID NO: 1422236 - RNA, 19 nt, Artificial Sequence
  Description of Artificial Sequence: Synthetic oligonucleotide
  Sense strand starting at position 3165 of SEQ ID NO: 1243528
gcuugcuugagacagaguu

SEQ ID NO: 1422237 - RNA, 19 nt, Artificial Sequence
  Description of Artificial Sequence: Synthetic oligonucleotide
  Antisense strand to SEQ ID NO: 1422236
aacucugucucaagcaagc

SEQ ID NO: 1422238 - RNA, 19 nt, Artificial Sequence
  Description of Artificial Sequence: Synthetic oligonucleotide
  Sense strand starting at position 3474 of SEQ ID NO: 1243528
agacauucuugacugaugu

SEQ ID NO: 1422239 - RNA, 19 nt, Artificial Sequence
  Description of Artificial Sequence: Synthetic oligonucleotide
  Antisense strand to SEQ ID NO: 1422238
acaucagucaagaaugucu

SEQ ID NO: 1422240 - RNA, 19 nt, Artificial Sequence
  Description of Artificial Sequence: Synthetic oligonucleotide
  Sense strand starting at position 3475 of SEQ ID NO: 1243528
gacauucuugacugauguu

SEQ ID NO: 1422241 - RNA, 19 nt, Artificial Sequence
  Description of Artificial Sequence: Synthetic oligonucleotide
  Antisense strand to SEQ ID NO: 1422240
aacaucagucaagaauguc

SEQ ID NO: 1422242 - RNA, 19 nt, Artificial Sequence
  Description of Artificial Sequence: Synthetic oligonucleotide
  Sense strand starting at position 3485 of SEQ ID NO: 1243528
acugauguucuggacaagu

SEQ ID NO: 1422243 - RNA, 19 nt, Artificial Sequence
  Description of Artificial Sequence: Synthetic oligonucleotide
  Antisense strand to SEQ ID NO: 1422242
acuuguccagaacaucagu

SEQ ID NO: 1422244 - RNA, 19 nt, Artificial Sequence
  Description of Artificial Sequence: Synthetic oligonucleotide
  Sense strand starting at position 3487 of SEQ ID NO: 1243528
ugauguucuggacaaguug

SEQ ID NO: 1422245 - RNA, 19 nt, Artificial Sequence
  Description of Artificial Sequence: Synthetic oligonucleotide
  Antisense strand to SEQ ID NO: 1422244
caacuuguccagaacauca

SEQ ID NO: 1422246 - RNA, 19 nt, Artificial Sequence
  Description of Artificial Sequence: Synthetic oligonucleotide
  Sense strand starting at position 3512 of SEQ ID NO: 1243528
ggcucaguuuaaucaccau

SEQ ID NO: 1422247 - RNA, 19 nt, Artificial Sequence
  Description of Artificial Sequence: Synthetic oligonucleotide
  Antisense strand to SEQ ID NO: 1422246
auggugauuaaacugagcc

SEQ ID NO: 1422248 - RNA, 19 nt, Artificial Sequence
  Description of Artificial Sequence: Synthetic oligonucleotide
  Sense strand starting at position 3550 of SEQ ID NO: 1243528
ugacguaauuagccucaaa

SEQ ID NO: 1422249 - RNA, 19 nt, Artificial Sequence
  Description of Artificial Sequence: Synthetic oligonucleotide
  Antisense strand to SEQ ID NO: 1422248
uuugaggcuaauuacguca

SEQ ID NO: 1422250 - RNA, 19 nt, Artificial Sequence
  Description of Artificial Sequence: Synthetic oligonucleotide
  Sense strand starting at position 3553 of SEQ ID NO: 1243528
cguaauuagccucaaagac

SEQ ID NO: 1422251 - RNA, 19 nt, Artificial Sequence
  Description of Artificial Sequence: Synthetic oligonucleotide
  Antisense strand to SEQ ID NO: 1422250
gucuuugaggcuaauuacg

SEQ ID NO: 1422252 - RNA, 19 nt, Artificial Sequence
  Description of Artificial Sequence: Synthetic oligonucleotide
  Sense strand starting at position 3593 of SEQ ID NO: 1243528
gggucuucgaauugggaug

SEQ ID NO: 1422253 - RNA, 19 nt, Artificial Sequence
  Description of Artificial Sequence: Synthetic oligonucleotide
  Antisense strand to SEQ ID NO: 1422252
caucccaauucgaagaccc

SEQ ID NO: 1422254 - RNA, 19 nt, Artificial Sequence
  Description of Artificial Sequence: Synthetic oligonucleotide
  Sense strand starting at position 3598 of SEQ ID NO: 1243528
uucgaauugggauggauuc

SEQ ID NO: 1422255 - RNA, 19 nt, Artificial Sequence
  Description of Artificial Sequence: Synthetic oligonucleotide
  Antisense strand to SEQ ID NO: 1422254
gaauccaucccaauucgaa

SEQ ID NO: 1422256 - RNA, 19 nt, Artificial Sequence
  Description of Artificial Sequence: Synthetic oligonucleotide
  Sense strand starting at position 3813 of SEQ ID NO: 1243528
cggguaaucccagguacuc

SEQ ID NO: 1422257 - RNA, 19 nt, Artificial Sequence
  Description of Artificial Sequence: Synthetic oligonucleotide
  Antisense strand to SEQ ID NO: 1422256
gaguaccugggauuacccg

SEQ ID NO: 1422258 - RNA, 19 nt, Artificial Sequence
  Description of Artificial Sequence: Synthetic oligonucleotide
  Sense strand starting at position 3954 of SEQ ID NO: 1243528
guugaacacuuagucucua

SEQ ID NO: 1422259 - RNA, 19 nt, Artificial Sequence
  Description of Artificial Sequence: Synthetic oligonucleotide
  Antisense strand to SEQ ID NO: 1422258
uagagacuaaguguucaac

SEQ ID NO: 1422260 - RNA, 19 nt, Artificial Sequence
  Description of Artificial Sequence: Synthetic oligonucleotide
  Sense strand starting at position 52 of SEQ ID NO: 1243529
cucuacagagccugaaaua

SEQ ID NO: 1422261 - RNA, 19 nt, Artificial Sequence
  Description of Artificial Sequence: Synthetic oligonucleotide
  Antisense strand to SEQ ID NO: 1422260
uauuucaggcucuguagag

SEQ ID NO: 1422262 - RNA, 19 nt, Artificial Sequence
  Description of Artificial Sequence: Synthetic oligonucleotide
  Sense strand starting at position 202 of SEQ ID NO: 1243529
gcugccaaucucugagaua

SEQ ID NO: 1422263 - RNA, 19 nt, Artificial Sequence
  Description of Artificial Sequence: Synthetic oligonucleotide
  Antisense strand to SEQ ID NO: 1422262
uaucucagagauuggcagc

SEQ ID NO: 1422264 - RNA, 19 nt, Artificial Sequence
  Description of Artificial Sequence: Synthetic oligonucleotide
  Sense strand starting at position 258 of SEQ ID NO: 1243529
cagcuaucugcguaaggga

SEQ ID NO: 1422265 - RNA, 19 nt, Artificial Sequence
  Description of Artificial Sequence: Synthetic oligonucleotide
  Antisense strand to SEQ ID NO: 1422264
ucccuuacgcagauagcug

SEQ ID NO: 1422266 - RNA, 19 nt, Artificial Sequence
  Description of Artificial Sequence: Synthetic oligonucleotide
  Sense strand starting at position 386 of SEQ ID NO: 1243529
agugguacccugcagguau

SEQ ID NO: 1422267 - RNA, 19 nt, Artificial Sequence
  Description of Artificial Sequence: Synthetic oligonucleotide
  Antisense strand to SEQ ID NO: 1422266
auaccugcaggguaccacu

SEQ ID NO: 1422268 - RNA, 19 nt, Artificial Sequence
  Description of Artificial Sequence: Synthetic oligonucleotide
  Sense strand starting at position 397 of SEQ ID NO: 1243529
gcagguauaacaggguuga

SEQ ID NO: 1422269 - RNA, 19 nt, Artificial Sequence
  Description of Artificial Sequence: Synthetic oligonucleotide
  Antisense strand to SEQ ID NO: 1422268
ucaacccuguuauaccugc

SEQ ID NO: 1422270 - RNA, 19 nt, Artificial Sequence
  Description of Artificial Sequence: Synthetic oligonucleotide
  Sense strand starting at position 448 of SEQ ID NO: 1243529
agugucugcaucgagaaga

SEQ ID NO: 1422271 - RNA, 19 nt, Artificial Sequence
  Description of Artificial Sequence: Synthetic oligonucleotide
  Antisense strand to SEQ ID NO: 1422270
ucuucucgaugcagacacu

SEQ ID NO: 1422272 - RNA, 19 nt, Artificial Sequence
  Description of Artificial Sequence: Synthetic oligonucleotide
  Sense strand starting at position 774 of SEQ ID NO: 1243529
uggcuacucuuuccuagaa

SEQ ID NO: 1422273 - RNA, 19 nt, Artificial Sequence
  Description of Artificial Sequence: Synthetic oligonucleotide
  Antisense strand to SEQ ID NO: 1422272
uucuaggaaagaguagcca

SEQ ID NO: 1422274 - RNA, 19 nt, Artificial Sequence
  Description of Artificial Sequence: Synthetic oligonucleotide
  Sense strand starting at position 775 of SEQ ID NO: 1243529
ggcuacucuuuccuagaau

SEQ ID NO: 1422275 - RNA, 19 nt, Artificial Sequence
  Description of Artificial Sequence: Synthetic oligonucleotide
  Antisense strand to SEQ ID NO: 1422274
auucuaggaaagaguagcc

SEQ ID NO: 1422276 - RNA, 19 nt, Artificial Sequence
  Description of Artificial Sequence: Synthetic oligonucleotide
  Sense strand starting at position 817 of SEQ ID NO: 1243529
cuaagucauggauguccau

SEQ ID NO: 1422277 - RNA, 19 nt, Artificial Sequence
  Description of Artificial Sequence: Synthetic oligonucleotide
  Antisense strand to SEQ ID NO: 1422276
auggacauccaugacuuag

SEQ ID NO: 1422278 - RNA, 19 nt, Artificial Sequence
  Description of Artificial Sequence: Synthetic oligonucleotide
  Sense strand starting at position 826 of SEQ ID NO: 1243529
ggauguccaucccuuaacu

SEQ ID NO: 1422279 - RNA, 19 nt, Artificial Sequence
  Description of Artificial Sequence: Synthetic oligonucleotide
  Antisense strand to SEQ ID NO: 1422278
aguuaagggauggacaucc

SEQ ID NO: 1422280 - RNA, 19 nt, Artificial Sequence
  Description of Artificial Sequence: Synthetic oligonucleotide
  Sense strand starting at position 905 of SEQ ID NO: 1243529
gagaaaucuacacggcgau

SEQ ID NO: 1422281 - RNA, 19 nt, Artificial Sequence
  Description of Artificial Sequence: Synthetic oligonucleotide
  Antisense strand to SEQ ID NO: 1422280
aucgccguguagauuucuc

SEQ ID NO: 1422282 - RNA, 19 nt, Artificial Sequence
  Description of Artificial Sequence: Synthetic oligonucleotide
  Sense strand starting at position 906 of SEQ ID NO: 1243529
agaaaucuacacggcgaua

SEQ ID NO: 1422283 - RNA, 19 nt, Artificial Sequence
  Description of Artificial Sequence: Synthetic oligonucleotide
  Antisense strand to SEQ ID NO: 1422282
uaucgccguguagauuucu

SEQ ID NO: 1422284 - RNA, 19 nt, Artificial Sequence
  Description of Artificial Sequence: Synthetic oligonucleotide
  Sense strand starting at position 908 of SEQ ID NO: 1243529
aaaucuacacggcgauaau

SEQ ID NO: 1422285 - RNA, 19 nt, Artificial Sequence
  Description of Artificial Sequence: Synthetic oligonucleotide
  Antisense strand to SEQ ID NO: 1422284
auuaucgccguguagauuu

SEQ ID NO: 1422286 - RNA, 19 nt, Artificial Sequence
  Description of Artificial Sequence: Synthetic oligonucleotide
  Sense strand starting at position 909 of SEQ ID NO: 1243529
aaucuacacggcgauaaua

SEQ ID NO: 1422287 - RNA, 19 nt, Artificial Sequence
  Description of Artificial Sequence: Synthetic oligonucleotide
  Antisense strand to SEQ ID NO: 1422286
uauuaucgccguguagauu

SEQ ID NO: 1422288 - RNA, 19 nt, Artificial Sequence
  Description of Artificial Sequence: Synthetic oligonucleotide
  Sense strand starting at position 1062 of SEQ ID NO: 1243529
acaucucagcugcaaagaa

SEQ ID NO: 1422289 - RNA, 19 nt, Artificial Sequence
  Description of Artificial Sequence: Synthetic oligonucleotide
  Antisense strand to SEQ ID NO: 1422288
uucuuugcagcugagaugu

SEQ ID NO: 1422290 - RNA, 19 nt, Artificial Sequence
  Description of Artificial Sequence: Synthetic oligonucleotide
  Sense strand starting at position 1079 of SEQ ID NO: 1243529
aaagauuuguuagggugga

SEQ ID NO: 1422291 - RNA, 19 nt, Artificial Sequence
  Description of Artificial Sequence: Synthetic oligonucleotide
  Antisense strand to SEQ ID NO: 1422290
uccacccuaacaaaucuuu

SEQ ID NO: 1422292 - RNA, 19 nt, Artificial Sequence
  Description of Artificial Sequence: Synthetic oligonucleotide
  Sense strand starting at position 1084 of SEQ ID NO: 1243529
uuuguuaggguggaucauu

SEQ ID NO: 1422293 - RNA, 19 nt, Artificial Sequence
  Description of Artificial Sequence: Synthetic oligonucleotide
  Antisense strand to SEQ ID NO: 1422292
aaugauccacccuaacaaa

SEQ ID NO: 1422294 - RNA, 19 nt, Artificial Sequence
  Description of Artificial Sequence: Synthetic oligonucleotide
  Sense strand starting at position 1104 of SEQ ID NO: 1243529
caaccauacggucacagau

SEQ ID NO: 1422295 - RNA, 19 nt, Artificial Sequence
  Description of Artificial Sequence: Synthetic oligonucleotide
  Antisense strand to SEQ ID NO: 1422294
aucugugaccguaugguug

SEQ ID NO: 1422296 - RNA, 19 nt, Artificial Sequence
  Description of Artificial Sequence: Synthetic oligonucleotide
  Sense strand starting at position 1112 of SEQ ID NO: 1243529
cggucacagaucugaaaca

SEQ ID NO: 1422297 - RNA, 19 nt, Artificial Sequence
  Description of Artificial Sequence: Synthetic oligonucleotide
  Antisense strand to SEQ ID NO: 1422296
uguuucagaucugugaccg

SEQ ID NO: 1422298 - RNA, 19 nt, Artificial Sequence
  Description of Artificial Sequence: Synthetic oligonucleotide
  Sense strand starting at position 1129 of SEQ ID NO: 1243529
caaauccauuugggaguua

SEQ ID NO: 1422299 - RNA, 19 nt, Artificial Sequence
  Description of Artificial Sequence: Synthetic oligonucleotide
  Antisense strand to SEQ ID NO: 1422298
uaacucccaaauggauuug

SEQ ID NO: 1422300 - RNA, 19 nt, Artificial Sequence
  Description of Artificial Sequence: Synthetic oligonucleotide
  Sense strand starting at position 1141 of SEQ ID NO: 1243529
ggaguuaggcagugucaaa

SEQ ID NO: 1422301 - RNA, 19 nt, Artificial Sequence
  Description of Artificial Sequence: Synthetic oligonucleotide
  Antisense strand to SEQ ID NO: 1422300
uuugacacugccuaacucc

SEQ ID NO: 1422302 - RNA, 19 nt, Artificial Sequence
  Description of Artificial Sequence: Synthetic oligonucleotide
  Sense strand starting at position 1176 of SEQ ID NO: 1243529
auggacucuugaguagaca

SEQ ID NO: 1422303 - RNA, 19 nt, Artificial Sequence
  Description of Artificial Sequence: Synthetic oligonucleotide
  Antisense strand to SEQ ID NO: 1422302
ugucuacucaagaguccau

SEQ ID NO: 1422304 - RNA, 19 nt, Artificial Sequence
  Description of Artificial Sequence: Synthetic oligonucleotide
  Sense strand starting at position 1257 of SEQ ID NO: 1243529
gucacacuccuuuagcgau

SEQ ID NO: 1422305 - RNA, 19 nt, Artificial Sequence
  Description of Artificial Sequence: Synthetic oligonucleotide
  Antisense strand to SEQ ID NO: 1422304
aucgcuaaaggagugugac

SEQ ID NO: 1422306 - RNA, 19 nt, Artificial Sequence
  Description of Artificial Sequence: Synthetic oligonucleotide
  Sense strand starting at position 2007 of SEQ ID NO: 1243529
aggccuuuccaaugaaauc

SEQ ID NO: 1422307 - RNA, 19 nt, Artificial Sequence
  Description of Artificial Sequence: Synthetic oligonucleotide
  Antisense strand to SEQ ID NO: 1422306
gauuucauuggaaaggccu

SEQ ID NO: 1422308 - RNA, 19 nt, Artificial Sequence
  Description of Artificial Sequence: Synthetic oligonucleotide
  Sense strand starting at position 2241 of SEQ ID NO: 1243529
caguguucuguguuugucu

SEQ ID NO: 1422309 - RNA, 19 nt, Artificial Sequence
  Description of Artificial Sequence: Synthetic oligonucleotide
  Antisense strand to SEQ ID NO: 1422308
agacaaacacagaacacug

SEQ ID NO: 1422310 - RNA, 19 nt, Artificial Sequence
  Description of Artificial Sequence: Synthetic oligonucleotide
  Sense strand starting at position 2361 of SEQ ID NO: 1243529
cagggucacuguuuacauu

SEQ ID NO: 1422311 - RNA, 19 nt, Artificial Sequence
  Description of Artificial Sequence: Synthetic oligonucleotide
  Antisense strand to SEQ ID NO: 1422310
aauguaaacagugacccug

SEQ ID NO: 1422312 - RNA, 19 nt, Artificial Sequence
  Description of Artificial Sequence: Synthetic oligonucleotide
  Sense strand starting at position 2362 of SEQ ID NO: 1243529
agggucacuguuuacauua

SEQ ID NO: 1422313 - RNA, 19 nt, Artificial Sequence
  Description of Artificial Sequence: Synthetic oligonucleotide
  Antisense strand to SEQ ID NO: 1422312
uaauguaaacagugacccu

SEQ ID NO: 1422314 - RNA, 19 nt, Artificial Sequence
  Description of Artificial Sequence: Synthetic oligonucleotide
  Sense strand starting at position 2491 of SEQ ID NO: 1243529
aguucuggucguuaaauaa

SEQ ID NO: 1422315 - RNA, 19 nt, Artificial Sequence
  Description of Artificial Sequence: Synthetic oligonucleotide
  Antisense strand to SEQ ID NO: 1422314
uuauuuaacgaccagaacu

SEQ ID NO: 1422316 - RNA, 19 nt, Artificial Sequence
  Description of Artificial Sequence: Synthetic oligonucleotide
  Sense strand starting at position 2581 of SEQ ID NO: 1243529
auuuaaucguuauaagagg

SEQ ID NO: 1422317 - RNA, 19 nt, Artificial Sequence
  Description of Artificial Sequence: Synthetic oligonucleotide
  Antisense strand to SEQ ID NO: 1422316
ccucuuauaacgauuaaau

SEQ ID NO: 1422318 - RNA, 19 nt, Artificial Sequence
  Description of Artificial Sequence: Synthetic oligonucleotide
  Sense strand starting at position 2835 of SEQ ID NO: 1243529
aaagauguuuaagucuuga

SEQ ID NO: 1422319 - RNA, 19 nt, Artificial Sequence
  Description of Artificial Sequence: Synthetic oligonucleotide
  Antisense strand to SEQ ID NO: 1422318
ucaagacuuaaacaucuuu

SEQ ID NO: 1422320 - RNA, 19 nt, Artificial Sequence
  Description of Artificial Sequence: Synthetic oligonucleotide
  Sense strand starting at position 2840 of SEQ ID NO: 1243529
uguuuaagucuugaaacca

SEQ ID NO: 1422321 - RNA, 19 nt, Artificial Sequence
  Description of Artificial Sequence: Synthetic oligonucleotide
  Antisense strand to SEQ ID NO: 1422320
ugguuucaagacuuaaaca

SEQ ID NO: 1422322 - RNA, 19 nt, Artificial Sequence
  Description of Artificial Sequence: Synthetic oligonucleotide
  Sense strand starting at position 3006 of SEQ ID NO: 1243529
cacguugaaucauuacuga

SEQ ID NO: 1422323 - RNA, 19 nt, Artificial Sequence
  Description of Artificial Sequence: Synthetic oligonucleotide
  Antisense strand to SEQ ID NO: 1422322
ucaguaaugauucaacgug

SEQ ID NO: 1422324 - RNA, 19 nt, Artificial Sequence
  Description of Artificial Sequence: Synthetic oligonucleotide
  Sense strand starting at position 3190 of SEQ ID NO: 1243529
acacguauucuacaucaug

SEQ ID NO: 1422325 - RNA, 19 nt, Artificial Sequence
  Description of Artificial Sequence: Synthetic oligonucleotide
  Antisense strand to SEQ ID NO: 1422324
caugauguagaauacgugu

SEQ ID NO: 1422326 - RNA, 19 nt, Artificial Sequence
  Description of Artificial Sequence: Synthetic oligonucleotide
  Sense strand starting at position 3297 of SEQ ID NO: 1243529
agaagacgcauuuggugua

SEQ ID NO: 1422327 - RNA, 19 nt, Artificial Sequence
  Description of Artificial Sequence: Synthetic oligonucleotide
  Antisense strand to SEQ ID NO: 1422326
uacaccaaaugcgucuucu

SEQ ID NO: 1422328 - RNA, 19 nt, Artificial Sequence
  Description of Artificial Sequence: Synthetic oligonucleotide
  Sense strand starting at position 3348 of SEQ ID NO: 1243529
gucaguagaucaucuguaa

SEQ ID NO: 1422329 - RNA, 19 nt, Artificial Sequence
  Description of Artificial Sequence: Synthetic oligonucleotide
  Antisense strand to SEQ ID NO: 1422328
uuacagaugaucuacugac

SEQ ID NO: 1422330 - RNA, 19 nt, Artificial Sequence
  Description of Artificial Sequence: Synthetic oligonucleotide
  Sense strand starting at position 3351 of SEQ ID NO: 1243529
aguagaucaucuguaaagc

SEQ ID NO: 1422331 - RNA, 19 nt, Artificial Sequence
  Description of Artificial Sequence: Synthetic oligonucleotide
  Antisense strand to SEQ ID NO: 1422330
gcuuuacagaugaucuacu

SEQ ID NO: 1422332 - RNA, 19 nt, Artificial Sequence
  Description of Artificial Sequence: Synthetic oligonucleotide
  Sense strand starting at position 3374 of SEQ ID NO: 1243529
aggguucuccugggaaauc

SEQ ID NO: 1422333 - RNA, 19 nt, Artificial Sequence
  Description of Artificial Sequence: Synthetic oligonucleotide
  Antisense strand to SEQ ID NO: 1422332
gauuucccaggagaacccu

SEQ ID NO: 1422334 - RNA, 19 nt, Artificial Sequence
  Description of Artificial Sequence: Synthetic oligonucleotide
  Sense strand starting at position 3481 of SEQ ID NO: 1243529
cugacagucucccugacua

SEQ ID NO: 1422335 - RNA, 19 nt, Artificial Sequence
  Description of Artificial Sequence: Synthetic oligonucleotide
  Antisense strand to SEQ ID NO: 1422334
uagucagggagacugucag

SEQ ID NO: 1422336 - RNA, 19 nt, Artificial Sequence
  Description of Artificial Sequence: Synthetic oligonucleotide
  Sense strand starting at position 3582 of SEQ ID NO: 1243529
guuggcucucuuucguuaa

SEQ ID NO: 1422337 - RNA, 19 nt, Artificial Sequence
  Description of Artificial Sequence: Synthetic oligonucleotide
  Antisense strand to SEQ ID NO: 1422336
uuaacgaaagagagccaac

SEQ ID NO: 1422338 - RNA, 19 nt, Artificial Sequence
  Description of Artificial Sequence: Synthetic oligonucleotide
  Sense strand starting at position 3773 of SEQ ID NO: 1243529
aaaguaauuguggagucau

SEQ ID NO: 1422339 - RNA, 19 nt, Artificial Sequence
  Description of Artificial Sequence: Synthetic oligonucleotide
  Antisense strand to SEQ ID NO: 1422338
augacuccacaauuacuuu

SEQ ID NO: 1422340 - RNA, 19 nt, Artificial Sequence
  Description of Artificial Sequence: Synthetic oligonucleotide
  Sense strand starting at position 235 of SEQ ID NO: 1243530
acacuauacguauagcaua

SEQ ID NO: 1422341 - RNA, 19 nt, Artificial Sequence
  Description of Artificial Sequence: Synthetic oligonucleotide
  Antisense strand to SEQ ID NO: 1422340
uaugcuauacguauagugu

SEQ ID NO: 1422342 - RNA, 19 nt, Artificial Sequence
  Description of Artificial Sequence: Synthetic oligonucleotide
  Sense strand starting at position 262 of SEQ ID NO: 1243530
ggugcugcucagcauuaau

SEQ ID NO: 1422343 - RNA, 19 nt, Artificial Sequence
  Description of Artificial Sequence: Synthetic oligonucleotide
  Antisense strand to SEQ ID NO: 1422342
auuaaugcugagcagcacc

SEQ ID NO: 1422344 - RNA, 19 nt, Artificial Sequence
  Description of Artificial Sequence: Synthetic oligonucleotide
  Sense strand starting at position 273 of SEQ ID NO: 1243530
gcauuaaugguguacuuua

SEQ ID NO: 1422345 - RNA, 19 nt, Artificial Sequence
  Description of Artificial Sequence: Synthetic oligonucleotide
  Antisense strand to SEQ ID NO: 1422344
uaaaguacaccauuaaugc

SEQ ID NO: 1422346 - RNA, 19 nt, Artificial Sequence
  Description of Artificial Sequence: Synthetic oligonucleotide
  Sense strand starting at position 299 of SEQ ID NO: 1243530
gguuguaagcuccauaucu

SEQ ID NO: 1422347 - RNA, 19 nt, Artificial Sequence
  Description of Artificial Sequence: Synthetic oligonucleotide
  Antisense strand to SEQ ID NO: 1422346
agauauggagcuuacaacc

SEQ ID NO: 1422348 - RNA, 19 nt, Artificial Sequence
  Description of Artificial Sequence: Synthetic oligonucleotide
  Sense strand starting at position 369 of SEQ ID NO: 1243530
ggccuuaaggucuguauca

SEQ ID NO: 1422349 - RNA, 19 nt, Artificial Sequence
  Description of Artificial Sequence: Synthetic oligonucleotide
  Antisense strand to SEQ ID NO: 1422348
ugauacagaccuuaaggcc

SEQ ID NO: 1422350 - RNA, 19 nt, Artificial Sequence
  Description of Artificial Sequence: Synthetic oligonucleotide
  Sense strand starting at position 370 of SEQ ID NO: 1243530
gccuuaaggucuguaucac

SEQ ID NO: 1422351 - RNA, 19 nt, Artificial Sequence
  Description of Artificial Sequence: Synthetic oligonucleotide
  Antisense strand to SEQ ID NO: 1422350
gugauacagaccuuaaggc

SEQ ID NO: 1422352 - RNA, 19 nt, Artificial Sequence
  Description of Artificial Sequence: Synthetic oligonucleotide
  Sense strand starting at position 371 of SEQ ID NO: 1243530
ccuuaaggucuguaucaca

SEQ ID NO: 1422353 - RNA, 19 nt, Artificial Sequence
  Description of Artificial Sequence: Synthetic oligonucleotide
  Antisense strand to SEQ ID NO: 1422352
ugugauacagaccuuaagg

SEQ ID NO: 1422354 - RNA, 19 nt, Artificial Sequence
  Description of Artificial Sequence: Synthetic oligonucleotide
  Sense strand starting at position 500 of SEQ ID NO: 1243530
gugauccaguacuuaccaa

SEQ ID NO: 1422355 - RNA, 19 nt, Artificial Sequence
  Description of Artificial Sequence: Synthetic oligonucleotide
  Antisense strand to SEQ ID NO: 1422354
uugguaaguacuggaucac

SEQ ID NO: 1422356 - RNA, 19 nt, Artificial Sequence
  Description of Artificial Sequence: Synthetic oligonucleotide
  Sense strand starting at position 507 of SEQ ID NO: 1243530
aguacuuaccaagggcuua

SEQ ID NO: 1422357 - RNA, 19 nt, Artificial Sequence
  Description of Artificial Sequence: Synthetic oligonucleotide
  Antisense strand to SEQ ID NO: 1422356
uaagcccuugguaaguacu

SEQ ID NO: 1422358 - RNA, 19 nt, Artificial Sequence
  Description of Artificial Sequence: Synthetic oligonucleotide
  Sense strand starting at position 582 of SEQ ID NO: 1243530
cuguguauaccgcaauaga

SEQ ID NO: 1422359 - RNA, 19 nt, Artificial Sequence
  Description of Artificial Sequence: Synthetic oligonucleotide
  Antisense strand to SEQ ID NO: 1422358
ucuauugcgguauacacag

SEQ ID NO: 1422360 - RNA, 19 nt, Artificial Sequence
  Description of Artificial Sequence: Synthetic oligonucleotide
  Sense strand starting at position 602 of SEQ ID NO: 1243530
agauaaggcucagaaauaa

SEQ ID NO: 1422361 - RNA, 19 nt, Artificial Sequence
  Description of Artificial Sequence: Synthetic oligonucleotide
  Antisense strand to SEQ ID NO: 1422360
uuauuucugagccuuaucu

SEQ ID NO: 1422362 - RNA, 19 nt, Artificial Sequence
  Description of Artificial Sequence: Synthetic oligonucleotide
  Sense strand starting at position 752 of SEQ ID NO: 1243530
gaguauugaaaguaucggu

SEQ ID NO: 1422363 - RNA, 19 nt, Artificial Sequence
  Description of Artificial Sequence: Synthetic oligonucleotide
  Antisense strand to SEQ ID NO: 1422362
accgauacuuucaauacuc

SEQ ID NO: 1422364 - RNA, 19 nt, Artificial Sequence
  Description of Artificial Sequence: Synthetic oligonucleotide
  Sense strand starting at position 757 of SEQ ID NO: 1243530
uugaaaguaucggucuaga

SEQ ID NO: 1422365 - RNA, 19 nt, Artificial Sequence
  Description of Artificial Sequence: Synthetic oligonucleotide
  Antisense strand to SEQ ID NO: 1422364
ucuagaccgauacuuucaa

SEQ ID NO: 1422366 - RNA, 19 nt, Artificial Sequence
  Description of Artificial Sequence: Synthetic oligonucleotide
  Sense strand starting at position 799 of SEQ ID NO: 1243530
gagaucagagcauguagaa

SEQ ID NO: 1422367 - RNA, 19 nt, Artificial Sequence
  Description of Artificial Sequence: Synthetic oligonucleotide
  Antisense strand to SEQ ID NO: 1422366
uucuacaugcucugaucuc

SEQ ID NO: 1422368 - RNA, 19 nt, Artificial Sequence
  Description of Artificial Sequence: Synthetic oligonucleotide
  Sense strand starting at position 872 of SEQ ID NO: 1243530
gcaagugaccucuguaaau

SEQ ID NO: 1422369 - RNA, 19 nt, Artificial Sequence
  Description of Artificial Sequence: Synthetic oligonucleotide
  Antisense strand to SEQ ID NO: 1422368
auuuacagaggucacuugc

SEQ ID NO: 1422370 - RNA, 19 nt, Artificial Sequence
  Description of Artificial Sequence: Synthetic oligonucleotide
  Sense strand starting at position 925 of SEQ ID NO: 1243530
augagauguuucuccuaca

SEQ ID NO: 1422371 - RNA, 19 nt, Artificial Sequence
  Description of Artificial Sequence: Synthetic oligonucleotide
  Antisense strand to SEQ ID NO: 1422370
uguaggagaaacaucucau

SEQ ID NO: 1422372 - RNA, 19 nt, Artificial Sequence
  Description of Artificial Sequence: Synthetic oligonucleotide
  Sense strand starting at position 949 of SEQ ID NO: 1243530
ccagcucucuaaguguauu

SEQ ID NO: 1422373 - RNA, 19 nt, Artificial Sequence
  Description of Artificial Sequence: Synthetic oligonucleotide
  Antisense strand to SEQ ID NO: 1422372
aauacacuuagagagcugg

SEQ ID NO: 1422374 - RNA, 19 nt, Artificial Sequence
  Description of Artificial Sequence: Synthetic oligonucleotide
  Sense strand starting at position 952 of SEQ ID NO: 1243530
gcucucuaaguguauuaga

SEQ ID NO: 1422375 - RNA, 19 nt, Artificial Sequence
  Description of Artificial Sequence: Synthetic oligonucleotide
  Antisense strand to SEQ ID NO: 1422374
ucuaauacacuuagagagc

SEQ ID NO: 1422376 - RNA, 19 nt, Artificial Sequence
  Description of Artificial Sequence: Synthetic oligonucleotide
  Sense strand starting at position 961 of SEQ ID NO: 1243530
guguauuagagaugccuag

SEQ ID NO: 1422377 - RNA, 19 nt, Artificial Sequence
  Description of Artificial Sequence: Synthetic oligonucleotide
  Antisense strand to SEQ ID NO: 1422376
cuaggcaucucuaauacac

SEQ ID NO: 1422378 - RNA, 19 nt, Artificial Sequence
  Description of Artificial Sequence: Synthetic oligonucleotide
  Sense strand starting at position 965 of SEQ ID NO: 1243530
auuagagaugccuagguuc

SEQ ID NO: 1422379 - RNA, 19 nt, Artificial Sequence
  Description of Artificial Sequence: Synthetic oligonucleotide
  Antisense strand to SEQ ID NO: 1422378
gaaccuaggcaucucuaau

SEQ ID NO: 1422380 - RNA, 19 nt, Artificial Sequence
  Description of Artificial Sequence: Synthetic oligonucleotide
  Sense strand starting at position 1093 of SEQ ID NO: 1243530
uggugugaucauuaaauac

SEQ ID NO: 1422381 - RNA, 19 nt, Artificial Sequence
  Description of Artificial Sequence: Synthetic oligonucleotide
  Antisense strand to SEQ ID NO: 1422380
guauuuaaugaucacacca

SEQ ID NO: 1422382 - RNA, 19 nt, Artificial Sequence
  Description of Artificial Sequence: Synthetic oligonucleotide
  Sense strand starting at position 1153 of SEQ ID NO: 1243530
guaagcccucaauaaacga

SEQ ID NO: 1422383 - RNA, 19 nt, Artificial Sequence
  Description of Artificial Sequence: Synthetic oligonucleotide
  Antisense strand to SEQ ID NO: 1422382
ucguuuauugagggcuuac

SEQ ID NO: 1422384 - RNA, 19 nt, Artificial Sequence
  Description of Artificial Sequence: Synthetic oligonucleotide
  Sense strand starting at position 1173 of SEQ ID NO: 1243530
aguuauuauccggaggagc

SEQ ID NO: 1422385 - RNA, 19 nt, Artificial Sequence
  Description of Artificial Sequence: Synthetic oligonucleotide
  Antisense strand to SEQ ID NO: 1422384
gcuccuccggauaauaacu

SEQ ID NO: 1422386 - RNA, 19 nt, Artificial Sequence
  Description of Artificial Sequence: Synthetic oligonucleotide
  Sense strand starting at position 2431 of SEQ ID NO: 1243530
acacucuugcccgacuaua

SEQ ID NO: 1422387 - RNA, 19 nt, Artificial Sequence
  Description of Artificial Sequence: Synthetic oligonucleotide
  Antisense strand to SEQ ID NO: 1422386
uauagucgggcaagagugu

SEQ ID NO: 1422388 - RNA, 19 nt, Artificial Sequence
  Description of Artificial Sequence: Synthetic oligonucleotide
  Sense strand starting at position 2483 of SEQ ID NO: 1243530
agauaaacguaacuucgau

SEQ ID NO: 1422389 - RNA, 19 nt, Artificial Sequence
  Description of Artificial Sequence: Synthetic oligonucleotide
  Antisense strand to SEQ ID NO: 1422388
aucgaaguuacguuuaucu

SEQ ID NO: 1422390 - RNA, 19 nt, Artificial Sequence
  Description of Artificial Sequence: Synthetic oligonucleotide
  Sense strand starting at position 2489 of SEQ ID NO: 1243530
acguaacuucgauagccaa

SEQ ID NO: 1422391 - RNA, 19 nt, Artificial Sequence
  Description of Artificial Sequence: Synthetic oligonucleotide
  Antisense strand to SEQ ID NO: 1422390
uuggcuaucgaaguuacgu

SEQ ID NO: 1422392 - RNA, 19 nt, Artificial Sequence
  Description of Artificial Sequence: Synthetic oligonucleotide
  Sense strand starting at position 2520 of SEQ ID NO: 1243530
ggcagagaauguguuggau

SEQ ID NO: 1422393 - RNA, 19 nt, Artificial Sequence
  Description of Artificial Sequence: Synthetic oligonucleotide
  Antisense strand to SEQ ID NO: 1422392
auccaacacauucucugcc

SEQ ID NO: 1422394 - RNA, 19 nt, Artificial Sequence
  Description of Artificial Sequence: Synthetic oligonucleotide
  Sense strand starting at position 2560 of SEQ ID NO: 1243530
cacuuuacucgugaaagug

SEQ ID NO: 1422395 - RNA, 19 nt, Artificial Sequence
  Description of Artificial Sequence: Synthetic oligonucleotide
  Antisense strand to SEQ ID NO: 1422394
cacuuucacgaguaaagug

SEQ ID NO: 1422396 - RNA, 19 nt, Artificial Sequence
  Description of Artificial Sequence: Synthetic oligonucleotide
  Sense strand starting at position 2569 of SEQ ID NO: 1243530
cgugaaagugcucaucuuu

SEQ ID NO: 1422397 - RNA, 19 nt, Artificial Sequence
  Description of Artificial Sequence: Synthetic oligonucleotide
  Antisense strand to SEQ ID NO: 1422396
aaagaugagcacuuucacg

SEQ ID NO: 1422398 - RNA, 19 nt, Artificial Sequence
  Description of Artificial Sequence: Synthetic oligonucleotide
  Sense strand starting at position 2815 of SEQ ID NO: 1243530
guaugagucauccagccag

SEQ ID NO: 1422399 - RNA, 19 nt, Artificial Sequence
  Description of Artificial Sequence: Synthetic oligonucleotide
  Antisense strand to SEQ ID NO: 1422398
cuggcuggaugacucauac

SEQ ID NO: 1422400 - RNA, 19 nt, Artificial Sequence
  Description of Artificial Sequence: Synthetic oligonucleotide
  Sense strand starting at position 2900 of SEQ ID NO: 1243530
gugugccuacuacauagau

SEQ ID NO: 1422401 - RNA, 19 nt, Artificial Sequence
  Description of Artificial Sequence: Synthetic oligonucleotide
  Antisense strand to SEQ ID NO: 1422400
aucuauguaguaggcacac

SEQ ID NO: 1422402 - RNA, 19 nt, Artificial Sequence
  Description of Artificial Sequence: Synthetic oligonucleotide
  Sense strand starting at position 2909 of SEQ ID NO: 1243530
cuacauagauuggagcaaa

SEQ ID NO: 1422403 - RNA, 19 nt, Artificial Sequence
  Description of Artificial Sequence: Synthetic oligonucleotide
  Antisense strand to SEQ ID NO: 1422402
uuugcuccaaucuauguag

SEQ ID NO: 1422404 - RNA, 19 nt, Artificial Sequence
  Description of Artificial Sequence: Synthetic oligonucleotide
  Sense strand starting at position 3029 of SEQ ID NO: 1243530
ccagaaguauaguccaauu

SEQ ID NO: 1422405 - RNA, 19 nt, Artificial Sequence
  Description of Artificial Sequence: Synthetic oligonucleotide
  Antisense strand to SEQ ID NO: 1422404
aauuggacuauacuucugg

SEQ ID NO: 1422406 - RNA, 19 nt, Artificial Sequence
  Description of Artificial Sequence: Synthetic oligonucleotide
  Sense strand starting at position 3433 of SEQ ID NO: 1243530
ucaaguggguuucuaagga

SEQ ID NO: 1422407 - RNA, 19 nt, Artificial Sequence
  Description of Artificial Sequence: Synthetic oligonucleotide
  Antisense strand to SEQ ID NO: 1422406
uccuuagaaacccacuuga

SEQ ID NO: 1422408 - RNA, 19 nt, Artificial Sequence
  Description of Artificial Sequence: Synthetic oligonucleotide
  Sense strand starting at position 3469 of SEQ ID NO: 1243530
aagguugaauaggaaugau

SEQ ID NO: 1422409 - RNA, 19 nt, Artificial Sequence
  Description of Artificial Sequence: Synthetic oligonucleotide
  Antisense strand to SEQ ID NO: 1422408
aucauuccuauucaaccuu

SEQ ID NO: 1422410 - RNA, 19 nt, Artificial Sequence
  Description of Artificial Sequence: Synthetic oligonucleotide
  Sense strand starting at position 3575 of SEQ ID NO: 1243530
gcagcuagucuggaacaaa

SEQ ID NO: 1422411 - RNA, 19 nt, Artificial Sequence
  Description of Artificial Sequence: Synthetic oligonucleotide
  Antisense strand to SEQ ID NO: 1422410
uuuguuccagacuagcugc

SEQ ID NO: 1422412 - RNA, 19 nt, Artificial Sequence
  Description of Artificial Sequence: Synthetic oligonucleotide
  Sense strand starting at position 3698 of SEQ ID NO: 1243530
ucagacuucccugagcuau

SEQ ID NO: 1422413 - RNA, 19 nt, Artificial Sequence
  Description of Artificial Sequence: Synthetic oligonucleotide
  Antisense strand to SEQ ID NO: 1422412
auagcucagggaagucuga

SEQ ID NO: 1422414 - RNA, 19 nt, Artificial Sequence
  Description of Artificial Sequence: Synthetic oligonucleotide
  Sense strand starting at position 3727 of SEQ ID NO: 1243530
ugucaaaccucagugugau

SEQ ID NO: 1422415 - RNA, 19 nt, Artificial Sequence
  Description of Artificial Sequence: Synthetic oligonucleotide
  Antisense strand to SEQ ID NO: 1422414
aucacacugagguuugaca

SEQ ID NO: 1422416 - RNA, 19 nt, Artificial Sequence
  Description of Artificial Sequence: Synthetic oligonucleotide
  Sense strand starting at position 3728 of SEQ ID NO: 1243530
gucaaaccucagugugauc

SEQ ID NO: 1422417 - RNA, 19 nt, Artificial Sequence
  Description of Artificial Sequence: Synthetic oligonucleotide
  Antisense strand to SEQ ID NO: 1422416
gaucacacugagguuugac

SEQ ID NO: 1422418 - RNA, 19 nt, Artificial Sequence
  Description of Artificial Sequence: Synthetic oligonucleotide
  Sense strand starting at position 3733 of SEQ ID NO: 1243530
accucagugugaucugaau

SEQ ID NO: 1422419 - RNA, 19 nt, Artificial Sequence
  Description of Artificial Sequence: Synthetic oligonucleotide
  Antisense strand to SEQ ID NO: 1422418
auucagaucacacugaggu

SEQ ID NO: 1422420 - RNA, 19 nt, Artificial Sequence
  Description of Artificial Sequence: Synthetic oligonucleotide
  Sense strand starting at position 15 of SEQ ID NO: 1243531
aauugcauuucugcgggaa

SEQ ID NO: 1422421 - RNA, 19 nt, Artificial Sequence
  Description of Artificial Sequence: Synthetic oligonucleotide
  Antisense strand to SEQ ID NO: 1422420
uucccgcagaaaugcaauu

SEQ ID NO: 1422422 - RNA, 19 nt, Artificial Sequence
  Description of Artificial Sequence: Synthetic oligonucleotide
  Sense strand starting at position 16 of SEQ ID NO: 1243531
auugcauuucugcgggaac

SEQ ID NO: 1422423 - RNA, 19 nt, Artificial Sequence
  Description of Artificial Sequence: Synthetic oligonucleotide
  Antisense strand to SEQ ID NO: 1422422
guucccgcagaaaugcaau

SEQ ID NO: 1422424 - RNA, 19 nt, Artificial Sequence
  Description of Artificial Sequence: Synthetic oligonucleotide
  Sense strand starting at position 203 of SEQ ID NO: 1243531
gugaaaugccaucacauca

SEQ ID NO: 1422425 - RNA, 19 nt, Artificial Sequence
  Description of Artificial Sequence: Synthetic oligonucleotide
  Antisense strand to SEQ ID NO: 1422424
ugaugugauggcauuucac

SEQ ID NO: 1422426 - RNA, 19 nt, Artificial Sequence
  Description of Artificial Sequence: Synthetic oligonucleotide
  Sense strand starting at position 228 of SEQ ID NO: 1243531
gggacuggcucaguucuca

SEQ ID NO: 1422427 - RNA, 19 nt, Artificial Sequence
  Description of Artificial Sequence: Synthetic oligonucleotide
  Antisense strand to SEQ ID NO: 1422426
ugagaacugagccaguccc

SEQ ID NO: 1422428 - RNA, 19 nt, Artificial Sequence
  Description of Artificial Sequence: Synthetic oligonucleotide
  Sense strand starting at position 237 of SEQ ID NO: 1243531
ucaguucucaggcaugaag

SEQ ID NO: 1422429 - RNA, 19 nt, Artificial Sequence
  Description of Artificial Sequence: Synthetic oligonucleotide
  Antisense strand to SEQ ID NO: 1422428
cuucaugccugagaacuga

SEQ ID NO: 1422430 - RNA, 19 nt, Artificial Sequence
  Description of Artificial Sequence: Synthetic oligonucleotide
  Sense strand starting at position 333 of SEQ ID NO: 1243531
ggcagucuucagugaggac

SEQ ID NO: 1422431 - RNA, 19 nt, Artificial Sequence
  Description of Artificial Sequence: Synthetic oligonucleotide
  Antisense strand to SEQ ID NO: 1422430
guccucacugaagacugcc

SEQ ID NO: 1422432 - RNA, 19 nt, Artificial Sequence
  Description of Artificial Sequence: Synthetic oligonucleotide
  Sense strand starting at position 358 of SEQ ID NO: 1243531
agugacaaaugauagaaau

SEQ ID NO: 1422433 - RNA, 19 nt, Artificial Sequence
  Description of Artificial Sequence: Synthetic oligonucleotide
  Antisense strand to SEQ ID NO: 1422432
auuucuaucauuugucacu

SEQ ID NO: 1422434 - RNA, 19 nt, Artificial Sequence
  Description of Artificial Sequence: Synthetic oligonucleotide
  Sense strand starting at position 414 of SEQ ID NO: 1243531
ggugucuaauauccuuuaa

SEQ ID NO: 1422435 - RNA, 19 nt, Artificial Sequence
  Description of Artificial Sequence: Synthetic oligonucleotide
  Antisense strand to SEQ ID NO: 1422434
uuaaaggauauuagacacc

SEQ ID NO: 1422436 - RNA, 19 nt, Artificial Sequence
  Description of Artificial Sequence: Synthetic oligonucleotide
  Sense strand starting at position 416 of SEQ ID NO: 1243531
ugucuaauauccuuuaacg

SEQ ID NO: 1422437 - RNA, 19 nt, Artificial Sequence
  Description of Artificial Sequence: Synthetic oligonucleotide
  Antisense strand to SEQ ID NO: 1422436
cguuaaaggauauuagaca

SEQ ID NO: 1422438 - RNA, 19 nt, Artificial Sequence
  Description of Artificial Sequence: Synthetic oligonucleotide
  Sense strand starting at position 436 of SEQ ID NO: 1243531
cuaggcaaauccuugcaga

SEQ ID NO: 1422439 - RNA, 19 nt, Artificial Sequence
  Description of Artificial Sequence: Synthetic oligonucleotide
  Antisense strand to SEQ ID NO: 1422438
ucugcaaggauuugccuag

SEQ ID NO: 1422440 - RNA, 19 nt, Artificial Sequence
  Description of Artificial Sequence: Synthetic oligonucleotide
  Sense strand starting at position 452 of SEQ ID NO: 1243531
agacaaguagugugaugaa

SEQ ID NO: 1422441 - RNA, 19 nt, Artificial Sequence
  Description of Artificial Sequence: Synthetic oligonucleotide
  Antisense strand to SEQ ID NO: 1422440
uucaucacacuacuugucu

SEQ ID NO: 1422442 - RNA, 19 nt, Artificial Sequence
  Description of Artificial Sequence: Synthetic oligonucleotide
  Sense strand starting at position 536 of SEQ ID NO: 1243531
agaccuuggcucugaaaug

SEQ ID NO: 1422443 - RNA, 19 nt, Artificial Sequence
  Description of Artificial Sequence: Synthetic oligonucleotide
  Antisense strand to SEQ ID NO: 1422442
cauuucagagccaaggucu

SEQ ID NO: 1422444 - RNA, 19 nt, Artificial Sequence
  Description of Artificial Sequence: Synthetic oligonucleotide
  Sense strand starting at position 634 of SEQ ID NO: 1243531
gguaucccuggagaaguua

SEQ ID NO: 1422445 - RNA, 19 nt, Artificial Sequence
  Description of Artificial Sequence: Synthetic oligonucleotide
  Antisense strand to SEQ ID NO: 1422444
uaacuucuccagggauacc

SEQ ID NO: 1422446 - RNA, 19 nt, Artificial Sequence
  Description of Artificial Sequence: Synthetic oligonucleotide
  Sense strand starting at position 755 of SEQ ID NO: 1243531
agggcaaaguaaucccaua

SEQ ID NO: 1422447 - RNA, 19 nt, Artificial Sequence
  Description of Artificial Sequence: Synthetic oligonucleotide
  Antisense strand to SEQ ID NO: 1422446
uaugggauuacuuugcccu

SEQ ID NO: 1422448 - RNA, 19 nt, Artificial Sequence
  Description of Artificial Sequence: Synthetic oligonucleotide
  Sense strand starting at position 2241 of SEQ ID NO: 1243531
gacaauucccaaggcggaa

SEQ ID NO: 1422449 - RNA, 19 nt, Artificial Sequence
  Description of Artificial Sequence: Synthetic oligonucleotide
  Antisense strand to SEQ ID NO: 1422448
uuccgccuugggaauuguc

SEQ ID NO: 1422450 - RNA, 19 nt, Artificial Sequence
  Description of Artificial Sequence: Synthetic oligonucleotide
  Sense strand starting at position 2426 of SEQ ID NO: 1243531
cagggaucuucugucggua

SEQ ID NO: 1422451 - RNA, 19 nt, Artificial Sequence
  Description of Artificial Sequence: Synthetic oligonucleotide
  Antisense strand to SEQ ID NO: 1422450
uaccgacagaagaucccug

SEQ ID NO: 1422452 - RNA, 19 nt, Artificial Sequence
  Description of Artificial Sequence: Synthetic oligonucleotide
  Sense strand starting at position 2431 of SEQ ID NO: 1243531
aucuucugucgguaccaga

SEQ ID NO: 1422453 - RNA, 19 nt, Artificial Sequence
  Description of Artificial Sequence: Synthetic oligonucleotide
  Antisense strand to SEQ ID NO: 1422452
ucugguaccgacagaagau

SEQ ID NO: 1422454 - RNA, 19 nt, Artificial Sequence
  Description of Artificial Sequence: Synthetic oligonucleotide
  Sense strand starting at position 2538 of SEQ ID NO: 1243531
ggaggcuuugggugaguuu

SEQ ID NO: 1422455 - RNA, 19 nt, Artificial Sequence
  Description of Artificial Sequence: Synthetic oligonucleotide
  Antisense strand to SEQ ID NO: 1422454
aaacucacccaaagccucc

SEQ ID NO: 1422456 - RNA, 19 nt, Artificial Sequence
  Description of Artificial Sequence: Synthetic oligonucleotide
  Sense strand starting at position 2558 of SEQ ID NO: 1243531
uggaguuaaucagcacaag

SEQ ID NO: 1422457 - RNA, 19 nt, Artificial Sequence
  Description of Artificial Sequence: Synthetic oligonucleotide
  Antisense strand to SEQ ID NO: 1422456
cuugugcugauuaacucca

SEQ ID NO: 1422458 - RNA, 19 nt, Artificial Sequence
  Description of Artificial Sequence: Synthetic oligonucleotide
  Sense strand starting at position 2715 of SEQ ID NO: 1243531
aagggagacccguggaguu

SEQ ID NO: 1422459 - RNA, 19 nt, Artificial Sequence
  Description of Artificial Sequence: Synthetic oligonucleotide
  Antisense strand to SEQ ID NO: 1422458
aacuccacgggucucccuu

SEQ ID NO: 1422460 - RNA, 19 nt, Artificial Sequence
  Description of Artificial Sequence: Synthetic oligonucleotide
  Sense strand starting at position 2716 of SEQ ID NO: 1243531
agggagacccguggaguua

SEQ ID NO: 1422461 - RNA, 19 nt, Artificial Sequence
  Description of Artificial Sequence: Synthetic oligonucleotide
  Antisense strand to SEQ ID NO: 1422460
uaacuccacgggucucccu

SEQ ID NO: 1422462 - RNA, 19 nt, Artificial Sequence
  Description of Artificial Sequence: Synthetic oligonucleotide
  Sense strand starting at position 2725 of SEQ ID NO: 1243531
cguggaguuacucaaccuu

SEQ ID NO: 1422463 - RNA, 19 nt, Artificial Sequence
  Description of Artificial Sequence: Synthetic oligonucleotide
  Antisense strand to SEQ ID NO: 1422462
aagguugaguaacuccacg

SEQ ID NO: 1422464 - RNA, 19 nt, Artificial Sequence
  Description of Artificial Sequence: Synthetic oligonucleotide
  Sense strand starting at position 2856 of SEQ ID NO: 1243531
ggucuugcucuugaaagug

SEQ ID NO: 1422465 - RNA, 19 nt, Artificial Sequence
  Description of Artificial Sequence: Synthetic oligonucleotide
  Antisense strand to SEQ ID NO: 1422464
cacuuucaagagcaagacc

SEQ ID NO: 1422466 - RNA, 19 nt, Artificial Sequence
  Description of Artificial Sequence: Synthetic oligonucleotide
  Sense strand starting at position 2962 of SEQ ID NO: 1243531
gucguuuaggcagaaugau

SEQ ID NO: 1422467 - RNA, 19 nt, Artificial Sequence
  Description of Artificial Sequence: Synthetic oligonucleotide
  Antisense strand to SEQ ID NO: 1422466
aucauucugccuaaacgac

SEQ ID NO: 1422468 - RNA, 19 nt, Artificial Sequence
  Description of Artificial Sequence: Synthetic oligonucleotide
  Sense strand starting at position 3016 of SEQ ID NO: 1243531
gacucagucuuucugguuu

SEQ ID NO: 1422469 - RNA, 19 nt, Artificial Sequence
  Description of Artificial Sequence: Synthetic oligonucleotide
  Antisense strand to SEQ ID NO: 1422468
aaaccagaaagacugaguc

SEQ ID NO: 1422470 - RNA, 19 nt, Artificial Sequence
  Description of Artificial Sequence: Synthetic oligonucleotide
  Sense strand starting at position 3104 of SEQ ID NO: 1243531
guuggugucccauacggga

SEQ ID NO: 1422471 - RNA, 19 nt, Artificial Sequence
  Description of Artificial Sequence: Synthetic oligonucleotide
  Antisense strand to SEQ ID NO: 1422470
ucccguaugggacaccaac

SEQ ID NO: 1422472 - RNA, 19 nt, Artificial Sequence
  Description of Artificial Sequence: Synthetic oligonucleotide
  Sense strand starting at position 3121 of SEQ ID NO: 1243531
gaccuagcacucugggaau

SEQ ID NO: 1422473 - RNA, 19 nt, Artificial Sequence
  Description of Artificial Sequence: Synthetic oligonucleotide
  Antisense strand to SEQ ID NO: 1422472
auucccagagugcuagguc

SEQ ID NO: 1422474 - RNA, 19 nt, Artificial Sequence
  Description of Artificial Sequence: Synthetic oligonucleotide
  Sense strand starting at position 3157 of SEQ ID NO: 1243531
caguuugugaauugaggac

SEQ ID NO: 1422475 - RNA, 19 nt, Artificial Sequence
  Description of Artificial Sequence: Synthetic oligonucleotide
  Antisense strand to SEQ ID NO: 1422474
guccucaauucacaaacug

SEQ ID NO: 1422476 - RNA, 19 nt, Artificial Sequence
  Description of Artificial Sequence: Synthetic oligonucleotide
  Sense strand starting at position 3239 of SEQ ID NO: 1243531
aagaaaguggaguguaaug

SEQ ID NO: 1422477 - RNA, 19 nt, Artificial Sequence
  Description of Artificial Sequence: Synthetic oligonucleotide
  Antisense strand to SEQ ID NO: 1422476
cauuacacuccacuuucuu

SEQ ID NO: 1422478 - RNA, 19 nt, Artificial Sequence
  Description of Artificial Sequence: Synthetic oligonucleotide
  Sense strand starting at position 3248 of SEQ ID NO: 1243531
gaguguaaugaaggcucau

SEQ ID NO: 1422479 - RNA, 19 nt, Artificial Sequence
  Description of Artificial Sequence: Synthetic oligonucleotide
  Antisense strand to SEQ ID NO: 1422478
augagccuucauuacacuc

SEQ ID NO: 1422480 - RNA, 19 nt, Artificial Sequence
  Description of Artificial Sequence: Synthetic oligonucleotide
  Sense strand starting at position 3310 of SEQ ID NO: 1243531
ccacaagcauccgugaaua

SEQ ID NO: 1422481 - RNA, 19 nt, Artificial Sequence
  Description of Artificial Sequence: Synthetic oligonucleotide
  Antisense strand to SEQ ID NO: 1422480
uauucacggaugcuugugg

SEQ ID NO: 1422482 - RNA, 19 nt, Artificial Sequence
  Description of Artificial Sequence: Synthetic oligonucleotide
  Sense strand starting at position 3312 of SEQ ID NO: 1243531
acaagcauccgugaauaca

SEQ ID NO: 1422483 - RNA, 19 nt, Artificial Sequence
  Description of Artificial Sequence: Synthetic oligonucleotide
  Antisense strand to SEQ ID NO: 1422482
uguauucacggaugcuugu

SEQ ID NO: 1422484 - RNA, 19 nt, Artificial Sequence
  Description of Artificial Sequence: Synthetic oligonucleotide
  Sense strand starting at position 3324 of SEQ ID NO: 1243531
gaauacaaagcuuguguca

SEQ ID NO: 1422485 - RNA, 19 nt, Artificial Sequence
  Description of Artificial Sequence: Synthetic oligonucleotide
  Antisense strand to SEQ ID NO: 1422484
ugacacaagcuuuguauuc

SEQ ID NO: 1422486 - RNA, 19 nt, Artificial Sequence
  Description of Artificial Sequence: Synthetic oligonucleotide
  Sense strand starting at position 3372 of SEQ ID NO: 1243531
gugaaugagguuuaaucuc

SEQ ID NO: 1422487 - RNA, 19 nt, Artificial Sequence
  Description of Artificial Sequence: Synthetic oligonucleotide
  Antisense strand to SEQ ID NO: 1422486
gagauuaaaccucauucac

SEQ ID NO: 1422488 - RNA, 19 nt, Artificial Sequence
  Description of Artificial Sequence: Synthetic oligonucleotide
  Sense strand starting at position 3417 of SEQ ID NO: 1243531
aagccugauguggauguua

SEQ ID NO: 1422489 - RNA, 19 nt, Artificial Sequence
  Description of Artificial Sequence: Synthetic oligonucleotide
  Antisense strand to SEQ ID NO: 1422488
uaacauccacaucaggcuu

SEQ ID NO: 1422490 - RNA, 19 nt, Artificial Sequence
  Description of Artificial Sequence: Synthetic oligonucleotide
  Sense strand starting at position 3419 of SEQ ID NO: 1243531
gccugauguggauguuaau

SEQ ID NO: 1422491 - RNA, 19 nt, Artificial Sequence
  Description of Artificial Sequence: Synthetic oligonucleotide
  Antisense strand to SEQ ID NO: 1422490
auuaacauccacaucaggc

SEQ ID NO: 1422492 - RNA, 19 nt, Artificial Sequence
  Description of Artificial Sequence: Synthetic oligonucleotide
  Sense strand starting at position 3425 of SEQ ID NO: 1243531
uguggauguuaaucauuaa

SEQ ID NO: 1422493 - RNA, 19 nt, Artificial Sequence
  Description of Artificial Sequence: Synthetic oligonucleotide
  Antisense strand to SEQ ID NO: 1422492
uuaaugauuaacauccaca

SEQ ID NO: 1422494 - RNA, 19 nt, Artificial Sequence
  Description of Artificial Sequence: Synthetic oligonucleotide
  Sense strand starting at position 3928 of SEQ ID NO: 1243531
ugagauaagcauugcugua

SEQ ID NO: 1422495 - RNA, 19 nt, Artificial Sequence
  Description of Artificial Sequence: Synthetic oligonucleotide
  Antisense strand to SEQ ID NO: 1422494
uacagcaaugcuuaucuca

SEQ ID NO: 1422496 - RNA, 19 nt, Artificial Sequence
  Description of Artificial Sequence: Synthetic oligonucleotide
  Sense strand starting at position 3930 of SEQ ID NO: 1243531
agauaagcauugcuguaga

SEQ ID NO: 1422497 - RNA, 19 nt, Artificial Sequence
  Description of Artificial Sequence: Synthetic oligonucleotide
  Antisense strand to SEQ ID NO: 1422496
ucuacagcaaugcuuaucu

SEQ ID NO: 1422498 - RNA, 19 nt, Artificial Sequence
  Description of Artificial Sequence: Synthetic oligonucleotide
  Sense strand starting at position 3933 of SEQ ID NO: 1243531
uaagcauugcuguagagau

SEQ ID NO: 1422499 - RNA, 19 nt, Artificial Sequence
  Description of Artificial Sequence: Synthetic oligonucleotide
  Antisense strand to SEQ ID NO: 1422498
aucucuacagcaaugcuua

SEQ ID NO: 1422500 - RNA, 19 nt, Artificial Sequence
  Description of Artificial Sequence: Synthetic oligonucleotide
  Sense strand starting at position 138 of SEQ ID NO: 1243532
cucagauucuggucccuau

SEQ ID NO: 1422501 - RNA, 19 nt, Artificial Sequence
  Description of Artificial Sequence: Synthetic oligonucleotide
  Antisense strand to SEQ ID NO: 1422500
auagggaccagaaucugag

SEQ ID NO: 1422502 - RNA, 19 nt, Artificial Sequence
  Description of Artificial Sequence: Synthetic oligonucleotide
  Sense strand starting at position 148 of SEQ ID NO: 1243532
ggucccuauucuguuacuu

SEQ ID NO: 1422503 - RNA, 19 nt, Artificial Sequence
  Description of Artificial Sequence: Synthetic oligonucleotide
  Antisense strand to SEQ ID NO: 1422502
aaguaacagaauagggacc

SEQ ID NO: 1422504 - RNA, 19 nt, Artificial Sequence
  Description of Artificial Sequence: Synthetic oligonucleotide
  Sense strand starting at position 161 of SEQ ID NO: 1243532
uuacuuaccaguuggguga

SEQ ID NO: 1422505 - RNA, 19 nt, Artificial Sequence
  Description of Artificial Sequence: Synthetic oligonucleotide
  Antisense strand to SEQ ID NO: 1422504
ucacccaacugguaaguaa

SEQ ID NO: 1422506 - RNA, 19 nt, Artificial Sequence
  Description of Artificial Sequence: Synthetic oligonucleotide
  Sense strand starting at position 165 of SEQ ID NO: 1243532
uuaccaguugggugaucuu

SEQ ID NO: 1422507 - RNA, 19 nt, Artificial Sequence
  Description of Artificial Sequence: Synthetic oligonucleotide
  Antisense strand to SEQ ID NO: 1422506
aagaucacccaacugguaa

SEQ ID NO: 1422508 - RNA, 19 nt, Artificial Sequence
  Description of Artificial Sequence: Synthetic oligonucleotide
  Sense strand starting at position 214 of SEQ ID NO: 1243532
cugucuucuucuguagaga

SEQ ID NO: 1422509 - RNA, 19 nt, Artificial Sequence
  Description of Artificial Sequence: Synthetic oligonucleotide
  Antisense strand to SEQ ID NO: 1422508
ucucuacagaagaagacag

SEQ ID NO: 1422510 - RNA, 19 nt, Artificial Sequence
  Description of Artificial Sequence: Synthetic oligonucleotide
  Sense strand starting at position 215 of SEQ ID NO: 1243532
ugucuucuucuguagagau

SEQ ID NO: 1422511 - RNA, 19 nt, Artificial Sequence
  Description of Artificial Sequence: Synthetic oligonucleotide
  Antisense strand to SEQ ID NO: 1422510
aucucuacagaagaagaca

SEQ ID NO: 1422512 - RNA, 19 nt, Artificial Sequence
  Description of Artificial Sequence: Synthetic oligonucleotide
  Sense strand starting at position 217 of SEQ ID NO: 1243532
ucuucuucuguagagauaa

SEQ ID NO: 1422513 - RNA, 19 nt, Artificial Sequence
  Description of Artificial Sequence: Synthetic oligonucleotide
  Antisense strand to SEQ ID NO: 1422512
uuaucucuacagaagaaga

SEQ ID NO: 1422514 - RNA, 19 nt, Artificial Sequence
  Description of Artificial Sequence: Synthetic oligonucleotide
  Sense strand starting at position 248 of SEQ ID NO: 1243532
ccuagaggaucacugcaau

SEQ ID NO: 1422515 - RNA, 19 nt, Artificial Sequence
  Description of Artificial Sequence: Synthetic oligonucleotide
  Antisense strand to SEQ ID NO: 1422514
auugcagugauccucuagg

SEQ ID NO: 1422516 - RNA, 19 nt, Artificial Sequence
  Description of Artificial Sequence: Synthetic oligonucleotide
  Sense strand starting at position 254 of SEQ ID NO: 1243532
ggaucacugcaaugauuga

SEQ ID NO: 1422517 - RNA, 19 nt, Artificial Sequence
  Description of Artificial Sequence: Synthetic oligonucleotide
  Antisense strand to SEQ ID NO: 1422516
ucaaucauugcagugaucc

SEQ ID NO: 1422518 - RNA, 19 nt, Artificial Sequence
  Description of Artificial Sequence: Synthetic oligonucleotide
  Sense strand starting at position 323 of SEQ ID NO: 1243532
cauaaauggugacucugau

SEQ ID NO: 1422519 - RNA, 19 nt, Artificial Sequence
  Description of Artificial Sequence: Synthetic oligonucleotide
  Antisense strand to SEQ ID NO: 1422518
aucagagucaccauuuaug

SEQ ID NO: 1422520 - RNA, 19 nt, Artificial Sequence
  Description of Artificial Sequence: Synthetic oligonucleotide
  Sense strand starting at position 560 of SEQ ID NO: 1243532
gugggugacucacauauuu

SEQ ID NO: 1422521 - RNA, 19 nt, Artificial Sequence
  Description of Artificial Sequence: Synthetic oligonucleotide
  Antisense strand to SEQ ID NO: 1422520
aaauaugugagucacccac

SEQ ID NO: 1422522 - RNA, 19 nt, Artificial Sequence
  Description of Artificial Sequence: Synthetic oligonucleotide
  Sense strand starting at position 1027 of SEQ ID NO: 1243532
guugguuaccuuggagaug

SEQ ID NO: 1422523 - RNA, 19 nt, Artificial Sequence
  Description of Artificial Sequence: Synthetic oligonucleotide
  Antisense strand to SEQ ID NO: 1422522
caucuccaagguaaccaac

SEQ ID NO: 1422524 - RNA, 19 nt, Artificial Sequence
  Description of Artificial Sequence: Synthetic oligonucleotide
  Sense strand starting at position 1088 of SEQ ID NO: 1243532
cuauaccuccggugacaau

SEQ ID NO: 1422525 - RNA, 19 nt, Artificial Sequence
  Description of Artificial Sequence: Synthetic oligonucleotide
  Antisense strand to SEQ ID NO: 1422524
auugucaccggagguauag

SEQ ID NO: 1422526 - RNA, 19 nt, Artificial Sequence
  Description of Artificial Sequence: Synthetic oligonucleotide
  Sense strand starting at position 1097 of SEQ ID NO: 1243532
cggugacaaucauccaagu

SEQ ID NO: 1422527 - RNA, 19 nt, Artificial Sequence
  Description of Artificial Sequence: Synthetic oligonucleotide
  Antisense strand to SEQ ID NO: 1422526
acuuggaugauugucaccg

SEQ ID NO: 1422528 - RNA, 19 nt, Artificial Sequence
  Description of Artificial Sequence: Synthetic oligonucleotide
  Sense strand starting at position 1110 of SEQ ID NO: 1243532
ccaaguaggccugaaacgu

SEQ ID NO: 1422529 - RNA, 19 nt, Artificial Sequence
  Description of Artificial Sequence: Synthetic oligonucleotide
  Antisense strand to SEQ ID NO: 1422528
acguuucaggccuacuugg

SEQ ID NO: 1422530 - RNA, 19 nt, Artificial Sequence
  Description of Artificial Sequence: Synthetic oligonucleotide
  Sense strand starting at position 2676 of SEQ ID NO: 1243532
ggucauaagcuguaaacag

SEQ ID NO: 1422531 - RNA, 19 nt, Artificial Sequence
  Description of Artificial Sequence: Synthetic oligonucleotide
  Antisense strand to SEQ ID NO: 1422530
cuguuuacagcuuaugacc

SEQ ID NO: 1422532 - RNA, 19 nt, Artificial Sequence
  Description of Artificial Sequence: Synthetic oligonucleotide
  Sense strand starting at position 2729 of SEQ ID NO: 1243532
cuacccuauuugggaaagu

SEQ ID NO: 1422533 - RNA, 19 nt, Artificial Sequence
  Description of Artificial Sequence: Synthetic oligonucleotide
  Antisense strand to SEQ ID NO: 1422532
acuuucccaaauaggguag

SEQ ID NO: 1422534 - RNA, 19 nt, Artificial Sequence
  Description of Artificial Sequence: Synthetic oligonucleotide
  Sense strand starting at position 3178 of SEQ ID NO: 1243532
guggguaacucugugcaca

SEQ ID NO: 1422535 - RNA, 19 nt, Artificial Sequence
  Description of Artificial Sequence: Synthetic oligonucleotide
  Antisense strand to SEQ ID NO: 1422534
ugugcacagaguuacccac

SEQ ID NO: 1422536 - RNA, 19 nt, Artificial Sequence
  Description of Artificial Sequence: Synthetic oligonucleotide
  Sense strand starting at position 3180 of SEQ ID NO: 1243532
ggguaacucugugcacaga

SEQ ID NO: 1422537 - RNA, 19 nt, Artificial Sequence
  Description of Artificial Sequence: Synthetic oligonucleotide
  Antisense strand to SEQ ID NO: 1422536
ucugugcacagaguuaccc

SEQ ID NO: 1422538 - RNA, 19 nt, Artificial Sequence
  Description of Artificial Sequence: Synthetic oligonucleotide
  Sense strand starting at position 3251 of SEQ ID NO: 1243532
gggucacuuggagguugaa

SEQ ID NO: 1422539 - RNA, 19 nt, Artificial Sequence
  Description of Artificial Sequence: Synthetic oligonucleotide
  Antisense strand to SEQ ID NO: 1422538
uucaaccuccaagugaccc

SEQ ID NO: 1422540 - RNA, 19 nt, Artificial Sequence
  Description of Artificial Sequence: Synthetic oligonucleotide
  Sense strand starting at position 3254 of SEQ ID NO: 1243532
ucacuuggagguugaaagu

SEQ ID NO: 1422541 - RNA, 19 nt, Artificial Sequence
  Description of Artificial Sequence: Synthetic oligonucleotide
  Antisense strand to SEQ ID NO: 1422540
acuuucaaccuccaaguga

SEQ ID NO: 1422542 - RNA, 19 nt, Artificial Sequence
  Description of Artificial Sequence: Synthetic oligonucleotide
  Sense strand starting at position 3269 of SEQ ID NO: 1243532
aagugcauggcugagacau

SEQ ID NO: 1422543 - RNA, 19 nt, Artificial Sequence
  Description of Artificial Sequence: Synthetic oligonucleotide
  Antisense strand to SEQ ID NO: 1422542
augucucagccaugcacuu

SEQ ID NO: 1422544 - RNA, 19 nt, Artificial Sequence
  Description of Artificial Sequence: Synthetic oligonucleotide
  Sense strand starting at position 3275 of SEQ ID NO: 1243532
auggcugagacaugucagu

SEQ ID NO: 1422545 - RNA, 19 nt, Artificial Sequence
  Description of Artificial Sequence: Synthetic oligonucleotide
  Antisense strand to SEQ ID NO: 1422544
acugacaugucucagccau

SEQ ID NO: 1422546 - RNA, 19 nt, Artificial Sequence
  Description of Artificial Sequence: Synthetic oligonucleotide
  Sense strand starting at position 3280 of SEQ ID NO: 1243532
ugagacaugucaguggaca

SEQ ID NO: 1422547 - RNA, 19 nt, Artificial Sequence
  Description of Artificial Sequence: Synthetic oligonucleotide
  Antisense strand to SEQ ID NO: 1422546
uguccacugacaugucuca

SEQ ID NO: 1422548 - RNA, 19 nt, Artificial Sequence
  Description of Artificial Sequence: Synthetic oligonucleotide
  Sense strand starting at position 3281 of SEQ ID NO: 1243532
gagacaugucaguggacac

SEQ ID NO: 1422549 - RNA, 19 nt, Artificial Sequence
  Description of Artificial Sequence: Synthetic oligonucleotide
  Antisense strand to SEQ ID NO: 1422548
guguccacugacaugucuc

SEQ ID NO: 1422550 - RNA, 19 nt, Artificial Sequence
  Description of Artificial Sequence: Synthetic oligonucleotide
  Sense strand starting at position 3305 of SEQ ID NO: 1243532
gaguguggaguccagacuu

SEQ ID NO: 1422551 - RNA, 19 nt, Artificial Sequence
  Description of Artificial Sequence: Synthetic oligonucleotide
  Antisense strand to SEQ ID NO: 1422550
aagucuggacuccacacuc

SEQ ID NO: 1422552 - RNA, 19 nt, Artificial Sequence
  Description of Artificial Sequence: Synthetic oligonucleotide
  Sense strand starting at position 3402 of SEQ ID NO: 1243532
cugaaauucccacgaggga

SEQ ID NO: 1422553 - RNA, 19 nt, Artificial Sequence
  Description of Artificial Sequence: Synthetic oligonucleotide
  Antisense strand to SEQ ID NO: 1422552
ucccucgugggaauuucag

SEQ ID NO: 1422554 - RNA, 19 nt, Artificial Sequence
  Description of Artificial Sequence: Synthetic oligonucleotide
  Sense strand starting at position 3433 of SEQ ID NO: 1243532
guacgaagcgauuauucau

SEQ ID NO: 1422555 - RNA, 19 nt, Artificial Sequence
  Description of Artificial Sequence: Synthetic oligonucleotide
  Antisense strand to SEQ ID NO: 1422554
augaauaaucgcuucguac

SEQ ID NO: 1422556 - RNA, 19 nt, Artificial Sequence
  Description of Artificial Sequence: Synthetic oligonucleotide
  Sense strand starting at position 3586 of SEQ ID NO: 1243532
gacaguccucugggccuua

SEQ ID NO: 1422557 - RNA, 19 nt, Artificial Sequence
  Description of Artificial Sequence: Synthetic oligonucleotide
  Antisense strand to SEQ ID NO: 1422556
uaaggcccagaggacuguc

SEQ ID NO: 1422558 - RNA, 19 nt, Artificial Sequence
  Description of Artificial Sequence: Synthetic oligonucleotide
  Sense strand starting at position 3591 of SEQ ID NO: 1243532
uccucugggccuuauguua

SEQ ID NO: 1422559 - RNA, 19 nt, Artificial Sequence
  Description of Artificial Sequence: Synthetic oligonucleotide
  Antisense strand to SEQ ID NO: 1422558
uaacauaaggcccagagga

SEQ ID NO: 1422560 - RNA, 19 nt, Artificial Sequence
  Description of Artificial Sequence: Synthetic oligonucleotide
  Sense strand starting at position 3606 of SEQ ID NO: 1243532
guuagaguacuggagguau

SEQ ID NO: 1422561 - RNA, 19 nt, Artificial Sequence
  Description of Artificial Sequence: Synthetic oligonucleotide
  Antisense strand to SEQ ID NO: 1422560
auaccuccaguacucuaac

SEQ ID NO: 1422562 - RNA, 19 nt, Artificial Sequence
  Description of Artificial Sequence: Synthetic oligonucleotide
  Sense strand starting at position 3608 of SEQ ID NO: 1243532
uagaguacuggagguauaa

SEQ ID NO: 1422563 - RNA, 19 nt, Artificial Sequence
  Description of Artificial Sequence: Synthetic oligonucleotide
  Antisense strand to SEQ ID NO: 1422562
uuauaccuccaguacucua

SEQ ID NO: 1422564 - RNA, 19 nt, Artificial Sequence
  Description of Artificial Sequence: Synthetic oligonucleotide
  Sense strand starting at position 3760 of SEQ ID NO: 1243532
cucuuaauccaguauguua

SEQ ID NO: 1422565 - RNA, 19 nt, Artificial Sequence
  Description of Artificial Sequence: Synthetic oligonucleotide
  Antisense strand to SEQ ID NO: 1422564
uaacauacuggauuaagag

SEQ ID NO: 1422566 - RNA, 19 nt, Artificial Sequence
  Description of Artificial Sequence: Synthetic oligonucleotide
  Sense strand starting at position 3762 of SEQ ID NO: 1243532
cuuaauccaguauguuaau

SEQ ID NO: 1422567 - RNA, 19 nt, Artificial Sequence
  Description of Artificial Sequence: Synthetic oligonucleotide
  Antisense strand to SEQ ID NO: 1422566
auuaacauacuggauuaag

SEQ ID NO: 1422568 - RNA, 19 nt, Artificial Sequence
  Description of Artificial Sequence: Synthetic oligonucleotide
  Sense strand starting at position 3805 of SEQ ID NO: 1243532
gaaauagauuaugcucugu

SEQ ID NO: 1422569 - RNA, 19 nt, Artificial Sequence
  Description of Artificial Sequence: Synthetic oligonucleotide
  Antisense strand to SEQ ID NO: 1422568
acagagcauaaucuauuuc

SEQ ID NO: 1422570 - RNA, 19 nt, Artificial Sequence
  Description of Artificial Sequence: Synthetic oligonucleotide
  Sense strand starting at position 3807 of SEQ ID NO: 1243532
aauagauuaugcucugugu

SEQ ID NO: 1422571 - RNA, 19 nt, Artificial Sequence
  Description of Artificial Sequence: Synthetic oligonucleotide
  Antisense strand to SEQ ID NO: 1422570
acacagagcauaaucuauu

SEQ ID NO: 1422572 - RNA, 19 nt, Artificial Sequence
  Description of Artificial Sequence: Synthetic oligonucleotide
  Sense strand starting at position 3809 of SEQ ID NO: 1243532
uagauuaugcucuguguug

SEQ ID NO: 1422573 - RNA, 19 nt, Artificial Sequence
  Description of Artificial Sequence: Synthetic oligonucleotide
  Antisense strand to SEQ ID NO: 1422572
caacacagagcauaaucua

SEQ ID NO: 1422574 - RNA, 19 nt, Artificial Sequence
  Description of Artificial Sequence: Synthetic oligonucleotide
  Sense strand starting at position 3811 of SEQ ID NO: 1243532
gauuaugcucuguguugga

SEQ ID NO: 1422575 - RNA, 19 nt, Artificial Sequence
  Description of Artificial Sequence: Synthetic oligonucleotide
  Antisense strand to SEQ ID NO: 1422574
uccaacacagagcauaauc

SEQ ID NO: 1422576 - RNA, 19 nt, Artificial Sequence
  Description of Artificial Sequence: Synthetic oligonucleotide
  Sense strand starting at position 3815 of SEQ ID NO: 1243532
augcucuguguuggagaca

SEQ ID NO: 1422577 - RNA, 19 nt, Artificial Sequence
  Description of Artificial Sequence: Synthetic oligonucleotide
  Antisense strand to SEQ ID NO: 1422576
ugucuccaacacagagcau

SEQ ID NO: 1422578 - RNA, 19 nt, Artificial Sequence
  Description of Artificial Sequence: Synthetic oligonucleotide
  Sense strand starting at position 3930 of SEQ ID NO: 1243532
uaaagaugccaauguauag

SEQ ID NO: 1422579 - RNA, 19 nt, Artificial Sequence
  Description of Artificial Sequence: Synthetic oligonucleotide
  Antisense strand to SEQ ID NO: 1422578
cuauacauuggcaucuuua

SEQ ID NO: 1422580 - RNA, 19 nt, Artificial Sequence
  Description of Artificial Sequence: Synthetic oligonucleotide
  Sense strand starting at position 154 of SEQ ID NO: 1243533
cucagauucuggucccuau

SEQ ID NO: 1422581 - RNA, 19 nt, Artificial Sequence
  Description of Artificial Sequence: Synthetic oligonucleotide
  Antisense strand to SEQ ID NO: 1422580
auagggaccagaaucugag

SEQ ID NO: 1422582 - RNA, 19 nt, Artificial Sequence
  Description of Artificial Sequence: Synthetic oligonucleotide
  Sense strand starting at position 164 of SEQ ID NO: 1243533
ggucccuauucuguuacuu

SEQ ID NO: 1422583 - RNA, 19 nt, Artificial Sequence
  Description of Artificial Sequence: Synthetic oligonucleotide
  Antisense strand to SEQ ID NO: 1422582
aaguaacagaauagggacc

SEQ ID NO: 1422584 - RNA, 19 nt, Artificial Sequence
  Description of Artificial Sequence: Synthetic oligonucleotide
  Sense strand starting at position 177 of SEQ ID NO: 1243533
uuacuuaccaguuggguga

SEQ ID NO: 1422585 - RNA, 19 nt, Artificial Sequence
  Description of Artificial Sequence: Synthetic oligonucleotide
  Antisense strand to SEQ ID NO: 1422584
ucacccaacugguaaguaa

SEQ ID NO: 1422586 - RNA, 19 nt, Artificial Sequence
  Description of Artificial Sequence: Synthetic oligonucleotide
  Sense strand starting at position 181 of SEQ ID NO: 1243533
uuaccaguugggugaucuu

SEQ ID NO: 1422587 - RNA, 19 nt, Artificial Sequence
  Description of Artificial Sequence: Synthetic oligonucleotide
  Antisense strand to SEQ ID NO: 1422586
aagaucacccaacugguaa

SEQ ID NO: 1422588 - RNA, 19 nt, Artificial Sequence
  Description of Artificial Sequence: Synthetic oligonucleotide
  Sense strand starting at position 230 of SEQ ID NO: 1243533
cugucuucuucuguagaga

SEQ ID NO: 1422589 - RNA, 19 nt, Artificial Sequence
  Description of Artificial Sequence: Synthetic oligonucleotide
  Antisense strand to SEQ ID NO: 1422588
ucucuacagaagaagacag

SEQ ID NO: 1422590 - RNA, 19 nt, Artificial Sequence
  Description of Artificial Sequence: Synthetic oligonucleotide
  Sense strand starting at position 231 of SEQ ID NO: 1243533
ugucuucuucuguagagau

SEQ ID NO: 1422591 - RNA, 19 nt, Artificial Sequence
  Description of Artificial Sequence: Synthetic oligonucleotide
  Antisense strand to SEQ ID NO: 1422590
aucucuacagaagaagaca

SEQ ID NO: 1422592 - RNA, 19 nt, Artificial Sequence
  Description of Artificial Sequence: Synthetic oligonucleotide
  Sense strand starting at position 233 of SEQ ID NO: 1243533
ucuucuucuguagagauaa

SEQ ID NO: 1422593 - RNA, 19 nt, Artificial Sequence
  Description of Artificial Sequence: Synthetic oligonucleotide
  Antisense strand to SEQ ID NO: 1422592
uuaucucuacagaagaaga

SEQ ID NO: 1422594 - RNA, 19 nt, Artificial Sequence
  Description of Artificial Sequence: Synthetic oligonucleotide
  Sense strand starting at position 264 of SEQ ID NO: 1243533
ccuagaggaucacugcaau

SEQ ID NO: 1422595 - RNA, 19 nt, Artificial Sequence
  Description of Artificial Sequence: Synthetic oligonucleotide
  Antisense strand to SEQ ID NO: 1422594
auugcagugauccucuagg

SEQ ID NO: 1422596 - RNA, 19 nt, Artificial Sequence
  Description of Artificial Sequence: Synthetic oligonucleotide
  Sense strand starting at position 270 of SEQ ID NO: 1243533
ggaucacugcaaugauuga

SEQ ID NO: 1422597 - RNA, 19 nt, Artificial Sequence
  Description of Artificial Sequence: Synthetic oligonucleotide
  Antisense strand to SEQ ID NO: 1422596
ucaaucauugcagugaucc

SEQ ID NO: 1422598 - RNA, 19 nt, Artificial Sequence
  Description of Artificial Sequence: Synthetic oligonucleotide
  Sense strand starting at position 339 of SEQ ID NO: 1243533
cauaaauggugacucugau

SEQ ID NO: 1422599 - RNA, 19 nt, Artificial Sequence
  Description of Artificial Sequence: Synthetic oligonucleotide
  Antisense strand to SEQ ID NO: 1422598
aucagagucaccauuuaug

SEQ ID NO: 1422600 - RNA, 19 nt, Artificial Sequence
  Description of Artificial Sequence: Synthetic oligonucleotide
  Sense strand starting at position 576 of SEQ ID NO: 1243533
gugggugacucacauauuu

SEQ ID NO: 1422601 - RNA, 19 nt, Artificial Sequence
  Description of Artificial Sequence: Synthetic oligonucleotide
  Antisense strand to SEQ ID NO: 1422600
aaauaugugagucacccac

SEQ ID NO: 1422602 - RNA, 19 nt, Artificial Sequence
  Description of Artificial Sequence: Synthetic oligonucleotide
  Sense strand starting at position 1043 of SEQ ID NO: 1243533
guugguuaccuuggagaug

SEQ ID NO: 1422603 - RNA, 19 nt, Artificial Sequence
  Description of Artificial Sequence: Synthetic oligonucleotide
  Antisense strand to SEQ ID NO: 1422602
caucuccaagguaaccaac

SEQ ID NO: 1422604 - RNA, 19 nt, Artificial Sequence
  Description of Artificial Sequence: Synthetic oligonucleotide
  Sense strand starting at position 1104 of SEQ ID NO: 1243533
cuauaccuccggugacaau

SEQ ID NO: 1422605 - RNA, 19 nt, Artificial Sequence
  Description of Artificial Sequence: Synthetic oligonucleotide
  Antisense strand to SEQ ID NO: 1422604
auugucaccggagguauag

SEQ ID NO: 1422606 - RNA, 19 nt, Artificial Sequence
  Description of Artificial Sequence: Synthetic oligonucleotide
  Sense strand starting at position 1113 of SEQ ID NO: 1243533
cggugacaaucauccaagu

SEQ ID NO: 1422607 - RNA, 19 nt, Artificial Sequence
  Description of Artificial Sequence: Synthetic oligonucleotide
  Antisense strand to SEQ ID NO: 1422606
acuuggaugauugucaccg

SEQ ID NO: 1422608 - RNA, 19 nt, Artificial Sequence
  Description of Artificial Sequence: Synthetic oligonucleotide
  Sense strand starting at position 1126 of SEQ ID NO: 1243533
ccaaguaggccugaaacgu

SEQ ID NO: 1422609 - RNA, 19 nt, Artificial Sequence
  Description of Artificial Sequence: Synthetic oligonucleotide
  Antisense strand to SEQ ID NO: 1422608
acguuucaggccuacuugg

SEQ ID NO: 1422610 - RNA, 19 nt, Artificial Sequence
  Description of Artificial Sequence: Synthetic oligonucleotide
  Sense strand starting at position 2692 of SEQ ID NO: 1243533
ggucauaagcuguaaacag

SEQ ID NO: 1422611 - RNA, 19 nt, Artificial Sequence
  Description of Artificial Sequence: Synthetic oligonucleotide
  Antisense strand to SEQ ID NO: 1422610
cuguuuacagcuuaugacc

SEQ ID NO: 1422612 - RNA, 19 nt, Artificial Sequence
  Description of Artificial Sequence: Synthetic oligonucleotide
  Sense strand starting at position 2745 of SEQ ID NO: 1243533
cuacccuauuugggaaagu

SEQ ID NO: 1422613 - RNA, 19 nt, Artificial Sequence
  Description of Artificial Sequence: Synthetic oligonucleotide
  Antisense strand to SEQ ID NO: 1422612
acuuucccaaauaggguag

SEQ ID NO: 1422614 - RNA, 19 nt, Artificial Sequence
  Description of Artificial Sequence: Synthetic oligonucleotide
  Sense strand starting at position 3194 of SEQ ID NO: 1243533
guggguaacucugugcaca

SEQ ID NO: 1422615 - RNA, 19 nt, Artificial Sequence
  Description of Artificial Sequence: Synthetic oligonucleotide
  Antisense strand to SEQ ID NO: 1422614
ugugcacagaguuacccac

SEQ ID NO: 1422616 - RNA, 19 nt, Artificial Sequence
  Description of Artificial Sequence: Synthetic oligonucleotide
  Sense strand starting at position 3196 of SEQ ID NO: 1243533
ggguaacucugugcacaga

SEQ ID NO: 1422617 - RNA, 19 nt, Artificial Sequence
  Description of Artificial Sequence: Synthetic oligonucleotide
  Antisense strand to SEQ ID NO: 1422616
ucugugcacagaguuaccc

SEQ ID NO: 1422618 - RNA, 19 nt, Artificial Sequence
  Description of Artificial Sequence: Synthetic oligonucleotide
  Sense strand starting at position 3267 of SEQ ID NO: 1243533
gggucacuuggagguugaa

SEQ ID NO: 1422619 - RNA, 19 nt, Artificial Sequence
  Description of Artificial Sequence: Synthetic oligonucleotide
  Antisense strand to SEQ ID NO: 1422618
uucaaccuccaagugaccc

SEQ ID NO: 1422620 - RNA, 19 nt, Artificial Sequence
  Description of Artificial Sequence: Synthetic oligonucleotide
  Sense strand starting at position 3270 of SEQ ID NO: 1243533
ucacuuggagguugaaagu

SEQ ID NO: 1422621 - RNA, 19 nt, Artificial Sequence
  Description of Artificial Sequence: Synthetic oligonucleotide
  Antisense strand to SEQ ID NO: 1422620
acuuucaaccuccaaguga

SEQ ID NO: 1422622 - RNA, 19 nt, Artificial Sequence
  Description of Artificial Sequence: Synthetic oligonucleotide
  Sense strand starting at position 3285 of SEQ ID NO: 1243533
aagugcauggcugagacau

SEQ ID NO: 1422623 - RNA, 19 nt, Artificial Sequence
  Description of Artificial Sequence: Synthetic oligonucleotide
  Antisense strand to SEQ ID NO: 1422622
augucucagccaugcacuu

SEQ ID NO: 1422624 - RNA, 19 nt, Artificial Sequence
  Description of Artificial Sequence: Synthetic oligonucleotide
  Sense strand starting at position 3291 of SEQ ID NO: 1243533
auggcugagacaugucagu

SEQ ID NO: 1422625 - RNA, 19 nt, Artificial Sequence
  Description of Artificial Sequence: Synthetic oligonucleotide
  Antisense strand to SEQ ID NO: 1422624
acugacaugucucagccau

SEQ ID NO: 1422626 - RNA, 19 nt, Artificial Sequence
  Description of Artificial Sequence: Synthetic oligonucleotide
  Sense strand starting at position 3296 of SEQ ID NO: 1243533
ugagacaugucaguggaca

SEQ ID NO: 1422627 - RNA, 19 nt, Artificial Sequence
  Description of Artificial Sequence: Synthetic oligonucleotide
  Antisense strand to SEQ ID NO: 1422626
uguccacugacaugucuca

SEQ ID NO: 1422628 - RNA, 19 nt, Artificial Sequence
  Description of Artificial Sequence: Synthetic oligonucleotide
  Sense strand starting at position 3297 of SEQ ID NO: 1243533
gagacaugucaguggacac

SEQ ID NO: 1422629 - RNA, 19 nt, Artificial Sequence
  Description of Artificial Sequence: Synthetic oligonucleotide
  Antisense strand to SEQ ID NO: 1422628
guguccacugacaugucuc

SEQ ID NO: 1422630 - RNA, 19 nt, Artificial Sequence
  Description of Artificial Sequence: Synthetic oligonucleotide
  Sense strand starting at position 3321 of SEQ ID NO: 1243533
gaguguggaguccagacuu

SEQ ID NO: 1422631 - RNA, 19 nt, Artificial Sequence
  Description of Artificial Sequence: Synthetic oligonucleotide
  Antisense strand to SEQ ID NO: 1422630
aagucuggacuccacacuc

SEQ ID NO: 1422632 - RNA, 19 nt, Artificial Sequence
  Description of Artificial Sequence: Synthetic oligonucleotide
  Sense strand starting at position 3418 of SEQ ID NO: 1243533
cugaaauucccacgaggga

SEQ ID NO: 1422633 - RNA, 19 nt, Artificial Sequence
  Description of Artificial Sequence: Synthetic oligonucleotide
  Antisense strand to SEQ ID NO: 1422632
ucccucgugggaauuucag

SEQ ID NO: 1422634 - RNA, 19 nt, Artificial Sequence
  Description of Artificial Sequence: Synthetic oligonucleotide
  Sense strand starting at position 3449 of SEQ ID NO: 1243533
guacgaagcgauuauucau

SEQ ID NO: 1422635 - RNA, 19 nt, Artificial Sequence
  Description of Artificial Sequence: Synthetic oligonucleotide
  Antisense strand to SEQ ID NO: 1422634
augaauaaucgcuucguac

SEQ ID NO: 1422636 - RNA, 19 nt, Artificial Sequence
  Description of Artificial Sequence: Synthetic oligonucleotide
  Sense strand starting at position 3602 of SEQ ID NO: 1243533
gacaguccucugggccuua

SEQ ID NO: 1422637 - RNA, 19 nt, Artificial Sequence
  Description of Artificial Sequence: Synthetic oligonucleotide
  Antisense strand to SEQ ID NO: 1422636
uaaggcccagaggacuguc

SEQ ID NO: 1422638 - RNA, 19 nt, Artificial Sequence
  Description of Artificial Sequence: Synthetic oligonucleotide
  Sense strand starting at position 3607 of SEQ ID NO: 1243533
uccucugggccuuauguua

SEQ ID NO: 1422639 - RNA, 19 nt, Artificial Sequence
  Description of Artificial Sequence: Synthetic oligonucleotide
  Antisense strand to SEQ ID NO: 1422638
uaacauaaggcccagagga

SEQ ID NO: 1422640 - RNA, 19 nt, Artificial Sequence
  Description of Artificial Sequence: Synthetic oligonucleotide
  Sense strand starting at position 3622 of SEQ ID NO: 1243533
guuagaguacuggagguau

SEQ ID NO: 1422641 - RNA, 19 nt, Artificial Sequence
  Description of Artificial Sequence: Synthetic oligonucleotide
  Antisense strand to SEQ ID NO: 1422640
auaccuccaguacucuaac

SEQ ID NO: 1422642 - RNA, 19 nt, Artificial Sequence
  Description of Artificial Sequence: Synthetic oligonucleotide
  Sense strand starting at position 3624 of SEQ ID NO: 1243533
uagaguacuggagguauaa

SEQ ID NO: 1422643 - RNA, 19 nt, Artificial Sequence
  Description of Artificial Sequence: Synthetic oligonucleotide
  Antisense strand to SEQ ID NO: 1422642
uuauaccuccaguacucua

SEQ ID NO: 1422644 - RNA, 19 nt, Artificial Sequence
  Description of Artificial Sequence: Synthetic oligonucleotide
  Sense strand starting at position 3776 of SEQ ID NO: 1243533
cucuuaauccaguauguua

SEQ ID NO: 1422645 - RNA, 19 nt, Artificial Sequence
  Description of Artificial Sequence: Synthetic oligonucleotide
  Antisense strand to SEQ ID NO: 1422644
uaacauacuggauuaagag

SEQ ID NO: 1422646 - RNA, 19 nt, Artificial Sequence
  Description of Artificial Sequence: Synthetic oligonucleotide
  Sense strand starting at position 3778 of SEQ ID NO: 1243533
cuuaauccaguauguuaau

SEQ ID NO: 1422647 - RNA, 19 nt, Artificial Sequence
  Description of Artificial Sequence: Synthetic oligonucleotide
  Antisense strand to SEQ ID NO: 1422646
auuaacauacuggauuaag

SEQ ID NO: 1422648 - RNA, 19 nt, Artificial Sequence
  Description of Artificial Sequence: Synthetic oligonucleotide
  Sense strand starting at position 3821 of SEQ ID NO: 1243533
gaaauagauuaugcucugu

SEQ ID NO: 1422649 - RNA, 19 nt, Artificial Sequence
  Description of Artificial Sequence: Synthetic oligonucleotide
  Antisense strand to SEQ ID NO: 1422648
acagagcauaaucuauuuc

SEQ ID NO: 1422650 - RNA, 19 nt, Artificial Sequence
  Description of Artificial Sequence: Synthetic oligonucleotide
  Sense strand starting at position 3823 of SEQ ID NO: 1243533
aauagauuaugcucugugu

SEQ ID NO: 1422651 - RNA, 19 nt, Artificial Sequence
  Description of Artificial Sequence: Synthetic oligonucleotide
  Antisense strand to SEQ ID NO: 1422650
acacagagcauaaucuauu

SEQ ID NO: 1422652 - RNA, 19 nt, Artificial Sequence
  Description of Artificial Sequence: Synthetic oligonucleotide
  Sense strand starting at position 3825 of SEQ ID NO: 1243533
uagauuaugcucuguguug

SEQ ID NO: 1422653 - RNA, 19 nt, Artificial Sequence
  Description of Artificial Sequence: Synthetic oligonucleotide
  Antisense strand to SEQ ID NO: 1422652
caacacagagcauaaucua

SEQ ID NO: 1422654 - RNA, 19 nt, Artificial Sequence
  Description of Artificial Sequence: Synthetic oligonucleotide
  Sense strand starting at position 3827 of SEQ ID NO: 1243533
gauuaugcucuguguugga

SEQ ID NO: 1422655 - RNA, 19 nt, Artificial Sequence
  Description of Artificial Sequence: Synthetic oligonucleotide
  Antisense strand to SEQ ID NO: 1422654
uccaacacagagcauaauc

SEQ ID NO: 1422656 - RNA, 19 nt, Artificial Sequence
  Description of Artificial Sequence: Synthetic oligonucleotide
  Sense strand starting at position 3831 of SEQ ID NO: 1243533
augcucuguguuggagaca

SEQ ID NO: 1422657 - RNA, 19 nt, Artificial Sequence
  Description of Artificial Sequence: Synthetic oligonucleotide
  Antisense strand to SEQ ID NO: 1422656
ugucuccaacacagagcau

SEQ ID NO: 1422658 - RNA, 19 nt, Artificial Sequence
  Description of Artificial Sequence: Synthetic oligonucleotide
  Sense strand starting at position 3946 of SEQ ID NO: 1243533
uaaagaugccaauguauag

SEQ ID NO: 1422659 - RNA, 19 nt, Artificial Sequence
  Description of Artificial Sequence: Synthetic oligonucleotide
  Antisense strand to SEQ ID NO: 1422658
cuauacauuggcaucuuua

SEQ ID NO: 1422660 - RNA, 19 nt, Artificial Sequence
  Description of Artificial Sequence: Synthetic oligonucleotide
  Sense strand starting at position 166 of SEQ ID NO: 1243534
gggaccuucucauugcgaa

SEQ ID NO: 1422661 - RNA, 19 nt, Artificial Sequence
  Description of Artificial Sequence: Synthetic oligonucleotide
  Antisense strand to SEQ ID NO: 1422660
uucgcaaugagaagguccc

SEQ ID NO: 1422662 - RNA, 19 nt, Artificial Sequence
  Description of Artificial Sequence: Synthetic oligonucleotide
  Sense strand starting at position 245 of SEQ ID NO: 1243534
ucaagcuagucacuuugau

SEQ ID NO: 1422663 - RNA, 19 nt, Artificial Sequence
  Description of Artificial Sequence: Synthetic oligonucleotide
  Antisense strand to SEQ ID NO: 1422662
aucaaagugacuagcuuga

SEQ ID NO: 1422664 - RNA, 19 nt, Artificial Sequence
  Description of Artificial Sequence: Synthetic oligonucleotide
  Sense strand starting at position 261 of SEQ ID NO: 1243534
gauaaagugcugcaaguca

SEQ ID NO: 1422665 - RNA, 19 nt, Artificial Sequence
  Description of Artificial Sequence: Synthetic oligonucleotide
  Antisense strand to SEQ ID NO: 1422664
ugacuugcagcacuuuauc

SEQ ID NO: 1422666 - RNA, 19 nt, Artificial Sequence
  Description of Artificial Sequence: Synthetic oligonucleotide
  Sense strand starting at position 276 of SEQ ID NO: 1243534
gucagagucucaccugaua

SEQ ID NO: 1422667 - RNA, 19 nt, Artificial Sequence
  Description of Artificial Sequence: Synthetic oligonucleotide
  Antisense strand to SEQ ID NO: 1422666
uaucaggugagacucugac

SEQ ID NO: 1422668 - RNA, 19 nt, Artificial Sequence
  Description of Artificial Sequence: Synthetic oligonucleotide
  Sense strand starting at position 552 of SEQ ID NO: 1243534
aaaugaacguuaucaaggu

SEQ ID NO: 1422669 - RNA, 19 nt, Artificial Sequence
  Description of Artificial Sequence: Synthetic oligonucleotide
  Antisense strand to SEQ ID NO: 1422668
accuugauaacguucauuu

SEQ ID NO: 1422670 - RNA, 19 nt, Artificial Sequence
  Description of Artificial Sequence: Synthetic oligonucleotide
  Sense strand starting at position 560 of SEQ ID NO: 1243534
guuaucaagguuggugaca

SEQ ID NO: 1422671 - RNA, 19 nt, Artificial Sequence
  Description of Artificial Sequence: Synthetic oligonucleotide
  Antisense strand to SEQ ID NO: 1422670
ugucaccaaccuugauaac

SEQ ID NO: 1422672 - RNA, 19 nt, Artificial Sequence
  Description of Artificial Sequence: Synthetic oligonucleotide
  Sense strand starting at position 629 of SEQ ID NO: 1243534
agguacucaccuugagaug

SEQ ID NO: 1422673 - RNA, 19 nt, Artificial Sequence
  Description of Artificial Sequence: Synthetic oligonucleotide
  Antisense strand to SEQ ID NO: 1422672
caucucaaggugaguaccu

SEQ ID NO: 1422674 - RNA, 19 nt, Artificial Sequence
  Description of Artificial Sequence: Synthetic oligonucleotide
  Sense strand starting at position 685 of SEQ ID NO: 1243534
cgauguaggccauagguua

SEQ ID NO: 1422675 - RNA, 19 nt, Artificial Sequence
  Description of Artificial Sequence: Synthetic oligonucleotide
  Antisense strand to SEQ ID NO: 1422674
uaaccuauggccuacaucg

SEQ ID NO: 1422676 - RNA, 19 nt, Artificial Sequence
  Description of Artificial Sequence: Synthetic oligonucleotide
  Sense strand starting at position 895 of SEQ ID NO: 1243534
ggauucagccgaggucaaa

SEQ ID NO: 1422677 - RNA, 19 nt, Artificial Sequence
  Description of Artificial Sequence: Synthetic oligonucleotide
  Antisense strand to SEQ ID NO: 1422676
uuugaccucggcugaaucc

SEQ ID NO: 1422678 - RNA, 19 nt, Artificial Sequence
  Description of Artificial Sequence: Synthetic oligonucleotide
  Sense strand starting at position 973 of SEQ ID NO: 1243534
ggaggugagucuaacagga

SEQ ID NO: 1422679 - RNA, 19 nt, Artificial Sequence
  Description of Artificial Sequence: Synthetic oligonucleotide
  Antisense strand to SEQ ID NO: 1422678
uccuguuagacucaccucc

SEQ ID NO: 1422680 - RNA, 19 nt, Artificial Sequence
  Description of Artificial Sequence: Synthetic oligonucleotide
  Sense strand starting at position 977 of SEQ ID NO: 1243534
gugagucuaacaggagaca

SEQ ID NO: 1422681 - RNA, 19 nt, Artificial Sequence
  Description of Artificial Sequence: Synthetic oligonucleotide
  Antisense strand to SEQ ID NO: 1422680
ugucuccuguuagacucac

SEQ ID NO: 1422682 - RNA, 19 nt, Artificial Sequence
  Description of Artificial Sequence: Synthetic oligonucleotide
  Sense strand starting at position 1096 of SEQ ID NO: 1243534
ugaguuagcguuguucgaa

SEQ ID NO: 1422683 - RNA, 19 nt, Artificial Sequence
  Description of Artificial Sequence: Synthetic oligonucleotide
  Antisense strand to SEQ ID NO: 1422682
uucgaacaacgcuaacuca

SEQ ID NO: 1422684 - RNA, 19 nt, Artificial Sequence
  Description of Artificial Sequence: Synthetic oligonucleotide
  Sense strand starting at position 1177 of SEQ ID NO: 1243534
aaauguuuggcaggaguaa

SEQ ID NO: 1422685 - RNA, 19 nt, Artificial Sequence
  Description of Artificial Sequence: Synthetic oligonucleotide
  Antisense strand to SEQ ID NO: 1422684
uuacuccugccaaacauuu

SEQ ID NO: 1422686 - RNA, 19 nt, Artificial Sequence
  Description of Artificial Sequence: Synthetic oligonucleotide
  Sense strand starting at position 1231 of SEQ ID NO: 1243534
gcaguuggucuauauaaag

SEQ ID NO: 1422687 - RNA, 19 nt, Artificial Sequence
  Description of Artificial Sequence: Synthetic oligonucleotide
  Antisense strand to SEQ ID NO: 1422686
cuuuauauagaccaacugc

SEQ ID NO: 1422688 - RNA, 19 nt, Artificial Sequence
  Description of Artificial Sequence: Synthetic oligonucleotide
  Sense strand starting at position 1366 of SEQ ID NO: 1243534
gagcaaguuccaggagguu

SEQ ID NO: 1422689 - RNA, 19 nt, Artificial Sequence
  Description of Artificial Sequence: Synthetic oligonucleotide
  Antisense strand to SEQ ID NO: 1422688
aaccuccuggaacuugcuc

SEQ ID NO: 1422690 - RNA, 19 nt, Artificial Sequence
  Description of Artificial Sequence: Synthetic oligonucleotide
  Sense strand starting at position 1384 of SEQ ID NO: 1243534
ucauaaagagcucaaaguu

SEQ ID NO: 1422691 - RNA, 19 nt, Artificial Sequence
  Description of Artificial Sequence: Synthetic oligonucleotide
  Antisense strand to SEQ ID NO: 1422690
aacuuugagcucuuuauga

SEQ ID NO: 1422692 - RNA, 19 nt, Artificial Sequence
  Description of Artificial Sequence: Synthetic oligonucleotide
  Sense strand starting at position 1393 of SEQ ID NO: 1243534
gcucaaaguucuccgaaga

SEQ ID NO: 1422693 - RNA, 19 nt, Artificial Sequence
  Description of Artificial Sequence: Synthetic oligonucleotide
  Antisense strand to SEQ ID NO: 1422692
ucuucggagaacuuugagc

SEQ ID NO: 1422694 - RNA, 19 nt, Artificial Sequence
  Description of Artificial Sequence: Synthetic oligonucleotide
  Sense strand starting at position 1433 of SEQ ID NO: 1243534
accuacucuggaggugaau

SEQ ID NO: 1422695 - RNA, 19 nt, Artificial Sequence
  Description of Artificial Sequence: Synthetic oligonucleotide
  Antisense strand to SEQ ID NO: 1422694
auucaccuccagaguaggu

SEQ ID NO: 1422696 - RNA, 19 nt, Artificial Sequence
  Description of Artificial Sequence: Synthetic oligonucleotide
  Sense strand starting at position 2286 of SEQ ID NO: 1243534
ggucuucgucgggcugaua

SEQ ID NO: 1422697 - RNA, 19 nt, Artificial Sequence
  Description of Artificial Sequence: Synthetic oligonucleotide
  Antisense strand to SEQ ID NO: 1422696
uaucagcccgacgaagacc

SEQ ID NO: 1422698 - RNA, 19 nt, Artificial Sequence
  Description of Artificial Sequence: Synthetic oligonucleotide
  Sense strand starting at position 2335 of SEQ ID NO: 1243534
ugcuuaccuccggaauuau

SEQ ID NO: 1422699 - RNA, 19 nt, Artificial Sequence
  Description of Artificial Sequence: Synthetic oligonucleotide
  Antisense strand to SEQ ID NO: 1422698
auaauuccggagguaagca

SEQ ID NO: 1422700 - RNA, 19 nt, Artificial Sequence
  Description of Artificial Sequence: Synthetic oligonucleotide
  Sense strand starting at position 2360 of SEQ ID NO: 1243534
agguaucgacuuuagauua

SEQ ID NO: 1422701 - RNA, 19 nt, Artificial Sequence
  Description of Artificial Sequence: Synthetic oligonucleotide
  Antisense strand to SEQ ID NO: 1422700
uaaucuaaagucgauaccu

SEQ ID NO: 1422702 - RNA, 19 nt, Artificial Sequence
  Description of Artificial Sequence: Synthetic oligonucleotide
  Sense strand starting at position 2580 of SEQ ID NO: 1243534
cgguuucauccugcgcuga

SEQ ID NO: 1422703 - RNA, 19 nt, Artificial Sequence
  Description of Artificial Sequence: Synthetic oligonucleotide
  Antisense strand to SEQ ID NO: 1422702
ucagcgcaggaugaaaccg

SEQ ID NO: 1422704 - RNA, 19 nt, Artificial Sequence
  Description of Artificial Sequence: Synthetic oligonucleotide
  Sense strand starting at position 2686 of SEQ ID NO: 1243534
gcgagauguccacaaacug

SEQ ID NO: 1422705 - RNA, 19 nt, Artificial Sequence
  Description of Artificial Sequence: Synthetic oligonucleotide
  Antisense strand to SEQ ID NO: 1422704
caguuuguggacaucucgc

SEQ ID NO: 1422706 - RNA, 19 nt, Artificial Sequence
  Description of Artificial Sequence: Synthetic oligonucleotide
  Sense strand starting at position 2737 of SEQ ID NO: 1243534
uggagugugagucagucau

SEQ ID NO: 1422707 - RNA, 19 nt, Artificial Sequence
  Description of Artificial Sequence: Synthetic oligonucleotide
  Antisense strand to SEQ ID NO: 1422706
augacugacucacacucca

SEQ ID NO: 1422708 - RNA, 19 nt, Artificial Sequence
  Description of Artificial Sequence: Synthetic oligonucleotide
  Sense strand starting at position 2741 of SEQ ID NO: 1243534
gugugagucagucaucaag

SEQ ID NO: 1422709 - RNA, 19 nt, Artificial Sequence
  Description of Artificial Sequence: Synthetic oligonucleotide
  Antisense strand to SEQ ID NO: 1422708
cuugaugacugacucacac

SEQ ID NO: 1422710 - RNA, 19 nt, Artificial Sequence
  Description of Artificial Sequence: Synthetic oligonucleotide
  Sense strand starting at position 2743 of SEQ ID NO: 1243534
gugagucagucaucaagaa

SEQ ID NO: 1422711 - RNA, 19 nt, Artificial Sequence
  Description of Artificial Sequence: Synthetic oligonucleotide
  Antisense strand to SEQ ID NO: 1422710
uucuugaugacugacucac

SEQ ID NO: 1422712 - RNA, 19 nt, Artificial Sequence
  Description of Artificial Sequence: Synthetic oligonucleotide
  Sense strand starting at position 2747 of SEQ ID NO: 1243534
gucagucaucaagaagagu

SEQ ID NO: 1422713 - RNA, 19 nt, Artificial Sequence
  Description of Artificial Sequence: Synthetic oligonucleotide
  Antisense strand to SEQ ID NO: 1422712
acucuucuugaugacugac

SEQ ID NO: 1422714 - RNA, 19 nt, Artificial Sequence
  Description of Artificial Sequence: Synthetic oligonucleotide
  Sense strand starting at position 2753 of SEQ ID NO: 1243534
caucaagaagagugaaguu

SEQ ID NO: 1422715 - RNA, 19 nt, Artificial Sequence
  Description of Artificial Sequence: Synthetic oligonucleotide
  Antisense strand to SEQ ID NO: 1422714
aacuucacucuucuugaug

SEQ ID NO: 1422716 - RNA, 19 nt, Artificial Sequence
  Description of Artificial Sequence: Synthetic oligonucleotide
  Sense strand starting at position 2994 of SEQ ID NO: 1243534
uaggauuaguguccuugga

SEQ ID NO: 1422717 - RNA, 19 nt, Artificial Sequence
  Description of Artificial Sequence: Synthetic oligonucleotide
  Antisense strand to SEQ ID NO: 1422716
uccaaggacacuaauccua

SEQ ID NO: 1422718 - RNA, 19 nt, Artificial Sequence
  Description of Artificial Sequence: Synthetic oligonucleotide
  Sense strand starting at position 2996 of SEQ ID NO: 1243534
ggauuaguguccuuggaag

SEQ ID NO: 1422719 - RNA, 19 nt, Artificial Sequence
  Description of Artificial Sequence: Synthetic oligonucleotide
  Antisense strand to SEQ ID NO: 1422718
cuuccaaggacacuaaucc

SEQ ID NO: 1422720 - RNA, 19 nt, Artificial Sequence
  Description of Artificial Sequence: Synthetic oligonucleotide
  Sense strand starting at position 3189 of SEQ ID NO: 1243534
acuuguuaugguuacguaa

SEQ ID NO: 1422721 - RNA, 19 nt, Artificial Sequence
  Description of Artificial Sequence: Synthetic oligonucleotide
  Antisense strand to SEQ ID NO: 1422720
uuacguaaccauaacaagu

SEQ ID NO: 1422722 - RNA, 19 nt, Artificial Sequence
  Description of Artificial Sequence: Synthetic oligonucleotide
  Sense strand starting at position 3202 of SEQ ID NO: 1243534
acguaagaggaaugugaau

SEQ ID NO: 1422723 - RNA, 19 nt, Artificial Sequence
  Description of Artificial Sequence: Synthetic oligonucleotide
  Antisense strand to SEQ ID NO: 1422722
auucacauuccucuuacgu

SEQ ID NO: 1422724 - RNA, 19 nt, Artificial Sequence
  Description of Artificial Sequence: Synthetic oligonucleotide
  Sense strand starting at position 3204 of SEQ ID NO: 1243534
guaagaggaaugugaauuc

SEQ ID NO: 1422725 - RNA, 19 nt, Artificial Sequence
  Description of Artificial Sequence: Synthetic oligonucleotide
  Antisense strand to SEQ ID NO: 1422724
gaauucacauuccucuuac

SEQ ID NO: 1422726 - RNA, 19 nt, Artificial Sequence
  Description of Artificial Sequence: Synthetic oligonucleotide
  Sense strand starting at position 3286 of SEQ ID NO: 1243534
acucuaugugucgauaaga

SEQ ID NO: 1422727 - RNA, 19 nt, Artificial Sequence
  Description of Artificial Sequence: Synthetic oligonucleotide
  Antisense strand to SEQ ID NO: 1422726
ucuuaucgacacauagagu

SEQ ID NO: 1422728 - RNA, 19 nt, Artificial Sequence
  Description of Artificial Sequence: Synthetic oligonucleotide
  Sense strand starting at position 3359 of SEQ ID NO: 1243534
ggacguuacuguccaugga

SEQ ID NO: 1422729 - RNA, 19 nt, Artificial Sequence
  Description of Artificial Sequence: Synthetic oligonucleotide
  Antisense strand to SEQ ID NO: 1422728
uccauggacaguaacgucc

SEQ ID NO: 1422730 - RNA, 19 nt, Artificial Sequence
  Description of Artificial Sequence: Synthetic oligonucleotide
  Sense strand starting at position 3360 of SEQ ID NO: 1243534
gacguuacuguccauggaa

SEQ ID NO: 1422731 - RNA, 19 nt, Artificial Sequence
  Description of Artificial Sequence: Synthetic oligonucleotide
  Antisense strand to SEQ ID NO: 1422730
uuccauggacaguaacguc

SEQ ID NO: 1422732 - RNA, 19 nt, Artificial Sequence
  Description of Artificial Sequence: Synthetic oligonucleotide
  Sense strand starting at position 3362 of SEQ ID NO: 1243534
cguuacuguccauggaaag

SEQ ID NO: 1422733 - RNA, 19 nt, Artificial Sequence
  Description of Artificial Sequence: Synthetic oligonucleotide
  Antisense strand to SEQ ID NO: 1422732
cuuuccauggacaguaacg

SEQ ID NO: 1422734 - RNA, 19 nt, Artificial Sequence
  Description of Artificial Sequence: Synthetic oligonucleotide
  Sense strand starting at position 3412 of SEQ ID NO: 1243534
gccugucugcgaucugagu

SEQ ID NO: 1422735 - RNA, 19 nt, Artificial Sequence
  Description of Artificial Sequence: Synthetic oligonucleotide
  Antisense strand to SEQ ID NO: 1422734
acucagaucgcagacaggc

SEQ ID NO: 1422736 - RNA, 19 nt, Artificial Sequence
  Description of Artificial Sequence: Synthetic oligonucleotide
  Sense strand starting at position 3454 of SEQ ID NO: 1243534
gucacagccucuuuggaaa

SEQ ID NO: 1422737 - RNA, 19 nt, Artificial Sequence
  Description of Artificial Sequence: Synthetic oligonucleotide
  Antisense strand to SEQ ID NO: 1422736
uuuccaaagaggcugugac

SEQ ID NO: 1422738 - RNA, 19 nt, Artificial Sequence
  Description of Artificial Sequence: Synthetic oligonucleotide
  Sense strand starting at position 3644 of SEQ ID NO: 1243534
cccugugguccaugaagag

SEQ ID NO: 1422739 - RNA, 19 nt, Artificial Sequence
  Description of Artificial Sequence: Synthetic oligonucleotide
  Antisense strand to SEQ ID NO: 1422738
cucuucauggaccacaggg

SEQ ID NO: 1422740 - RNA, 19 nt, Artificial Sequence
  Description of Artificial Sequence: Synthetic oligonucleotide
  Sense strand starting at position 21 of SEQ ID NO: 1243535
gccacaugccaucagagaa

SEQ ID NO: 1422741 - RNA, 19 nt, Artificial Sequence
  Description of Artificial Sequence: Synthetic oligonucleotide
  Antisense strand to SEQ ID NO: 1422740
uucucugauggcauguggc

SEQ ID NO: 1422742 - RNA, 19 nt, Artificial Sequence
  Description of Artificial Sequence: Synthetic oligonucleotide
  Sense strand starting at position 103 of SEQ ID NO: 1243535
gcgcgcuguccagucgaaa

SEQ ID NO: 1422743 - RNA, 19 nt, Artificial Sequence
  Description of Artificial Sequence: Synthetic oligonucleotide
  Antisense strand to SEQ ID NO: 1422742
uuucgacuggacagcgcgc

SEQ ID NO: 1422744 - RNA, 19 nt, Artificial Sequence
  Description of Artificial Sequence: Synthetic oligonucleotide
  Sense strand starting at position 104 of SEQ ID NO: 1243535
cgcgcuguccagucgaaau

SEQ ID NO: 1422745 - RNA, 19 nt, Artificial Sequence
  Description of Artificial Sequence: Synthetic oligonucleotide
  Antisense strand to SEQ ID NO: 1422744
auuucgacuggacagcgcg

SEQ ID NO: 1422746 - RNA, 19 nt, Artificial Sequence
  Description of Artificial Sequence: Synthetic oligonucleotide
  Sense strand starting at position 106 of SEQ ID NO: 1243535
cgcuguccagucgaaauau

SEQ ID NO: 1422747 - RNA, 19 nt, Artificial Sequence
  Description of Artificial Sequence: Synthetic oligonucleotide
  Antisense strand to SEQ ID NO: 1422746
auauuucgacuggacagcg

SEQ ID NO: 1422748 - RNA, 19 nt, Artificial Sequence
  Description of Artificial Sequence: Synthetic oligonucleotide
  Sense strand starting at position 150 of SEQ ID NO: 1243535
agccauacgugucauugua

SEQ ID NO: 1422749 - RNA, 19 nt, Artificial Sequence
  Description of Artificial Sequence: Synthetic oligonucleotide
  Antisense strand to SEQ ID NO: 1422748
uacaaugacacguauggcu

SEQ ID NO: 1422750 - RNA, 19 nt, Artificial Sequence
  Description of Artificial Sequence: Synthetic oligonucleotide
  Sense strand starting at position 152 of SEQ ID NO: 1243535
ccauacgugucauuguaug

SEQ ID NO: 1422751 - RNA, 19 nt, Artificial Sequence
  Description of Artificial Sequence: Synthetic oligonucleotide
  Antisense strand to SEQ ID NO: 1422750
cauacaaugacacguaugg

SEQ ID NO: 1422752 - RNA, 19 nt, Artificial Sequence
  Description of Artificial Sequence: Synthetic oligonucleotide
  Sense strand starting at position 157 of SEQ ID NO: 1243535
cgugucauuguauguaugu

SEQ ID NO: 1422753 - RNA, 19 nt, Artificial Sequence
  Description of Artificial Sequence: Synthetic oligonucleotide
  Antisense strand to SEQ ID NO: 1422752
acauacauacaaugacacg

SEQ ID NO: 1422754 - RNA, 19 nt, Artificial Sequence
  Description of Artificial Sequence: Synthetic oligonucleotide
  Sense strand starting at position 158 of SEQ ID NO: 1243535
gugucauuguauguaugua

SEQ ID NO: 1422755 - RNA, 19 nt, Artificial Sequence
  Description of Artificial Sequence: Synthetic oligonucleotide
  Antisense strand to SEQ ID NO: 1422754
uacauacauacaaugacac

SEQ ID NO: 1422756 - RNA, 19 nt, Artificial Sequence
  Description of Artificial Sequence: Synthetic oligonucleotide
  Sense strand starting at position 159 of SEQ ID NO: 1243535
ugucauuguauguauguau

SEQ ID NO: 1422757 - RNA, 19 nt, Artificial Sequence
  Description of Artificial Sequence: Synthetic oligonucleotide
  Antisense strand to SEQ ID NO: 1422756
auacauacauacaaugaca

SEQ ID NO: 1422758 - RNA, 19 nt, Artificial Sequence
  Description of Artificial Sequence: Synthetic oligonucleotide
  Sense strand starting at position 186 of SEQ ID NO: 1243535
gcauguauguggagaggga

SEQ ID NO: 1422759 - RNA, 19 nt, Artificial Sequence
  Description of Artificial Sequence: Synthetic oligonucleotide
  Antisense strand to SEQ ID NO: 1422758
ucccucuccacauacaugc

SEQ ID NO: 1422760 - RNA, 19 nt, Artificial Sequence
  Description of Artificial Sequence: Synthetic oligonucleotide
  Sense strand starting at position 862 of SEQ ID NO: 1243535
acugcauccugccaagauu

SEQ ID NO: 1422761 - RNA, 19 nt, Artificial Sequence
  Description of Artificial Sequence: Synthetic oligonucleotide
  Antisense strand to SEQ ID NO: 1422760
aaucuuggcaggaugcagu

SEQ ID NO: 1422762 - RNA, 19 nt, Artificial Sequence
  Description of Artificial Sequence: Synthetic oligonucleotide
  Sense strand starting at position 865 of SEQ ID NO: 1243535
gcauccugccaagauuaau

SEQ ID NO: 1422763 - RNA, 19 nt, Artificial Sequence
  Description of Artificial Sequence: Synthetic oligonucleotide
  Antisense strand to SEQ ID NO: 1422762
auuaaucuuggcaggaugc

SEQ ID NO: 1422764 - RNA, 19 nt, Artificial Sequence
  Description of Artificial Sequence: Synthetic oligonucleotide
  Sense strand starting at position 976 of SEQ ID NO: 1243535
cuuucuuucucauccgaag

SEQ ID NO: 1422765 - RNA, 19 nt, Artificial Sequence
  Description of Artificial Sequence: Synthetic oligonucleotide
  Antisense strand to SEQ ID NO: 1422764
cuucggaugagaaagaaag

SEQ ID NO: 1422766 - RNA, 19 nt, Artificial Sequence
  Description of Artificial Sequence: Synthetic oligonucleotide
  Sense strand starting at position 979 of SEQ ID NO: 1243535
ucuuucucauccgaaguuu

SEQ ID NO: 1422767 - RNA, 19 nt, Artificial Sequence
  Description of Artificial Sequence: Synthetic oligonucleotide
  Antisense strand to SEQ ID NO: 1422766
aaacuucggaugagaaaga

SEQ ID NO: 1422768 - RNA, 19 nt, Artificial Sequence
  Description of Artificial Sequence: Synthetic oligonucleotide
  Sense strand starting at position 1112 of SEQ ID NO: 1243535
gguccuucgugguucaaua

SEQ ID NO: 1422769 - RNA, 19 nt, Artificial Sequence
  Description of Artificial Sequence: Synthetic oligonucleotide
  Antisense strand to SEQ ID NO: 1422768
uauugaaccacgaaggacc

SEQ ID NO: 1422770 - RNA, 19 nt, Artificial Sequence
  Description of Artificial Sequence: Synthetic oligonucleotide
  Sense strand starting at position 1516 of SEQ ID NO: 1243535
ccgcgaucaccagagcaga

SEQ ID NO: 1422771 - RNA, 19 nt, Artificial Sequence
  Description of Artificial Sequence: Synthetic oligonucleotide
  Antisense strand to SEQ ID NO: 1422770
ucugcucuggugaucgcgg

SEQ ID NO: 1422772 - RNA, 19 nt, Artificial Sequence
  Description of Artificial Sequence: Synthetic oligonucleotide
  Sense strand starting at position 1609 of SEQ ID NO: 1243535
gcagaagugggucacguua

SEQ ID NO: 1422773 - RNA, 19 nt, Artificial Sequence
  Description of Artificial Sequence: Synthetic oligonucleotide
  Antisense strand to SEQ ID NO: 1422772
uaacgugacccacuucugc

SEQ ID NO: 1422774 - RNA, 19 nt, Artificial Sequence
  Description of Artificial Sequence: Synthetic oligonucleotide
  Sense strand starting at position 1611 of SEQ ID NO: 1243535
agaagugggucacguuauu

SEQ ID NO: 1422775 - RNA, 19 nt, Artificial Sequence
  Description of Artificial Sequence: Synthetic oligonucleotide
  Antisense strand to SEQ ID NO: 1422774
aauaacgugacccacuucu

SEQ ID NO: 1422776 - RNA, 19 nt, Artificial Sequence
  Description of Artificial Sequence: Synthetic oligonucleotide
  Sense strand starting at position 2224 of SEQ ID NO: 1243535
cggacucaagacugauuaa

SEQ ID NO: 1422777 - RNA, 19 nt, Artificial Sequence
  Description of Artificial Sequence: Synthetic oligonucleotide
  Antisense strand to SEQ ID NO: 1422776
uuaaucagucuugaguccg

SEQ ID NO: 1422778 - RNA, 19 nt, Artificial Sequence
  Description of Artificial Sequence: Synthetic oligonucleotide
  Sense strand starting at position 2426 of SEQ ID NO: 1243535
ucagaacaaccgugauugu

SEQ ID NO: 1422779 - RNA, 19 nt, Artificial Sequence
  Description of Artificial Sequence: Synthetic oligonucleotide
  Antisense strand to SEQ ID NO: 1422778
acaaucacgguuguucuga

SEQ ID NO: 1422780 - RNA, 19 nt, Artificial Sequence
  Description of Artificial Sequence: Synthetic oligonucleotide
  Sense strand starting at position 2429 of SEQ ID NO: 1243535
gaacaaccgugauugucuu

SEQ ID NO: 1422781 - RNA, 19 nt, Artificial Sequence
  Description of Artificial Sequence: Synthetic oligonucleotide
  Antisense strand to SEQ ID NO: 1422780
aagacaaucacgguuguuc

SEQ ID NO: 1422782 - RNA, 19 nt, Artificial Sequence
  Description of Artificial Sequence: Synthetic oligonucleotide
  Sense strand starting at position 2621 of SEQ ID NO: 1243535
gggcacggcuucuuguaaa

SEQ ID NO: 1422783 - RNA, 19 nt, Artificial Sequence
  Description of Artificial Sequence: Synthetic oligonucleotide
  Antisense strand to SEQ ID NO: 1422782
uuuacaagaagccgugccc

SEQ ID NO: 1422784 - RNA, 19 nt, Artificial Sequence
  Description of Artificial Sequence: Synthetic oligonucleotide
  Sense strand starting at position 2876 of SEQ ID NO: 1243535
ggaguucggugucuggaua

SEQ ID NO: 1422785 - RNA, 19 nt, Artificial Sequence
  Description of Artificial Sequence: Synthetic oligonucleotide
  Antisense strand to SEQ ID NO: 1422784
uauccagacaccgaacucc

SEQ ID NO: 1422786 - RNA, 19 nt, Artificial Sequence
  Description of Artificial Sequence: Synthetic oligonucleotide
  Sense strand starting at position 2877 of SEQ ID NO: 1243535
gaguucggugucuggauaa

SEQ ID NO: 1422787 - RNA, 19 nt, Artificial Sequence
  Description of Artificial Sequence: Synthetic oligonucleotide
  Antisense strand to SEQ ID NO: 1422786
uuauccagacaccgaacuc

SEQ ID NO: 1422788 - RNA, 19 nt, Artificial Sequence
  Description of Artificial Sequence: Synthetic oligonucleotide
  Sense strand starting at position 2961 of SEQ ID NO: 1243535
cauguuuaauuuggaguuu

SEQ ID NO: 1422789 - RNA, 19 nt, Artificial Sequence
  Description of Artificial Sequence: Synthetic oligonucleotide
  Antisense strand to SEQ ID NO: 1422788
aaacuccaaauuaaacaug

SEQ ID NO: 1422790 - RNA, 19 nt, Artificial Sequence
  Description of Artificial Sequence: Synthetic oligonucleotide
  Sense strand starting at position 3066 of SEQ ID NO: 1243535
cagagauugggcuguagga

SEQ ID NO: 1422791 - RNA, 19 nt, Artificial Sequence
  Description of Artificial Sequence: Synthetic oligonucleotide
  Antisense strand to SEQ ID NO: 1422790
uccuacagcccaaucucug

SEQ ID NO: 1422792 - RNA, 19 nt, Artificial Sequence
  Description of Artificial Sequence: Synthetic oligonucleotide
  Sense strand starting at position 3346 of SEQ ID NO: 1243535
uuucucugugagcaggaau

SEQ ID NO: 1422793 - RNA, 19 nt, Artificial Sequence
  Description of Artificial Sequence: Synthetic oligonucleotide
  Antisense strand to SEQ ID NO: 1422792
auuccugcucacagagaaa

SEQ ID NO: 1422794 - RNA, 19 nt, Artificial Sequence
  Description of Artificial Sequence: Synthetic oligonucleotide
  Sense strand starting at position 3357 of SEQ ID NO: 1243535
gcaggaaucccuggugugu

SEQ ID NO: 1422795 - RNA, 19 nt, Artificial Sequence
  Description of Artificial Sequence: Synthetic oligonucleotide
  Antisense strand to SEQ ID NO: 1422794
acacaccagggauuccugc

SEQ ID NO: 1422796 - RNA, 19 nt, Artificial Sequence
  Description of Artificial Sequence: Synthetic oligonucleotide
  Sense strand starting at position 3721 of SEQ ID NO: 1243535
gcgccauugcacuccauau

SEQ ID NO: 1422797 - RNA, 19 nt, Artificial Sequence
  Description of Artificial Sequence: Synthetic oligonucleotide
  Antisense strand to SEQ ID NO: 1422796
auauggagugcaauggcgc

SEQ ID NO: 1422798 - RNA, 19 nt, Artificial Sequence
  Description of Artificial Sequence: Synthetic oligonucleotide
  Sense strand starting at position 3732 of SEQ ID NO: 1243535
cuccauauugggcgagaga

SEQ ID NO: 1422799 - RNA, 19 nt, Artificial Sequence
  Description of Artificial Sequence: Synthetic oligonucleotide
  Antisense strand to SEQ ID NO: 1422798
ucucucgcccaauauggag

SEQ ID NO: 1422800 - RNA, 19 nt, Artificial Sequence
  Description of Artificial Sequence: Synthetic oligonucleotide
  Sense strand starting at position 3780 of SEQ ID NO: 1243535
guauaaggguccuaugacu

SEQ ID NO: 1422801 - RNA, 19 nt, Artificial Sequence
  Description of Artificial Sequence: Synthetic oligonucleotide
  Antisense strand to SEQ ID NO: 1422800
agucauaggacccuuauac

SEQ ID NO: 1422802 - RNA, 19 nt, Artificial Sequence
  Description of Artificial Sequence: Synthetic oligonucleotide
  Sense strand starting at position 3827 of SEQ ID NO: 1243535
gccuaauagccauauuagg

SEQ ID NO: 1422803 - RNA, 19 nt, Artificial Sequence
  Description of Artificial Sequence: Synthetic oligonucleotide
  Antisense strand to SEQ ID NO: 1422802
ccuaauauggcuauuaggc

SEQ ID NO: 1422804 - RNA, 19 nt, Artificial Sequence
  Description of Artificial Sequence: Synthetic oligonucleotide
  Sense strand starting at position 3833 of SEQ ID NO: 1243535
uagccauauuaggguuaga

SEQ ID NO: 1422805 - RNA, 19 nt, Artificial Sequence
  Description of Artificial Sequence: Synthetic oligonucleotide
  Antisense strand to SEQ ID NO: 1422804
ucuaacccuaauauggcua

SEQ ID NO: 1422806 - RNA, 19 nt, Artificial Sequence
  Description of Artificial Sequence: Synthetic oligonucleotide
  Sense strand starting at position 3836 of SEQ ID NO: 1243535
ccauauuaggguuagagcu

SEQ ID NO: 1422807 - RNA, 19 nt, Artificial Sequence
  Description of Artificial Sequence: Synthetic oligonucleotide
  Antisense strand to SEQ ID NO: 1422806
agcucuaacccuaauaugg

SEQ ID NO: 1422808 - RNA, 19 nt, Artificial Sequence
  Description of Artificial Sequence: Synthetic oligonucleotide
  Sense strand starting at position 3892 of SEQ ID NO: 1243535
gggagcguuucaguccgua

SEQ ID NO: 1422809 - RNA, 19 nt, Artificial Sequence
  Description of Artificial Sequence: Synthetic oligonucleotide
  Antisense strand to SEQ ID NO: 1422808
uacggacugaaacgcuccc

SEQ ID NO: 1422810 - RNA, 19 nt, Artificial Sequence
  Description of Artificial Sequence: Synthetic oligonucleotide
  Sense strand starting at position 3895 of SEQ ID NO: 1243535
agcguuucaguccguaaca

SEQ ID NO: 1422811 - RNA, 19 nt, Artificial Sequence
  Description of Artificial Sequence: Synthetic oligonucleotide
  Antisense strand to SEQ ID NO: 1422810
uguuacggacugaaacgcu

SEQ ID NO: 1422812 - RNA, 19 nt, Artificial Sequence
  Description of Artificial Sequence: Synthetic oligonucleotide
  Sense strand starting at position 3914 of SEQ ID NO: 1243535
ccagguaagugcugcaaca

SEQ ID NO: 1422813 - RNA, 19 nt, Artificial Sequence
  Description of Artificial Sequence: Synthetic oligonucleotide
  Antisense strand to SEQ ID NO: 1422812
uguugcagcacuuaccugg

SEQ ID NO: 1422814 - RNA, 19 nt, Artificial Sequence
  Description of Artificial Sequence: Synthetic oligonucleotide
  Sense strand starting at position 3916 of SEQ ID NO: 1243535
agguaagugcugcaacaga

SEQ ID NO: 1422815 - RNA, 19 nt, Artificial Sequence
  Description of Artificial Sequence: Synthetic oligonucleotide
  Antisense strand to SEQ ID NO: 1422814
ucuguugcagcacuuaccu

SEQ ID NO: 1422816 - RNA, 19 nt, Artificial Sequence
  Description of Artificial Sequence: Synthetic oligonucleotide
  Sense strand starting at position 3962 of SEQ ID NO: 1243535
uagggaagcuccucuaaga

SEQ ID NO: 1422817 - RNA, 19 nt, Artificial Sequence
  Description of Artificial Sequence: Synthetic oligonucleotide
  Antisense strand to SEQ ID NO: 1422816
ucuuagaggagcuucccua

SEQ ID NO: 1422818 - RNA, 19 nt, Artificial Sequence
  Description of Artificial Sequence: Synthetic oligonucleotide
  Sense strand starting at position 19 of SEQ ID NO: 1243536
cccuuaaagagaugacguu

SEQ ID NO: 1422819 - RNA, 19 nt, Artificial Sequence
  Description of Artificial Sequence: Synthetic oligonucleotide
  Antisense strand to SEQ ID NO: 1422818
aacgucaucucuuuaaggg

SEQ ID NO: 1422820 - RNA, 19 nt, Artificial Sequence
  Description of Artificial Sequence: Synthetic oligonucleotide
  Sense strand starting at position 25 of SEQ ID NO: 1243536
aagagaugacguuacugua

SEQ ID NO: 1422821 - RNA, 19 nt, Artificial Sequence
  Description of Artificial Sequence: Synthetic oligonucleotide
  Antisense strand to SEQ ID NO: 1422820
uacaguaacgucaucucuu

SEQ ID NO: 1422822 - RNA, 19 nt, Artificial Sequence
  Description of Artificial Sequence: Synthetic oligonucleotide
  Sense strand starting at position 56 of SEQ ID NO: 1243536
gaaauuauuagugggugga

SEQ ID NO: 1422823 - RNA, 19 nt, Artificial Sequence
  Description of Artificial Sequence: Synthetic oligonucleotide
  Antisense strand to SEQ ID NO: 1422822
uccacccacuaauaauuuc

SEQ ID NO: 1422824 - RNA, 19 nt, Artificial Sequence
  Description of Artificial Sequence: Synthetic oligonucleotide
  Sense strand starting at position 57 of SEQ ID NO: 1243536
aaauuauuaguggguggaa

SEQ ID NO: 1422825 - RNA, 19 nt, Artificial Sequence
  Description of Artificial Sequence: Synthetic oligonucleotide
  Antisense strand to SEQ ID NO: 1422824
uuccacccacuaauaauuu

SEQ ID NO: 1422826 - RNA, 19 nt, Artificial Sequence
  Description of Artificial Sequence: Synthetic oligonucleotide
  Sense strand starting at position 58 of SEQ ID NO: 1243536
aauuauuaguggguggaau

SEQ ID NO: 1422827 - RNA, 19 nt, Artificial Sequence
  Description of Artificial Sequence: Synthetic oligonucleotide
  Antisense strand to SEQ ID NO: 1422826
auuccacccacuaauaauu

SEQ ID NO: 1422828 - RNA, 19 nt, Artificial Sequence
  Description of Artificial Sequence: Synthetic oligonucleotide
  Sense strand starting at position 59 of SEQ ID NO: 1243536
auuauuaguggguggaauc

SEQ ID NO: 1422829 - RNA, 19 nt, Artificial Sequence
  Description of Artificial Sequence: Synthetic oligonucleotide
  Antisense strand to SEQ ID NO: 1422828
gauuccacccacuaauaau

SEQ ID NO: 1422830 - RNA, 19 nt, Artificial Sequence
  Description of Artificial Sequence: Synthetic oligonucleotide
  Sense strand starting at position 60 of SEQ ID NO: 1243536
uuauuaguggguggaaucu

SEQ ID NO: 1422831 - RNA, 19 nt, Artificial Sequence
  Description of Artificial Sequence: Synthetic oligonucleotide
  Antisense strand to SEQ ID NO: 1422830
agauuccacccacuaauaa

SEQ ID NO: 1422832 - RNA, 19 nt, Artificial Sequence
  Description of Artificial Sequence: Synthetic oligonucleotide
  Sense strand starting at position 111 of SEQ ID NO: 1243536
auaaaugacugagauucca

SEQ ID NO: 1422833 - RNA, 19 nt, Artificial Sequence
  Description of Artificial Sequence: Synthetic oligonucleotide
  Antisense strand to SEQ ID NO: 1422832
uggaaucucagucauuuau

SEQ ID NO: 1422834 - RNA, 19 nt, Artificial Sequence
  Description of Artificial Sequence: Synthetic oligonucleotide
  Sense strand starting at position 140 of SEQ ID NO: 1243536
acaauuugcuggcauguca

SEQ ID NO: 1422835 - RNA, 19 nt, Artificial Sequence
  Description of Artificial Sequence: Synthetic oligonucleotide
  Antisense strand to SEQ ID NO: 1422834
ugacaugccagcaaauugu

SEQ ID NO: 1422836 - RNA, 19 nt, Artificial Sequence
  Description of Artificial Sequence: Synthetic oligonucleotide
  Sense strand starting at position 161 of SEQ ID NO: 1243536
gcuuacauggauuacuaua

SEQ ID NO: 1422837 - RNA, 19 nt, Artificial Sequence
  Description of Artificial Sequence: Synthetic oligonucleotide
  Antisense strand to SEQ ID NO: 1422836
uauaguaauccauguaagc

SEQ ID NO: 1422838 - RNA, 19 nt, Artificial Sequence
  Description of Artificial Sequence: Synthetic oligonucleotide
  Sense strand starting at position 255 of SEQ ID NO: 1243536
aacuauagucuuggaggua

SEQ ID NO: 1422839 - RNA, 19 nt, Artificial Sequence
  Description of Artificial Sequence: Synthetic oligonucleotide
  Antisense strand to SEQ ID NO: 1422838
uaccuccaagacuauaguu

SEQ ID NO: 1422840 - RNA, 19 nt, Artificial Sequence
  Description of Artificial Sequence: Synthetic oligonucleotide
  Sense strand starting at position 256 of SEQ ID NO: 1243536
acuauagucuuggagguaa

SEQ ID NO: 1422841 - RNA, 19 nt, Artificial Sequence
  Description of Artificial Sequence: Synthetic oligonucleotide
  Antisense strand to SEQ ID NO: 1422840
uuaccuccaagacuauagu

SEQ ID NO: 1422842 - RNA, 19 nt, Artificial Sequence
  Description of Artificial Sequence: Synthetic oligonucleotide
  Sense strand starting at position 258 of SEQ ID NO: 1243536
uauagucuuggagguaaau

SEQ ID NO: 1422843 - RNA, 19 nt, Artificial Sequence
  Description of Artificial Sequence: Synthetic oligonucleotide
  Antisense strand to SEQ ID NO: 1422842
auuuaccuccaagacuaua

SEQ ID NO: 1422844 - RNA, 19 nt, Artificial Sequence
  Description of Artificial Sequence: Synthetic oligonucleotide
  Sense strand starting at position 260 of SEQ ID NO: 1243536
uagucuuggagguaaaugu

SEQ ID NO: 1422845 - RNA, 19 nt, Artificial Sequence
  Description of Artificial Sequence: Synthetic oligonucleotide
  Antisense strand to SEQ ID NO: 1422844
acauuuaccuccaagacua

SEQ ID NO: 1422846 - RNA, 19 nt, Artificial Sequence
  Description of Artificial Sequence: Synthetic oligonucleotide
  Sense strand starting at position 264 of SEQ ID NO: 1243536
cuuggagguaaaugucaca

SEQ ID NO: 1422847 - RNA, 19 nt, Artificial Sequence
  Description of Artificial Sequence: Synthetic oligonucleotide
  Antisense strand to SEQ ID NO: 1422846
ugugacauuuaccuccaag

SEQ ID NO: 1422848 - RNA, 19 nt, Artificial Sequence
  Description of Artificial Sequence: Synthetic oligonucleotide
  Sense strand starting at position 444 of SEQ ID NO: 1243536
agcaaagucuuaucaaagu

SEQ ID NO: 1422849 - RNA, 19 nt, Artificial Sequence
  Description of Artificial Sequence: Synthetic oligonucleotide
  Antisense strand to SEQ ID NO: 1422848
acuuugauaagacuuugcu

SEQ ID NO: 1422850 - RNA, 19 nt, Artificial Sequence
  Description of Artificial Sequence: Synthetic oligonucleotide
  Sense strand starting at position 585 of SEQ ID NO: 1243536
aaaguaaucucuuccggca

SEQ ID NO: 1422851 - RNA, 19 nt, Artificial Sequence
  Description of Artificial Sequence: Synthetic oligonucleotide
  Antisense strand to SEQ ID NO: 1422850
ugccggaagagauuacuuu

SEQ ID NO: 1422852 - RNA, 19 nt, Artificial Sequence
  Description of Artificial Sequence: Synthetic oligonucleotide
  Sense strand starting at position 821 of SEQ ID NO: 1243536
guuucuaagggucgccaau

SEQ ID NO: 1422853 - RNA, 19 nt, Artificial Sequence
  Description of Artificial Sequence: Synthetic oligonucleotide
  Antisense strand to SEQ ID NO: 1422852
auuggcgacccuuagaaac

SEQ ID NO: 1422854 - RNA, 19 nt, Artificial Sequence
  Description of Artificial Sequence: Synthetic oligonucleotide
  Sense strand starting at position 823 of SEQ ID NO: 1243536
uucuaagggucgccaauaa

SEQ ID NO: 1422855 - RNA, 19 nt, Artificial Sequence
  Description of Artificial Sequence: Synthetic oligonucleotide
  Antisense strand to SEQ ID NO: 1422854
uuauuggcgacccuuagaa

SEQ ID NO: 1422856 - RNA, 19 nt, Artificial Sequence
  Description of Artificial Sequence: Synthetic oligonucleotide
  Sense strand starting at position 1004 of SEQ ID NO: 1243536
gcaugcacguguccauaaa

SEQ ID NO: 1422857 - RNA, 19 nt, Artificial Sequence
  Description of Artificial Sequence: Synthetic oligonucleotide
  Antisense strand to SEQ ID NO: 1422856
uuuauggacacgugcaugc

SEQ ID NO: 1422858 - RNA, 19 nt, Artificial Sequence
  Description of Artificial Sequence: Synthetic oligonucleotide
  Sense strand starting at position 1005 of SEQ ID NO: 1243536
caugcacguguccauaaau

SEQ ID NO: 1422859 - RNA, 19 nt, Artificial Sequence
  Description of Artificial Sequence: Synthetic oligonucleotide
  Antisense strand to SEQ ID NO: 1422858
auuuauggacacgugcaug

SEQ ID NO: 1422860 - RNA, 19 nt, Artificial Sequence
  Description of Artificial Sequence: Synthetic oligonucleotide
  Sense strand starting at position 1014 of SEQ ID NO: 1243536
guccauaaaugagcucaca

SEQ ID NO: 1422861 - RNA, 19 nt, Artificial Sequence
  Description of Artificial Sequence: Synthetic oligonucleotide
  Antisense strand to SEQ ID NO: 1422860
ugugagcucauuuauggac

SEQ ID NO: 1422862 - RNA, 19 nt, Artificial Sequence
  Description of Artificial Sequence: Synthetic oligonucleotide
  Sense strand starting at position 1190 of SEQ ID NO: 1243536
gguaauaaauaccagauuu

SEQ ID NO: 1422863 - RNA, 19 nt, Artificial Sequence
  Description of Artificial Sequence: Synthetic oligonucleotide
  Antisense strand to SEQ ID NO: 1422862
aaaucugguauuuauuacc

SEQ ID NO: 1422864 - RNA, 19 nt, Artificial Sequence
  Description of Artificial Sequence: Synthetic oligonucleotide
  Sense strand starting at position 1227 of SEQ ID NO: 1243536
caauguguguuaucuguca

SEQ ID NO: 1422865 - RNA, 19 nt, Artificial Sequence
  Description of Artificial Sequence: Synthetic oligonucleotide
  Antisense strand to SEQ ID NO: 1422864
ugacagauaacacacauug

SEQ ID NO: 1422866 - RNA, 19 nt, Artificial Sequence
  Description of Artificial Sequence: Synthetic oligonucleotide
  Sense strand starting at position 1271 of SEQ ID NO: 1243536
aggccuuaucgcguuugca

SEQ ID NO: 1422867 - RNA, 19 nt, Artificial Sequence
  Description of Artificial Sequence: Synthetic oligonucleotide
  Antisense strand to SEQ ID NO: 1422866
ugcaaacgcgauaaggccu

SEQ ID NO: 1422868 - RNA, 19 nt, Artificial Sequence
  Description of Artificial Sequence: Synthetic oligonucleotide
  Sense strand starting at position 1272 of SEQ ID NO: 1243536
ggccuuaucgcguuugcag

SEQ ID NO: 1422869 - RNA, 19 nt, Artificial Sequence
  Description of Artificial Sequence: Synthetic oligonucleotide
  Antisense strand to SEQ ID NO: 1422868
cugcaaacgcgauaaggcc

SEQ ID NO: 1422870 - RNA, 19 nt, Artificial Sequence
  Description of Artificial Sequence: Synthetic oligonucleotide
  Sense strand starting at position 2027 of SEQ ID NO: 1243536
cguaguuguggaugaugga

SEQ ID NO: 1422871 - RNA, 19 nt, Artificial Sequence
  Description of Artificial Sequence: Synthetic oligonucleotide
  Antisense strand to SEQ ID NO: 1422870
uccaucauccacaacuacg

SEQ ID NO: 1422872 - RNA, 19 nt, Artificial Sequence
  Description of Artificial Sequence: Synthetic oligonucleotide
  Sense strand starting at position 2033 of SEQ ID NO: 1243536
uguggaugauggagucgau

SEQ ID NO: 1422873 - RNA, 19 nt, Artificial Sequence
  Description of Artificial Sequence: Synthetic oligonucleotide
  Antisense strand to SEQ ID NO: 1422872
aucgacuccaucauccaca

SEQ ID NO: 1422874 - RNA, 19 nt, Artificial Sequence
  Description of Artificial Sequence: Synthetic oligonucleotide
  Sense strand starting at position 2180 of SEQ ID NO: 1243536
gguuguuggccuugaucuc

SEQ ID NO: 1422875 - RNA, 19 nt, Artificial Sequence
  Description of Artificial Sequence: Synthetic oligonucleotide
  Antisense strand to SEQ ID NO: 1422874
gagaucaaggccaacaacc

SEQ ID NO: 1422876 - RNA, 19 nt, Artificial Sequence
  Description of Artificial Sequence: Synthetic oligonucleotide
  Sense strand starting at position 3409 of SEQ ID NO: 1243536
cuggauuucugguugcuuu

SEQ ID NO: 1422877 - RNA, 19 nt, Artificial Sequence
  Description of Artificial Sequence: Synthetic oligonucleotide
  Antisense strand to SEQ ID NO: 1422876
aaagcaaccagaaauccag

SEQ ID NO: 1422878 - RNA, 19 nt, Artificial Sequence
  Description of Artificial Sequence: Synthetic oligonucleotide
  Sense strand starting at position 3434 of SEQ ID NO: 1243536
cgcaaauuugcguggagca

SEQ ID NO: 1422879 - RNA, 19 nt, Artificial Sequence
  Description of Artificial Sequence: Synthetic oligonucleotide
  Antisense strand to SEQ ID NO: 1422878
ugcuccacgcaaauuugcg

SEQ ID NO: 1422880 - RNA, 19 nt, Artificial Sequence
  Description of Artificial Sequence: Synthetic oligonucleotide
  Sense strand starting at position 3435 of SEQ ID NO: 1243536
gcaaauuugcguggagcau

SEQ ID NO: 1422881 - RNA, 19 nt, Artificial Sequence
  Description of Artificial Sequence: Synthetic oligonucleotide
  Antisense strand to SEQ ID NO: 1422880
augcuccacgcaaauuugc

SEQ ID NO: 1422882 - RNA, 19 nt, Artificial Sequence
  Description of Artificial Sequence: Synthetic oligonucleotide
  Sense strand starting at position 3478 of SEQ ID NO: 1243536
ucggccuuccugcuuuauu

SEQ ID NO: 1422883 - RNA, 19 nt, Artificial Sequence
  Description of Artificial Sequence: Synthetic oligonucleotide
  Antisense strand to SEQ ID NO: 1422882
aauaaagcaggaaggccga

SEQ ID NO: 1422884 - RNA, 19 nt, Artificial Sequence
  Description of Artificial Sequence: Synthetic oligonucleotide
  Sense strand starting at position 3479 of SEQ ID NO: 1243536
cggccuuccugcuuuauuu

SEQ ID NO: 1422885 - RNA, 19 nt, Artificial Sequence
  Description of Artificial Sequence: Synthetic oligonucleotide
  Antisense strand to SEQ ID NO: 1422884
aaauaaagcaggaaggccg

SEQ ID NO: 1422886 - RNA, 19 nt, Artificial Sequence
  Description of Artificial Sequence: Synthetic oligonucleotide
  Sense strand starting at position 3522 of SEQ ID NO: 1243536
uggguaucuucgagaaacg

SEQ ID NO: 1422887 - RNA, 19 nt, Artificial Sequence
  Description of Artificial Sequence: Synthetic oligonucleotide
  Antisense strand to SEQ ID NO: 1422886
cguuucucgaagauaccca

SEQ ID NO: 1422888 - RNA, 19 nt, Artificial Sequence
  Description of Artificial Sequence: Synthetic oligonucleotide
  Sense strand starting at position 3588 of SEQ ID NO: 1243536
ugcaaagcugugugaccuu

SEQ ID NO: 1422889 - RNA, 19 nt, Artificial Sequence
  Description of Artificial Sequence: Synthetic oligonucleotide
  Antisense strand to SEQ ID NO: 1422888
aaggucacacagcuuugca

SEQ ID NO: 1422890 - RNA, 19 nt, Artificial Sequence
  Description of Artificial Sequence: Synthetic oligonucleotide
  Sense strand starting at position 3676 of SEQ ID NO: 1243536
ccgagguuugugcgaaggu

SEQ ID NO: 1422891 - RNA, 19 nt, Artificial Sequence
  Description of Artificial Sequence: Synthetic oligonucleotide
  Antisense strand to SEQ ID NO: 1422890
accuucgcacaaaccucgg

SEQ ID NO: 1422892 - RNA, 19 nt, Artificial Sequence
  Description of Artificial Sequence: Synthetic oligonucleotide
  Sense strand starting at position 3678 of SEQ ID NO: 1243536
gagguuugugcgaaggugu

SEQ ID NO: 1422893 - RNA, 19 nt, Artificial Sequence
  Description of Artificial Sequence: Synthetic oligonucleotide
  Antisense strand to SEQ ID NO: 1422892
acaccuucgcacaaaccuc

SEQ ID NO: 1422894 - RNA, 19 nt, Artificial Sequence
  Description of Artificial Sequence: Synthetic oligonucleotide
  Sense strand starting at position 3679 of SEQ ID NO: 1243536
agguuugugcgaagguguu

SEQ ID NO: 1422895 - RNA, 19 nt, Artificial Sequence
  Description of Artificial Sequence: Synthetic oligonucleotide
  Antisense strand to SEQ ID NO: 1422894
aacaccuucgcacaaaccu

SEQ ID NO: 1422896 - RNA, 19 nt, Artificial Sequence
  Description of Artificial Sequence: Synthetic oligonucleotide
  Sense strand starting at position 3763 of SEQ ID NO: 1243536
ggugcaagcuuucuccaaa

SEQ ID NO: 1422897 - RNA, 19 nt, Artificial Sequence
  Description of Artificial Sequence: Synthetic oligonucleotide
  Antisense strand to SEQ ID NO: 1422896
uuuggagaaagcuugcacc

SEQ ID NO: 1422898 - RNA, 19 nt, Artificial Sequence
  Description of Artificial Sequence: Synthetic oligonucleotide
  Sense strand starting at position 69 of SEQ ID NO: 1243537
caguguuugcaugauaaua

SEQ ID NO: 1422899 - RNA, 19 nt, Artificial Sequence
  Description of Artificial Sequence: Synthetic oligonucleotide
  Antisense strand to SEQ ID NO: 1422898
uauuaucaugcaaacacug

SEQ ID NO: 1422900 - RNA, 19 nt, Artificial Sequence
  Description of Artificial Sequence: Synthetic oligonucleotide
  Sense strand starting at position 126 of SEQ ID NO: 1243537
ggcacuguuucaguggaau

SEQ ID NO: 1422901 - RNA, 19 nt, Artificial Sequence
  Description of Artificial Sequence: Synthetic oligonucleotide
  Antisense strand to SEQ ID NO: 1422900
auuccacugaaacagugcc

SEQ ID NO: 1422902 - RNA, 19 nt, Artificial Sequence
  Description of Artificial Sequence: Synthetic oligonucleotide
  Sense strand starting at position 189 of SEQ ID NO: 1243537
uuccaacuguucuuguaga

SEQ ID NO: 1422903 - RNA, 19 nt, Artificial Sequence
  Description of Artificial Sequence: Synthetic oligonucleotide
  Antisense strand to SEQ ID NO: 1422902
ucuacaagaacaguuggaa

SEQ ID NO: 1422904 - RNA, 19 nt, Artificial Sequence
  Description of Artificial Sequence: Synthetic oligonucleotide
  Sense strand starting at position 199 of SEQ ID NO: 1243537
ucuuguagaucccuguagu

SEQ ID NO: 1422905 - RNA, 19 nt, Artificial Sequence
  Description of Artificial Sequence: Synthetic oligonucleotide
  Antisense strand to SEQ ID NO: 1422904
acuacagggaucuacaaga

SEQ ID NO: 1422906 - RNA, 19 nt, Artificial Sequence
  Description of Artificial Sequence: Synthetic oligonucleotide
  Sense strand starting at position 200 of SEQ ID NO: 1243537
cuuguagaucccuguaguc

SEQ ID NO: 1422907 - RNA, 19 nt, Artificial Sequence
  Description of Artificial Sequence: Synthetic oligonucleotide
  Antisense strand to SEQ ID NO: 1422906
gacuacagggaucuacaag

SEQ ID NO: 1422908 - RNA, 19 nt, Artificial Sequence
  Description of Artificial Sequence: Synthetic oligonucleotide
  Sense strand starting at position 202 of SEQ ID NO: 1243537
uguagaucccuguagucac

SEQ ID NO: 1422909 - RNA, 19 nt, Artificial Sequence
  Description of Artificial Sequence: Synthetic oligonucleotide
  Antisense strand to SEQ ID NO: 1422908
gugacuacagggaucuaca

SEQ ID NO: 1422910 - RNA, 19 nt, Artificial Sequence
  Description of Artificial Sequence: Synthetic oligonucleotide
  Sense strand starting at position 209 of SEQ ID NO: 1243537
cccuguagucacugauuuc

SEQ ID NO: 1422911 - RNA, 19 nt, Artificial Sequence
  Description of Artificial Sequence: Synthetic oligonucleotide
  Antisense strand to SEQ ID NO: 1422910
gaaaucagugacuacaggg

SEQ ID NO: 1422912 - RNA, 19 nt, Artificial Sequence
  Description of Artificial Sequence: Synthetic oligonucleotide
  Sense strand starting at position 336 of SEQ ID NO: 1243537
gcuagauuggcagaacuag

SEQ ID NO: 1422913 - RNA, 19 nt, Artificial Sequence
  Description of Artificial Sequence: Synthetic oligonucleotide
  Antisense strand to SEQ ID NO: 1422912
cuaguucugccaaucuagc

SEQ ID NO: 1422914 - RNA, 19 nt, Artificial Sequence
  Description of Artificial Sequence: Synthetic oligonucleotide
  Sense strand starting at position 365 of SEQ ID NO: 1243537
aacugacuucccgguaugu

SEQ ID NO: 1422915 - RNA, 19 nt, Artificial Sequence
  Description of Artificial Sequence: Synthetic oligonucleotide
  Antisense strand to SEQ ID NO: 1422914
acauaccgggaagucaguu

SEQ ID NO: 1422916 - RNA, 19 nt, Artificial Sequence
  Description of Artificial Sequence: Synthetic oligonucleotide
  Sense strand starting at position 367 of SEQ ID NO: 1243537
cugacuucccgguaugucu

SEQ ID NO: 1422917 - RNA, 19 nt, Artificial Sequence
  Description of Artificial Sequence: Synthetic oligonucleotide
  Antisense strand to SEQ ID NO: 1422916
agacauaccgggaagucag

SEQ ID NO: 1422918 - RNA, 19 nt, Artificial Sequence
  Description of Artificial Sequence: Synthetic oligonucleotide
  Sense strand starting at position 374 of SEQ ID NO: 1243537
cccgguaugucugucacaa

SEQ ID NO: 1422919 - RNA, 19 nt, Artificial Sequence
  Description of Artificial Sequence: Synthetic oligonucleotide
  Antisense strand to SEQ ID NO: 1422918
uugugacagacauaccggg

SEQ ID NO: 1422920 - RNA, 19 nt, Artificial Sequence
  Description of Artificial Sequence: Synthetic oligonucleotide
  Sense strand starting at position 408 of SEQ ID NO: 1243537
gccagagugaagugagcuu

SEQ ID NO: 1422921 - RNA, 19 nt, Artificial Sequence
  Description of Artificial Sequence: Synthetic oligonucleotide
  Antisense strand to SEQ ID NO: 1422920
aagcucacuucacucuggc

SEQ ID NO: 1422922 - RNA, 19 nt, Artificial Sequence
  Description of Artificial Sequence: Synthetic oligonucleotide
  Sense strand starting at position 432 of SEQ ID NO: 1243537
acgugaaacucauccaaac

SEQ ID NO: 1422923 - RNA, 19 nt, Artificial Sequence
  Description of Artificial Sequence: Synthetic oligonucleotide
  Antisense strand to SEQ ID NO: 1422922
guuuggaugaguuucacgu

SEQ ID NO: 1422924 - RNA, 19 nt, Artificial Sequence
  Description of Artificial Sequence: Synthetic oligonucleotide
  Sense strand starting at position 444 of SEQ ID NO: 1243537
uccaaacucuucuuuggga

SEQ ID NO: 1422925 - RNA, 19 nt, Artificial Sequence
  Description of Artificial Sequence: Synthetic oligonucleotide
  Antisense strand to SEQ ID NO: 1422924
ucccaaagaagaguuugga

SEQ ID NO: 1422926 - RNA, 19 nt, Artificial Sequence
  Description of Artificial Sequence: Synthetic oligonucleotide
  Sense strand starting at position 1429 of SEQ ID NO: 1243537
uuuagucauguaugacauc

SEQ ID NO: 1422927 - RNA, 19 nt, Artificial Sequence
  Description of Artificial Sequence: Synthetic oligonucleotide
  Antisense strand to SEQ ID NO: 1422926
gaugucauacaugacuaaa

SEQ ID NO: 1422928 - RNA, 19 nt, Artificial Sequence
  Description of Artificial Sequence: Synthetic oligonucleotide
  Sense strand starting at position 1544 of SEQ ID NO: 1243537
agaguaagcgcucaaggaa

SEQ ID NO: 1422929 - RNA, 19 nt, Artificial Sequence
  Description of Artificial Sequence: Synthetic oligonucleotide
  Antisense strand to SEQ ID NO: 1422928
uuccuugagcgcuuacucu

SEQ ID NO: 1422930 - RNA, 19 nt, Artificial Sequence
  Description of Artificial Sequence: Synthetic oligonucleotide
  Sense strand starting at position 1564 of SEQ ID NO: 1243537
aucugugaacuugaugcau

SEQ ID NO: 1422931 - RNA, 19 nt, Artificial Sequence
  Description of Artificial Sequence: Synthetic oligonucleotide
  Antisense strand to SEQ ID NO: 1422930
augcaucaaguucacagau

SEQ ID NO: 1422932 - RNA, 19 nt, Artificial Sequence
  Description of Artificial Sequence: Synthetic oligonucleotide
  Sense strand starting at position 1568 of SEQ ID NO: 1243537
gugaacuugaugcaugcua

SEQ ID NO: 1422933 - RNA, 19 nt, Artificial Sequence
  Description of Artificial Sequence: Synthetic oligonucleotide
  Antisense strand to SEQ ID NO: 1422932
uagcaugcaucaaguucac

SEQ ID NO: 1422934 - RNA, 19 nt, Artificial Sequence
  Description of Artificial Sequence: Synthetic oligonucleotide
  Sense strand starting at position 1918 of SEQ ID NO: 1243537
cggugaguccucgagcucu

SEQ ID NO: 1422935 - RNA, 19 nt, Artificial Sequence
  Description of Artificial Sequence: Synthetic oligonucleotide
  Antisense strand to SEQ ID NO: 1422934
agagcucgaggacucaccg

SEQ ID NO: 1422936 - RNA, 19 nt, Artificial Sequence
  Description of Artificial Sequence: Synthetic oligonucleotide
  Sense strand starting at position 2167 of SEQ ID NO: 1243537
ggcccauucccagauucuu

SEQ ID NO: 1422937 - RNA, 19 nt, Artificial Sequence
  Description of Artificial Sequence: Synthetic oligonucleotide
  Antisense strand to SEQ ID NO: 1422936
aagaaucugggaaugggcc

SEQ ID NO: 1422938 - RNA, 19 nt, Artificial Sequence
  Description of Artificial Sequence: Synthetic oligonucleotide
  Sense strand starting at position 2186 of SEQ ID NO: 1243537
ccuaaccuuucgucuagaa

SEQ ID NO: 1422939 - RNA, 19 nt, Artificial Sequence
  Description of Artificial Sequence: Synthetic oligonucleotide
  Antisense strand to SEQ ID NO: 1422938
uucuagacgaaagguuagg

SEQ ID NO: 1422940 - RNA, 19 nt, Artificial Sequence
  Description of Artificial Sequence: Synthetic oligonucleotide
  Sense strand starting at position 2275 of SEQ ID NO: 1243537
uccaguuucuauccugaga

SEQ ID NO: 1422941 - RNA, 19 nt, Artificial Sequence
  Description of Artificial Sequence: Synthetic oligonucleotide
  Antisense strand to SEQ ID NO: 1422940
ucucaggauagaaacugga

SEQ ID NO: 1422942 - RNA, 19 nt, Artificial Sequence
  Description of Artificial Sequence: Synthetic oligonucleotide
  Sense strand starting at position 2278 of SEQ ID NO: 1243537
aguuucuauccugagacca

SEQ ID NO: 1422943 - RNA, 19 nt, Artificial Sequence
  Description of Artificial Sequence: Synthetic oligonucleotide
  Antisense strand to SEQ ID NO: 1422942
uggucucaggauagaaacu

SEQ ID NO: 1422944 - RNA, 19 nt, Artificial Sequence
  Description of Artificial Sequence: Synthetic oligonucleotide
  Sense strand starting at position 2295 of SEQ ID NO: 1243537
caccgcucucaagaagaga

SEQ ID NO: 1422945 - RNA, 19 nt, Artificial Sequence
  Description of Artificial Sequence: Synthetic oligonucleotide
  Antisense strand to SEQ ID NO: 1422944
ucucuucuugagagcggug

SEQ ID NO: 1422946 - RNA, 19 nt, Artificial Sequence
  Description of Artificial Sequence: Synthetic oligonucleotide
  Sense strand starting at position 2351 of SEQ ID NO: 1243537
gcguaugugcuggaacauc

SEQ ID NO: 1422947 - RNA, 19 nt, Artificial Sequence
  Description of Artificial Sequence: Synthetic oligonucleotide
  Antisense strand to SEQ ID NO: 1422946
gauguuccagcacauacgc

SEQ ID NO: 1422948 - RNA, 19 nt, Artificial Sequence
  Description of Artificial Sequence: Synthetic oligonucleotide
  Sense strand starting at position 2360 of SEQ ID NO: 1243537
cuggaacauccaugauauc

SEQ ID NO: 1422949 - RNA, 19 nt, Artificial Sequence
  Description of Artificial Sequence: Synthetic oligonucleotide
  Antisense strand to SEQ ID NO: 1422948
gauaucauggauguuccag

SEQ ID NO: 1422950 - RNA, 19 nt, Artificial Sequence
  Description of Artificial Sequence: Synthetic oligonucleotide
  Sense strand starting at position 2369 of SEQ ID NO: 1243537
ccaugauaucccgacccuu

SEQ ID NO: 1422951 - RNA, 19 nt, Artificial Sequence
  Description of Artificial Sequence: Synthetic oligonucleotide
  Antisense strand to SEQ ID NO: 1422950
aagggucgggauaucaugg

SEQ ID NO: 1422952 - RNA, 19 nt, Artificial Sequence
  Description of Artificial Sequence: Synthetic oligonucleotide
  Sense strand starting at position 2470 of SEQ ID NO: 1243537
gcgagaagcguaagagcuu

SEQ ID NO: 1422953 - RNA, 19 nt, Artificial Sequence
  Description of Artificial Sequence: Synthetic oligonucleotide
  Antisense strand to SEQ ID NO: 1422952
aagcucuuacgcuucucgc

SEQ ID NO: 1422954 - RNA, 19 nt, Artificial Sequence
  Description of Artificial Sequence: Synthetic oligonucleotide
  Sense strand starting at position 2550 of SEQ ID NO: 1243537
cccaaucuuccaggcugau

SEQ ID NO: 1422955 - RNA, 19 nt, Artificial Sequence
  Description of Artificial Sequence: Synthetic oligonucleotide
  Antisense strand to SEQ ID NO: 1422954
aucagccuggaagauuggg

SEQ ID NO: 1422956 - RNA, 19 nt, Artificial Sequence
  Description of Artificial Sequence: Synthetic oligonucleotide
  Sense strand starting at position 2905 of SEQ ID NO: 1243537
uuagcuagguaauuccaaa

SEQ ID NO: 1422957 - RNA, 19 nt, Artificial Sequence
  Description of Artificial Sequence: Synthetic oligonucleotide
  Antisense strand to SEQ ID NO: 1422956
uuuggaauuaccuagcuaa

SEQ ID NO: 1422958 - RNA, 19 nt, Artificial Sequence
  Description of Artificial Sequence: Synthetic oligonucleotide
  Sense strand starting at position 3021 of SEQ ID NO: 1243537
ugcuccaguccacaaagau

SEQ ID NO: 1422959 - RNA, 19 nt, Artificial Sequence
  Description of Artificial Sequence: Synthetic oligonucleotide
  Antisense strand to SEQ ID NO: 1422958
aucuuuguggacuggagca

SEQ ID NO: 1422960 - RNA, 19 nt, Artificial Sequence
  Description of Artificial Sequence: Synthetic oligonucleotide
  Sense strand starting at position 3162 of SEQ ID NO: 1243537
cugggagacuucccugcua

SEQ ID NO: 1422961 - RNA, 19 nt, Artificial Sequence
  Description of Artificial Sequence: Synthetic oligonucleotide
  Antisense strand to SEQ ID NO: 1422960
uagcagggaagucucccag

SEQ ID NO: 1422962 - RNA, 19 nt, Artificial Sequence
  Description of Artificial Sequence: Synthetic oligonucleotide
  Sense strand starting at position 3164 of SEQ ID NO: 1243537
gggagacuucccugcuaac

SEQ ID NO: 1422963 - RNA, 19 nt, Artificial Sequence
  Description of Artificial Sequence: Synthetic oligonucleotide
  Antisense strand to SEQ ID NO: 1422962
guuagcagggaagucuccc

SEQ ID NO: 1422964 - RNA, 19 nt, Artificial Sequence
  Description of Artificial Sequence: Synthetic oligonucleotide
  Sense strand starting at position 3511 of SEQ ID NO: 1243537
ugagauaaauaucaaugcu

SEQ ID NO: 1422965 - RNA, 19 nt, Artificial Sequence
  Description of Artificial Sequence: Synthetic oligonucleotide
  Antisense strand to SEQ ID NO: 1422964
agcauugauauuuaucuca

SEQ ID NO: 1422966 - RNA, 19 nt, Artificial Sequence
  Description of Artificial Sequence: Synthetic oligonucleotide
  Sense strand starting at position 3543 of SEQ ID NO: 1243537
aguacaagcugacuacuua

SEQ ID NO: 1422967 - RNA, 19 nt, Artificial Sequence
  Description of Artificial Sequence: Synthetic oligonucleotide
  Antisense strand to SEQ ID NO: 1422966
uaaguagucagcuuguacu

SEQ ID NO: 1422968 - RNA, 19 nt, Artificial Sequence
  Description of Artificial Sequence: Synthetic oligonucleotide
  Sense strand starting at position 3544 of SEQ ID NO: 1243537
guacaagcugacuacuuaa

SEQ ID NO: 1422969 - RNA, 19 nt, Artificial Sequence
  Description of Artificial Sequence: Synthetic oligonucleotide
  Antisense strand to SEQ ID NO: 1422968
uuaaguagucagcuuguac

SEQ ID NO: 1422970 - RNA, 19 nt, Artificial Sequence
  Description of Artificial Sequence: Synthetic oligonucleotide
  Sense strand starting at position 3845 of SEQ ID NO: 1243537
ucgggaguucaagauugca

SEQ ID NO: 1422971 - RNA, 19 nt, Artificial Sequence
  Description of Artificial Sequence: Synthetic oligonucleotide
  Antisense strand to SEQ ID NO: 1422970
ugcaaucuugaacucccga

SEQ ID NO: 1422972 - RNA, 19 nt, Artificial Sequence
  Description of Artificial Sequence: Synthetic oligonucleotide
  Sense strand starting at position 3864 of SEQ ID NO: 1243537
gugaauuacgaucaugcca

SEQ ID NO: 1422973 - RNA, 19 nt, Artificial Sequence
  Description of Artificial Sequence: Synthetic oligonucleotide
  Antisense strand to SEQ ID NO: 1422972
uggcaugaucguaauucac

SEQ ID NO: 1422974 - RNA, 19 nt, Artificial Sequence
  Description of Artificial Sequence: Synthetic oligonucleotide
  Sense strand starting at position 3897 of SEQ ID NO: 1243537
gggugaaaguaagaucuua

SEQ ID NO: 1422975 - RNA, 19 nt, Artificial Sequence
  Description of Artificial Sequence: Synthetic oligonucleotide
  Antisense strand to SEQ ID NO: 1422974
uaagaucuuacuuucaccc

SEQ ID NO: 1422976 - RNA, 19 nt, Artificial Sequence
  Description of Artificial Sequence: Synthetic oligonucleotide
  Sense strand starting at position 3905 of SEQ ID NO: 1243537
guaagaucuuaucucucag

SEQ ID NO: 1422977 - RNA, 19 nt, Artificial Sequence
  Description of Artificial Sequence: Synthetic oligonucleotide
  Antisense strand to SEQ ID NO: 1422976
cugagagauaagaucuuac

SEQ ID NO: 1422978 - RNA, 19 nt, Artificial Sequence
  Description of Artificial Sequence: Synthetic oligonucleotide
  Sense strand starting at position 565 of SEQ ID NO: 1243538
guggcaugaucucaaacuc

SEQ ID NO: 1422979 - RNA, 19 nt, Artificial Sequence
  Description of Artificial Sequence: Synthetic oligonucleotide
  Antisense strand to SEQ ID NO: 1422978
gaguuugagaucaugccac

SEQ ID NO: 1422980 - RNA, 19 nt, Artificial Sequence
  Description of Artificial Sequence: Synthetic oligonucleotide
  Sense strand starting at position 952 of SEQ ID NO: 1243538
gauaaauacgugcgcuuaa

SEQ ID NO: 1422981 - RNA, 19 nt, Artificial Sequence
  Description of Artificial Sequence: Synthetic oligonucleotide
  Antisense strand to SEQ ID NO: 1422980
uuaagcgcacguauuuauc

SEQ ID NO: 1422982 - RNA, 19 nt, Artificial Sequence
  Description of Artificial Sequence: Synthetic oligonucleotide
  Sense strand starting at position 954 of SEQ ID NO: 1243538
uaaauacgugcgcuuaagu

SEQ ID NO: 1422983 - RNA, 19 nt, Artificial Sequence
  Description of Artificial Sequence: Synthetic oligonucleotide
  Antisense strand to SEQ ID NO: 1422982
acuuaagcgcacguauuua

SEQ ID NO: 1422984 - RNA, 19 nt, Artificial Sequence
  Description of Artificial Sequence: Synthetic oligonucleotide
  Sense strand starting at position 964 of SEQ ID NO: 1243538
cgcuuaagugcauacacua

SEQ ID NO: 1422985 - RNA, 19 nt, Artificial Sequence
  Description of Artificial Sequence: Synthetic oligonucleotide
  Antisense strand to SEQ ID NO: 1422984
uaguguaugcacuuaagcg

SEQ ID NO: 1422986 - RNA, 19 nt, Artificial Sequence
  Description of Artificial Sequence: Synthetic oligonucleotide
  Sense strand starting at position 1009 of SEQ ID NO: 1243538
cagcgauuugcccagcacu

SEQ ID NO: 1422987 - RNA, 19 nt, Artificial Sequence
  Description of Artificial Sequence: Synthetic oligonucleotide
  Antisense strand to SEQ ID NO: 1422986
agugcugggcaaaucgcug

SEQ ID NO: 1422988 - RNA, 19 nt, Artificial Sequence
  Description of Artificial Sequence: Synthetic oligonucleotide
  Sense strand starting at position 1012 of SEQ ID NO: 1243538
cgauuugcccagcacugua

SEQ ID NO: 1422989 - RNA, 19 nt, Artificial Sequence
  Description of Artificial Sequence: Synthetic oligonucleotide
  Antisense strand to SEQ ID NO: 1422988
uacagugcugggcaaaucg

SEQ ID NO: 1422990 - RNA, 19 nt, Artificial Sequence
  Description of Artificial Sequence: Synthetic oligonucleotide
  Sense strand starting at position 1130 of SEQ ID NO: 1243538
gcuaauaaagugugucuau

SEQ ID NO: 1422991 - RNA, 19 nt, Artificial Sequence
  Description of Artificial Sequence: Synthetic oligonucleotide
  Antisense strand to SEQ ID NO: 1422990
auagacacacuuuauuagc

SEQ ID NO: 1422992 - RNA, 19 nt, Artificial Sequence
  Description of Artificial Sequence: Synthetic oligonucleotide
  Sense strand starting at position 1131 of SEQ ID NO: 1243538
cuaauaaagugugucuauc

SEQ ID NO: 1422993 - RNA, 19 nt, Artificial Sequence
  Description of Artificial Sequence: Synthetic oligonucleotide
  Antisense strand to SEQ ID NO: 1422992
gauagacacacuuuauuag

SEQ ID NO: 1422994 - RNA, 19 nt, Artificial Sequence
  Description of Artificial Sequence: Synthetic oligonucleotide
  Sense strand starting at position 1142 of SEQ ID NO: 1243538
ugucuaucuaacugagugu

SEQ ID NO: 1422995 - RNA, 19 nt, Artificial Sequence
  Description of Artificial Sequence: Synthetic oligonucleotide
  Antisense strand to SEQ ID NO: 1422994
acacucaguuagauagaca

SEQ ID NO: 1422996 - RNA, 19 nt, Artificial Sequence
  Description of Artificial Sequence: Synthetic oligonucleotide
  Sense strand starting at position 1146 of SEQ ID NO: 1243538
uaucuaacugagugugaca

SEQ ID NO: 1422997 - RNA, 19 nt, Artificial Sequence
  Description of Artificial Sequence: Synthetic oligonucleotide
  Antisense strand to SEQ ID NO: 1422996
ugucacacucaguuagaua

SEQ ID NO: 1422998 - RNA, 19 nt, Artificial Sequence
  Description of Artificial Sequence: Synthetic oligonucleotide
  Sense strand starting at position 1148 of SEQ ID NO: 1243538
ucuaacugagugugacaaa

SEQ ID NO: 1422999 - RNA, 19 nt, Artificial Sequence
  Description of Artificial Sequence: Synthetic oligonucleotide
  Antisense strand to SEQ ID NO: 1422998
uuugucacacucaguuaga

SEQ ID NO: 1423000 - RNA, 19 nt, Artificial Sequence
  Description of Artificial Sequence: Synthetic oligonucleotide
  Sense strand starting at position 1151 of SEQ ID NO: 1243538
aacugagugugacaaaguu

SEQ ID NO: 1423001 - RNA, 19 nt, Artificial Sequence
  Description of Artificial Sequence: Synthetic oligonucleotide
  Antisense strand to SEQ ID NO: 1423000
aacuuugucacacucaguu

SEQ ID NO: 1423002 - RNA, 19 nt, Artificial Sequence
  Description of Artificial Sequence: Synthetic oligonucleotide
  Sense strand starting at position 1157 of SEQ ID NO: 1243538
gugugacaaaguuguagaa

SEQ ID NO: 1423003 - RNA, 19 nt, Artificial Sequence
  Description of Artificial Sequence: Synthetic oligonucleotide
  Antisense strand to SEQ ID NO: 1423002
uucuacaacuuugucacac

SEQ ID NO: 1423004 - RNA, 19 nt, Artificial Sequence
  Description of Artificial Sequence: Synthetic oligonucleotide
  Sense strand starting at position 1281 of SEQ ID NO: 1243538
gaagauaacuaggaagaug

SEQ ID NO: 1423005 - RNA, 19 nt, Artificial Sequence
  Description of Artificial Sequence: Synthetic oligonucleotide
  Antisense strand to SEQ ID NO: 1423004
caucuuccuaguuaucuuc

SEQ ID NO: 1423006 - RNA, 19 nt, Artificial Sequence
  Description of Artificial Sequence: Synthetic oligonucleotide
  Sense strand starting at position 1358 of SEQ ID NO: 1243538
gugcgagacugcucauugu

SEQ ID NO: 1423007 - RNA, 19 nt, Artificial Sequence
  Description of Artificial Sequence: Synthetic oligonucleotide
  Antisense strand to SEQ ID NO: 1423006
acaaugagcagucucgcac

SEQ ID NO: 1423008 - RNA, 19 nt, Artificial Sequence
  Description of Artificial Sequence: Synthetic oligonucleotide
  Sense strand starting at position 1361 of SEQ ID NO: 1243538
cgagacugcucauuguaau

SEQ ID NO: 1423009 - RNA, 19 nt, Artificial Sequence
  Description of Artificial Sequence: Synthetic oligonucleotide
  Antisense strand to SEQ ID NO: 1423008
auuacaaugagcagucucg

SEQ ID NO: 1423010 - RNA, 19 nt, Artificial Sequence
  Description of Artificial Sequence: Synthetic oligonucleotide
  Sense strand starting at position 1362 of SEQ ID NO: 1243538
gagacugcucauuguaaua

SEQ ID NO: 1423011 - RNA, 19 nt, Artificial Sequence
  Description of Artificial Sequence: Synthetic oligonucleotide
  Antisense strand to SEQ ID NO: 1423010
uauuacaaugagcagucuc

SEQ ID NO: 1423012 - RNA, 19 nt, Artificial Sequence
  Description of Artificial Sequence: Synthetic oligonucleotide
  Sense strand starting at position 1417 of SEQ ID NO: 1243538
guuuauagcugcucuguaa

SEQ ID NO: 1423013 - RNA, 19 nt, Artificial Sequence
  Description of Artificial Sequence: Synthetic oligonucleotide
  Antisense strand to SEQ ID NO: 1423012
uuacagagcagcuauaaac

SEQ ID NO: 1423014 - RNA, 19 nt, Artificial Sequence
  Description of Artificial Sequence: Synthetic oligonucleotide
  Sense strand starting at position 1445 of SEQ ID NO: 1243538
cgucauuagccacacagaa

SEQ ID NO: 1423015 - RNA, 19 nt, Artificial Sequence
  Description of Artificial Sequence: Synthetic oligonucleotide
  Antisense strand to SEQ ID NO: 1423014
uucuguguggcuaaugacg

SEQ ID NO: 1423016 - RNA, 19 nt, Artificial Sequence
  Description of Artificial Sequence: Synthetic oligonucleotide
  Sense strand starting at position 1529 of SEQ ID NO: 1243538
gcccuaucccgagagagca

SEQ ID NO: 1423017 - RNA, 19 nt, Artificial Sequence
  Description of Artificial Sequence: Synthetic oligonucleotide
  Antisense strand to SEQ ID NO: 1423016
ugcucucucgggauagggc

SEQ ID NO: 1423018 - RNA, 19 nt, Artificial Sequence
  Description of Artificial Sequence: Synthetic oligonucleotide
  Sense strand starting at position 2312 of SEQ ID NO: 1243538
uccaguggccuguacuaua

SEQ ID NO: 1423019 - RNA, 19 nt, Artificial Sequence
  Description of Artificial Sequence: Synthetic oligonucleotide
  Antisense strand to SEQ ID NO: 1423018
uauaguacaggccacugga

SEQ ID NO: 1423020 - RNA, 19 nt, Artificial Sequence
  Description of Artificial Sequence: Synthetic oligonucleotide
  Sense strand starting at position 2377 of SEQ ID NO: 1243538
ggaaauggcugagccagaa

SEQ ID NO: 1423021 - RNA, 19 nt, Artificial Sequence
  Description of Artificial Sequence: Synthetic oligonucleotide
  Antisense strand to SEQ ID NO: 1423020
uucuggcucagccauuucc

SEQ ID NO: 1423022 - RNA, 19 nt, Artificial Sequence
  Description of Artificial Sequence: Synthetic oligonucleotide
  Sense strand starting at position 2528 of SEQ ID NO: 1243538
agcccuaaguguuugaaag

SEQ ID NO: 1423023 - RNA, 19 nt, Artificial Sequence
  Description of Artificial Sequence: Synthetic oligonucleotide
  Antisense strand to SEQ ID NO: 1423022
cuuucaaacacuuagggcu

SEQ ID NO: 1423024 - RNA, 19 nt, Artificial Sequence
  Description of Artificial Sequence: Synthetic oligonucleotide
  Sense strand starting at position 2529 of SEQ ID NO: 1243538
gcccuaaguguuugaaagu

SEQ ID NO: 1423025 - RNA, 19 nt, Artificial Sequence
  Description of Artificial Sequence: Synthetic oligonucleotide
  Antisense strand to SEQ ID NO: 1423024
acuuucaaacacuuagggc

SEQ ID NO: 1423026 - RNA, 19 nt, Artificial Sequence
  Description of Artificial Sequence: Synthetic oligonucleotide
  Sense strand starting at position 2530 of SEQ ID NO: 1243538
cccuaaguguuugaaagua

SEQ ID NO: 1423027 - RNA, 19 nt, Artificial Sequence
  Description of Artificial Sequence: Synthetic oligonucleotide
  Antisense strand to SEQ ID NO: 1423026
uacuuucaaacacuuaggg

SEQ ID NO: 1423028 - RNA, 19 nt, Artificial Sequence
  Description of Artificial Sequence: Synthetic oligonucleotide
  Sense strand starting at position 2693 of SEQ ID NO: 1243538
cauaaauuagccggaugua

SEQ ID NO: 1423029 - RNA, 19 nt, Artificial Sequence
  Description of Artificial Sequence: Synthetic oligonucleotide
  Antisense strand to SEQ ID NO: 1423028
uacauccggcuaauuuaug

SEQ ID NO: 1423030 - RNA, 19 nt, Artificial Sequence
  Description of Artificial Sequence: Synthetic oligonucleotide
  Sense strand starting at position 2936 of SEQ ID NO: 1243538
acucauuaaugaugguaua

SEQ ID NO: 1423031 - RNA, 19 nt, Artificial Sequence
  Description of Artificial Sequence: Synthetic oligonucleotide
  Antisense strand to SEQ ID NO: 1423030
uauaccaucauuaaugagu

SEQ ID NO: 1423032 - RNA, 19 nt, Artificial Sequence
  Description of Artificial Sequence: Synthetic oligonucleotide
  Sense strand starting at position 2937 of SEQ ID NO: 1243538
cucauuaaugaugguauau

SEQ ID NO: 1423033 - RNA, 19 nt, Artificial Sequence
  Description of Artificial Sequence: Synthetic oligonucleotide
  Antisense strand to SEQ ID NO: 1423032
auauaccaucauuaaugag

SEQ ID NO: 1423034 - RNA, 19 nt, Artificial Sequence
  Description of Artificial Sequence: Synthetic oligonucleotide
  Sense strand starting at position 2968 of SEQ ID NO: 1243538
acuagagcucuagauagcu

SEQ ID NO: 1423035 - RNA, 19 nt, Artificial Sequence
  Description of Artificial Sequence: Synthetic oligonucleotide
  Antisense strand to SEQ ID NO: 1423034
agcuaucuagagcucuagu

SEQ ID NO: 1423036 - RNA, 19 nt, Artificial Sequence
  Description of Artificial Sequence: Synthetic oligonucleotide
  Sense strand starting at position 3166 of SEQ ID NO: 1243538
ucgaaacuauccuggucaa

SEQ ID NO: 1423037 - RNA, 19 nt, Artificial Sequence
  Description of Artificial Sequence: Synthetic oligonucleotide
  Antisense strand to SEQ ID NO: 1423036
uugaccaggauaguuucga

SEQ ID NO: 1423038 - RNA, 19 nt, Artificial Sequence
  Description of Artificial Sequence: Synthetic oligonucleotide
  Sense strand starting at position 3167 of SEQ ID NO: 1243538
cgaaacuauccuggucaac

SEQ ID NO: 1423039 - RNA, 19 nt, Artificial Sequence
  Description of Artificial Sequence: Synthetic oligonucleotide
  Antisense strand to SEQ ID NO: 1423038
guugaccaggauaguuucg

SEQ ID NO: 1423040 - RNA, 19 nt, Artificial Sequence
  Description of Artificial Sequence: Synthetic oligonucleotide
  Sense strand starting at position 3169 of SEQ ID NO: 1243538
aaacuauccuggucaacgu

SEQ ID NO: 1423041 - RNA, 19 nt, Artificial Sequence
  Description of Artificial Sequence: Synthetic oligonucleotide
  Antisense strand to SEQ ID NO: 1423040
acguugaccaggauaguuu

SEQ ID NO: 1423042 - RNA, 19 nt, Artificial Sequence
  Description of Artificial Sequence: Synthetic oligonucleotide
  Sense strand starting at position 3277 of SEQ ID NO: 1243538
ggagaaaccgcuugagaac

SEQ ID NO: 1423043 - RNA, 19 nt, Artificial Sequence
  Description of Artificial Sequence: Synthetic oligonucleotide
  Antisense strand to SEQ ID NO: 1423042
guucucaagcgguuucucc

SEQ ID NO: 1423044 - RNA, 19 nt, Artificial Sequence
  Description of Artificial Sequence: Synthetic oligonucleotide
  Sense strand starting at position 3413 of SEQ ID NO: 1243538
auaugccucuucgacagaa

SEQ ID NO: 1423045 - RNA, 19 nt, Artificial Sequence
  Description of Artificial Sequence: Synthetic oligonucleotide
  Antisense strand to SEQ ID NO: 1423044
uucugucgaagaggcauau

SEQ ID NO: 1423046 - RNA, 19 nt, Artificial Sequence
  Description of Artificial Sequence: Synthetic oligonucleotide
  Sense strand starting at position 3544 of SEQ ID NO: 1243538
agacucuucuuagcccaga

SEQ ID NO: 1423047 - RNA, 19 nt, Artificial Sequence
  Description of Artificial Sequence: Synthetic oligonucleotide
  Antisense strand to SEQ ID NO: 1423046
ucugggcuaagaagagucu

SEQ ID NO: 1423048 - RNA, 19 nt, Artificial Sequence
  Description of Artificial Sequence: Synthetic oligonucleotide
  Sense strand starting at position 3658 of SEQ ID NO: 1243538
acuccuuuguccugucauu

SEQ ID NO: 1423049 - RNA, 19 nt, Artificial Sequence
  Description of Artificial Sequence: Synthetic oligonucleotide
  Antisense strand to SEQ ID NO: 1423048
aaugacaggacaaaggagu

SEQ ID NO: 1423050 - RNA, 19 nt, Artificial Sequence
  Description of Artificial Sequence: Synthetic oligonucleotide
  Sense strand starting at position 5 of SEQ ID NO: 1243539
aguaaauucugguuguucu

SEQ ID NO: 1423051 - RNA, 19 nt, Artificial Sequence
  Description of Artificial Sequence: Synthetic oligonucleotide
  Antisense strand to SEQ ID NO: 1423050
agaacaaccagaauuuacu

SEQ ID NO: 1423052 - RNA, 19 nt, Artificial Sequence
  Description of Artificial Sequence: Synthetic oligonucleotide
  Sense strand starting at position 128 of SEQ ID NO: 1243539
cccuauugauuaugcagau

SEQ ID NO: 1423053 - RNA, 19 nt, Artificial Sequence
  Description of Artificial Sequence: Synthetic oligonucleotide
  Antisense strand to SEQ ID NO: 1423052
aucugcauaaucaauaggg

SEQ ID NO: 1423054 - RNA, 19 nt, Artificial Sequence
  Description of Artificial Sequence: Synthetic oligonucleotide
  Sense strand starting at position 129 of SEQ ID NO: 1243539
ccuauugauuaugcagauu

SEQ ID NO: 1423055 - RNA, 19 nt, Artificial Sequence
  Description of Artificial Sequence: Synthetic oligonucleotide
  Antisense strand to SEQ ID NO: 1423054
aaucugcauaaucaauagg

SEQ ID NO: 1423056 - RNA, 19 nt, Artificial Sequence
  Description of Artificial Sequence: Synthetic oligonucleotide
  Sense strand starting at position 135 of SEQ ID NO: 1243539
gauuaugcagauugugauc

SEQ ID NO: 1423057 - RNA, 19 nt, Artificial Sequence
  Description of Artificial Sequence: Synthetic oligonucleotide
  Antisense strand to SEQ ID NO: 1423056
gaucacaaucugcauaauc

SEQ ID NO: 1423058 - RNA, 19 nt, Artificial Sequence
  Description of Artificial Sequence: Synthetic oligonucleotide
  Sense strand starting at position 140 of SEQ ID NO: 1243539
ugcagauugugaucaaucu

SEQ ID NO: 1423059 - RNA, 19 nt, Artificial Sequence
  Description of Artificial Sequence: Synthetic oligonucleotide
  Antisense strand to SEQ ID NO: 1423058
agauugaucacaaucugca

SEQ ID NO: 1423060 - RNA, 19 nt, Artificial Sequence
  Description of Artificial Sequence: Synthetic oligonucleotide
  Sense strand starting at position 141 of SEQ ID NO: 1243539
gcagauugugaucaaucuu

SEQ ID NO: 1423061 - RNA, 19 nt, Artificial Sequence
  Description of Artificial Sequence: Synthetic oligonucleotide
  Antisense strand to SEQ ID NO: 1423060
aagauugaucacaaucugc

SEQ ID NO: 1423062 - RNA, 19 nt, Artificial Sequence
  Description of Artificial Sequence: Synthetic oligonucleotide
  Sense strand starting at position 200 of SEQ ID NO: 1243539
caaauaaguuggucugcaa

SEQ ID NO: 1423063 - RNA, 19 nt, Artificial Sequence
  Description of Artificial Sequence: Synthetic oligonucleotide
  Antisense strand to SEQ ID NO: 1423062
uugcagaccaacuuauuug

SEQ ID NO: 1423064 - RNA, 19 nt, Artificial Sequence
  Description of Artificial Sequence: Synthetic oligonucleotide
  Sense strand starting at position 203 of SEQ ID NO: 1243539
auaaguuggucugcaacua

SEQ ID NO: 1423065 - RNA, 19 nt, Artificial Sequence
  Description of Artificial Sequence: Synthetic oligonucleotide
  Antisense strand to SEQ ID NO: 1423064
uaguugcagaccaacuuau

SEQ ID NO: 1423066 - RNA, 19 nt, Artificial Sequence
  Description of Artificial Sequence: Synthetic oligonucleotide
  Sense strand starting at position 360 of SEQ ID NO: 1243539
agcgaucaccgucugucau

SEQ ID NO: 1423067 - RNA, 19 nt, Artificial Sequence
  Description of Artificial Sequence: Synthetic oligonucleotide
  Antisense strand to SEQ ID NO: 1423066
augacagacggugaucgcu

SEQ ID NO: 1423068 - RNA, 19 nt, Artificial Sequence
  Description of Artificial Sequence: Synthetic oligonucleotide
  Sense strand starting at position 361 of SEQ ID NO: 1243539
gcgaucaccgucugucaua

SEQ ID NO: 1423069 - RNA, 19 nt, Artificial Sequence
  Description of Artificial Sequence: Synthetic oligonucleotide
  Antisense strand to SEQ ID NO: 1423068
uaugacagacggugaucgc

SEQ ID NO: 1423070 - RNA, 19 nt, Artificial Sequence
  Description of Artificial Sequence: Synthetic oligonucleotide
  Sense strand starting at position 362 of SEQ ID NO: 1243539
cgaucaccgucugucauau

SEQ ID NO: 1423071 - RNA, 19 nt, Artificial Sequence
  Description of Artificial Sequence: Synthetic oligonucleotide
  Antisense strand to SEQ ID NO: 1423070
auaugacagacggugaucg

SEQ ID NO: 1423072 - RNA, 19 nt, Artificial Sequence
  Description of Artificial Sequence: Synthetic oligonucleotide
  Sense strand starting at position 446 of SEQ ID NO: 1243539
ucagcaugcuccguccaua

SEQ ID NO: 1423073 - RNA, 19 nt, Artificial Sequence
  Description of Artificial Sequence: Synthetic oligonucleotide
  Antisense strand to SEQ ID NO: 1423072
uauggacggagcaugcuga

SEQ ID NO: 1423074 - RNA, 19 nt, Artificial Sequence
  Description of Artificial Sequence: Synthetic oligonucleotide
  Sense strand starting at position 460 of SEQ ID NO: 1243539
ccauacagugcuuagauca

SEQ ID NO: 1423075 - RNA, 19 nt, Artificial Sequence
  Description of Artificial Sequence: Synthetic oligonucleotide
  Antisense strand to SEQ ID NO: 1423074
ugaucuaagcacuguaugg

SEQ ID NO: 1423076 - RNA, 19 nt, Artificial Sequence
  Description of Artificial Sequence: Synthetic oligonucleotide
  Sense strand starting at position 465 of SEQ ID NO: 1243539
cagugcuuagaucaaguuu

SEQ ID NO: 1423077 - RNA, 19 nt, Artificial Sequence
  Description of Artificial Sequence: Synthetic oligonucleotide
  Antisense strand to SEQ ID NO: 1423076
aaacuugaucuaagcacug

SEQ ID NO: 1423078 - RNA, 19 nt, Artificial Sequence
  Description of Artificial Sequence: Synthetic oligonucleotide
  Sense strand starting at position 563 of SEQ ID NO: 1243539
uuugaaagcgcuuguaauc

SEQ ID NO: 1423079 - RNA, 19 nt, Artificial Sequence
  Description of Artificial Sequence: Synthetic oligonucleotide
  Antisense strand to SEQ ID NO: 1423078
gauuacaagcgcuuucaaa

SEQ ID NO: 1423080 - RNA, 19 nt, Artificial Sequence
  Description of Artificial Sequence: Synthetic oligonucleotide
  Sense strand starting at position 568 of SEQ ID NO: 1243539
aagcgcuuguaaucaaaga

SEQ ID NO: 1423081 - RNA, 19 nt, Artificial Sequence
  Description of Artificial Sequence: Synthetic oligonucleotide
  Antisense strand to SEQ ID NO: 1423080
ucuuugauuacaagcgcuu

SEQ ID NO: 1423082 - RNA, 19 nt, Artificial Sequence
  Description of Artificial Sequence: Synthetic oligonucleotide
  Sense strand starting at position 569 of SEQ ID NO: 1243539
agcgcuuguaaucaaagaa

SEQ ID NO: 1423083 - RNA, 19 nt, Artificial Sequence
  Description of Artificial Sequence: Synthetic oligonucleotide
  Antisense strand to SEQ ID NO: 1423082
uucuuugauuacaagcgcu

SEQ ID NO: 1423084 - RNA, 19 nt, Artificial Sequence
  Description of Artificial Sequence: Synthetic oligonucleotide
  Sense strand starting at position 625 of SEQ ID NO: 1243539
aagucagauucugagcaac

SEQ ID NO: 1423085 - RNA, 19 nt, Artificial Sequence
  Description of Artificial Sequence: Synthetic oligonucleotide
  Antisense strand to SEQ ID NO: 1423084
guugcucagaaucugacuu

SEQ ID NO: 1423086 - RNA, 19 nt, Artificial Sequence
  Description of Artificial Sequence: Synthetic oligonucleotide
  Sense strand starting at position 627 of SEQ ID NO: 1243539
gucagauucugagcaacag

SEQ ID NO: 1423087 - RNA, 19 nt, Artificial Sequence
  Description of Artificial Sequence: Synthetic oligonucleotide
  Antisense strand to SEQ ID NO: 1423086
cuguugcucagaaucugac

SEQ ID NO: 1423088 - RNA, 19 nt, Artificial Sequence
  Description of Artificial Sequence: Synthetic oligonucleotide
  Sense strand starting at position 651 of SEQ ID NO: 1243539
cucgcaaagugauauauac

SEQ ID NO: 1423089 - RNA, 19 nt, Artificial Sequence
  Description of Artificial Sequence: Synthetic oligonucleotide
  Antisense strand to SEQ ID NO: 1423088
guauauaucacuuugcgag

SEQ ID NO: 1423090 - RNA, 19 nt, Artificial Sequence
  Description of Artificial Sequence: Synthetic oligonucleotide
  Sense strand starting at position 692 of SEQ ID NO: 1243539
caagaacccuccgaguacu

SEQ ID NO: 1423091 - RNA, 19 nt, Artificial Sequence
  Description of Artificial Sequence: Synthetic oligonucleotide
  Antisense strand to SEQ ID NO: 1423090
aguacucggaggguucuug

SEQ ID NO: 1423092 - RNA, 19 nt, Artificial Sequence
  Description of Artificial Sequence: Synthetic oligonucleotide
  Sense strand starting at position 885 of SEQ ID NO: 1243539
ccagauucgcgagagcaaa

SEQ ID NO: 1423093 - RNA, 19 nt, Artificial Sequence
  Description of Artificial Sequence: Synthetic oligonucleotide
  Antisense strand to SEQ ID NO: 1423092
uuugcucucgcgaaucugg

SEQ ID NO: 1423094 - RNA, 19 nt, Artificial Sequence
  Description of Artificial Sequence: Synthetic oligonucleotide
  Sense strand starting at position 2252 of SEQ ID NO: 1243539
gcggcucuaggcuguaauu

SEQ ID NO: 1423095 - RNA, 19 nt, Artificial Sequence
  Description of Artificial Sequence: Synthetic oligonucleotide
  Antisense strand to SEQ ID NO: 1423094
aauuacagccuagagccgc

SEQ ID NO: 1423096 - RNA, 19 nt, Artificial Sequence
  Description of Artificial Sequence: Synthetic oligonucleotide
  Sense strand starting at position 2261 of SEQ ID NO: 1243539
ggcuguaauugggaugcaa

SEQ ID NO: 1423097 - RNA, 19 nt, Artificial Sequence
  Description of Artificial Sequence: Synthetic oligonucleotide
  Antisense strand to SEQ ID NO: 1423096
uugcaucccaauuacagcc

SEQ ID NO: 1423098 - RNA, 19 nt, Artificial Sequence
  Description of Artificial Sequence: Synthetic oligonucleotide
  Sense strand starting at position 2407 of SEQ ID NO: 1243539
ggaucuuuauucugcuaau

SEQ ID NO: 1423099 - RNA, 19 nt, Artificial Sequence
  Description of Artificial Sequence: Synthetic oligonucleotide
  Antisense strand to SEQ ID NO: 1423098
auuagcagaauaaagaucc

SEQ ID NO: 1423100 - RNA, 19 nt, Artificial Sequence
  Description of Artificial Sequence: Synthetic oligonucleotide
  Sense strand starting at position 2420 of SEQ ID NO: 1243539
gcuaauuaguuuccugcaa

SEQ ID NO: 1423101 - RNA, 19 nt, Artificial Sequence
  Description of Artificial Sequence: Synthetic oligonucleotide
  Antisense strand to SEQ ID NO: 1423100
uugcaggaaacuaauuagc

SEQ ID NO: 1423102 - RNA, 19 nt, Artificial Sequence
  Description of Artificial Sequence: Synthetic oligonucleotide
  Sense strand starting at position 2448 of SEQ ID NO: 1243539
gugauuaauucagugcgca

SEQ ID NO: 1423103 - RNA, 19 nt, Artificial Sequence
  Description of Artificial Sequence: Synthetic oligonucleotide
  Antisense strand to SEQ ID NO: 1423102
ugcgcacugaauuaaucac

SEQ ID NO: 1423104 - RNA, 19 nt, Artificial Sequence
  Description of Artificial Sequence: Synthetic oligonucleotide
  Sense strand starting at position 2460 of SEQ ID NO: 1243539
gugcgcaugugcuucauua

SEQ ID NO: 1423105 - RNA, 19 nt, Artificial Sequence
  Description of Artificial Sequence: Synthetic oligonucleotide
  Antisense strand to SEQ ID NO: 1423104
uaaugaagcacaugcgcac

SEQ ID NO: 1423106 - RNA, 19 nt, Artificial Sequence
  Description of Artificial Sequence: Synthetic oligonucleotide
  Sense strand starting at position 2505 of SEQ ID NO: 1243539
agccaccuucuggaucaau

SEQ ID NO: 1423107 - RNA, 19 nt, Artificial Sequence
  Description of Artificial Sequence: Synthetic oligonucleotide
  Antisense strand to SEQ ID NO: 1423106
auugauccagaagguggcu

SEQ ID NO: 1423108 - RNA, 19 nt, Artificial Sequence
  Description of Artificial Sequence: Synthetic oligonucleotide
  Sense strand starting at position 2936 of SEQ ID NO: 1243539
cgcagcaauguuuaaauua

SEQ ID NO: 1423109 - RNA, 19 nt, Artificial Sequence
  Description of Artificial Sequence: Synthetic oligonucleotide
  Antisense strand to SEQ ID NO: 1423108
uaauuuaaacauugcugcg

SEQ ID NO: 1423110 - RNA, 19 nt, Artificial Sequence
  Description of Artificial Sequence: Synthetic oligonucleotide
  Sense strand starting at position 3001 of SEQ ID NO: 1243539
gacagcuuagaguaaaggu

SEQ ID NO: 1423111 - RNA, 19 nt, Artificial Sequence
  Description of Artificial Sequence: Synthetic oligonucleotide
  Antisense strand to SEQ ID NO: 1423110
accuuuacucuaagcuguc

SEQ ID NO: 1423112 - RNA, 19 nt, Artificial Sequence
  Description of Artificial Sequence: Synthetic oligonucleotide
  Sense strand starting at position 3031 of SEQ ID NO: 1243539
agcagagacuucgaauaga

SEQ ID NO: 1423113 - RNA, 19 nt, Artificial Sequence
  Description of Artificial Sequence: Synthetic oligonucleotide
  Antisense strand to SEQ ID NO: 1423112
ucuauucgaagucucugcu

SEQ ID NO: 1423114 - RNA, 19 nt, Artificial Sequence
  Description of Artificial Sequence: Synthetic oligonucleotide
  Sense strand starting at position 3210 of SEQ ID NO: 1243539
ggucuucucugguucuuua

SEQ ID NO: 1423115 - RNA, 19 nt, Artificial Sequence
  Description of Artificial Sequence: Synthetic oligonucleotide
  Antisense strand to SEQ ID NO: 1423114
uaaagaaccagagaagacc

SEQ ID NO: 1423116 - RNA, 19 nt, Artificial Sequence
  Description of Artificial Sequence: Synthetic oligonucleotide
  Sense strand starting at position 3213 of SEQ ID NO: 1243539
cuucucugguucuuuagaa

SEQ ID NO: 1423117 - RNA, 19 nt, Artificial Sequence
  Description of Artificial Sequence: Synthetic oligonucleotide
  Antisense strand to SEQ ID NO: 1423116
uucuaaagaaccagagaag

SEQ ID NO: 1423118 - RNA, 19 nt, Artificial Sequence
  Description of Artificial Sequence: Synthetic oligonucleotide
  Sense strand starting at position 3276 of SEQ ID NO: 1243539
gaaagugaaucagaacuga

SEQ ID NO: 1423119 - RNA, 19 nt, Artificial Sequence
  Description of Artificial Sequence: Synthetic oligonucleotide
  Antisense strand to SEQ ID NO: 1423118
ucaguucugauucacuuuc

SEQ ID NO: 1423120 - RNA, 19 nt, Artificial Sequence
  Description of Artificial Sequence: Synthetic oligonucleotide
  Sense strand starting at position 3398 of SEQ ID NO: 1243539
ucgugugaaaccuggaaag

SEQ ID NO: 1423121 - RNA, 19 nt, Artificial Sequence
  Description of Artificial Sequence: Synthetic oligonucleotide
  Antisense strand to SEQ ID NO: 1423120
cuuuccagguuucacacga

SEQ ID NO: 1423122 - RNA, 19 nt, Artificial Sequence
  Description of Artificial Sequence: Synthetic oligonucleotide
  Sense strand starting at position 3400 of SEQ ID NO: 1243539
gugugaaaccuggaaagca

SEQ ID NO: 1423123 - RNA, 19 nt, Artificial Sequence
  Description of Artificial Sequence: Synthetic oligonucleotide
  Antisense strand to SEQ ID NO: 1423122
ugcuuuccagguuucacac

SEQ ID NO: 1423124 - RNA, 19 nt, Artificial Sequence
  Description of Artificial Sequence: Synthetic oligonucleotide
  Sense strand starting at position 3648 of SEQ ID NO: 1243539
agccaaagggcuugaaaug

SEQ ID NO: 1423125 - RNA, 19 nt, Artificial Sequence
  Description of Artificial Sequence: Synthetic oligonucleotide
  Antisense strand to SEQ ID NO: 1423124
cauuucaagcccuuuggcu

SEQ ID NO: 1423126 - RNA, 19 nt, Artificial Sequence
  Description of Artificial Sequence: Synthetic oligonucleotide
  Sense strand starting at position 3767 of SEQ ID NO: 1243539
accgauucccaguacauca

SEQ ID NO: 1423127 - RNA, 19 nt, Artificial Sequence
  Description of Artificial Sequence: Synthetic oligonucleotide
  Antisense strand to SEQ ID NO: 1423126
ugauguacugggaaucggu

SEQ ID NO: 1423128 - RNA, 19 nt, Artificial Sequence
  Description of Artificial Sequence: Synthetic oligonucleotide
  Sense strand starting at position 3932 of SEQ ID NO: 1243539
gcgucacugcuacugcaau

SEQ ID NO: 1423129 - RNA, 19 nt, Artificial Sequence
  Description of Artificial Sequence: Synthetic oligonucleotide
  Antisense strand to SEQ ID NO: 1423128
auugcaguagcagugacgc

SEQ ID NO: 1423130 - RNA, 19 nt, Artificial Sequence
  Description of Artificial Sequence: Synthetic oligonucleotide
  Sense strand starting at position 3 of SEQ ID NO: 1243540
ggccuuucuugaucagguu

SEQ ID NO: 1423131 - RNA, 19 nt, Artificial Sequence
  Description of Artificial Sequence: Synthetic oligonucleotide
  Antisense strand to SEQ ID NO: 1423130
aaccugaucaagaaaggcc

SEQ ID NO: 1423132 - RNA, 19 nt, Artificial Sequence
  Description of Artificial Sequence: Synthetic oligonucleotide
  Sense strand starting at position 4 of SEQ ID NO: 1243540
gccuuucuugaucagguua

SEQ ID NO: 1423133 - RNA, 19 nt, Artificial Sequence
  Description of Artificial Sequence: Synthetic oligonucleotide
  Antisense strand to SEQ ID NO: 1423132
uaaccugaucaagaaaggc

SEQ ID NO: 1423134 - RNA, 19 nt, Artificial Sequence
  Description of Artificial Sequence: Synthetic oligonucleotide
  Sense strand starting at position 95 of SEQ ID NO: 1243540
ccuccuggaacucgugauu

SEQ ID NO: 1423135 - RNA, 19 nt, Artificial Sequence
  Description of Artificial Sequence: Synthetic oligonucleotide
  Antisense strand to SEQ ID NO: 1423134
aaucacgaguuccaggagg

SEQ ID NO: 1423136 - RNA, 19 nt, Artificial Sequence
  Description of Artificial Sequence: Synthetic oligonucleotide
  Sense strand starting at position 117 of SEQ ID NO: 1243540
aggguuucccuugaaaccu

SEQ ID NO: 1423137 - RNA, 19 nt, Artificial Sequence
  Description of Artificial Sequence: Synthetic oligonucleotide
  Antisense strand to SEQ ID NO: 1423136
agguuucaagggaaacccu

SEQ ID NO: 1423138 - RNA, 19 nt, Artificial Sequence
  Description of Artificial Sequence: Synthetic oligonucleotide
  Sense strand starting at position 153 of SEQ ID NO: 1243540
auuaacugaacgugaagau

SEQ ID NO: 1423139 - RNA, 19 nt, Artificial Sequence
  Description of Artificial Sequence: Synthetic oligonucleotide
  Antisense strand to SEQ ID NO: 1423138
aucuucacguucaguuaau

SEQ ID NO: 1423140 - RNA, 19 nt, Artificial Sequence
  Description of Artificial Sequence: Synthetic oligonucleotide
  Sense strand starting at position 269 of SEQ ID NO: 1243540
uagggugagcuuuaaauua

SEQ ID NO: 1423141 - RNA, 19 nt, Artificial Sequence
  Description of Artificial Sequence: Synthetic oligonucleotide
  Antisense strand to SEQ ID NO: 1423140
uaauuuaaagcucacccua

SEQ ID NO: 1423142 - RNA, 19 nt, Artificial Sequence
  Description of Artificial Sequence: Synthetic oligonucleotide
  Sense strand starting at position 292 of SEQ ID NO: 1243540
cuauuuauuuagugacuug

SEQ ID NO: 1423143 - RNA, 19 nt, Artificial Sequence
  Description of Artificial Sequence: Synthetic oligonucleotide
  Antisense strand to SEQ ID NO: 1423142
caagucacuaaauaaauag

SEQ ID NO: 1423144 - RNA, 19 nt, Artificial Sequence
  Description of Artificial Sequence: Synthetic oligonucleotide
  Sense strand starting at position 299 of SEQ ID NO: 1243540
uuuagugacuugucuccaa

SEQ ID NO: 1423145 - RNA, 19 nt, Artificial Sequence
  Description of Artificial Sequence: Synthetic oligonucleotide
  Antisense strand to SEQ ID NO: 1423144
uuggagacaagucacuaaa

SEQ ID NO: 1423146 - RNA, 19 nt, Artificial Sequence
  Description of Artificial Sequence: Synthetic oligonucleotide
  Sense strand starting at position 302 of SEQ ID NO: 1243540
agugacuugucuccaagga

SEQ ID NO: 1423147 - RNA, 19 nt, Artificial Sequence
  Description of Artificial Sequence: Synthetic oligonucleotide
  Antisense strand to SEQ ID NO: 1423146
uccuuggagacaagucacu

SEQ ID NO: 1423148 - RNA, 19 nt, Artificial Sequence
  Description of Artificial Sequence: Synthetic oligonucleotide
  Sense strand starting at position 303 of SEQ ID NO: 1243540
gugacuugucuccaaggau

SEQ ID NO: 1423149 - RNA, 19 nt, Artificial Sequence
  Description of Artificial Sequence: Synthetic oligonucleotide
  Antisense strand to SEQ ID NO: 1423148
auccuuggagacaagucac

SEQ ID NO: 1423150 - RNA, 19 nt, Artificial Sequence
  Description of Artificial Sequence: Synthetic oligonucleotide
  Sense strand starting at position 340 of SEQ ID NO: 1243540
auaagaugauguguaacuu

SEQ ID NO: 1423151 - RNA, 19 nt, Artificial Sequence
  Description of Artificial Sequence: Synthetic oligonucleotide
  Antisense strand to SEQ ID NO: 1423150
aaguuacacaucaucuuau

SEQ ID NO: 1423152 - RNA, 19 nt, Artificial Sequence
  Description of Artificial Sequence: Synthetic oligonucleotide
  Sense strand starting at position 341 of SEQ ID NO: 1243540
uaagaugauguguaacuuu

SEQ ID NO: 1423153 - RNA, 19 nt, Artificial Sequence
  Description of Artificial Sequence: Synthetic oligonucleotide
  Antisense strand to SEQ ID NO: 1423152
aaaguuacacaucaucuua

SEQ ID NO: 1423154 - RNA, 19 nt, Artificial Sequence
  Description of Artificial Sequence: Synthetic oligonucleotide
  Sense strand starting at position 349 of SEQ ID NO: 1243540
uguguaacuuucucacaau

SEQ ID NO: 1423155 - RNA, 19 nt, Artificial Sequence
  Description of Artificial Sequence: Synthetic oligonucleotide
  Antisense strand to SEQ ID NO: 1423154
auugugagaaaguuacaca

SEQ ID NO: 1423156 - RNA, 19 nt, Artificial Sequence
  Description of Artificial Sequence: Synthetic oligonucleotide
  Sense strand starting at position 490 of SEQ ID NO: 1243540
gggagucuucaaggacugu

SEQ ID NO: 1423157 - RNA, 19 nt, Artificial Sequence
  Description of Artificial Sequence: Synthetic oligonucleotide
  Antisense strand to SEQ ID NO: 1423156
acaguccuugaagacuccc

SEQ ID NO: 1423158 - RNA, 19 nt, Artificial Sequence
  Description of Artificial Sequence: Synthetic oligonucleotide
  Sense strand starting at position 681 of SEQ ID NO: 1243540
agguguguccaaggcagaa

SEQ ID NO: 1423159 - RNA, 19 nt, Artificial Sequence
  Description of Artificial Sequence: Synthetic oligonucleotide
  Antisense strand to SEQ ID NO: 1423158
uucugccuuggacacaccu

SEQ ID NO: 1423160 - RNA, 19 nt, Artificial Sequence
  Description of Artificial Sequence: Synthetic oligonucleotide
  Sense strand starting at position 1017 of SEQ ID NO: 1243540
cgacuucuccagggcugaa

SEQ ID NO: 1423161 - RNA, 19 nt, Artificial Sequence
  Description of Artificial Sequence: Synthetic oligonucleotide
  Antisense strand to SEQ ID NO: 1423160
uucagcccuggagaagucg

SEQ ID NO: 1423162 - RNA, 19 nt, Artificial Sequence
  Description of Artificial Sequence: Synthetic oligonucleotide
  Sense strand starting at position 1733 of SEQ ID NO: 1243540
ccggaaucgcuuuauguaa

SEQ ID NO: 1423163 - RNA, 19 nt, Artificial Sequence
  Description of Artificial Sequence: Synthetic oligonucleotide
  Antisense strand to SEQ ID NO: 1423162
uuacauaaagcgauuccgg

SEQ ID NO: 1423164 - RNA, 19 nt, Artificial Sequence
  Description of Artificial Sequence: Synthetic oligonucleotide
  Sense strand starting at position 2195 of SEQ ID NO: 1243540
ccuagaaucgggcgagaag

SEQ ID NO: 1423165 - RNA, 19 nt, Artificial Sequence
  Description of Artificial Sequence: Synthetic oligonucleotide
  Antisense strand to SEQ ID NO: 1423164
cuucucgcccgauucuagg

SEQ ID NO: 1423166 - RNA, 19 nt, Artificial Sequence
  Description of Artificial Sequence: Synthetic oligonucleotide
  Sense strand starting at position 2196 of SEQ ID NO: 1243540
cuagaaucgggcgagaaga

SEQ ID NO: 1423167 - RNA, 19 nt, Artificial Sequence
  Description of Artificial Sequence: Synthetic oligonucleotide
  Antisense strand to SEQ ID NO: 1423166
ucuucucgcccgauucuag

SEQ ID NO: 1423168 - RNA, 19 nt, Artificial Sequence
  Description of Artificial Sequence: Synthetic oligonucleotide
  Sense strand starting at position 2335 of SEQ ID NO: 1243540
acaggaauuuauuggaaac

SEQ ID NO: 1423169 - RNA, 19 nt, Artificial Sequence
  Description of Artificial Sequence: Synthetic oligonucleotide
  Antisense strand to SEQ ID NO: 1423168
guuuccaauaaauuccugu

SEQ ID NO: 1423170 - RNA, 19 nt, Artificial Sequence
  Description of Artificial Sequence: Synthetic oligonucleotide
  Sense strand starting at position 2578 of SEQ ID NO: 1243540
gccacaucaccgcagagau

SEQ ID NO: 1423171 - RNA, 19 nt, Artificial Sequence
  Description of Artificial Sequence: Synthetic oligonucleotide
  Antisense strand to SEQ ID NO: 1423170
aucucugcggugauguggc

SEQ ID NO: 1423172 - RNA, 19 nt, Artificial Sequence
  Description of Artificial Sequence: Synthetic oligonucleotide
  Sense strand starting at position 2796 of SEQ ID NO: 1243540
aagaaaucucaccggaagu

SEQ ID NO: 1423173 - RNA, 19 nt, Artificial Sequence
  Description of Artificial Sequence: Synthetic oligonucleotide
  Antisense strand to SEQ ID NO: 1423172
acuuccggugagauuucuu

SEQ ID NO: 1423174 - RNA, 19 nt, Artificial Sequence
  Description of Artificial Sequence: Synthetic oligonucleotide
  Sense strand starting at position 2797 of SEQ ID NO: 1243540
agaaaucucaccggaaguc

SEQ ID NO: 1423175 - RNA, 19 nt, Artificial Sequence
  Description of Artificial Sequence: Synthetic oligonucleotide
  Antisense strand to SEQ ID NO: 1423174
gacuuccggugagauuucu

SEQ ID NO: 1423176 - RNA, 19 nt, Artificial Sequence
  Description of Artificial Sequence: Synthetic oligonucleotide
  Sense strand starting at position 3002 of SEQ ID NO: 1243540
ggcgaagagcaguauguau

SEQ ID NO: 1423177 - RNA, 19 nt, Artificial Sequence
  Description of Artificial Sequence: Synthetic oligonucleotide
  Antisense strand to SEQ ID NO: 1423176
auacauacugcucuucgcc

SEQ ID NO: 1423178 - RNA, 19 nt, Artificial Sequence
  Description of Artificial Sequence: Synthetic oligonucleotide
  Sense strand starting at position 3010 of SEQ ID NO: 1243540
gcaguauguauggaauugu

SEQ ID NO: 1423179 - RNA, 19 nt, Artificial Sequence
  Description of Artificial Sequence: Synthetic oligonucleotide
  Antisense strand to SEQ ID NO: 1423178
acaauuccauacauacugc

SEQ ID NO: 1423180 - RNA, 19 nt, Artificial Sequence
  Description of Artificial Sequence: Synthetic oligonucleotide
  Sense strand starting at position 3024 of SEQ ID NO: 1243540
auuguauuagcaugaggca

SEQ ID NO: 1423181 - RNA, 19 nt, Artificial Sequence
  Description of Artificial Sequence: Synthetic oligonucleotide
  Antisense strand to SEQ ID NO: 1423180
ugccucaugcuaauacaau

SEQ ID NO: 1423182 - RNA, 19 nt, Artificial Sequence
  Description of Artificial Sequence: Synthetic oligonucleotide
  Sense strand starting at position 3065 of SEQ ID NO: 1243540
ggaugcuuagcuggugaaa

SEQ ID NO: 1423183 - RNA, 19 nt, Artificial Sequence
  Description of Artificial Sequence: Synthetic oligonucleotide
  Antisense strand to SEQ ID NO: 1423182
uuucaccagcuaagcaucc

SEQ ID NO: 1423184 - RNA, 19 nt, Artificial Sequence
  Description of Artificial Sequence: Synthetic oligonucleotide
  Sense strand starting at position 3121 of SEQ ID NO: 1243540
guaaguuggguucagauua

SEQ ID NO: 1423185 - RNA, 19 nt, Artificial Sequence
  Description of Artificial Sequence: Synthetic oligonucleotide
  Antisense strand to SEQ ID NO: 1423184
uaaucugaacccaacuuac

SEQ ID NO: 1423186 - RNA, 19 nt, Artificial Sequence
  Description of Artificial Sequence: Synthetic oligonucleotide
  Sense strand starting at position 3267 of SEQ ID NO: 1243540
agggaaucauguccgauua

SEQ ID NO: 1423187 - RNA, 19 nt, Artificial Sequence
  Description of Artificial Sequence: Synthetic oligonucleotide
  Antisense strand to SEQ ID NO: 1423186
uaaucggacaugauucccu

SEQ ID NO: 1423188 - RNA, 19 nt, Artificial Sequence
  Description of Artificial Sequence: Synthetic oligonucleotide
  Sense strand starting at position 3268 of SEQ ID NO: 1243540
gggaaucauguccgauuag

SEQ ID NO: 1423189 - RNA, 19 nt, Artificial Sequence
  Description of Artificial Sequence: Synthetic oligonucleotide
  Antisense strand to SEQ ID NO: 1423188
cuaaucggacaugauuccc

SEQ ID NO: 1423190 - RNA, 19 nt, Artificial Sequence
  Description of Artificial Sequence: Synthetic oligonucleotide
  Sense strand starting at position 3372 of SEQ ID NO: 1243540
ggaggaugaguuugcaaac

SEQ ID NO: 1423191 - RNA, 19 nt, Artificial Sequence
  Description of Artificial Sequence: Synthetic oligonucleotide
  Antisense strand to SEQ ID NO: 1423190
guuugcaaacucauccucc

SEQ ID NO: 1423192 - RNA, 19 nt, Artificial Sequence
  Description of Artificial Sequence: Synthetic oligonucleotide
  Sense strand starting at position 3392 of SEQ ID NO: 1243540
agacuauggucacugcaga

SEQ ID NO: 1423193 - RNA, 19 nt, Artificial Sequence
  Description of Artificial Sequence: Synthetic oligonucleotide
  Antisense strand to SEQ ID NO: 1423192
ucugcagugaccauagucu

SEQ ID NO: 1423194 - RNA, 19 nt, Artificial Sequence
  Description of Artificial Sequence: Synthetic oligonucleotide
  Sense strand starting at position 3475 of SEQ ID NO: 1243540
uuauauuggccauauaagu

SEQ ID NO: 1423195 - RNA, 19 nt, Artificial Sequence
  Description of Artificial Sequence: Synthetic oligonucleotide
  Antisense strand to SEQ ID NO: 1423194
acuuauauggccaauauaa

SEQ ID NO: 1423196 - RNA, 19 nt, Artificial Sequence
  Description of Artificial Sequence: Synthetic oligonucleotide
  Sense strand starting at position 3482 of SEQ ID NO: 1243540
ggccauauaaguugagaac

SEQ ID NO: 1423197 - RNA, 19 nt, Artificial Sequence
  Description of Artificial Sequence: Synthetic oligonucleotide
  Antisense strand to SEQ ID NO: 1423196
guucucaacuuauauggcc

SEQ ID NO: 1423198 - RNA, 19 nt, Artificial Sequence
  Description of Artificial Sequence: Synthetic oligonucleotide
  Sense strand starting at position 3614 of SEQ ID NO: 1243540
cuggcaaucucuccggaaa

SEQ ID NO: 1423199 - RNA, 19 nt, Artificial Sequence
  Description of Artificial Sequence: Synthetic oligonucleotide
  Antisense strand to SEQ ID NO: 1423198
uuuccggagagauugccag

SEQ ID NO: 1423200 - RNA, 19 nt, Artificial Sequence
  Description of Artificial Sequence: Synthetic oligonucleotide
  Sense strand starting at position 3659 of SEQ ID NO: 1243540
uaaggccugcuggauaaau

SEQ ID NO: 1423201 - RNA, 19 nt, Artificial Sequence
  Description of Artificial Sequence: Synthetic oligonucleotide
  Antisense strand to SEQ ID NO: 1423200
auuuauccagcaggccuua

SEQ ID NO: 1423202 - RNA, 19 nt, Artificial Sequence
  Description of Artificial Sequence: Synthetic oligonucleotide
  Sense strand starting at position 3661 of SEQ ID NO: 1243540
aggccugcuggauaaauua

SEQ ID NO: 1423203 - RNA, 19 nt, Artificial Sequence
  Description of Artificial Sequence: Synthetic oligonucleotide
  Antisense strand to SEQ ID NO: 1423202
uaauuuauccagcaggccu

SEQ ID NO: 1423204 - RNA, 19 nt, Artificial Sequence
  Description of Artificial Sequence: Synthetic oligonucleotide
  Sense strand starting at position 3760 of SEQ ID NO: 1243540
ucguaaucuggugacauca

SEQ ID NO: 1423205 - RNA, 19 nt, Artificial Sequence
  Description of Artificial Sequence: Synthetic oligonucleotide
  Antisense strand to SEQ ID NO: 1423204
ugaugucaccagauuacga

SEQ ID NO: 1423206 - RNA, 19 nt, Artificial Sequence
  Description of Artificial Sequence: Synthetic oligonucleotide
  Sense strand starting at position 3896 of SEQ ID NO: 1243540
cgggaucugcccuaauacu

SEQ ID NO: 1423207 - RNA, 19 nt, Artificial Sequence
  Description of Artificial Sequence: Synthetic oligonucleotide
  Antisense strand to SEQ ID NO: 1423206
aguauuagggcagaucccg

SEQ ID NO: 1423208 - RNA, 19 nt, Artificial Sequence
  Description of Artificial Sequence: Synthetic oligonucleotide
  Sense strand starting at position 3956 of SEQ ID NO: 1243540
acuugagaggccugacaag

SEQ ID NO: 1423209 - RNA, 19 nt, Artificial Sequence
  Description of Artificial Sequence: Synthetic oligonucleotide
  Antisense strand to SEQ ID NO: 1423208
cuugucaggccucucaagu

SEQ ID NO: 1423210 - RNA, 19 nt, Artificial Sequence
  Description of Artificial Sequence: Synthetic oligonucleotide
  Sense strand starting at position 380 of SEQ ID NO: 1243541
ugaagucacaagggaaguu

SEQ ID NO: 1423211 - RNA, 19 nt, Artificial Sequence
  Description of Artificial Sequence: Synthetic oligonucleotide
  Antisense strand to SEQ ID NO: 1423210
aacuucccuugugacuuca

SEQ ID NO: 1423212 - RNA, 19 nt, Artificial Sequence
  Description of Artificial Sequence: Synthetic oligonucleotide
  Sense strand starting at position 406 of SEQ ID NO: 1243541
uuugaauugaaugguaaug

SEQ ID NO: 1423213 - RNA, 19 nt, Artificial Sequence
  Description of Artificial Sequence: Synthetic oligonucleotide
  Antisense strand to SEQ ID NO: 1423212
cauuaccauucaauucaaa

SEQ ID NO: 1423214 - RNA, 19 nt, Artificial Sequence
  Description of Artificial Sequence: Synthetic oligonucleotide
  Sense strand starting at position 408 of SEQ ID NO: 1243541
ugaauugaaugguaaugaa

SEQ ID NO: 1423215 - RNA, 19 nt, Artificial Sequence
  Description of Artificial Sequence: Synthetic oligonucleotide
  Antisense strand to SEQ ID NO: 1423214
uucauuaccauucaauuca

SEQ ID NO: 1423216 - RNA, 19 nt, Artificial Sequence
  Description of Artificial Sequence: Synthetic oligonucleotide
  Sense strand starting at position 739 of SEQ ID NO: 1243541
aaauuugagugauguaguu

SEQ ID NO: 1423217 - RNA, 19 nt, Artificial Sequence
  Description of Artificial Sequence: Synthetic oligonucleotide
  Antisense strand to SEQ ID NO: 1423216
aacuacaucacucaaauuu

SEQ ID NO: 1423218 - RNA, 19 nt, Artificial Sequence
  Description of Artificial Sequence: Synthetic oligonucleotide
  Sense strand starting at position 745 of SEQ ID NO: 1243541
gagugauguaguuaaagua

SEQ ID NO: 1423219 - RNA, 19 nt, Artificial Sequence
  Description of Artificial Sequence: Synthetic oligonucleotide
  Antisense strand to SEQ ID NO: 1423218
uacuuuaacuacaucacuc

SEQ ID NO: 1423220 - RNA, 19 nt, Artificial Sequence
  Description of Artificial Sequence: Synthetic oligonucleotide
  Sense strand starting at position 771 of SEQ ID NO: 1243541
gaggaacaguuacaucaau

SEQ ID NO: 1423221 - RNA, 19 nt, Artificial Sequence
  Description of Artificial Sequence: Synthetic oligonucleotide
  Antisense strand to SEQ ID NO: 1423220
auugauguaacuguuccuc

SEQ ID NO: 1423222 - RNA, 19 nt, Artificial Sequence
  Description of Artificial Sequence: Synthetic oligonucleotide
  Sense strand starting at position 849 of SEQ ID NO: 1243541
gaggcagagcacuacuuua

SEQ ID NO: 1423223 - RNA, 19 nt, Artificial Sequence
  Description of Artificial Sequence: Synthetic oligonucleotide
  Antisense strand to SEQ ID NO: 1423222
uaaaguagugcucugccuc

SEQ ID NO: 1423224 - RNA, 19 nt, Artificial Sequence
  Description of Artificial Sequence: Synthetic oligonucleotide
  Sense strand starting at position 1005 of SEQ ID NO: 1243541
guauuacaaucacauagga

SEQ ID NO: 1423225 - RNA, 19 nt, Artificial Sequence
  Description of Artificial Sequence: Synthetic oligonucleotide
  Antisense strand to SEQ ID NO: 1423224
uccuaugugauuguaauac

SEQ ID NO: 1423226 - RNA, 19 nt, Artificial Sequence
  Description of Artificial Sequence: Synthetic oligonucleotide
  Sense strand starting at position 1038 of SEQ ID NO: 1243541
gaggucccucguugacaga

SEQ ID NO: 1423227 - RNA, 19 nt, Artificial Sequence
  Description of Artificial Sequence: Synthetic oligonucleotide
  Antisense strand to SEQ ID NO: 1423226
ucugucaacgagggaccuc

SEQ ID NO: 1423228 - RNA, 19 nt, Artificial Sequence
  Description of Artificial Sequence: Synthetic oligonucleotide
  Sense strand starting at position 1075 of SEQ ID NO: 1243541
gugacugcaccagaaucau

SEQ ID NO: 1423229 - RNA, 19 nt, Artificial Sequence
  Description of Artificial Sequence: Synthetic oligonucleotide
  Antisense strand to SEQ ID NO: 1423228
augauucuggugcagucac

SEQ ID NO: 1423230 - RNA, 19 nt, Artificial Sequence
  Description of Artificial Sequence: Synthetic oligonucleotide
  Sense strand starting at position 1154 of SEQ ID NO: 1243541
guaaauuccacccgagaga

SEQ ID NO: 1423231 - RNA, 19 nt, Artificial Sequence
  Description of Artificial Sequence: Synthetic oligonucleotide
  Antisense strand to SEQ ID NO: 1423230
ucucucggguggaauuuac

SEQ ID NO: 1423232 - RNA, 19 nt, Artificial Sequence
  Description of Artificial Sequence: Synthetic oligonucleotide
  Sense strand starting at position 1337 of SEQ ID NO: 1243541
agaugauaacgcuggaagu

SEQ ID NO: 1423233 - RNA, 19 nt, Artificial Sequence
  Description of Artificial Sequence: Synthetic oligonucleotide
  Antisense strand to SEQ ID NO: 1423232
acuuccagcguuaucaucu

SEQ ID NO: 1423234 - RNA, 19 nt, Artificial Sequence
  Description of Artificial Sequence: Synthetic oligonucleotide
  Sense strand starting at position 1614 of SEQ ID NO: 1243541
ggcgcaucuccugacaaag

SEQ ID NO: 1423235 - RNA, 19 nt, Artificial Sequence
  Description of Artificial Sequence: Synthetic oligonucleotide
  Antisense strand to SEQ ID NO: 1423234
cuuugucaggagaugcgcc

SEQ ID NO: 1423236 - RNA, 19 nt, Artificial Sequence
  Description of Artificial Sequence: Synthetic oligonucleotide
  Sense strand starting at position 1770 of SEQ ID NO: 1243541
cuacgaguagccgaaguuu

SEQ ID NO: 1423237 - RNA, 19 nt, Artificial Sequence
  Description of Artificial Sequence: Synthetic oligonucleotide
  Antisense strand to SEQ ID NO: 1423236
aaacuucggcuacucguag

SEQ ID NO: 1423238 - RNA, 19 nt, Artificial Sequence
  Description of Artificial Sequence: Synthetic oligonucleotide
  Sense strand starting at position 2139 of SEQ ID NO: 1243541
ucaggaaagucuucgccuu

SEQ ID NO: 1423239 - RNA, 19 nt, Artificial Sequence
  Description of Artificial Sequence: Synthetic oligonucleotide
  Antisense strand to SEQ ID NO: 1423238
aaggcgaagacuuuccuga

SEQ ID NO: 1423240 - RNA, 19 nt, Artificial Sequence
  Description of Artificial Sequence: Synthetic oligonucleotide
  Sense strand starting at position 2166 of SEQ ID NO: 1243541
gucugaugagccgaccaaa

SEQ ID NO: 1423241 - RNA, 19 nt, Artificial Sequence
  Description of Artificial Sequence: Synthetic oligonucleotide
  Antisense strand to SEQ ID NO: 1423240
uuuggucggcucaucagac

SEQ ID NO: 1423242 - RNA, 19 nt, Artificial Sequence
  Description of Artificial Sequence: Synthetic oligonucleotide
  Sense strand starting at position 2225 of SEQ ID NO: 1243541
ugggucgugaacuacaauu

SEQ ID NO: 1423243 - RNA, 19 nt, Artificial Sequence
  Description of Artificial Sequence: Synthetic oligonucleotide
  Antisense strand to SEQ ID NO: 1423242
aauuguaguucacgaccca

SEQ ID NO: 1423244 - RNA, 19 nt, Artificial Sequence
  Description of Artificial Sequence: Synthetic oligonucleotide
  Sense strand starting at position 2360 of SEQ ID NO: 1243541
agauuaacugcguauaaca

SEQ ID NO: 1423245 - RNA, 19 nt, Artificial Sequence
  Description of Artificial Sequence: Synthetic oligonucleotide
  Antisense strand to SEQ ID NO: 1423244
uguuauacgcaguuaaucu

SEQ ID NO: 1423246 - RNA, 19 nt, Artificial Sequence
  Description of Artificial Sequence: Synthetic oligonucleotide
  Sense strand starting at position 2362 of SEQ ID NO: 1243541
auuaacugcguauaacauu

SEQ ID NO: 1423247 - RNA, 19 nt, Artificial Sequence
  Description of Artificial Sequence: Synthetic oligonucleotide
  Antisense strand to SEQ ID NO: 1423246
aauguuauacgcaguuaau

SEQ ID NO: 1423248 - RNA, 19 nt, Artificial Sequence
  Description of Artificial Sequence: Synthetic oligonucleotide
  Sense strand starting at position 2368 of SEQ ID NO: 1243541
ugcguauaacauuaaguuc

SEQ ID NO: 1423249 - RNA, 19 nt, Artificial Sequence
  Description of Artificial Sequence: Synthetic oligonucleotide
  Antisense strand to SEQ ID NO: 1423248
gaacuuaauguuauacgca

SEQ ID NO: 1423250 - RNA, 19 nt, Artificial Sequence
  Description of Artificial Sequence: Synthetic oligonucleotide
  Sense strand starting at position 2427 of SEQ ID NO: 1243541
aagguaucaugugcugcaa

SEQ ID NO: 1423251 - RNA, 19 nt, Artificial Sequence
  Description of Artificial Sequence: Synthetic oligonucleotide
  Antisense strand to SEQ ID NO: 1423250
uugcagcacaugauaccuu

SEQ ID NO: 1423252 - RNA, 19 nt, Artificial Sequence
  Description of Artificial Sequence: Synthetic oligonucleotide
  Sense strand starting at position 2470 of SEQ ID NO: 1243541
ggccacuuuguugagguau

SEQ ID NO: 1423253 - RNA, 19 nt, Artificial Sequence
  Description of Artificial Sequence: Synthetic oligonucleotide
  Antisense strand to SEQ ID NO: 1423252
auaccucaacaaaguggcc

SEQ ID NO: 1423254 - RNA, 19 nt, Artificial Sequence
  Description of Artificial Sequence: Synthetic oligonucleotide
  Sense strand starting at position 2592 of SEQ ID NO: 1243541
aguuauuugucugaugaga

SEQ ID NO: 1423255 - RNA, 19 nt, Artificial Sequence
  Description of Artificial Sequence: Synthetic oligonucleotide
  Antisense strand to SEQ ID NO: 1423254
ucucaucagacaaauaacu

SEQ ID NO: 1423256 - RNA, 19 nt, Artificial Sequence
  Description of Artificial Sequence: Synthetic oligonucleotide
  Sense strand starting at position 2594 of SEQ ID NO: 1243541
uuauuugucugaugagaac

SEQ ID NO: 1423257 - RNA, 19 nt, Artificial Sequence
  Description of Artificial Sequence: Synthetic oligonucleotide
  Antisense strand to SEQ ID NO: 1423256
guucucaucagacaaauaa

SEQ ID NO: 1423258 - RNA, 19 nt, Artificial Sequence
  Description of Artificial Sequence: Synthetic oligonucleotide
  Sense strand starting at position 2655 of SEQ ID NO: 1243541
ugucaacuaucgucacaua

SEQ ID NO: 1423259 - RNA, 19 nt, Artificial Sequence
  Description of Artificial Sequence: Synthetic oligonucleotide
  Antisense strand to SEQ ID NO: 1423258
uaugugacgauaguugaca

SEQ ID NO: 1423260 - RNA, 19 nt, Artificial Sequence
  Description of Artificial Sequence: Synthetic oligonucleotide
  Sense strand starting at position 3317 of SEQ ID NO: 1243541
gccuguaaccauuacagua

SEQ ID NO: 1423261 - RNA, 19 nt, Artificial Sequence
  Description of Artificial Sequence: Synthetic oligonucleotide
  Antisense strand to SEQ ID NO: 1423260
uacuguaaugguuacaggc

SEQ ID NO: 1423262 - RNA, 19 nt, Artificial Sequence
  Description of Artificial Sequence: Synthetic oligonucleotide
  Sense strand starting at position 3329 of SEQ ID NO: 1243541
uacaguaucguacagaaua

SEQ ID NO: 1423263 - RNA, 19 nt, Artificial Sequence
  Description of Artificial Sequence: Synthetic oligonucleotide
  Antisense strand to SEQ ID NO: 1423262
uauucuguacgauacugua

SEQ ID NO: 1423264 - RNA, 19 nt, Artificial Sequence
  Description of Artificial Sequence: Synthetic oligonucleotide
  Sense strand starting at position 3405 of SEQ ID NO: 1243541
ccuggaaaucucugauauu

SEQ ID NO: 1423265 - RNA, 19 nt, Artificial Sequence
  Description of Artificial Sequence: Synthetic oligonucleotide
  Antisense strand to SEQ ID NO: 1423264
aauaucagagauuuccagg

SEQ ID NO: 1423266 - RNA, 19 nt, Artificial Sequence
  Description of Artificial Sequence: Synthetic oligonucleotide
  Sense strand starting at position 3406 of SEQ ID NO: 1243541
cuggaaaucucugauauuu

SEQ ID NO: 1423267 - RNA, 19 nt, Artificial Sequence
  Description of Artificial Sequence: Synthetic oligonucleotide
  Antisense strand to SEQ ID NO: 1423266
aaauaucagagauuuccag

SEQ ID NO: 1423268 - RNA, 19 nt, Artificial Sequence
  Description of Artificial Sequence: Synthetic oligonucleotide
  Sense strand starting at position 3454 of SEQ ID NO: 1243541
gguugucauauagguggaa

SEQ ID NO: 1423269 - RNA, 19 nt, Artificial Sequence
  Description of Artificial Sequence: Synthetic oligonucleotide
  Antisense strand to SEQ ID NO: 1423268
uuccaccuauaugacaacc

SEQ ID NO: 1423270 - RNA, 19 nt, Artificial Sequence
  Description of Artificial Sequence: Synthetic oligonucleotide
  Sense strand starting at position 3455 of SEQ ID NO: 1243541
guugucauauagguggaau

SEQ ID NO: 1423271 - RNA, 19 nt, Artificial Sequence
  Description of Artificial Sequence: Synthetic oligonucleotide
  Antisense strand to SEQ ID NO: 1423270
auuccaccuauaugacaac

SEQ ID NO: 1423272 - RNA, 19 nt, Artificial Sequence
  Description of Artificial Sequence: Synthetic oligonucleotide
  Sense strand starting at position 3456 of SEQ ID NO: 1243541
uugucauauagguggaauc

SEQ ID NO: 1423273 - RNA, 19 nt, Artificial Sequence
  Description of Artificial Sequence: Synthetic oligonucleotide
  Antisense strand to SEQ ID NO: 1423272
gauuccaccuauaugacaa

SEQ ID NO: 1423274 - RNA, 19 nt, Artificial Sequence
  Description of Artificial Sequence: Synthetic oligonucleotide
  Sense strand starting at position 3525 of SEQ ID NO: 1243541
uuaaguuucccucauguuu

SEQ ID NO: 1423275 - RNA, 19 nt, Artificial Sequence
  Description of Artificial Sequence: Synthetic oligonucleotide
  Antisense strand to SEQ ID NO: 1423274
aaacaugagggaaacuuaa

SEQ ID NO: 1423276 - RNA, 19 nt, Artificial Sequence
  Description of Artificial Sequence: Synthetic oligonucleotide
  Sense strand starting at position 3534 of SEQ ID NO: 1243541
ccucauguuucccucaagu

SEQ ID NO: 1423277 - RNA, 19 nt, Artificial Sequence
  Description of Artificial Sequence: Synthetic oligonucleotide
  Antisense strand to SEQ ID NO: 1423276
acuugagggaaacaugagg

SEQ ID NO: 1423278 - RNA, 19 nt, Artificial Sequence
  Description of Artificial Sequence: Synthetic oligonucleotide
  Sense strand starting at position 3536 of SEQ ID NO: 1243541
ucauguuucccucaaguua

SEQ ID NO: 1423279 - RNA, 19 nt, Artificial Sequence
  Description of Artificial Sequence: Synthetic oligonucleotide
  Antisense strand to SEQ ID NO: 1423278
uaacuugagggaaacauga

SEQ ID NO: 1423280 - RNA, 19 nt, Artificial Sequence
  Description of Artificial Sequence: Synthetic oligonucleotide
  Sense strand starting at position 3716 of SEQ ID NO: 1243541
acagccaugccuggguaau

SEQ ID NO: 1423281 - RNA, 19 nt, Artificial Sequence
  Description of Artificial Sequence: Synthetic oligonucleotide
  Antisense strand to SEQ ID NO: 1423280
auuacccaggcauggcugu

SEQ ID NO: 1423282 - RNA, 19 nt, Artificial Sequence
  Description of Artificial Sequence: Synthetic oligonucleotide
  Sense strand starting at position 3717 of SEQ ID NO: 1243541
cagccaugccuggguaauu

SEQ ID NO: 1423283 - RNA, 19 nt, Artificial Sequence
  Description of Artificial Sequence: Synthetic oligonucleotide
  Antisense strand to SEQ ID NO: 1423282
aauuacccaggcauggcug

SEQ ID NO: 1423284 - RNA, 19 nt, Artificial Sequence
  Description of Artificial Sequence: Synthetic oligonucleotide
  Sense strand starting at position 3718 of SEQ ID NO: 1243541
agccaugccuggguaauuu

SEQ ID NO: 1423285 - RNA, 19 nt, Artificial Sequence
  Description of Artificial Sequence: Synthetic oligonucleotide
  Antisense strand to SEQ ID NO: 1423284
aaauuacccaggcauggcu

SEQ ID NO: 1423286 - RNA, 19 nt, Artificial Sequence
  Description of Artificial Sequence: Synthetic oligonucleotide
  Sense strand starting at position 3893 of SEQ ID NO: 1243541
auucuacugucugcaugua

SEQ ID NO: 1423287 - RNA, 19 nt, Artificial Sequence
  Description of Artificial Sequence: Synthetic oligonucleotide
  Antisense strand to SEQ ID NO: 1423286
uacaugcagacaguagaau

SEQ ID NO: 1423288 - RNA, 19 nt, Artificial Sequence
  Description of Artificial Sequence: Synthetic oligonucleotide
  Sense strand starting at position 3943 of SEQ ID NO: 1243541
auacauugguugcuucuaa

SEQ ID NO: 1423289 - RNA, 19 nt, Artificial Sequence
  Description of Artificial Sequence: Synthetic oligonucleotide
  Antisense strand to SEQ ID NO: 1423288
uuagaagcaaccaauguau

SEQ ID NO: 1423290 - RNA, 19 nt, Artificial Sequence
  Description of Artificial Sequence: Synthetic oligonucleotide
  Sense strand starting at position 20 of SEQ ID NO: 1243542
ggauaacgaucaugaugug

SEQ ID NO: 1423291 - RNA, 19 nt, Artificial Sequence
  Description of Artificial Sequence: Synthetic oligonucleotide
  Antisense strand to SEQ ID NO: 1423290
cacaucaugaucguuaucc

SEQ ID NO: 1423292 - RNA, 19 nt, Artificial Sequence
  Description of Artificial Sequence: Synthetic oligonucleotide
  Sense strand starting at position 37 of SEQ ID NO: 1243542
ugcucuggcucuccucaaa

SEQ ID NO: 1423293 - RNA, 19 nt, Artificial Sequence
  Description of Artificial Sequence: Synthetic oligonucleotide
  Antisense strand to SEQ ID NO: 1423292
uuugaggagagccagagca

SEQ ID NO: 1423294 - RNA, 19 nt, Artificial Sequence
  Description of Artificial Sequence: Synthetic oligonucleotide
  Sense strand starting at position 56 of SEQ ID NO: 1243542
ccaaguaacugucuuguuu

SEQ ID NO: 1423295 - RNA, 19 nt, Artificial Sequence
  Description of Artificial Sequence: Synthetic oligonucleotide
  Antisense strand to SEQ ID NO: 1423294
aaacaagacaguuacuugg

SEQ ID NO: 1423296 - RNA, 19 nt, Artificial Sequence
  Description of Artificial Sequence: Synthetic oligonucleotide
  Sense strand starting at position 76 of SEQ ID NO: 1243542
aguauuggcaggugucuua

SEQ ID NO: 1423297 - RNA, 19 nt, Artificial Sequence
  Description of Artificial Sequence: Synthetic oligonucleotide
  Antisense strand to SEQ ID NO: 1423296
uaagacaccugccaauacu

SEQ ID NO: 1423298 - RNA, 19 nt, Artificial Sequence
  Description of Artificial Sequence: Synthetic oligonucleotide
  Sense strand starting at position 83 of SEQ ID NO: 1243542
gcaggugucuuacuccuua

SEQ ID NO: 1423299 - RNA, 19 nt, Artificial Sequence
  Description of Artificial Sequence: Synthetic oligonucleotide
  Antisense strand to SEQ ID NO: 1423298
uaaggaguaagacaccugc

SEQ ID NO: 1423300 - RNA, 19 nt, Artificial Sequence
  Description of Artificial Sequence: Synthetic oligonucleotide
  Sense strand starting at position 88 of SEQ ID NO: 1243542
ugucuuacuccuuaaggcu

SEQ ID NO: 1423301 - RNA, 19 nt, Artificial Sequence
  Description of Artificial Sequence: Synthetic oligonucleotide
  Antisense strand to SEQ ID NO: 1423300
agccuuaaggaguaagaca

SEQ ID NO: 1423302 - RNA, 19 nt, Artificial Sequence
  Description of Artificial Sequence: Synthetic oligonucleotide
  Sense strand starting at position 372 of SEQ ID NO: 1243542
ucaaauccagccuggagaa

SEQ ID NO: 1423303 - RNA, 19 nt, Artificial Sequence
  Description of Artificial Sequence: Synthetic oligonucleotide
  Antisense strand to SEQ ID NO: 1423302
uucuccaggcuggauuuga

SEQ ID NO: 1423304 - RNA, 19 nt, Artificial Sequence
  Description of Artificial Sequence: Synthetic oligonucleotide
  Sense strand starting at position 852 of SEQ ID NO: 1243542
ugauguauuguaugcuuaa

SEQ ID NO: 1423305 - RNA, 19 nt, Artificial Sequence
  Description of Artificial Sequence: Synthetic oligonucleotide
  Antisense strand to SEQ ID NO: 1423304
uuaagcauacaauacauca

SEQ ID NO: 1423306 - RNA, 19 nt, Artificial Sequence
  Description of Artificial Sequence: Synthetic oligonucleotide
  Sense strand starting at position 853 of SEQ ID NO: 1243542
gauguauuguaugcuuaau

SEQ ID NO: 1423307 - RNA, 19 nt, Artificial Sequence
  Description of Artificial Sequence: Synthetic oligonucleotide
  Antisense strand to SEQ ID NO: 1423306
auuaagcauacaauacauc

SEQ ID NO: 1423308 - RNA, 19 nt, Artificial Sequence
  Description of Artificial Sequence: Synthetic oligonucleotide
  Sense strand starting at position 855 of SEQ ID NO: 1243542
uguauuguaugcuuaauuc

SEQ ID NO: 1423309 - RNA, 19 nt, Artificial Sequence
  Description of Artificial Sequence: Synthetic oligonucleotide
  Antisense strand to SEQ ID NO: 1423308
gaauuaagcauacaauaca

SEQ ID NO: 1423310 - RNA, 19 nt, Artificial Sequence
  Description of Artificial Sequence: Synthetic oligonucleotide
  Sense strand starting at position 1085 of SEQ ID NO: 1243542
uugaauugaucuugauguc

SEQ ID NO: 1423311 - RNA, 19 nt, Artificial Sequence
  Description of Artificial Sequence: Synthetic oligonucleotide
  Antisense strand to SEQ ID NO: 1423310
gacaucaagaucaauucaa

SEQ ID NO: 1423312 - RNA, 19 nt, Artificial Sequence
  Description of Artificial Sequence: Synthetic oligonucleotide
  Sense strand starting at position 1086 of SEQ ID NO: 1243542
ugaauugaucuugaugucu

SEQ ID NO: 1423313 - RNA, 19 nt, Artificial Sequence
  Description of Artificial Sequence: Synthetic oligonucleotide
  Antisense strand to SEQ ID NO: 1423312
agacaucaagaucaauuca

SEQ ID NO: 1423314 - RNA, 19 nt, Artificial Sequence
  Description of Artificial Sequence: Synthetic oligonucleotide
  Sense strand starting at position 1177 of SEQ ID NO: 1243542
ccaucuggaucuugaugua

SEQ ID NO: 1423315 - RNA, 19 nt, Artificial Sequence
  Description of Artificial Sequence: Synthetic oligonucleotide
  Antisense strand to SEQ ID NO: 1423314
uacaucaagauccagaugg

SEQ ID NO: 1423316 - RNA, 19 nt, Artificial Sequence
  Description of Artificial Sequence: Synthetic oligonucleotide
  Sense strand starting at position 1180 of SEQ ID NO: 1243542
ucuggaucuugauguauuu

SEQ ID NO: 1423317 - RNA, 19 nt, Artificial Sequence
  Description of Artificial Sequence: Synthetic oligonucleotide
  Antisense strand to SEQ ID NO: 1423316
aaauacaucaagauccaga

SEQ ID NO: 1423318 - RNA, 19 nt, Artificial Sequence
  Description of Artificial Sequence: Synthetic oligonucleotide
  Sense strand starting at position 1218 of SEQ ID NO: 1243542
uggauaaccuuagaguugu

SEQ ID NO: 1423319 - RNA, 19 nt, Artificial Sequence
  Description of Artificial Sequence: Synthetic oligonucleotide
  Antisense strand to SEQ ID NO: 1423318
acaacucuaagguuaucca

SEQ ID NO: 1423320 - RNA, 19 nt, Artificial Sequence
  Description of Artificial Sequence: Synthetic oligonucleotide
  Sense strand starting at position 1283 of SEQ ID NO: 1243542
acgaaucagccucacauua

SEQ ID NO: 1423321 - RNA, 19 nt, Artificial Sequence
  Description of Artificial Sequence: Synthetic oligonucleotide
  Antisense strand to SEQ ID NO: 1423320
uaaugugaggcugauucgu

SEQ ID NO: 1423322 - RNA, 19 nt, Artificial Sequence
  Description of Artificial Sequence: Synthetic oligonucleotide
  Sense strand starting at position 1328 of SEQ ID NO: 1243542
gggagugaguugcucuauu

SEQ ID NO: 1423323 - RNA, 19 nt, Artificial Sequence
  Description of Artificial Sequence: Synthetic oligonucleotide
  Antisense strand to SEQ ID NO: 1423322
aauagagcaacucacuccc

SEQ ID NO: 1423324 - RNA, 19 nt, Artificial Sequence
  Description of Artificial Sequence: Synthetic oligonucleotide
  Sense strand starting at position 1442 of SEQ ID NO: 1243542
ugccuccuugcccaagaaa

SEQ ID NO: 1423325 - RNA, 19 nt, Artificial Sequence
  Description of Artificial Sequence: Synthetic oligonucleotide
  Antisense strand to SEQ ID NO: 1423324
uuucuugggcaaggaggca

SEQ ID NO: 1423326 - RNA, 19 nt, Artificial Sequence
  Description of Artificial Sequence: Synthetic oligonucleotide
  Sense strand starting at position 1471 of SEQ ID NO: 1243542
agccucuuccuagacaugu

SEQ ID NO: 1423327 - RNA, 19 nt, Artificial Sequence
  Description of Artificial Sequence: Synthetic oligonucleotide
  Antisense strand to SEQ ID NO: 1423326
acaugucuaggaagaggcu

SEQ ID NO: 1423328 - RNA, 19 nt, Artificial Sequence
  Description of Artificial Sequence: Synthetic oligonucleotide
  Sense strand starting at position 1622 of SEQ ID NO: 1243542
auuucuuauugacaagagu

SEQ ID NO: 1423329 - RNA, 19 nt, Artificial Sequence
  Description of Artificial Sequence: Synthetic oligonucleotide
  Antisense strand to SEQ ID NO: 1423328
acucuugucaauaagaaau

SEQ ID NO: 1423330 - RNA, 19 nt, Artificial Sequence
  Description of Artificial Sequence: Synthetic oligonucleotide
  Sense strand starting at position 2368 of SEQ ID NO: 1243542
cucgguuaucuccaauucu

SEQ ID NO: 1423331 - RNA, 19 nt, Artificial Sequence
  Description of Artificial Sequence: Synthetic oligonucleotide
  Antisense strand to SEQ ID NO: 1423330
agaauuggagauaaccgag

SEQ ID NO: 1423332 - RNA, 19 nt, Artificial Sequence
  Description of Artificial Sequence: Synthetic oligonucleotide
  Sense strand starting at position 2631 of SEQ ID NO: 1243542
gugugcgugucccuguauu

SEQ ID NO: 1423333 - RNA, 19 nt, Artificial Sequence
  Description of Artificial Sequence: Synthetic oligonucleotide
  Antisense strand to SEQ ID NO: 1423332
aauacagggacacgcacac

SEQ ID NO: 1423334 - RNA, 19 nt, Artificial Sequence
  Description of Artificial Sequence: Synthetic oligonucleotide
  Sense strand starting at position 2801 of SEQ ID NO: 1243542
ugacuucagcgguaagagu

SEQ ID NO: 1423335 - RNA, 19 nt, Artificial Sequence
  Description of Artificial Sequence: Synthetic oligonucleotide
  Antisense strand to SEQ ID NO: 1423334
acucuuaccgcugaaguca

SEQ ID NO: 1423336 - RNA, 19 nt, Artificial Sequence
  Description of Artificial Sequence: Synthetic oligonucleotide
  Sense strand starting at position 2933 of SEQ ID NO: 1243542
ccuccugagcaaugugcaa

SEQ ID NO: 1423337 - RNA, 19 nt, Artificial Sequence
  Description of Artificial Sequence: Synthetic oligonucleotide
  Antisense strand to SEQ ID NO: 1423336
uugcacauugcucaggagg

SEQ ID NO: 1423338 - RNA, 19 nt, Artificial Sequence
  Description of Artificial Sequence: Synthetic oligonucleotide
  Sense strand starting at position 2955 of SEQ ID NO: 1243542
cagaucuacugccguguua

SEQ ID NO: 1423339 - RNA, 19 nt, Artificial Sequence
  Description of Artificial Sequence: Synthetic oligonucleotide
  Antisense strand to SEQ ID NO: 1423338
uaacacggcaguagaucug

SEQ ID NO: 1423340 - RNA, 19 nt, Artificial Sequence
  Description of Artificial Sequence: Synthetic oligonucleotide
  Sense strand starting at position 2957 of SEQ ID NO: 1243542
gaucuacugccguguuauu

SEQ ID NO: 1423341 - RNA, 19 nt, Artificial Sequence
  Description of Artificial Sequence: Synthetic oligonucleotide
  Antisense strand to SEQ ID NO: 1423340
aauaacacggcaguagauc

SEQ ID NO: 1423342 - RNA, 19 nt, Artificial Sequence
  Description of Artificial Sequence: Synthetic oligonucleotide
  Sense strand starting at position 3018 of SEQ ID NO: 1243542
agcaaacaaugauggaaau

SEQ ID NO: 1423343 - RNA, 19 nt, Artificial Sequence
  Description of Artificial Sequence: Synthetic oligonucleotide
  Antisense strand to SEQ ID NO: 1423342
auuuccaucauuguuugcu

SEQ ID NO: 1423344 - RNA, 19 nt, Artificial Sequence
  Description of Artificial Sequence: Synthetic oligonucleotide
  Sense strand starting at position 3362 of SEQ ID NO: 1243542
agcuauuacguuuauguaa

SEQ ID NO: 1423345 - RNA, 19 nt, Artificial Sequence
  Description of Artificial Sequence: Synthetic oligonucleotide
  Antisense strand to SEQ ID NO: 1423344
uuacauaaacguaauagcu

SEQ ID NO: 1423346 - RNA, 19 nt, Artificial Sequence
  Description of Artificial Sequence: Synthetic oligonucleotide
  Sense strand starting at position 3370 of SEQ ID NO: 1243542
cguuuauguaauuaugucu

SEQ ID NO: 1423347 - RNA, 19 nt, Artificial Sequence
  Description of Artificial Sequence: Synthetic oligonucleotide
  Antisense strand to SEQ ID NO: 1423346
agacauaauuacauaaacg

SEQ ID NO: 1423348 - RNA, 19 nt, Artificial Sequence
  Description of Artificial Sequence: Synthetic oligonucleotide
  Sense strand starting at position 3384 of SEQ ID NO: 1243542
ugucuuauauaucacagac

SEQ ID NO: 1423349 - RNA, 19 nt, Artificial Sequence
  Description of Artificial Sequence: Synthetic oligonucleotide
  Antisense strand to SEQ ID NO: 1423348
gucugugauauauaagaca

SEQ ID NO: 1423350 - RNA, 19 nt, Artificial Sequence
  Description of Artificial Sequence: Synthetic oligonucleotide
  Sense strand starting at position 3408 of SEQ ID NO: 1243542
ggcuacauuuccuagauuu

SEQ ID NO: 1423351 - RNA, 19 nt, Artificial Sequence
  Description of Artificial Sequence: Synthetic oligonucleotide
  Antisense strand to SEQ ID NO: 1423350
aaaucuaggaaauguagcc

SEQ ID NO: 1423352 - RNA, 19 nt, Artificial Sequence
  Description of Artificial Sequence: Synthetic oligonucleotide
  Sense strand starting at position 3442 of SEQ ID NO: 1243542
acauuagagcauugcauac

SEQ ID NO: 1423353 - RNA, 19 nt, Artificial Sequence
  Description of Artificial Sequence: Synthetic oligonucleotide
  Antisense strand to SEQ ID NO: 1423352
guaugcaaugcucuaaugu

SEQ ID NO: 1423354 - RNA, 19 nt, Artificial Sequence
  Description of Artificial Sequence: Synthetic oligonucleotide
  Sense strand starting at position 3483 of SEQ ID NO: 1243542
aacgaaauguuccugaugu

SEQ ID NO: 1423355 - RNA, 19 nt, Artificial Sequence
  Description of Artificial Sequence: Synthetic oligonucleotide
  Antisense strand to SEQ ID NO: 1423354
acaucaggaacauuucguu

SEQ ID NO: 1423356 - RNA, 19 nt, Artificial Sequence
  Description of Artificial Sequence: Synthetic oligonucleotide
  Sense strand starting at position 3484 of SEQ ID NO: 1243542
acgaaauguuccugauguc

SEQ ID NO: 1423357 - RNA, 19 nt, Artificial Sequence
  Description of Artificial Sequence: Synthetic oligonucleotide
  Antisense strand to SEQ ID NO: 1423356
gacaucaggaacauuucgu

SEQ ID NO: 1423358 - RNA, 19 nt, Artificial Sequence
  Description of Artificial Sequence: Synthetic oligonucleotide
  Sense strand starting at position 3485 of SEQ ID NO: 1243542
cgaaauguuccugauguca

SEQ ID NO: 1423359 - RNA, 19 nt, Artificial Sequence
  Description of Artificial Sequence: Synthetic oligonucleotide
  Antisense strand to SEQ ID NO: 1423358
ugacaucaggaacauuucg

SEQ ID NO: 1423360 - RNA, 19 nt, Artificial Sequence
  Description of Artificial Sequence: Synthetic oligonucleotide
  Sense strand starting at position 3498 of SEQ ID NO: 1243542
augucacacugcuuuauca

SEQ ID NO: 1423361 - RNA, 19 nt, Artificial Sequence
  Description of Artificial Sequence: Synthetic oligonucleotide
  Antisense strand to SEQ ID NO: 1423360
ugauaaagcagugugacau

SEQ ID NO: 1423362 - RNA, 19 nt, Artificial Sequence
  Description of Artificial Sequence: Synthetic oligonucleotide
  Sense strand starting at position 3648 of SEQ ID NO: 1243542
ggagauagcucgucucuac

SEQ ID NO: 1423363 - RNA, 19 nt, Artificial Sequence
  Description of Artificial Sequence: Synthetic oligonucleotide
  Antisense strand to SEQ ID NO: 1423362
guagagacgagcuaucucc

SEQ ID NO: 1423364 - RNA, 19 nt, Artificial Sequence
  Description of Artificial Sequence: Synthetic oligonucleotide
  Sense strand starting at position 3906 of SEQ ID NO: 1243542
gcuaacaaguaaugaaaua

SEQ ID NO: 1423365 - RNA, 19 nt, Artificial Sequence
  Description of Artificial Sequence: Synthetic oligonucleotide
  Antisense strand to SEQ ID NO: 1423364
uauuucauuacuuguuagc

SEQ ID NO: 1423366 - RNA, 19 nt, Artificial Sequence
  Description of Artificial Sequence: Synthetic oligonucleotide
  Sense strand starting at position 121 of SEQ ID NO: 1243543
aucuuaacgugcugagauc

SEQ ID NO: 1423367 - RNA, 19 nt, Artificial Sequence
  Description of Artificial Sequence: Synthetic oligonucleotide
  Antisense strand to SEQ ID NO: 1423366
gaucucagcacguuaagau

SEQ ID NO: 1423368 - RNA, 19 nt, Artificial Sequence
  Description of Artificial Sequence: Synthetic oligonucleotide
  Sense strand starting at position 354 of SEQ ID NO: 1243543
ccuuaucagcgcuggagau

SEQ ID NO: 1423369 - RNA, 19 nt, Artificial Sequence
  Description of Artificial Sequence: Synthetic oligonucleotide
  Antisense strand to SEQ ID NO: 1423368
aucuccagcgcugauaagg

SEQ ID NO: 1423370 - RNA, 19 nt, Artificial Sequence
  Description of Artificial Sequence: Synthetic oligonucleotide
  Sense strand starting at position 384 of SEQ ID NO: 1243543
cugcgaucucccuguccga

SEQ ID NO: 1423371 - RNA, 19 nt, Artificial Sequence
  Description of Artificial Sequence: Synthetic oligonucleotide
  Antisense strand to SEQ ID NO: 1423370
ucggacagggagaucgcag

SEQ ID NO: 1423372 - RNA, 19 nt, Artificial Sequence
  Description of Artificial Sequence: Synthetic oligonucleotide
  Sense strand starting at position 397 of SEQ ID NO: 1243543
guccgagcuaucugcauuu

SEQ ID NO: 1423373 - RNA, 19 nt, Artificial Sequence
  Description of Artificial Sequence: Synthetic oligonucleotide
  Antisense strand to SEQ ID NO: 1423372
aaaugcagauagcucggac

SEQ ID NO: 1423374 - RNA, 19 nt, Artificial Sequence
  Description of Artificial Sequence: Synthetic oligonucleotide
  Sense strand starting at position 399 of SEQ ID NO: 1243543
ccgagcuaucugcauuucu

SEQ ID NO: 1423375 - RNA, 19 nt, Artificial Sequence
  Description of Artificial Sequence: Synthetic oligonucleotide
  Antisense strand to SEQ ID NO: 1423374
agaaaugcagauagcucgg

SEQ ID NO: 1423376 - RNA, 19 nt, Artificial Sequence
  Description of Artificial Sequence: Synthetic oligonucleotide
  Sense strand starting at position 408 of SEQ ID NO: 1243543
cugcauuucucaucacagu

SEQ ID NO: 1423377 - RNA, 19 nt, Artificial Sequence
  Description of Artificial Sequence: Synthetic oligonucleotide
  Antisense strand to SEQ ID NO: 1423376
acugugaugagaaaugcag

SEQ ID NO: 1423378 - RNA, 19 nt, Artificial Sequence
  Description of Artificial Sequence: Synthetic oligonucleotide
  Sense strand starting at position 556 of SEQ ID NO: 1243543
uuuaauacuugaguugaca

SEQ ID NO: 1423379 - RNA, 19 nt, Artificial Sequence
  Description of Artificial Sequence: Synthetic oligonucleotide
  Antisense strand to SEQ ID NO: 1423378
ugucaacucaaguauuaaa

SEQ ID NO: 1423380 - RNA, 19 nt, Artificial Sequence
  Description of Artificial Sequence: Synthetic oligonucleotide
  Sense strand starting at position 719 of SEQ ID NO: 1243543
gcaguggucguguggacaa

SEQ ID NO: 1423381 - RNA, 19 nt, Artificial Sequence
  Description of Artificial Sequence: Synthetic oligonucleotide
  Antisense strand to SEQ ID NO: 1423380
uuguccacacgaccacugc

SEQ ID NO: 1423382 - RNA, 19 nt, Artificial Sequence
  Description of Artificial Sequence: Synthetic oligonucleotide
  Sense strand starting at position 871 of SEQ ID NO: 1243543
aacugugaggcgcaaaguu

SEQ ID NO: 1423383 - RNA, 19 nt, Artificial Sequence
  Description of Artificial Sequence: Synthetic oligonucleotide
  Antisense strand to SEQ ID NO: 1423382
aacuuugcgccucacaguu

SEQ ID NO: 1423384 - RNA, 19 nt, Artificial Sequence
  Description of Artificial Sequence: Synthetic oligonucleotide
  Sense strand starting at position 975 of SEQ ID NO: 1243543
ccgacagcuuaguucucau

SEQ ID NO: 1423385 - RNA, 19 nt, Artificial Sequence
  Description of Artificial Sequence: Synthetic oligonucleotide
  Antisense strand to SEQ ID NO: 1423384
augagaacuaagcugucgg

SEQ ID NO: 1423386 - RNA, 19 nt, Artificial Sequence
  Description of Artificial Sequence: Synthetic oligonucleotide
  Sense strand starting at position 1484 of SEQ ID NO: 1243543
gagucaaccgcgcgagaua

SEQ ID NO: 1423387 - RNA, 19 nt, Artificial Sequence
  Description of Artificial Sequence: Synthetic oligonucleotide
  Antisense strand to SEQ ID NO: 1423386
uaucucgcgcgguugacuc

SEQ ID NO: 1423388 - RNA, 19 nt, Artificial Sequence
  Description of Artificial Sequence: Synthetic oligonucleotide
  Sense strand starting at position 1522 of SEQ ID NO: 1243543
ucccgacagaacgaucuua

SEQ ID NO: 1423389 - RNA, 19 nt, Artificial Sequence
  Description of Artificial Sequence: Synthetic oligonucleotide
  Antisense strand to SEQ ID NO: 1423388
uaagaucguucugucggga

SEQ ID NO: 1423390 - RNA, 19 nt, Artificial Sequence
  Description of Artificial Sequence: Synthetic oligonucleotide
  Sense strand starting at position 1533 of SEQ ID NO: 1243543
cgaucuuaucaggacggga

SEQ ID NO: 1423391 - RNA, 19 nt, Artificial Sequence
  Description of Artificial Sequence: Synthetic oligonucleotide
  Antisense strand to SEQ ID NO: 1423390
ucccguccugauaagaucg

SEQ ID NO: 1423392 - RNA, 19 nt, Artificial Sequence
  Description of Artificial Sequence: Synthetic oligonucleotide
  Sense strand starting at position 1546 of SEQ ID NO: 1243543
acgggacuugcagaaugua

SEQ ID NO: 1423393 - RNA, 19 nt, Artificial Sequence
  Description of Artificial Sequence: Synthetic oligonucleotide
  Antisense strand to SEQ ID NO: 1423392
uacauucugcaagucccgu

SEQ ID NO: 1423394 - RNA, 19 nt, Artificial Sequence
  Description of Artificial Sequence: Synthetic oligonucleotide
  Sense strand starting at position 1549 of SEQ ID NO: 1243543
ggacuugcagaauguaaua

SEQ ID NO: 1423395 - RNA, 19 nt, Artificial Sequence
  Description of Artificial Sequence: Synthetic oligonucleotide
  Antisense strand to SEQ ID NO: 1423394
uauuacauucugcaagucc

SEQ ID NO: 1423396 - RNA, 19 nt, Artificial Sequence
  Description of Artificial Sequence: Synthetic oligonucleotide
  Sense strand starting at position 1916 of SEQ ID NO: 1243543
aaguuugacucacgcuuga

SEQ ID NO: 1423397 - RNA, 19 nt, Artificial Sequence
  Description of Artificial Sequence: Synthetic oligonucleotide
  Antisense strand to SEQ ID NO: 1423396
ucaagcgugagucaaacuu

SEQ ID NO: 1423398 - RNA, 19 nt, Artificial Sequence
  Description of Artificial Sequence: Synthetic oligonucleotide
  Sense strand starting at position 2721 of SEQ ID NO: 1243543
cugggagucugagaccuau

SEQ ID NO: 1423399 - RNA, 19 nt, Artificial Sequence
  Description of Artificial Sequence: Synthetic oligonucleotide
  Antisense strand to SEQ ID NO: 1423398
auaggucucagacucccag

SEQ ID NO: 1423400 - RNA, 19 nt, Artificial Sequence
  Description of Artificial Sequence: Synthetic oligonucleotide
  Sense strand starting at position 2731 of SEQ ID NO: 1243543
gagaccuauucgguucugu

SEQ ID NO: 1423401 - RNA, 19 nt, Artificial Sequence
  Description of Artificial Sequence: Synthetic oligonucleotide
  Antisense strand to SEQ ID NO: 1423400
acagaaccgaauaggucuc

SEQ ID NO: 1423402 - RNA, 19 nt, Artificial Sequence
  Description of Artificial Sequence: Synthetic oligonucleotide
  Sense strand starting at position 2977 of SEQ ID NO: 1243543
acguuucucuugggccaga

SEQ ID NO: 1423403 - RNA, 19 nt, Artificial Sequence
  Description of Artificial Sequence: Synthetic oligonucleotide
  Antisense strand to SEQ ID NO: 1423402
ucuggcccaagagaaacgu

SEQ ID NO: 1423404 - RNA, 19 nt, Artificial Sequence
  Description of Artificial Sequence: Synthetic oligonucleotide
  Sense strand starting at position 3257 of SEQ ID NO: 1243543
gucagaggucagcgagguu

SEQ ID NO: 1423405 - RNA, 19 nt, Artificial Sequence
  Description of Artificial Sequence: Synthetic oligonucleotide
  Antisense strand to SEQ ID NO: 1423404
aaccucgcugaccucugac

SEQ ID NO: 1423406 - RNA, 19 nt, Artificial Sequence
  Description of Artificial Sequence: Synthetic oligonucleotide
  Sense strand starting at position 3408 of SEQ ID NO: 1243543
ccagcugaguuguaucauc

SEQ ID NO: 1423407 - RNA, 19 nt, Artificial Sequence
  Description of Artificial Sequence: Synthetic oligonucleotide
  Antisense strand to SEQ ID NO: 1423406
gaugauacaacucagcugg

SEQ ID NO: 1423408 - RNA, 19 nt, Artificial Sequence
  Description of Artificial Sequence: Synthetic oligonucleotide
  Sense strand starting at position 3413 of SEQ ID NO: 1243543
ugaguuguaucaucuccuu

SEQ ID NO: 1423409 - RNA, 19 nt, Artificial Sequence
  Description of Artificial Sequence: Synthetic oligonucleotide
  Antisense strand to SEQ ID NO: 1423408
aaggagaugauacaacuca

SEQ ID NO: 1423410 - RNA, 19 nt, Artificial Sequence
  Description of Artificial Sequence: Synthetic oligonucleotide
  Sense strand starting at position 3533 of SEQ ID NO: 1243543
accugaugaugagaucauc

SEQ ID NO: 1423411 - RNA, 19 nt, Artificial Sequence
  Description of Artificial Sequence: Synthetic oligonucleotide
  Antisense strand to SEQ ID NO: 1423410
gaugaucucaucaucaggu

SEQ ID NO: 1423412 - RNA, 19 nt, Artificial Sequence
  Description of Artificial Sequence: Synthetic oligonucleotide
  Sense strand starting at position 3536 of SEQ ID NO: 1243543
ugaugaugagaucaucgca

SEQ ID NO: 1423413 - RNA, 19 nt, Artificial Sequence
  Description of Artificial Sequence: Synthetic oligonucleotide
  Antisense strand to SEQ ID NO: 1423412
ugcgaugaucucaucauca

SEQ ID NO: 1423414 - RNA, 19 nt, Artificial Sequence
  Description of Artificial Sequence: Synthetic oligonucleotide
  Sense strand starting at position 3541 of SEQ ID NO: 1243543
augagaucaucgcacagca

SEQ ID NO: 1423415 - RNA, 19 nt, Artificial Sequence
  Description of Artificial Sequence: Synthetic oligonucleotide
  Antisense strand to SEQ ID NO: 1423414
ugcugugcgaugaucucau

SEQ ID NO: 1423416 - RNA, 19 nt, Artificial Sequence
  Description of Artificial Sequence: Synthetic oligonucleotide
  Sense strand starting at position 3612 of SEQ ID NO: 1243543
ugccaacuucugugaccua

SEQ ID NO: 1423417 - RNA, 19 nt, Artificial Sequence
  Description of Artificial Sequence: Synthetic oligonucleotide
  Antisense strand to SEQ ID NO: 1423416
uaggucacagaaguuggca

SEQ ID NO: 1423418 - RNA, 19 nt, Artificial Sequence
  Description of Artificial Sequence: Synthetic oligonucleotide
  Sense strand starting at position 3613 of SEQ ID NO: 1243543
gccaacuucugugaccuau

SEQ ID NO: 1423419 - RNA, 19 nt, Artificial Sequence
  Description of Artificial Sequence: Synthetic oligonucleotide
  Antisense strand to SEQ ID NO: 1423418
auaggucacagaaguuggc

SEQ ID NO: 1423420 - RNA, 19 nt, Artificial Sequence
  Description of Artificial Sequence: Synthetic oligonucleotide
  Sense strand starting at position 222 of SEQ ID NO: 1243544
cugggugaacccuggaaga

SEQ ID NO: 1423421 - RNA, 19 nt, Artificial Sequence
  Description of Artificial Sequence: Synthetic oligonucleotide
  Antisense strand to SEQ ID NO: 1423420
ucuuccaggguucacccag

SEQ ID NO: 1423422 - RNA, 19 nt, Artificial Sequence
  Description of Artificial Sequence: Synthetic oligonucleotide
  Sense strand starting at position 369 of SEQ ID NO: 1243544
uccugaguaguugaggcua

SEQ ID NO: 1423423 - RNA, 19 nt, Artificial Sequence
  Description of Artificial Sequence: Synthetic oligonucleotide
  Antisense strand to SEQ ID NO: 1423422
uagccucaacuacucagga

SEQ ID NO: 1423424 - RNA, 19 nt, Artificial Sequence
  Description of Artificial Sequence: Synthetic oligonucleotide
  Sense strand starting at position 539 of SEQ ID NO: 1243544
cucccaaagcauuguaaug

SEQ ID NO: 1423425 - RNA, 19 nt, Artificial Sequence
  Description of Artificial Sequence: Synthetic oligonucleotide
  Antisense strand to SEQ ID NO: 1423424
cauuacaaugcuuugggag

SEQ ID NO: 1423426 - RNA, 19 nt, Artificial Sequence
  Description of Artificial Sequence: Synthetic oligonucleotide
  Sense strand starting at position 764 of SEQ ID NO: 1243544
agaaaucuuccaggaguuc

SEQ ID NO: 1423427 - RNA, 19 nt, Artificial Sequence
  Description of Artificial Sequence: Synthetic oligonucleotide
  Antisense strand to SEQ ID NO: 1423426
gaacuccuggaagauuucu

SEQ ID NO: 1423428 - RNA, 19 nt, Artificial Sequence
  Description of Artificial Sequence: Synthetic oligonucleotide
  Sense strand starting at position 1020 of SEQ ID NO: 1243544
cuuccuuguugacuugauu

SEQ ID NO: 1423429 - RNA, 19 nt, Artificial Sequence
  Description of Artificial Sequence: Synthetic oligonucleotide
  Antisense strand to SEQ ID NO: 1423428
aaucaagucaacaaggaag

SEQ ID NO: 1423430 - RNA, 19 nt, Artificial Sequence
  Description of Artificial Sequence: Synthetic oligonucleotide
  Sense strand starting at position 1103 of SEQ ID NO: 1243544
agacccagucuugagcuua

SEQ ID NO: 1423431 - RNA, 19 nt, Artificial Sequence
  Description of Artificial Sequence: Synthetic oligonucleotide
  Antisense strand to SEQ ID NO: 1423430
uaagcucaagacugggucu

SEQ ID NO: 1423432 - RNA, 19 nt, Artificial Sequence
  Description of Artificial Sequence: Synthetic oligonucleotide
  Sense strand starting at position 1108 of SEQ ID NO: 1243544
cagucuugagcuuagaaag

SEQ ID NO: 1423433 - RNA, 19 nt, Artificial Sequence
  Description of Artificial Sequence: Synthetic oligonucleotide
  Antisense strand to SEQ ID NO: 1423432
cuuucuaagcucaagacug

SEQ ID NO: 1423434 - RNA, 19 nt, Artificial Sequence
  Description of Artificial Sequence: Synthetic oligonucleotide
  Sense strand starting at position 1118 of SEQ ID NO: 1243544
cuuagaaaggacuguccau

SEQ ID NO: 1423435 - RNA, 19 nt, Artificial Sequence
  Description of Artificial Sequence: Synthetic oligonucleotide
  Antisense strand to SEQ ID NO: 1423434
auggacaguccuuucuaag

SEQ ID NO: 1423436 - RNA, 19 nt, Artificial Sequence
  Description of Artificial Sequence: Synthetic oligonucleotide
  Sense strand starting at position 1229 of SEQ ID NO: 1243544
uucucucaggccugaagau

SEQ ID NO: 1423437 - RNA, 19 nt, Artificial Sequence
  Description of Artificial Sequence: Synthetic oligonucleotide
  Antisense strand to SEQ ID NO: 1423436
aucuucaggccugagagaa

SEQ ID NO: 1423438 - RNA, 19 nt, Artificial Sequence
  Description of Artificial Sequence: Synthetic oligonucleotide
  Sense strand starting at position 1262 of SEQ ID NO: 1243544
uggauuaagccuuauucca

SEQ ID NO: 1423439 - RNA, 19 nt, Artificial Sequence
  Description of Artificial Sequence: Synthetic oligonucleotide
  Antisense strand to SEQ ID NO: 1423438
uggaauaaggcuuaaucca

SEQ ID NO: 1423440 - RNA, 19 nt, Artificial Sequence
  Description of Artificial Sequence: Synthetic oligonucleotide
  Sense strand starting at position 1398 of SEQ ID NO: 1243544
caaagagauggcugaguuu

SEQ ID NO: 1423441 - RNA, 19 nt, Artificial Sequence
  Description of Artificial Sequence: Synthetic oligonucleotide
  Antisense strand to SEQ ID NO: 1423440
aaacucagccaucucuuug

SEQ ID NO: 1423442 - RNA, 19 nt, Artificial Sequence
  Description of Artificial Sequence: Synthetic oligonucleotide
  Sense strand starting at position 1401 of SEQ ID NO: 1243544
agagauggcugaguuuacu

SEQ ID NO: 1423443 - RNA, 19 nt, Artificial Sequence
  Description of Artificial Sequence: Synthetic oligonucleotide
  Antisense strand to SEQ ID NO: 1423442
aguaaacucagccaucucu

SEQ ID NO: 1423444 - RNA, 19 nt, Artificial Sequence
  Description of Artificial Sequence: Synthetic oligonucleotide
  Sense strand starting at position 1410 of SEQ ID NO: 1243544
ugaguuuacugagcccaga

SEQ ID NO: 1423445 - RNA, 19 nt, Artificial Sequence
  Description of Artificial Sequence: Synthetic oligonucleotide
  Antisense strand to SEQ ID NO: 1423444
ucugggcucaguaaacuca

SEQ ID NO: 1423446 - RNA, 19 nt, Artificial Sequence
  Description of Artificial Sequence: Synthetic oligonucleotide
  Sense strand starting at position 1444 of SEQ ID NO: 1243544
gccucaucaucugugguga

SEQ ID NO: 1423447 - RNA, 19 nt, Artificial Sequence
  Description of Artificial Sequence: Synthetic oligonucleotide
  Antisense strand to SEQ ID NO: 1423446
ucaccacagaugaugaggc

SEQ ID NO: 1423448 - RNA, 19 nt, Artificial Sequence
  Description of Artificial Sequence: Synthetic oligonucleotide
  Sense strand starting at position 1445 of SEQ ID NO: 1243544
ccucaucaucuguggugaa

SEQ ID NO: 1423449 - RNA, 19 nt, Artificial Sequence
  Description of Artificial Sequence: Synthetic oligonucleotide
  Antisense strand to SEQ ID NO: 1423448
uucaccacagaugaugagg

SEQ ID NO: 1423450 - RNA, 19 nt, Artificial Sequence
  Description of Artificial Sequence: Synthetic oligonucleotide
  Sense strand starting at position 1458 of SEQ ID NO: 1243544
ggugaauuggccuggauua

SEQ ID NO: 1423451 - RNA, 19 nt, Artificial Sequence
  Description of Artificial Sequence: Synthetic oligonucleotide
  Antisense strand to SEQ ID NO: 1423450
uaauccaggccaauucacc

SEQ ID NO: 1423452 - RNA, 19 nt, Artificial Sequence
  Description of Artificial Sequence: Synthetic oligonucleotide
  Sense strand starting at position 1459 of SEQ ID NO: 1243544
gugaauuggccuggauuau

SEQ ID NO: 1423453 - RNA, 19 nt, Artificial Sequence
  Description of Artificial Sequence: Synthetic oligonucleotide
  Antisense strand to SEQ ID NO: 1423452
auaauccaggccaauucac

SEQ ID NO: 1423454 - RNA, 19 nt, Artificial Sequence
  Description of Artificial Sequence: Synthetic oligonucleotide
  Sense strand starting at position 1460 of SEQ ID NO: 1243544
ugaauuggccuggauuaug

SEQ ID NO: 1423455 - RNA, 19 nt, Artificial Sequence
  Description of Artificial Sequence: Synthetic oligonucleotide
  Antisense strand to SEQ ID NO: 1423454
cauaauccaggccaauuca

SEQ ID NO: 1423456 - RNA, 19 nt, Artificial Sequence
  Description of Artificial Sequence: Synthetic oligonucleotide
  Sense strand starting at position 1493 of SEQ ID NO: 1243544
ugguuuaaaucccuggcau

SEQ ID NO: 1423457 - RNA, 19 nt, Artificial Sequence
  Description of Artificial Sequence: Synthetic oligonucleotide
  Antisense strand to SEQ ID NO: 1423456
augccagggauuuaaacca

SEQ ID NO: 1423458 - RNA, 19 nt, Artificial Sequence
  Description of Artificial Sequence: Synthetic oligonucleotide
  Sense strand starting at position 1494 of SEQ ID NO: 1243544
gguuuaaaucccuggcauc

SEQ ID NO: 1423459 - RNA, 19 nt, Artificial Sequence
  Description of Artificial Sequence: Synthetic oligonucleotide
  Antisense strand to SEQ ID NO: 1423458
gaugccagggauuuaaacc

SEQ ID NO: 1423460 - RNA, 19 nt, Artificial Sequence
  Description of Artificial Sequence: Synthetic oligonucleotide
  Sense strand starting at position 1540 of SEQ ID NO: 1243544
uagaguugccucuauguua

SEQ ID NO: 1423461 - RNA, 19 nt, Artificial Sequence
  Description of Artificial Sequence: Synthetic oligonucleotide
  Antisense strand to SEQ ID NO: 1423460
uaacauagaggcaacucua

SEQ ID NO: 1423462 - RNA, 19 nt, Artificial Sequence
  Description of Artificial Sequence: Synthetic oligonucleotide
  Sense strand starting at position 1656 of SEQ ID NO: 1243544
ucgggaccagcucaagaua

SEQ ID NO: 1423463 - RNA, 19 nt, Artificial Sequence
  Description of Artificial Sequence: Synthetic oligonucleotide
  Antisense strand to SEQ ID NO: 1423462
uaucuugagcuggucccga

SEQ ID NO: 1423464 - RNA, 19 nt, Artificial Sequence
  Description of Artificial Sequence: Synthetic oligonucleotide
  Sense strand starting at position 1689 of SEQ ID NO: 1243544
ccuggucuaugugucacua

SEQ ID NO: 1423465 - RNA, 19 nt, Artificial Sequence
  Description of Artificial Sequence: Synthetic oligonucleotide
  Antisense strand to SEQ ID NO: 1423464
uagugacacauagaccagg

SEQ ID NO: 1423466 - RNA, 19 nt, Artificial Sequence
  Description of Artificial Sequence: Synthetic oligonucleotide
  Sense strand starting at position 2009 of SEQ ID NO: 1243544
cccuuuauugugugaaccu

SEQ ID NO: 1423467 - RNA, 19 nt, Artificial Sequence
  Description of Artificial Sequence: Synthetic oligonucleotide
  Antisense strand to SEQ ID NO: 1423466
agguucacacaauaaaggg

SEQ ID NO: 1423468 - RNA, 19 nt, Artificial Sequence
  Description of Artificial Sequence: Synthetic oligonucleotide
  Sense strand starting at position 2131 of SEQ ID NO: 1243544
aggguaagauucucugagu

SEQ ID NO: 1423469 - RNA, 19 nt, Artificial Sequence
  Description of Artificial Sequence: Synthetic oligonucleotide
  Antisense strand to SEQ ID NO: 1423468
acucagagaaucuuacccu

SEQ ID NO: 1423470 - RNA, 19 nt, Artificial Sequence
  Description of Artificial Sequence: Synthetic oligonucleotide
  Sense strand starting at position 2455 of SEQ ID NO: 1243544
ugccguauaccaggagaaa

SEQ ID NO: 1423471 - RNA, 19 nt, Artificial Sequence
  Description of Artificial Sequence: Synthetic oligonucleotide
  Antisense strand to SEQ ID NO: 1423470
uuucuccugguauacggca

SEQ ID NO: 1423472 - RNA, 19 nt, Artificial Sequence
  Description of Artificial Sequence: Synthetic oligonucleotide
  Sense strand starting at position 2456 of SEQ ID NO: 1243544
gccguauaccaggagaaac

SEQ ID NO: 1423473 - RNA, 19 nt, Artificial Sequence
  Description of Artificial Sequence: Synthetic oligonucleotide
  Antisense strand to SEQ ID NO: 1423472
guuucuccugguauacggc

SEQ ID NO: 1423474 - RNA, 19 nt, Artificial Sequence
  Description of Artificial Sequence: Synthetic oligonucleotide
  Sense strand starting at position 2467 of SEQ ID NO: 1243544
ggagaaacauaguaaacuu

SEQ ID NO: 1423475 - RNA, 19 nt, Artificial Sequence
  Description of Artificial Sequence: Synthetic oligonucleotide
  Antisense strand to SEQ ID NO: 1423474
aaguuuacuauguuucucc

SEQ ID NO: 1423476 - RNA, 19 nt, Artificial Sequence
  Description of Artificial Sequence: Synthetic oligonucleotide
  Sense strand starting at position 2521 of SEQ ID NO: 1243544
gcuuaucaccucuaggcuu

SEQ ID NO: 1423477 - RNA, 19 nt, Artificial Sequence
  Description of Artificial Sequence: Synthetic oligonucleotide
  Antisense strand to SEQ ID NO: 1423476
aagccuagaggugauaagc

SEQ ID NO: 1423478 - RNA, 19 nt, Artificial Sequence
  Description of Artificial Sequence: Synthetic oligonucleotide
  Sense strand starting at position 2545 of SEQ ID NO: 1243544
gugcucucaccugaaaucu

SEQ ID NO: 1423479 - RNA, 19 nt, Artificial Sequence
  Description of Artificial Sequence: Synthetic oligonucleotide
  Antisense strand to SEQ ID NO: 1423478
agauuucaggugagagcac

SEQ ID NO: 1423480 - RNA, 19 nt, Artificial Sequence
  Description of Artificial Sequence: Synthetic oligonucleotide
  Sense strand starting at position 2595 of SEQ ID NO: 1243544
aggcauucgaaauguggau

SEQ ID NO: 1423481 - RNA, 19 nt, Artificial Sequence
  Description of Artificial Sequence: Synthetic oligonucleotide
  Antisense strand to SEQ ID NO: 1423480
auccacauuucgaaugccu

SEQ ID NO: 1423482 - RNA, 19 nt, Artificial Sequence
  Description of Artificial Sequence: Synthetic oligonucleotide
  Sense strand starting at position 2604 of SEQ ID NO: 1243544
aaauguggauucucccaga

SEQ ID NO: 1423483 - RNA, 19 nt, Artificial Sequence
  Description of Artificial Sequence: Synthetic oligonucleotide
  Antisense strand to SEQ ID NO: 1423482
ucugggagaauccacauuu

SEQ ID NO: 1423484 - RNA, 19 nt, Artificial Sequence
  Description of Artificial Sequence: Synthetic oligonucleotide
  Sense strand starting at position 2659 of SEQ ID NO: 1243544
cugacuauuugccagacau

SEQ ID NO: 1423485 - RNA, 19 nt, Artificial Sequence
  Description of Artificial Sequence: Synthetic oligonucleotide
  Antisense strand to SEQ ID NO: 1423484
augucuggcaaauagucag

SEQ ID NO: 1423486 - RNA, 19 nt, Artificial Sequence
  Description of Artificial Sequence: Synthetic oligonucleotide
  Sense strand starting at position 3269 of SEQ ID NO: 1243544
agcugaggaggucaaaguu

SEQ ID NO: 1423487 - RNA, 19 nt, Artificial Sequence
  Description of Artificial Sequence: Synthetic oligonucleotide
  Antisense strand to SEQ ID NO: 1423486
aacuuugaccuccucagcu

SEQ ID NO: 1423488 - RNA, 19 nt, Artificial Sequence
  Description of Artificial Sequence: Synthetic oligonucleotide
  Sense strand starting at position 3291 of SEQ ID NO: 1243544
gugagccaugaucgaaaca

SEQ ID NO: 1423489 - RNA, 19 nt, Artificial Sequence
  Description of Artificial Sequence: Synthetic oligonucleotide
  Antisense strand to SEQ ID NO: 1423488
uguuucgaucauggcucac

SEQ ID NO: 1423490 - RNA, 19 nt, Artificial Sequence
  Description of Artificial Sequence: Synthetic oligonucleotide
  Sense strand starting at position 3292 of SEQ ID NO: 1243544
ugagccaugaucgaaacau

SEQ ID NO: 1423491 - RNA, 19 nt, Artificial Sequence
  Description of Artificial Sequence: Synthetic oligonucleotide
  Antisense strand to SEQ ID NO: 1423490
auguuucgaucauggcuca

SEQ ID NO: 1423492 - RNA, 19 nt, Artificial Sequence
  Description of Artificial Sequence: Synthetic oligonucleotide
  Sense strand starting at position 3772 of SEQ ID NO: 1243544
ccauuucucucugagaagg

SEQ ID NO: 1423493 - RNA, 19 nt, Artificial Sequence
  Description of Artificial Sequence: Synthetic oligonucleotide
  Antisense strand to SEQ ID NO: 1423492
ccuucucagagagaaaugg

SEQ ID NO: 1423494 - RNA, 19 nt, Artificial Sequence
  Description of Artificial Sequence: Synthetic oligonucleotide
  Sense strand starting at position 3774 of SEQ ID NO: 1243544
auuucucucugagaaggau

SEQ ID NO: 1423495 - RNA, 19 nt, Artificial Sequence
  Description of Artificial Sequence: Synthetic oligonucleotide
  Antisense strand to SEQ ID NO: 1423494
auccuucucagagagaaau

SEQ ID NO: 1423496 - RNA, 19 nt, Artificial Sequence
  Description of Artificial Sequence: Synthetic oligonucleotide
  Sense strand starting at position 3840 of SEQ ID NO: 1243544
gaaacagagucaguccaau

SEQ ID NO: 1423497 - RNA, 19 nt, Artificial Sequence
  Description of Artificial Sequence: Synthetic oligonucleotide
  Antisense strand to SEQ ID NO: 1423496
auuggacugacucuguuuc

SEQ ID NO: 1423498 - RNA, 19 nt, Artificial Sequence
  Description of Artificial Sequence: Synthetic oligonucleotide
  Sense strand starting at position 3846 of SEQ ID NO: 1243544
gagucaguccaaugggaag

SEQ ID NO: 1423499 - RNA, 19 nt, Artificial Sequence
  Description of Artificial Sequence: Synthetic oligonucleotide
  Antisense strand to SEQ ID NO: 1423498
cuucccauuggacugacuc

SEQ ID NO: 1423500 - RNA, 19 nt, Artificial Sequence
  Description of Artificial Sequence: Synthetic oligonucleotide
  Sense strand starting at position 698 of SEQ ID NO: 1243545
gucacuguggcccacauau

SEQ ID NO: 1423501 - RNA, 19 nt, Artificial Sequence
  Description of Artificial Sequence: Synthetic oligonucleotide
  Antisense strand to SEQ ID NO: 1423500
auaugugggccacagugac

SEQ ID NO: 1423502 - RNA, 19 nt, Artificial Sequence
  Description of Artificial Sequence: Synthetic oligonucleotide
  Sense strand starting at position 789 of SEQ ID NO: 1243545
gcaggugacuucccacacu

SEQ ID NO: 1423503 - RNA, 19 nt, Artificial Sequence
  Description of Artificial Sequence: Synthetic oligonucleotide
  Antisense strand to SEQ ID NO: 1423502
agugugggaagucaccugc

SEQ ID NO: 1423504 - RNA, 19 nt, Artificial Sequence
  Description of Artificial Sequence: Synthetic oligonucleotide
  Sense strand starting at position 898 of SEQ ID NO: 1243545
cucugucuccucugcuauu

SEQ ID NO: 1423505 - RNA, 19 nt, Artificial Sequence
  Description of Artificial Sequence: Synthetic oligonucleotide
  Antisense strand to SEQ ID NO: 1423504
aauagcagaggagacagag

SEQ ID NO: 1423506 - RNA, 19 nt, Artificial Sequence
  Description of Artificial Sequence: Synthetic oligonucleotide
  Sense strand starting at position 988 of SEQ ID NO: 1243545
cagagacacuucgauauua

SEQ ID NO: 1423507 - RNA, 19 nt, Artificial Sequence
  Description of Artificial Sequence: Synthetic oligonucleotide
  Antisense strand to SEQ ID NO: 1423506
uaauaucgaagugucucug

SEQ ID NO: 1423508 - RNA, 19 nt, Artificial Sequence
  Description of Artificial Sequence: Synthetic oligonucleotide
  Sense strand starting at position 993 of SEQ ID NO: 1243545
acacuucgauauuaaggaa

SEQ ID NO: 1423509 - RNA, 19 nt, Artificial Sequence
  Description of Artificial Sequence: Synthetic oligonucleotide
  Antisense strand to SEQ ID NO: 1423508
uuccuuaauaucgaagugu

SEQ ID NO: 1423510 - RNA, 19 nt, Artificial Sequence
  Description of Artificial Sequence: Synthetic oligonucleotide
  Sense strand starting at position 1007 of SEQ ID NO: 1243545
aggaaauggcccuggacuu

SEQ ID NO: 1423511 - RNA, 19 nt, Artificial Sequence
  Description of Artificial Sequence: Synthetic oligonucleotide
  Antisense strand to SEQ ID NO: 1423510
aaguccagggccauuuccu

SEQ ID NO: 1423512 - RNA, 19 nt, Artificial Sequence
  Description of Artificial Sequence: Synthetic oligonucleotide
  Sense strand starting at position 1032 of SEQ ID NO: 1243545
cuaacacuucugcgacuca

SEQ ID NO: 1423513 - RNA, 19 nt, Artificial Sequence
  Description of Artificial Sequence: Synthetic oligonucleotide
  Antisense strand to SEQ ID NO: 1423512
ugagucgcagaaguguuag

SEQ ID NO: 1423514 - RNA, 19 nt, Artificial Sequence
  Description of Artificial Sequence: Synthetic oligonucleotide
  Sense strand starting at position 1081 of SEQ ID NO: 1243545
ccuccugucuucuuugaca

SEQ ID NO: 1423515 - RNA, 19 nt, Artificial Sequence
  Description of Artificial Sequence: Synthetic oligonucleotide
  Antisense strand to SEQ ID NO: 1423514
ugucaaagaagacaggagg

SEQ ID NO: 1423516 - RNA, 19 nt, Artificial Sequence
  Description of Artificial Sequence: Synthetic oligonucleotide
  Sense strand starting at position 1083 of SEQ ID NO: 1243545
uccugucuucuuugacagu

SEQ ID NO: 1423517 - RNA, 19 nt, Artificial Sequence
  Description of Artificial Sequence: Synthetic oligonucleotide
  Antisense strand to SEQ ID NO: 1423516
acugucaaagaagacagga

SEQ ID NO: 1423518 - RNA, 19 nt, Artificial Sequence
  Description of Artificial Sequence: Synthetic oligonucleotide
  Sense strand starting at position 1092 of SEQ ID NO: 1243545
cuuugacaguaaucggaca

SEQ ID NO: 1423519 - RNA, 19 nt, Artificial Sequence
  Description of Artificial Sequence: Synthetic oligonucleotide
  Antisense strand to SEQ ID NO: 1423518
uguccgauuacugucaaag

SEQ ID NO: 1423520 - RNA, 19 nt, Artificial Sequence
  Description of Artificial Sequence: Synthetic oligonucleotide
  Sense strand starting at position 1094 of SEQ ID NO: 1243545
uugacaguaaucggacaga

SEQ ID NO: 1423521 - RNA, 19 nt, Artificial Sequence
  Description of Artificial Sequence: Synthetic oligonucleotide
  Antisense strand to SEQ ID NO: 1423520
ucuguccgauuacugucaa

SEQ ID NO: 1423522 - RNA, 19 nt, Artificial Sequence
  Description of Artificial Sequence: Synthetic oligonucleotide
  Sense strand starting at position 1245 of SEQ ID NO: 1243545
ccaggaagcaucgacagua

SEQ ID NO: 1423523 - RNA, 19 nt, Artificial Sequence
  Description of Artificial Sequence: Synthetic oligonucleotide
  Antisense strand to SEQ ID NO: 1423522
uacugucgaugcuuccugg

SEQ ID NO: 1423524 - RNA, 19 nt, Artificial Sequence
  Description of Artificial Sequence: Synthetic oligonucleotide
  Sense strand starting at position 1308 of SEQ ID NO: 1243545
cccugaguuccugaaacug

SEQ ID NO: 1423525 - RNA, 19 nt, Artificial Sequence
  Description of Artificial Sequence: Synthetic oligonucleotide
  Antisense strand to SEQ ID NO: 1423524
caguuucaggaacucaggg

SEQ ID NO: 1423526 - RNA, 19 nt, Artificial Sequence
  Description of Artificial Sequence: Synthetic oligonucleotide
  Sense strand starting at position 1468 of SEQ ID NO: 1243545
ggccauacaucucugaaga

SEQ ID NO: 1423527 - RNA, 19 nt, Artificial Sequence
  Description of Artificial Sequence: Synthetic oligonucleotide
  Antisense strand to SEQ ID NO: 1423526
ucuucagagauguauggcc

SEQ ID NO: 1423528 - RNA, 19 nt, Artificial Sequence
  Description of Artificial Sequence: Synthetic oligonucleotide
  Sense strand starting at position 1469 of SEQ ID NO: 1243545
gccauacaucucugaagaa

SEQ ID NO: 1423529 - RNA, 19 nt, Artificial Sequence
  Description of Artificial Sequence: Synthetic oligonucleotide
  Antisense strand to SEQ ID NO: 1423528
uucuucagagauguauggc

SEQ ID NO: 1423530 - RNA, 19 nt, Artificial Sequence
  Description of Artificial Sequence: Synthetic oligonucleotide
  Sense strand starting at position 1575 of SEQ ID NO: 1243545
caggaugguucugugacca

SEQ ID NO: 1423531 - RNA, 19 nt, Artificial Sequence
  Description of Artificial Sequence: Synthetic oligonucleotide
  Antisense strand to SEQ ID NO: 1423530
uggucacagaaccauccug

SEQ ID NO: 1423532 - RNA, 19 nt, Artificial Sequence
  Description of Artificial Sequence: Synthetic oligonucleotide
  Sense strand starting at position 1579 of SEQ ID NO: 1243545
augguucugugaccagagu

SEQ ID NO: 1423533 - RNA, 19 nt, Artificial Sequence
  Description of Artificial Sequence: Synthetic oligonucleotide
  Antisense strand to SEQ ID NO: 1423532
acucuggucacagaaccau

SEQ ID NO: 1423534 - RNA, 19 nt, Artificial Sequence
  Description of Artificial Sequence: Synthetic oligonucleotide
  Sense strand starting at position 1580 of SEQ ID NO: 1243545
ugguucugugaccagaguu

SEQ ID NO: 1423535 - RNA, 19 nt, Artificial Sequence
  Description of Artificial Sequence: Synthetic oligonucleotide
  Antisense strand to SEQ ID NO: 1423534
aacucuggucacagaacca

SEQ ID NO: 1423536 - RNA, 19 nt, Artificial Sequence
  Description of Artificial Sequence: Synthetic oligonucleotide
  Sense strand starting at position 1593 of SEQ ID NO: 1243545
agaguuagucugggacaag

SEQ ID NO: 1423537 - RNA, 19 nt, Artificial Sequence
  Description of Artificial Sequence: Synthetic oligonucleotide
  Antisense strand to SEQ ID NO: 1423536
cuugucccagacuaacucu

SEQ ID NO: 1423538 - RNA, 19 nt, Artificial Sequence
  Description of Artificial Sequence: Synthetic oligonucleotide
  Sense strand starting at position 1752 of SEQ ID NO: 1243545
cagggcucugugggaagaa

SEQ ID NO: 1423539 - RNA, 19 nt, Artificial Sequence
  Description of Artificial Sequence: Synthetic oligonucleotide
  Antisense strand to SEQ ID NO: 1423538
uucuucccacagagcccug

SEQ ID NO: 1423540 - RNA, 19 nt, Artificial Sequence
  Description of Artificial Sequence: Synthetic oligonucleotide
  Sense strand starting at position 2095 of SEQ ID NO: 1243545
cacaguuaucucugggauc

SEQ ID NO: 1423541 - RNA, 19 nt, Artificial Sequence
  Description of Artificial Sequence: Synthetic oligonucleotide
  Antisense strand to SEQ ID NO: 1423540
gaucccagagauaacugug

SEQ ID NO: 1423542 - RNA, 19 nt, Artificial Sequence
  Description of Artificial Sequence: Synthetic oligonucleotide
  Sense strand starting at position 2097 of SEQ ID NO: 1243545
caguuaucucugggaucuc

SEQ ID NO: 1423543 - RNA, 19 nt, Artificial Sequence
  Description of Artificial Sequence: Synthetic oligonucleotide
  Antisense strand to SEQ ID NO: 1423542
gagaucccagagauaacug

SEQ ID NO: 1423544 - RNA, 19 nt, Artificial Sequence
  Description of Artificial Sequence: Synthetic oligonucleotide
  Sense strand starting at position 2474 of SEQ ID NO: 1243545
gcagguaugagccaguguu

SEQ ID NO: 1423545 - RNA, 19 nt, Artificial Sequence
  Description of Artificial Sequence: Synthetic oligonucleotide
  Antisense strand to SEQ ID NO: 1423544
aacacuggcucauaccugc

SEQ ID NO: 1423546 - RNA, 19 nt, Artificial Sequence
  Description of Artificial Sequence: Synthetic oligonucleotide
  Sense strand starting at position 2484 of SEQ ID NO: 1243545
gccaguguucagggacuca

SEQ ID NO: 1423547 - RNA, 19 nt, Artificial Sequence
  Description of Artificial Sequence: Synthetic oligonucleotide
  Antisense strand to SEQ ID NO: 1423546
ugagucccugaacacuggc

SEQ ID NO: 1423548 - RNA, 19 nt, Artificial Sequence
  Description of Artificial Sequence: Synthetic oligonucleotide
  Sense strand starting at position 2768 of SEQ ID NO: 1243545
aaagcucguguucggagau

SEQ ID NO: 1423549 - RNA, 19 nt, Artificial Sequence
  Description of Artificial Sequence: Synthetic oligonucleotide
  Antisense strand to SEQ ID NO: 1423548
aucuccgaacacgagcuuu

SEQ ID NO: 1423550 - RNA, 19 nt, Artificial Sequence
  Description of Artificial Sequence: Synthetic oligonucleotide
  Sense strand starting at position 2771 of SEQ ID NO: 1243545
gcucguguucggagauguc

SEQ ID NO: 1423551 - RNA, 19 nt, Artificial Sequence
  Description of Artificial Sequence: Synthetic oligonucleotide
  Antisense strand to SEQ ID NO: 1423550
gacaucuccgaacacgagc

SEQ ID NO: 1423552 - RNA, 19 nt, Artificial Sequence
  Description of Artificial Sequence: Synthetic oligonucleotide
  Sense strand starting at position 2781 of SEQ ID NO: 1243545
ggagaugucucaucccaag

SEQ ID NO: 1423553 - RNA, 19 nt, Artificial Sequence
  Description of Artificial Sequence: Synthetic oligonucleotide
  Antisense strand to SEQ ID NO: 1423552
cuugggaugagacaucucc

SEQ ID NO: 1423554 - RNA, 19 nt, Artificial Sequence
  Description of Artificial Sequence: Synthetic oligonucleotide
  Sense strand starting at position 2879 of SEQ ID NO: 1243545
agagauaaaggccgucaga

SEQ ID NO: 1423555 - RNA, 19 nt, Artificial Sequence
  Description of Artificial Sequence: Synthetic oligonucleotide
  Antisense strand to SEQ ID NO: 1423554
ucugacggccuuuaucucu

SEQ ID NO: 1423556 - RNA, 19 nt, Artificial Sequence
  Description of Artificial Sequence: Synthetic oligonucleotide
  Sense strand starting at position 2976 of SEQ ID NO: 1243545
guguguuccagggacugaa

SEQ ID NO: 1423557 - RNA, 19 nt, Artificial Sequence
  Description of Artificial Sequence: Synthetic oligonucleotide
  Antisense strand to SEQ ID NO: 1423556
uucagucccuggaacacac

SEQ ID NO: 1423558 - RNA, 19 nt, Artificial Sequence
  Description of Artificial Sequence: Synthetic oligonucleotide
  Sense strand starting at position 3032 of SEQ ID NO: 1243545
ggcugugaucaccaacaca

SEQ ID NO: 1423559 - RNA, 19 nt, Artificial Sequence
  Description of Artificial Sequence: Synthetic oligonucleotide
  Antisense strand to SEQ ID NO: 1423558
uguguuggugaucacagcc

SEQ ID NO: 1423560 - RNA, 19 nt, Artificial Sequence
  Description of Artificial Sequence: Synthetic oligonucleotide
  Sense strand starting at position 3137 of SEQ ID NO: 1243545
cucuguucugcggauaaca

SEQ ID NO: 1423561 - RNA, 19 nt, Artificial Sequence
  Description of Artificial Sequence: Synthetic oligonucleotide
  Antisense strand to SEQ ID NO: 1423560
uguuauccgcagaacagag

SEQ ID NO: 1423562 - RNA, 19 nt, Artificial Sequence
  Description of Artificial Sequence: Synthetic oligonucleotide
  Sense strand starting at position 3218 of SEQ ID NO: 1243545
ugcccugagccuuagacuu

SEQ ID NO: 1423563 - RNA, 19 nt, Artificial Sequence
  Description of Artificial Sequence: Synthetic oligonucleotide
  Antisense strand to SEQ ID NO: 1423562
aagucuaaggcucagggca

SEQ ID NO: 1423564 - RNA, 19 nt, Artificial Sequence
  Description of Artificial Sequence: Synthetic oligonucleotide
  Sense strand starting at position 3249 of SEQ ID NO: 1243545
gagaguguacaacgcuaau

SEQ ID NO: 1423565 - RNA, 19 nt, Artificial Sequence
  Description of Artificial Sequence: Synthetic oligonucleotide
  Antisense strand to SEQ ID NO: 1423564
auuagcguuguacacucuc

SEQ ID NO: 1423566 - RNA, 19 nt, Artificial Sequence
  Description of Artificial Sequence: Synthetic oligonucleotide
  Sense strand starting at position 3287 of SEQ ID NO: 1243545
ugagaaaucacgggcgcau

SEQ ID NO: 1423567 - RNA, 19 nt, Artificial Sequence
  Description of Artificial Sequence: Synthetic oligonucleotide
  Antisense strand to SEQ ID NO: 1423566
augcgcccgugauuucuca

SEQ ID NO: 1423568 - RNA, 19 nt, Artificial Sequence
  Description of Artificial Sequence: Synthetic oligonucleotide
  Sense strand starting at position 3299 of SEQ ID NO: 1243545
ggcgcauccaccuggagau

SEQ ID NO: 1423569 - RNA, 19 nt, Artificial Sequence
  Description of Artificial Sequence: Synthetic oligonucleotide
  Antisense strand to SEQ ID NO: 1423568
aucuccagguggaugcgcc

SEQ ID NO: 1423570 - RNA, 19 nt, Artificial Sequence
  Description of Artificial Sequence: Synthetic oligonucleotide
  Sense strand starting at position 3440 of SEQ ID NO: 1243545
acaugcuucccaggaagau

SEQ ID NO: 1423571 - RNA, 19 nt, Artificial Sequence
  Description of Artificial Sequence: Synthetic oligonucleotide
  Antisense strand to SEQ ID NO: 1423570
aucuuccugggaagcaugu

SEQ ID NO: 1423572 - RNA, 19 nt, Artificial Sequence
  Description of Artificial Sequence: Synthetic oligonucleotide
  Sense strand starting at position 3465 of SEQ ID NO: 1243545
aaagaagggcuuugugcau

SEQ ID NO: 1423573 - RNA, 19 nt, Artificial Sequence
  Description of Artificial Sequence: Synthetic oligonucleotide
  Antisense strand to SEQ ID NO: 1423572
augcacaaagcccuucuuu

SEQ ID NO: 1423574 - RNA, 19 nt, Artificial Sequence
  Description of Artificial Sequence: Synthetic oligonucleotide
  Sense strand starting at position 3528 of SEQ ID NO: 1243545
gccggucucaucgggauga

SEQ ID NO: 1423575 - RNA, 19 nt, Artificial Sequence
  Description of Artificial Sequence: Synthetic oligonucleotide
  Antisense strand to SEQ ID NO: 1423574
ucaucccgaugagaccggc

SEQ ID NO: 1423576 - RNA, 19 nt, Artificial Sequence
  Description of Artificial Sequence: Synthetic oligonucleotide
  Sense strand starting at position 3713 of SEQ ID NO: 1243545
gaugucuugugguccauga

SEQ ID NO: 1423577 - RNA, 19 nt, Artificial Sequence
  Description of Artificial Sequence: Synthetic oligonucleotide
  Antisense strand to SEQ ID NO: 1423576
ucauggaccacaagacauc

SEQ ID NO: 1423578 - RNA, 19 nt, Artificial Sequence
  Description of Artificial Sequence: Synthetic oligonucleotide
  Sense strand starting at position 3715 of SEQ ID NO: 1243545
ugucuugugguccaugaaa

SEQ ID NO: 1423579 - RNA, 19 nt, Artificial Sequence
  Description of Artificial Sequence: Synthetic oligonucleotide
  Antisense strand to SEQ ID NO: 1423578
uuucauggaccacaagaca

SEQ ID NO: 1423580 - RNA, 19 nt, Artificial Sequence
  Description of Artificial Sequence: Synthetic oligonucleotide
  Sense strand starting at position 10 of SEQ ID NO: 1243546
gagaguacuguccagcagu

SEQ ID NO: 1423581 - RNA, 19 nt, Artificial Sequence
  Description of Artificial Sequence: Synthetic oligonucleotide
  Antisense strand to SEQ ID NO: 1423580
acugcuggacaguacucuc

SEQ ID NO: 1423582 - RNA, 19 nt, Artificial Sequence
  Description of Artificial Sequence: Synthetic oligonucleotide
  Sense strand starting at position 24 of SEQ ID NO: 1243546
gcagucuggguguaaggua

SEQ ID NO: 1423583 - RNA, 19 nt, Artificial Sequence
  Description of Artificial Sequence: Synthetic oligonucleotide
  Antisense strand to SEQ ID NO: 1423582
uaccuuacacccagacugc

SEQ ID NO: 1423584 - RNA, 19 nt, Artificial Sequence
  Description of Artificial Sequence: Synthetic oligonucleotide
  Sense strand starting at position 40 of SEQ ID NO: 1243546
guaacagaacaguguucuu

SEQ ID NO: 1423585 - RNA, 19 nt, Artificial Sequence
  Description of Artificial Sequence: Synthetic oligonucleotide
  Antisense strand to SEQ ID NO: 1423584
aagaacacuguucuguuac

SEQ ID NO: 1423586 - RNA, 19 nt, Artificial Sequence
  Description of Artificial Sequence: Synthetic oligonucleotide
  Sense strand starting at position 277 of SEQ ID NO: 1243546
gaccucaggugaucaacau

SEQ ID NO: 1423587 - RNA, 19 nt, Artificial Sequence
  Description of Artificial Sequence: Synthetic oligonucleotide
  Antisense strand to SEQ ID NO: 1423586
auguugaucaccugagguc

SEQ ID NO: 1423588 - RNA, 19 nt, Artificial Sequence
  Description of Artificial Sequence: Synthetic oligonucleotide
  Sense strand starting at position 381 of SEQ ID NO: 1243546
aucugucaggagugaaaga

SEQ ID NO: 1423589 - RNA, 19 nt, Artificial Sequence
  Description of Artificial Sequence: Synthetic oligonucleotide
  Antisense strand to SEQ ID NO: 1423588
ucuuucacuccugacagau

SEQ ID NO: 1423590 - RNA, 19 nt, Artificial Sequence
  Description of Artificial Sequence: Synthetic oligonucleotide
  Sense strand starting at position 444 of SEQ ID NO: 1243546
uacguucgcaaagaaguua

SEQ ID NO: 1423591 - RNA, 19 nt, Artificial Sequence
  Description of Artificial Sequence: Synthetic oligonucleotide
  Antisense strand to SEQ ID NO: 1423590
uaacuucuuugcgaacgua

SEQ ID NO: 1423592 - RNA, 19 nt, Artificial Sequence
  Description of Artificial Sequence: Synthetic oligonucleotide
  Sense strand starting at position 553 of SEQ ID NO: 1243546
gcugauagaucucuacaca

SEQ ID NO: 1423593 - RNA, 19 nt, Artificial Sequence
  Description of Artificial Sequence: Synthetic oligonucleotide
  Antisense strand to SEQ ID NO: 1423592
uguguagagaucuaucagc

SEQ ID NO: 1423594 - RNA, 19 nt, Artificial Sequence
  Description of Artificial Sequence: Synthetic oligonucleotide
  Sense strand starting at position 605 of SEQ ID NO: 1243546
uugcaaaugcugcaggauu

SEQ ID NO: 1423595 - RNA, 19 nt, Artificial Sequence
  Description of Artificial Sequence: Synthetic oligonucleotide
  Antisense strand to SEQ ID NO: 1423594
aauccugcagcauuugcaa

SEQ ID NO: 1423596 - RNA, 19 nt, Artificial Sequence
  Description of Artificial Sequence: Synthetic oligonucleotide
  Sense strand starting at position 707 of SEQ ID NO: 1243546
ggaggagagugacagaaau

SEQ ID NO: 1423597 - RNA, 19 nt, Artificial Sequence
  Description of Artificial Sequence: Synthetic oligonucleotide
  Antisense strand to SEQ ID NO: 1423596
auuucugucacucuccucc

SEQ ID NO: 1423598 - RNA, 19 nt, Artificial Sequence
  Description of Artificial Sequence: Synthetic oligonucleotide
  Sense strand starting at position 751 of SEQ ID NO: 1243546
cacugagugcaacaguaaa

SEQ ID NO: 1423599 - RNA, 19 nt, Artificial Sequence
  Description of Artificial Sequence: Synthetic oligonucleotide
  Antisense strand to SEQ ID NO: 1423598
uuuacuguugcacucagug

SEQ ID NO: 1423600 - RNA, 19 nt, Artificial Sequence
  Description of Artificial Sequence: Synthetic oligonucleotide
  Sense strand starting at position 775 of SEQ ID NO: 1243546
uggagacggcucugggaua

SEQ ID NO: 1423601 - RNA, 19 nt, Artificial Sequence
  Description of Artificial Sequence: Synthetic oligonucleotide
  Antisense strand to SEQ ID NO: 1423600
uaucccagagccgucucca

SEQ ID NO: 1423602 - RNA, 19 nt, Artificial Sequence
  Description of Artificial Sequence: Synthetic oligonucleotide
  Sense strand starting at position 933 of SEQ ID NO: 1243546
acgauaaaugcuuagguga

SEQ ID NO: 1423603 - RNA, 19 nt, Artificial Sequence
  Description of Artificial Sequence: Synthetic oligonucleotide
  Antisense strand to SEQ ID NO: 1423602
ucaccuaagcauuuaucgu

SEQ ID NO: 1423604 - RNA, 19 nt, Artificial Sequence
  Description of Artificial Sequence: Synthetic oligonucleotide
  Sense strand starting at position 936 of SEQ ID NO: 1243546
auaaaugcuuaggugaaua

SEQ ID NO: 1423605 - RNA, 19 nt, Artificial Sequence
  Description of Artificial Sequence: Synthetic oligonucleotide
  Antisense strand to SEQ ID NO: 1423604
uauucaccuaagcauuuau

SEQ ID NO: 1423606 - RNA, 19 nt, Artificial Sequence
  Description of Artificial Sequence: Synthetic oligonucleotide
  Sense strand starting at position 947 of SEQ ID NO: 1243546
ggugaauaaugucugguuu

SEQ ID NO: 1423607 - RNA, 19 nt, Artificial Sequence
  Description of Artificial Sequence: Synthetic oligonucleotide
  Antisense strand to SEQ ID NO: 1423606
aaaccagacauuauucacc

SEQ ID NO: 1423608 - RNA, 19 nt, Artificial Sequence
  Description of Artificial Sequence: Synthetic oligonucleotide
  Sense strand starting at position 958 of SEQ ID NO: 1243546
ucugguuuccauuguaaga

SEQ ID NO: 1423609 - RNA, 19 nt, Artificial Sequence
  Description of Artificial Sequence: Synthetic oligonucleotide
  Antisense strand to SEQ ID NO: 1423608
ucuuacaauggaaaccaga

SEQ ID NO: 1423610 - RNA, 19 nt, Artificial Sequence
  Description of Artificial Sequence: Synthetic oligonucleotide
  Sense strand starting at position 1090 of SEQ ID NO: 1243546
uuuaucuuucucugaagag

SEQ ID NO: 1423611 - RNA, 19 nt, Artificial Sequence
  Description of Artificial Sequence: Synthetic oligonucleotide
  Antisense strand to SEQ ID NO: 1423610
cucuucagagaaagauaaa

SEQ ID NO: 1423612 - RNA, 19 nt, Artificial Sequence
  Description of Artificial Sequence: Synthetic oligonucleotide
  Sense strand starting at position 1197 of SEQ ID NO: 1243546
gcugucuuagucuuccagu

SEQ ID NO: 1423613 - RNA, 19 nt, Artificial Sequence
  Description of Artificial Sequence: Synthetic oligonucleotide
  Antisense strand to SEQ ID NO: 1423612
acuggaagacuaagacagc

SEQ ID NO: 1423614 - RNA, 19 nt, Artificial Sequence
  Description of Artificial Sequence: Synthetic oligonucleotide
  Sense strand starting at position 1288 of SEQ ID NO: 1243546
cugaaucuucucggguaaa

SEQ ID NO: 1423615 - RNA, 19 nt, Artificial Sequence
  Description of Artificial Sequence: Synthetic oligonucleotide
  Antisense strand to SEQ ID NO: 1423614
uuuacccgagaagauucag

SEQ ID NO: 1423616 - RNA, 19 nt, Artificial Sequence
  Description of Artificial Sequence: Synthetic oligonucleotide
  Sense strand starting at position 1310 of SEQ ID NO: 1243546
gugagaaacugcucaauca

SEQ ID NO: 1423617 - RNA, 19 nt, Artificial Sequence
  Description of Artificial Sequence: Synthetic oligonucleotide
  Antisense strand to SEQ ID NO: 1423616
ugauugagcaguuucucac

SEQ ID NO: 1423618 - RNA, 19 nt, Artificial Sequence
  Description of Artificial Sequence: Synthetic oligonucleotide
  Sense strand starting at position 1389 of SEQ ID NO: 1243546
guucccagaguuuacugaa

SEQ ID NO: 1423619 - RNA, 19 nt, Artificial Sequence
  Description of Artificial Sequence: Synthetic oligonucleotide
  Antisense strand to SEQ ID NO: 1423618
uucaguaaacucugggaac

SEQ ID NO: 1423620 - RNA, 19 nt, Artificial Sequence
  Description of Artificial Sequence: Synthetic oligonucleotide
  Sense strand starting at position 1438 of SEQ ID NO: 1243546
acagaauugccugaagcau

SEQ ID NO: 1423621 - RNA, 19 nt, Artificial Sequence
  Description of Artificial Sequence: Synthetic oligonucleotide
  Antisense strand to SEQ ID NO: 1423620
augcuucaggcaauucugu

SEQ ID NO: 1423622 - RNA, 19 nt, Artificial Sequence
  Description of Artificial Sequence: Synthetic oligonucleotide
  Sense strand starting at position 1446 of SEQ ID NO: 1243546
gccugaagcauuugcggaa

SEQ ID NO: 1423623 - RNA, 19 nt, Artificial Sequence
  Description of Artificial Sequence: Synthetic oligonucleotide
  Antisense strand to SEQ ID NO: 1423622
uuccgcaaaugcuucaggc

SEQ ID NO: 1423624 - RNA, 19 nt, Artificial Sequence
  Description of Artificial Sequence: Synthetic oligonucleotide
  Sense strand starting at position 1663 of SEQ ID NO: 1243546
ugcuuaauguuccugggag

SEQ ID NO: 1423625 - RNA, 19 nt, Artificial Sequence
  Description of Artificial Sequence: Synthetic oligonucleotide
  Antisense strand to SEQ ID NO: 1423624
cucccaggaacauuaagca

SEQ ID NO: 1423626 - RNA, 19 nt, Artificial Sequence
  Description of Artificial Sequence: Synthetic oligonucleotide
  Sense strand starting at position 1665 of SEQ ID NO: 1243546
cuuaauguuccugggagug

SEQ ID NO: 1423627 - RNA, 19 nt, Artificial Sequence
  Description of Artificial Sequence: Synthetic oligonucleotide
  Antisense strand to SEQ ID NO: 1423626
cacucccaggaacauuaag

SEQ ID NO: 1423628 - RNA, 19 nt, Artificial Sequence
  Description of Artificial Sequence: Synthetic oligonucleotide
  Sense strand starting at position 1670 of SEQ ID NO: 1243546
uguuccugggagugugaua

SEQ ID NO: 1423629 - RNA, 19 nt, Artificial Sequence
  Description of Artificial Sequence: Synthetic oligonucleotide
  Antisense strand to SEQ ID NO: 1423628
uaucacacucccaggaaca

SEQ ID NO: 1423630 - RNA, 19 nt, Artificial Sequence
  Description of Artificial Sequence: Synthetic oligonucleotide
  Sense strand starting at position 1724 of SEQ ID NO: 1243546
caggguauuccaggcugau

SEQ ID NO: 1423631 - RNA, 19 nt, Artificial Sequence
  Description of Artificial Sequence: Synthetic oligonucleotide
  Antisense strand to SEQ ID NO: 1423630
aucagccuggaauacccug

SEQ ID NO: 1423632 - RNA, 19 nt, Artificial Sequence
  Description of Artificial Sequence: Synthetic oligonucleotide
  Sense strand starting at position 1727 of SEQ ID NO: 1243546
gguauuccaggcugauuaa

SEQ ID NO: 1423633 - RNA, 19 nt, Artificial Sequence
  Description of Artificial Sequence: Synthetic oligonucleotide
  Antisense strand to SEQ ID NO: 1423632
uuaaucagccuggaauacc

SEQ ID NO: 1423634 - RNA, 19 nt, Artificial Sequence
  Description of Artificial Sequence: Synthetic oligonucleotide
  Sense strand starting at position 1728 of SEQ ID NO: 1243546
guauuccaggcugauuaau

SEQ ID NO: 1423635 - RNA, 19 nt, Artificial Sequence
  Description of Artificial Sequence: Synthetic oligonucleotide
  Antisense strand to SEQ ID NO: 1423634
auuaaucagccuggaauac

SEQ ID NO: 1423636 - RNA, 19 nt, Artificial Sequence
  Description of Artificial Sequence: Synthetic oligonucleotide
  Sense strand starting at position 1730 of SEQ ID NO: 1243546
auuccaggcugauuaauca

SEQ ID NO: 1423637 - RNA, 19 nt, Artificial Sequence
  Description of Artificial Sequence: Synthetic oligonucleotide
  Antisense strand to SEQ ID NO: 1423636
ugauuaaucagccuggaau

SEQ ID NO: 1423638 - RNA, 19 nt, Artificial Sequence
  Description of Artificial Sequence: Synthetic oligonucleotide
  Sense strand starting at position 1773 of SEQ ID NO: 1243546
gugaacguauacucuaaga

SEQ ID NO: 1423639 - RNA, 19 nt, Artificial Sequence
  Description of Artificial Sequence: Synthetic oligonucleotide
  Antisense strand to SEQ ID NO: 1423638
ucuuagaguauacguucac

SEQ ID NO: 1423640 - RNA, 19 nt, Artificial Sequence
  Description of Artificial Sequence: Synthetic oligonucleotide
  Sense strand starting at position 1820 of SEQ ID NO: 1243546
agaugugaccgcgcaaugu

SEQ ID NO: 1423641 - RNA, 19 nt, Artificial Sequence
  Description of Artificial Sequence: Synthetic oligonucleotide
  Antisense strand to SEQ ID NO: 1423640
acauugcgcggucacaucu

SEQ ID NO: 1423642 - RNA, 19 nt, Artificial Sequence
  Description of Artificial Sequence: Synthetic oligonucleotide
  Sense strand starting at position 2548 of SEQ ID NO: 1243546
gcuucaggcggagaaucua

SEQ ID NO: 1423643 - RNA, 19 nt, Artificial Sequence
  Description of Artificial Sequence: Synthetic oligonucleotide
  Antisense strand to SEQ ID NO: 1423642
uagauucuccgccugaagc

SEQ ID NO: 1423644 - RNA, 19 nt, Artificial Sequence
  Description of Artificial Sequence: Synthetic oligonucleotide
  Sense strand starting at position 3221 of SEQ ID NO: 1243546
cucucagcucuuggaaacu

SEQ ID NO: 1423645 - RNA, 19 nt, Artificial Sequence
  Description of Artificial Sequence: Synthetic oligonucleotide
  Antisense strand to SEQ ID NO: 1423644
aguuuccaagagcugagag

SEQ ID NO: 1423646 - RNA, 19 nt, Artificial Sequence
  Description of Artificial Sequence: Synthetic oligonucleotide
  Sense strand starting at position 3239 of SEQ ID NO: 1243546
ugagaaguuacagguaaua

SEQ ID NO: 1423647 - RNA, 19 nt, Artificial Sequence
  Description of Artificial Sequence: Synthetic oligonucleotide
  Antisense strand to SEQ ID NO: 1423646
uauuaccuguaacuucuca

SEQ ID NO: 1423648 - RNA, 19 nt, Artificial Sequence
  Description of Artificial Sequence: Synthetic oligonucleotide
  Sense strand starting at position 3324 of SEQ ID NO: 1243546
guaaccacagccugugaua

SEQ ID NO: 1423649 - RNA, 19 nt, Artificial Sequence
  Description of Artificial Sequence: Synthetic oligonucleotide
  Antisense strand to SEQ ID NO: 1423648
uaucacaggcugugguuac

SEQ ID NO: 1423650 - RNA, 19 nt, Artificial Sequence
  Description of Artificial Sequence: Synthetic oligonucleotide
  Sense strand starting at position 3407 of SEQ ID NO: 1243546
uuagguuggcaugagacau

SEQ ID NO: 1423651 - RNA, 19 nt, Artificial Sequence
  Description of Artificial Sequence: Synthetic oligonucleotide
  Antisense strand to SEQ ID NO: 1423650
augucucaugccaaccuaa

SEQ ID NO: 1423652 - RNA, 19 nt, Artificial Sequence
  Description of Artificial Sequence: Synthetic oligonucleotide
  Sense strand starting at position 3411 of SEQ ID NO: 1243546
guuggcaugagacaucagu

SEQ ID NO: 1423653 - RNA, 19 nt, Artificial Sequence
  Description of Artificial Sequence: Synthetic oligonucleotide
  Antisense strand to SEQ ID NO: 1423652
acugaugucucaugccaac

SEQ ID NO: 1423654 - RNA, 19 nt, Artificial Sequence
  Description of Artificial Sequence: Synthetic oligonucleotide
  Sense strand starting at position 3704 of SEQ ID NO: 1243546
aguuaauccguuuaggauu

SEQ ID NO: 1423655 - RNA, 19 nt, Artificial Sequence
  Description of Artificial Sequence: Synthetic oligonucleotide
  Antisense strand to SEQ ID NO: 1423654
aauccuaaacggauuaacu

SEQ ID NO: 1423656 - RNA, 19 nt, Artificial Sequence
  Description of Artificial Sequence: Synthetic oligonucleotide
  Sense strand starting at position 3754 of SEQ ID NO: 1243546
guuaauagauguucuuuac

SEQ ID NO: 1423657 - RNA, 19 nt, Artificial Sequence
  Description of Artificial Sequence: Synthetic oligonucleotide
  Antisense strand to SEQ ID NO: 1423656
guaaagaacaucuauuaac

SEQ ID NO: 1423658 - RNA, 19 nt, Artificial Sequence
  Description of Artificial Sequence: Synthetic oligonucleotide
  Sense strand starting at position 3814 of SEQ ID NO: 1243546
aaugcuguccuuuauggaa

SEQ ID NO: 1423659 - RNA, 19 nt, Artificial Sequence
  Description of Artificial Sequence: Synthetic oligonucleotide
  Antisense strand to SEQ ID NO: 1423658
uuccauaaaggacagcauu

SEQ ID NO: 1423660 - RNA, 19 nt, Artificial Sequence
  Description of Artificial Sequence: Synthetic oligonucleotide
  Sense strand starting at position 124 of SEQ ID NO: 1243547
gggugacccuaucugcuaa

SEQ ID NO: 1423661 - RNA, 19 nt, Artificial Sequence
  Description of Artificial Sequence: Synthetic oligonucleotide
  Antisense strand to SEQ ID NO: 1423660
uuagcagauagggucaccc

SEQ ID NO: 1423662 - RNA, 19 nt, Artificial Sequence
  Description of Artificial Sequence: Synthetic oligonucleotide
  Sense strand starting at position 140 of SEQ ID NO: 1243547
uaagaauucugcuaguagg

SEQ ID NO: 1423663 - RNA, 19 nt, Artificial Sequence
  Description of Artificial Sequence: Synthetic oligonucleotide
  Antisense strand to SEQ ID NO: 1423662
ccuacuagcagaauucuua

SEQ ID NO: 1423664 - RNA, 19 nt, Artificial Sequence
  Description of Artificial Sequence: Synthetic oligonucleotide
  Sense strand starting at position 143 of SEQ ID NO: 1243547
gaauucugcuaguaggaaa

SEQ ID NO: 1423665 - RNA, 19 nt, Artificial Sequence
  Description of Artificial Sequence: Synthetic oligonucleotide
  Antisense strand to SEQ ID NO: 1423664
uuuccuacuagcagaauuc

SEQ ID NO: 1423666 - RNA, 19 nt, Artificial Sequence
  Description of Artificial Sequence: Synthetic oligonucleotide
  Sense strand starting at position 209 of SEQ ID NO: 1243547
acaauuacuucuggugaca

SEQ ID NO: 1423667 - RNA, 19 nt, Artificial Sequence
  Description of Artificial Sequence: Synthetic oligonucleotide
  Antisense strand to SEQ ID NO: 1423666
ugucaccagaaguaauugu

SEQ ID NO: 1423668 - RNA, 19 nt, Artificial Sequence
  Description of Artificial Sequence: Synthetic oligonucleotide
  Sense strand starting at position 277 of SEQ ID NO: 1243547
ggguaucaguaguuggauu

SEQ ID NO: 1423669 - RNA, 19 nt, Artificial Sequence
  Description of Artificial Sequence: Synthetic oligonucleotide
  Antisense strand to SEQ ID NO: 1423668
aauccaacuacugauaccc

SEQ ID NO: 1423670 - RNA, 19 nt, Artificial Sequence
  Description of Artificial Sequence: Synthetic oligonucleotide
  Sense strand starting at position 318 of SEQ ID NO: 1243547
caggauagguucccagaua

SEQ ID NO: 1423671 - RNA, 19 nt, Artificial Sequence
  Description of Artificial Sequence: Synthetic oligonucleotide
  Antisense strand to SEQ ID NO: 1423670
uaucugggaaccuauccug

SEQ ID NO: 1423672 - RNA, 19 nt, Artificial Sequence
  Description of Artificial Sequence: Synthetic oligonucleotide
  Sense strand starting at position 319 of SEQ ID NO: 1243547
aggauagguucccagauag

SEQ ID NO: 1423673 - RNA, 19 nt, Artificial Sequence
  Description of Artificial Sequence: Synthetic oligonucleotide
  Antisense strand to SEQ ID NO: 1423672
cuaucugggaaccuauccu

SEQ ID NO: 1423674 - RNA, 19 nt, Artificial Sequence
  Description of Artificial Sequence: Synthetic oligonucleotide
  Sense strand starting at position 367 of SEQ ID NO: 1243547
guccacuucugagacuuaa

SEQ ID NO: 1423675 - RNA, 19 nt, Artificial Sequence
  Description of Artificial Sequence: Synthetic oligonucleotide
  Antisense strand to SEQ ID NO: 1423674
uuaagucucagaaguggac

SEQ ID NO: 1423676 - RNA, 19 nt, Artificial Sequence
  Description of Artificial Sequence: Synthetic oligonucleotide
  Sense strand starting at position 378 of SEQ ID NO: 1243547
agacuuaaauagggagaga

SEQ ID NO: 1423677 - RNA, 19 nt, Artificial Sequence
  Description of Artificial Sequence: Synthetic oligonucleotide
  Antisense strand to SEQ ID NO: 1423676
ucucucccuauuuaagucu

SEQ ID NO: 1423678 - RNA, 19 nt, Artificial Sequence
  Description of Artificial Sequence: Synthetic oligonucleotide
  Sense strand starting at position 2081 of SEQ ID NO: 1243547
guugcugcgccugucaaua

SEQ ID NO: 1423679 - RNA, 19 nt, Artificial Sequence
  Description of Artificial Sequence: Synthetic oligonucleotide
  Antisense strand to SEQ ID NO: 1423678
uauugacaggcgcagcaac

SEQ ID NO: 1423680 - RNA, 19 nt, Artificial Sequence
  Description of Artificial Sequence: Synthetic oligonucleotide
  Sense strand starting at position 2235 of SEQ ID NO: 1243547
ugcugguguccggugaguu

SEQ ID NO: 1423681 - RNA, 19 nt, Artificial Sequence
  Description of Artificial Sequence: Synthetic oligonucleotide
  Antisense strand to SEQ ID NO: 1423680
aacucaccggacaccagca

SEQ ID NO: 1423682 - RNA, 19 nt, Artificial Sequence
  Description of Artificial Sequence: Synthetic oligonucleotide
  Sense strand starting at position 2236 of SEQ ID NO: 1243547
gcugguguccggugaguuc

SEQ ID NO: 1423683 - RNA, 19 nt, Artificial Sequence
  Description of Artificial Sequence: Synthetic oligonucleotide
  Antisense strand to SEQ ID NO: 1423682
gaacucaccggacaccagc

SEQ ID NO: 1423684 - RNA, 19 nt, Artificial Sequence
  Description of Artificial Sequence: Synthetic oligonucleotide
  Sense strand starting at position 2247 of SEQ ID NO: 1243547
gugaguucuccgcuuccuu

SEQ ID NO: 1423685 - RNA, 19 nt, Artificial Sequence
  Description of Artificial Sequence: Synthetic oligonucleotide
  Antisense strand to SEQ ID NO: 1423684
aaggaagcggagaacucac

SEQ ID NO: 1423686 - RNA, 19 nt, Artificial Sequence
  Description of Artificial Sequence: Synthetic oligonucleotide
  Sense strand starting at position 2552 of SEQ ID NO: 1243547
caccgagugcguucugagu

SEQ ID NO: 1423687 - RNA, 19 nt, Artificial Sequence
  Description of Artificial Sequence: Synthetic oligonucleotide
  Antisense strand to SEQ ID NO: 1423686
acucagaacgcacucggug

SEQ ID NO: 1423688 - RNA, 19 nt, Artificial Sequence
  Description of Artificial Sequence: Synthetic oligonucleotide
  Sense strand starting at position 2558 of SEQ ID NO: 1243547
gugcguucugaguacucaa

SEQ ID NO: 1423689 - RNA, 19 nt, Artificial Sequence
  Description of Artificial Sequence: Synthetic oligonucleotide
  Antisense strand to SEQ ID NO: 1423688
uugaguacucagaacgcac

SEQ ID NO: 1423690 - RNA, 19 nt, Artificial Sequence
  Description of Artificial Sequence: Synthetic oligonucleotide
  Sense strand starting at position 2561 of SEQ ID NO: 1243547
cguucugaguacucaauaa

SEQ ID NO: 1423691 - RNA, 19 nt, Artificial Sequence
  Description of Artificial Sequence: Synthetic oligonucleotide
  Antisense strand to SEQ ID NO: 1423690
uuauugaguacucagaacg

SEQ ID NO: 1423692 - RNA, 19 nt, Artificial Sequence
  Description of Artificial Sequence: Synthetic oligonucleotide
  Sense strand starting at position 2649 of SEQ ID NO: 1243547
ugggccaucgcuagaguga

SEQ ID NO: 1423693 - RNA, 19 nt, Artificial Sequence
  Description of Artificial Sequence: Synthetic oligonucleotide
  Antisense strand to SEQ ID NO: 1423692
ucacucuagcgauggccca

SEQ ID NO: 1423694 - RNA, 19 nt, Artificial Sequence
  Description of Artificial Sequence: Synthetic oligonucleotide
  Sense strand starting at position 2650 of SEQ ID NO: 1243547
gggccaucgcuagagugaa

SEQ ID NO: 1423695 - RNA, 19 nt, Artificial Sequence
  Description of Artificial Sequence: Synthetic oligonucleotide
  Antisense strand to SEQ ID NO: 1423694
uucacucuagcgauggccc

SEQ ID NO: 1423696 - RNA, 19 nt, Artificial Sequence
  Description of Artificial Sequence: Synthetic oligonucleotide
  Sense strand starting at position 2651 of SEQ ID NO: 1243547
ggccaucgcuagagugaag

SEQ ID NO: 1423697 - RNA, 19 nt, Artificial Sequence
  Description of Artificial Sequence: Synthetic oligonucleotide
  Antisense strand to SEQ ID NO: 1423696
cuucacucuagcgauggcc

SEQ ID NO: 1423698 - RNA, 19 nt, Artificial Sequence
  Description of Artificial Sequence: Synthetic oligonucleotide
  Sense strand starting at position 2753 of SEQ ID NO: 1243547
ccgccuucugcaugaaguu

SEQ ID NO: 1423699 - RNA, 19 nt, Artificial Sequence
  Description of Artificial Sequence: Synthetic oligonucleotide
  Antisense strand to SEQ ID NO: 1423698
aacuucaugcagaaggcgg

SEQ ID NO: 1423700 - RNA, 19 nt, Artificial Sequence
  Description of Artificial Sequence: Synthetic oligonucleotide
  Sense strand starting at position 2754 of SEQ ID NO: 1243547
cgccuucugcaugaaguua

SEQ ID NO: 1423701 - RNA, 19 nt, Artificial Sequence
  Description of Artificial Sequence: Synthetic oligonucleotide
  Antisense strand to SEQ ID NO: 1423700
uaacuucaugcagaaggcg

SEQ ID NO: 1423702 - RNA, 19 nt, Artificial Sequence
  Description of Artificial Sequence: Synthetic oligonucleotide
  Sense strand starting at position 2884 of SEQ ID NO: 1243547
ugaugcuuuaggcaagaua

SEQ ID NO: 1423703 - RNA, 19 nt, Artificial Sequence
  Description of Artificial Sequence: Synthetic oligonucleotide
  Antisense strand to SEQ ID NO: 1423702
uaucuugccuaaagcauca

SEQ ID NO: 1423704 - RNA, 19 nt, Artificial Sequence
  Description of Artificial Sequence: Synthetic oligonucleotide
  Sense strand starting at position 2887 of SEQ ID NO: 1243547
ugcuuuaggcaagauacuu

SEQ ID NO: 1423705 - RNA, 19 nt, Artificial Sequence
  Description of Artificial Sequence: Synthetic oligonucleotide
  Antisense strand to SEQ ID NO: 1423704
aaguaucuugccuaaagca

SEQ ID NO: 1423706 - RNA, 19 nt, Artificial Sequence
  Description of Artificial Sequence: Synthetic oligonucleotide
  Sense strand starting at position 2928 of SEQ ID NO: 1243547
gcuagaaagcagugcuaac

SEQ ID NO: 1423707 - RNA, 19 nt, Artificial Sequence
  Description of Artificial Sequence: Synthetic oligonucleotide
  Antisense strand to SEQ ID NO: 1423706
guuagcacugcuuucuagc

SEQ ID NO: 1423708 - RNA, 19 nt, Artificial Sequence
  Description of Artificial Sequence: Synthetic oligonucleotide
  Sense strand starting at position 3122 of SEQ ID NO: 1243547
cucaguaguccugaguaua

SEQ ID NO: 1423709 - RNA, 19 nt, Artificial Sequence
  Description of Artificial Sequence: Synthetic oligonucleotide
  Antisense strand to SEQ ID NO: 1423708
uauacucaggacuacugag

SEQ ID NO: 1423710 - RNA, 19 nt, Artificial Sequence
  Description of Artificial Sequence: Synthetic oligonucleotide
  Sense strand starting at position 3125 of SEQ ID NO: 1243547
aguaguccugaguauauuc

SEQ ID NO: 1423711 - RNA, 19 nt, Artificial Sequence
  Description of Artificial Sequence: Synthetic oligonucleotide
  Antisense strand to SEQ ID NO: 1423710
gaauauacucaggacuacu

SEQ ID NO: 1423712 - RNA, 19 nt, Artificial Sequence
  Description of Artificial Sequence: Synthetic oligonucleotide
  Sense strand starting at position 3665 of SEQ ID NO: 1243547
auaaacuggccuuggagau

SEQ ID NO: 1423713 - RNA, 19 nt, Artificial Sequence
  Description of Artificial Sequence: Synthetic oligonucleotide
  Antisense strand to SEQ ID NO: 1423712
aucuccaaggccaguuuau

SEQ ID NO: 1423714 - RNA, 19 nt, Artificial Sequence
  Description of Artificial Sequence: Synthetic oligonucleotide
  Sense strand starting at position 3688 of SEQ ID NO: 1243547
acauguugucaagacuuga

SEQ ID NO: 1423715 - RNA, 19 nt, Artificial Sequence
  Description of Artificial Sequence: Synthetic oligonucleotide
  Antisense strand to SEQ ID NO: 1423714
ucaagucuugacaacaugu

SEQ ID NO: 1423716 - RNA, 19 nt, Artificial Sequence
  Description of Artificial Sequence: Synthetic oligonucleotide
  Sense strand starting at position 3692 of SEQ ID NO: 1243547
guugucaagacuugaguau

SEQ ID NO: 1423717 - RNA, 19 nt, Artificial Sequence
  Description of Artificial Sequence: Synthetic oligonucleotide
  Antisense strand to SEQ ID NO: 1423716
auacucaagucuugacaac

SEQ ID NO: 1423718 - RNA, 19 nt, Artificial Sequence
  Description of Artificial Sequence: Synthetic oligonucleotide
  Sense strand starting at position 3693 of SEQ ID NO: 1243547
uugucaagacuugaguaua

SEQ ID NO: 1423719 - RNA, 19 nt, Artificial Sequence
  Description of Artificial Sequence: Synthetic oligonucleotide
  Antisense strand to SEQ ID NO: 1423718
uauacucaagucuugacaa

SEQ ID NO: 1423720 - RNA, 19 nt, Artificial Sequence
  Description of Artificial Sequence: Synthetic oligonucleotide
  Sense strand starting at position 3703 of SEQ ID NO: 1243547
uugaguauauuguccucuu

SEQ ID NO: 1423721 - RNA, 19 nt, Artificial Sequence
  Description of Artificial Sequence: Synthetic oligonucleotide
  Antisense strand to SEQ ID NO: 1423720
aagaggacaauauacucaa

SEQ ID NO: 1423722 - RNA, 19 nt, Artificial Sequence
  Description of Artificial Sequence: Synthetic oligonucleotide
  Sense strand starting at position 3706 of SEQ ID NO: 1243547
aguauauuguccucuugua

SEQ ID NO: 1423723 - RNA, 19 nt, Artificial Sequence
  Description of Artificial Sequence: Synthetic oligonucleotide
  Antisense strand to SEQ ID NO: 1423722
uacaagaggacaauauacu

SEQ ID NO: 1423724 - RNA, 19 nt, Artificial Sequence
  Description of Artificial Sequence: Synthetic oligonucleotide
  Sense strand starting at position 3729 of SEQ ID NO: 1243547
ggcucacuccugugaugga

SEQ ID NO: 1423725 - RNA, 19 nt, Artificial Sequence
  Description of Artificial Sequence: Synthetic oligonucleotide
  Antisense strand to SEQ ID NO: 1423724
uccaucacaggagugagcc

SEQ ID NO: 1423726 - RNA, 19 nt, Artificial Sequence
  Description of Artificial Sequence: Synthetic oligonucleotide
  Sense strand starting at position 3730 of SEQ ID NO: 1243547
gcucacuccugugauggaa

SEQ ID NO: 1423727 - RNA, 19 nt, Artificial Sequence
  Description of Artificial Sequence: Synthetic oligonucleotide
  Antisense strand to SEQ ID NO: 1423726
uuccaucacaggagugagc

SEQ ID NO: 1423728 - RNA, 19 nt, Artificial Sequence
  Description of Artificial Sequence: Synthetic oligonucleotide
  Sense strand starting at position 3734 of SEQ ID NO: 1243547
acuccugugauggaagagu

SEQ ID NO: 1423729 - RNA, 19 nt, Artificial Sequence
  Description of Artificial Sequence: Synthetic oligonucleotide
  Antisense strand to SEQ ID NO: 1423728
acucuuccaucacaggagu

SEQ ID NO: 1423730 - RNA, 19 nt, Artificial Sequence
  Description of Artificial Sequence: Synthetic oligonucleotide
  Sense strand starting at position 3765 of SEQ ID NO: 1243547
gggacauaguuggagacaa

SEQ ID NO: 1423731 - RNA, 19 nt, Artificial Sequence
  Description of Artificial Sequence: Synthetic oligonucleotide
  Antisense strand to SEQ ID NO: 1423730
uugucuccaacuauguccc

SEQ ID NO: 1423732 - RNA, 19 nt, Artificial Sequence
  Description of Artificial Sequence: Synthetic oligonucleotide
  Sense strand starting at position 3775 of SEQ ID NO: 1243547
uggagacaacucugaucuu

SEQ ID NO: 1423733 - RNA, 19 nt, Artificial Sequence
  Description of Artificial Sequence: Synthetic oligonucleotide
  Antisense strand to SEQ ID NO: 1423732
aagaucagaguugucucca

SEQ ID NO: 1423734 - RNA, 19 nt, Artificial Sequence
  Description of Artificial Sequence: Synthetic oligonucleotide
  Sense strand starting at position 3776 of SEQ ID NO: 1243547
ggagacaacucugaucuua

SEQ ID NO: 1423735 - RNA, 19 nt, Artificial Sequence
  Description of Artificial Sequence: Synthetic oligonucleotide
  Antisense strand to SEQ ID NO: 1423734
uaagaucagaguugucucc

SEQ ID NO: 1423736 - RNA, 19 nt, Artificial Sequence
  Description of Artificial Sequence: Synthetic oligonucleotide
  Sense strand starting at position 3876 of SEQ ID NO: 1243547
ggccuagcugugugucaua

SEQ ID NO: 1423737 - RNA, 19 nt, Artificial Sequence
  Description of Artificial Sequence: Synthetic oligonucleotide
  Antisense strand to SEQ ID NO: 1423736
uaugacacacagcuaggcc

SEQ ID NO: 1423738 - RNA, 19 nt, Artificial Sequence
  Description of Artificial Sequence: Synthetic oligonucleotide
  Sense strand starting at position 3887 of SEQ ID NO: 1243547
gugucauaugcccacuucu

SEQ ID NO: 1423739 - RNA, 19 nt, Artificial Sequence
  Description of Artificial Sequence: Synthetic oligonucleotide
  Antisense strand to SEQ ID NO: 1423738
agaagugggcauaugacac

SEQ ID NO: 1423740 - RNA, 19 nt, Artificial Sequence
  Description of Artificial Sequence: Synthetic oligonucleotide
  Sense strand starting at position 112 of SEQ ID NO: 1243548
cagguauaucuguauagca

SEQ ID NO: 1423741 - RNA, 19 nt, Artificial Sequence
  Description of Artificial Sequence: Synthetic oligonucleotide
  Antisense strand to SEQ ID NO: 1423740
ugcuauacagauauaccug

SEQ ID NO: 1423742 - RNA, 19 nt, Artificial Sequence
  Description of Artificial Sequence: Synthetic oligonucleotide
  Sense strand starting at position 114 of SEQ ID NO: 1243548
gguauaucuguauagcacu

SEQ ID NO: 1423743 - RNA, 19 nt, Artificial Sequence
  Description of Artificial Sequence: Synthetic oligonucleotide
  Antisense strand to SEQ ID NO: 1423742
agugcuauacagauauacc

SEQ ID NO: 1423744 - RNA, 19 nt, Artificial Sequence
  Description of Artificial Sequence: Synthetic oligonucleotide
  Sense strand starting at position 158 of SEQ ID NO: 1243548
auacucaugucugucacaa

SEQ ID NO: 1423745 - RNA, 19 nt, Artificial Sequence
  Description of Artificial Sequence: Synthetic oligonucleotide
  Antisense strand to SEQ ID NO: 1423744
uugugacagacaugaguau

SEQ ID NO: 1423746 - RNA, 19 nt, Artificial Sequence
  Description of Artificial Sequence: Synthetic oligonucleotide
  Sense strand starting at position 327 of SEQ ID NO: 1243548
agaucaugauacccagagu

SEQ ID NO: 1423747 - RNA, 19 nt, Artificial Sequence
  Description of Artificial Sequence: Synthetic oligonucleotide
  Antisense strand to SEQ ID NO: 1423746
acucuggguaucaugaucu

SEQ ID NO: 1423748 - RNA, 19 nt, Artificial Sequence
  Description of Artificial Sequence: Synthetic oligonucleotide
  Sense strand starting at position 340 of SEQ ID NO: 1243548
cagaguaugguguaugauc

SEQ ID NO: 1423749 - RNA, 19 nt, Artificial Sequence
  Description of Artificial Sequence: Synthetic oligonucleotide
  Antisense strand to SEQ ID NO: 1423748
gaucauacaccauacucug

SEQ ID NO: 1423750 - RNA, 19 nt, Artificial Sequence
  Description of Artificial Sequence: Synthetic oligonucleotide
  Sense strand starting at position 342 of SEQ ID NO: 1243548
gaguaugguguaugaucau

SEQ ID NO: 1423751 - RNA, 19 nt, Artificial Sequence
  Description of Artificial Sequence: Synthetic oligonucleotide
  Antisense strand to SEQ ID NO: 1423750
augaucauacaccauacuc

SEQ ID NO: 1423752 - RNA, 19 nt, Artificial Sequence
  Description of Artificial Sequence: Synthetic oligonucleotide
  Sense strand starting at position 349 of SEQ ID NO: 1243548
guguaugaucauggcauau

SEQ ID NO: 1423753 - RNA, 19 nt, Artificial Sequence
  Description of Artificial Sequence: Synthetic oligonucleotide
  Antisense strand to SEQ ID NO: 1423752
auaugccaugaucauacac

SEQ ID NO: 1423754 - RNA, 19 nt, Artificial Sequence
  Description of Artificial Sequence: Synthetic oligonucleotide
  Sense strand starting at position 677 of SEQ ID NO: 1243548
uugggagucuuagcaagag

SEQ ID NO: 1423755 - RNA, 19 nt, Artificial Sequence
  Description of Artificial Sequence: Synthetic oligonucleotide
  Antisense strand to SEQ ID NO: 1423754
cucuugcuaagacucccaa

SEQ ID NO: 1423756 - RNA, 19 nt, Artificial Sequence
  Description of Artificial Sequence: Synthetic oligonucleotide
  Sense strand starting at position 681 of SEQ ID NO: 1243548
gagucuuagcaagagcaag

SEQ ID NO: 1423757 - RNA, 19 nt, Artificial Sequence
  Description of Artificial Sequence: Synthetic oligonucleotide
  Antisense strand to SEQ ID NO: 1423756
cuugcucuugcuaagacuc

SEQ ID NO: 1423758 - RNA, 19 nt, Artificial Sequence
  Description of Artificial Sequence: Synthetic oligonucleotide
  Sense strand starting at position 1094 of SEQ ID NO: 1243548
gcaacaugauuaucuguau

SEQ ID NO: 1423759 - RNA, 19 nt, Artificial Sequence
  Description of Artificial Sequence: Synthetic oligonucleotide
  Antisense strand to SEQ ID NO: 1423758
auacagauaaucauguugc

SEQ ID NO: 1423760 - RNA, 19 nt, Artificial Sequence
  Description of Artificial Sequence: Synthetic oligonucleotide
  Sense strand starting at position 1097 of SEQ ID NO: 1243548
acaugauuaucuguauaag

SEQ ID NO: 1423761 - RNA, 19 nt, Artificial Sequence
  Description of Artificial Sequence: Synthetic oligonucleotide
  Antisense strand to SEQ ID NO: 1423760
cuuauacagauaaucaugu

SEQ ID NO: 1423762 - RNA, 19 nt, Artificial Sequence
  Description of Artificial Sequence: Synthetic oligonucleotide
  Sense strand starting at position 1559 of SEQ ID NO: 1243548
gcaagagccuugguuaaag

SEQ ID NO: 1423763 - RNA, 19 nt, Artificial Sequence
  Description of Artificial Sequence: Synthetic oligonucleotide
  Antisense strand to SEQ ID NO: 1423762
cuuuaaccaaggcucuugc

SEQ ID NO: 1423764 - RNA, 19 nt, Artificial Sequence
  Description of Artificial Sequence: Synthetic oligonucleotide
  Sense strand starting at position 1607 of SEQ ID NO: 1243548
auggcuucccuaggaggua

SEQ ID NO: 1423765 - RNA, 19 nt, Artificial Sequence
  Description of Artificial Sequence: Synthetic oligonucleotide
  Antisense strand to SEQ ID NO: 1423764
uaccuccuagggaagccau

SEQ ID NO: 1423766 - RNA, 19 nt, Artificial Sequence
  Description of Artificial Sequence: Synthetic oligonucleotide
  Sense strand starting at position 1623 of SEQ ID NO: 1243548
guaggaaucagcuggaguc

SEQ ID NO: 1423767 - RNA, 19 nt, Artificial Sequence
  Description of Artificial Sequence: Synthetic oligonucleotide
  Antisense strand to SEQ ID NO: 1423766
gacuccagcugauuccuac

SEQ ID NO: 1423768 - RNA, 19 nt, Artificial Sequence
  Description of Artificial Sequence: Synthetic oligonucleotide
  Sense strand starting at position 2072 of SEQ ID NO: 1243548
gguguuuccgauugggaga

SEQ ID NO: 1423769 - RNA, 19 nt, Artificial Sequence
  Description of Artificial Sequence: Synthetic oligonucleotide
  Antisense strand to SEQ ID NO: 1423768
ucucccaaucggaaacacc

SEQ ID NO: 1423770 - RNA, 19 nt, Artificial Sequence
  Description of Artificial Sequence: Synthetic oligonucleotide
  Sense strand starting at position 2196 of SEQ ID NO: 1243548
agcaguugauugucaggaa

SEQ ID NO: 1423771 - RNA, 19 nt, Artificial Sequence
  Description of Artificial Sequence: Synthetic oligonucleotide
  Antisense strand to SEQ ID NO: 1423770
uuccugacaaucaacugcu

SEQ ID NO: 1423772 - RNA, 19 nt, Artificial Sequence
  Description of Artificial Sequence: Synthetic oligonucleotide
  Sense strand starting at position 2209 of SEQ ID NO: 1243548
caggaaggaauucgugaua

SEQ ID NO: 1423773 - RNA, 19 nt, Artificial Sequence
  Description of Artificial Sequence: Synthetic oligonucleotide
  Antisense strand to SEQ ID NO: 1423772
uaucacgaauuccuuccug

SEQ ID NO: 1423774 - RNA, 19 nt, Artificial Sequence
  Description of Artificial Sequence: Synthetic oligonucleotide
  Sense strand starting at position 2260 of SEQ ID NO: 1243548
cgguguuuccugguugcuu

SEQ ID NO: 1423775 - RNA, 19 nt, Artificial Sequence
  Description of Artificial Sequence: Synthetic oligonucleotide
  Antisense strand to SEQ ID NO: 1423774
aagcaaccaggaaacaccg

SEQ ID NO: 1423776 - RNA, 19 nt, Artificial Sequence
  Description of Artificial Sequence: Synthetic oligonucleotide
  Sense strand starting at position 2354 of SEQ ID NO: 1243548
gaggaagacccuugugucu

SEQ ID NO: 1423777 - RNA, 19 nt, Artificial Sequence
  Description of Artificial Sequence: Synthetic oligonucleotide
  Antisense strand to SEQ ID NO: 1423776
agacacaagggucuuccuc

SEQ ID NO: 1423778 - RNA, 19 nt, Artificial Sequence
  Description of Artificial Sequence: Synthetic oligonucleotide
  Sense strand starting at position 2621 of SEQ ID NO: 1243548
agagaacucuggccaggau

SEQ ID NO: 1423779 - RNA, 19 nt, Artificial Sequence
  Description of Artificial Sequence: Synthetic oligonucleotide
  Antisense strand to SEQ ID NO: 1423778
auccuggccagaguucucu

SEQ ID NO: 1423780 - RNA, 19 nt, Artificial Sequence
  Description of Artificial Sequence: Synthetic oligonucleotide
  Sense strand starting at position 2819 of SEQ ID NO: 1243548
uuacuuaaccuguaagugu

SEQ ID NO: 1423781 - RNA, 19 nt, Artificial Sequence
  Description of Artificial Sequence: Synthetic oligonucleotide
  Antisense strand to SEQ ID NO: 1423780
acacuuacagguuaaguaa

SEQ ID NO: 1423782 - RNA, 19 nt, Artificial Sequence
  Description of Artificial Sequence: Synthetic oligonucleotide
  Sense strand starting at position 2909 of SEQ ID NO: 1243548
acauguaaaucaguacaau

SEQ ID NO: 1423783 - RNA, 19 nt, Artificial Sequence
  Description of Artificial Sequence: Synthetic oligonucleotide
  Antisense strand to SEQ ID NO: 1423782
auuguacugauuuacaugu

SEQ ID NO: 1423784 - RNA, 19 nt, Artificial Sequence
  Description of Artificial Sequence: Synthetic oligonucleotide
  Sense strand starting at position 3015 of SEQ ID NO: 1243548
cugaauaggcucuggaguu

SEQ ID NO: 1423785 - RNA, 19 nt, Artificial Sequence
  Description of Artificial Sequence: Synthetic oligonucleotide
  Antisense strand to SEQ ID NO: 1423784
aacuccagagccuauucag

SEQ ID NO: 1423786 - RNA, 19 nt, Artificial Sequence
  Description of Artificial Sequence: Synthetic oligonucleotide
  Sense strand starting at position 3155 of SEQ ID NO: 1243548
caggguugguucuuagaag

SEQ ID NO: 1423787 - RNA, 19 nt, Artificial Sequence
  Description of Artificial Sequence: Synthetic oligonucleotide
  Antisense strand to SEQ ID NO: 1423786
cuucuaagaaccaacccug

SEQ ID NO: 1423788 - RNA, 19 nt, Artificial Sequence
  Description of Artificial Sequence: Synthetic oligonucleotide
  Sense strand starting at position 3169 of SEQ ID NO: 1243548
agaagaucagagugcuaaa

SEQ ID NO: 1423789 - RNA, 19 nt, Artificial Sequence
  Description of Artificial Sequence: Synthetic oligonucleotide
  Antisense strand to SEQ ID NO: 1423788
uuuagcacucugaucuucu

SEQ ID NO: 1423790 - RNA, 19 nt, Artificial Sequence
  Description of Artificial Sequence: Synthetic oligonucleotide
  Sense strand starting at position 3313 of SEQ ID NO: 1243548
aggcuuucugcagagugua

SEQ ID NO: 1423791 - RNA, 19 nt, Artificial Sequence
  Description of Artificial Sequence: Synthetic oligonucleotide
  Antisense strand to SEQ ID NO: 1423790
uacacucugcagaaagccu

SEQ ID NO: 1423792 - RNA, 19 nt, Artificial Sequence
  Description of Artificial Sequence: Synthetic oligonucleotide
  Sense strand starting at position 3326 of SEQ ID NO: 1243548
aguguaaacuccucaagaa

SEQ ID NO: 1423793 - RNA, 19 nt, Artificial Sequence
  Description of Artificial Sequence: Synthetic oligonucleotide
  Antisense strand to SEQ ID NO: 1423792
uucuugaggaguuuacacu

SEQ ID NO: 1423794 - RNA, 19 nt, Artificial Sequence
  Description of Artificial Sequence: Synthetic oligonucleotide
  Sense strand starting at position 3353 of SEQ ID NO: 1243548
uucuaucuuguccaugacu

SEQ ID NO: 1423795 - RNA, 19 nt, Artificial Sequence
  Description of Artificial Sequence: Synthetic oligonucleotide
  Antisense strand to SEQ ID NO: 1423794
agucauggacaagauagaa

SEQ ID NO: 1423796 - RNA, 19 nt, Artificial Sequence
  Description of Artificial Sequence: Synthetic oligonucleotide
  Sense strand starting at position 3364 of SEQ ID NO: 1243548
ccaugacuguauccugagu

SEQ ID NO: 1423797 - RNA, 19 nt, Artificial Sequence
  Description of Artificial Sequence: Synthetic oligonucleotide
  Antisense strand to SEQ ID NO: 1423796
acucaggauacagucaugg

SEQ ID NO: 1423798 - RNA, 19 nt, Artificial Sequence
  Description of Artificial Sequence: Synthetic oligonucleotide
  Sense strand starting at position 3369 of SEQ ID NO: 1243548
acuguauccugaguuucua

SEQ ID NO: 1423799 - RNA, 19 nt, Artificial Sequence
  Description of Artificial Sequence: Synthetic oligonucleotide
  Antisense strand to SEQ ID NO: 1423798
uagaaacucaggauacagu

SEQ ID NO: 1423800 - RNA, 19 nt, Artificial Sequence
  Description of Artificial Sequence: Synthetic oligonucleotide
  Sense strand starting at position 3379 of SEQ ID NO: 1243548
gaguuucuagaauaguguu

SEQ ID NO: 1423801 - RNA, 19 nt, Artificial Sequence
  Description of Artificial Sequence: Synthetic oligonucleotide
  Antisense strand to SEQ ID NO: 1423800
aacacuauucuagaaacuc

SEQ ID NO: 1423802 - RNA, 19 nt, Artificial Sequence
  Description of Artificial Sequence: Synthetic oligonucleotide
  Sense strand starting at position 3385 of SEQ ID NO: 1243548
cuagaauaguguuuauaac

SEQ ID NO: 1423803 - RNA, 19 nt, Artificial Sequence
  Description of Artificial Sequence: Synthetic oligonucleotide
  Antisense strand to SEQ ID NO: 1423802
guuauaaacacuauucuag

SEQ ID NO: 1423804 - RNA, 19 nt, Artificial Sequence
  Description of Artificial Sequence: Synthetic oligonucleotide
  Sense strand starting at position 3501 of SEQ ID NO: 1243548
gcacucaacgcagaaugaa

SEQ ID NO: 1423805 - RNA, 19 nt, Artificial Sequence
  Description of Artificial Sequence: Synthetic oligonucleotide
  Antisense strand to SEQ ID NO: 1423804
uucauucugcguugagugc

SEQ ID NO: 1423806 - RNA, 19 nt, Artificial Sequence
  Description of Artificial Sequence: Synthetic oligonucleotide
  Sense strand starting at position 3509 of SEQ ID NO: 1243548
cgcagaaugaaucaugagu

SEQ ID NO: 1423807 - RNA, 19 nt, Artificial Sequence
  Description of Artificial Sequence: Synthetic oligonucleotide
  Antisense strand to SEQ ID NO: 1423806
acucaugauucauucugcg

SEQ ID NO: 1423808 - RNA, 19 nt, Artificial Sequence
  Description of Artificial Sequence: Synthetic oligonucleotide
  Sense strand starting at position 3625 of SEQ ID NO: 1243548
acuggcuuuccagaacaau

SEQ ID NO: 1423809 - RNA, 19 nt, Artificial Sequence
  Description of Artificial Sequence: Synthetic oligonucleotide
  Antisense strand to SEQ ID NO: 1423808
auuguucuggaaagccagu

SEQ ID NO: 1423810 - RNA, 19 nt, Artificial Sequence
  Description of Artificial Sequence: Synthetic oligonucleotide
  Sense strand starting at position 3639 of SEQ ID NO: 1243548
acaauauacuaagugguau

SEQ ID NO: 1423811 - RNA, 19 nt, Artificial Sequence
  Description of Artificial Sequence: Synthetic oligonucleotide
  Antisense strand to SEQ ID NO: 1423810
auaccacuuaguauauugu

SEQ ID NO: 1423812 - RNA, 19 nt, Artificial Sequence
  Description of Artificial Sequence: Synthetic oligonucleotide
  Sense strand starting at position 3858 of SEQ ID NO: 1243548
uaaauaacgugcucaaagu

SEQ ID NO: 1423813 - RNA, 19 nt, Artificial Sequence
  Description of Artificial Sequence: Synthetic oligonucleotide
  Antisense strand to SEQ ID NO: 1423812
acuuugagcacguuauuua

SEQ ID NO: 1423814 - RNA, 19 nt, Artificial Sequence
  Description of Artificial Sequence: Synthetic oligonucleotide
  Sense strand starting at position 3919 of SEQ ID NO: 1243548
auaguuuggccucaguaua

SEQ ID NO: 1423815 - RNA, 19 nt, Artificial Sequence
  Description of Artificial Sequence: Synthetic oligonucleotide
  Antisense strand to SEQ ID NO: 1423814
uauacugaggccaaacuau

SEQ ID NO: 1423816 - RNA, 19 nt, Artificial Sequence
  Description of Artificial Sequence: Synthetic oligonucleotide
  Sense strand starting at position 3970 of SEQ ID NO: 1243548
cguaguucugugucucaua

SEQ ID NO: 1423817 - RNA, 19 nt, Artificial Sequence
  Description of Artificial Sequence: Synthetic oligonucleotide
  Antisense strand to SEQ ID NO: 1423816
uaugagacacagaacuacg

SEQ ID NO: 1423818 - RNA, 19 nt, Artificial Sequence
  Description of Artificial Sequence: Synthetic oligonucleotide
  Sense strand starting at position 3979 of SEQ ID NO: 1243548
gugucucauagugaagaag

SEQ ID NO: 1423819 - RNA, 19 nt, Artificial Sequence
  Description of Artificial Sequence: Synthetic oligonucleotide
  Antisense strand to SEQ ID NO: 1423818
cuucuucacuaugagacac

SEQ ID NO: 1423820 - RNA, 19 nt, Artificial Sequence
  Description of Artificial Sequence: Synthetic oligonucleotide
  Sense strand starting at position 146 of SEQ ID NO: 1243549
gaggaagugcuccagcacu

SEQ ID NO: 1423821 - RNA, 19 nt, Artificial Sequence
  Description of Artificial Sequence: Synthetic oligonucleotide
  Antisense strand to SEQ ID NO: 1423820
agugcuggagcacuuccuc

SEQ ID NO: 1423822 - RNA, 19 nt, Artificial Sequence
  Description of Artificial Sequence: Synthetic oligonucleotide
  Sense strand starting at position 192 of SEQ ID NO: 1243549
guggcaucucgaaguaggu

SEQ ID NO: 1423823 - RNA, 19 nt, Artificial Sequence
  Description of Artificial Sequence: Synthetic oligonucleotide
  Antisense strand to SEQ ID NO: 1423822
accuacuucgagaugccac

SEQ ID NO: 1423824 - RNA, 19 nt, Artificial Sequence
  Description of Artificial Sequence: Synthetic oligonucleotide
  Sense strand starting at position 232 of SEQ ID NO: 1243549
gcggaacucucaguauaaa

SEQ ID NO: 1423825 - RNA, 19 nt, Artificial Sequence
  Description of Artificial Sequence: Synthetic oligonucleotide
  Antisense strand to SEQ ID NO: 1423824
uuuauacugagaguuccgc

SEQ ID NO: 1423826 - RNA, 19 nt, Artificial Sequence
  Description of Artificial Sequence: Synthetic oligonucleotide
  Sense strand starting at position 534 of SEQ ID NO: 1243549
ugcuuaggaagaugugaaa

SEQ ID NO: 1423827 - RNA, 19 nt, Artificial Sequence
  Description of Artificial Sequence: Synthetic oligonucleotide
  Antisense strand to SEQ ID NO: 1423826
uuucacaucuuccuaagca

SEQ ID NO: 1423828 - RNA, 19 nt, Artificial Sequence
  Description of Artificial Sequence: Synthetic oligonucleotide
  Sense strand starting at position 553 of SEQ ID NO: 1243549
ggaagauccugagaaugaa

SEQ ID NO: 1423829 - RNA, 19 nt, Artificial Sequence
  Description of Artificial Sequence: Synthetic oligonucleotide
  Antisense strand to SEQ ID NO: 1423828
uucauucucaggaucuucc

SEQ ID NO: 1423830 - RNA, 19 nt, Artificial Sequence
  Description of Artificial Sequence: Synthetic oligonucleotide
  Sense strand starting at position 1032 of SEQ ID NO: 1243549
aaagaaagacgguguguaa

SEQ ID NO: 1423831 - RNA, 19 nt, Artificial Sequence
  Description of Artificial Sequence: Synthetic oligonucleotide
  Antisense strand to SEQ ID NO: 1423830
uuacacaccgucuuucuuu

SEQ ID NO: 1423832 - RNA, 19 nt, Artificial Sequence
  Description of Artificial Sequence: Synthetic oligonucleotide
  Sense strand starting at position 1068 of SEQ ID NO: 1243549
uuaaaucaggcuuggagaa

SEQ ID NO: 1423833 - RNA, 19 nt, Artificial Sequence
  Description of Artificial Sequence: Synthetic oligonucleotide
  Antisense strand to SEQ ID NO: 1423832
uucuccaagccugauuuaa

SEQ ID NO: 1423834 - RNA, 19 nt, Artificial Sequence
  Description of Artificial Sequence: Synthetic oligonucleotide
  Sense strand starting at position 1118 of SEQ ID NO: 1243549
ggucaauaccgaggacauc

SEQ ID NO: 1423835 - RNA, 19 nt, Artificial Sequence
  Description of Artificial Sequence: Synthetic oligonucleotide
  Antisense strand to SEQ ID NO: 1423834
gauguccucgguauugacc

SEQ ID NO: 1423836 - RNA, 19 nt, Artificial Sequence
  Description of Artificial Sequence: Synthetic oligonucleotide
  Sense strand starting at position 1146 of SEQ ID NO: 1243549
gcagguuggucacugaauc

SEQ ID NO: 1423837 - RNA, 19 nt, Artificial Sequence
  Description of Artificial Sequence: Synthetic oligonucleotide
  Antisense strand to SEQ ID NO: 1423836
gauucagugaccaaccugc

SEQ ID NO: 1423838 - RNA, 19 nt, Artificial Sequence
  Description of Artificial Sequence: Synthetic oligonucleotide
  Sense strand starting at position 1147 of SEQ ID NO: 1243549
cagguuggucacugaaucu

SEQ ID NO: 1423839 - RNA, 19 nt, Artificial Sequence
  Description of Artificial Sequence: Synthetic oligonucleotide
  Antisense strand to SEQ ID NO: 1423838
agauucagugaccaaccug

SEQ ID NO: 1423840 - RNA, 19 nt, Artificial Sequence
  Description of Artificial Sequence: Synthetic oligonucleotide
  Sense strand starting at position 1159 of SEQ ID NO: 1243549
ugaaucuggccauacugua

SEQ ID NO: 1423841 - RNA, 19 nt, Artificial Sequence
  Description of Artificial Sequence: Synthetic oligonucleotide
  Antisense strand to SEQ ID NO: 1423840
uacaguauggccagauuca

SEQ ID NO: 1423842 - RNA, 19 nt, Artificial Sequence
  Description of Artificial Sequence: Synthetic oligonucleotide
  Sense strand starting at position 1383 of SEQ ID NO: 1243549
ggaacaccuuuaccguaaa

SEQ ID NO: 1423843 - RNA, 19 nt, Artificial Sequence
  Description of Artificial Sequence: Synthetic oligonucleotide
  Antisense strand to SEQ ID NO: 1423842
uuuacgguaaagguguucc

SEQ ID NO: 1423844 - RNA, 19 nt, Artificial Sequence
  Description of Artificial Sequence: Synthetic oligonucleotide
  Sense strand starting at position 1386 of SEQ ID NO: 1243549
acaccuuuaccguaaagcu

SEQ ID NO: 1423845 - RNA, 19 nt, Artificial Sequence
  Description of Artificial Sequence: Synthetic oligonucleotide
  Antisense strand to SEQ ID NO: 1423844
agcuuuacgguaaaggugu

SEQ ID NO: 1423846 - RNA, 19 nt, Artificial Sequence
  Description of Artificial Sequence: Synthetic oligonucleotide
  Sense strand starting at position 1993 of SEQ ID NO: 1243549
ugggaaauguaguucgaau

SEQ ID NO: 1423847 - RNA, 19 nt, Artificial Sequence
  Description of Artificial Sequence: Synthetic oligonucleotide
  Antisense strand to SEQ ID NO: 1423846
auucgaacuacauuuccca

SEQ ID NO: 1423848 - RNA, 19 nt, Artificial Sequence
  Description of Artificial Sequence: Synthetic oligonucleotide
  Sense strand starting at position 2001 of SEQ ID NO: 1243549
guaguucgaaugcaaacaa

SEQ ID NO: 1423849 - RNA, 19 nt, Artificial Sequence
  Description of Artificial Sequence: Synthetic oligonucleotide
  Antisense strand to SEQ ID NO: 1423848
uuguuugcauucgaacuac

SEQ ID NO: 1423850 - RNA, 19 nt, Artificial Sequence
  Description of Artificial Sequence: Synthetic oligonucleotide
  Sense strand starting at position 2618 of SEQ ID NO: 1243549
uggugacucccauagguua

SEQ ID NO: 1423851 - RNA, 19 nt, Artificial Sequence
  Description of Artificial Sequence: Synthetic oligonucleotide
  Antisense strand to SEQ ID NO: 1423850
uaaccuaugggagucacca

SEQ ID NO: 1423852 - RNA, 19 nt, Artificial Sequence
  Description of Artificial Sequence: Synthetic oligonucleotide
  Sense strand starting at position 2620 of SEQ ID NO: 1243549
gugacucccauagguuaga

SEQ ID NO: 1423853 - RNA, 19 nt, Artificial Sequence
  Description of Artificial Sequence: Synthetic oligonucleotide
  Antisense strand to SEQ ID NO: 1423852
ucuaaccuaugggagucac

SEQ ID NO: 1423854 - RNA, 19 nt, Artificial Sequence
  Description of Artificial Sequence: Synthetic oligonucleotide
  Sense strand starting at position 2745 of SEQ ID NO: 1243549
cgguuuccuuucucaauuu

SEQ ID NO: 1423855 - RNA, 19 nt, Artificial Sequence
  Description of Artificial Sequence: Synthetic oligonucleotide
  Antisense strand to SEQ ID NO: 1423854
aaauugagaaaggaaaccg

SEQ ID NO: 1423856 - RNA, 19 nt, Artificial Sequence
  Description of Artificial Sequence: Synthetic oligonucleotide
  Sense strand starting at position 2793 of SEQ ID NO: 1243549
uguguuugugcguuguauc

SEQ ID NO: 1423857 - RNA, 19 nt, Artificial Sequence
  Description of Artificial Sequence: Synthetic oligonucleotide
  Antisense strand to SEQ ID NO: 1423856
gauacaacgcacaaacaca

SEQ ID NO: 1423858 - RNA, 19 nt, Artificial Sequence
  Description of Artificial Sequence: Synthetic oligonucleotide
  Sense strand starting at position 2873 of SEQ ID NO: 1243549
uggccuuauuucucgaugu

SEQ ID NO: 1423859 - RNA, 19 nt, Artificial Sequence
  Description of Artificial Sequence: Synthetic oligonucleotide
  Antisense strand to SEQ ID NO: 1423858
acaucgagaaauaaggcca

SEQ ID NO: 1423860 - RNA, 19 nt, Artificial Sequence
  Description of Artificial Sequence: Synthetic oligonucleotide
  Sense strand starting at position 2962 of SEQ ID NO: 1243549
cugacuaauggcugacgau

SEQ ID NO: 1423861 - RNA, 19 nt, Artificial Sequence
  Description of Artificial Sequence: Synthetic oligonucleotide
  Antisense strand to SEQ ID NO: 1423860
aucgucagccauuagucag

SEQ ID NO: 1423862 - RNA, 19 nt, Artificial Sequence
  Description of Artificial Sequence: Synthetic oligonucleotide
  Sense strand starting at position 3099 of SEQ ID NO: 1243549
aaagcauuaugguuugaau

SEQ ID NO: 1423863 - RNA, 19 nt, Artificial Sequence
  Description of Artificial Sequence: Synthetic oligonucleotide
  Antisense strand to SEQ ID NO: 1423862
auucaaaccauaaugcuuu

SEQ ID NO: 1423864 - RNA, 19 nt, Artificial Sequence
  Description of Artificial Sequence: Synthetic oligonucleotide
  Sense strand starting at position 3101 of SEQ ID NO: 1243549
agcauuaugguuugaauua

SEQ ID NO: 1423865 - RNA, 19 nt, Artificial Sequence
  Description of Artificial Sequence: Synthetic oligonucleotide
  Antisense strand to SEQ ID NO: 1423864
uaauucaaaccauaaugcu

SEQ ID NO: 1423866 - RNA, 19 nt, Artificial Sequence
  Description of Artificial Sequence: Synthetic oligonucleotide
  Sense strand starting at position 3131 of SEQ ID NO: 1243549
agauaacugagaugucuug

SEQ ID NO: 1423867 - RNA, 19 nt, Artificial Sequence
  Description of Artificial Sequence: Synthetic oligonucleotide
  Antisense strand to SEQ ID NO: 1423866
caagacaucucaguuaucu

SEQ ID NO: 1423868 - RNA, 19 nt, Artificial Sequence
  Description of Artificial Sequence: Synthetic oligonucleotide
  Sense strand starting at position 3157 of SEQ ID NO: 1243549
auauaaaccugugugauug

SEQ ID NO: 1423869 - RNA, 19 nt, Artificial Sequence
  Description of Artificial Sequence: Synthetic oligonucleotide
  Antisense strand to SEQ ID NO: 1423868
caaucacacagguuuauau

SEQ ID NO: 1423870 - RNA, 19 nt, Artificial Sequence
  Description of Artificial Sequence: Synthetic oligonucleotide
  Sense strand starting at position 3158 of SEQ ID NO: 1243549
uauaaaccugugugauugu

SEQ ID NO: 1423871 - RNA, 19 nt, Artificial Sequence
  Description of Artificial Sequence: Synthetic oligonucleotide
  Antisense strand to SEQ ID NO: 1423870
acaaucacacagguuuaua

SEQ ID NO: 1423872 - RNA, 19 nt, Artificial Sequence
  Description of Artificial Sequence: Synthetic oligonucleotide
  Sense strand starting at position 3161 of SEQ ID NO: 1243549
aaaccugugugauuguauu

SEQ ID NO: 1423873 - RNA, 19 nt, Artificial Sequence
  Description of Artificial Sequence: Synthetic oligonucleotide
  Antisense strand to SEQ ID NO: 1423872
aauacaaucacacagguuu

SEQ ID NO: 1423874 - RNA, 19 nt, Artificial Sequence
  Description of Artificial Sequence: Synthetic oligonucleotide
  Sense strand starting at position 3226 of SEQ ID NO: 1243549
ggaagauaauuguaaagau

SEQ ID NO: 1423875 - RNA, 19 nt, Artificial Sequence
  Description of Artificial Sequence: Synthetic oligonucleotide
  Antisense strand to SEQ ID NO: 1423874
aucuuuacaauuaucuucc

SEQ ID NO: 1423876 - RNA, 19 nt, Artificial Sequence
  Description of Artificial Sequence: Synthetic oligonucleotide
  Sense strand starting at position 3236 of SEQ ID NO: 1243549
uguaaagauuagcuacaca

SEQ ID NO: 1423877 - RNA, 19 nt, Artificial Sequence
  Description of Artificial Sequence: Synthetic oligonucleotide
  Antisense strand to SEQ ID NO: 1423876
uguguagcuaaucuuuaca

SEQ ID NO: 1423878 - RNA, 19 nt, Artificial Sequence
  Description of Artificial Sequence: Synthetic oligonucleotide
  Sense strand starting at position 3318 of SEQ ID NO: 1243549
ggagcucuucccgagagga

SEQ ID NO: 1423879 - RNA, 19 nt, Artificial Sequence
  Description of Artificial Sequence: Synthetic oligonucleotide
  Antisense strand to SEQ ID NO: 1423878
uccucucgggaagagcucc

SEQ ID NO: 1423880 - RNA, 19 nt, Artificial Sequence
  Description of Artificial Sequence: Synthetic oligonucleotide
  Sense strand starting at position 3519 of SEQ ID NO: 1243549
acaaguauguacccuuuga

SEQ ID NO: 1423881 - RNA, 19 nt, Artificial Sequence
  Description of Artificial Sequence: Synthetic oligonucleotide
  Antisense strand to SEQ ID NO: 1423880
ucaaaggguacauacuugu

SEQ ID NO: 1423882 - RNA, 19 nt, Artificial Sequence
  Description of Artificial Sequence: Synthetic oligonucleotide
  Sense strand starting at position 3556 of SEQ ID NO: 1243549
ugaaucugaugucuacaaa

SEQ ID NO: 1423883 - RNA, 19 nt, Artificial Sequence
  Description of Artificial Sequence: Synthetic oligonucleotide
  Antisense strand to SEQ ID NO: 1423882
uuuguagacaucagauuca

SEQ ID NO: 1423884 - RNA, 19 nt, Artificial Sequence
  Description of Artificial Sequence: Synthetic oligonucleotide
  Sense strand starting at position 3578 of SEQ ID NO: 1243549
cuuguagaauucuuuguag

SEQ ID NO: 1423885 - RNA, 19 nt, Artificial Sequence
  Description of Artificial Sequence: Synthetic oligonucleotide
  Antisense strand to SEQ ID NO: 1423884
cuacaaagaauucuacaag

SEQ ID NO: 1423886 - RNA, 19 nt, Artificial Sequence
  Description of Artificial Sequence: Synthetic oligonucleotide
  Sense strand starting at position 3580 of SEQ ID NO: 1243549
uguagaauucuuuguagug

SEQ ID NO: 1423887 - RNA, 19 nt, Artificial Sequence
  Description of Artificial Sequence: Synthetic oligonucleotide
  Antisense strand to SEQ ID NO: 1423886
cacuacaaagaauucuaca

SEQ ID NO: 1423888 - RNA, 19 nt, Artificial Sequence
  Description of Artificial Sequence: Synthetic oligonucleotide
  Sense strand starting at position 3581 of SEQ ID NO: 1243549
guagaauucuuuguaguga

SEQ ID NO: 1423889 - RNA, 19 nt, Artificial Sequence
  Description of Artificial Sequence: Synthetic oligonucleotide
  Antisense strand to SEQ ID NO: 1423888
ucacuacaaagaauucuac

SEQ ID NO: 1423890 - RNA, 19 nt, Artificial Sequence
  Description of Artificial Sequence: Synthetic oligonucleotide
  Sense strand starting at position 3639 of SEQ ID NO: 1243549
aggaguaaauuggugcauu

SEQ ID NO: 1423891 - RNA, 19 nt, Artificial Sequence
  Description of Artificial Sequence: Synthetic oligonucleotide
  Antisense strand to SEQ ID NO: 1423890
aaugcaccaauuuacuccu

SEQ ID NO: 1423892 - RNA, 19 nt, Artificial Sequence
  Description of Artificial Sequence: Synthetic oligonucleotide
  Sense strand starting at position 3663 of SEQ ID NO: 1243549
ucuggaaauuacccagcua

SEQ ID NO: 1423893 - RNA, 19 nt, Artificial Sequence
  Description of Artificial Sequence: Synthetic oligonucleotide
  Antisense strand to SEQ ID NO: 1423892
uagcuggguaauuuccaga

SEQ ID NO: 1423894 - RNA, 19 nt, Artificial Sequence
  Description of Artificial Sequence: Synthetic oligonucleotide
  Sense strand starting at position 3808 of SEQ ID NO: 1243549
uauguuuguguugagggau

SEQ ID NO: 1423895 - RNA, 19 nt, Artificial Sequence
  Description of Artificial Sequence: Synthetic oligonucleotide
  Antisense strand to SEQ ID NO: 1423894
aucccucaacacaaacaua

SEQ ID NO: 1423896 - RNA, 19 nt, Artificial Sequence
  Description of Artificial Sequence: Synthetic oligonucleotide
  Sense strand starting at position 3811 of SEQ ID NO: 1243549
guuuguguugagggauaca

SEQ ID NO: 1423897 - RNA, 19 nt, Artificial Sequence
  Description of Artificial Sequence: Synthetic oligonucleotide
  Antisense strand to SEQ ID NO: 1423896
uguaucccucaacacaaac

SEQ ID NO: 1423898 - RNA, 19 nt, Artificial Sequence
  Description of Artificial Sequence: Synthetic oligonucleotide
  Sense strand starting at position 3917 of SEQ ID NO: 1243549
ggcugaucacuggagguua

SEQ ID NO: 1423899 - RNA, 19 nt, Artificial Sequence
  Description of Artificial Sequence: Synthetic oligonucleotide
  Antisense strand to SEQ ID NO: 1423898
uaaccuccagugaucagcc

SEQ ID NO: 1423900 - RNA, 19 nt, Artificial Sequence
  Description of Artificial Sequence: Synthetic oligonucleotide
  Sense strand starting at position 1 of SEQ ID NO: 1243550
gugugaagaugcccagaaa

SEQ ID NO: 1423901 - RNA, 19 nt, Artificial Sequence
  Description of Artificial Sequence: Synthetic oligonucleotide
  Antisense strand to SEQ ID NO: 1423900
uuucugggcaucuucacac

SEQ ID NO: 1423902 - RNA, 19 nt, Artificial Sequence
  Description of Artificial Sequence: Synthetic oligonucleotide
  Sense strand starting at position 92 of SEQ ID NO: 1243550
cccucagaauguuugggua

SEQ ID NO: 1423903 - RNA, 19 nt, Artificial Sequence
  Description of Artificial Sequence: Synthetic oligonucleotide
  Antisense strand to SEQ ID NO: 1423902
uacccaaacauucugaggg

SEQ ID NO: 1423904 - RNA, 19 nt, Artificial Sequence
  Description of Artificial Sequence: Synthetic oligonucleotide
  Sense strand starting at position 417 of SEQ ID NO: 1243550
gaggaagugcuccagcacu

SEQ ID NO: 1423905 - RNA, 19 nt, Artificial Sequence
  Description of Artificial Sequence: Synthetic oligonucleotide
  Antisense strand to SEQ ID NO: 1423904
agugcuggagcacuuccuc

SEQ ID NO: 1423906 - RNA, 19 nt, Artificial Sequence
  Description of Artificial Sequence: Synthetic oligonucleotide
  Sense strand starting at position 463 of SEQ ID NO: 1243550
guggcaucucgaaguaggu

SEQ ID NO: 1423907 - RNA, 19 nt, Artificial Sequence
  Description of Artificial Sequence: Synthetic oligonucleotide
  Antisense strand to SEQ ID NO: 1423906
accuacuucgagaugccac

SEQ ID NO: 1423908 - RNA, 19 nt, Artificial Sequence
  Description of Artificial Sequence: Synthetic oligonucleotide
  Sense strand starting at position 503 of SEQ ID NO: 1243550
gcggaacucucaguauaaa

SEQ ID NO: 1423909 - RNA, 19 nt, Artificial Sequence
  Description of Artificial Sequence: Synthetic oligonucleotide
  Antisense strand to SEQ ID NO: 1423908
uuuauacugagaguuccgc

SEQ ID NO: 1423910 - RNA, 19 nt, Artificial Sequence
  Description of Artificial Sequence: Synthetic oligonucleotide
  Sense strand starting at position 805 of SEQ ID NO: 1243550
ugcuuaggaagaugugaaa

SEQ ID NO: 1423911 - RNA, 19 nt, Artificial Sequence
  Description of Artificial Sequence: Synthetic oligonucleotide
  Antisense strand to SEQ ID NO: 1423910
uuucacaucuuccuaagca

SEQ ID NO: 1423912 - RNA, 19 nt, Artificial Sequence
  Description of Artificial Sequence: Synthetic oligonucleotide
  Sense strand starting at position 824 of SEQ ID NO: 1243550
ggaagauccugagaaugaa

SEQ ID NO: 1423913 - RNA, 19 nt, Artificial Sequence
  Description of Artificial Sequence: Synthetic oligonucleotide
  Antisense strand to SEQ ID NO: 1423912
uucauucucaggaucuucc

SEQ ID NO: 1423914 - RNA, 19 nt, Artificial Sequence
  Description of Artificial Sequence: Synthetic oligonucleotide
  Sense strand starting at position 1303 of SEQ ID NO: 1243550
aaagaaagacgguguguaa

SEQ ID NO: 1423915 - RNA, 19 nt, Artificial Sequence
  Description of Artificial Sequence: Synthetic oligonucleotide
  Antisense strand to SEQ ID NO: 1423914
uuacacaccgucuuucuuu

SEQ ID NO: 1423916 - RNA, 19 nt, Artificial Sequence
  Description of Artificial Sequence: Synthetic oligonucleotide
  Sense strand starting at position 1339 of SEQ ID NO: 1243550
uuaaaucaggcuuggagaa

SEQ ID NO: 1423917 - RNA, 19 nt, Artificial Sequence
  Description of Artificial Sequence: Synthetic oligonucleotide
  Antisense strand to SEQ ID NO: 1423916
uucuccaagccugauuuaa

SEQ ID NO: 1423918 - RNA, 19 nt, Artificial Sequence
  Description of Artificial Sequence: Synthetic oligonucleotide
  Sense strand starting at position 1389 of SEQ ID NO: 1243550
ggucaauaccgaggacauc

SEQ ID NO: 1423919 - RNA, 19 nt, Artificial Sequence
  Description of Artificial Sequence: Synthetic oligonucleotide
  Antisense strand to SEQ ID NO: 1423918
gauguccucgguauugacc

SEQ ID NO: 1423920 - RNA, 19 nt, Artificial Sequence
  Description of Artificial Sequence: Synthetic oligonucleotide
  Sense strand starting at position 1417 of SEQ ID NO: 1243550
gcagguuggucacugaauc

SEQ ID NO: 1423921 - RNA, 19 nt, Artificial Sequence
  Description of Artificial Sequence: Synthetic oligonucleotide
  Antisense strand to SEQ ID NO: 1423920
gauucagugaccaaccugc

SEQ ID NO: 1423922 - RNA, 19 nt, Artificial Sequence
  Description of Artificial Sequence: Synthetic oligonucleotide
  Sense strand starting at position 1418 of SEQ ID NO: 1243550
cagguuggucacugaaucu

SEQ ID NO: 1423923 - RNA, 19 nt, Artificial Sequence
  Description of Artificial Sequence: Synthetic oligonucleotide
  Antisense strand to SEQ ID NO: 1423922
agauucagugaccaaccug

SEQ ID NO: 1423924 - RNA, 19 nt, Artificial Sequence
  Description of Artificial Sequence: Synthetic oligonucleotide
  Sense strand starting at position 1430 of SEQ ID NO: 1243550
ugaaucuggccauacugua

SEQ ID NO: 1423925 - RNA, 19 nt, Artificial Sequence
  Description of Artificial Sequence: Synthetic oligonucleotide
  Antisense strand to SEQ ID NO: 1423924
uacaguauggccagauuca

SEQ ID NO: 1423926 - RNA, 19 nt, Artificial Sequence
  Description of Artificial Sequence: Synthetic oligonucleotide
  Sense strand starting at position 1654 of SEQ ID NO: 1243550
ggaacaccuuuaccguaaa

SEQ ID NO: 1423927 - RNA, 19 nt, Artificial Sequence
  Description of Artificial Sequence: Synthetic oligonucleotide
  Antisense strand to SEQ ID NO: 1423926
uuuacgguaaagguguucc

SEQ ID NO: 1423928 - RNA, 19 nt, Artificial Sequence
  Description of Artificial Sequence: Synthetic oligonucleotide
  Sense strand starting at position 1657 of SEQ ID NO: 1243550
acaccuuuaccguaaagcu

SEQ ID NO: 1423929 - RNA, 19 nt, Artificial Sequence
  Description of Artificial Sequence: Synthetic oligonucleotide
  Antisense strand to SEQ ID NO: 1423928
agcuuuacgguaaaggugu

SEQ ID NO: 1423930 - RNA, 19 nt, Artificial Sequence
  Description of Artificial Sequence: Synthetic oligonucleotide
  Sense strand starting at position 2264 of SEQ ID NO: 1243550
ugggaaauguaguucgaau

SEQ ID NO: 1423931 - RNA, 19 nt, Artificial Sequence
  Description of Artificial Sequence: Synthetic oligonucleotide
  Antisense strand to SEQ ID NO: 1423930
auucgaacuacauuuccca

SEQ ID NO: 1423932 - RNA, 19 nt, Artificial Sequence
  Description of Artificial Sequence: Synthetic oligonucleotide
  Sense strand starting at position 2272 of SEQ ID NO: 1243550
guaguucgaaugcaaacaa

SEQ ID NO: 1423933 - RNA, 19 nt, Artificial Sequence
  Description of Artificial Sequence: Synthetic oligonucleotide
  Antisense strand to SEQ ID NO: 1423932
uuguuugcauucgaacuac

SEQ ID NO: 1423934 - RNA, 19 nt, Artificial Sequence
  Description of Artificial Sequence: Synthetic oligonucleotide
  Sense strand starting at position 2889 of SEQ ID NO: 1243550
uggugacucccauagguua

SEQ ID NO: 1423935 - RNA, 19 nt, Artificial Sequence
  Description of Artificial Sequence: Synthetic oligonucleotide
  Antisense strand to SEQ ID NO: 1423934
uaaccuaugggagucacca

SEQ ID NO: 1423936 - RNA, 19 nt, Artificial Sequence
  Description of Artificial Sequence: Synthetic oligonucleotide
  Sense strand starting at position 2891 of SEQ ID NO: 1243550
gugacucccauagguuaga

SEQ ID NO: 1423937 - RNA, 19 nt, Artificial Sequence
  Description of Artificial Sequence: Synthetic oligonucleotide
  Antisense strand to SEQ ID NO: 1423936
ucuaaccuaugggagucac

SEQ ID NO: 1423938 - RNA, 19 nt, Artificial Sequence
  Description of Artificial Sequence: Synthetic oligonucleotide
  Sense strand starting at position 3016 of SEQ ID NO: 1243550
cgguuuccuuucucaauuu

SEQ ID NO: 1423939 - RNA, 19 nt, Artificial Sequence
  Description of Artificial Sequence: Synthetic oligonucleotide
  Antisense strand to SEQ ID NO: 1423938
aaauugagaaaggaaaccg

SEQ ID NO: 1423940 - RNA, 19 nt, Artificial Sequence
  Description of Artificial Sequence: Synthetic oligonucleotide
  Sense strand starting at position 3064 of SEQ ID NO: 1243550
uguguuugugcguuguauc

SEQ ID NO: 1423941 - RNA, 19 nt, Artificial Sequence
  Description of Artificial Sequence: Synthetic oligonucleotide
  Antisense strand to SEQ ID NO: 1423940
gauacaacgcacaaacaca

SEQ ID NO: 1423942 - RNA, 19 nt, Artificial Sequence
  Description of Artificial Sequence: Synthetic oligonucleotide
  Sense strand starting at position 3144 of SEQ ID NO: 1243550
uggccuuauuucucgaugu

SEQ ID NO: 1423943 - RNA, 19 nt, Artificial Sequence
  Description of Artificial Sequence: Synthetic oligonucleotide
  Antisense strand to SEQ ID NO: 1423942
acaucgagaaauaaggcca

SEQ ID NO: 1423944 - RNA, 19 nt, Artificial Sequence
  Description of Artificial Sequence: Synthetic oligonucleotide
  Sense strand starting at position 3233 of SEQ ID NO: 1243550
cugacuaauggcugacgau

SEQ ID NO: 1423945 - RNA, 19 nt, Artificial Sequence
  Description of Artificial Sequence: Synthetic oligonucleotide
  Antisense strand to SEQ ID NO: 1423944
aucgucagccauuagucag

SEQ ID NO: 1423946 - RNA, 19 nt, Artificial Sequence
  Description of Artificial Sequence: Synthetic oligonucleotide
  Sense strand starting at position 3370 of SEQ ID NO: 1243550
aaagcauuaugguuugaau

SEQ ID NO: 1423947 - RNA, 19 nt, Artificial Sequence
  Description of Artificial Sequence: Synthetic oligonucleotide
  Antisense strand to SEQ ID NO: 1423946
auucaaaccauaaugcuuu

SEQ ID NO: 1423948 - RNA, 19 nt, Artificial Sequence
  Description of Artificial Sequence: Synthetic oligonucleotide
  Sense strand starting at position 3372 of SEQ ID NO: 1243550
agcauuaugguuugaauua

SEQ ID NO: 1423949 - RNA, 19 nt, Artificial Sequence
  Description of Artificial Sequence: Synthetic oligonucleotide
  Antisense strand to SEQ ID NO: 1423948
uaauucaaaccauaaugcu

SEQ ID NO: 1423950 - RNA, 19 nt, Artificial Sequence
  Description of Artificial Sequence: Synthetic oligonucleotide
  Sense strand starting at position 3402 of SEQ ID NO: 1243550
agauaacugagaugucuug

SEQ ID NO: 1423951 - RNA, 19 nt, Artificial Sequence
  Description of Artificial Sequence: Synthetic oligonucleotide
  Antisense strand to SEQ ID NO: 1423950
caagacaucucaguuaucu

SEQ ID NO: 1423952 - RNA, 19 nt, Artificial Sequence
  Description of Artificial Sequence: Synthetic oligonucleotide
  Sense strand starting at position 3428 of SEQ ID NO: 1243550
auauaaaccugugugauug

SEQ ID NO: 1423953 - RNA, 19 nt, Artificial Sequence
  Description of Artificial Sequence: Synthetic oligonucleotide
  Antisense strand to SEQ ID NO: 1423952
caaucacacagguuuauau

SEQ ID NO: 1423954 - RNA, 19 nt, Artificial Sequence
  Description of Artificial Sequence: Synthetic oligonucleotide
  Sense strand starting at position 3429 of SEQ ID NO: 1243550
uauaaaccugugugauugu

SEQ ID NO: 1423955 - RNA, 19 nt, Artificial Sequence
  Description of Artificial Sequence: Synthetic oligonucleotide
  Antisense strand to SEQ ID NO: 1423954
acaaucacacagguuuaua

SEQ ID NO: 1423956 - RNA, 19 nt, Artificial Sequence
  Description of Artificial Sequence: Synthetic oligonucleotide
  Sense strand starting at position 3432 of SEQ ID NO: 1243550
aaaccugugugauuguauu

SEQ ID NO: 1423957 - RNA, 19 nt, Artificial Sequence
  Description of Artificial Sequence: Synthetic oligonucleotide
  Antisense strand to SEQ ID NO: 1423956
aauacaaucacacagguuu

SEQ ID NO: 1423958 - RNA, 19 nt, Artificial Sequence
  Description of Artificial Sequence: Synthetic oligonucleotide
  Sense strand starting at position 3497 of SEQ ID NO: 1243550
ggaagauaauuguaaagau

SEQ ID NO: 1423959 - RNA, 19 nt, Artificial Sequence
  Description of Artificial Sequence: Synthetic oligonucleotide
  Antisense strand to SEQ ID NO: 1423958
aucuuuacaauuaucuucc

SEQ ID NO: 1423960 - RNA, 19 nt, Artificial Sequence
  Description of Artificial Sequence: Synthetic oligonucleotide
  Sense strand starting at position 3507 of SEQ ID NO: 1243550
uguaaagauuagcuacaca

SEQ ID NO: 1423961 - RNA, 19 nt, Artificial Sequence
  Description of Artificial Sequence: Synthetic oligonucleotide
  Antisense strand to SEQ ID NO: 1423960
uguguagcuaaucuuuaca

SEQ ID NO: 1423962 - RNA, 19 nt, Artificial Sequence
  Description of Artificial Sequence: Synthetic oligonucleotide
  Sense strand starting at position 3589 of SEQ ID NO: 1243550
ggagcucuucccgagagga

SEQ ID NO: 1423963 - RNA, 19 nt, Artificial Sequence
  Description of Artificial Sequence: Synthetic oligonucleotide
  Antisense strand to SEQ ID NO: 1423962
uccucucgggaagagcucc

SEQ ID NO: 1423964 - RNA, 19 nt, Artificial Sequence
  Description of Artificial Sequence: Synthetic oligonucleotide
  Sense strand starting at position 3790 of SEQ ID NO: 1243550
acaaguauguacccuuuga

SEQ ID NO: 1423965 - RNA, 19 nt, Artificial Sequence
  Description of Artificial Sequence: Synthetic oligonucleotide
  Antisense strand to SEQ ID NO: 1423964
ucaaaggguacauacuugu

SEQ ID NO: 1423966 - RNA, 19 nt, Artificial Sequence
  Description of Artificial Sequence: Synthetic oligonucleotide
  Sense strand starting at position 3794 of SEQ ID NO: 1243550
guauguacccuuugaccuu

SEQ ID NO: 1423967 - RNA, 19 nt, Artificial Sequence
  Description of Artificial Sequence: Synthetic oligonucleotide
  Antisense strand to SEQ ID NO: 1423966
aaggucaaaggguacauac

SEQ ID NO: 1423968 - RNA, 19 nt, Artificial Sequence
  Description of Artificial Sequence: Synthetic oligonucleotide
  Sense strand starting at position 3827 of SEQ ID NO: 1243550
ugaaucugaugucuacaaa

SEQ ID NO: 1423969 - RNA, 19 nt, Artificial Sequence
  Description of Artificial Sequence: Synthetic oligonucleotide
  Antisense strand to SEQ ID NO: 1423968
uuuguagacaucagauuca

SEQ ID NO: 1423970 - RNA, 19 nt, Artificial Sequence
  Description of Artificial Sequence: Synthetic oligonucleotide
  Sense strand starting at position 3849 of SEQ ID NO: 1243550
cuuguagaauucuuuguag

SEQ ID NO: 1423971 - RNA, 19 nt, Artificial Sequence
  Description of Artificial Sequence: Synthetic oligonucleotide
  Antisense strand to SEQ ID NO: 1423970
cuacaaagaauucuacaag

SEQ ID NO: 1423972 - RNA, 19 nt, Artificial Sequence
  Description of Artificial Sequence: Synthetic oligonucleotide
  Sense strand starting at position 3851 of SEQ ID NO: 1243550
uguagaauucuuuguagug

SEQ ID NO: 1423973 - RNA, 19 nt, Artificial Sequence
  Description of Artificial Sequence: Synthetic oligonucleotide
  Antisense strand to SEQ ID NO: 1423972
cacuacaaagaauucuaca

SEQ ID NO: 1423974 - RNA, 19 nt, Artificial Sequence
  Description of Artificial Sequence: Synthetic oligonucleotide
  Sense strand starting at position 3852 of SEQ ID NO: 1243550
guagaauucuuuguaguga

SEQ ID NO: 1423975 - RNA, 19 nt, Artificial Sequence
  Description of Artificial Sequence: Synthetic oligonucleotide
  Antisense strand to SEQ ID NO: 1423974
ucacuacaaagaauucuac

SEQ ID NO: 1423976 - RNA, 19 nt, Artificial Sequence
  Description of Artificial Sequence: Synthetic oligonucleotide
  Sense strand starting at position 3910 of SEQ ID NO: 1243550
aggaguaaauuggugcauu

SEQ ID NO: 1423977 - RNA, 19 nt, Artificial Sequence
  Description of Artificial Sequence: Synthetic oligonucleotide
  Antisense strand to SEQ ID NO: 1423976
aaugcaccaauuuacuccu

SEQ ID NO: 1423978 - RNA, 19 nt, Artificial Sequence
  Description of Artificial Sequence: Synthetic oligonucleotide
  Sense strand starting at position 3934 of SEQ ID NO: 1243550
ucuggaaauuacccagcua

SEQ ID NO: 1423979 - RNA, 19 nt, Artificial Sequence
  Description of Artificial Sequence: Synthetic oligonucleotide
  Antisense strand to SEQ ID NO: 1423978
uagcuggguaauuuccaga

SEQ ID NO: 1423980 - RNA, 19 nt, Artificial Sequence
  Description of Artificial Sequence: Synthetic oligonucleotide
  Sense strand starting at position 147 of SEQ ID NO: 1243551
gaggaagugcuccagcacu

SEQ ID NO: 1423981 - RNA, 19 nt, Artificial Sequence
  Description of Artificial Sequence: Synthetic oligonucleotide
  Antisense strand to SEQ ID NO: 1423980
agugcuggagcacuuccuc

SEQ ID NO: 1423982 - RNA, 19 nt, Artificial Sequence
  Description of Artificial Sequence: Synthetic oligonucleotide
  Sense strand starting at position 193 of SEQ ID NO: 1243551
guggcaucucgaaguaggu

SEQ ID NO: 1423983 - RNA, 19 nt, Artificial Sequence
  Description of Artificial Sequence: Synthetic oligonucleotide
  Antisense strand to SEQ ID NO: 1423982
accuacuucgagaugccac

SEQ ID NO: 1423984 - RNA, 19 nt, Artificial Sequence
  Description of Artificial Sequence: Synthetic oligonucleotide
  Sense strand starting at position 233 of SEQ ID NO: 1243551
gcggaacucucaguauaaa

SEQ ID NO: 1423985 - RNA, 19 nt, Artificial Sequence
  Description of Artificial Sequence: Synthetic oligonucleotide
  Antisense strand to SEQ ID NO: 1423984
uuuauacugagaguuccgc

SEQ ID NO: 1423986 - RNA, 19 nt, Artificial Sequence
  Description of Artificial Sequence: Synthetic oligonucleotide
  Sense strand starting at position 535 of SEQ ID NO: 1243551
ugcuuaggaagaugugaaa

SEQ ID NO: 1423987 - RNA, 19 nt, Artificial Sequence
  Description of Artificial Sequence: Synthetic oligonucleotide
  Antisense strand to SEQ ID NO: 1423986
uuucacaucuuccuaagca

SEQ ID NO: 1423988 - RNA, 19 nt, Artificial Sequence
  Description of Artificial Sequence: Synthetic oligonucleotide
  Sense strand starting at position 554 of SEQ ID NO: 1243551
ggaagauccugagaaugaa

SEQ ID NO: 1423989 - RNA, 19 nt, Artificial Sequence
  Description of Artificial Sequence: Synthetic oligonucleotide
  Antisense strand to SEQ ID NO: 1423988
uucauucucaggaucuucc

SEQ ID NO: 1423990 - RNA, 19 nt, Artificial Sequence
  Description of Artificial Sequence: Synthetic oligonucleotide
  Sense strand starting at position 1033 of SEQ ID NO: 1243551
aaagaaagacgguguguaa

SEQ ID NO: 1423991 - RNA, 19 nt, Artificial Sequence
  Description of Artificial Sequence: Synthetic oligonucleotide
  Antisense strand to SEQ ID NO: 1423990
uuacacaccgucuuucuuu

SEQ ID NO: 1423992 - RNA, 19 nt, Artificial Sequence
  Description of Artificial Sequence: Synthetic oligonucleotide
  Sense strand starting at position 1069 of SEQ ID NO: 1243551
uuaaaucaggcuuggagaa

SEQ ID NO: 1423993 - RNA, 19 nt, Artificial Sequence
  Description of Artificial Sequence: Synthetic oligonucleotide
  Antisense strand to SEQ ID NO: 1423992
uucuccaagccugauuuaa

SEQ ID NO: 1423994 - RNA, 19 nt, Artificial Sequence
  Description of Artificial Sequence: Synthetic oligonucleotide
  Sense strand starting at position 1119 of SEQ ID NO: 1243551
ggucaauaccgaggacauc

SEQ ID NO: 1423995 - RNA, 19 nt, Artificial Sequence
  Description of Artificial Sequence: Synthetic oligonucleotide
  Antisense strand to SEQ ID NO: 1423994
gauguccucgguauugacc

SEQ ID NO: 1423996 - RNA, 19 nt, Artificial Sequence
  Description of Artificial Sequence: Synthetic oligonucleotide
  Sense strand starting at position 1147 of SEQ ID NO: 1243551
gcagguuggucacugaauc

SEQ ID NO: 1423997 - RNA, 19 nt, Artificial Sequence
  Description of Artificial Sequence: Synthetic oligonucleotide
  Antisense strand to SEQ ID NO: 1423996
gauucagugaccaaccugc

SEQ ID NO: 1423998 - RNA, 19 nt, Artificial Sequence
  Description of Artificial Sequence: Synthetic oligonucleotide
  Sense strand starting at position 1148 of SEQ ID NO: 1243551
cagguuggucacugaaucu

SEQ ID NO: 1423999 - RNA, 19 nt, Artificial Sequence
  Description of Artificial Sequence: Synthetic oligonucleotide
  Antisense strand to SEQ ID NO: 1423998
agauucagugaccaaccug

SEQ ID NO: 1424000 - RNA, 19 nt, Artificial Sequence
  Description of Artificial Sequence: Synthetic oligonucleotide
  Sense strand starting at position 1160 of SEQ ID NO: 1243551
ugaaucuggccauacugua

SEQ ID NO: 1424001 - RNA, 19 nt, Artificial Sequence
  Description of Artificial Sequence: Synthetic oligonucleotide
  Antisense strand to SEQ ID NO: 1424000
uacaguauggccagauuca

SEQ ID NO: 1424002 - RNA, 19 nt, Artificial Sequence
  Description of Artificial Sequence: Synthetic oligonucleotide
  Sense strand starting at position 1384 of SEQ ID NO: 1243551
ggaacaccuuuaccguaaa

SEQ ID NO: 1424003 - RNA, 19 nt, Artificial Sequence
  Description of Artificial Sequence: Synthetic oligonucleotide
  Antisense strand to SEQ ID NO: 1424002
uuuacgguaaagguguucc

SEQ ID NO: 1424004 - RNA, 19 nt, Artificial Sequence
  Description of Artificial Sequence: Synthetic oligonucleotide
  Sense strand starting at position 1387 of SEQ ID NO: 1243551
acaccuuuaccguaaagcu

SEQ ID NO: 1424005 - RNA, 19 nt, Artificial Sequence
  Description of Artificial Sequence: Synthetic oligonucleotide
  Antisense strand to SEQ ID NO: 1424004
agcuuuacgguaaaggugu

SEQ ID NO: 1424006 - RNA, 19 nt, Artificial Sequence
  Description of Artificial Sequence: Synthetic oligonucleotide
  Sense strand starting at position 1994 of SEQ ID NO: 1243551
ugggaaauguaguucgaau

SEQ ID NO: 1424007 - RNA, 19 nt, Artificial Sequence
  Description of Artificial Sequence: Synthetic oligonucleotide
  Antisense strand to SEQ ID NO: 1424006
auucgaacuacauuuccca

SEQ ID NO: 1424008 - RNA, 19 nt, Artificial Sequence
  Description of Artificial Sequence: Synthetic oligonucleotide
  Sense strand starting at position 2002 of SEQ ID NO: 1243551
guaguucgaaugcaaacaa

SEQ ID NO: 1424009 - RNA, 19 nt, Artificial Sequence
  Description of Artificial Sequence: Synthetic oligonucleotide
  Antisense strand to SEQ ID NO: 1424008
uuguuugcauucgaacuac

SEQ ID NO: 1424010 - RNA, 19 nt, Artificial Sequence
  Description of Artificial Sequence: Synthetic oligonucleotide
  Sense strand starting at position 2619 of SEQ ID NO: 1243551
uggugacucccauagguua

SEQ ID NO: 1424011 - RNA, 19 nt, Artificial Sequence
  Description of Artificial Sequence: Synthetic oligonucleotide
  Antisense strand to SEQ ID NO: 1424010
uaaccuaugggagucacca

SEQ ID NO: 1424012 - RNA, 19 nt, Artificial Sequence
  Description of Artificial Sequence: Synthetic oligonucleotide
  Sense strand starting at position 2621 of SEQ ID NO: 1243551
gugacucccauagguuaga

SEQ ID NO: 1424013 - RNA, 19 nt, Artificial Sequence
  Description of Artificial Sequence: Synthetic oligonucleotide
  Antisense strand to SEQ ID NO: 1424012
ucuaaccuaugggagucac

SEQ ID NO: 1424014 - RNA, 19 nt, Artificial Sequence
  Description of Artificial Sequence: Synthetic oligonucleotide
  Sense strand starting at position 2746 of SEQ ID NO: 1243551
cgguuuccuuucucaauuu

SEQ ID NO: 1424015 - RNA, 19 nt, Artificial Sequence
  Description of Artificial Sequence: Synthetic oligonucleotide
  Antisense strand to SEQ ID NO: 1424014
aaauugagaaaggaaaccg

SEQ ID NO: 1424016 - RNA, 19 nt, Artificial Sequence
  Description of Artificial Sequence: Synthetic oligonucleotide
  Sense strand starting at position 2794 of SEQ ID NO: 1243551
uguguuugugcguuguauc

SEQ ID NO: 1424017 - RNA, 19 nt, Artificial Sequence
  Description of Artificial Sequence: Synthetic oligonucleotide
  Antisense strand to SEQ ID NO: 1424016
gauacaacgcacaaacaca

SEQ ID NO: 1424018 - RNA, 19 nt, Artificial Sequence
  Description of Artificial Sequence: Synthetic oligonucleotide
  Sense strand starting at position 2874 of SEQ ID NO: 1243551
uggccuuauuucucgaugu

SEQ ID NO: 1424019 - RNA, 19 nt, Artificial Sequence
  Description of Artificial Sequence: Synthetic oligonucleotide
  Antisense strand to SEQ ID NO: 1424018
acaucgagaaauaaggcca

SEQ ID NO: 1424020 - RNA, 19 nt, Artificial Sequence
  Description of Artificial Sequence: Synthetic oligonucleotide
  Sense strand starting at position 2963 of SEQ ID NO: 1243551
cugacuaauggcugacgau

SEQ ID NO: 1424021 - RNA, 19 nt, Artificial Sequence
  Description of Artificial Sequence: Synthetic oligonucleotide
  Antisense strand to SEQ ID NO: 1424020
aucgucagccauuagucag

SEQ ID NO: 1424022 - RNA, 19 nt, Artificial Sequence
  Description of Artificial Sequence: Synthetic oligonucleotide
  Sense strand starting at position 3100 of SEQ ID NO: 1243551
aaagcauuaugguuugaau

SEQ ID NO: 1424023 - RNA, 19 nt, Artificial Sequence
  Description of Artificial Sequence: Synthetic oligonucleotide
  Antisense strand to SEQ ID NO: 1424022
auucaaaccauaaugcuuu

SEQ ID NO: 1424024 - RNA, 19 nt, Artificial Sequence
  Description of Artificial Sequence: Synthetic oligonucleotide
  Sense strand starting at position 3102 of SEQ ID NO: 1243551
agcauuaugguuugaauua

SEQ ID NO: 1424025 - RNA, 19 nt, Artificial Sequence
  Description of Artificial Sequence: Synthetic oligonucleotide
  Antisense strand to SEQ ID NO: 1424024
uaauucaaaccauaaugcu

SEQ ID NO: 1424026 - RNA, 19 nt, Artificial Sequence
  Description of Artificial Sequence: Synthetic oligonucleotide
  Sense strand starting at position 3132 of SEQ ID NO: 1243551
agauaacugagaugucuug

SEQ ID NO: 1424027 - RNA, 19 nt, Artificial Sequence
  Description of Artificial Sequence: Synthetic oligonucleotide
  Antisense strand to SEQ ID NO: 1424026
caagacaucucaguuaucu

SEQ ID NO: 1424028 - RNA, 19 nt, Artificial Sequence
  Description of Artificial Sequence: Synthetic oligonucleotide
  Sense strand starting at position 3158 of SEQ ID NO: 1243551
auauaaaccugugugauug

SEQ ID NO: 1424029 - RNA, 19 nt, Artificial Sequence
  Description of Artificial Sequence: Synthetic oligonucleotide
  Antisense strand to SEQ ID NO: 1424028
caaucacacagguuuauau

SEQ ID NO: 1424030 - RNA, 19 nt, Artificial Sequence
  Description of Artificial Sequence: Synthetic oligonucleotide
  Sense strand starting at position 3159 of SEQ ID NO: 1243551
uauaaaccugugugauugu

SEQ ID NO: 1424031 - RNA, 19 nt, Artificial Sequence
  Description of Artificial Sequence: Synthetic oligonucleotide
  Antisense strand to SEQ ID NO: 1424030
acaaucacacagguuuaua

SEQ ID NO: 1424032 - RNA, 19 nt, Artificial Sequence
  Description of Artificial Sequence: Synthetic oligonucleotide
  Sense strand starting at position 3162 of SEQ ID NO: 1243551
aaaccugugugauuguauu

SEQ ID NO: 1424033 - RNA, 19 nt, Artificial Sequence
  Description of Artificial Sequence: Synthetic oligonucleotide
  Antisense strand to SEQ ID NO: 1424032
aauacaaucacacagguuu

SEQ ID NO: 1424034 - RNA, 19 nt, Artificial Sequence
  Description of Artificial Sequence: Synthetic oligonucleotide
  Sense strand starting at position 3227 of SEQ ID NO: 1243551
ggaagauaauuguaaagau

SEQ ID NO: 1424035 - RNA, 19 nt, Artificial Sequence
  Description of Artificial Sequence: Synthetic oligonucleotide
  Antisense strand to SEQ ID NO: 1424034
aucuuuacaauuaucuucc

SEQ ID NO: 1424036 - RNA, 19 nt, Artificial Sequence
  Description of Artificial Sequence: Synthetic oligonucleotide
  Sense strand starting at position 3237 of SEQ ID NO: 1243551
uguaaagauuagcuacaca

SEQ ID NO: 1424037 - RNA, 19 nt, Artificial Sequence
  Description of Artificial Sequence: Synthetic oligonucleotide
  Antisense strand to SEQ ID NO: 1424036
uguguagcuaaucuuuaca

SEQ ID NO: 1424038 - RNA, 19 nt, Artificial Sequence
  Description of Artificial Sequence: Synthetic oligonucleotide
  Sense strand starting at position 3319 of SEQ ID NO: 1243551
ggagcucuucccgagagga

SEQ ID NO: 1424039 - RNA, 19 nt, Artificial Sequence
  Description of Artificial Sequence: Synthetic oligonucleotide
  Antisense strand to SEQ ID NO: 1424038
uccucucgggaagagcucc

SEQ ID NO: 1424040 - RNA, 19 nt, Artificial Sequence
  Description of Artificial Sequence: Synthetic oligonucleotide
  Sense strand starting at position 3520 of SEQ ID NO: 1243551
acaaguauguacccuuuga

SEQ ID NO: 1424041 - RNA, 19 nt, Artificial Sequence
  Description of Artificial Sequence: Synthetic oligonucleotide
  Antisense strand to SEQ ID NO: 1424040
ucaaaggguacauacuugu

SEQ ID NO: 1424042 - RNA, 19 nt, Artificial Sequence
  Description of Artificial Sequence: Synthetic oligonucleotide
  Sense strand starting at position 3557 of SEQ ID NO: 1243551
ugaaucugaugucuacaaa

SEQ ID NO: 1424043 - RNA, 19 nt, Artificial Sequence
  Description of Artificial Sequence: Synthetic oligonucleotide
  Antisense strand to SEQ ID NO: 1424042
uuuguagacaucagauuca

SEQ ID NO: 1424044 - RNA, 19 nt, Artificial Sequence
  Description of Artificial Sequence: Synthetic oligonucleotide
  Sense strand starting at position 3579 of SEQ ID NO: 1243551
cuuguagaauucuuuguag

SEQ ID NO: 1424045 - RNA, 19 nt, Artificial Sequence
  Description of Artificial Sequence: Synthetic oligonucleotide
  Antisense strand to SEQ ID NO: 1424044
cuacaaagaauucuacaag

SEQ ID NO: 1424046 - RNA, 19 nt, Artificial Sequence
  Description of Artificial Sequence: Synthetic oligonucleotide
  Sense strand starting at position 3581 of SEQ ID NO: 1243551
uguagaauucuuuguagug

SEQ ID NO: 1424047 - RNA, 19 nt, Artificial Sequence
  Description of Artificial Sequence: Synthetic oligonucleotide
  Antisense strand to SEQ ID NO: 1424046
cacuacaaagaauucuaca

SEQ ID NO: 1424048 - RNA, 19 nt, Artificial Sequence
  Description of Artificial Sequence: Synthetic oligonucleotide
  Sense strand starting at position 3582 of SEQ ID NO: 1243551
guagaauucuuuguaguga

SEQ ID NO: 1424049 - RNA, 19 nt, Artificial Sequence
  Description of Artificial Sequence: Synthetic oligonucleotide
  Antisense strand to SEQ ID NO: 1424048
ucacuacaaagaauucuac

SEQ ID NO: 1424050 - RNA, 19 nt, Artificial Sequence
  Description of Artificial Sequence: Synthetic oligonucleotide
  Sense strand starting at position 3640 of SEQ ID NO: 1243551
aggaguaaauuggugcauu

SEQ ID NO: 1424051 - RNA, 19 nt, Artificial Sequence
  Description of Artificial Sequence: Synthetic oligonucleotide
  Antisense strand to SEQ ID NO: 1424050
aaugcaccaauuuacuccu

SEQ ID NO: 1424052 - RNA, 19 nt, Artificial Sequence
  Description of Artificial Sequence: Synthetic oligonucleotide
  Sense strand starting at position 3664 of SEQ ID NO: 1243551
ucuggaaauuacccagcua

SEQ ID NO: 1424053 - RNA, 19 nt, Artificial Sequence
  Description of Artificial Sequence: Synthetic oligonucleotide
  Antisense strand to SEQ ID NO: 1424052
uagcuggguaauuuccaga

SEQ ID NO: 1424054 - RNA, 19 nt, Artificial Sequence
  Description of Artificial Sequence: Synthetic oligonucleotide
  Sense strand starting at position 3809 of SEQ ID NO: 1243551
uauguuuguguugagggau

SEQ ID NO: 1424055 - RNA, 19 nt, Artificial Sequence
  Description of Artificial Sequence: Synthetic oligonucleotide
  Antisense strand to SEQ ID NO: 1424054
aucccucaacacaaacaua

SEQ ID NO: 1424056 - RNA, 19 nt, Artificial Sequence
  Description of Artificial Sequence: Synthetic oligonucleotide
  Sense strand starting at position 3812 of SEQ ID NO: 1243551
guuuguguugagggauaca

SEQ ID NO: 1424057 - RNA, 19 nt, Artificial Sequence
  Description of Artificial Sequence: Synthetic oligonucleotide
  Antisense strand to SEQ ID NO: 1424056
uguaucccucaacacaaac

SEQ ID NO: 1424058 - RNA, 19 nt, Artificial Sequence
  Description of Artificial Sequence: Synthetic oligonucleotide
  Sense strand starting at position 3918 of SEQ ID NO: 1243551
ggcugaucacuggagguua

SEQ ID NO: 1424059 - RNA, 19 nt, Artificial Sequence
  Description of Artificial Sequence: Synthetic oligonucleotide
  Antisense strand to SEQ ID NO: 1424058
uaaccuccagugaucagcc

SEQ ID NO: 1424060 - RNA, 19 nt, Artificial Sequence
  Description of Artificial Sequence: Synthetic oligonucleotide
  Sense strand starting at position 79 of SEQ ID NO: 1243552
gucuguguuugggucuuga

SEQ ID NO: 1424061 - RNA, 19 nt, Artificial Sequence
  Description of Artificial Sequence: Synthetic oligonucleotide
  Antisense strand to SEQ ID NO: 1424060
ucaagacccaaacacagac

SEQ ID NO: 1424062 - RNA, 19 nt, Artificial Sequence
  Description of Artificial Sequence: Synthetic oligonucleotide
  Sense strand starting at position 201 of SEQ ID NO: 1243552
acagaauggucaugagguu

SEQ ID NO: 1424063 - RNA, 19 nt, Artificial Sequence
  Description of Artificial Sequence: Synthetic oligonucleotide
  Antisense strand to SEQ ID NO: 1424062
aaccucaugaccauucugu

SEQ ID NO: 1424064 - RNA, 19 nt, Artificial Sequence
  Description of Artificial Sequence: Synthetic oligonucleotide
  Sense strand starting at position 222 of SEQ ID NO: 1243552
cgcagauaaugauggagaa

SEQ ID NO: 1424065 - RNA, 19 nt, Artificial Sequence
  Description of Artificial Sequence: Synthetic oligonucleotide
  Antisense strand to SEQ ID NO: 1424064
uucuccaucauuaucugcg

SEQ ID NO: 1424066 - RNA, 19 nt, Artificial Sequence
  Description of Artificial Sequence: Synthetic oligonucleotide
  Sense strand starting at position 253 of SEQ ID NO: 1243552
ucaggaaaguccuggauaa

SEQ ID NO: 1424067 - RNA, 19 nt, Artificial Sequence
  Description of Artificial Sequence: Synthetic oligonucleotide
  Antisense strand to SEQ ID NO: 1424066
uuauccaggacuuuccuga

SEQ ID NO: 1424068 - RNA, 19 nt, Artificial Sequence
  Description of Artificial Sequence: Synthetic oligonucleotide
  Sense strand starting at position 277 of SEQ ID NO: 1243552
ggguggcgcuggucauuaa

SEQ ID NO: 1424069 - RNA, 19 nt, Artificial Sequence
  Description of Artificial Sequence: Synthetic oligonucleotide
  Antisense strand to SEQ ID NO: 1424068
uuaaugaccagcgccaccc

SEQ ID NO: 1424070 - RNA, 19 nt, Artificial Sequence
  Description of Artificial Sequence: Synthetic oligonucleotide
  Sense strand starting at position 278 of SEQ ID NO: 1243552
gguggcgcuggucauuaau

SEQ ID NO: 1424071 - RNA, 19 nt, Artificial Sequence
  Description of Artificial Sequence: Synthetic oligonucleotide
  Antisense strand to SEQ ID NO: 1424070
auuaaugaccagcgccacc

SEQ ID NO: 1424072 - RNA, 19 nt, Artificial Sequence
  Description of Artificial Sequence: Synthetic oligonucleotide
  Sense strand starting at position 461 of SEQ ID NO: 1243552
uggcgucucaugccuauua

SEQ ID NO: 1424073 - RNA, 19 nt, Artificial Sequence
  Description of Artificial Sequence: Synthetic oligonucleotide
  Antisense strand to SEQ ID NO: 1424072
uaauaggcaugagacgcca

SEQ ID NO: 1424074 - RNA, 19 nt, Artificial Sequence
  Description of Artificial Sequence: Synthetic oligonucleotide
  Sense strand starting at position 462 of SEQ ID NO: 1243552
ggcgucucaugccuauuau

SEQ ID NO: 1424075 - RNA, 19 nt, Artificial Sequence
  Description of Artificial Sequence: Synthetic oligonucleotide
  Antisense strand to SEQ ID NO: 1424074
auaauaggcaugagacgcc

SEQ ID NO: 1424076 - RNA, 19 nt, Artificial Sequence
  Description of Artificial Sequence: Synthetic oligonucleotide
  Sense strand starting at position 463 of SEQ ID NO: 1243552
gcgucucaugccuauuauc

SEQ ID NO: 1424077 - RNA, 19 nt, Artificial Sequence
  Description of Artificial Sequence: Synthetic oligonucleotide
  Antisense strand to SEQ ID NO: 1424076
gauaauaggcaugagacgc

SEQ ID NO: 1424078 - RNA, 19 nt, Artificial Sequence
  Description of Artificial Sequence: Synthetic oligonucleotide
  Sense strand starting at position 471 of SEQ ID NO: 1243552
ugccuauuauccuuagagc

SEQ ID NO: 1424079 - RNA, 19 nt, Artificial Sequence
  Description of Artificial Sequence: Synthetic oligonucleotide
  Antisense strand to SEQ ID NO: 1424078
gcucuaaggauaauaggca

SEQ ID NO: 1424080 - RNA, 19 nt, Artificial Sequence
  Description of Artificial Sequence: Synthetic oligonucleotide
  Sense strand starting at position 502 of SEQ ID NO: 1243552
cugcgagacagguggaaau

SEQ ID NO: 1424081 - RNA, 19 nt, Artificial Sequence
  Description of Artificial Sequence: Synthetic oligonucleotide
  Antisense strand to SEQ ID NO: 1424080
auuuccaccugucucgcag

SEQ ID NO: 1424082 - RNA, 19 nt, Artificial Sequence
  Description of Artificial Sequence: Synthetic oligonucleotide
  Sense strand starting at position 522 of SEQ ID NO: 1243552
gcaggcauguggucugcau

SEQ ID NO: 1424083 - RNA, 19 nt, Artificial Sequence
  Description of Artificial Sequence: Synthetic oligonucleotide
  Antisense strand to SEQ ID NO: 1424082
augcagaccacaugccugc

SEQ ID NO: 1424084 - RNA, 19 nt, Artificial Sequence
  Description of Artificial Sequence: Synthetic oligonucleotide
  Sense strand starting at position 869 of SEQ ID NO: 1243552
ggccacuggcuagagaauu

SEQ ID NO: 1424085 - RNA, 19 nt, Artificial Sequence
  Description of Artificial Sequence: Synthetic oligonucleotide
  Antisense strand to SEQ ID NO: 1424084
aauucucuagccaguggcc

SEQ ID NO: 1424086 - RNA, 19 nt, Artificial Sequence
  Description of Artificial Sequence: Synthetic oligonucleotide
  Sense strand starting at position 903 of SEQ ID NO: 1243552
acuguuaugcuguaaauuc

SEQ ID NO: 1424087 - RNA, 19 nt, Artificial Sequence
  Description of Artificial Sequence: Synthetic oligonucleotide
  Antisense strand to SEQ ID NO: 1424086
gaauuuacagcauaacagu

SEQ ID NO: 1424088 - RNA, 19 nt, Artificial Sequence
  Description of Artificial Sequence: Synthetic oligonucleotide
  Sense strand starting at position 999 of SEQ ID NO: 1243552
cagacucugugccuugaaa

SEQ ID NO: 1424089 - RNA, 19 nt, Artificial Sequence
  Description of Artificial Sequence: Synthetic oligonucleotide
  Antisense strand to SEQ ID NO: 1424088
uuucaaggcacagagucug

SEQ ID NO: 1424090 - RNA, 19 nt, Artificial Sequence
  Description of Artificial Sequence: Synthetic oligonucleotide
  Sense strand starting at position 1341 of SEQ ID NO: 1243552
ucccacucucugugauguu

SEQ ID NO: 1424091 - RNA, 19 nt, Artificial Sequence
  Description of Artificial Sequence: Synthetic oligonucleotide
  Antisense strand to SEQ ID NO: 1424090
aacaucacagagaguggga

SEQ ID NO: 1424092 - RNA, 19 nt, Artificial Sequence
  Description of Artificial Sequence: Synthetic oligonucleotide
  Sense strand starting at position 1401 of SEQ ID NO: 1243552
cccuuuauugcugaagcaa

SEQ ID NO: 1424093 - RNA, 19 nt, Artificial Sequence
  Description of Artificial Sequence: Synthetic oligonucleotide
  Antisense strand to SEQ ID NO: 1424092
uugcuucagcaauaaaggg

SEQ ID NO: 1424094 - RNA, 19 nt, Artificial Sequence
  Description of Artificial Sequence: Synthetic oligonucleotide
  Sense strand starting at position 1481 of SEQ ID NO: 1243552
uccugucaucaggagcaga

SEQ ID NO: 1424095 - RNA, 19 nt, Artificial Sequence
  Description of Artificial Sequence: Synthetic oligonucleotide
  Antisense strand to SEQ ID NO: 1424094
ucugcuccugaugacagga

SEQ ID NO: 1424096 - RNA, 19 nt, Artificial Sequence
  Description of Artificial Sequence: Synthetic oligonucleotide
  Sense strand starting at position 1495 of SEQ ID NO: 1243552
gcagaaaguucugcagaga

SEQ ID NO: 1424097 - RNA, 19 nt, Artificial Sequence
  Description of Artificial Sequence: Synthetic oligonucleotide
  Antisense strand to SEQ ID NO: 1424096
ucucugcagaacuuucugc

SEQ ID NO: 1424098 - RNA, 19 nt, Artificial Sequence
  Description of Artificial Sequence: Synthetic oligonucleotide
  Sense strand starting at position 1545 of SEQ ID NO: 1243552
ccgucaaggccaggguaau

SEQ ID NO: 1424099 - RNA, 19 nt, Artificial Sequence
  Description of Artificial Sequence: Synthetic oligonucleotide
  Antisense strand to SEQ ID NO: 1424098
auuacccuggccuugacgg

SEQ ID NO: 1424100 - RNA, 19 nt, Artificial Sequence
  Description of Artificial Sequence: Synthetic oligonucleotide
  Sense strand starting at position 2140 of SEQ ID NO: 1243552
gcucaugaggauggcuuua

SEQ ID NO: 1424101 - RNA, 19 nt, Artificial Sequence
  Description of Artificial Sequence: Synthetic oligonucleotide
  Antisense strand to SEQ ID NO: 1424100
uaaagccauccucaugagc

SEQ ID NO: 1424102 - RNA, 19 nt, Artificial Sequence
  Description of Artificial Sequence: Synthetic oligonucleotide
  Sense strand starting at position 2228 of SEQ ID NO: 1243552
gaaagauuguguuauuuga

SEQ ID NO: 1424103 - RNA, 19 nt, Artificial Sequence
  Description of Artificial Sequence: Synthetic oligonucleotide
  Antisense strand to SEQ ID NO: 1424102
ucaaauaacacaaucuuuc

SEQ ID NO: 1424104 - RNA, 19 nt, Artificial Sequence
  Description of Artificial Sequence: Synthetic oligonucleotide
  Sense strand starting at position 2268 of SEQ ID NO: 1243552
guuguccucacagguagaa

SEQ ID NO: 1424105 - RNA, 19 nt, Artificial Sequence
  Description of Artificial Sequence: Synthetic oligonucleotide
  Antisense strand to SEQ ID NO: 1424104
uucuaccugugaggacaac

SEQ ID NO: 1424106 - RNA, 19 nt, Artificial Sequence
  Description of Artificial Sequence: Synthetic oligonucleotide
  Sense strand starting at position 2347 of SEQ ID NO: 1243552
gaagguuauugucuccuga

SEQ ID NO: 1424107 - RNA, 19 nt, Artificial Sequence
  Description of Artificial Sequence: Synthetic oligonucleotide
  Antisense strand to SEQ ID NO: 1424106
ucaggagacaauaaccuuc

SEQ ID NO: 1424108 - RNA, 19 nt, Artificial Sequence
  Description of Artificial Sequence: Synthetic oligonucleotide
  Sense strand starting at position 2434 of SEQ ID NO: 1243552
cucucucccuaagagugaa

SEQ ID NO: 1424109 - RNA, 19 nt, Artificial Sequence
  Description of Artificial Sequence: Synthetic oligonucleotide
  Antisense strand to SEQ ID NO: 1424108
uucacucuuagggagagag

SEQ ID NO: 1424110 - RNA, 19 nt, Artificial Sequence
  Description of Artificial Sequence: Synthetic oligonucleotide
  Sense strand starting at position 2500 of SEQ ID NO: 1243552
uugggaagaaguugguuaa

SEQ ID NO: 1424111 - RNA, 19 nt, Artificial Sequence
  Description of Artificial Sequence: Synthetic oligonucleotide
  Antisense strand to SEQ ID NO: 1424110
uuaaccaacuucuucccaa

SEQ ID NO: 1424112 - RNA, 19 nt, Artificial Sequence
  Description of Artificial Sequence: Synthetic oligonucleotide
  Sense strand starting at position 2507 of SEQ ID NO: 1243552
gaaguugguuaauccgauu

SEQ ID NO: 1424113 - RNA, 19 nt, Artificial Sequence
  Description of Artificial Sequence: Synthetic oligonucleotide
  Antisense strand to SEQ ID NO: 1424112
aaucggauuaaccaacuuc

SEQ ID NO: 1424114 - RNA, 19 nt, Artificial Sequence
  Description of Artificial Sequence: Synthetic oligonucleotide
  Sense strand starting at position 2554 of SEQ ID NO: 1243552
gagggugugauccagcuau

SEQ ID NO: 1424115 - RNA, 19 nt, Artificial Sequence
  Description of Artificial Sequence: Synthetic oligonucleotide
  Antisense strand to SEQ ID NO: 1424114
auagcuggaucacacccuc

SEQ ID NO: 1424116 - RNA, 19 nt, Artificial Sequence
  Description of Artificial Sequence: Synthetic oligonucleotide
  Sense strand starting at position 2579 of SEQ ID NO: 1243552
gguucuaaguucucaaaca

SEQ ID NO: 1424117 - RNA, 19 nt, Artificial Sequence
  Description of Artificial Sequence: Synthetic oligonucleotide
  Antisense strand to SEQ ID NO: 1424116
uguuugagaacuuagaacc

SEQ ID NO: 1424118 - RNA, 19 nt, Artificial Sequence
  Description of Artificial Sequence: Synthetic oligonucleotide
  Sense strand starting at position 2580 of SEQ ID NO: 1243552
guucuaaguucucaaacac

SEQ ID NO: 1424119 - RNA, 19 nt, Artificial Sequence
  Description of Artificial Sequence: Synthetic oligonucleotide
  Antisense strand to SEQ ID NO: 1424118
guguuugagaacuuagaac

SEQ ID NO: 1424120 - RNA, 19 nt, Artificial Sequence
  Description of Artificial Sequence: Synthetic oligonucleotide
  Sense strand starting at position 2637 of SEQ ID NO: 1243552
cccuuuagacccugagaag

SEQ ID NO: 1424121 - RNA, 19 nt, Artificial Sequence
  Description of Artificial Sequence: Synthetic oligonucleotide
  Antisense strand to SEQ ID NO: 1424120
cuucucagggucuaaaggg

SEQ ID NO: 1424122 - RNA, 19 nt, Artificial Sequence
  Description of Artificial Sequence: Synthetic oligonucleotide
  Sense strand starting at position 2640 of SEQ ID NO: 1243552
uuuagacccugagaaguaa

SEQ ID NO: 1424123 - RNA, 19 nt, Artificial Sequence
  Description of Artificial Sequence: Synthetic oligonucleotide
  Antisense strand to SEQ ID NO: 1424122
uuacuucucagggucuaaa

SEQ ID NO: 1424124 - RNA, 19 nt, Artificial Sequence
  Description of Artificial Sequence: Synthetic oligonucleotide
  Sense strand starting at position 2677 of SEQ ID NO: 1243552
cagagacugugcuuuacuu

SEQ ID NO: 1424125 - RNA, 19 nt, Artificial Sequence
  Description of Artificial Sequence: Synthetic oligonucleotide
  Antisense strand to SEQ ID NO: 1424124
aaguaaagcacagucucug

SEQ ID NO: 1424126 - RNA, 19 nt, Artificial Sequence
  Description of Artificial Sequence: Synthetic oligonucleotide
  Sense strand starting at position 2782 of SEQ ID NO: 1243552
ccaggaaguuucccuagga

SEQ ID NO: 1424127 - RNA, 19 nt, Artificial Sequence
  Description of Artificial Sequence: Synthetic oligonucleotide
  Antisense strand to SEQ ID NO: 1424126
uccuagggaaacuuccugg

SEQ ID NO: 1424128 - RNA, 19 nt, Artificial Sequence
  Description of Artificial Sequence: Synthetic oligonucleotide
  Sense strand starting at position 2783 of SEQ ID NO: 1243552
caggaaguuucccuaggaa

SEQ ID NO: 1424129 - RNA, 19 nt, Artificial Sequence
  Description of Artificial Sequence: Synthetic oligonucleotide
  Antisense strand to SEQ ID NO: 1424128
uuccuagggaaacuuccug

SEQ ID NO: 1424130 - RNA, 19 nt, Artificial Sequence
  Description of Artificial Sequence: Synthetic oligonucleotide
  Sense strand starting at position 2786 of SEQ ID NO: 1243552
gaaguuucccuaggaaacg

SEQ ID NO: 1424131 - RNA, 19 nt, Artificial Sequence
  Description of Artificial Sequence: Synthetic oligonucleotide
  Antisense strand to SEQ ID NO: 1424130
cguuuccuagggaaacuuc

SEQ ID NO: 1424132 - RNA, 19 nt, Artificial Sequence
  Description of Artificial Sequence: Synthetic oligonucleotide
  Sense strand starting at position 2787 of SEQ ID NO: 1243552
aaguuucccuaggaaacgu

SEQ ID NO: 1424133 - RNA, 19 nt, Artificial Sequence
  Description of Artificial Sequence: Synthetic oligonucleotide
  Antisense strand to SEQ ID NO: 1424132
acguuuccuagggaaacuu

SEQ ID NO: 1424134 - RNA, 19 nt, Artificial Sequence
  Description of Artificial Sequence: Synthetic oligonucleotide
  Sense strand starting at position 2816 of SEQ ID NO: 1243552
cugucuuuggcucaccaga

SEQ ID NO: 1424135 - RNA, 19 nt, Artificial Sequence
  Description of Artificial Sequence: Synthetic oligonucleotide
  Antisense strand to SEQ ID NO: 1424134
ucuggugagccaaagacag

SEQ ID NO: 1424136 - RNA, 19 nt, Artificial Sequence
  Description of Artificial Sequence: Synthetic oligonucleotide
  Sense strand starting at position 2818 of SEQ ID NO: 1243552
gucuuuggcucaccagaau

SEQ ID NO: 1424137 - RNA, 19 nt, Artificial Sequence
  Description of Artificial Sequence: Synthetic oligonucleotide
  Antisense strand to SEQ ID NO: 1424136
auucuggugagccaaagac

SEQ ID NO: 1424138 - RNA, 19 nt, Artificial Sequence
  Description of Artificial Sequence: Synthetic oligonucleotide
  Sense strand starting at position 3209 of SEQ ID NO: 1243552
ccaucaugcccagaggguu

SEQ ID NO: 1424139 - RNA, 19 nt, Artificial Sequence
  Description of Artificial Sequence: Synthetic oligonucleotide
  Antisense strand to SEQ ID NO: 1424138
aacccucugggcaugaugg

SEQ ID NO: 1424140 - RNA, 19 nt, Artificial Sequence
  Description of Artificial Sequence: Synthetic oligonucleotide
  Sense strand starting at position 96 of SEQ ID NO: 1243553
gucuguguuugggucuuga

SEQ ID NO: 1424141 - RNA, 19 nt, Artificial Sequence
  Description of Artificial Sequence: Synthetic oligonucleotide
  Antisense strand to SEQ ID NO: 1424140
ucaagacccaaacacagac

SEQ ID NO: 1424142 - RNA, 19 nt, Artificial Sequence
  Description of Artificial Sequence: Synthetic oligonucleotide
  Sense strand starting at position 218 of SEQ ID NO: 1243553
acagaauggucaugagguu

SEQ ID NO: 1424143 - RNA, 19 nt, Artificial Sequence
  Description of Artificial Sequence: Synthetic oligonucleotide
  Antisense strand to SEQ ID NO: 1424142
aaccucaugaccauucugu

SEQ ID NO: 1424144 - RNA, 19 nt, Artificial Sequence
  Description of Artificial Sequence: Synthetic oligonucleotide
  Sense strand starting at position 239 of SEQ ID NO: 1243553
cgcagauaaugauggagaa

SEQ ID NO: 1424145 - RNA, 19 nt, Artificial Sequence
  Description of Artificial Sequence: Synthetic oligonucleotide
  Antisense strand to SEQ ID NO: 1424144
uucuccaucauuaucugcg

SEQ ID NO: 1424146 - RNA, 19 nt, Artificial Sequence
  Description of Artificial Sequence: Synthetic oligonucleotide
  Sense strand starting at position 270 of SEQ ID NO: 1243553
ucaggaaaguccuggauaa

SEQ ID NO: 1424147 - RNA, 19 nt, Artificial Sequence
  Description of Artificial Sequence: Synthetic oligonucleotide
  Antisense strand to SEQ ID NO: 1424146
uuauccaggacuuuccuga

SEQ ID NO: 1424148 - RNA, 19 nt, Artificial Sequence
  Description of Artificial Sequence: Synthetic oligonucleotide
  Sense strand starting at position 294 of SEQ ID NO: 1243553
ggguggcgcuggucauuaa

SEQ ID NO: 1424149 - RNA, 19 nt, Artificial Sequence
  Description of Artificial Sequence: Synthetic oligonucleotide
  Antisense strand to SEQ ID NO: 1424148
uuaaugaccagcgccaccc

SEQ ID NO: 1424150 - RNA, 19 nt, Artificial Sequence
  Description of Artificial Sequence: Synthetic oligonucleotide
  Sense strand starting at position 295 of SEQ ID NO: 1243553
gguggcgcuggucauuaau

SEQ ID NO: 1424151 - RNA, 19 nt, Artificial Sequence
  Description of Artificial Sequence: Synthetic oligonucleotide
  Antisense strand to SEQ ID NO: 1424150
auuaaugaccagcgccacc

SEQ ID NO: 1424152 - RNA, 19 nt, Artificial Sequence
  Description of Artificial Sequence: Synthetic oligonucleotide
  Sense strand starting at position 478 of SEQ ID NO: 1243553
uggcgucucaugccuauua

SEQ ID NO: 1424153 - RNA, 19 nt, Artificial Sequence
  Description of Artificial Sequence: Synthetic oligonucleotide
  Antisense strand to SEQ ID NO: 1424152
uaauaggcaugagacgcca

SEQ ID NO: 1424154 - RNA, 19 nt, Artificial Sequence
  Description of Artificial Sequence: Synthetic oligonucleotide
  Sense strand starting at position 479 of SEQ ID NO: 1243553
ggcgucucaugccuauuau

SEQ ID NO: 1424155 - RNA, 19 nt, Artificial Sequence
  Description of Artificial Sequence: Synthetic oligonucleotide
  Antisense strand to SEQ ID NO: 1424154
auaauaggcaugagacgcc

SEQ ID NO: 1424156 - RNA, 19 nt, Artificial Sequence
  Description of Artificial Sequence: Synthetic oligonucleotide
  Sense strand starting at position 480 of SEQ ID NO: 1243553
gcgucucaugccuauuauc

SEQ ID NO: 1424157 - RNA, 19 nt, Artificial Sequence
  Description of Artificial Sequence: Synthetic oligonucleotide
  Antisense strand to SEQ ID NO: 1424156
gauaauaggcaugagacgc

SEQ ID NO: 1424158 - RNA, 19 nt, Artificial Sequence
  Description of Artificial Sequence: Synthetic oligonucleotide
  Sense strand starting at position 488 of SEQ ID NO: 1243553
ugccuauuauccuuagagc

SEQ ID NO: 1424159 - RNA, 19 nt, Artificial Sequence
  Description of Artificial Sequence: Synthetic oligonucleotide
  Antisense strand to SEQ ID NO: 1424158
gcucuaaggauaauaggca

SEQ ID NO: 1424160 - RNA, 19 nt, Artificial Sequence
  Description of Artificial Sequence: Synthetic oligonucleotide
  Sense strand starting at position 519 of SEQ ID NO: 1243553
cugcgagacagguggaaau

SEQ ID NO: 1424161 - RNA, 19 nt, Artificial Sequence
  Description of Artificial Sequence: Synthetic oligonucleotide
  Antisense strand to SEQ ID NO: 1424160
auuuccaccugucucgcag

SEQ ID NO: 1424162 - RNA, 19 nt, Artificial Sequence
  Description of Artificial Sequence: Synthetic oligonucleotide
  Sense strand starting at position 539 of SEQ ID NO: 1243553
gcaggcauguggucugcau

SEQ ID NO: 1424163 - RNA, 19 nt, Artificial Sequence
  Description of Artificial Sequence: Synthetic oligonucleotide
  Antisense strand to SEQ ID NO: 1424162
augcagaccacaugccugc

SEQ ID NO: 1424164 - RNA, 19 nt, Artificial Sequence
  Description of Artificial Sequence: Synthetic oligonucleotide
  Sense strand starting at position 886 of SEQ ID NO: 1243553
ggccacuggcuagagaauu

SEQ ID NO: 1424165 - RNA, 19 nt, Artificial Sequence
  Description of Artificial Sequence: Synthetic oligonucleotide
  Antisense strand to SEQ ID NO: 1424164
aauucucuagccaguggcc

SEQ ID NO: 1424166 - RNA, 19 nt, Artificial Sequence
  Description of Artificial Sequence: Synthetic oligonucleotide
  Sense strand starting at position 920 of SEQ ID NO: 1243553
acuguuaugcuguaaauuc

SEQ ID NO: 1424167 - RNA, 19 nt, Artificial Sequence
  Description of Artificial Sequence: Synthetic oligonucleotide
  Antisense strand to SEQ ID NO: 1424166
gaauuuacagcauaacagu

SEQ ID NO: 1424168 - RNA, 19 nt, Artificial Sequence
  Description of Artificial Sequence: Synthetic oligonucleotide
  Sense strand starting at position 1016 of SEQ ID NO: 1243553
cagacucugugccuugaaa

SEQ ID NO: 1424169 - RNA, 19 nt, Artificial Sequence
  Description of Artificial Sequence: Synthetic oligonucleotide
  Antisense strand to SEQ ID NO: 1424168
uuucaaggcacagagucug

SEQ ID NO: 1424170 - RNA, 19 nt, Artificial Sequence
  Description of Artificial Sequence: Synthetic oligonucleotide
  Sense strand starting at position 1358 of SEQ ID NO: 1243553
ucccacucucugugauguu

SEQ ID NO: 1424171 - RNA, 19 nt, Artificial Sequence
  Description of Artificial Sequence: Synthetic oligonucleotide
  Antisense strand to SEQ ID NO: 1424170
aacaucacagagaguggga

SEQ ID NO: 1424172 - RNA, 19 nt, Artificial Sequence
  Description of Artificial Sequence: Synthetic oligonucleotide
  Sense strand starting at position 1418 of SEQ ID NO: 1243553
cccuuuauugcugaagcaa

SEQ ID NO: 1424173 - RNA, 19 nt, Artificial Sequence
  Description of Artificial Sequence: Synthetic oligonucleotide
  Antisense strand to SEQ ID NO: 1424172
uugcuucagcaauaaaggg

SEQ ID NO: 1424174 - RNA, 19 nt, Artificial Sequence
  Description of Artificial Sequence: Synthetic oligonucleotide
  Sense strand starting at position 1498 of SEQ ID NO: 1243553
uccugucaucaggagcaga

SEQ ID NO: 1424175 - RNA, 19 nt, Artificial Sequence
  Description of Artificial Sequence: Synthetic oligonucleotide
  Antisense strand to SEQ ID NO: 1424174
ucugcuccugaugacagga

SEQ ID NO: 1424176 - RNA, 19 nt, Artificial Sequence
  Description of Artificial Sequence: Synthetic oligonucleotide
  Sense strand starting at position 1512 of SEQ ID NO: 1243553
gcagaaaguucugcagaga

SEQ ID NO: 1424177 - RNA, 19 nt, Artificial Sequence
  Description of Artificial Sequence: Synthetic oligonucleotide
  Antisense strand to SEQ ID NO: 1424176
ucucugcagaacuuucugc

SEQ ID NO: 1424178 - RNA, 19 nt, Artificial Sequence
  Description of Artificial Sequence: Synthetic oligonucleotide
  Sense strand starting at position 1562 of SEQ ID NO: 1243553
ccgucaaggccaggguaau

SEQ ID NO: 1424179 - RNA, 19 nt, Artificial Sequence
  Description of Artificial Sequence: Synthetic oligonucleotide
  Antisense strand to SEQ ID NO: 1424178
auuacccuggccuugacgg

SEQ ID NO: 1424180 - RNA, 19 nt, Artificial Sequence
  Description of Artificial Sequence: Synthetic oligonucleotide
  Sense strand starting at position 2157 of SEQ ID NO: 1243553
gcucaugaggauggcuuua

SEQ ID NO: 1424181 - RNA, 19 nt, Artificial Sequence
  Description of Artificial Sequence: Synthetic oligonucleotide
  Antisense strand to SEQ ID NO: 1424180
uaaagccauccucaugagc

SEQ ID NO: 1424182 - RNA, 19 nt, Artificial Sequence
  Description of Artificial Sequence: Synthetic oligonucleotide
  Sense strand starting at position 2245 of SEQ ID NO: 1243553
gaaagauuguguuauuuga

SEQ ID NO: 1424183 - RNA, 19 nt, Artificial Sequence
  Description of Artificial Sequence: Synthetic oligonucleotide
  Antisense strand to SEQ ID NO: 1424182
ucaaauaacacaaucuuuc

SEQ ID NO: 1424184 - RNA, 19 nt, Artificial Sequence
  Description of Artificial Sequence: Synthetic oligonucleotide
  Sense strand starting at position 2285 of SEQ ID NO: 1243553
guuguccucacagguagaa

SEQ ID NO: 1424185 - RNA, 19 nt, Artificial Sequence
  Description of Artificial Sequence: Synthetic oligonucleotide
  Antisense strand to SEQ ID NO: 1424184
uucuaccugugaggacaac

SEQ ID NO: 1424186 - RNA, 19 nt, Artificial Sequence
  Description of Artificial Sequence: Synthetic oligonucleotide
  Sense strand starting at position 2364 of SEQ ID NO: 1243553
gaagguuauugucuccuga

SEQ ID NO: 1424187 - RNA, 19 nt, Artificial Sequence
  Description of Artificial Sequence: Synthetic oligonucleotide
  Antisense strand to SEQ ID NO: 1424186
ucaggagacaauaaccuuc

SEQ ID NO: 1424188 - RNA, 19 nt, Artificial Sequence
  Description of Artificial Sequence: Synthetic oligonucleotide
  Sense strand starting at position 2451 of SEQ ID NO: 1243553
cucucucccuaagagugaa

SEQ ID NO: 1424189 - RNA, 19 nt, Artificial Sequence
  Description of Artificial Sequence: Synthetic oligonucleotide
  Antisense strand to SEQ ID NO: 1424188
uucacucuuagggagagag

SEQ ID NO: 1424190 - RNA, 19 nt, Artificial Sequence
  Description of Artificial Sequence: Synthetic oligonucleotide
  Sense strand starting at position 2517 of SEQ ID NO: 1243553
uugggaagaaguugguuaa

SEQ ID NO: 1424191 - RNA, 19 nt, Artificial Sequence
  Description of Artificial Sequence: Synthetic oligonucleotide
  Antisense strand to SEQ ID NO: 1424190
uuaaccaacuucuucccaa

SEQ ID NO: 1424192 - RNA, 19 nt, Artificial Sequence
  Description of Artificial Sequence: Synthetic oligonucleotide
  Sense strand starting at position 2524 of SEQ ID NO: 1243553
gaaguugguuaauccgauu

SEQ ID NO: 1424193 - RNA, 19 nt, Artificial Sequence
  Description of Artificial Sequence: Synthetic oligonucleotide
  Antisense strand to SEQ ID NO: 1424192
aaucggauuaaccaacuuc

SEQ ID NO: 1424194 - RNA, 19 nt, Artificial Sequence
  Description of Artificial Sequence: Synthetic oligonucleotide
  Sense strand starting at position 2571 of SEQ ID NO: 1243553
gagggugugauccagcuau

SEQ ID NO: 1424195 - RNA, 19 nt, Artificial Sequence
  Description of Artificial Sequence: Synthetic oligonucleotide
  Antisense strand to SEQ ID NO: 1424194
auagcuggaucacacccuc

SEQ ID NO: 1424196 - RNA, 19 nt, Artificial Sequence
  Description of Artificial Sequence: Synthetic oligonucleotide
  Sense strand starting at position 2596 of SEQ ID NO: 1243553
gguucuaaguucucaaaca

SEQ ID NO: 1424197 - RNA, 19 nt, Artificial Sequence
  Description of Artificial Sequence: Synthetic oligonucleotide
  Antisense strand to SEQ ID NO: 1424196
uguuugagaacuuagaacc

SEQ ID NO: 1424198 - RNA, 19 nt, Artificial Sequence
  Description of Artificial Sequence: Synthetic oligonucleotide
  Sense strand starting at position 2597 of SEQ ID NO: 1243553
guucuaaguucucaaacac

SEQ ID NO: 1424199 - RNA, 19 nt, Artificial Sequence
  Description of Artificial Sequence: Synthetic oligonucleotide
  Antisense strand to SEQ ID NO: 1424198
guguuugagaacuuagaac

SEQ ID NO: 1424200 - RNA, 19 nt, Artificial Sequence
  Description of Artificial Sequence: Synthetic oligonucleotide
  Sense strand starting at position 2654 of SEQ ID NO: 1243553
cccuuuagacccugagaag

SEQ ID NO: 1424201 - RNA, 19 nt, Artificial Sequence
  Description of Artificial Sequence: Synthetic oligonucleotide
  Antisense strand to SEQ ID NO: 1424200
cuucucagggucuaaaggg

SEQ ID NO: 1424202 - RNA, 19 nt, Artificial Sequence
  Description of Artificial Sequence: Synthetic oligonucleotide
  Sense strand starting at position 2657 of SEQ ID NO: 1243553
uuuagacccugagaaguaa

SEQ ID NO: 1424203 - RNA, 19 nt, Artificial Sequence
  Description of Artificial Sequence: Synthetic oligonucleotide
  Antisense strand to SEQ ID NO: 1424202
uuacuucucagggucuaaa

SEQ ID NO: 1424204 - RNA, 19 nt, Artificial Sequence
  Description of Artificial Sequence: Synthetic oligonucleotide
  Sense strand starting at position 2694 of SEQ ID NO: 1243553
cagagacugugcuuuacuu

SEQ ID NO: 1424205 - RNA, 19 nt, Artificial Sequence
  Description of Artificial Sequence: Synthetic oligonucleotide
  Antisense strand to SEQ ID NO: 1424204
aaguaaagcacagucucug

SEQ ID NO: 1424206 - RNA, 19 nt, Artificial Sequence
  Description of Artificial Sequence: Synthetic oligonucleotide
  Sense strand starting at position 2799 of SEQ ID NO: 1243553
ccaggaaguuucccuagga

SEQ ID NO: 1424207 - RNA, 19 nt, Artificial Sequence
  Description of Artificial Sequence: Synthetic oligonucleotide
  Antisense strand to SEQ ID NO: 1424206
uccuagggaaacuuccugg

SEQ ID NO: 1424208 - RNA, 19 nt, Artificial Sequence
  Description of Artificial Sequence: Synthetic oligonucleotide
  Sense strand starting at position 2800 of SEQ ID NO: 1243553
caggaaguuucccuaggaa

SEQ ID NO: 1424209 - RNA, 19 nt, Artificial Sequence
  Description of Artificial Sequence: Synthetic oligonucleotide
  Antisense strand to SEQ ID NO: 1424208
uuccuagggaaacuuccug

SEQ ID NO: 1424210 - RNA, 19 nt, Artificial Sequence
  Description of Artificial Sequence: Synthetic oligonucleotide
  Sense strand starting at position 2803 of SEQ ID NO: 1243553
gaaguuucccuaggaaacg

SEQ ID NO: 1424211 - RNA, 19 nt, Artificial Sequence
  Description of Artificial Sequence: Synthetic oligonucleotide
  Antisense strand to SEQ ID NO: 1424210
cguuuccuagggaaacuuc

SEQ ID NO: 1424212 - RNA, 19 nt, Artificial Sequence
  Description of Artificial Sequence: Synthetic oligonucleotide
  Sense strand starting at position 2804 of SEQ ID NO: 1243553
aaguuucccuaggaaacgu

SEQ ID NO: 1424213 - RNA, 19 nt, Artificial Sequence
  Description of Artificial Sequence: Synthetic oligonucleotide
  Antisense strand to SEQ ID NO: 1424212
acguuuccuagggaaacuu

SEQ ID NO: 1424214 - RNA, 19 nt, Artificial Sequence
  Description of Artificial Sequence: Synthetic oligonucleotide
  Sense strand starting at position 2833 of SEQ ID NO: 1243553
cugucuuuggcucaccaga

SEQ ID NO: 1424215 - RNA, 19 nt, Artificial Sequence
  Description of Artificial Sequence: Synthetic oligonucleotide
  Antisense strand to SEQ ID NO: 1424214
ucuggugagccaaagacag

SEQ ID NO: 1424216 - RNA, 19 nt, Artificial Sequence
  Description of Artificial Sequence: Synthetic oligonucleotide
  Sense strand starting at position 2835 of SEQ ID NO: 1243553
gucuuuggcucaccagaau

SEQ ID NO: 1424217 - RNA, 19 nt, Artificial Sequence
  Description of Artificial Sequence: Synthetic oligonucleotide
  Antisense strand to SEQ ID NO: 1424216
auucuggugagccaaagac

SEQ ID NO: 1424218 - RNA, 19 nt, Artificial Sequence
  Description of Artificial Sequence: Synthetic oligonucleotide
  Sense strand starting at position 3226 of SEQ ID NO: 1243553
ccaucaugcccagaggguu

SEQ ID NO: 1424219 - RNA, 19 nt, Artificial Sequence
  Description of Artificial Sequence: Synthetic oligonucleotide
  Antisense strand to SEQ ID NO: 1424218
aacccucugggcaugaugg

SEQ ID NO: 1424220 - RNA, 19 nt, Artificial Sequence
  Description of Artificial Sequence: Synthetic oligonucleotide
  Sense strand starting at position 8 of SEQ ID NO: 1243554
uguggaauacacgagcaaa

SEQ ID NO: 1424221 - RNA, 19 nt, Artificial Sequence
  Description of Artificial Sequence: Synthetic oligonucleotide
  Antisense strand to SEQ ID NO: 1424220
uuugcucguguauuccaca

SEQ ID NO: 1424222 - RNA, 19 nt, Artificial Sequence
  Description of Artificial Sequence: Synthetic oligonucleotide
  Sense strand starting at position 107 of SEQ ID NO: 1243554
augugacugucucuccuau

SEQ ID NO: 1424223 - RNA, 19 nt, Artificial Sequence
  Description of Artificial Sequence: Synthetic oligonucleotide
  Antisense strand to SEQ ID NO: 1424222
auaggagagacagucacau

SEQ ID NO: 1424224 - RNA, 19 nt, Artificial Sequence
  Description of Artificial Sequence: Synthetic oligonucleotide
  Sense strand starting at position 109 of SEQ ID NO: 1243554
gugacugucucuccuauua

SEQ ID NO: 1424225 - RNA, 19 nt, Artificial Sequence
  Description of Artificial Sequence: Synthetic oligonucleotide
  Antisense strand to SEQ ID NO: 1424224
uaauaggagagacagucac

SEQ ID NO: 1424226 - RNA, 19 nt, Artificial Sequence
  Description of Artificial Sequence: Synthetic oligonucleotide
  Sense strand starting at position 365 of SEQ ID NO: 1243554
uucuguauugcacauuaua

SEQ ID NO: 1424227 - RNA, 19 nt, Artificial Sequence
  Description of Artificial Sequence: Synthetic oligonucleotide
  Antisense strand to SEQ ID NO: 1424226
uauaaugugcaauacagaa

SEQ ID NO: 1424228 - RNA, 19 nt, Artificial Sequence
  Description of Artificial Sequence: Synthetic oligonucleotide
  Sense strand starting at position 368 of SEQ ID NO: 1243554
uguauugcacauuauacau

SEQ ID NO: 1424229 - RNA, 19 nt, Artificial Sequence
  Description of Artificial Sequence: Synthetic oligonucleotide
  Antisense strand to SEQ ID NO: 1424228
auguauaaugugcaauaca

SEQ ID NO: 1424230 - RNA, 19 nt, Artificial Sequence
  Description of Artificial Sequence: Synthetic oligonucleotide
  Sense strand starting at position 743 of SEQ ID NO: 1243554
cccagaucccucuggagau

SEQ ID NO: 1424231 - RNA, 19 nt, Artificial Sequence
  Description of Artificial Sequence: Synthetic oligonucleotide
  Antisense strand to SEQ ID NO: 1424230
aucuccagagggaucuggg

SEQ ID NO: 1424232 - RNA, 19 nt, Artificial Sequence
  Description of Artificial Sequence: Synthetic oligonucleotide
  Sense strand starting at position 755 of SEQ ID NO: 1243554
uggagaugugcuugauaua

SEQ ID NO: 1424233 - RNA, 19 nt, Artificial Sequence
  Description of Artificial Sequence: Synthetic oligonucleotide
  Antisense strand to SEQ ID NO: 1424232
uauaucaagcacaucucca

SEQ ID NO: 1424234 - RNA, 19 nt, Artificial Sequence
  Description of Artificial Sequence: Synthetic oligonucleotide
  Sense strand starting at position 756 of SEQ ID NO: 1243554
ggagaugugcuugauauau

SEQ ID NO: 1424235 - RNA, 19 nt, Artificial Sequence
  Description of Artificial Sequence: Synthetic oligonucleotide
  Antisense strand to SEQ ID NO: 1424234
auauaucaagcacaucucc

SEQ ID NO: 1424236 - RNA, 19 nt, Artificial Sequence
  Description of Artificial Sequence: Synthetic oligonucleotide
  Sense strand starting at position 776 of SEQ ID NO: 1243554
gucugugcacuauauuauc

SEQ ID NO: 1424237 - RNA, 19 nt, Artificial Sequence
  Description of Artificial Sequence: Synthetic oligonucleotide
  Antisense strand to SEQ ID NO: 1424236
gauaauauagugcacagac

SEQ ID NO: 1424238 - RNA, 19 nt, Artificial Sequence
  Description of Artificial Sequence: Synthetic oligonucleotide
  Sense strand starting at position 1109 of SEQ ID NO: 1243554
agacgccaucuguaccaaa

SEQ ID NO: 1424239 - RNA, 19 nt, Artificial Sequence
  Description of Artificial Sequence: Synthetic oligonucleotide
  Antisense strand to SEQ ID NO: 1424238
uuugguacagauggcgucu

SEQ ID NO: 1424240 - RNA, 19 nt, Artificial Sequence
  Description of Artificial Sequence: Synthetic oligonucleotide
  Sense strand starting at position 1496 of SEQ ID NO: 1243554
cuugauguguuucuacaua

SEQ ID NO: 1424241 - RNA, 19 nt, Artificial Sequence
  Description of Artificial Sequence: Synthetic oligonucleotide
  Antisense strand to SEQ ID NO: 1424240
uauguagaaacacaucaag

SEQ ID NO: 1424242 - RNA, 19 nt, Artificial Sequence
  Description of Artificial Sequence: Synthetic oligonucleotide
  Sense strand starting at position 1564 of SEQ ID NO: 1243554
auggauaugcucuaguuuc

SEQ ID NO: 1424243 - RNA, 19 nt, Artificial Sequence
  Description of Artificial Sequence: Synthetic oligonucleotide
  Antisense strand to SEQ ID NO: 1424242
gaaacuagagcauauccau

SEQ ID NO: 1424244 - RNA, 19 nt, Artificial Sequence
  Description of Artificial Sequence: Synthetic oligonucleotide
  Sense strand starting at position 1584 of SEQ ID NO: 1243554
uaaucaauacucgagugau

SEQ ID NO: 1424245 - RNA, 19 nt, Artificial Sequence
  Description of Artificial Sequence: Synthetic oligonucleotide
  Antisense strand to SEQ ID NO: 1424244
aucacucgaguauugauua

SEQ ID NO: 1424246 - RNA, 19 nt, Artificial Sequence
  Description of Artificial Sequence: Synthetic oligonucleotide
  Sense strand starting at position 1587 of SEQ ID NO: 1243554
ucaauacucgagugaugca

SEQ ID NO: 1424247 - RNA, 19 nt, Artificial Sequence
  Description of Artificial Sequence: Synthetic oligonucleotide
  Antisense strand to SEQ ID NO: 1424246
ugcaucacucgaguauuga

SEQ ID NO: 1424248 - RNA, 19 nt, Artificial Sequence
  Description of Artificial Sequence: Synthetic oligonucleotide
  Sense strand starting at position 2295 of SEQ ID NO: 1243554
cuagauuuaccucguucuc

SEQ ID NO: 1424249 - RNA, 19 nt, Artificial Sequence
  Description of Artificial Sequence: Synthetic oligonucleotide
  Antisense strand to SEQ ID NO: 1424248
gagaacgagguaaaucuag

SEQ ID NO: 1424250 - RNA, 19 nt, Artificial Sequence
  Description of Artificial Sequence: Synthetic oligonucleotide
  Sense strand starting at position 2297 of SEQ ID NO: 1243554
agauuuaccucguucucuu

SEQ ID NO: 1424251 - RNA, 19 nt, Artificial Sequence
  Description of Artificial Sequence: Synthetic oligonucleotide
  Antisense strand to SEQ ID NO: 1424250
aagagaacgagguaaaucu

SEQ ID NO: 1424252 - RNA, 19 nt, Artificial Sequence
  Description of Artificial Sequence: Synthetic oligonucleotide
  Sense strand starting at position 2849 of SEQ ID NO: 1243554
ccucgacccggagaugauu

SEQ ID NO: 1424253 - RNA, 19 nt, Artificial Sequence
  Description of Artificial Sequence: Synthetic oligonucleotide
  Antisense strand to SEQ ID NO: 1424252
aaucaucuccgggucgagg

SEQ ID NO: 1424254 - RNA, 19 nt, Artificial Sequence
  Description of Artificial Sequence: Synthetic oligonucleotide
  Sense strand starting at position 2919 of SEQ ID NO: 1243554
gucuuaauuauguaggugu

SEQ ID NO: 1424255 - RNA, 19 nt, Artificial Sequence
  Description of Artificial Sequence: Synthetic oligonucleotide
  Antisense strand to SEQ ID NO: 1424254
acaccuacauaauuaagac

SEQ ID NO: 1424256 - RNA, 19 nt, Artificial Sequence
  Description of Artificial Sequence: Synthetic oligonucleotide
  Sense strand starting at position 2983 of SEQ ID NO: 1243554
aaagauagcuuucucguga

SEQ ID NO: 1424257 - RNA, 19 nt, Artificial Sequence
  Description of Artificial Sequence: Synthetic oligonucleotide
  Antisense strand to SEQ ID NO: 1424256
ucacgagaaagcuaucuuu

SEQ ID NO: 1424258 - RNA, 19 nt, Artificial Sequence
  Description of Artificial Sequence: Synthetic oligonucleotide
  Sense strand starting at position 2984 of SEQ ID NO: 1243554
aagauagcuuucucgugau

SEQ ID NO: 1424259 - RNA, 19 nt, Artificial Sequence
  Description of Artificial Sequence: Synthetic oligonucleotide
  Antisense strand to SEQ ID NO: 1424258
aucacgagaaagcuaucuu

SEQ ID NO: 1424260 - RNA, 19 nt, Artificial Sequence
  Description of Artificial Sequence: Synthetic oligonucleotide
  Sense strand starting at position 2996 of SEQ ID NO: 1243554
ucgugauagccacaaggcu

SEQ ID NO: 1424261 - RNA, 19 nt, Artificial Sequence
  Description of Artificial Sequence: Synthetic oligonucleotide
  Antisense strand to SEQ ID NO: 1424260
agccuuguggcuaucacga

SEQ ID NO: 1424262 - RNA, 19 nt, Artificial Sequence
  Description of Artificial Sequence: Synthetic oligonucleotide
  Sense strand starting at position 3020 of SEQ ID NO: 1243554
ccucauucugcucauaugu

SEQ ID NO: 1424263 - RNA, 19 nt, Artificial Sequence
  Description of Artificial Sequence: Synthetic oligonucleotide
  Antisense strand to SEQ ID NO: 1424262
acauaugagcagaaugagg

SEQ ID NO: 1424264 - RNA, 19 nt, Artificial Sequence
  Description of Artificial Sequence: Synthetic oligonucleotide
  Sense strand starting at position 3078 of SEQ ID NO: 1243554
cugugcucggcguuaacuu

SEQ ID NO: 1424265 - RNA, 19 nt, Artificial Sequence
  Description of Artificial Sequence: Synthetic oligonucleotide
  Antisense strand to SEQ ID NO: 1424264
aaguuaacgccgagcacag

SEQ ID NO: 1424266 - RNA, 19 nt, Artificial Sequence
  Description of Artificial Sequence: Synthetic oligonucleotide
  Sense strand starting at position 3108 of SEQ ID NO: 1243554
guuuaucacuaccugacau

SEQ ID NO: 1424267 - RNA, 19 nt, Artificial Sequence
  Description of Artificial Sequence: Synthetic oligonucleotide
  Antisense strand to SEQ ID NO: 1424266
augucagguagugauaaac

SEQ ID NO: 1424268 - RNA, 19 nt, Artificial Sequence
  Description of Artificial Sequence: Synthetic oligonucleotide
  Sense strand starting at position 3130 of SEQ ID NO: 1243554
cguguuucccacgacucaa

SEQ ID NO: 1424269 - RNA, 19 nt, Artificial Sequence
  Description of Artificial Sequence: Synthetic oligonucleotide
  Antisense strand to SEQ ID NO: 1424268
uugagucgugggaaacacg

SEQ ID NO: 1424270 - RNA, 19 nt, Artificial Sequence
  Description of Artificial Sequence: Synthetic oligonucleotide
  Sense strand starting at position 3138 of SEQ ID NO: 1243554
ccacgacucaacgauaagu

SEQ ID NO: 1424271 - RNA, 19 nt, Artificial Sequence
  Description of Artificial Sequence: Synthetic oligonucleotide
  Antisense strand to SEQ ID NO: 1424270
acuuaucguugagucgugg

SEQ ID NO: 1424272 - RNA, 19 nt, Artificial Sequence
  Description of Artificial Sequence: Synthetic oligonucleotide
  Sense strand starting at position 3151 of SEQ ID NO: 1243554
auaaguguucaugagggca

SEQ ID NO: 1424273 - RNA, 19 nt, Artificial Sequence
  Description of Artificial Sequence: Synthetic oligonucleotide
  Antisense strand to SEQ ID NO: 1424272
ugcccucaugaacacuuau

SEQ ID NO: 1424274 - RNA, 19 nt, Artificial Sequence
  Description of Artificial Sequence: Synthetic oligonucleotide
  Sense strand starting at position 3177 of SEQ ID NO: 1243554
uuuaaugcccuaugacaag

SEQ ID NO: 1424275 - RNA, 19 nt, Artificial Sequence
  Description of Artificial Sequence: Synthetic oligonucleotide
  Antisense strand to SEQ ID NO: 1424274
cuugucauagggcauuaaa

SEQ ID NO: 1424276 - RNA, 19 nt, Artificial Sequence
  Description of Artificial Sequence: Synthetic oligonucleotide
  Sense strand starting at position 3217 of SEQ ID NO: 1243554
caugguagaugcuuaguaa

SEQ ID NO: 1424277 - RNA, 19 nt, Artificial Sequence
  Description of Artificial Sequence: Synthetic oligonucleotide
  Antisense strand to SEQ ID NO: 1424276
uuacuaagcaucuaccaug

SEQ ID NO: 1424278 - RNA, 19 nt, Artificial Sequence
  Description of Artificial Sequence: Synthetic oligonucleotide
  Sense strand starting at position 3218 of SEQ ID NO: 1243554
augguagaugcuuaguaaa

SEQ ID NO: 1424279 - RNA, 19 nt, Artificial Sequence
  Description of Artificial Sequence: Synthetic oligonucleotide
  Antisense strand to SEQ ID NO: 1424278
uuuacuaagcaucuaccau

SEQ ID NO: 1424280 - RNA, 19 nt, Artificial Sequence
  Description of Artificial Sequence: Synthetic oligonucleotide
  Sense strand starting at position 3240 of SEQ ID NO: 1243554
uuguuuaaugaaugaaggu

SEQ ID NO: 1424281 - RNA, 19 nt, Artificial Sequence
  Description of Artificial Sequence: Synthetic oligonucleotide
  Antisense strand to SEQ ID NO: 1424280
accuucauucauuaaacaa

SEQ ID NO: 1424282 - RNA, 19 nt, Artificial Sequence
  Description of Artificial Sequence: Synthetic oligonucleotide
  Sense strand starting at position 3337 of SEQ ID NO: 1243554
acaguuauaugccugugaa

SEQ ID NO: 1424283 - RNA, 19 nt, Artificial Sequence
  Description of Artificial Sequence: Synthetic oligonucleotide
  Antisense strand to SEQ ID NO: 1424282
uucacaggcauauaacugu

SEQ ID NO: 1424284 - RNA, 19 nt, Artificial Sequence
  Description of Artificial Sequence: Synthetic oligonucleotide
  Sense strand starting at position 3338 of SEQ ID NO: 1243554
caguuauaugccugugaau

SEQ ID NO: 1424285 - RNA, 19 nt, Artificial Sequence
  Description of Artificial Sequence: Synthetic oligonucleotide
  Antisense strand to SEQ ID NO: 1424284
auucacaggcauauaacug

SEQ ID NO: 1424286 - RNA, 19 nt, Artificial Sequence
  Description of Artificial Sequence: Synthetic oligonucleotide
  Sense strand starting at position 3340 of SEQ ID NO: 1243554
guuauaugccugugaauau

SEQ ID NO: 1424287 - RNA, 19 nt, Artificial Sequence
  Description of Artificial Sequence: Synthetic oligonucleotide
  Antisense strand to SEQ ID NO: 1424286
auauucacaggcauauaac

SEQ ID NO: 1424288 - RNA, 19 nt, Artificial Sequence
  Description of Artificial Sequence: Synthetic oligonucleotide
  Sense strand starting at position 3749 of SEQ ID NO: 1243554
aucuuucuguauuugcaga

SEQ ID NO: 1424289 - RNA, 19 nt, Artificial Sequence
  Description of Artificial Sequence: Synthetic oligonucleotide
  Antisense strand to SEQ ID NO: 1424288
ucugcaaauacagaaagau

SEQ ID NO: 1424290 - RNA, 19 nt, Artificial Sequence
  Description of Artificial Sequence: Synthetic oligonucleotide
  Sense strand starting at position 3751 of SEQ ID NO: 1243554
cuuucuguauuugcagaua

SEQ ID NO: 1424291 - RNA, 19 nt, Artificial Sequence
  Description of Artificial Sequence: Synthetic oligonucleotide
  Antisense strand to SEQ ID NO: 1424290
uaucugcaaauacagaaag

SEQ ID NO: 1424292 - RNA, 19 nt, Artificial Sequence
  Description of Artificial Sequence: Synthetic oligonucleotide
  Sense strand starting at position 3836 of SEQ ID NO: 1243554
ccagauuacuuuguguaca

SEQ ID NO: 1424293 - RNA, 19 nt, Artificial Sequence
  Description of Artificial Sequence: Synthetic oligonucleotide
  Antisense strand to SEQ ID NO: 1424292
uguacacaaaguaaucugg

SEQ ID NO: 1424294 - RNA, 19 nt, Artificial Sequence
  Description of Artificial Sequence: Synthetic oligonucleotide
  Sense strand starting at position 3838 of SEQ ID NO: 1243554
agauuacuuuguguacaug

SEQ ID NO: 1424295 - RNA, 19 nt, Artificial Sequence
  Description of Artificial Sequence: Synthetic oligonucleotide
  Antisense strand to SEQ ID NO: 1424294
cauguacacaaaguaaucu

SEQ ID NO: 1424296 - RNA, 19 nt, Artificial Sequence
  Description of Artificial Sequence: Synthetic oligonucleotide
  Sense strand starting at position 3839 of SEQ ID NO: 1243554
gauuacuuuguguacaugu

SEQ ID NO: 1424297 - RNA, 19 nt, Artificial Sequence
  Description of Artificial Sequence: Synthetic oligonucleotide
  Antisense strand to SEQ ID NO: 1424296
acauguacacaaaguaauc

SEQ ID NO: 1424298 - RNA, 19 nt, Artificial Sequence
  Description of Artificial Sequence: Synthetic oligonucleotide
  Sense strand starting at position 3846 of SEQ ID NO: 1243554
uuguguacauguuuccaaa

SEQ ID NO: 1424299 - RNA, 19 nt, Artificial Sequence
  Description of Artificial Sequence: Synthetic oligonucleotide
  Antisense strand to SEQ ID NO: 1424298
uuuggaaacauguacacaa

SEQ ID NO: 1424300 - RNA, 19 nt, Artificial Sequence
  Description of Artificial Sequence: Synthetic oligonucleotide
  Sense strand starting at position 30 of SEQ ID NO: 1243555
augugacugucucuccuau

SEQ ID NO: 1424301 - RNA, 19 nt, Artificial Sequence
  Description of Artificial Sequence: Synthetic oligonucleotide
  Antisense strand to SEQ ID NO: 1424300
auaggagagacagucacau

SEQ ID NO: 1424302 - RNA, 19 nt, Artificial Sequence
  Description of Artificial Sequence: Synthetic oligonucleotide
  Sense strand starting at position 32 of SEQ ID NO: 1243555
gugacugucucuccuauua

SEQ ID NO: 1424303 - RNA, 19 nt, Artificial Sequence
  Description of Artificial Sequence: Synthetic oligonucleotide
  Antisense strand to SEQ ID NO: 1424302
uaauaggagagacagucac

SEQ ID NO: 1424304 - RNA, 19 nt, Artificial Sequence
  Description of Artificial Sequence: Synthetic oligonucleotide
  Sense strand starting at position 288 of SEQ ID NO: 1243555
uucuguauugcacauuaua

SEQ ID NO: 1424305 - RNA, 19 nt, Artificial Sequence
  Description of Artificial Sequence: Synthetic oligonucleotide
  Antisense strand to SEQ ID NO: 1424304
uauaaugugcaauacagaa

SEQ ID NO: 1424306 - RNA, 19 nt, Artificial Sequence
  Description of Artificial Sequence: Synthetic oligonucleotide
  Sense strand starting at position 291 of SEQ ID NO: 1243555
uguauugcacauuauacau

SEQ ID NO: 1424307 - RNA, 19 nt, Artificial Sequence
  Description of Artificial Sequence: Synthetic oligonucleotide
  Antisense strand to SEQ ID NO: 1424306
auguauaaugugcaauaca

SEQ ID NO: 1424308 - RNA, 19 nt, Artificial Sequence
  Description of Artificial Sequence: Synthetic oligonucleotide
  Sense strand starting at position 666 of SEQ ID NO: 1243555
cccagaucccucuggagau

SEQ ID NO: 1424309 - RNA, 19 nt, Artificial Sequence
  Description of Artificial Sequence: Synthetic oligonucleotide
  Antisense strand to SEQ ID NO: 1424308
aucuccagagggaucuggg

SEQ ID NO: 1424310 - RNA, 19 nt, Artificial Sequence
  Description of Artificial Sequence: Synthetic oligonucleotide
  Sense strand starting at position 678 of SEQ ID NO: 1243555
uggagaugugcuugauaua

SEQ ID NO: 1424311 - RNA, 19 nt, Artificial Sequence
  Description of Artificial Sequence: Synthetic oligonucleotide
  Antisense strand to SEQ ID NO: 1424310
uauaucaagcacaucucca

SEQ ID NO: 1424312 - RNA, 19 nt, Artificial Sequence
  Description of Artificial Sequence: Synthetic oligonucleotide
  Sense strand starting at position 679 of SEQ ID NO: 1243555
ggagaugugcuugauauau

SEQ ID NO: 1424313 - RNA, 19 nt, Artificial Sequence
  Description of Artificial Sequence: Synthetic oligonucleotide
  Antisense strand to SEQ ID NO: 1424312
auauaucaagcacaucucc

SEQ ID NO: 1424314 - RNA, 19 nt, Artificial Sequence
  Description of Artificial Sequence: Synthetic oligonucleotide
  Sense strand starting at position 699 of SEQ ID NO: 1243555
gucugugcacuauauuauc

SEQ ID NO: 1424315 - RNA, 19 nt, Artificial Sequence
  Description of Artificial Sequence: Synthetic oligonucleotide
  Antisense strand to SEQ ID NO: 1424314
gauaauauagugcacagac

SEQ ID NO: 1424316 - RNA, 19 nt, Artificial Sequence
  Description of Artificial Sequence: Synthetic oligonucleotide
  Sense strand starting at position 1032 of SEQ ID NO: 1243555
agacgccaucuguaccaaa

SEQ ID NO: 1424317 - RNA, 19 nt, Artificial Sequence
  Description of Artificial Sequence: Synthetic oligonucleotide
  Antisense strand to SEQ ID NO: 1424316
uuugguacagauggcgucu

SEQ ID NO: 1424318 - RNA, 19 nt, Artificial Sequence
  Description of Artificial Sequence: Synthetic oligonucleotide
  Sense strand starting at position 1419 of SEQ ID NO: 1243555
cuugauguguuucuacaua

SEQ ID NO: 1424319 - RNA, 19 nt, Artificial Sequence
  Description of Artificial Sequence: Synthetic oligonucleotide
  Antisense strand to SEQ ID NO: 1424318
uauguagaaacacaucaag

SEQ ID NO: 1424320 - RNA, 19 nt, Artificial Sequence
  Description of Artificial Sequence: Synthetic oligonucleotide
  Sense strand starting at position 1487 of SEQ ID NO: 1243555
auggauaugcucuaguuuc

SEQ ID NO: 1424321 - RNA, 19 nt, Artificial Sequence
  Description of Artificial Sequence: Synthetic oligonucleotide
  Antisense strand to SEQ ID NO: 1424320
gaaacuagagcauauccau

SEQ ID NO: 1424322 - RNA, 19 nt, Artificial Sequence
  Description of Artificial Sequence: Synthetic oligonucleotide
  Sense strand starting at position 1507 of SEQ ID NO: 1243555
uaaucaauacucgagugau

SEQ ID NO: 1424323 - RNA, 19 nt, Artificial Sequence
  Description of Artificial Sequence: Synthetic oligonucleotide
  Antisense strand to SEQ ID NO: 1424322
aucacucgaguauugauua

SEQ ID NO: 1424324 - RNA, 19 nt, Artificial Sequence
  Description of Artificial Sequence: Synthetic oligonucleotide
  Sense strand starting at position 1510 of SEQ ID NO: 1243555
ucaauacucgagugaugca

SEQ ID NO: 1424325 - RNA, 19 nt, Artificial Sequence
  Description of Artificial Sequence: Synthetic oligonucleotide
  Antisense strand to SEQ ID NO: 1424324
ugcaucacucgaguauuga

SEQ ID NO: 1424326 - RNA, 19 nt, Artificial Sequence
  Description of Artificial Sequence: Synthetic oligonucleotide
  Sense strand starting at position 2218 of SEQ ID NO: 1243555
cuagauuuaccucguucuc

SEQ ID NO: 1424327 - RNA, 19 nt, Artificial Sequence
  Description of Artificial Sequence: Synthetic oligonucleotide
  Antisense strand to SEQ ID NO: 1424326
gagaacgagguaaaucuag

SEQ ID NO: 1424328 - RNA, 19 nt, Artificial Sequence
  Description of Artificial Sequence: Synthetic oligonucleotide
  Sense strand starting at position 2220 of SEQ ID NO: 1243555
agauuuaccucguucucuu

SEQ ID NO: 1424329 - RNA, 19 nt, Artificial Sequence
  Description of Artificial Sequence: Synthetic oligonucleotide
  Antisense strand to SEQ ID NO: 1424328
aagagaacgagguaaaucu

SEQ ID NO: 1424330 - RNA, 19 nt, Artificial Sequence
  Description of Artificial Sequence: Synthetic oligonucleotide
  Sense strand starting at position 2772 of SEQ ID NO: 1243555
ccucgacccggagaugauu

SEQ ID NO: 1424331 - RNA, 19 nt, Artificial Sequence
  Description of Artificial Sequence: Synthetic oligonucleotide
  Antisense strand to SEQ ID NO: 1424330
aaucaucuccgggucgagg

SEQ ID NO: 1424332 - RNA, 19 nt, Artificial Sequence
  Description of Artificial Sequence: Synthetic oligonucleotide
  Sense strand starting at position 2842 of SEQ ID NO: 1243555
gucuuaauuauguaggugu

SEQ ID NO: 1424333 - RNA, 19 nt, Artificial Sequence
  Description of Artificial Sequence: Synthetic oligonucleotide
  Antisense strand to SEQ ID NO: 1424332
acaccuacauaauuaagac

SEQ ID NO: 1424334 - RNA, 19 nt, Artificial Sequence
  Description of Artificial Sequence: Synthetic oligonucleotide
  Sense strand starting at position 2906 of SEQ ID NO: 1243555
aaagauagcuuucucguga

SEQ ID NO: 1424335 - RNA, 19 nt, Artificial Sequence
  Description of Artificial Sequence: Synthetic oligonucleotide
  Antisense strand to SEQ ID NO: 1424334
ucacgagaaagcuaucuuu

SEQ ID NO: 1424336 - RNA, 19 nt, Artificial Sequence
  Description of Artificial Sequence: Synthetic oligonucleotide
  Sense strand starting at position 2907 of SEQ ID NO: 1243555
aagauagcuuucucgugau

SEQ ID NO: 1424337 - RNA, 19 nt, Artificial Sequence
  Description of Artificial Sequence: Synthetic oligonucleotide
  Antisense strand to SEQ ID NO: 1424336
aucacgagaaagcuaucuu

SEQ ID NO: 1424338 - RNA, 19 nt, Artificial Sequence
  Description of Artificial Sequence: Synthetic oligonucleotide
  Sense strand starting at position 2919 of SEQ ID NO: 1243555
ucgugauagccacaaggcu

SEQ ID NO: 1424339 - RNA, 19 nt, Artificial Sequence
  Description of Artificial Sequence: Synthetic oligonucleotide
  Antisense strand to SEQ ID NO: 1424338
agccuuguggcuaucacga

SEQ ID NO: 1424340 - RNA, 19 nt, Artificial Sequence
  Description of Artificial Sequence: Synthetic oligonucleotide
  Sense strand starting at position 2943 of SEQ ID NO: 1243555
ccucauucugcucauaugu

SEQ ID NO: 1424341 - RNA, 19 nt, Artificial Sequence
  Description of Artificial Sequence: Synthetic oligonucleotide
  Antisense strand to SEQ ID NO: 1424340
acauaugagcagaaugagg

SEQ ID NO: 1424342 - RNA, 19 nt, Artificial Sequence
  Description of Artificial Sequence: Synthetic oligonucleotide
  Sense strand starting at position 3001 of SEQ ID NO: 1243555
cugugcucggcguuaacuu

SEQ ID NO: 1424343 - RNA, 19 nt, Artificial Sequence
  Description of Artificial Sequence: Synthetic oligonucleotide
  Antisense strand to SEQ ID NO: 1424342
aaguuaacgccgagcacag

SEQ ID NO: 1424344 - RNA, 19 nt, Artificial Sequence
  Description of Artificial Sequence: Synthetic oligonucleotide
  Sense strand starting at position 3031 of SEQ ID NO: 1243555
guuuaucacuaccugacau

SEQ ID NO: 1424345 - RNA, 19 nt, Artificial Sequence
  Description of Artificial Sequence: Synthetic oligonucleotide
  Antisense strand to SEQ ID NO: 1424344
augucagguagugauaaac

SEQ ID NO: 1424346 - RNA, 19 nt, Artificial Sequence
  Description of Artificial Sequence: Synthetic oligonucleotide
  Sense strand starting at position 3061 of SEQ ID NO: 1243555
ccacgacucaacgauaagu

SEQ ID NO: 1424347 - RNA, 19 nt, Artificial Sequence
  Description of Artificial Sequence: Synthetic oligonucleotide
  Antisense strand to SEQ ID NO: 1424346
acuuaucguugagucgugg

SEQ ID NO: 1424348 - RNA, 19 nt, Artificial Sequence
  Description of Artificial Sequence: Synthetic oligonucleotide
  Sense strand starting at position 3074 of SEQ ID NO: 1243555
auaaguguucaugagggca

SEQ ID NO: 1424349 - RNA, 19 nt, Artificial Sequence
  Description of Artificial Sequence: Synthetic oligonucleotide
  Antisense strand to SEQ ID NO: 1424348
ugcccucaugaacacuuau

SEQ ID NO: 1424350 - RNA, 19 nt, Artificial Sequence
  Description of Artificial Sequence: Synthetic oligonucleotide
  Sense strand starting at position 3100 of SEQ ID NO: 1243555
uuuaaugcccuaugacaag

SEQ ID NO: 1424351 - RNA, 19 nt, Artificial Sequence
  Description of Artificial Sequence: Synthetic oligonucleotide
  Antisense strand to SEQ ID NO: 1424350
cuugucauagggcauuaaa

SEQ ID NO: 1424352 - RNA, 19 nt, Artificial Sequence
  Description of Artificial Sequence: Synthetic oligonucleotide
  Sense strand starting at position 3140 of SEQ ID NO: 1243555
caugguagaugcuuaguaa

SEQ ID NO: 1424353 - RNA, 19 nt, Artificial Sequence
  Description of Artificial Sequence: Synthetic oligonucleotide
  Antisense strand to SEQ ID NO: 1424352
uuacuaagcaucuaccaug

SEQ ID NO: 1424354 - RNA, 19 nt, Artificial Sequence
  Description of Artificial Sequence: Synthetic oligonucleotide
  Sense strand starting at position 3141 of SEQ ID NO: 1243555
augguagaugcuuaguaaa

SEQ ID NO: 1424355 - RNA, 19 nt, Artificial Sequence
  Description of Artificial Sequence: Synthetic oligonucleotide
  Antisense strand to SEQ ID NO: 1424354
uuuacuaagcaucuaccau

SEQ ID NO: 1424356 - RNA, 19 nt, Artificial Sequence
  Description of Artificial Sequence: Synthetic oligonucleotide
  Sense strand starting at position 3163 of SEQ ID NO: 1243555
uuguuuaaugaaugaaggu

SEQ ID NO: 1424357 - RNA, 19 nt, Artificial Sequence
  Description of Artificial Sequence: Synthetic oligonucleotide
  Antisense strand to SEQ ID NO: 1424356
accuucauucauuaaacaa

SEQ ID NO: 1424358 - RNA, 19 nt, Artificial Sequence
  Description of Artificial Sequence: Synthetic oligonucleotide
  Sense strand starting at position 3260 of SEQ ID NO: 1243555
acaguuauaugccugugaa

SEQ ID NO: 1424359 - RNA, 19 nt, Artificial Sequence
  Description of Artificial Sequence: Synthetic oligonucleotide
  Antisense strand to SEQ ID NO: 1424358
uucacaggcauauaacugu

SEQ ID NO: 1424360 - RNA, 19 nt, Artificial Sequence
  Description of Artificial Sequence: Synthetic oligonucleotide
  Sense strand starting at position 3261 of SEQ ID NO: 1243555
caguuauaugccugugaau

SEQ ID NO: 1424361 - RNA, 19 nt, Artificial Sequence
  Description of Artificial Sequence: Synthetic oligonucleotide
  Antisense strand to SEQ ID NO: 1424360
auucacaggcauauaacug

SEQ ID NO: 1424362 - RNA, 19 nt, Artificial Sequence
  Description of Artificial Sequence: Synthetic oligonucleotide
  Sense strand starting at position 3672 of SEQ ID NO: 1243555
aucuuucuguauuugcaga

SEQ ID NO: 1424363 - RNA, 19 nt, Artificial Sequence
  Description of Artificial Sequence: Synthetic oligonucleotide
  Antisense strand to SEQ ID NO: 1424362
ucugcaaauacagaaagau

SEQ ID NO: 1424364 - RNA, 19 nt, Artificial Sequence
  Description of Artificial Sequence: Synthetic oligonucleotide
  Sense strand starting at position 3674 of SEQ ID NO: 1243555
cuuucuguauuugcagaua

SEQ ID NO: 1424365 - RNA, 19 nt, Artificial Sequence
  Description of Artificial Sequence: Synthetic oligonucleotide
  Antisense strand to SEQ ID NO: 1424364
uaucugcaaauacagaaag

SEQ ID NO: 1424366 - RNA, 19 nt, Artificial Sequence
  Description of Artificial Sequence: Synthetic oligonucleotide
  Sense strand starting at position 3759 of SEQ ID NO: 1243555
ccagauuacuuuguguaca

SEQ ID NO: 1424367 - RNA, 19 nt, Artificial Sequence
  Description of Artificial Sequence: Synthetic oligonucleotide
  Antisense strand to SEQ ID NO: 1424366
uguacacaaaguaaucugg

SEQ ID NO: 1424368 - RNA, 19 nt, Artificial Sequence
  Description of Artificial Sequence: Synthetic oligonucleotide
  Sense strand starting at position 3761 of SEQ ID NO: 1243555
agauuacuuuguguacaug

SEQ ID NO: 1424369 - RNA, 19 nt, Artificial Sequence
  Description of Artificial Sequence: Synthetic oligonucleotide
  Antisense strand to SEQ ID NO: 1424368
cauguacacaaaguaaucu

SEQ ID NO: 1424370 - RNA, 19 nt, Artificial Sequence
  Description of Artificial Sequence: Synthetic oligonucleotide
  Sense strand starting at position 3762 of SEQ ID NO: 1243555
gauuacuuuguguacaugu

SEQ ID NO: 1424371 - RNA, 19 nt, Artificial Sequence
  Description of Artificial Sequence: Synthetic oligonucleotide
  Antisense strand to SEQ ID NO: 1424370
acauguacacaaaguaauc

SEQ ID NO: 1424372 - RNA, 19 nt, Artificial Sequence
  Description of Artificial Sequence: Synthetic oligonucleotide
  Sense strand starting at position 3769 of SEQ ID NO: 1243555
uuguguacauguuuccaaa

SEQ ID NO: 1424373 - RNA, 19 nt, Artificial Sequence
  Description of Artificial Sequence: Synthetic oligonucleotide
  Antisense strand to SEQ ID NO: 1424372
uuuggaaacauguacacaa

SEQ ID NO: 1424374 - RNA, 19 nt, Artificial Sequence
  Description of Artificial Sequence: Synthetic oligonucleotide
  Sense strand starting at position 3912 of SEQ ID NO: 1243555
ugggaaacagcuugaugua

SEQ ID NO: 1424375 - RNA, 19 nt, Artificial Sequence
  Description of Artificial Sequence: Synthetic oligonucleotide
  Antisense strand to SEQ ID NO: 1424374
uacaucaagcuguuuccca

SEQ ID NO: 1424376 - RNA, 19 nt, Artificial Sequence
  Description of Artificial Sequence: Synthetic oligonucleotide
  Sense strand starting at position 3937 of SEQ ID NO: 1243555
ccauaagguccacaguaau

SEQ ID NO: 1424377 - RNA, 19 nt, Artificial Sequence
  Description of Artificial Sequence: Synthetic oligonucleotide
  Antisense strand to SEQ ID NO: 1424376
auuacuguggaccuuaugg

SEQ ID NO: 1424378 - RNA, 19 nt, Artificial Sequence
  Description of Artificial Sequence: Synthetic oligonucleotide
  Sense strand starting at position 3943 of SEQ ID NO: 1243555
gguccacaguaauuaaauu

SEQ ID NO: 1424379 - RNA, 19 nt, Artificial Sequence
  Description of Artificial Sequence: Synthetic oligonucleotide
  Antisense strand to SEQ ID NO: 1424378
aauuuaauuacuguggacc

SEQ ID NO: 1424380 - RNA, 19 nt, Artificial Sequence
  Description of Artificial Sequence: Synthetic oligonucleotide
  Sense strand starting at position 1 of SEQ ID NO: 1243556
gccauccaggaguaaguau

SEQ ID NO: 1424381 - RNA, 19 nt, Artificial Sequence
  Description of Artificial Sequence: Synthetic oligonucleotide
  Antisense strand to SEQ ID NO: 1424380
auacuuacuccuggauggc

SEQ ID NO: 1424382 - RNA, 19 nt, Artificial Sequence
  Description of Artificial Sequence: Synthetic oligonucleotide
  Sense strand starting at position 197 of SEQ ID NO: 1243556
caagauggccagugaagaa

SEQ ID NO: 1424383 - RNA, 19 nt, Artificial Sequence
  Description of Artificial Sequence: Synthetic oligonucleotide
  Antisense strand to SEQ ID NO: 1424382
uucuucacuggccaucuug

SEQ ID NO: 1424384 - RNA, 19 nt, Artificial Sequence
  Description of Artificial Sequence: Synthetic oligonucleotide
  Sense strand starting at position 243 of SEQ ID NO: 1243556
augugucaugagcaaauuc

SEQ ID NO: 1424385 - RNA, 19 nt, Artificial Sequence
  Description of Artificial Sequence: Synthetic oligonucleotide
  Antisense strand to SEQ ID NO: 1424384
gaauuugcucaugacacau

SEQ ID NO: 1424386 - RNA, 19 nt, Artificial Sequence
  Description of Artificial Sequence: Synthetic oligonucleotide
  Sense strand starting at position 267 of SEQ ID NO: 1243556
auguuucggaaaugaguaa

SEQ ID NO: 1424387 - RNA, 19 nt, Artificial Sequence
  Description of Artificial Sequence: Synthetic oligonucleotide
  Antisense strand to SEQ ID NO: 1424386
uuacucauuuccgaaacau

SEQ ID NO: 1424388 - RNA, 19 nt, Artificial Sequence
  Description of Artificial Sequence: Synthetic oligonucleotide
  Sense strand starting at position 268 of SEQ ID NO: 1243556
uguuucggaaaugaguaau

SEQ ID NO: 1424389 - RNA, 19 nt, Artificial Sequence
  Description of Artificial Sequence: Synthetic oligonucleotide
  Antisense strand to SEQ ID NO: 1424388
auuacucauuuccgaaaca

SEQ ID NO: 1424390 - RNA, 19 nt, Artificial Sequence
  Description of Artificial Sequence: Synthetic oligonucleotide
  Sense strand starting at position 271 of SEQ ID NO: 1243556
uucggaaaugaguaauucu

SEQ ID NO: 1424391 - RNA, 19 nt, Artificial Sequence
  Description of Artificial Sequence: Synthetic oligonucleotide
  Antisense strand to SEQ ID NO: 1424390
agaauuacucauuuccgaa

SEQ ID NO: 1424392 - RNA, 19 nt, Artificial Sequence
  Description of Artificial Sequence: Synthetic oligonucleotide
  Sense strand starting at position 294 of SEQ ID NO: 1243556
cuauguaaaccguagcaga

SEQ ID NO: 1424393 - RNA, 19 nt, Artificial Sequence
  Description of Artificial Sequence: Synthetic oligonucleotide
  Antisense strand to SEQ ID NO: 1424392
ucugcuacgguuuacauag

SEQ ID NO: 1424394 - RNA, 19 nt, Artificial Sequence
  Description of Artificial Sequence: Synthetic oligonucleotide
  Sense strand starting at position 375 of SEQ ID NO: 1243556
acagaccagucucauuuau

SEQ ID NO: 1424395 - RNA, 19 nt, Artificial Sequence
  Description of Artificial Sequence: Synthetic oligonucleotide
  Antisense strand to SEQ ID NO: 1424394
auaaaugagacuggucugu

SEQ ID NO: 1424396 - RNA, 19 nt, Artificial Sequence
  Description of Artificial Sequence: Synthetic oligonucleotide
  Sense strand starting at position 448 of SEQ ID NO: 1243556
caucaugaguaaguaggau

SEQ ID NO: 1424397 - RNA, 19 nt, Artificial Sequence
  Description of Artificial Sequence: Synthetic oligonucleotide
  Antisense strand to SEQ ID NO: 1424396
auccuacuuacucaugaug

SEQ ID NO: 1424398 - RNA, 19 nt, Artificial Sequence
  Description of Artificial Sequence: Synthetic oligonucleotide
  Sense strand starting at position 462 of SEQ ID NO: 1243556
aggauuaucccacgaagau

SEQ ID NO: 1424399 - RNA, 19 nt, Artificial Sequence
  Description of Artificial Sequence: Synthetic oligonucleotide
  Antisense strand to SEQ ID NO: 1424398
aucuucgugggauaauccu

SEQ ID NO: 1424400 - RNA, 19 nt, Artificial Sequence
  Description of Artificial Sequence: Synthetic oligonucleotide
  Sense strand starting at position 474 of SEQ ID NO: 1243556
cgaagauacuaauuaguau

SEQ ID NO: 1424401 - RNA, 19 nt, Artificial Sequence
  Description of Artificial Sequence: Synthetic oligonucleotide
  Antisense strand to SEQ ID NO: 1424400
auacuaauuaguaucuucg

SEQ ID NO: 1424402 - RNA, 19 nt, Artificial Sequence
  Description of Artificial Sequence: Synthetic oligonucleotide
  Sense strand starting at position 547 of SEQ ID NO: 1243556
ugccaaagauguuuaacau

SEQ ID NO: 1424403 - RNA, 19 nt, Artificial Sequence
  Description of Artificial Sequence: Synthetic oligonucleotide
  Antisense strand to SEQ ID NO: 1424402
auguuaaacaucuuuggca

SEQ ID NO: 1424404 - RNA, 19 nt, Artificial Sequence
  Description of Artificial Sequence: Synthetic oligonucleotide
  Sense strand starting at position 548 of SEQ ID NO: 1243556
gccaaagauguuuaacaua

SEQ ID NO: 1424405 - RNA, 19 nt, Artificial Sequence
  Description of Artificial Sequence: Synthetic oligonucleotide
  Antisense strand to SEQ ID NO: 1424404
uauguuaaacaucuuuggc

SEQ ID NO: 1424406 - RNA, 19 nt, Artificial Sequence
  Description of Artificial Sequence: Synthetic oligonucleotide
  Sense strand starting at position 612 of SEQ ID NO: 1243556
cucucauauguaggaagua

SEQ ID NO: 1424407 - RNA, 19 nt, Artificial Sequence
  Description of Artificial Sequence: Synthetic oligonucleotide
  Antisense strand to SEQ ID NO: 1424406
uacuuccuacauaugagag

SEQ ID NO: 1424408 - RNA, 19 nt, Artificial Sequence
  Description of Artificial Sequence: Synthetic oligonucleotide
  Sense strand starting at position 787 of SEQ ID NO: 1243556
augcgagucccagaugacu

SEQ ID NO: 1424409 - RNA, 19 nt, Artificial Sequence
  Description of Artificial Sequence: Synthetic oligonucleotide
  Antisense strand to SEQ ID NO: 1424408
agucaucugggacucgcau

SEQ ID NO: 1424410 - RNA, 19 nt, Artificial Sequence
  Description of Artificial Sequence: Synthetic oligonucleotide
  Sense strand starting at position 1149 of SEQ ID NO: 1243556
agccaaugugcuuaacuau

SEQ ID NO: 1424411 - RNA, 19 nt, Artificial Sequence
  Description of Artificial Sequence: Synthetic oligonucleotide
  Antisense strand to SEQ ID NO: 1424410
auaguuaagcacauuggcu

SEQ ID NO: 1424412 - RNA, 19 nt, Artificial Sequence
  Description of Artificial Sequence: Synthetic oligonucleotide
  Sense strand starting at position 1277 of SEQ ID NO: 1243556
auccaaguacuguacuuua

SEQ ID NO: 1424413 - RNA, 19 nt, Artificial Sequence
  Description of Artificial Sequence: Synthetic oligonucleotide
  Antisense strand to SEQ ID NO: 1424412
uaaaguacaguacuuggau

SEQ ID NO: 1424414 - RNA, 19 nt, Artificial Sequence
  Description of Artificial Sequence: Synthetic oligonucleotide
  Sense strand starting at position 1285 of SEQ ID NO: 1243556
acuguacuuuagguaguaa

SEQ ID NO: 1424415 - RNA, 19 nt, Artificial Sequence
  Description of Artificial Sequence: Synthetic oligonucleotide
  Antisense strand to SEQ ID NO: 1424414
uuacuaccuaaaguacagu

SEQ ID NO: 1424416 - RNA, 19 nt, Artificial Sequence
  Description of Artificial Sequence: Synthetic oligonucleotide
  Sense strand starting at position 1286 of SEQ ID NO: 1243556
cuguacuuuagguaguaaa

SEQ ID NO: 1424417 - RNA, 19 nt, Artificial Sequence
  Description of Artificial Sequence: Synthetic oligonucleotide
  Antisense strand to SEQ ID NO: 1424416
uuuacuaccuaaaguacag

SEQ ID NO: 1424418 - RNA, 19 nt, Artificial Sequence
  Description of Artificial Sequence: Synthetic oligonucleotide
  Sense strand starting at position 1321 of SEQ ID NO: 1243556
guaugaauuagcgauucug

SEQ ID NO: 1424419 - RNA, 19 nt, Artificial Sequence
  Description of Artificial Sequence: Synthetic oligonucleotide
  Antisense strand to SEQ ID NO: 1424418
cagaaucgcuaauucauac

SEQ ID NO: 1424420 - RNA, 19 nt, Artificial Sequence
  Description of Artificial Sequence: Synthetic oligonucleotide
  Sense strand starting at position 1363 of SEQ ID NO: 1243556
cugagugaauucguaauua

SEQ ID NO: 1424421 - RNA, 19 nt, Artificial Sequence
  Description of Artificial Sequence: Synthetic oligonucleotide
  Antisense strand to SEQ ID NO: 1424420
uaauuacgaauucacucag

SEQ ID NO: 1424422 - RNA, 19 nt, Artificial Sequence
  Description of Artificial Sequence: Synthetic oligonucleotide
  Sense strand starting at position 1456 of SEQ ID NO: 1243556
gacacugcuccaggagaca

SEQ ID NO: 1424423 - RNA, 19 nt, Artificial Sequence
  Description of Artificial Sequence: Synthetic oligonucleotide
  Antisense strand to SEQ ID NO: 1424422
ugucuccuggagcaguguc

SEQ ID NO: 1424424 - RNA, 19 nt, Artificial Sequence
  Description of Artificial Sequence: Synthetic oligonucleotide
  Sense strand starting at position 1591 of SEQ ID NO: 1243556
ucgggaugcacauagguua

SEQ ID NO: 1424425 - RNA, 19 nt, Artificial Sequence
  Description of Artificial Sequence: Synthetic oligonucleotide
  Antisense strand to SEQ ID NO: 1424424
uaaccuaugugcaucccga

SEQ ID NO: 1424426 - RNA, 19 nt, Artificial Sequence
  Description of Artificial Sequence: Synthetic oligonucleotide
  Sense strand starting at position 2305 of SEQ ID NO: 1243556
guuuguaauguccaucuua

SEQ ID NO: 1424427 - RNA, 19 nt, Artificial Sequence
  Description of Artificial Sequence: Synthetic oligonucleotide
  Antisense strand to SEQ ID NO: 1424426
uaagauggacauuacaaac

SEQ ID NO: 1424428 - RNA, 19 nt, Artificial Sequence
  Description of Artificial Sequence: Synthetic oligonucleotide
  Sense strand starting at position 2404 of SEQ ID NO: 1243556
augccuuaaguguaaugaa

SEQ ID NO: 1424429 - RNA, 19 nt, Artificial Sequence
  Description of Artificial Sequence: Synthetic oligonucleotide
  Antisense strand to SEQ ID NO: 1424428
uucauuacacuuaaggcau

SEQ ID NO: 1424430 - RNA, 19 nt, Artificial Sequence
  Description of Artificial Sequence: Synthetic oligonucleotide
  Sense strand starting at position 2438 of SEQ ID NO: 1243556
gaccgucaucugucguuua

SEQ ID NO: 1424431 - RNA, 19 nt, Artificial Sequence
  Description of Artificial Sequence: Synthetic oligonucleotide
  Antisense strand to SEQ ID NO: 1424430
uaaacgacagaugacgguc

SEQ ID NO: 1424432 - RNA, 19 nt, Artificial Sequence
  Description of Artificial Sequence: Synthetic oligonucleotide
  Sense strand starting at position 2440 of SEQ ID NO: 1243556
ccgucaucugucguuuaaa

SEQ ID NO: 1424433 - RNA, 19 nt, Artificial Sequence
  Description of Artificial Sequence: Synthetic oligonucleotide
  Antisense strand to SEQ ID NO: 1424432
uuuaaacgacagaugacgg

SEQ ID NO: 1424434 - RNA, 19 nt, Artificial Sequence
  Description of Artificial Sequence: Synthetic oligonucleotide
  Sense strand starting at position 2522 of SEQ ID NO: 1243556
acacauagacguugucuga

SEQ ID NO: 1424435 - RNA, 19 nt, Artificial Sequence
  Description of Artificial Sequence: Synthetic oligonucleotide
  Antisense strand to SEQ ID NO: 1424434
ucagacaacgucuaugugu

SEQ ID NO: 1424436 - RNA, 19 nt, Artificial Sequence
  Description of Artificial Sequence: Synthetic oligonucleotide
  Sense strand starting at position 2561 of SEQ ID NO: 1243556
ugacuuacauuguugcaaa

SEQ ID NO: 1424437 - RNA, 19 nt, Artificial Sequence
  Description of Artificial Sequence: Synthetic oligonucleotide
  Antisense strand to SEQ ID NO: 1424436
uuugcaacaauguaaguca

SEQ ID NO: 1424438 - RNA, 19 nt, Artificial Sequence
  Description of Artificial Sequence: Synthetic oligonucleotide
  Sense strand starting at position 2641 of SEQ ID NO: 1243556
ggacaaucgucucuugauu

SEQ ID NO: 1424439 - RNA, 19 nt, Artificial Sequence
  Description of Artificial Sequence: Synthetic oligonucleotide
  Antisense strand to SEQ ID NO: 1424438
aaucaagagacgauugucc

SEQ ID NO: 1424440 - RNA, 19 nt, Artificial Sequence
  Description of Artificial Sequence: Synthetic oligonucleotide
  Sense strand starting at position 2647 of SEQ ID NO: 1243556
ucgucucuugauuauacaa

SEQ ID NO: 1424441 - RNA, 19 nt, Artificial Sequence
  Description of Artificial Sequence: Synthetic oligonucleotide
  Antisense strand to SEQ ID NO: 1424440
uuguauaaucaagagacga

SEQ ID NO: 1424442 - RNA, 19 nt, Artificial Sequence
  Description of Artificial Sequence: Synthetic oligonucleotide
  Sense strand starting at position 2676 of SEQ ID NO: 1243556
ccuggaagaucaguguaug

SEQ ID NO: 1424443 - RNA, 19 nt, Artificial Sequence
  Description of Artificial Sequence: Synthetic oligonucleotide
  Antisense strand to SEQ ID NO: 1424442
cauacacugaucuuccagg

SEQ ID NO: 1424444 - RNA, 19 nt, Artificial Sequence
  Description of Artificial Sequence: Synthetic oligonucleotide
  Sense strand starting at position 2677 of SEQ ID NO: 1243556
cuggaagaucaguguaugu

SEQ ID NO: 1424445 - RNA, 19 nt, Artificial Sequence
  Description of Artificial Sequence: Synthetic oligonucleotide
  Antisense strand to SEQ ID NO: 1424444
acauacacugaucuuccag

SEQ ID NO: 1424446 - RNA, 19 nt, Artificial Sequence
  Description of Artificial Sequence: Synthetic oligonucleotide
  Sense strand starting at position 2679 of SEQ ID NO: 1243556
ggaagaucaguguauguua

SEQ ID NO: 1424447 - RNA, 19 nt, Artificial Sequence
  Description of Artificial Sequence: Synthetic oligonucleotide
  Antisense strand to SEQ ID NO: 1424446
uaacauacacugaucuucc

SEQ ID NO: 1424448 - RNA, 19 nt, Artificial Sequence
  Description of Artificial Sequence: Synthetic oligonucleotide
  Sense strand starting at position 2681 of SEQ ID NO: 1243556
aagaucaguguauguuaaa

SEQ ID NO: 1424449 - RNA, 19 nt, Artificial Sequence
  Description of Artificial Sequence: Synthetic oligonucleotide
  Antisense strand to SEQ ID NO: 1424448
uuuaacauacacugaucuu

SEQ ID NO: 1424450 - RNA, 19 nt, Artificial Sequence
  Description of Artificial Sequence: Synthetic oligonucleotide
  Sense strand starting at position 3223 of SEQ ID NO: 1243556
cuggaagugugagcucaaa

SEQ ID NO: 1424451 - RNA, 19 nt, Artificial Sequence
  Description of Artificial Sequence: Synthetic oligonucleotide
  Antisense strand to SEQ ID NO: 1424450
uuugagcucacacuuccag

SEQ ID NO: 1424452 - RNA, 19 nt, Artificial Sequence
  Description of Artificial Sequence: Synthetic oligonucleotide
  Sense strand starting at position 3321 of SEQ ID NO: 1243556
uguguacuuacuuaauggu

SEQ ID NO: 1424453 - RNA, 19 nt, Artificial Sequence
  Description of Artificial Sequence: Synthetic oligonucleotide
  Antisense strand to SEQ ID NO: 1424452
accauuaaguaaguacaca

SEQ ID NO: 1424454 - RNA, 19 nt, Artificial Sequence
  Description of Artificial Sequence: Synthetic oligonucleotide
  Sense strand starting at position 3328 of SEQ ID NO: 1243556
uuacuuaauggugauaguu

SEQ ID NO: 1424455 - RNA, 19 nt, Artificial Sequence
  Description of Artificial Sequence: Synthetic oligonucleotide
  Antisense strand to SEQ ID NO: 1424454
aacuaucaccauuaaguaa

SEQ ID NO: 1424456 - RNA, 19 nt, Artificial Sequence
  Description of Artificial Sequence: Synthetic oligonucleotide
  Sense strand starting at position 3532 of SEQ ID NO: 1243556
aaggguaggauaugucuua

SEQ ID NO: 1424457 - RNA, 19 nt, Artificial Sequence
  Description of Artificial Sequence: Synthetic oligonucleotide
  Antisense strand to SEQ ID NO: 1424456
uaagacauauccuacccuu

SEQ ID NO: 1424458 - RNA, 19 nt, Artificial Sequence
  Description of Artificial Sequence: Synthetic oligonucleotide
  Sense strand starting at position 3533 of SEQ ID NO: 1243556
aggguaggauaugucuuau

SEQ ID NO: 1424459 - RNA, 19 nt, Artificial Sequence
  Description of Artificial Sequence: Synthetic oligonucleotide
  Antisense strand to SEQ ID NO: 1424458
auaagacauauccuacccu

SEQ ID NO: 1424460 - RNA, 19 nt, Artificial Sequence
  Description of Artificial Sequence: Synthetic oligonucleotide
  Sense strand starting at position 229 of SEQ ID NO: 1243557
cccagauaacugugccuca

SEQ ID NO: 1424461 - RNA, 19 nt, Artificial Sequence
  Description of Artificial Sequence: Synthetic oligonucleotide
  Antisense strand to SEQ ID NO: 1424460
ugaggcacaguuaucuggg

SEQ ID NO: 1424462 - RNA, 19 nt, Artificial Sequence
  Description of Artificial Sequence: Synthetic oligonucleotide
  Sense strand starting at position 417 of SEQ ID NO: 1243557
caugguuugugaccuggga

SEQ ID NO: 1424463 - RNA, 19 nt, Artificial Sequence
  Description of Artificial Sequence: Synthetic oligonucleotide
  Antisense strand to SEQ ID NO: 1424462
ucccaggucacaaaccaug

SEQ ID NO: 1424464 - RNA, 19 nt, Artificial Sequence
  Description of Artificial Sequence: Synthetic oligonucleotide
  Sense strand starting at position 419 of SEQ ID NO: 1243557
ugguuugugaccugggaac

SEQ ID NO: 1424465 - RNA, 19 nt, Artificial Sequence
  Description of Artificial Sequence: Synthetic oligonucleotide
  Antisense strand to SEQ ID NO: 1424464
guucccaggucacaaacca

SEQ ID NO: 1424466 - RNA, 19 nt, Artificial Sequence
  Description of Artificial Sequence: Synthetic oligonucleotide
  Sense strand starting at position 477 of SEQ ID NO: 1243557
aagggaaauuaguauagga

SEQ ID NO: 1424467 - RNA, 19 nt, Artificial Sequence
  Description of Artificial Sequence: Synthetic oligonucleotide
  Antisense strand to SEQ ID NO: 1424466
uccuauacuaauuucccuu

SEQ ID NO: 1424468 - RNA, 19 nt, Artificial Sequence
  Description of Artificial Sequence: Synthetic oligonucleotide
  Sense strand starting at position 805 of SEQ ID NO: 1243557
cccagcuuugcagagaaga

SEQ ID NO: 1424469 - RNA, 19 nt, Artificial Sequence
  Description of Artificial Sequence: Synthetic oligonucleotide
  Antisense strand to SEQ ID NO: 1424468
ucuucucugcaaagcuggg

SEQ ID NO: 1424470 - RNA, 19 nt, Artificial Sequence
  Description of Artificial Sequence: Synthetic oligonucleotide
  Sense strand starting at position 827 of SEQ ID NO: 1243557
gaccguggacccuaacaua

SEQ ID NO: 1424471 - RNA, 19 nt, Artificial Sequence
  Description of Artificial Sequence: Synthetic oligonucleotide
  Antisense strand to SEQ ID NO: 1424470
uauguuaggguccacgguc

SEQ ID NO: 1424472 - RNA, 19 nt, Artificial Sequence
  Description of Artificial Sequence: Synthetic oligonucleotide
  Sense strand starting at position 912 of SEQ ID NO: 1243557
cucuaagcccuagaaagua

SEQ ID NO: 1424473 - RNA, 19 nt, Artificial Sequence
  Description of Artificial Sequence: Synthetic oligonucleotide
  Antisense strand to SEQ ID NO: 1424472
uacuuucuagggcuuagag

SEQ ID NO: 1424474 - RNA, 19 nt, Artificial Sequence
  Description of Artificial Sequence: Synthetic oligonucleotide
  Sense strand starting at position 920 of SEQ ID NO: 1243557
ccuagaaaguauguuaaua

SEQ ID NO: 1424475 - RNA, 19 nt, Artificial Sequence
  Description of Artificial Sequence: Synthetic oligonucleotide
  Antisense strand to SEQ ID NO: 1424474
uauuaacauacuuucuagg

SEQ ID NO: 1424476 - RNA, 19 nt, Artificial Sequence
  Description of Artificial Sequence: Synthetic oligonucleotide
  Sense strand starting at position 928 of SEQ ID NO: 1243557
guauguuaauauccucauu

SEQ ID NO: 1424477 - RNA, 19 nt, Artificial Sequence
  Description of Artificial Sequence: Synthetic oligonucleotide
  Antisense strand to SEQ ID NO: 1424476
aaugaggauauuaacauac

SEQ ID NO: 1424478 - RNA, 19 nt, Artificial Sequence
  Description of Artificial Sequence: Synthetic oligonucleotide
  Sense strand starting at position 1005 of SEQ ID NO: 1243557
guacuagcagauugaggau

SEQ ID NO: 1424479 - RNA, 19 nt, Artificial Sequence
  Description of Artificial Sequence: Synthetic oligonucleotide
  Antisense strand to SEQ ID NO: 1424478
auccucaaucugcuaguac

SEQ ID NO: 1424480 - RNA, 19 nt, Artificial Sequence
  Description of Artificial Sequence: Synthetic oligonucleotide
  Sense strand starting at position 1020 of SEQ ID NO: 1243557
ggauuugaacgcuggcgau

SEQ ID NO: 1424481 - RNA, 19 nt, Artificial Sequence
  Description of Artificial Sequence: Synthetic oligonucleotide
  Antisense strand to SEQ ID NO: 1424480
aucgccagcguucaaaucc

SEQ ID NO: 1424482 - RNA, 19 nt, Artificial Sequence
  Description of Artificial Sequence: Synthetic oligonucleotide
  Sense strand starting at position 1139 of SEQ ID NO: 1243557
augaguguuccagguuaaa

SEQ ID NO: 1424483 - RNA, 19 nt, Artificial Sequence
  Description of Artificial Sequence: Synthetic oligonucleotide
  Antisense strand to SEQ ID NO: 1424482
uuuaaccuggaacacucau

SEQ ID NO: 1424484 - RNA, 19 nt, Artificial Sequence
  Description of Artificial Sequence: Synthetic oligonucleotide
  Sense strand starting at position 1142 of SEQ ID NO: 1243557
aguguuccagguuaaauca

SEQ ID NO: 1424485 - RNA, 19 nt, Artificial Sequence
  Description of Artificial Sequence: Synthetic oligonucleotide
  Antisense strand to SEQ ID NO: 1424484
ugauuuaaccuggaacacu

SEQ ID NO: 1424486 - RNA, 19 nt, Artificial Sequence
  Description of Artificial Sequence: Synthetic oligonucleotide
  Sense strand starting at position 1220 of SEQ ID NO: 1243557
cgcaaugucccagugcuca

SEQ ID NO: 1424487 - RNA, 19 nt, Artificial Sequence
  Description of Artificial Sequence: Synthetic oligonucleotide
  Antisense strand to SEQ ID NO: 1424486
ugagcacugggacauugcg

SEQ ID NO: 1424488 - RNA, 19 nt, Artificial Sequence
  Description of Artificial Sequence: Synthetic oligonucleotide
  Sense strand starting at position 1231 of SEQ ID NO: 1243557
agugcucagggcuaaacaa

SEQ ID NO: 1424489 - RNA, 19 nt, Artificial Sequence
  Description of Artificial Sequence: Synthetic oligonucleotide
  Antisense strand to SEQ ID NO: 1424488
uuguuuagcccugagcacu

SEQ ID NO: 1424490 - RNA, 19 nt, Artificial Sequence
  Description of Artificial Sequence: Synthetic oligonucleotide
  Sense strand starting at position 2019 of SEQ ID NO: 1243557
gccugcucgugaccaauuu

SEQ ID NO: 1424491 - RNA, 19 nt, Artificial Sequence
  Description of Artificial Sequence: Synthetic oligonucleotide
  Antisense strand to SEQ ID NO: 1424490
aaauuggucacgagcaggc

SEQ ID NO: 1424492 - RNA, 19 nt, Artificial Sequence
  Description of Artificial Sequence: Synthetic oligonucleotide
  Sense strand starting at position 2185 of SEQ ID NO: 1243557
ccugaaauucugggaguga

SEQ ID NO: 1424493 - RNA, 19 nt, Artificial Sequence
  Description of Artificial Sequence: Synthetic oligonucleotide
  Antisense strand to SEQ ID NO: 1424492
ucacucccagaauuucagg

SEQ ID NO: 1424494 - RNA, 19 nt, Artificial Sequence
  Description of Artificial Sequence: Synthetic oligonucleotide
  Sense strand starting at position 2218 of SEQ ID NO: 1243557
gcuggauccaagcgaagaa

SEQ ID NO: 1424495 - RNA, 19 nt, Artificial Sequence
  Description of Artificial Sequence: Synthetic oligonucleotide
  Antisense strand to SEQ ID NO: 1424494
uucuucgcuuggauccagc

SEQ ID NO: 1424496 - RNA, 19 nt, Artificial Sequence
  Description of Artificial Sequence: Synthetic oligonucleotide
  Sense strand starting at position 2263 of SEQ ID NO: 1243557
cgggcaaccuggguuagaa

SEQ ID NO: 1424497 - RNA, 19 nt, Artificial Sequence
  Description of Artificial Sequence: Synthetic oligonucleotide
  Antisense strand to SEQ ID NO: 1424496
uucuaacccagguugcccg

SEQ ID NO: 1424498 - RNA, 19 nt, Artificial Sequence
  Description of Artificial Sequence: Synthetic oligonucleotide
  Sense strand starting at position 2265 of SEQ ID NO: 1243557
ggcaaccuggguuagaauu

SEQ ID NO: 1424499 - RNA, 19 nt, Artificial Sequence
  Description of Artificial Sequence: Synthetic oligonucleotide
  Antisense strand to SEQ ID NO: 1424498
aauucuaacccagguugcc

SEQ ID NO: 1424500 - RNA, 19 nt, Artificial Sequence
  Description of Artificial Sequence: Synthetic oligonucleotide
  Sense strand starting at position 2364 of SEQ ID NO: 1243557
cugaauuguuaaucagcuu

SEQ ID NO: 1424501 - RNA, 19 nt, Artificial Sequence
  Description of Artificial Sequence: Synthetic oligonucleotide
  Antisense strand to SEQ ID NO: 1424500
aagcugauuaacaauucag

SEQ ID NO: 1424502 - RNA, 19 nt, Artificial Sequence
  Description of Artificial Sequence: Synthetic oligonucleotide
  Sense strand starting at position 2385 of SEQ ID NO: 1243557
ccggaugaauccuuuccca

SEQ ID NO: 1424503 - RNA, 19 nt, Artificial Sequence
  Description of Artificial Sequence: Synthetic oligonucleotide
  Antisense strand to SEQ ID NO: 1424502
ugggaaaggauucauccgg

SEQ ID NO: 1424504 - RNA, 19 nt, Artificial Sequence
  Description of Artificial Sequence: Synthetic oligonucleotide
  Sense strand starting at position 2438 of SEQ ID NO: 1243557
ggcugaagauggucccauu

SEQ ID NO: 1424505 - RNA, 19 nt, Artificial Sequence
  Description of Artificial Sequence: Synthetic oligonucleotide
  Antisense strand to SEQ ID NO: 1424504
aaugggaccaucuucagcc

SEQ ID NO: 1424506 - RNA, 19 nt, Artificial Sequence
  Description of Artificial Sequence: Synthetic oligonucleotide
  Sense strand starting at position 2768 of SEQ ID NO: 1243557
uuuaaaucugcccgagaug

SEQ ID NO: 1424507 - RNA, 19 nt, Artificial Sequence
  Description of Artificial Sequence: Synthetic oligonucleotide
  Antisense strand to SEQ ID NO: 1424506
caucucgggcagauuuaaa

SEQ ID NO: 1424508 - RNA, 19 nt, Artificial Sequence
  Description of Artificial Sequence: Synthetic oligonucleotide
  Sense strand starting at position 2769 of SEQ ID NO: 1243557
uuaaaucugcccgagaugu

SEQ ID NO: 1424509 - RNA, 19 nt, Artificial Sequence
  Description of Artificial Sequence: Synthetic oligonucleotide
  Antisense strand to SEQ ID NO: 1424508
acaucucgggcagauuuaa

SEQ ID NO: 1424510 - RNA, 19 nt, Artificial Sequence
  Description of Artificial Sequence: Synthetic oligonucleotide
  Sense strand starting at position 2933 of SEQ ID NO: 1243557
gugggcuuugugucgguga

SEQ ID NO: 1424511 - RNA, 19 nt, Artificial Sequence
  Description of Artificial Sequence: Synthetic oligonucleotide
  Antisense strand to SEQ ID NO: 1424510
ucaccgacacaaagcccac

SEQ ID NO: 1424512 - RNA, 19 nt, Artificial Sequence
  Description of Artificial Sequence: Synthetic oligonucleotide
  Sense strand starting at position 2990 of SEQ ID NO: 1243557
ggccaugagauccgcaaau

SEQ ID NO: 1424513 - RNA, 19 nt, Artificial Sequence
  Description of Artificial Sequence: Synthetic oligonucleotide
  Antisense strand to SEQ ID NO: 1424512
auuugcggaucucauggcc

SEQ ID NO: 1424514 - RNA, 19 nt, Artificial Sequence
  Description of Artificial Sequence: Synthetic oligonucleotide
  Sense strand starting at position 3009 of SEQ ID NO: 1243557
ggaagcguccugggauaga

SEQ ID NO: 1424515 - RNA, 19 nt, Artificial Sequence
  Description of Artificial Sequence: Synthetic oligonucleotide
  Antisense strand to SEQ ID NO: 1424514
ucuaucccaggacgcuucc

SEQ ID NO: 1424516 - RNA, 19 nt, Artificial Sequence
  Description of Artificial Sequence: Synthetic oligonucleotide
  Sense strand starting at position 3037 of SEQ ID NO: 1243557
ucaguuaccguguauugag

SEQ ID NO: 1424517 - RNA, 19 nt, Artificial Sequence
  Description of Artificial Sequence: Synthetic oligonucleotide
  Antisense strand to SEQ ID NO: 1424516
cucaauacacgguaacuga

SEQ ID NO: 1424518 - RNA, 19 nt, Artificial Sequence
  Description of Artificial Sequence: Synthetic oligonucleotide
  Sense strand starting at position 3045 of SEQ ID NO: 1243557
cguguauugagcguuuaua

SEQ ID NO: 1424519 - RNA, 19 nt, Artificial Sequence
  Description of Artificial Sequence: Synthetic oligonucleotide
  Antisense strand to SEQ ID NO: 1424518
uauaaacgcucaauacacg

SEQ ID NO: 1424520 - RNA, 19 nt, Artificial Sequence
  Description of Artificial Sequence: Synthetic oligonucleotide
  Sense strand starting at position 3090 of SEQ ID NO: 1243557
guaugaagcagaugcuauu

SEQ ID NO: 1424521 - RNA, 19 nt, Artificial Sequence
  Description of Artificial Sequence: Synthetic oligonucleotide
  Antisense strand to SEQ ID NO: 1424520
aauagcaucugcuucauac

SEQ ID NO: 1424522 - RNA, 19 nt, Artificial Sequence
  Description of Artificial Sequence: Synthetic oligonucleotide
  Sense strand starting at position 3181 of SEQ ID NO: 1243557
ugaggcuaccaugauagua

SEQ ID NO: 1424523 - RNA, 19 nt, Artificial Sequence
  Description of Artificial Sequence: Synthetic oligonucleotide
  Antisense strand to SEQ ID NO: 1424522
uacuaucaugguagccuca

SEQ ID NO: 1424524 - RNA, 19 nt, Artificial Sequence
  Description of Artificial Sequence: Synthetic oligonucleotide
  Sense strand starting at position 3190 of SEQ ID NO: 1243557
caugauaguagaggguaau

SEQ ID NO: 1424525 - RNA, 19 nt, Artificial Sequence
  Description of Artificial Sequence: Synthetic oligonucleotide
  Antisense strand to SEQ ID NO: 1424524
auuacccucuacuaucaug

SEQ ID NO: 1424526 - RNA, 19 nt, Artificial Sequence
  Description of Artificial Sequence: Synthetic oligonucleotide
  Sense strand starting at position 3223 of SEQ ID NO: 1243557
guuugugaugacuaaguga

SEQ ID NO: 1424527 - RNA, 19 nt, Artificial Sequence
  Description of Artificial Sequence: Synthetic oligonucleotide
  Antisense strand to SEQ ID NO: 1424526
ucacuuagucaucacaaac

SEQ ID NO: 1424528 - RNA, 19 nt, Artificial Sequence
  Description of Artificial Sequence: Synthetic oligonucleotide
  Sense strand starting at position 3491 of SEQ ID NO: 1243557
auuccucaccucgagugau

SEQ ID NO: 1424529 - RNA, 19 nt, Artificial Sequence
  Description of Artificial Sequence: Synthetic oligonucleotide
  Antisense strand to SEQ ID NO: 1424528
aucacucgaggugaggaau

SEQ ID NO: 1424530 - RNA, 19 nt, Artificial Sequence
  Description of Artificial Sequence: Synthetic oligonucleotide
  Sense strand starting at position 3768 of SEQ ID NO: 1243557
uggcacgaucauuggacau

SEQ ID NO: 1424531 - RNA, 19 nt, Artificial Sequence
  Description of Artificial Sequence: Synthetic oligonucleotide
  Antisense strand to SEQ ID NO: 1424530
auguccaaugaucgugcca

SEQ ID NO: 1424532 - RNA, 19 nt, Artificial Sequence
  Description of Artificial Sequence: Synthetic oligonucleotide
  Sense strand starting at position 3830 of SEQ ID NO: 1243557
agaagacucuagccucaaa

SEQ ID NO: 1424533 - RNA, 19 nt, Artificial Sequence
  Description of Artificial Sequence: Synthetic oligonucleotide
  Antisense strand to SEQ ID NO: 1424532
uuugaggcuagagucuucu

SEQ ID NO: 1424534 - RNA, 19 nt, Artificial Sequence
  Description of Artificial Sequence: Synthetic oligonucleotide
  Sense strand starting at position 3958 of SEQ ID NO: 1243557
accucauaucacuggguua

SEQ ID NO: 1424535 - RNA, 19 nt, Artificial Sequence
  Description of Artificial Sequence: Synthetic oligonucleotide
  Antisense strand to SEQ ID NO: 1424534
uaacccagugauaugaggu

SEQ ID NO: 1424536 - RNA, 19 nt, Artificial Sequence
  Description of Artificial Sequence: Synthetic oligonucleotide
  Sense strand starting at position 3961 of SEQ ID NO: 1243557
ucauaucacuggguuagga

SEQ ID NO: 1424537 - RNA, 19 nt, Artificial Sequence
  Description of Artificial Sequence: Synthetic oligonucleotide
  Antisense strand to SEQ ID NO: 1424536
uccuaacccagugauauga

SEQ ID NO: 1424538 - RNA, 19 nt, Artificial Sequence
  Description of Artificial Sequence: Synthetic oligonucleotide
  Sense strand starting at position 3978 of SEQ ID NO: 1243557
gaugaaaugagcggagcua

SEQ ID NO: 1424539 - RNA, 19 nt, Artificial Sequence
  Description of Artificial Sequence: Synthetic oligonucleotide
  Antisense strand to SEQ ID NO: 1424538
uagcuccgcucauuucauc

SEQ ID NO: 1424540 - RNA, 19 nt, Artificial Sequence
  Description of Artificial Sequence: Synthetic oligonucleotide
  Sense strand starting at position 11 of SEQ ID NO: 1243558
gguaaugcuguuggaauac

SEQ ID NO: 1424541 - RNA, 19 nt, Artificial Sequence
  Description of Artificial Sequence: Synthetic oligonucleotide
  Antisense strand to SEQ ID NO: 1424540
guauuccaacagcauuacc

SEQ ID NO: 1424542 - RNA, 19 nt, Artificial Sequence
  Description of Artificial Sequence: Synthetic oligonucleotide
  Sense strand starting at position 30 of SEQ ID NO: 1243558
agacauaucuggcucaagu

SEQ ID NO: 1424543 - RNA, 19 nt, Artificial Sequence
  Description of Artificial Sequence: Synthetic oligonucleotide
  Antisense strand to SEQ ID NO: 1424542
acuugagccagauaugucu

SEQ ID NO: 1424544 - RNA, 19 nt, Artificial Sequence
  Description of Artificial Sequence: Synthetic oligonucleotide
  Sense strand starting at position 62 of SEQ ID NO: 1243558
acgguaucauuugagacau

SEQ ID NO: 1424545 - RNA, 19 nt, Artificial Sequence
  Description of Artificial Sequence: Synthetic oligonucleotide
  Antisense strand to SEQ ID NO: 1424544
augucucaaaugauaccgu

SEQ ID NO: 1424546 - RNA, 19 nt, Artificial Sequence
  Description of Artificial Sequence: Synthetic oligonucleotide
  Sense strand starting at position 64 of SEQ ID NO: 1243558
gguaucauuugagacauuc

SEQ ID NO: 1424547 - RNA, 19 nt, Artificial Sequence
  Description of Artificial Sequence: Synthetic oligonucleotide
  Antisense strand to SEQ ID NO: 1424546
gaaugucucaaaugauacc

SEQ ID NO: 1424548 - RNA, 19 nt, Artificial Sequence
  Description of Artificial Sequence: Synthetic oligonucleotide
  Sense strand starting at position 310 of SEQ ID NO: 1243558
augugucuccaagggauga

SEQ ID NO: 1424549 - RNA, 19 nt, Artificial Sequence
  Description of Artificial Sequence: Synthetic oligonucleotide
  Antisense strand to SEQ ID NO: 1424548
ucaucccuuggagacacau

SEQ ID NO: 1424550 - RNA, 19 nt, Artificial Sequence
  Description of Artificial Sequence: Synthetic oligonucleotide
  Sense strand starting at position 311 of SEQ ID NO: 1243558
ugugucuccaagggaugaa

SEQ ID NO: 1424551 - RNA, 19 nt, Artificial Sequence
  Description of Artificial Sequence: Synthetic oligonucleotide
  Antisense strand to SEQ ID NO: 1424550
uucaucccuuggagacaca

SEQ ID NO: 1424552 - RNA, 19 nt, Artificial Sequence
  Description of Artificial Sequence: Synthetic oligonucleotide
  Sense strand starting at position 385 of SEQ ID NO: 1243558
aagggugucccaggagauu

SEQ ID NO: 1424553 - RNA, 19 nt, Artificial Sequence
  Description of Artificial Sequence: Synthetic oligonucleotide
  Antisense strand to SEQ ID NO: 1424552
aaucuccugggacacccuu

SEQ ID NO: 1424554 - RNA, 19 nt, Artificial Sequence
  Description of Artificial Sequence: Synthetic oligonucleotide
  Sense strand starting at position 645 of SEQ ID NO: 1243558
cauucuuuccgauaacgug

SEQ ID NO: 1424555 - RNA, 19 nt, Artificial Sequence
  Description of Artificial Sequence: Synthetic oligonucleotide
  Antisense strand to SEQ ID NO: 1424554
cacguuaucggaaagaaug

SEQ ID NO: 1424556 - RNA, 19 nt, Artificial Sequence
  Description of Artificial Sequence: Synthetic oligonucleotide
  Sense strand starting at position 743 of SEQ ID NO: 1243558
uuccucucacgugaaaugu

SEQ ID NO: 1424557 - RNA, 19 nt, Artificial Sequence
  Description of Artificial Sequence: Synthetic oligonucleotide
  Antisense strand to SEQ ID NO: 1424556
acauuucacgugagaggaa

SEQ ID NO: 1424558 - RNA, 19 nt, Artificial Sequence
  Description of Artificial Sequence: Synthetic oligonucleotide
  Sense strand starting at position 796 of SEQ ID NO: 1243558
auccacugcucugugaaau

SEQ ID NO: 1424559 - RNA, 19 nt, Artificial Sequence
  Description of Artificial Sequence: Synthetic oligonucleotide
  Antisense strand to SEQ ID NO: 1424558
auuucacagagcaguggau

SEQ ID NO: 1424560 - RNA, 19 nt, Artificial Sequence
  Description of Artificial Sequence: Synthetic oligonucleotide
  Sense strand starting at position 861 of SEQ ID NO: 1243558
aauaguuaagaaugugaac

SEQ ID NO: 1424561 - RNA, 19 nt, Artificial Sequence
  Description of Artificial Sequence: Synthetic oligonucleotide
  Antisense strand to SEQ ID NO: 1424560
guucacauucuuaacuauu

SEQ ID NO: 1424562 - RNA, 19 nt, Artificial Sequence
  Description of Artificial Sequence: Synthetic oligonucleotide
  Sense strand starting at position 889 of SEQ ID NO: 1243558
gaaguuggccuuuggaaau

SEQ ID NO: 1424563 - RNA, 19 nt, Artificial Sequence
  Description of Artificial Sequence: Synthetic oligonucleotide
  Antisense strand to SEQ ID NO: 1424562
auuuccaaaggccaacuuc

SEQ ID NO: 1424564 - RNA, 19 nt, Artificial Sequence
  Description of Artificial Sequence: Synthetic oligonucleotide
  Sense strand starting at position 988 of SEQ ID NO: 1243558
gcgugcuacacguuaggaa

SEQ ID NO: 1424565 - RNA, 19 nt, Artificial Sequence
  Description of Artificial Sequence: Synthetic oligonucleotide
  Antisense strand to SEQ ID NO: 1424564
uuccuaacguguagcacgc

SEQ ID NO: 1424566 - RNA, 19 nt, Artificial Sequence
  Description of Artificial Sequence: Synthetic oligonucleotide
  Sense strand starting at position 1038 of SEQ ID NO: 1243558
guguuaagaugauuaauga

SEQ ID NO: 1424567 - RNA, 19 nt, Artificial Sequence
  Description of Artificial Sequence: Synthetic oligonucleotide
  Antisense strand to SEQ ID NO: 1424566
ucauuaaucaucuuaacac

SEQ ID NO: 1424568 - RNA, 19 nt, Artificial Sequence
  Description of Artificial Sequence: Synthetic oligonucleotide
  Sense strand starting at position 1048 of SEQ ID NO: 1243558
gauuaaugagcaggcgauu

SEQ ID NO: 1424569 - RNA, 19 nt, Artificial Sequence
  Description of Artificial Sequence: Synthetic oligonucleotide
  Antisense strand to SEQ ID NO: 1424568
aaucgccugcucauuaauc

SEQ ID NO: 1424570 - RNA, 19 nt, Artificial Sequence
  Description of Artificial Sequence: Synthetic oligonucleotide
  Sense strand starting at position 1051 of SEQ ID NO: 1243558
uaaugagcaggcgauuaua

SEQ ID NO: 1424571 - RNA, 19 nt, Artificial Sequence
  Description of Artificial Sequence: Synthetic oligonucleotide
  Antisense strand to SEQ ID NO: 1424570
uauaaucgccugcucauua

SEQ ID NO: 1424572 - RNA, 19 nt, Artificial Sequence
  Description of Artificial Sequence: Synthetic oligonucleotide
  Sense strand starting at position 1246 of SEQ ID NO: 1243558
cgguuaauuuggucugcuu

SEQ ID NO: 1424573 - RNA, 19 nt, Artificial Sequence
  Description of Artificial Sequence: Synthetic oligonucleotide
  Antisense strand to SEQ ID NO: 1424572
aagcagaccaaauuaaccg

SEQ ID NO: 1424574 - RNA, 19 nt, Artificial Sequence
  Description of Artificial Sequence: Synthetic oligonucleotide
  Sense strand starting at position 1353 of SEQ ID NO: 1243558
aucgcuauuugcucaaauu

SEQ ID NO: 1424575 - RNA, 19 nt, Artificial Sequence
  Description of Artificial Sequence: Synthetic oligonucleotide
  Antisense strand to SEQ ID NO: 1424574
aauuugagcaaauagcgau

SEQ ID NO: 1424576 - RNA, 19 nt, Artificial Sequence
  Description of Artificial Sequence: Synthetic oligonucleotide
  Sense strand starting at position 1354 of SEQ ID NO: 1243558
ucgcuauuugcucaaauuc

SEQ ID NO: 1424577 - RNA, 19 nt, Artificial Sequence
  Description of Artificial Sequence: Synthetic oligonucleotide
  Antisense strand to SEQ ID NO: 1424576
gaauuugagcaaauagcga

SEQ ID NO: 1424578 - RNA, 19 nt, Artificial Sequence
  Description of Artificial Sequence: Synthetic oligonucleotide
  Sense strand starting at position 3053 of SEQ ID NO: 1243558
gccagaaugcccuauuccu

SEQ ID NO: 1424579 - RNA, 19 nt, Artificial Sequence
  Description of Artificial Sequence: Synthetic oligonucleotide
  Antisense strand to SEQ ID NO: 1424578
aggaauagggcauucuggc

SEQ ID NO: 1424580 - RNA, 19 nt, Artificial Sequence
  Description of Artificial Sequence: Synthetic oligonucleotide
  Sense strand starting at position 3112 of SEQ ID NO: 1243558
cguagucuuccggcugagu

SEQ ID NO: 1424581 - RNA, 19 nt, Artificial Sequence
  Description of Artificial Sequence: Synthetic oligonucleotide
  Antisense strand to SEQ ID NO: 1424580
acucagccggaagacuacg

SEQ ID NO: 1424582 - RNA, 19 nt, Artificial Sequence
  Description of Artificial Sequence: Synthetic oligonucleotide
  Sense strand starting at position 3115 of SEQ ID NO: 1243558
agucuuccggcugaguaga

SEQ ID NO: 1424583 - RNA, 19 nt, Artificial Sequence
  Description of Artificial Sequence: Synthetic oligonucleotide
  Antisense strand to SEQ ID NO: 1424582
ucuacucagccggaagacu

SEQ ID NO: 1424584 - RNA, 19 nt, Artificial Sequence
  Description of Artificial Sequence: Synthetic oligonucleotide
  Sense strand starting at position 3125 of SEQ ID NO: 1243558
cugaguagauucuccuagu

SEQ ID NO: 1424585 - RNA, 19 nt, Artificial Sequence
  Description of Artificial Sequence: Synthetic oligonucleotide
  Antisense strand to SEQ ID NO: 1424584
acuaggagaaucuacucag

SEQ ID NO: 1424586 - RNA, 19 nt, Artificial Sequence
  Description of Artificial Sequence: Synthetic oligonucleotide
  Sense strand starting at position 3126 of SEQ ID NO: 1243558
ugaguagauucuccuaguc

SEQ ID NO: 1424587 - RNA, 19 nt, Artificial Sequence
  Description of Artificial Sequence: Synthetic oligonucleotide
  Antisense strand to SEQ ID NO: 1424586
gacuaggagaaucuacuca

SEQ ID NO: 1424588 - RNA, 19 nt, Artificial Sequence
  Description of Artificial Sequence: Synthetic oligonucleotide
  Sense strand starting at position 3141 of SEQ ID NO: 1243558
agucuucuggcugaguaga

SEQ ID NO: 1424589 - RNA, 19 nt, Artificial Sequence
  Description of Artificial Sequence: Synthetic oligonucleotide
  Antisense strand to SEQ ID NO: 1424588
ucuacucagccagaagacu

SEQ ID NO: 1424590 - RNA, 19 nt, Artificial Sequence
  Description of Artificial Sequence: Synthetic oligonucleotide
  Sense strand starting at position 3167 of SEQ ID NO: 1243558
agaggaggugggugucaaa

SEQ ID NO: 1424591 - RNA, 19 nt, Artificial Sequence
  Description of Artificial Sequence: Synthetic oligonucleotide
  Antisense strand to SEQ ID NO: 1424590
uuugacacccaccuccucu

SEQ ID NO: 1424592 - RNA, 19 nt, Artificial Sequence
  Description of Artificial Sequence: Synthetic oligonucleotide
  Sense strand starting at position 3204 of SEQ ID NO: 1243558
ccgccaucuagcuugguua

SEQ ID NO: 1424593 - RNA, 19 nt, Artificial Sequence
  Description of Artificial Sequence: Synthetic oligonucleotide
  Antisense strand to SEQ ID NO: 1424592
uaaccaagcuagauggcgg

SEQ ID NO: 1424594 - RNA, 19 nt, Artificial Sequence
  Description of Artificial Sequence: Synthetic oligonucleotide
  Sense strand starting at position 3207 of SEQ ID NO: 1243558
ccaucuagcuugguuaaac

SEQ ID NO: 1424595 - RNA, 19 nt, Artificial Sequence
  Description of Artificial Sequence: Synthetic oligonucleotide
  Antisense strand to SEQ ID NO: 1424594
guuuaaccaagcuagaugg

SEQ ID NO: 1424596 - RNA, 19 nt, Artificial Sequence
  Description of Artificial Sequence: Synthetic oligonucleotide
  Sense strand starting at position 3261 of SEQ ID NO: 1243558
cagugagacguguggaaca

SEQ ID NO: 1424597 - RNA, 19 nt, Artificial Sequence
  Description of Artificial Sequence: Synthetic oligonucleotide
  Antisense strand to SEQ ID NO: 1424596
uguuccacacgucucacug

SEQ ID NO: 1424598 - RNA, 19 nt, Artificial Sequence
  Description of Artificial Sequence: Synthetic oligonucleotide
  Sense strand starting at position 3263 of SEQ ID NO: 1243558
gugagacguguggaacaaa

SEQ ID NO: 1424599 - RNA, 19 nt, Artificial Sequence
  Description of Artificial Sequence: Synthetic oligonucleotide
  Antisense strand to SEQ ID NO: 1424598
uuuguuccacacgucucac

SEQ ID NO: 1424600 - RNA, 19 nt, Artificial Sequence
  Description of Artificial Sequence: Synthetic oligonucleotide
  Sense strand starting at position 3298 of SEQ ID NO: 1243558
gcagaaacaucccugauug

SEQ ID NO: 1424601 - RNA, 19 nt, Artificial Sequence
  Description of Artificial Sequence: Synthetic oligonucleotide
  Antisense strand to SEQ ID NO: 1424600
caaucagggauguuucugc

SEQ ID NO: 1424602 - RNA, 19 nt, Artificial Sequence
  Description of Artificial Sequence: Synthetic oligonucleotide
  Sense strand starting at position 3300 of SEQ ID NO: 1243558
agaaacaucccugauugcu

SEQ ID NO: 1424603 - RNA, 19 nt, Artificial Sequence
  Description of Artificial Sequence: Synthetic oligonucleotide
  Antisense strand to SEQ ID NO: 1424602
agcaaucagggauguuucu

SEQ ID NO: 1424604 - RNA, 19 nt, Artificial Sequence
  Description of Artificial Sequence: Synthetic oligonucleotide
  Sense strand starting at position 3657 of SEQ ID NO: 1243558
ucccuaggccuuugaaauc

SEQ ID NO: 1424605 - RNA, 19 nt, Artificial Sequence
  Description of Artificial Sequence: Synthetic oligonucleotide
  Antisense strand to SEQ ID NO: 1424604
gauuucaaaggccuaggga

SEQ ID NO: 1424606 - RNA, 19 nt, Artificial Sequence
  Description of Artificial Sequence: Synthetic oligonucleotide
  Sense strand starting at position 3666 of SEQ ID NO: 1243558
cuuugaaauccuggagauu

SEQ ID NO: 1424607 - RNA, 19 nt, Artificial Sequence
  Description of Artificial Sequence: Synthetic oligonucleotide
  Antisense strand to SEQ ID NO: 1424606
aaucuccaggauuucaaag

SEQ ID NO: 1424608 - RNA, 19 nt, Artificial Sequence
  Description of Artificial Sequence: Synthetic oligonucleotide
  Sense strand starting at position 3716 of SEQ ID NO: 1243558
ugauucucauccuucuagu

SEQ ID NO: 1424609 - RNA, 19 nt, Artificial Sequence
  Description of Artificial Sequence: Synthetic oligonucleotide
  Antisense strand to SEQ ID NO: 1424608
acuagaaggaugagaauca

SEQ ID NO: 1424610 - RNA, 19 nt, Artificial Sequence
  Description of Artificial Sequence: Synthetic oligonucleotide
  Sense strand starting at position 3775 of SEQ ID NO: 1243558
cugaaaugucuuggaaaca

SEQ ID NO: 1424611 - RNA, 19 nt, Artificial Sequence
  Description of Artificial Sequence: Synthetic oligonucleotide
  Antisense strand to SEQ ID NO: 1424610
uguuuccaagacauuucag

SEQ ID NO: 1424612 - RNA, 19 nt, Artificial Sequence
  Description of Artificial Sequence: Synthetic oligonucleotide
  Sense strand starting at position 3816 of SEQ ID NO: 1243558
gcugaaggcugaguuuaag

SEQ ID NO: 1424613 - RNA, 19 nt, Artificial Sequence
  Description of Artificial Sequence: Synthetic oligonucleotide
  Antisense strand to SEQ ID NO: 1424612
cuuaaacucagccuucagc

SEQ ID NO: 1424614 - RNA, 19 nt, Artificial Sequence
  Description of Artificial Sequence: Synthetic oligonucleotide
  Sense strand starting at position 3898 of SEQ ID NO: 1243558
gacucaaugugucugcaaa

SEQ ID NO: 1424615 - RNA, 19 nt, Artificial Sequence
  Description of Artificial Sequence: Synthetic oligonucleotide
  Antisense strand to SEQ ID NO: 1424614
uuugcagacacauugaguc

SEQ ID NO: 1424616 - RNA, 19 nt, Artificial Sequence
  Description of Artificial Sequence: Synthetic oligonucleotide
  Sense strand starting at position 3936 of SEQ ID NO: 1243558
guauuuguaagcuguugau

SEQ ID NO: 1424617 - RNA, 19 nt, Artificial Sequence
  Description of Artificial Sequence: Synthetic oligonucleotide
  Antisense strand to SEQ ID NO: 1424616
aucaacagcuuacaaauac

SEQ ID NO: 1424618 - RNA, 19 nt, Artificial Sequence
  Description of Artificial Sequence: Synthetic oligonucleotide
  Sense strand starting at position 3940 of SEQ ID NO: 1243558
uuguaagcuguugaugauu

SEQ ID NO: 1424619 - RNA, 19 nt, Artificial Sequence
  Description of Artificial Sequence: Synthetic oligonucleotide
  Antisense strand to SEQ ID NO: 1424618
aaucaucaacagcuuacaa

SEQ ID NO: 1424620 - RNA, 19 nt, Artificial Sequence
  Description of Artificial Sequence: Synthetic oligonucleotide
  Sense strand starting at position 294 of SEQ ID NO: 1243559
agucaacagagaugucaga

SEQ ID NO: 1424621 - RNA, 19 nt, Artificial Sequence
  Description of Artificial Sequence: Synthetic oligonucleotide
  Antisense strand to SEQ ID NO: 1424620
ucugacaucucuguugacu

SEQ ID NO: 1424622 - RNA, 19 nt, Artificial Sequence
  Description of Artificial Sequence: Synthetic oligonucleotide
  Sense strand starting at position 413 of SEQ ID NO: 1243559
aaaggaucaguguggccau

SEQ ID NO: 1424623 - RNA, 19 nt, Artificial Sequence
  Description of Artificial Sequence: Synthetic oligonucleotide
  Antisense strand to SEQ ID NO: 1424622
auggccacacugauccuuu

SEQ ID NO: 1424624 - RNA, 19 nt, Artificial Sequence
  Description of Artificial Sequence: Synthetic oligonucleotide
  Sense strand starting at position 474 of SEQ ID NO: 1243559
ggacccucucgagaucuca

SEQ ID NO: 1424625 - RNA, 19 nt, Artificial Sequence
  Description of Artificial Sequence: Synthetic oligonucleotide
  Antisense strand to SEQ ID NO: 1424624
ugagaucucgagagggucc

SEQ ID NO: 1424626 - RNA, 19 nt, Artificial Sequence
  Description of Artificial Sequence: Synthetic oligonucleotide
  Sense strand starting at position 678 of SEQ ID NO: 1243559
gccugaacgugcucugaac

SEQ ID NO: 1424627 - RNA, 19 nt, Artificial Sequence
  Description of Artificial Sequence: Synthetic oligonucleotide
  Antisense strand to SEQ ID NO: 1424626
guucagagcacguucaggc

SEQ ID NO: 1424628 - RNA, 19 nt, Artificial Sequence
  Description of Artificial Sequence: Synthetic oligonucleotide
  Sense strand starting at position 1033 of SEQ ID NO: 1243559
aguguuagcagcuggcaaa

SEQ ID NO: 1424629 - RNA, 19 nt, Artificial Sequence
  Description of Artificial Sequence: Synthetic oligonucleotide
  Antisense strand to SEQ ID NO: 1424628
uuugccagcugcuaacacu

SEQ ID NO: 1424630 - RNA, 19 nt, Artificial Sequence
  Description of Artificial Sequence: Synthetic oligonucleotide
  Sense strand starting at position 1334 of SEQ ID NO: 1243559
gcgguuuccugucugccaa

SEQ ID NO: 1424631 - RNA, 19 nt, Artificial Sequence
  Description of Artificial Sequence: Synthetic oligonucleotide
  Antisense strand to SEQ ID NO: 1424630
uuggcagacaggaaaccgc

SEQ ID NO: 1424632 - RNA, 19 nt, Artificial Sequence
  Description of Artificial Sequence: Synthetic oligonucleotide
  Sense strand starting at position 1335 of SEQ ID NO: 1243559
cgguuuccugucugccaau

SEQ ID NO: 1424633 - RNA, 19 nt, Artificial Sequence
  Description of Artificial Sequence: Synthetic oligonucleotide
  Antisense strand to SEQ ID NO: 1424632
auuggcagacaggaaaccg

SEQ ID NO: 1424634 - RNA, 19 nt, Artificial Sequence
  Description of Artificial Sequence: Synthetic oligonucleotide
  Sense strand starting at position 1336 of SEQ ID NO: 1243559
gguuuccugucugccaauu

SEQ ID NO: 1424635 - RNA, 19 nt, Artificial Sequence
  Description of Artificial Sequence: Synthetic oligonucleotide
  Antisense strand to SEQ ID NO: 1424634
aauuggcagacaggaaacc

SEQ ID NO: 1424636 - RNA, 19 nt, Artificial Sequence
  Description of Artificial Sequence: Synthetic oligonucleotide
  Sense strand starting at position 2259 of SEQ ID NO: 1243559
cgccucuuaccgugggaga

SEQ ID NO: 1424637 - RNA, 19 nt, Artificial Sequence
  Description of Artificial Sequence: Synthetic oligonucleotide
  Antisense strand to SEQ ID NO: 1424636
ucucccacgguaagaggcg

SEQ ID NO: 1424638 - RNA, 19 nt, Artificial Sequence
  Description of Artificial Sequence: Synthetic oligonucleotide
  Sense strand starting at position 3192 of SEQ ID NO: 1243559
gcucauuugugaugcuguu

SEQ ID NO: 1424639 - RNA, 19 nt, Artificial Sequence
  Description of Artificial Sequence: Synthetic oligonucleotide
  Antisense strand to SEQ ID NO: 1424638
aacagcaucacaaaugagc

SEQ ID NO: 1424640 - RNA, 19 nt, Artificial Sequence
  Description of Artificial Sequence: Synthetic oligonucleotide
  Sense strand starting at position 3198 of SEQ ID NO: 1243559
uugugaugcuguuugcagu

SEQ ID NO: 1424641 - RNA, 19 nt, Artificial Sequence
  Description of Artificial Sequence: Synthetic oligonucleotide
  Antisense strand to SEQ ID NO: 1424640
acugcaaacagcaucacaa

SEQ ID NO: 1424642 - RNA, 19 nt, Artificial Sequence
  Description of Artificial Sequence: Synthetic oligonucleotide
  Sense strand starting at position 3205 of SEQ ID NO: 1243559
gcuguuugcagucgucuua

SEQ ID NO: 1424643 - RNA, 19 nt, Artificial Sequence
  Description of Artificial Sequence: Synthetic oligonucleotide
  Antisense strand to SEQ ID NO: 1424642
uaagacgacugcaaacagc

SEQ ID NO: 1424644 - RNA, 19 nt, Artificial Sequence
  Description of Artificial Sequence: Synthetic oligonucleotide
  Sense strand starting at position 3212 of SEQ ID NO: 1243559
gcagucgucuuaggaagga

SEQ ID NO: 1424645 - RNA, 19 nt, Artificial Sequence
  Description of Artificial Sequence: Synthetic oligonucleotide
  Antisense strand to SEQ ID NO: 1424644
uccuuccuaagacgacugc

SEQ ID NO: 1424646 - RNA, 19 nt, Artificial Sequence
  Description of Artificial Sequence: Synthetic oligonucleotide
  Sense strand starting at position 3356 of SEQ ID NO: 1243559
ggagaagccucguuccuga

SEQ ID NO: 1424647 - RNA, 19 nt, Artificial Sequence
  Description of Artificial Sequence: Synthetic oligonucleotide
  Antisense strand to SEQ ID NO: 1424646
ucaggaacgaggcuucucc

SEQ ID NO: 1424648 - RNA, 19 nt, Artificial Sequence
  Description of Artificial Sequence: Synthetic oligonucleotide
  Sense strand starting at position 3428 of SEQ ID NO: 1243559
agaaauccugccuggauua

SEQ ID NO: 1424649 - RNA, 19 nt, Artificial Sequence
  Description of Artificial Sequence: Synthetic oligonucleotide
  Antisense strand to SEQ ID NO: 1424648
uaauccaggcaggauuucu

SEQ ID NO: 1424650 - RNA, 19 nt, Artificial Sequence
  Description of Artificial Sequence: Synthetic oligonucleotide
  Sense strand starting at position 3440 of SEQ ID NO: 1243559
uggauuauauuucgucuuu

SEQ ID NO: 1424651 - RNA, 19 nt, Artificial Sequence
  Description of Artificial Sequence: Synthetic oligonucleotide
  Antisense strand to SEQ ID NO: 1424650
aaagacgaaauauaaucca

SEQ ID NO: 1424652 - RNA, 19 nt, Artificial Sequence
  Description of Artificial Sequence: Synthetic oligonucleotide
  Sense strand starting at position 3441 of SEQ ID NO: 1243559
ggauuauauuucgucuuuc

SEQ ID NO: 1424653 - RNA, 19 nt, Artificial Sequence
  Description of Artificial Sequence: Synthetic oligonucleotide
  Antisense strand to SEQ ID NO: 1424652
gaaagacgaaauauaaucc

SEQ ID NO: 1424654 - RNA, 19 nt, Artificial Sequence
  Description of Artificial Sequence: Synthetic oligonucleotide
  Sense strand starting at position 3452 of SEQ ID NO: 1243559
cgucuuucucucugaggca

SEQ ID NO: 1424655 - RNA, 19 nt, Artificial Sequence
  Description of Artificial Sequence: Synthetic oligonucleotide
  Antisense strand to SEQ ID NO: 1424654
ugccucagagagaaagacg

SEQ ID NO: 1424656 - RNA, 19 nt, Artificial Sequence
  Description of Artificial Sequence: Synthetic oligonucleotide
  Sense strand starting at position 3453 of SEQ ID NO: 1243559
gucuuucucucugaggcau

SEQ ID NO: 1424657 - RNA, 19 nt, Artificial Sequence
  Description of Artificial Sequence: Synthetic oligonucleotide
  Antisense strand to SEQ ID NO: 1424656
augccucagagagaaagac

SEQ ID NO: 1424658 - RNA, 19 nt, Artificial Sequence
  Description of Artificial Sequence: Synthetic oligonucleotide
  Sense strand starting at position 3459 of SEQ ID NO: 1243559
cucucugaggcauagacuu

SEQ ID NO: 1424659 - RNA, 19 nt, Artificial Sequence
  Description of Artificial Sequence: Synthetic oligonucleotide
  Antisense strand to SEQ ID NO: 1424658
aagucuaugccucagagag

SEQ ID NO: 1424660 - RNA, 19 nt, Artificial Sequence
  Description of Artificial Sequence: Synthetic oligonucleotide
  Sense strand starting at position 3489 of SEQ ID NO: 1243559
acuuaacagcuagggauaa

SEQ ID NO: 1424661 - RNA, 19 nt, Artificial Sequence
  Description of Artificial Sequence: Synthetic oligonucleotide
  Antisense strand to SEQ ID NO: 1424660
uuaucccuagcuguuaagu

SEQ ID NO: 1424662 - RNA, 19 nt, Artificial Sequence
  Description of Artificial Sequence: Synthetic oligonucleotide
  Sense strand starting at position 3490 of SEQ ID NO: 1243559
cuuaacagcuagggauaaa

SEQ ID NO: 1424663 - RNA, 19 nt, Artificial Sequence
  Description of Artificial Sequence: Synthetic oligonucleotide
  Antisense strand to SEQ ID NO: 1424662
uuuaucccuagcuguuaag

SEQ ID NO: 1424664 - RNA, 19 nt, Artificial Sequence
  Description of Artificial Sequence: Synthetic oligonucleotide
  Sense strand starting at position 3827 of SEQ ID NO: 1243559
accauucugugguuccaau

SEQ ID NO: 1424665 - RNA, 19 nt, Artificial Sequence
  Description of Artificial Sequence: Synthetic oligonucleotide
  Antisense strand to SEQ ID NO: 1424664
auuggaaccacagaauggu

SEQ ID NO: 1424666 - RNA, 19 nt, Artificial Sequence
  Description of Artificial Sequence: Synthetic oligonucleotide
  Sense strand starting at position 3845 of SEQ ID NO: 1243559
ugaccugugccuugucaga

SEQ ID NO: 1424667 - RNA, 19 nt, Artificial Sequence
  Description of Artificial Sequence: Synthetic oligonucleotide
  Antisense strand to SEQ ID NO: 1424666
ucugacaaggcacagguca

SEQ ID NO: 1424668 - RNA, 19 nt, Artificial Sequence
  Description of Artificial Sequence: Synthetic oligonucleotide
  Sense strand starting at position 3874 of SEQ ID NO: 1243559
agccuugaaagguaacagu

SEQ ID NO: 1424669 - RNA, 19 nt, Artificial Sequence
  Description of Artificial Sequence: Synthetic oligonucleotide
  Antisense strand to SEQ ID NO: 1424668
acuguuaccuuucaaggcu

SEQ ID NO: 1424670 - RNA, 19 nt, Artificial Sequence
  Description of Artificial Sequence: Synthetic oligonucleotide
  Sense strand starting at position 3900 of SEQ ID NO: 1243559
uccugugugcacuggaaau

SEQ ID NO: 1424671 - RNA, 19 nt, Artificial Sequence
  Description of Artificial Sequence: Synthetic oligonucleotide
  Antisense strand to SEQ ID NO: 1424670
auuuccagugcacacagga

SEQ ID NO: 1424672 - RNA, 19 nt, Artificial Sequence
  Description of Artificial Sequence: Synthetic oligonucleotide
  Sense strand starting at position 3924 of SEQ ID NO: 1243559
acucgcagguucugggaaa

SEQ ID NO: 1424673 - RNA, 19 nt, Artificial Sequence
  Description of Artificial Sequence: Synthetic oligonucleotide
  Antisense strand to SEQ ID NO: 1424672
uuucccagaaccugcgagu

SEQ ID NO: 1424674 - RNA, 19 nt, Artificial Sequence
  Description of Artificial Sequence: Synthetic oligonucleotide
  Sense strand starting at position 3942 of SEQ ID NO: 1243559
agggauuucucggaacuua

SEQ ID NO: 1424675 - RNA, 19 nt, Artificial Sequence
  Description of Artificial Sequence: Synthetic oligonucleotide
  Antisense strand to SEQ ID NO: 1424674
uaaguuccgagaaaucccu

SEQ ID NO: 1424676 - RNA, 19 nt, Artificial Sequence
  Description of Artificial Sequence: Synthetic oligonucleotide
  Sense strand starting at position 3953 of SEQ ID NO: 1243559
ggaacuuaaaccgggaagu

SEQ ID NO: 1424677 - RNA, 19 nt, Artificial Sequence
  Description of Artificial Sequence: Synthetic oligonucleotide
  Antisense strand to SEQ ID NO: 1424676
acuucccgguuuaaguucc

SEQ ID NO: 1424678 - RNA, 19 nt, Artificial Sequence
  Description of Artificial Sequence: Synthetic oligonucleotide
  Sense strand starting at position 119 of SEQ ID NO: 1243560
gccugaacgugcucugaac

SEQ ID NO: 1424679 - RNA, 19 nt, Artificial Sequence
  Description of Artificial Sequence: Synthetic oligonucleotide
  Antisense strand to SEQ ID NO: 1424678
guucagagcacguucaggc

SEQ ID NO: 1424680 - RNA, 19 nt, Artificial Sequence
  Description of Artificial Sequence: Synthetic oligonucleotide
  Sense strand starting at position 474 of SEQ ID NO: 1243560
aguguuagcagcuggcaaa

SEQ ID NO: 1424681 - RNA, 19 nt, Artificial Sequence
  Description of Artificial Sequence: Synthetic oligonucleotide
  Antisense strand to SEQ ID NO: 1424680
uuugccagcugcuaacacu

SEQ ID NO: 1424682 - RNA, 19 nt, Artificial Sequence
  Description of Artificial Sequence: Synthetic oligonucleotide
  Sense strand starting at position 775 of SEQ ID NO: 1243560
gcgguuuccugucugccaa

SEQ ID NO: 1424683 - RNA, 19 nt, Artificial Sequence
  Description of Artificial Sequence: Synthetic oligonucleotide
  Antisense strand to SEQ ID NO: 1424682
uuggcagacaggaaaccgc

SEQ ID NO: 1424684 - RNA, 19 nt, Artificial Sequence
  Description of Artificial Sequence: Synthetic oligonucleotide
  Sense strand starting at position 776 of SEQ ID NO: 1243560
cgguuuccugucugccaau

SEQ ID NO: 1424685 - RNA, 19 nt, Artificial Sequence
  Description of Artificial Sequence: Synthetic oligonucleotide
  Antisense strand to SEQ ID NO: 1424684
auuggcagacaggaaaccg

SEQ ID NO: 1424686 - RNA, 19 nt, Artificial Sequence
  Description of Artificial Sequence: Synthetic oligonucleotide
  Sense strand starting at position 777 of SEQ ID NO: 1243560
gguuuccugucugccaauu

SEQ ID NO: 1424687 - RNA, 19 nt, Artificial Sequence
  Description of Artificial Sequence: Synthetic oligonucleotide
  Antisense strand to SEQ ID NO: 1424686
aauuggcagacaggaaacc

SEQ ID NO: 1424688 - RNA, 19 nt, Artificial Sequence
  Description of Artificial Sequence: Synthetic oligonucleotide
  Sense strand starting at position 1700 of SEQ ID NO: 1243560
cgccucuuaccgugggaga

SEQ ID NO: 1424689 - RNA, 19 nt, Artificial Sequence
  Description of Artificial Sequence: Synthetic oligonucleotide
  Antisense strand to SEQ ID NO: 1424688
ucucccacgguaagaggcg

SEQ ID NO: 1424690 - RNA, 19 nt, Artificial Sequence
  Description of Artificial Sequence: Synthetic oligonucleotide
  Sense strand starting at position 2633 of SEQ ID NO: 1243560
gcucauuugugaugcuguu

SEQ ID NO: 1424691 - RNA, 19 nt, Artificial Sequence
  Description of Artificial Sequence: Synthetic oligonucleotide
  Antisense strand to SEQ ID NO: 1424690
aacagcaucacaaaugagc

SEQ ID NO: 1424692 - RNA, 19 nt, Artificial Sequence
  Description of Artificial Sequence: Synthetic oligonucleotide
  Sense strand starting at position 2639 of SEQ ID NO: 1243560
uugugaugcuguuugcagu

SEQ ID NO: 1424693 - RNA, 19 nt, Artificial Sequence
  Description of Artificial Sequence: Synthetic oligonucleotide
  Antisense strand to SEQ ID NO: 1424692
acugcaaacagcaucacaa

SEQ ID NO: 1424694 - RNA, 19 nt, Artificial Sequence
  Description of Artificial Sequence: Synthetic oligonucleotide
  Sense strand starting at position 2646 of SEQ ID NO: 1243560
gcuguuugcagucgucuua

SEQ ID NO: 1424695 - RNA, 19 nt, Artificial Sequence
  Description of Artificial Sequence: Synthetic oligonucleotide
  Antisense strand to SEQ ID NO: 1424694
uaagacgacugcaaacagc

SEQ ID NO: 1424696 - RNA, 19 nt, Artificial Sequence
  Description of Artificial Sequence: Synthetic oligonucleotide
  Sense strand starting at position 2653 of SEQ ID NO: 1243560
gcagucgucuuaggaagga

SEQ ID NO: 1424697 - RNA, 19 nt, Artificial Sequence
  Description of Artificial Sequence: Synthetic oligonucleotide
  Antisense strand to SEQ ID NO: 1424696
uccuuccuaagacgacugc

SEQ ID NO: 1424698 - RNA, 19 nt, Artificial Sequence
  Description of Artificial Sequence: Synthetic oligonucleotide
  Sense strand starting at position 2797 of SEQ ID NO: 1243560
ggagaagccucguuccuga

SEQ ID NO: 1424699 - RNA, 19 nt, Artificial Sequence
  Description of Artificial Sequence: Synthetic oligonucleotide
  Antisense strand to SEQ ID NO: 1424698
ucaggaacgaggcuucucc

SEQ ID NO: 1424700 - RNA, 19 nt, Artificial Sequence
  Description of Artificial Sequence: Synthetic oligonucleotide
  Sense strand starting at position 2869 of SEQ ID NO: 1243560
agaaauccugccuggauua

SEQ ID NO: 1424701 - RNA, 19 nt, Artificial Sequence
  Description of Artificial Sequence: Synthetic oligonucleotide
  Antisense strand to SEQ ID NO: 1424700
uaauccaggcaggauuucu

SEQ ID NO: 1424702 - RNA, 19 nt, Artificial Sequence
  Description of Artificial Sequence: Synthetic oligonucleotide
  Sense strand starting at position 2881 of SEQ ID NO: 1243560
uggauuauauuucgucuuu

SEQ ID NO: 1424703 - RNA, 19 nt, Artificial Sequence
  Description of Artificial Sequence: Synthetic oligonucleotide
  Antisense strand to SEQ ID NO: 1424702
aaagacgaaauauaaucca

SEQ ID NO: 1424704 - RNA, 19 nt, Artificial Sequence
  Description of Artificial Sequence: Synthetic oligonucleotide
  Sense strand starting at position 2882 of SEQ ID NO: 1243560
ggauuauauuucgucuuuc

SEQ ID NO: 1424705 - RNA, 19 nt, Artificial Sequence
  Description of Artificial Sequence: Synthetic oligonucleotide
  Antisense strand to SEQ ID NO: 1424704
gaaagacgaaauauaaucc

SEQ ID NO: 1424706 - RNA, 19 nt, Artificial Sequence
  Description of Artificial Sequence: Synthetic oligonucleotide
  Sense strand starting at position 2893 of SEQ ID NO: 1243560
cgucuuucucucugaggca

SEQ ID NO: 1424707 - RNA, 19 nt, Artificial Sequence
  Description of Artificial Sequence: Synthetic oligonucleotide
  Antisense strand to SEQ ID NO: 1424706
ugccucagagagaaagacg

SEQ ID NO: 1424708 - RNA, 19 nt, Artificial Sequence
  Description of Artificial Sequence: Synthetic oligonucleotide
  Sense strand starting at position 2894 of SEQ ID NO: 1243560
gucuuucucucugaggcau

SEQ ID NO: 1424709 - RNA, 19 nt, Artificial Sequence
  Description of Artificial Sequence: Synthetic oligonucleotide
  Antisense strand to SEQ ID NO: 1424708
augccucagagagaaagac

SEQ ID NO: 1424710 - RNA, 19 nt, Artificial Sequence
  Description of Artificial Sequence: Synthetic oligonucleotide
  Sense strand starting at position 2900 of SEQ ID NO: 1243560
cucucugaggcauagacuu

SEQ ID NO: 1424711 - RNA, 19 nt, Artificial Sequence
  Description of Artificial Sequence: Synthetic oligonucleotide
  Antisense strand to SEQ ID NO: 1424710
aagucuaugccucagagag

SEQ ID NO: 1424712 - RNA, 19 nt, Artificial Sequence
  Description of Artificial Sequence: Synthetic oligonucleotide
  Sense strand starting at position 2930 of SEQ ID NO: 1243560
acuuaacagcuagggauaa

SEQ ID NO: 1424713 - RNA, 19 nt, Artificial Sequence
  Description of Artificial Sequence: Synthetic oligonucleotide
  Antisense strand to SEQ ID NO: 1424712
uuaucccuagcuguuaagu

SEQ ID NO: 1424714 - RNA, 19 nt, Artificial Sequence
  Description of Artificial Sequence: Synthetic oligonucleotide
  Sense strand starting at position 2931 of SEQ ID NO: 1243560
cuuaacagcuagggauaaa

SEQ ID NO: 1424715 - RNA, 19 nt, Artificial Sequence
  Description of Artificial Sequence: Synthetic oligonucleotide
  Antisense strand to SEQ ID NO: 1424714
uuuaucccuagcuguuaag

SEQ ID NO: 1424716 - RNA, 19 nt, Artificial Sequence
  Description of Artificial Sequence: Synthetic oligonucleotide
  Sense strand starting at position 3268 of SEQ ID NO: 1243560
accauucugugguuccaau

SEQ ID NO: 1424717 - RNA, 19 nt, Artificial Sequence
  Description of Artificial Sequence: Synthetic oligonucleotide
  Antisense strand to SEQ ID NO: 1424716
auuggaaccacagaauggu

SEQ ID NO: 1424718 - RNA, 19 nt, Artificial Sequence
  Description of Artificial Sequence: Synthetic oligonucleotide
  Sense strand starting at position 3286 of SEQ ID NO: 1243560
ugaccugugccuugucaga

SEQ ID NO: 1424719 - RNA, 19 nt, Artificial Sequence
  Description of Artificial Sequence: Synthetic oligonucleotide
  Antisense strand to SEQ ID NO: 1424718
ucugacaaggcacagguca

SEQ ID NO: 1424720 - RNA, 19 nt, Artificial Sequence
  Description of Artificial Sequence: Synthetic oligonucleotide
  Sense strand starting at position 3315 of SEQ ID NO: 1243560
agccuugaaagguaacagu

SEQ ID NO: 1424721 - RNA, 19 nt, Artificial Sequence
  Description of Artificial Sequence: Synthetic oligonucleotide
  Antisense strand to SEQ ID NO: 1424720
acuguuaccuuucaaggcu

SEQ ID NO: 1424722 - RNA, 19 nt, Artificial Sequence
  Description of Artificial Sequence: Synthetic oligonucleotide
  Sense strand starting at position 3341 of SEQ ID NO: 1243560
uccugugugcacuggaaau

SEQ ID NO: 1424723 - RNA, 19 nt, Artificial Sequence
  Description of Artificial Sequence: Synthetic oligonucleotide
  Antisense strand to SEQ ID NO: 1424722
auuuccagugcacacagga

SEQ ID NO: 1424724 - RNA, 19 nt, Artificial Sequence
  Description of Artificial Sequence: Synthetic oligonucleotide
  Sense strand starting at position 3365 of SEQ ID NO: 1243560
acucgcagguucugggaaa

SEQ ID NO: 1424725 - RNA, 19 nt, Artificial Sequence
  Description of Artificial Sequence: Synthetic oligonucleotide
  Antisense strand to SEQ ID NO: 1424724
uuucccagaaccugcgagu

SEQ ID NO: 1424726 - RNA, 19 nt, Artificial Sequence
  Description of Artificial Sequence: Synthetic oligonucleotide
  Sense strand starting at position 3383 of SEQ ID NO: 1243560
agggauuucucggaacuua

SEQ ID NO: 1424727 - RNA, 19 nt, Artificial Sequence
  Description of Artificial Sequence: Synthetic oligonucleotide
  Antisense strand to SEQ ID NO: 1424726
uaaguuccgagaaaucccu

SEQ ID NO: 1424728 - RNA, 19 nt, Artificial Sequence
  Description of Artificial Sequence: Synthetic oligonucleotide
  Sense strand starting at position 3394 of SEQ ID NO: 1243560
ggaacuuaaaccgggaagu

SEQ ID NO: 1424729 - RNA, 19 nt, Artificial Sequence
  Description of Artificial Sequence: Synthetic oligonucleotide
  Antisense strand to SEQ ID NO: 1424728
acuucccgguuuaaguucc

SEQ ID NO: 1424730 - RNA, 19 nt, Artificial Sequence
  Description of Artificial Sequence: Synthetic oligonucleotide
  Sense strand starting at position 3477 of SEQ ID NO: 1243560
augaaucacccuugaguug

SEQ ID NO: 1424731 - RNA, 19 nt, Artificial Sequence
  Description of Artificial Sequence: Synthetic oligonucleotide
  Antisense strand to SEQ ID NO: 1424730
caacucaagggugauucau

SEQ ID NO: 1424732 - RNA, 19 nt, Artificial Sequence
  Description of Artificial Sequence: Synthetic oligonucleotide
  Sense strand starting at position 3484 of SEQ ID NO: 1243560
acccuugaguugcacaaga

SEQ ID NO: 1424733 - RNA, 19 nt, Artificial Sequence
  Description of Artificial Sequence: Synthetic oligonucleotide
  Antisense strand to SEQ ID NO: 1424732
ucuugugcaacucaagggu

SEQ ID NO: 1424734 - RNA, 19 nt, Artificial Sequence
  Description of Artificial Sequence: Synthetic oligonucleotide
  Sense strand starting at position 3486 of SEQ ID NO: 1243560
ccuugaguugcacaagaag

SEQ ID NO: 1424735 - RNA, 19 nt, Artificial Sequence
  Description of Artificial Sequence: Synthetic oligonucleotide
  Antisense strand to SEQ ID NO: 1424734
cuucuugugcaacucaagg

SEQ ID NO: 1424736 - RNA, 19 nt, Artificial Sequence
  Description of Artificial Sequence: Synthetic oligonucleotide
  Sense strand starting at position 3580 of SEQ ID NO: 1243560
guuccugugcuggagagaa

SEQ ID NO: 1424737 - RNA, 19 nt, Artificial Sequence
  Description of Artificial Sequence: Synthetic oligonucleotide
  Antisense strand to SEQ ID NO: 1424736
uucucuccagcacaggaac

SEQ ID NO: 1424738 - RNA, 19 nt, Artificial Sequence
  Description of Artificial Sequence: Synthetic oligonucleotide
  Sense strand starting at position 3746 of SEQ ID NO: 1243560
gcucaaugucucugggugu

SEQ ID NO: 1424739 - RNA, 19 nt, Artificial Sequence
  Description of Artificial Sequence: Synthetic oligonucleotide
  Antisense strand to SEQ ID NO: 1424738
acacccagagacauugagc

SEQ ID NO: 1424740 - RNA, 19 nt, Artificial Sequence
  Description of Artificial Sequence: Synthetic oligonucleotide
  Sense strand starting at position 3747 of SEQ ID NO: 1243560
cucaaugucucugggugua

SEQ ID NO: 1424741 - RNA, 19 nt, Artificial Sequence
  Description of Artificial Sequence: Synthetic oligonucleotide
  Antisense strand to SEQ ID NO: 1424740
uacacccagagacauugag

SEQ ID NO: 1424742 - RNA, 19 nt, Artificial Sequence
  Description of Artificial Sequence: Synthetic oligonucleotide
  Sense strand starting at position 3757 of SEQ ID NO: 1243560
cuggguguaucucagagau

SEQ ID NO: 1424743 - RNA, 19 nt, Artificial Sequence
  Description of Artificial Sequence: Synthetic oligonucleotide
  Antisense strand to SEQ ID NO: 1424742
aucucugagauacacccag

SEQ ID NO: 1424744 - RNA, 19 nt, Artificial Sequence
  Description of Artificial Sequence: Synthetic oligonucleotide
  Sense strand starting at position 3759 of SEQ ID NO: 1243560
ggguguaucucagagauaa

SEQ ID NO: 1424745 - RNA, 19 nt, Artificial Sequence
  Description of Artificial Sequence: Synthetic oligonucleotide
  Antisense strand to SEQ ID NO: 1424744
uuaucucugagauacaccc

SEQ ID NO: 1424746 - RNA, 19 nt, Artificial Sequence
  Description of Artificial Sequence: Synthetic oligonucleotide
  Sense strand starting at position 3761 of SEQ ID NO: 1243560
guguaucucagagauaagc

SEQ ID NO: 1424747 - RNA, 19 nt, Artificial Sequence
  Description of Artificial Sequence: Synthetic oligonucleotide
  Antisense strand to SEQ ID NO: 1424746
gcuuaucucugagauacac

SEQ ID NO: 1424748 - RNA, 19 nt, Artificial Sequence
  Description of Artificial Sequence: Synthetic oligonucleotide
  Sense strand starting at position 3784 of SEQ ID NO: 1243560
ggugguguuccuugcuuau

SEQ ID NO: 1424749 - RNA, 19 nt, Artificial Sequence
  Description of Artificial Sequence: Synthetic oligonucleotide
  Antisense strand to SEQ ID NO: 1424748
auaagcaaggaacaccacc

SEQ ID NO: 1424750 - RNA, 19 nt, Artificial Sequence
  Description of Artificial Sequence: Synthetic oligonucleotide
  Sense strand starting at position 3811 of SEQ ID NO: 1243560
ggcaccuggccggaauaau

SEQ ID NO: 1424751 - RNA, 19 nt, Artificial Sequence
  Description of Artificial Sequence: Synthetic oligonucleotide
  Antisense strand to SEQ ID NO: 1424750
auuauuccggccaggugcc

SEQ ID NO: 1424752 - RNA, 19 nt, Artificial Sequence
  Description of Artificial Sequence: Synthetic oligonucleotide
  Sense strand starting at position 3894 of SEQ ID NO: 1243560
cggaauaccugaggagcau

SEQ ID NO: 1424753 - RNA, 19 nt, Artificial Sequence
  Description of Artificial Sequence: Synthetic oligonucleotide
  Antisense strand to SEQ ID NO: 1424752
augcuccucagguauuccg

SEQ ID NO: 1424754 - RNA, 19 nt, Artificial Sequence
  Description of Artificial Sequence: Synthetic oligonucleotide
  Sense strand starting at position 3905 of SEQ ID NO: 1243560
aggagcauccacuauaucu

SEQ ID NO: 1424755 - RNA, 19 nt, Artificial Sequence
  Description of Artificial Sequence: Synthetic oligonucleotide
  Antisense strand to SEQ ID NO: 1424754
agauauaguggaugcuccu

SEQ ID NO: 1424756 - RNA, 19 nt, Artificial Sequence
  Description of Artificial Sequence: Synthetic oligonucleotide
  Sense strand starting at position 3916 of SEQ ID NO: 1243560
cuauaucucccagguguua

SEQ ID NO: 1424757 - RNA, 19 nt, Artificial Sequence
  Description of Artificial Sequence: Synthetic oligonucleotide
  Antisense strand to SEQ ID NO: 1424756
uaacaccugggagauauag

SEQ ID NO: 1424758 - RNA, 19 nt, Artificial Sequence
  Description of Artificial Sequence: Synthetic oligonucleotide
  Sense strand starting at position 65 of SEQ ID NO: 1243561
gguggaagaucuugagaca

SEQ ID NO: 1424759 - RNA, 19 nt, Artificial Sequence
  Description of Artificial Sequence: Synthetic oligonucleotide
  Antisense strand to SEQ ID NO: 1424758
ugucucaagaucuuccacc

SEQ ID NO: 1424760 - RNA, 19 nt, Artificial Sequence
  Description of Artificial Sequence: Synthetic oligonucleotide
  Sense strand starting at position 68 of SEQ ID NO: 1243561
ggaagaucuugagacacug

SEQ ID NO: 1424761 - RNA, 19 nt, Artificial Sequence
  Description of Artificial Sequence: Synthetic oligonucleotide
  Antisense strand to SEQ ID NO: 1424760
cagugucucaagaucuucc

SEQ ID NO: 1424762 - RNA, 19 nt, Artificial Sequence
  Description of Artificial Sequence: Synthetic oligonucleotide
  Sense strand starting at position 393 of SEQ ID NO: 1243561
ccagcuuuccgacaugcuu

SEQ ID NO: 1424763 - RNA, 19 nt, Artificial Sequence
  Description of Artificial Sequence: Synthetic oligonucleotide
  Antisense strand to SEQ ID NO: 1424762
aagcaugucggaaagcugg

SEQ ID NO: 1424764 - RNA, 19 nt, Artificial Sequence
  Description of Artificial Sequence: Synthetic oligonucleotide
  Sense strand starting at position 478 of SEQ ID NO: 1243561
gagagaagcugcccaauca

SEQ ID NO: 1424765 - RNA, 19 nt, Artificial Sequence
  Description of Artificial Sequence: Synthetic oligonucleotide
  Antisense strand to SEQ ID NO: 1424764
ugauugggcagcuucucuc

SEQ ID NO: 1424766 - RNA, 19 nt, Artificial Sequence
  Description of Artificial Sequence: Synthetic oligonucleotide
  Sense strand starting at position 655 of SEQ ID NO: 1243561
gugauccguucuguagaga

SEQ ID NO: 1424767 - RNA, 19 nt, Artificial Sequence
  Description of Artificial Sequence: Synthetic oligonucleotide
  Antisense strand to SEQ ID NO: 1424766
ucucuacagaacggaucac

SEQ ID NO: 1424768 - RNA, 19 nt, Artificial Sequence
  Description of Artificial Sequence: Synthetic oligonucleotide
  Sense strand starting at position 656 of SEQ ID NO: 1243561
ugauccguucuguagagaa

SEQ ID NO: 1424769 - RNA, 19 nt, Artificial Sequence
  Description of Artificial Sequence: Synthetic oligonucleotide
  Antisense strand to SEQ ID NO: 1424768
uucucuacagaacggauca

SEQ ID NO: 1424770 - RNA, 19 nt, Artificial Sequence
  Description of Artificial Sequence: Synthetic oligonucleotide
  Sense strand starting at position 658 of SEQ ID NO: 1243561
auccguucuguagagaaga

SEQ ID NO: 1424771 - RNA, 19 nt, Artificial Sequence
  Description of Artificial Sequence: Synthetic oligonucleotide
  Antisense strand to SEQ ID NO: 1424770
ucuucucuacagaacggau

SEQ ID NO: 1424772 - RNA, 19 nt, Artificial Sequence
  Description of Artificial Sequence: Synthetic oligonucleotide
  Sense strand starting at position 660 of SEQ ID NO: 1243561
ccguucuguagagaagaga

SEQ ID NO: 1424773 - RNA, 19 nt, Artificial Sequence
  Description of Artificial Sequence: Synthetic oligonucleotide
  Antisense strand to SEQ ID NO: 1424772
ucucuucucuacagaacgg

SEQ ID NO: 1424774 - RNA, 19 nt, Artificial Sequence
  Description of Artificial Sequence: Synthetic oligonucleotide
  Sense strand starting at position 680 of SEQ ID NO: 1243561
aaaguaugagcucgaggaa

SEQ ID NO: 1424775 - RNA, 19 nt, Artificial Sequence
  Description of Artificial Sequence: Synthetic oligonucleotide
  Antisense strand to SEQ ID NO: 1424774
uuccucgagcucauacuuu

SEQ ID NO: 1424776 - RNA, 19 nt, Artificial Sequence
  Description of Artificial Sequence: Synthetic oligonucleotide
  Sense strand starting at position 681 of SEQ ID NO: 1243561
aaguaugagcucgaggaag

SEQ ID NO: 1424777 - RNA, 19 nt, Artificial Sequence
  Description of Artificial Sequence: Synthetic oligonucleotide
  Antisense strand to SEQ ID NO: 1424776
cuuccucgagcucauacuu

SEQ ID NO: 1424778 - RNA, 19 nt, Artificial Sequence
  Description of Artificial Sequence: Synthetic oligonucleotide
  Sense strand starting at position 683 of SEQ ID NO: 1243561
guaugagcucgaggaagga

SEQ ID NO: 1424779 - RNA, 19 nt, Artificial Sequence
  Description of Artificial Sequence: Synthetic oligonucleotide
  Antisense strand to SEQ ID NO: 1424778
uccuuccucgagcucauac

SEQ ID NO: 1424780 - RNA, 19 nt, Artificial Sequence
  Description of Artificial Sequence: Synthetic oligonucleotide
  Sense strand starting at position 989 of SEQ ID NO: 1243561
ggguuaucugccuacaaua

SEQ ID NO: 1424781 - RNA, 19 nt, Artificial Sequence
  Description of Artificial Sequence: Synthetic oligonucleotide
  Antisense strand to SEQ ID NO: 1424780
uauuguaggcagauaaccc

SEQ ID NO: 1424782 - RNA, 19 nt, Artificial Sequence
  Description of Artificial Sequence: Synthetic oligonucleotide
  Sense strand starting at position 1043 of SEQ ID NO: 1243561
uugcuacccugagucuuaa

SEQ ID NO: 1424783 - RNA, 19 nt, Artificial Sequence
  Description of Artificial Sequence: Synthetic oligonucleotide
  Antisense strand to SEQ ID NO: 1424782
uuaagacucaggguagcaa

SEQ ID NO: 1424784 - RNA, 19 nt, Artificial Sequence
  Description of Artificial Sequence: Synthetic oligonucleotide
  Sense strand starting at position 1054 of SEQ ID NO: 1243561
agucuuaauacgggccaca

SEQ ID NO: 1424785 - RNA, 19 nt, Artificial Sequence
  Description of Artificial Sequence: Synthetic oligonucleotide
  Antisense strand to SEQ ID NO: 1424784
uguggcccguauuaagacu

SEQ ID NO: 1424786 - RNA, 19 nt, Artificial Sequence
  Description of Artificial Sequence: Synthetic oligonucleotide
  Sense strand starting at position 1121 of SEQ ID NO: 1243561
gcaaauggccucugacagu

SEQ ID NO: 1424787 - RNA, 19 nt, Artificial Sequence
  Description of Artificial Sequence: Synthetic oligonucleotide
  Antisense strand to SEQ ID NO: 1424786
acugucagaggccauuugc

SEQ ID NO: 1424788 - RNA, 19 nt, Artificial Sequence
  Description of Artificial Sequence: Synthetic oligonucleotide
  Sense strand starting at position 1138 of SEQ ID NO: 1243561
gucaauauuuaggacaacu

SEQ ID NO: 1424789 - RNA, 19 nt, Artificial Sequence
  Description of Artificial Sequence: Synthetic oligonucleotide
  Antisense strand to SEQ ID NO: 1424788
aguuguccuaaauauugac

SEQ ID NO: 1424790 - RNA, 19 nt, Artificial Sequence
  Description of Artificial Sequence: Synthetic oligonucleotide
  Sense strand starting at position 1328 of SEQ ID NO: 1243561
caggcuugauguccacaca

SEQ ID NO: 1424791 - RNA, 19 nt, Artificial Sequence
  Description of Artificial Sequence: Synthetic oligonucleotide
  Antisense strand to SEQ ID NO: 1424790
uguguggacaucaagccug

SEQ ID NO: 1424792 - RNA, 19 nt, Artificial Sequence
  Description of Artificial Sequence: Synthetic oligonucleotide
  Sense strand starting at position 1331 of SEQ ID NO: 1243561
gcuugauguccacacagca

SEQ ID NO: 1424793 - RNA, 19 nt, Artificial Sequence
  Description of Artificial Sequence: Synthetic oligonucleotide
  Antisense strand to SEQ ID NO: 1424792
ugcuguguggacaucaagc

SEQ ID NO: 1424794 - RNA, 19 nt, Artificial Sequence
  Description of Artificial Sequence: Synthetic oligonucleotide
  Sense strand starting at position 1363 of SEQ ID NO: 1243561
cugguucucucccagaacu

SEQ ID NO: 1424795 - RNA, 19 nt, Artificial Sequence
  Description of Artificial Sequence: Synthetic oligonucleotide
  Antisense strand to SEQ ID NO: 1424794
aguucugggagagaaccag

SEQ ID NO: 1424796 - RNA, 19 nt, Artificial Sequence
  Description of Artificial Sequence: Synthetic oligonucleotide
  Sense strand starting at position 1365 of SEQ ID NO: 1243561
gguucucucccagaacuca

SEQ ID NO: 1424797 - RNA, 19 nt, Artificial Sequence
  Description of Artificial Sequence: Synthetic oligonucleotide
  Antisense strand to SEQ ID NO: 1424796
ugaguucugggagagaacc

SEQ ID NO: 1424798 - RNA, 19 nt, Artificial Sequence
  Description of Artificial Sequence: Synthetic oligonucleotide
  Sense strand starting at position 1476 of SEQ ID NO: 1243561
ccuggucugccuuggcaau

SEQ ID NO: 1424799 - RNA, 19 nt, Artificial Sequence
  Description of Artificial Sequence: Synthetic oligonucleotide
  Antisense strand to SEQ ID NO: 1424798
auugccaaggcagaccagg

SEQ ID NO: 1424800 - RNA, 19 nt, Artificial Sequence
  Description of Artificial Sequence: Synthetic oligonucleotide
  Sense strand starting at position 1569 of SEQ ID NO: 1243561
ccuauaaaguucuggguaa

SEQ ID NO: 1424801 - RNA, 19 nt, Artificial Sequence
  Description of Artificial Sequence: Synthetic oligonucleotide
  Antisense strand to SEQ ID NO: 1424800
uuacccagaacuuuauagg

SEQ ID NO: 1424802 - RNA, 19 nt, Artificial Sequence
  Description of Artificial Sequence: Synthetic oligonucleotide
  Sense strand starting at position 1570 of SEQ ID NO: 1243561
cuauaaaguucuggguaau

SEQ ID NO: 1424803 - RNA, 19 nt, Artificial Sequence
  Description of Artificial Sequence: Synthetic oligonucleotide
  Antisense strand to SEQ ID NO: 1424802
auuacccagaacuuuauag

SEQ ID NO: 1424804 - RNA, 19 nt, Artificial Sequence
  Description of Artificial Sequence: Synthetic oligonucleotide
  Sense strand starting at position 1571 of SEQ ID NO: 1243561
uauaaaguucuggguaauu

SEQ ID NO: 1424805 - RNA, 19 nt, Artificial Sequence
  Description of Artificial Sequence: Synthetic oligonucleotide
  Antisense strand to SEQ ID NO: 1424804
aauuacccagaacuuuaua

SEQ ID NO: 1424806 - RNA, 19 nt, Artificial Sequence
  Description of Artificial Sequence: Synthetic oligonucleotide
  Sense strand starting at position 1573 of SEQ ID NO: 1243561
uaaaguucuggguaauugu

SEQ ID NO: 1424807 - RNA, 19 nt, Artificial Sequence
  Description of Artificial Sequence: Synthetic oligonucleotide
  Antisense strand to SEQ ID NO: 1424806
acaauuacccagaacuuua

SEQ ID NO: 1424808 - RNA, 19 nt, Artificial Sequence
  Description of Artificial Sequence: Synthetic oligonucleotide
  Sense strand starting at position 1581 of SEQ ID NO: 1243561
uggguaauuguuggaaggu

SEQ ID NO: 1424809 - RNA, 19 nt, Artificial Sequence
  Description of Artificial Sequence: Synthetic oligonucleotide
  Antisense strand to SEQ ID NO: 1424808
accuuccaacaauuaccca

SEQ ID NO: 1424810 - RNA, 19 nt, Artificial Sequence
  Description of Artificial Sequence: Synthetic oligonucleotide
  Sense strand starting at position 1582 of SEQ ID NO: 1243561
ggguaauuguuggaaggua

SEQ ID NO: 1424811 - RNA, 19 nt, Artificial Sequence
  Description of Artificial Sequence: Synthetic oligonucleotide
  Antisense strand to SEQ ID NO: 1424810
uaccuuccaacaauuaccc

SEQ ID NO: 1424812 - RNA, 19 nt, Artificial Sequence
  Description of Artificial Sequence: Synthetic oligonucleotide
  Sense strand starting at position 1789 of SEQ ID NO: 1243561
aggacagucuggccucuaa

SEQ ID NO: 1424813 - RNA, 19 nt, Artificial Sequence
  Description of Artificial Sequence: Synthetic oligonucleotide
  Antisense strand to SEQ ID NO: 1424812
uuagaggccagacuguccu

SEQ ID NO: 1424814 - RNA, 19 nt, Artificial Sequence
  Description of Artificial Sequence: Synthetic oligonucleotide
  Sense strand starting at position 1845 of SEQ ID NO: 1243561
cugucauccucagcaucuu

SEQ ID NO: 1424815 - RNA, 19 nt, Artificial Sequence
  Description of Artificial Sequence: Synthetic oligonucleotide
  Antisense strand to SEQ ID NO: 1424814
aagaugcugaggaugacag

SEQ ID NO: 1424816 - RNA, 19 nt, Artificial Sequence
  Description of Artificial Sequence: Synthetic oligonucleotide
  Sense strand starting at position 1855 of SEQ ID NO: 1243561
cagcaucuuccggaaggga

SEQ ID NO: 1424817 - RNA, 19 nt, Artificial Sequence
  Description of Artificial Sequence: Synthetic oligonucleotide
  Antisense strand to SEQ ID NO: 1424816
ucccuuccggaagaugcug

SEQ ID NO: 1424818 - RNA, 19 nt, Artificial Sequence
  Description of Artificial Sequence: Synthetic oligonucleotide
  Sense strand starting at position 2113 of SEQ ID NO: 1243561
ccaggaagccucugugauc

SEQ ID NO: 1424819 - RNA, 19 nt, Artificial Sequence
  Description of Artificial Sequence: Synthetic oligonucleotide
  Antisense strand to SEQ ID NO: 1424818
gaucacagaggcuuccugg

SEQ ID NO: 1424820 - RNA, 19 nt, Artificial Sequence
  Description of Artificial Sequence: Synthetic oligonucleotide
  Sense strand starting at position 2114 of SEQ ID NO: 1243561
caggaagccucugugauca

SEQ ID NO: 1424821 - RNA, 19 nt, Artificial Sequence
  Description of Artificial Sequence: Synthetic oligonucleotide
  Antisense strand to SEQ ID NO: 1424820
ugaucacagaggcuuccug

SEQ ID NO: 1424822 - RNA, 19 nt, Artificial Sequence
  Description of Artificial Sequence: Synthetic oligonucleotide
  Sense strand starting at position 2116 of SEQ ID NO: 1243561
ggaagccucugugaucacu

SEQ ID NO: 1424823 - RNA, 19 nt, Artificial Sequence
  Description of Artificial Sequence: Synthetic oligonucleotide
  Antisense strand to SEQ ID NO: 1424822
agugaucacagaggcuucc

SEQ ID NO: 1424824 - RNA, 19 nt, Artificial Sequence
  Description of Artificial Sequence: Synthetic oligonucleotide
  Sense strand starting at position 2124 of SEQ ID NO: 1243561
cugugaucacuccgcaaag

SEQ ID NO: 1424825 - RNA, 19 nt, Artificial Sequence
  Description of Artificial Sequence: Synthetic oligonucleotide
  Antisense strand to SEQ ID NO: 1424824
cuuugcggagugaucacag

SEQ ID NO: 1424826 - RNA, 19 nt, Artificial Sequence
  Description of Artificial Sequence: Synthetic oligonucleotide
  Sense strand starting at position 3124 of SEQ ID NO: 1243561
ucuggucugccacaauuga

SEQ ID NO: 1424827 - RNA, 19 nt, Artificial Sequence
  Description of Artificial Sequence: Synthetic oligonucleotide
  Antisense strand to SEQ ID NO: 1424826
ucaauuguggcagaccaga

SEQ ID NO: 1424828 - RNA, 19 nt, Artificial Sequence
  Description of Artificial Sequence: Synthetic oligonucleotide
  Sense strand starting at position 3180 of SEQ ID NO: 1243561
ggacuuugggcugguuuga

SEQ ID NO: 1424829 - RNA, 19 nt, Artificial Sequence
  Description of Artificial Sequence: Synthetic oligonucleotide
  Antisense strand to SEQ ID NO: 1424828
ucaaaccagcccaaagucc

SEQ ID NO: 1424830 - RNA, 19 nt, Artificial Sequence
  Description of Artificial Sequence: Synthetic oligonucleotide
  Sense strand starting at position 3339 of SEQ ID NO: 1243561
gagggcccugagcgauaua

SEQ ID NO: 1424831 - RNA, 19 nt, Artificial Sequence
  Description of Artificial Sequence: Synthetic oligonucleotide
  Antisense strand to SEQ ID NO: 1424830
uauaucgcucagggcccuc

SEQ ID NO: 1424832 - RNA, 19 nt, Artificial Sequence
  Description of Artificial Sequence: Synthetic oligonucleotide
  Sense strand starting at position 3340 of SEQ ID NO: 1243561
agggcccugagcgauauau

SEQ ID NO: 1424833 - RNA, 19 nt, Artificial Sequence
  Description of Artificial Sequence: Synthetic oligonucleotide
  Antisense strand to SEQ ID NO: 1424832
auauaucgcucagggcccu

SEQ ID NO: 1424834 - RNA, 19 nt, Artificial Sequence
  Description of Artificial Sequence: Synthetic oligonucleotide
  Sense strand starting at position 3342 of SEQ ID NO: 1243561
ggcccugagcgauauauga

SEQ ID NO: 1424835 - RNA, 19 nt, Artificial Sequence
  Description of Artificial Sequence: Synthetic oligonucleotide
  Antisense strand to SEQ ID NO: 1424834
ucauauaucgcucagggcc

SEQ ID NO: 1424836 - RNA, 19 nt, Artificial Sequence
  Description of Artificial Sequence: Synthetic oligonucleotide
  Sense strand starting at position 3344 of SEQ ID NO: 1243561
cccugagcgauauaugaaa

SEQ ID NO: 1424837 - RNA, 19 nt, Artificial Sequence
  Description of Artificial Sequence: Synthetic oligonucleotide
  Antisense strand to SEQ ID NO: 1424836
uuucauauaucgcucaggg

SEQ ID NO: 1424838 - RNA, 19 nt, Artificial Sequence
  Description of Artificial Sequence: Synthetic oligonucleotide
  Sense strand starting at position 591 of SEQ ID NO: 1243562
gcgccugguuuggagauua

SEQ ID NO: 1424839 - RNA, 19 nt, Artificial Sequence
  Description of Artificial Sequence: Synthetic oligonucleotide
  Antisense strand to SEQ ID NO: 1424838
uaaucuccaaaccaggcgc

SEQ ID NO: 1424840 - RNA, 19 nt, Artificial Sequence
  Description of Artificial Sequence: Synthetic oligonucleotide
  Sense strand starting at position 599 of SEQ ID NO: 1243562
uuuggagauuaugauggau

SEQ ID NO: 1424841 - RNA, 19 nt, Artificial Sequence
  Description of Artificial Sequence: Synthetic oligonucleotide
  Antisense strand to SEQ ID NO: 1424840
auccaucauaaucuccaaa

SEQ ID NO: 1424842 - RNA, 19 nt, Artificial Sequence
  Description of Artificial Sequence: Synthetic oligonucleotide
  Sense strand starting at position 1193 of SEQ ID NO: 1243562
caggcuuggcuggaaaugu

SEQ ID NO: 1424843 - RNA, 19 nt, Artificial Sequence
  Description of Artificial Sequence: Synthetic oligonucleotide
  Antisense strand to SEQ ID NO: 1424842
acauuuccagccaagccug

SEQ ID NO: 1424844 - RNA, 19 nt, Artificial Sequence
  Description of Artificial Sequence: Synthetic oligonucleotide
  Sense strand starting at position 1334 of SEQ ID NO: 1243562
gauggacagcgcuggaaau

SEQ ID NO: 1424845 - RNA, 19 nt, Artificial Sequence
  Description of Artificial Sequence: Synthetic oligonucleotide
  Antisense strand to SEQ ID NO: 1424844
auuuccagcgcuguccauc

SEQ ID NO: 1424846 - RNA, 19 nt, Artificial Sequence
  Description of Artificial Sequence: Synthetic oligonucleotide
  Sense strand starting at position 1598 of SEQ ID NO: 1243562
uugccaccucgcgauguau

SEQ ID NO: 1424847 - RNA, 19 nt, Artificial Sequence
  Description of Artificial Sequence: Synthetic oligonucleotide
  Antisense strand to SEQ ID NO: 1424846
auacaucgcgagguggcaa

SEQ ID NO: 1424848 - RNA, 19 nt, Artificial Sequence
  Description of Artificial Sequence: Synthetic oligonucleotide
  Sense strand starting at position 1672 of SEQ ID NO: 1243562
accggucgguguucaaaga

SEQ ID NO: 1424849 - RNA, 19 nt, Artificial Sequence
  Description of Artificial Sequence: Synthetic oligonucleotide
  Antisense strand to SEQ ID NO: 1424848
ucuuugaacaccgaccggu

SEQ ID NO: 1424850 - RNA, 19 nt, Artificial Sequence
  Description of Artificial Sequence: Synthetic oligonucleotide
  Sense strand starting at position 1851 of SEQ ID NO: 1243562
ccgcgcaguugucagaaga

SEQ ID NO: 1424851 - RNA, 19 nt, Artificial Sequence
  Description of Artificial Sequence: Synthetic oligonucleotide
  Antisense strand to SEQ ID NO: 1424850
ucuucugacaacugcgcgg

SEQ ID NO: 1424852 - RNA, 19 nt, Artificial Sequence
  Description of Artificial Sequence: Synthetic oligonucleotide
  Sense strand starting at position 1852 of SEQ ID NO: 1243562
cgcgcaguugucagaagaa

SEQ ID NO: 1424853 - RNA, 19 nt, Artificial Sequence
  Description of Artificial Sequence: Synthetic oligonucleotide
  Antisense strand to SEQ ID NO: 1424852
uucuucugacaacugcgcg

SEQ ID NO: 1424854 - RNA, 19 nt, Artificial Sequence
  Description of Artificial Sequence: Synthetic oligonucleotide
  Sense strand starting at position 1881 of SEQ ID NO: 1243562
ugcuacuuucugcgagguu

SEQ ID NO: 1424855 - RNA, 19 nt, Artificial Sequence
  Description of Artificial Sequence: Synthetic oligonucleotide
  Antisense strand to SEQ ID NO: 1424854
aaccucgcagaaaguagca

SEQ ID NO: 1424856 - RNA, 19 nt, Artificial Sequence
  Description of Artificial Sequence: Synthetic oligonucleotide
  Sense strand starting at position 1882 of SEQ ID NO: 1243562
gcuacuuucugcgagguuu

SEQ ID NO: 1424857 - RNA, 19 nt, Artificial Sequence
  Description of Artificial Sequence: Synthetic oligonucleotide
  Antisense strand to SEQ ID NO: 1424856
aaaccucgcagaaaguagc

SEQ ID NO: 1424858 - RNA, 19 nt, Artificial Sequence
  Description of Artificial Sequence: Synthetic oligonucleotide
  Sense strand starting at position 1981 of SEQ ID NO: 1243562
aggguucugacuugggaaa

SEQ ID NO: 1424859 - RNA, 19 nt, Artificial Sequence
  Description of Artificial Sequence: Synthetic oligonucleotide
  Antisense strand to SEQ ID NO: 1424858
uuucccaagucagaacccu

SEQ ID NO: 1424860 - RNA, 19 nt, Artificial Sequence
  Description of Artificial Sequence: Synthetic oligonucleotide
  Sense strand starting at position 2186 of SEQ ID NO: 1243562
gguuaucaaucucucggau

SEQ ID NO: 1424861 - RNA, 19 nt, Artificial Sequence
  Description of Artificial Sequence: Synthetic oligonucleotide
  Antisense strand to SEQ ID NO: 1424860
auccgagagauugauaacc

SEQ ID NO: 1424862 - RNA, 19 nt, Artificial Sequence
  Description of Artificial Sequence: Synthetic oligonucleotide
  Sense strand starting at position 2189 of SEQ ID NO: 1243562
uaucaaucucucggaucga

SEQ ID NO: 1424863 - RNA, 19 nt, Artificial Sequence
  Description of Artificial Sequence: Synthetic oligonucleotide
  Antisense strand to SEQ ID NO: 1424862
ucgauccgagagauugaua

SEQ ID NO: 1424864 - RNA, 19 nt, Artificial Sequence
  Description of Artificial Sequence: Synthetic oligonucleotide
  Sense strand starting at position 2190 of SEQ ID NO: 1243562
aucaaucucucggaucgau

SEQ ID NO: 1424865 - RNA, 19 nt, Artificial Sequence
  Description of Artificial Sequence: Synthetic oligonucleotide
  Antisense strand to SEQ ID NO: 1424864
aucgauccgagagauugau

SEQ ID NO: 1424866 - RNA, 19 nt, Artificial Sequence
  Description of Artificial Sequence: Synthetic oligonucleotide
  Sense strand starting at position 2194 of SEQ ID NO: 1243562
aucucucggaucgauaagu

SEQ ID NO: 1424867 - RNA, 19 nt, Artificial Sequence
  Description of Artificial Sequence: Synthetic oligonucleotide
  Antisense strand to SEQ ID NO: 1424866
acuuaucgauccgagagau

SEQ ID NO: 1424868 - RNA, 19 nt, Artificial Sequence
  Description of Artificial Sequence: Synthetic oligonucleotide
  Sense strand starting at position 2446 of SEQ ID NO: 1243562
ggcugauugccgagguaga

SEQ ID NO: 1424869 - RNA, 19 nt, Artificial Sequence
  Description of Artificial Sequence: Synthetic oligonucleotide
  Antisense strand to SEQ ID NO: 1424868
ucuaccucggcaaucagcc

SEQ ID NO: 1424870 - RNA, 19 nt, Artificial Sequence
  Description of Artificial Sequence: Synthetic oligonucleotide
  Sense strand starting at position 2447 of SEQ ID NO: 1243562
gcugauugccgagguagau

SEQ ID NO: 1424871 - RNA, 19 nt, Artificial Sequence
  Description of Artificial Sequence: Synthetic oligonucleotide
  Antisense strand to SEQ ID NO: 1424870
aucuaccucggcaaucagc

SEQ ID NO: 1424872 - RNA, 19 nt, Artificial Sequence
  Description of Artificial Sequence: Synthetic oligonucleotide
  Sense strand starting at position 2552 of SEQ ID NO: 1243562
ggcagucucagagguagag

SEQ ID NO: 1424873 - RNA, 19 nt, Artificial Sequence
  Description of Artificial Sequence: Synthetic oligonucleotide
  Antisense strand to SEQ ID NO: 1424872
cucuaccucugagacugcc

SEQ ID NO: 1424874 - RNA, 19 nt, Artificial Sequence
  Description of Artificial Sequence: Synthetic oligonucleotide
  Sense strand starting at position 2743 of SEQ ID NO: 1243562
ccagcuugugcguccaaga

SEQ ID NO: 1424875 - RNA, 19 nt, Artificial Sequence
  Description of Artificial Sequence: Synthetic oligonucleotide
  Antisense strand to SEQ ID NO: 1424874
ucuuggacgcacaagcugg

SEQ ID NO: 1424876 - RNA, 19 nt, Artificial Sequence
  Description of Artificial Sequence: Synthetic oligonucleotide
  Sense strand starting at position 2746 of SEQ ID NO: 1243562
gcuugugcguccaagagug

SEQ ID NO: 1424877 - RNA, 19 nt, Artificial Sequence
  Description of Artificial Sequence: Synthetic oligonucleotide
  Antisense strand to SEQ ID NO: 1424876
cacucuuggacgcacaagc

SEQ ID NO: 1424878 - RNA, 19 nt, Artificial Sequence
  Description of Artificial Sequence: Synthetic oligonucleotide
  Sense strand starting at position 2754 of SEQ ID NO: 1243562
guccaagaguguccaacau

SEQ ID NO: 1424879 - RNA, 19 nt, Artificial Sequence
  Description of Artificial Sequence: Synthetic oligonucleotide
  Antisense strand to SEQ ID NO: 1424878
auguuggacacucuuggac

SEQ ID NO: 1424880 - RNA, 19 nt, Artificial Sequence
  Description of Artificial Sequence: Synthetic oligonucleotide
  Sense strand starting at position 2776 of SEQ ID NO: 1243562
ggccuucccggagggaaua

SEQ ID NO: 1424881 - RNA, 19 nt, Artificial Sequence
  Description of Artificial Sequence: Synthetic oligonucleotide
  Antisense strand to SEQ ID NO: 1424880
uauucccuccgggaaggcc

SEQ ID NO: 1424882 - RNA, 19 nt, Artificial Sequence
  Description of Artificial Sequence: Synthetic oligonucleotide
  Sense strand starting at position 3047 of SEQ ID NO: 1243562
gcgggcugccucugcuaga

SEQ ID NO: 1424883 - RNA, 19 nt, Artificial Sequence
  Description of Artificial Sequence: Synthetic oligonucleotide
  Antisense strand to SEQ ID NO: 1424882
ucuagcagaggcagcccgc

SEQ ID NO: 1424884 - RNA, 19 nt, Artificial Sequence
  Description of Artificial Sequence: Synthetic oligonucleotide
  Sense strand starting at position 3609 of SEQ ID NO: 1243562
gugccuuccuuauuugcaa

SEQ ID NO: 1424885 - RNA, 19 nt, Artificial Sequence
  Description of Artificial Sequence: Synthetic oligonucleotide
  Antisense strand to SEQ ID NO: 1424884
uugcaaauaaggaaggcac

SEQ ID NO: 1424886 - RNA, 19 nt, Artificial Sequence
  Description of Artificial Sequence: Synthetic oligonucleotide
  Sense strand starting at position 3757 of SEQ ID NO: 1243562
gccuacuucuggcagggaa

SEQ ID NO: 1424887 - RNA, 19 nt, Artificial Sequence
  Description of Artificial Sequence: Synthetic oligonucleotide
  Antisense strand to SEQ ID NO: 1424886
uucccugccagaaguaggc

SEQ ID NO: 1424888 - RNA, 19 nt, Artificial Sequence
  Description of Artificial Sequence: Synthetic oligonucleotide
  Sense strand starting at position 3759 of SEQ ID NO: 1243562
cuacuucuggcagggaaua

SEQ ID NO: 1424889 - RNA, 19 nt, Artificial Sequence
  Description of Artificial Sequence: Synthetic oligonucleotide
  Antisense strand to SEQ ID NO: 1424888
uauucccugccagaaguag

SEQ ID NO: 1424890 - RNA, 19 nt, Artificial Sequence
  Description of Artificial Sequence: Synthetic oligonucleotide
  Sense strand starting at position 3821 of SEQ ID NO: 1243562
ucuccuucuucgccggaaa

SEQ ID NO: 1424891 - RNA, 19 nt, Artificial Sequence
  Description of Artificial Sequence: Synthetic oligonucleotide
  Antisense strand to SEQ ID NO: 1424890
uuuccggcgaagaaggaga

SEQ ID NO: 1424892 - RNA, 19 nt, Artificial Sequence
  Description of Artificial Sequence: Synthetic oligonucleotide
  Sense strand starting at position 3823 of SEQ ID NO: 1243562
uccuucuucgccggaaagu

SEQ ID NO: 1424893 - RNA, 19 nt, Artificial Sequence
  Description of Artificial Sequence: Synthetic oligonucleotide
  Antisense strand to SEQ ID NO: 1424892
acuuuccggcgaagaagga

SEQ ID NO: 1424894 - RNA, 19 nt, Artificial Sequence
  Description of Artificial Sequence: Synthetic oligonucleotide
  Sense strand starting at position 3961 of SEQ ID NO: 1243562
guaagacuuugcccacaaa

SEQ ID NO: 1424895 - RNA, 19 nt, Artificial Sequence
  Description of Artificial Sequence: Synthetic oligonucleotide
  Antisense strand to SEQ ID NO: 1424894
uuugugggcaaagucuuac

SEQ ID NO: 1424896 - RNA, 19 nt, Artificial Sequence
  Description of Artificial Sequence: Synthetic oligonucleotide
  Sense strand starting at position 96 of SEQ ID NO: 1243563
uggguaguagauugaaguu

SEQ ID NO: 1424897 - RNA, 19 nt, Artificial Sequence
  Description of Artificial Sequence: Synthetic oligonucleotide
  Antisense strand to SEQ ID NO: 1424896
aacuucaaucuacuaccca

SEQ ID NO: 1424898 - RNA, 19 nt, Artificial Sequence
  Description of Artificial Sequence: Synthetic oligonucleotide
  Sense strand starting at position 105 of SEQ ID NO: 1243563
gauugaaguuuagcucuua

SEQ ID NO: 1424899 - RNA, 19 nt, Artificial Sequence
  Description of Artificial Sequence: Synthetic oligonucleotide
  Antisense strand to SEQ ID NO: 1424898
uaagagcuaaacuucaauc

SEQ ID NO: 1424900 - RNA, 19 nt, Artificial Sequence
  Description of Artificial Sequence: Synthetic oligonucleotide
  Sense strand starting at position 106 of SEQ ID NO: 1243563
auugaaguuuagcucuuaa

SEQ ID NO: 1424901 - RNA, 19 nt, Artificial Sequence
  Description of Artificial Sequence: Synthetic oligonucleotide
  Antisense strand to SEQ ID NO: 1424900
uuaagagcuaaacuucaau

SEQ ID NO: 1424902 - RNA, 19 nt, Artificial Sequence
  Description of Artificial Sequence: Synthetic oligonucleotide
  Sense strand starting at position 164 of SEQ ID NO: 1243563
gguuccauauguccacaaa

SEQ ID NO: 1424903 - RNA, 19 nt, Artificial Sequence
  Description of Artificial Sequence: Synthetic oligonucleotide
  Antisense strand to SEQ ID NO: 1424902
uuuguggacauauggaacc

SEQ ID NO: 1424904 - RNA, 19 nt, Artificial Sequence
  Description of Artificial Sequence: Synthetic oligonucleotide
  Sense strand starting at position 209 of SEQ ID NO: 1243563
uuaaauuggucucugacca

SEQ ID NO: 1424905 - RNA, 19 nt, Artificial Sequence
  Description of Artificial Sequence: Synthetic oligonucleotide
  Antisense strand to SEQ ID NO: 1424904
uggucagagaccaauuuaa

SEQ ID NO: 1424906 - RNA, 19 nt, Artificial Sequence
  Description of Artificial Sequence: Synthetic oligonucleotide
  Sense strand starting at position 277 of SEQ ID NO: 1243563
agccuuguucgccucggaa

SEQ ID NO: 1424907 - RNA, 19 nt, Artificial Sequence
  Description of Artificial Sequence: Synthetic oligonucleotide
  Antisense strand to SEQ ID NO: 1424906
uuccgaggcgaacaaggcu

SEQ ID NO: 1424908 - RNA, 19 nt, Artificial Sequence
  Description of Artificial Sequence: Synthetic oligonucleotide
  Sense strand starting at position 311 of SEQ ID NO: 1243563
uugcauuggagguaaccua

SEQ ID NO: 1424909 - RNA, 19 nt, Artificial Sequence
  Description of Artificial Sequence: Synthetic oligonucleotide
  Antisense strand to SEQ ID NO: 1424908
uagguuaccuccaaugcaa

SEQ ID NO: 1424910 - RNA, 19 nt, Artificial Sequence
  Description of Artificial Sequence: Synthetic oligonucleotide
  Sense strand starting at position 670 of SEQ ID NO: 1243563
agcagaugauugccucuga

SEQ ID NO: 1424911 - RNA, 19 nt, Artificial Sequence
  Description of Artificial Sequence: Synthetic oligonucleotide
  Antisense strand to SEQ ID NO: 1424910
ucagaggcaaucaucugcu

SEQ ID NO: 1424912 - RNA, 19 nt, Artificial Sequence
  Description of Artificial Sequence: Synthetic oligonucleotide
  Sense strand starting at position 671 of SEQ ID NO: 1243563
gcagaugauugccucugau

SEQ ID NO: 1424913 - RNA, 19 nt, Artificial Sequence
  Description of Artificial Sequence: Synthetic oligonucleotide
  Antisense strand to SEQ ID NO: 1424912
aucagaggcaaucaucugc

SEQ ID NO: 1424914 - RNA, 19 nt, Artificial Sequence
  Description of Artificial Sequence: Synthetic oligonucleotide
  Sense strand starting at position 1286 of SEQ ID NO: 1243563
agccgaagaugaguaagaa

SEQ ID NO: 1424915 - RNA, 19 nt, Artificial Sequence
  Description of Artificial Sequence: Synthetic oligonucleotide
  Antisense strand to SEQ ID NO: 1424914
uucuuacucaucuucggcu

SEQ ID NO: 1424916 - RNA, 19 nt, Artificial Sequence
  Description of Artificial Sequence: Synthetic oligonucleotide
  Sense strand starting at position 1290 of SEQ ID NO: 1243563
gaagaugaguaagaagaaa

SEQ ID NO: 1424917 - RNA, 19 nt, Artificial Sequence
  Description of Artificial Sequence: Synthetic oligonucleotide
  Antisense strand to SEQ ID NO: 1424916
uuucuucuuacucaucuuc

SEQ ID NO: 1424918 - RNA, 19 nt, Artificial Sequence
  Description of Artificial Sequence: Synthetic oligonucleotide
  Sense strand starting at position 1352 of SEQ ID NO: 1243563
ugggcaggaucuccugaua

SEQ ID NO: 1424919 - RNA, 19 nt, Artificial Sequence
  Description of Artificial Sequence: Synthetic oligonucleotide
  Antisense strand to SEQ ID NO: 1424918
uaucaggagauccugccca

SEQ ID NO: 1424920 - RNA, 19 nt, Artificial Sequence
  Description of Artificial Sequence: Synthetic oligonucleotide
  Sense strand starting at position 1859 of SEQ ID NO: 1243563
gcucuaguucgagcuccuu

SEQ ID NO: 1424921 - RNA, 19 nt, Artificial Sequence
  Description of Artificial Sequence: Synthetic oligonucleotide
  Antisense strand to SEQ ID NO: 1424920
aaggagcucgaacuagagc

SEQ ID NO: 1424922 - RNA, 19 nt, Artificial Sequence
  Description of Artificial Sequence: Synthetic oligonucleotide
  Sense strand starting at position 1980 of SEQ ID NO: 1243563
auccuucuccaggaaguuu

SEQ ID NO: 1424923 - RNA, 19 nt, Artificial Sequence
  Description of Artificial Sequence: Synthetic oligonucleotide
  Antisense strand to SEQ ID NO: 1424922
aaacuuccuggagaaggau

SEQ ID NO: 1424924 - RNA, 19 nt, Artificial Sequence
  Description of Artificial Sequence: Synthetic oligonucleotide
  Sense strand starting at position 2046 of SEQ ID NO: 1243563
gugcaaucuccuggugaaa

SEQ ID NO: 1424925 - RNA, 19 nt, Artificial Sequence
  Description of Artificial Sequence: Synthetic oligonucleotide
  Antisense strand to SEQ ID NO: 1424924
uuucaccaggagauugcac

SEQ ID NO: 1424926 - RNA, 19 nt, Artificial Sequence
  Description of Artificial Sequence: Synthetic oligonucleotide
  Sense strand starting at position 2103 of SEQ ID NO: 1243563
ggcucagacuacuuaacga

SEQ ID NO: 1424927 - RNA, 19 nt, Artificial Sequence
  Description of Artificial Sequence: Synthetic oligonucleotide
  Antisense strand to SEQ ID NO: 1424926
ucguuaaguagucugagcc

SEQ ID NO: 1424928 - RNA, 19 nt, Artificial Sequence
  Description of Artificial Sequence: Synthetic oligonucleotide
  Sense strand starting at position 2304 of SEQ ID NO: 1243563
gacuaaugacucugggcaa

SEQ ID NO: 1424929 - RNA, 19 nt, Artificial Sequence
  Description of Artificial Sequence: Synthetic oligonucleotide
  Antisense strand to SEQ ID NO: 1424928
uugcccagagucauuaguc

SEQ ID NO: 1424930 - RNA, 19 nt, Artificial Sequence
  Description of Artificial Sequence: Synthetic oligonucleotide
  Sense strand starting at position 2343 of SEQ ID NO: 1243563
ggacaaggccugugaucga

SEQ ID NO: 1424931 - RNA, 19 nt, Artificial Sequence
  Description of Artificial Sequence: Synthetic oligonucleotide
  Antisense strand to SEQ ID NO: 1424930
ucgaucacaggccuugucc

SEQ ID NO: 1424932 - RNA, 19 nt, Artificial Sequence
  Description of Artificial Sequence: Synthetic oligonucleotide
  Sense strand starting at position 2353 of SEQ ID NO: 1243563
ugugaucgaccuugaacuu

SEQ ID NO: 1424933 - RNA, 19 nt, Artificial Sequence
  Description of Artificial Sequence: Synthetic oligonucleotide
  Antisense strand to SEQ ID NO: 1424932
aaguucaaggucgaucaca

SEQ ID NO: 1424934 - RNA, 19 nt, Artificial Sequence
  Description of Artificial Sequence: Synthetic oligonucleotide
  Sense strand starting at position 2354 of SEQ ID NO: 1243563
gugaucgaccuugaacuua

SEQ ID NO: 1424935 - RNA, 19 nt, Artificial Sequence
  Description of Artificial Sequence: Synthetic oligonucleotide
  Antisense strand to SEQ ID NO: 1424934
uaaguucaaggucgaucac

SEQ ID NO: 1424936 - RNA, 19 nt, Artificial Sequence
  Description of Artificial Sequence: Synthetic oligonucleotide
  Sense strand starting at position 2399 of SEQ ID NO: 1243563
gcuaaugggccaggaguaa

SEQ ID NO: 1424937 - RNA, 19 nt, Artificial Sequence
  Description of Artificial Sequence: Synthetic oligonucleotide
  Antisense strand to SEQ ID NO: 1424936
uuacuccuggcccauuagc

SEQ ID NO: 1424938 - RNA, 19 nt, Artificial Sequence
  Description of Artificial Sequence: Synthetic oligonucleotide
  Sense strand starting at position 2480 of SEQ ID NO: 1243563
gcaucacuaccuggacaga

SEQ ID NO: 1424939 - RNA, 19 nt, Artificial Sequence
  Description of Artificial Sequence: Synthetic oligonucleotide
  Antisense strand to SEQ ID NO: 1424938
ucuguccagguagugaugc

SEQ ID NO: 1424940 - RNA, 19 nt, Artificial Sequence
  Description of Artificial Sequence: Synthetic oligonucleotide
  Sense strand starting at position 2808 of SEQ ID NO: 1243563
aggagauucuugcuugaga

SEQ ID NO: 1424941 - RNA, 19 nt, Artificial Sequence
  Description of Artificial Sequence: Synthetic oligonucleotide
  Antisense strand to SEQ ID NO: 1424940
ucucaagcaagaaucuccu

SEQ ID NO: 1424942 - RNA, 19 nt, Artificial Sequence
  Description of Artificial Sequence: Synthetic oligonucleotide
  Sense strand starting at position 2809 of SEQ ID NO: 1243563
ggagauucuugcuugagau

SEQ ID NO: 1424943 - RNA, 19 nt, Artificial Sequence
  Description of Artificial Sequence: Synthetic oligonucleotide
  Antisense strand to SEQ ID NO: 1424942
aucucaagcaagaaucucc

SEQ ID NO: 1424944 - RNA, 19 nt, Artificial Sequence
  Description of Artificial Sequence: Synthetic oligonucleotide
  Sense strand starting at position 2810 of SEQ ID NO: 1243563
gagauucuugcuugagauu

SEQ ID NO: 1424945 - RNA, 19 nt, Artificial Sequence
  Description of Artificial Sequence: Synthetic oligonucleotide
  Antisense strand to SEQ ID NO: 1424944
aaucucaagcaagaaucuc

SEQ ID NO: 1424946 - RNA, 19 nt, Artificial Sequence
  Description of Artificial Sequence: Synthetic oligonucleotide
  Sense strand starting at position 2811 of SEQ ID NO: 1243563
agauucuugcuugagauua

SEQ ID NO: 1424947 - RNA, 19 nt, Artificial Sequence
  Description of Artificial Sequence: Synthetic oligonucleotide
  Antisense strand to SEQ ID NO: 1424946
uaaucucaagcaagaaucu

SEQ ID NO: 1424948 - RNA, 19 nt, Artificial Sequence
  Description of Artificial Sequence: Synthetic oligonucleotide
  Sense strand starting at position 2816 of SEQ ID NO: 1243563
cuugcuugagauuauggau

SEQ ID NO: 1424949 - RNA, 19 nt, Artificial Sequence
  Description of Artificial Sequence: Synthetic oligonucleotide
  Antisense strand to SEQ ID NO: 1424948
auccauaaucucaagcaag

SEQ ID NO: 1424950 - RNA, 19 nt, Artificial Sequence
  Description of Artificial Sequence: Synthetic oligonucleotide
  Sense strand starting at position 2949 of SEQ ID NO: 1243563
gaggaagguuggguaaucu

SEQ ID NO: 1424951 - RNA, 19 nt, Artificial Sequence
  Description of Artificial Sequence: Synthetic oligonucleotide
  Antisense strand to SEQ ID NO: 1424950
agauuacccaaccuuccuc

SEQ ID NO: 1424952 - RNA, 19 nt, Artificial Sequence
  Description of Artificial Sequence: Synthetic oligonucleotide
  Sense strand starting at position 2977 of SEQ ID NO: 1243563
ccgugauauguggagggaa

SEQ ID NO: 1424953 - RNA, 19 nt, Artificial Sequence
  Description of Artificial Sequence: Synthetic oligonucleotide
  Antisense strand to SEQ ID NO: 1424952
uucccuccacauaucacgg

SEQ ID NO: 1424954 - RNA, 19 nt, Artificial Sequence
  Description of Artificial Sequence: Synthetic oligonucleotide
  Sense strand starting at position 2978 of SEQ ID NO: 1243563
cgugauauguggagggaaa

SEQ ID NO: 1424955 - RNA, 19 nt, Artificial Sequence
  Description of Artificial Sequence: Synthetic oligonucleotide
  Antisense strand to SEQ ID NO: 1424954
uuucccuccacauaucacg

SEQ ID NO: 1424956 - RNA, 19 nt, Artificial Sequence
  Description of Artificial Sequence: Synthetic oligonucleotide
  Sense strand starting at position 3049 of SEQ ID NO: 1243563
ucugucauguaucugggau

SEQ ID NO: 1424957 - RNA, 19 nt, Artificial Sequence
  Description of Artificial Sequence: Synthetic oligonucleotide
  Antisense strand to SEQ ID NO: 1424956
aucccagauacaugacaga

SEQ ID NO: 1424958 - RNA, 19 nt, Artificial Sequence
  Description of Artificial Sequence: Synthetic oligonucleotide
  Sense strand starting at position 3050 of SEQ ID NO: 1243563
cugucauguaucugggauu

SEQ ID NO: 1424959 - RNA, 19 nt, Artificial Sequence
  Description of Artificial Sequence: Synthetic oligonucleotide
  Antisense strand to SEQ ID NO: 1424958
aaucccagauacaugacag

SEQ ID NO: 1424960 - RNA, 19 nt, Artificial Sequence
  Description of Artificial Sequence: Synthetic oligonucleotide
  Sense strand starting at position 3102 of SEQ ID NO: 1243563
ccuguaaucccaugggaag

SEQ ID NO: 1424961 - RNA, 19 nt, Artificial Sequence
  Description of Artificial Sequence: Synthetic oligonucleotide
  Antisense strand to SEQ ID NO: 1424960
cuucccaugggauuacagg

SEQ ID NO: 1424962 - RNA, 19 nt, Artificial Sequence
  Description of Artificial Sequence: Synthetic oligonucleotide
  Sense strand starting at position 3103 of SEQ ID NO: 1243563
cuguaaucccaugggaaga

SEQ ID NO: 1424963 - RNA, 19 nt, Artificial Sequence
  Description of Artificial Sequence: Synthetic oligonucleotide
  Antisense strand to SEQ ID NO: 1424962
ucuucccaugggauuacag

SEQ ID NO: 1424964 - RNA, 19 nt, Artificial Sequence
  Description of Artificial Sequence: Synthetic oligonucleotide
  Sense strand starting at position 3276 of SEQ ID NO: 1243563
agauuacagugagccauau

SEQ ID NO: 1424965 - RNA, 19 nt, Artificial Sequence
  Description of Artificial Sequence: Synthetic oligonucleotide
  Antisense strand to SEQ ID NO: 1424964
auauggcucacuguaaucu

SEQ ID NO: 1424966 - RNA, 19 nt, Artificial Sequence
  Description of Artificial Sequence: Synthetic oligonucleotide
  Sense strand starting at position 3280 of SEQ ID NO: 1243563
uacagugagccauauaaug

SEQ ID NO: 1424967 - RNA, 19 nt, Artificial Sequence
  Description of Artificial Sequence: Synthetic oligonucleotide
  Antisense strand to SEQ ID NO: 1424966
cauuauauggcucacugua

SEQ ID NO: 1424968 - RNA, 19 nt, Artificial Sequence
  Description of Artificial Sequence: Synthetic oligonucleotide
  Sense strand starting at position 3382 of SEQ ID NO: 1243563
uaggguuuagauuauuagu

SEQ ID NO: 1424969 - RNA, 19 nt, Artificial Sequence
  Description of Artificial Sequence: Synthetic oligonucleotide
  Antisense strand to SEQ ID NO: 1424968
acuaauaaucuaaacccua

SEQ ID NO: 1424970 - RNA, 19 nt, Artificial Sequence
  Description of Artificial Sequence: Synthetic oligonucleotide
  Sense strand starting at position 3384 of SEQ ID NO: 1243563
ggguuuagauuauuagugu

SEQ ID NO: 1424971 - RNA, 19 nt, Artificial Sequence
  Description of Artificial Sequence: Synthetic oligonucleotide
  Antisense strand to SEQ ID NO: 1424970
acacuaauaaucuaaaccc

SEQ ID NO: 1424972 - RNA, 19 nt, Artificial Sequence
  Description of Artificial Sequence: Synthetic oligonucleotide
  Sense strand starting at position 3735 of SEQ ID NO: 1243563
aggugugcuguugcuaagu

SEQ ID NO: 1424973 - RNA, 19 nt, Artificial Sequence
  Description of Artificial Sequence: Synthetic oligonucleotide
  Antisense strand to SEQ ID NO: 1424972
acuuagcaacagcacaccu

SEQ ID NO: 1424974 - RNA, 19 nt, Artificial Sequence
  Description of Artificial Sequence: Synthetic oligonucleotide
  Sense strand starting at position 3905 of SEQ ID NO: 1243563
gauaaacuugggcgaguca

SEQ ID NO: 1424975 - RNA, 19 nt, Artificial Sequence
  Description of Artificial Sequence: Synthetic oligonucleotide
  Antisense strand to SEQ ID NO: 1424974
ugacucgcccaaguuuauc

SEQ ID NO: 1424976 - RNA, 19 nt, Artificial Sequence
  Description of Artificial Sequence: Synthetic oligonucleotide
  Sense strand starting at position 2107 of SEQ ID NO: 1243564
gcucaugguccugagugga

SEQ ID NO: 1424977 - RNA, 19 nt, Artificial Sequence
  Description of Artificial Sequence: Synthetic oligonucleotide
  Antisense strand to SEQ ID NO: 1424976
uccacucaggaccaugagc

SEQ ID NO: 1424978 - RNA, 19 nt, Artificial Sequence
  Description of Artificial Sequence: Synthetic oligonucleotide
  Sense strand starting at position 2339 of SEQ ID NO: 1243564
gggacccuucccugucuua

SEQ ID NO: 1424979 - RNA, 19 nt, Artificial Sequence
  Description of Artificial Sequence: Synthetic oligonucleotide
  Antisense strand to SEQ ID NO: 1424978
uaagacagggaaggguccc

SEQ ID NO: 1424980 - RNA, 19 nt, Artificial Sequence
  Description of Artificial Sequence: Synthetic oligonucleotide
  Sense strand starting at position 2346 of SEQ ID NO: 1243564
uucccugucuuagggagaa

SEQ ID NO: 1424981 - RNA, 19 nt, Artificial Sequence
  Description of Artificial Sequence: Synthetic oligonucleotide
  Antisense strand to SEQ ID NO: 1424980
uucucccuaagacagggaa

SEQ ID NO: 1424982 - RNA, 19 nt, Artificial Sequence
  Description of Artificial Sequence: Synthetic oligonucleotide
  Sense strand starting at position 2602 of SEQ ID NO: 1243564
ggcugcguugcaggacaua

SEQ ID NO: 1424983 - RNA, 19 nt, Artificial Sequence
  Description of Artificial Sequence: Synthetic oligonucleotide
  Antisense strand to SEQ ID NO: 1424982
uauguccugcaacgcagcc

SEQ ID NO: 1424984 - RNA, 19 nt, Artificial Sequence
  Description of Artificial Sequence: Synthetic oligonucleotide
  Sense strand starting at position 2985 of SEQ ID NO: 1243564
caugucuguucucauguca

SEQ ID NO: 1424985 - RNA, 19 nt, Artificial Sequence
  Description of Artificial Sequence: Synthetic oligonucleotide
  Antisense strand to SEQ ID NO: 1424984
ugacaugagaacagacaug

SEQ ID NO: 1424986 - RNA, 19 nt, Artificial Sequence
  Description of Artificial Sequence: Synthetic oligonucleotide
  Sense strand starting at position 2992 of SEQ ID NO: 1243564
guucucaugucaugacaua

SEQ ID NO: 1424987 - RNA, 19 nt, Artificial Sequence
  Description of Artificial Sequence: Synthetic oligonucleotide
  Antisense strand to SEQ ID NO: 1424986
uaugucaugacaugagaac

SEQ ID NO: 1424988 - RNA, 19 nt, Artificial Sequence
  Description of Artificial Sequence: Synthetic oligonucleotide
  Sense strand starting at position 3165 of SEQ ID NO: 1243564
aggcauuguccuugccacu

SEQ ID NO: 1424989 - RNA, 19 nt, Artificial Sequence
  Description of Artificial Sequence: Synthetic oligonucleotide
  Antisense strand to SEQ ID NO: 1424988
aguggcaaggacaaugccu

SEQ ID NO: 1424990 - RNA, 19 nt, Artificial Sequence
  Description of Artificial Sequence: Synthetic oligonucleotide
  Sense strand starting at position 3462 of SEQ ID NO: 1243564
gagguugguaccuguacuu

SEQ ID NO: 1424991 - RNA, 19 nt, Artificial Sequence
  Description of Artificial Sequence: Synthetic oligonucleotide
  Antisense strand to SEQ ID NO: 1424990
aaguacagguaccaaccuc

SEQ ID NO: 1424992 - RNA, 19 nt, Artificial Sequence
  Description of Artificial Sequence: Synthetic oligonucleotide
  Sense strand starting at position 3768 of SEQ ID NO: 1243564
ggugagguuuguugaguga

SEQ ID NO: 1424993 - RNA, 19 nt, Artificial Sequence
  Description of Artificial Sequence: Synthetic oligonucleotide
  Antisense strand to SEQ ID NO: 1424992
ucacucaacaaaccucacc

SEQ ID NO: 1424994 - RNA, 19 nt, Artificial Sequence
  Description of Artificial Sequence: Synthetic oligonucleotide
  Sense strand starting at position 3771 of SEQ ID NO: 1243564
gagguuuguugagugaaua

SEQ ID NO: 1424995 - RNA, 19 nt, Artificial Sequence
  Description of Artificial Sequence: Synthetic oligonucleotide
  Antisense strand to SEQ ID NO: 1424994
uauucacucaacaaaccuc

SEQ ID NO: 1424996 - RNA, 19 nt, Artificial Sequence
  Description of Artificial Sequence: Synthetic oligonucleotide
  Sense strand starting at position 3806 of SEQ ID NO: 1243564
ugagcacuuuccugaacug

SEQ ID NO: 1424997 - RNA, 19 nt, Artificial Sequence
  Description of Artificial Sequence: Synthetic oligonucleotide
  Antisense strand to SEQ ID NO: 1424996
caguucaggaaagugcuca

SEQ ID NO: 1424998 - RNA, 19 nt, Artificial Sequence
  Description of Artificial Sequence: Synthetic oligonucleotide
  Sense strand starting at position 3849 of SEQ ID NO: 1243564
agaggugaucugugauugu

SEQ ID NO: 1424999 - RNA, 19 nt, Artificial Sequence
  Description of Artificial Sequence: Synthetic oligonucleotide
  Antisense strand to SEQ ID NO: 1424998
acaaucacagaucaccucu

SEQ ID NO: 1425000 - RNA, 19 nt, Artificial Sequence
  Description of Artificial Sequence: Synthetic oligonucleotide
  Sense strand starting at position 3858 of SEQ ID NO: 1243564
cugugauugucgcccugaa

SEQ ID NO: 1425001 - RNA, 19 nt, Artificial Sequence
  Description of Artificial Sequence: Synthetic oligonucleotide
  Antisense strand to SEQ ID NO: 1425000
uucagggcgacaaucacag

SEQ ID NO: 1425002 - RNA, 19 nt, Artificial Sequence
  Description of Artificial Sequence: Synthetic oligonucleotide
  Sense strand starting at position 3 of SEQ ID NO: 1243565
guguauauuuguuguagag

SEQ ID NO: 1425003 - RNA, 19 nt, Artificial Sequence
  Description of Artificial Sequence: Synthetic oligonucleotide
  Antisense strand to SEQ ID NO: 1425002
cucuacaacaaauauacac

SEQ ID NO: 1425004 - RNA, 19 nt, Artificial Sequence
  Description of Artificial Sequence: Synthetic oligonucleotide
  Sense strand starting at position 13 of SEQ ID NO: 1243565
guuguagagaugggaucua

SEQ ID NO: 1425005 - RNA, 19 nt, Artificial Sequence
  Description of Artificial Sequence: Synthetic oligonucleotide
  Antisense strand to SEQ ID NO: 1425004
uagaucccaucucuacaac

SEQ ID NO: 1425006 - RNA, 19 nt, Artificial Sequence
  Description of Artificial Sequence: Synthetic oligonucleotide
  Sense strand starting at position 45 of SEQ ID NO: 1243565
ggcuucuccuggucucuua

SEQ ID NO: 1425007 - RNA, 19 nt, Artificial Sequence
  Description of Artificial Sequence: Synthetic oligonucleotide
  Antisense strand to SEQ ID NO: 1425006
uaagagaccaggagaagcc

SEQ ID NO: 1425008 - RNA, 19 nt, Artificial Sequence
  Description of Artificial Sequence: Synthetic oligonucleotide
  Sense strand starting at position 75 of SEQ ID NO: 1243565
aucuuagaaucuuguguuu

SEQ ID NO: 1425009 - RNA, 19 nt, Artificial Sequence
  Description of Artificial Sequence: Synthetic oligonucleotide
  Antisense strand to SEQ ID NO: 1425008
aaacacaagauucuaagau

SEQ ID NO: 1425010 - RNA, 19 nt, Artificial Sequence
  Description of Artificial Sequence: Synthetic oligonucleotide
  Sense strand starting at position 77 of SEQ ID NO: 1243565
cuuagaaucuuguguuucu

SEQ ID NO: 1425011 - RNA, 19 nt, Artificial Sequence
  Description of Artificial Sequence: Synthetic oligonucleotide
  Antisense strand to SEQ ID NO: 1425010
agaaacacaagauucuaag

SEQ ID NO: 1425012 - RNA, 19 nt, Artificial Sequence
  Description of Artificial Sequence: Synthetic oligonucleotide
  Sense strand starting at position 86 of SEQ ID NO: 1243565
uuguguuucucaccaucua

SEQ ID NO: 1425013 - RNA, 19 nt, Artificial Sequence
  Description of Artificial Sequence: Synthetic oligonucleotide
  Antisense strand to SEQ ID NO: 1425012
uagauggugagaaacacaa

SEQ ID NO: 1425014 - RNA, 19 nt, Artificial Sequence
  Description of Artificial Sequence: Synthetic oligonucleotide
  Sense strand starting at position 87 of SEQ ID NO: 1243565
uguguuucucaccaucuau

SEQ ID NO: 1425015 - RNA, 19 nt, Artificial Sequence
  Description of Artificial Sequence: Synthetic oligonucleotide
  Antisense strand to SEQ ID NO: 1425014
auagauggugagaaacaca

SEQ ID NO: 1425016 - RNA, 19 nt, Artificial Sequence
  Description of Artificial Sequence: Synthetic oligonucleotide
  Sense strand starting at position 98 of SEQ ID NO: 1243565
ccaucuaugucucugagau

SEQ ID NO: 1425017 - RNA, 19 nt, Artificial Sequence
  Description of Artificial Sequence: Synthetic oligonucleotide
  Antisense strand to SEQ ID NO: 1425016
aucucagagacauagaugg

SEQ ID NO: 1425018 - RNA, 19 nt, Artificial Sequence
  Description of Artificial Sequence: Synthetic oligonucleotide
  Sense strand starting at position 100 of SEQ ID NO: 1243565
aucuaugucucugagauuu

SEQ ID NO: 1425019 - RNA, 19 nt, Artificial Sequence
  Description of Artificial Sequence: Synthetic oligonucleotide
  Antisense strand to SEQ ID NO: 1425018
aaaucucagagacauagau

SEQ ID NO: 1425020 - RNA, 19 nt, Artificial Sequence
  Description of Artificial Sequence: Synthetic oligonucleotide
  Sense strand starting at position 191 of SEQ ID NO: 1243565
ccaguaucucugugucuca

SEQ ID NO: 1425021 - RNA, 19 nt, Artificial Sequence
  Description of Artificial Sequence: Synthetic oligonucleotide
  Antisense strand to SEQ ID NO: 1425020
ugagacacagagauacugg

SEQ ID NO: 1425022 - RNA, 19 nt, Artificial Sequence
  Description of Artificial Sequence: Synthetic oligonucleotide
  Sense strand starting at position 208 of SEQ ID NO: 1243565
cacugucucuggucaugaa

SEQ ID NO: 1425023 - RNA, 19 nt, Artificial Sequence
  Description of Artificial Sequence: Synthetic oligonucleotide
  Antisense strand to SEQ ID NO: 1425022
uucaugaccagagacagug

SEQ ID NO: 1425024 - RNA, 19 nt, Artificial Sequence
  Description of Artificial Sequence: Synthetic oligonucleotide
  Sense strand starting at position 209 of SEQ ID NO: 1243565
acugucucuggucaugaaa

SEQ ID NO: 1425025 - RNA, 19 nt, Artificial Sequence
  Description of Artificial Sequence: Synthetic oligonucleotide
  Antisense strand to SEQ ID NO: 1425024
uuucaugaccagagacagu

SEQ ID NO: 1425026 - RNA, 19 nt, Artificial Sequence
  Description of Artificial Sequence: Synthetic oligonucleotide
  Sense strand starting at position 211 of SEQ ID NO: 1243565
ugucucuggucaugaaaug

SEQ ID NO: 1425027 - RNA, 19 nt, Artificial Sequence
  Description of Artificial Sequence: Synthetic oligonucleotide
  Antisense strand to SEQ ID NO: 1425026
cauuucaugaccagagaca

SEQ ID NO: 1425028 - RNA, 19 nt, Artificial Sequence
  Description of Artificial Sequence: Synthetic oligonucleotide
  Sense strand starting at position 212 of SEQ ID NO: 1243565
gucucuggucaugaaaugu

SEQ ID NO: 1425029 - RNA, 19 nt, Artificial Sequence
  Description of Artificial Sequence: Synthetic oligonucleotide
  Antisense strand to SEQ ID NO: 1425028
acauuucaugaccagagac

SEQ ID NO: 1425030 - RNA, 19 nt, Artificial Sequence
  Description of Artificial Sequence: Synthetic oligonucleotide
  Sense strand starting at position 220 of SEQ ID NO: 1243565
ucaugaaaugucugucauu

SEQ ID NO: 1425031 - RNA, 19 nt, Artificial Sequence
  Description of Artificial Sequence: Synthetic oligonucleotide
  Antisense strand to SEQ ID NO: 1425030
aaugacagacauuucauga

SEQ ID NO: 1425032 - RNA, 19 nt, Artificial Sequence
  Description of Artificial Sequence: Synthetic oligonucleotide
  Sense strand starting at position 223 of SEQ ID NO: 1243565
ugaaaugucugucauugug

SEQ ID NO: 1425033 - RNA, 19 nt, Artificial Sequence
  Description of Artificial Sequence: Synthetic oligonucleotide
  Antisense strand to SEQ ID NO: 1425032
cacaaugacagacauuuca

SEQ ID NO: 1425034 - RNA, 19 nt, Artificial Sequence
  Description of Artificial Sequence: Synthetic oligonucleotide
  Sense strand starting at position 330 of SEQ ID NO: 1243565
augugacucugaugaagau

SEQ ID NO: 1425035 - RNA, 19 nt, Artificial Sequence
  Description of Artificial Sequence: Synthetic oligonucleotide
  Antisense strand to SEQ ID NO: 1425034
aucuucaucagagucacau

SEQ ID NO: 1425036 - RNA, 19 nt, Artificial Sequence
  Description of Artificial Sequence: Synthetic oligonucleotide
  Sense strand starting at position 725 of SEQ ID NO: 1243565
gagaaaguuucugccgugu

SEQ ID NO: 1425037 - RNA, 19 nt, Artificial Sequence
  Description of Artificial Sequence: Synthetic oligonucleotide
  Antisense strand to SEQ ID NO: 1425036
acacggcagaaacuuucuc

SEQ ID NO: 1425038 - RNA, 19 nt, Artificial Sequence
  Description of Artificial Sequence: Synthetic oligonucleotide
  Sense strand starting at position 727 of SEQ ID NO: 1243565
gaaaguuucugccguguga

SEQ ID NO: 1425039 - RNA, 19 nt, Artificial Sequence
  Description of Artificial Sequence: Synthetic oligonucleotide
  Antisense strand to SEQ ID NO: 1425038
ucacacggcagaaacuuuc

SEQ ID NO: 1425040 - RNA, 19 nt, Artificial Sequence
  Description of Artificial Sequence: Synthetic oligonucleotide
  Sense strand starting at position 791 of SEQ ID NO: 1243565
uuugcagucgugggaucau

SEQ ID NO: 1425041 - RNA, 19 nt, Artificial Sequence
  Description of Artificial Sequence: Synthetic oligonucleotide
  Antisense strand to SEQ ID NO: 1425040
augaucccacgacugcaaa

SEQ ID NO: 1425042 - RNA, 19 nt, Artificial Sequence
  Description of Artificial Sequence: Synthetic oligonucleotide
  Sense strand starting at position 1042 of SEQ ID NO: 1243565
gcaggacuuuccuguagac

SEQ ID NO: 1425043 - RNA, 19 nt, Artificial Sequence
  Description of Artificial Sequence: Synthetic oligonucleotide
  Antisense strand to SEQ ID NO: 1425042
gucuacaggaaaguccugc

SEQ ID NO: 1425044 - RNA, 19 nt, Artificial Sequence
  Description of Artificial Sequence: Synthetic oligonucleotide
  Sense strand starting at position 1074 of SEQ ID NO: 1243565
guggguuggacccgaaacu

SEQ ID NO: 1425045 - RNA, 19 nt, Artificial Sequence
  Description of Artificial Sequence: Synthetic oligonucleotide
  Antisense strand to SEQ ID NO: 1425044
aguuucggguccaacccac

SEQ ID NO: 1425046 - RNA, 19 nt, Artificial Sequence
  Description of Artificial Sequence: Synthetic oligonucleotide
  Sense strand starting at position 1084 of SEQ ID NO: 1243565
cccgaaacucccugacguu

SEQ ID NO: 1425047 - RNA, 19 nt, Artificial Sequence
  Description of Artificial Sequence: Synthetic oligonucleotide
  Antisense strand to SEQ ID NO: 1425046
aacgucagggaguuucggg

SEQ ID NO: 1425048 - RNA, 19 nt, Artificial Sequence
  Description of Artificial Sequence: Synthetic oligonucleotide
  Sense strand starting at position 1636 of SEQ ID NO: 1243565
cagagaucccgcugcccau

SEQ ID NO: 1425049 - RNA, 19 nt, Artificial Sequence
  Description of Artificial Sequence: Synthetic oligonucleotide
  Antisense strand to SEQ ID NO: 1425048
augggcagcgggaucucug

SEQ ID NO: 1425050 - RNA, 19 nt, Artificial Sequence
  Description of Artificial Sequence: Synthetic oligonucleotide
  Sense strand starting at position 1676 of SEQ ID NO: 1243565
gaagcugauccgcgagaaa

SEQ ID NO: 1425051 - RNA, 19 nt, Artificial Sequence
  Description of Artificial Sequence: Synthetic oligonucleotide
  Antisense strand to SEQ ID NO: 1425050
uuucucgcggaucagcuuc

SEQ ID NO: 1425052 - RNA, 19 nt, Artificial Sequence
  Description of Artificial Sequence: Synthetic oligonucleotide
  Sense strand starting at position 2816 of SEQ ID NO: 1243565
gcccacauuugcugugaaa

SEQ ID NO: 1425053 - RNA, 19 nt, Artificial Sequence
  Description of Artificial Sequence: Synthetic oligonucleotide
  Antisense strand to SEQ ID NO: 1425052
uuucacagcaaaugugggc

SEQ ID NO: 1425054 - RNA, 19 nt, Artificial Sequence
  Description of Artificial Sequence: Synthetic oligonucleotide
  Sense strand starting at position 2889 of SEQ ID NO: 1243565
ugccuaacccuucguagga

SEQ ID NO: 1425055 - RNA, 19 nt, Artificial Sequence
  Description of Artificial Sequence: Synthetic oligonucleotide
  Antisense strand to SEQ ID NO: 1425054
uccuacgaaggguuaggca

SEQ ID NO: 1425056 - RNA, 19 nt, Artificial Sequence
  Description of Artificial Sequence: Synthetic oligonucleotide
  Sense strand starting at position 2890 of SEQ ID NO: 1243565
gccuaacccuucguaggaa

SEQ ID NO: 1425057 - RNA, 19 nt, Artificial Sequence
  Description of Artificial Sequence: Synthetic oligonucleotide
  Antisense strand to SEQ ID NO: 1425056
uuccuacgaaggguuaggc

SEQ ID NO: 1425058 - RNA, 19 nt, Artificial Sequence
  Description of Artificial Sequence: Synthetic oligonucleotide
  Sense strand starting at position 2891 of SEQ ID NO: 1243565
ccuaacccuucguaggaau

SEQ ID NO: 1425059 - RNA, 19 nt, Artificial Sequence
  Description of Artificial Sequence: Synthetic oligonucleotide
  Antisense strand to SEQ ID NO: 1425058
auuccuacgaaggguuagg

SEQ ID NO: 1425060 - RNA, 19 nt, Artificial Sequence
  Description of Artificial Sequence: Synthetic oligonucleotide
  Sense strand starting at position 3063 of SEQ ID NO: 1243565
ccaccacucccgcgaauuu

SEQ ID NO: 1425061 - RNA, 19 nt, Artificial Sequence
  Description of Artificial Sequence: Synthetic oligonucleotide
  Antisense strand to SEQ ID NO: 1425060
aaauucgcgggaguggugg

SEQ ID NO: 1425062 - RNA, 19 nt, Artificial Sequence
  Description of Artificial Sequence: Synthetic oligonucleotide
  Sense strand starting at position 3729 of SEQ ID NO: 1243565
cccugaagggucugggaaa

SEQ ID NO: 1425063 - RNA, 19 nt, Artificial Sequence
  Description of Artificial Sequence: Synthetic oligonucleotide
  Antisense strand to SEQ ID NO: 1425062
uuucccagacccuucaggg

SEQ ID NO: 1425064 - RNA, 19 nt, Artificial Sequence
  Description of Artificial Sequence: Synthetic oligonucleotide
  Sense strand starting at position 3940 of SEQ ID NO: 1243565
gccugcgcuucccacuaau

SEQ ID NO: 1425065 - RNA, 19 nt, Artificial Sequence
  Description of Artificial Sequence: Synthetic oligonucleotide
  Antisense strand to SEQ ID NO: 1425064
auuagugggaagcgcaggc

SEQ ID NO: 1425066 - RNA, 19 nt, Artificial Sequence
  Description of Artificial Sequence: Synthetic oligonucleotide
  Sense strand starting at position 5 of SEQ ID NO: 1243566
guguauauuuguuguagag

SEQ ID NO: 1425067 - RNA, 19 nt, Artificial Sequence
  Description of Artificial Sequence: Synthetic oligonucleotide
  Antisense strand to SEQ ID NO: 1425066
cucuacaacaaauauacac

SEQ ID NO: 1425068 - RNA, 19 nt, Artificial Sequence
  Description of Artificial Sequence: Synthetic oligonucleotide
  Sense strand starting at position 15 of SEQ ID NO: 1243566
guuguagagaugggaucua

SEQ ID NO: 1425069 - RNA, 19 nt, Artificial Sequence
  Description of Artificial Sequence: Synthetic oligonucleotide
  Antisense strand to SEQ ID NO: 1425068
uagaucccaucucuacaac

SEQ ID NO: 1425070 - RNA, 19 nt, Artificial Sequence
  Description of Artificial Sequence: Synthetic oligonucleotide
  Sense strand starting at position 47 of SEQ ID NO: 1243566
ggcuucuccuggucucuua

SEQ ID NO: 1425071 - RNA, 19 nt, Artificial Sequence
  Description of Artificial Sequence: Synthetic oligonucleotide
  Antisense strand to SEQ ID NO: 1425070
uaagagaccaggagaagcc

SEQ ID NO: 1425072 - RNA, 19 nt, Artificial Sequence
  Description of Artificial Sequence: Synthetic oligonucleotide
  Sense strand starting at position 77 of SEQ ID NO: 1243566
aucuuagaaucuuguguuu

SEQ ID NO: 1425073 - RNA, 19 nt, Artificial Sequence
  Description of Artificial Sequence: Synthetic oligonucleotide
  Antisense strand to SEQ ID NO: 1425072
aaacacaagauucuaagau

SEQ ID NO: 1425074 - RNA, 19 nt, Artificial Sequence
  Description of Artificial Sequence: Synthetic oligonucleotide
  Sense strand starting at position 79 of SEQ ID NO: 1243566
cuuagaaucuuguguuucu

SEQ ID NO: 1425075 - RNA, 19 nt, Artificial Sequence
  Description of Artificial Sequence: Synthetic oligonucleotide
  Antisense strand to SEQ ID NO: 1425074
agaaacacaagauucuaag

SEQ ID NO: 1425076 - RNA, 19 nt, Artificial Sequence
  Description of Artificial Sequence: Synthetic oligonucleotide
  Sense strand starting at position 88 of SEQ ID NO: 1243566
uuguguuucucaccaucua

SEQ ID NO: 1425077 - RNA, 19 nt, Artificial Sequence
  Description of Artificial Sequence: Synthetic oligonucleotide
  Antisense strand to SEQ ID NO: 1425076
uagauggugagaaacacaa

SEQ ID NO: 1425078 - RNA, 19 nt, Artificial Sequence
  Description of Artificial Sequence: Synthetic oligonucleotide
  Sense strand starting at position 89 of SEQ ID NO: 1243566
uguguuucucaccaucuau

SEQ ID NO: 1425079 - RNA, 19 nt, Artificial Sequence
  Description of Artificial Sequence: Synthetic oligonucleotide
  Antisense strand to SEQ ID NO: 1425078
auagauggugagaaacaca

SEQ ID NO: 1425080 - RNA, 19 nt, Artificial Sequence
  Description of Artificial Sequence: Synthetic oligonucleotide
  Sense strand starting at position 100 of SEQ ID NO: 1243566
ccaucuaugucucugagau

SEQ ID NO: 1425081 - RNA, 19 nt, Artificial Sequence
  Description of Artificial Sequence: Synthetic oligonucleotide
  Antisense strand to SEQ ID NO: 1425080
aucucagagacauagaugg

SEQ ID NO: 1425082 - RNA, 19 nt, Artificial Sequence
  Description of Artificial Sequence: Synthetic oligonucleotide
  Sense strand starting at position 102 of SEQ ID NO: 1243566
aucuaugucucugagauuu

SEQ ID NO: 1425083 - RNA, 19 nt, Artificial Sequence
  Description of Artificial Sequence: Synthetic oligonucleotide
  Antisense strand to SEQ ID NO: 1425082
aaaucucagagacauagau

SEQ ID NO: 1425084 - RNA, 19 nt, Artificial Sequence
  Description of Artificial Sequence: Synthetic oligonucleotide
  Sense strand starting at position 193 of SEQ ID NO: 1243566
ccaguaucucugugucuca

SEQ ID NO: 1425085 - RNA, 19 nt, Artificial Sequence
  Description of Artificial Sequence: Synthetic oligonucleotide
  Antisense strand to SEQ ID NO: 1425084
ugagacacagagauacugg

SEQ ID NO: 1425086 - RNA, 19 nt, Artificial Sequence
  Description of Artificial Sequence: Synthetic oligonucleotide
  Sense strand starting at position 210 of SEQ ID NO: 1243566
cacugucucuggucaugaa

SEQ ID NO: 1425087 - RNA, 19 nt, Artificial Sequence
  Description of Artificial Sequence: Synthetic oligonucleotide
  Antisense strand to SEQ ID NO: 1425086
uucaugaccagagacagug

SEQ ID NO: 1425088 - RNA, 19 nt, Artificial Sequence
  Description of Artificial Sequence: Synthetic oligonucleotide
  Sense strand starting at position 211 of SEQ ID NO: 1243566
acugucucuggucaugaaa

SEQ ID NO: 1425089 - RNA, 19 nt, Artificial Sequence
  Description of Artificial Sequence: Synthetic oligonucleotide
  Antisense strand to SEQ ID NO: 1425088
uuucaugaccagagacagu

SEQ ID NO: 1425090 - RNA, 19 nt, Artificial Sequence
  Description of Artificial Sequence: Synthetic oligonucleotide
  Sense strand starting at position 213 of SEQ ID NO: 1243566
ugucucuggucaugaaaug

SEQ ID NO: 1425091 - RNA, 19 nt, Artificial Sequence
  Description of Artificial Sequence: Synthetic oligonucleotide
  Antisense strand to SEQ ID NO: 1425090
cauuucaugaccagagaca

SEQ ID NO: 1425092 - RNA, 19 nt, Artificial Sequence
  Description of Artificial Sequence: Synthetic oligonucleotide
  Sense strand starting at position 214 of SEQ ID NO: 1243566
gucucuggucaugaaaugu

SEQ ID NO: 1425093 - RNA, 19 nt, Artificial Sequence
  Description of Artificial Sequence: Synthetic oligonucleotide
  Antisense strand to SEQ ID NO: 1425092
acauuucaugaccagagac

SEQ ID NO: 1425094 - RNA, 19 nt, Artificial Sequence
  Description of Artificial Sequence: Synthetic oligonucleotide
  Sense strand starting at position 222 of SEQ ID NO: 1243566
ucaugaaaugucugucauu

SEQ ID NO: 1425095 - RNA, 19 nt, Artificial Sequence
  Description of Artificial Sequence: Synthetic oligonucleotide
  Antisense strand to SEQ ID NO: 1425094
aaugacagacauuucauga

SEQ ID NO: 1425096 - RNA, 19 nt, Artificial Sequence
  Description of Artificial Sequence: Synthetic oligonucleotide
  Sense strand starting at position 225 of SEQ ID NO: 1243566
ugaaaugucugucauugug

SEQ ID NO: 1425097 - RNA, 19 nt, Artificial Sequence
  Description of Artificial Sequence: Synthetic oligonucleotide
  Antisense strand to SEQ ID NO: 1425096
cacaaugacagacauuuca

SEQ ID NO: 1425098 - RNA, 19 nt, Artificial Sequence
  Description of Artificial Sequence: Synthetic oligonucleotide
  Sense strand starting at position 332 of SEQ ID NO: 1243566
augugacucugaugaagau

SEQ ID NO: 1425099 - RNA, 19 nt, Artificial Sequence
  Description of Artificial Sequence: Synthetic oligonucleotide
  Antisense strand to SEQ ID NO: 1425098
aucuucaucagagucacau

SEQ ID NO: 1425100 - RNA, 19 nt, Artificial Sequence
  Description of Artificial Sequence: Synthetic oligonucleotide
  Sense strand starting at position 727 of SEQ ID NO: 1243566
gagaaaguuucugccgugu

SEQ ID NO: 1425101 - RNA, 19 nt, Artificial Sequence
  Description of Artificial Sequence: Synthetic oligonucleotide
  Antisense strand to SEQ ID NO: 1425100
acacggcagaaacuuucuc

SEQ ID NO: 1425102 - RNA, 19 nt, Artificial Sequence
  Description of Artificial Sequence: Synthetic oligonucleotide
  Sense strand starting at position 729 of SEQ ID NO: 1243566
gaaaguuucugccguguga

SEQ ID NO: 1425103 - RNA, 19 nt, Artificial Sequence
  Description of Artificial Sequence: Synthetic oligonucleotide
  Antisense strand to SEQ ID NO: 1425102
ucacacggcagaaacuuuc

SEQ ID NO: 1425104 - RNA, 19 nt, Artificial Sequence
  Description of Artificial Sequence: Synthetic oligonucleotide
  Sense strand starting at position 793 of SEQ ID NO: 1243566
uuugcagucgugggaucau

SEQ ID NO: 1425105 - RNA, 19 nt, Artificial Sequence
  Description of Artificial Sequence: Synthetic oligonucleotide
  Antisense strand to SEQ ID NO: 1425104
augaucccacgacugcaaa

SEQ ID NO: 1425106 - RNA, 19 nt, Artificial Sequence
  Description of Artificial Sequence: Synthetic oligonucleotide
  Sense strand starting at position 1044 of SEQ ID NO: 1243566
gcaggacuuuccuguagac

SEQ ID NO: 1425107 - RNA, 19 nt, Artificial Sequence
  Description of Artificial Sequence: Synthetic oligonucleotide
  Antisense strand to SEQ ID NO: 1425106
gucuacaggaaaguccugc

SEQ ID NO: 1425108 - RNA, 19 nt, Artificial Sequence
  Description of Artificial Sequence: Synthetic oligonucleotide
  Sense strand starting at position 1076 of SEQ ID NO: 1243566
guggguuggacccgaaacu

SEQ ID NO: 1425109 - RNA, 19 nt, Artificial Sequence
  Description of Artificial Sequence: Synthetic oligonucleotide
  Antisense strand to SEQ ID NO: 1425108
aguuucggguccaacccac

SEQ ID NO: 1425110 - RNA, 19 nt, Artificial Sequence
  Description of Artificial Sequence: Synthetic oligonucleotide
  Sense strand starting at position 1086 of SEQ ID NO: 1243566
cccgaaacucccugacguu

SEQ ID NO: 1425111 - RNA, 19 nt, Artificial Sequence
  Description of Artificial Sequence: Synthetic oligonucleotide
  Antisense strand to SEQ ID NO: 1425110
aacgucagggaguuucggg

SEQ ID NO: 1425112 - RNA, 19 nt, Artificial Sequence
  Description of Artificial Sequence: Synthetic oligonucleotide
  Sense strand starting at position 1638 of SEQ ID NO: 1243566
cagagaucccgcugcccau

SEQ ID NO: 1425113 - RNA, 19 nt, Artificial Sequence
  Description of Artificial Sequence: Synthetic oligonucleotide
  Antisense strand to SEQ ID NO: 1425112
augggcagcgggaucucug

SEQ ID NO: 1425114 - RNA, 19 nt, Artificial Sequence
  Description of Artificial Sequence: Synthetic oligonucleotide
  Sense strand starting at position 1678 of SEQ ID NO: 1243566
gaagcugauccgcgagaaa

SEQ ID NO: 1425115 - RNA, 19 nt, Artificial Sequence
  Description of Artificial Sequence: Synthetic oligonucleotide
  Antisense strand to SEQ ID NO: 1425114
uuucucgcggaucagcuuc

SEQ ID NO: 1425116 - RNA, 19 nt, Artificial Sequence
  Description of Artificial Sequence: Synthetic oligonucleotide
  Sense strand starting at position 2818 of SEQ ID NO: 1243566
gcccacauuugcugugaaa

SEQ ID NO: 1425117 - RNA, 19 nt, Artificial Sequence
  Description of Artificial Sequence: Synthetic oligonucleotide
  Antisense strand to SEQ ID NO: 1425116
uuucacagcaaaugugggc

SEQ ID NO: 1425118 - RNA, 19 nt, Artificial Sequence
  Description of Artificial Sequence: Synthetic oligonucleotide
  Sense strand starting at position 2891 of SEQ ID NO: 1243566
ugccuaacccuucguagga

SEQ ID NO: 1425119 - RNA, 19 nt, Artificial Sequence
  Description of Artificial Sequence: Synthetic oligonucleotide
  Antisense strand to SEQ ID NO: 1425118
uccuacgaaggguuaggca

SEQ ID NO: 1425120 - RNA, 19 nt, Artificial Sequence
  Description of Artificial Sequence: Synthetic oligonucleotide
  Sense strand starting at position 2892 of SEQ ID NO: 1243566
gccuaacccuucguaggaa

SEQ ID NO: 1425121 - RNA, 19 nt, Artificial Sequence
  Description of Artificial Sequence: Synthetic oligonucleotide
  Antisense strand to SEQ ID NO: 1425120
uuccuacgaaggguuaggc

SEQ ID NO: 1425122 - RNA, 19 nt, Artificial Sequence
  Description of Artificial Sequence: Synthetic oligonucleotide
  Sense strand starting at position 2893 of SEQ ID NO: 1243566
ccuaacccuucguaggaau

SEQ ID NO: 1425123 - RNA, 19 nt, Artificial Sequence
  Description of Artificial Sequence: Synthetic oligonucleotide
  Antisense strand to SEQ ID NO: 1425122
auuccuacgaaggguuagg

SEQ ID NO: 1425124 - RNA, 19 nt, Artificial Sequence
  Description of Artificial Sequence: Synthetic oligonucleotide
  Sense strand starting at position 3065 of SEQ ID NO: 1243566
ccaccacucccgcgaauuu

SEQ ID NO: 1425125 - RNA, 19 nt, Artificial Sequence
  Description of Artificial Sequence: Synthetic oligonucleotide
  Antisense strand to SEQ ID NO: 1425124
aaauucgcgggaguggugg

SEQ ID NO: 1425126 - RNA, 19 nt, Artificial Sequence
  Description of Artificial Sequence: Synthetic oligonucleotide
  Sense strand starting at position 3731 of SEQ ID NO: 1243566
cccugaagggucugggaaa

SEQ ID NO: 1425127 - RNA, 19 nt, Artificial Sequence
  Description of Artificial Sequence: Synthetic oligonucleotide
  Antisense strand to SEQ ID NO: 1425126
uuucccagacccuucaggg

SEQ ID NO: 1425128 - RNA, 19 nt, Artificial Sequence
  Description of Artificial Sequence: Synthetic oligonucleotide
  Sense strand starting at position 3942 of SEQ ID NO: 1243566
gccugcgcuucccacuaau

SEQ ID NO: 1425129 - RNA, 19 nt, Artificial Sequence
  Description of Artificial Sequence: Synthetic oligonucleotide
  Antisense strand to SEQ ID NO: 1425128
auuagugggaagcgcaggc

SEQ ID NO: 1425130 - RNA, 19 nt, Artificial Sequence
  Description of Artificial Sequence: Synthetic oligonucleotide
  Sense strand starting at position 90 of SEQ ID NO: 1243567
ggagguuauaaagguuaga

SEQ ID NO: 1425131 - RNA, 19 nt, Artificial Sequence
  Description of Artificial Sequence: Synthetic oligonucleotide
  Antisense strand to SEQ ID NO: 1425130
ucuaaccuuuauaaccucc

SEQ ID NO: 1425132 - RNA, 19 nt, Artificial Sequence
  Description of Artificial Sequence: Synthetic oligonucleotide
  Sense strand starting at position 425 of SEQ ID NO: 1243567
guagcaaagcgugaugucu

SEQ ID NO: 1425133 - RNA, 19 nt, Artificial Sequence
  Description of Artificial Sequence: Synthetic oligonucleotide
  Antisense strand to SEQ ID NO: 1425132
agacaucacgcuuugcuac

SEQ ID NO: 1425134 - RNA, 19 nt, Artificial Sequence
  Description of Artificial Sequence: Synthetic oligonucleotide
  Sense strand starting at position 431 of SEQ ID NO: 1243567
aagcgugaugucuaacuaa

SEQ ID NO: 1425135 - RNA, 19 nt, Artificial Sequence
  Description of Artificial Sequence: Synthetic oligonucleotide
  Antisense strand to SEQ ID NO: 1425134
uuaguuagacaucacgcuu

SEQ ID NO: 1425136 - RNA, 19 nt, Artificial Sequence
  Description of Artificial Sequence: Synthetic oligonucleotide
  Sense strand starting at position 434 of SEQ ID NO: 1243567
cgugaugucuaacuaaggu

SEQ ID NO: 1425137 - RNA, 19 nt, Artificial Sequence
  Description of Artificial Sequence: Synthetic oligonucleotide
  Antisense strand to SEQ ID NO: 1425136
accuuaguuagacaucacg

SEQ ID NO: 1425138 - RNA, 19 nt, Artificial Sequence
  Description of Artificial Sequence: Synthetic oligonucleotide
  Sense strand starting at position 449 of SEQ ID NO: 1243567
aggucucucugacacucaa

SEQ ID NO: 1425139 - RNA, 19 nt, Artificial Sequence
  Description of Artificial Sequence: Synthetic oligonucleotide
  Antisense strand to SEQ ID NO: 1425138
uugagugucagagagaccu

SEQ ID NO: 1425140 - RNA, 19 nt, Artificial Sequence
  Description of Artificial Sequence: Synthetic oligonucleotide
  Sense strand starting at position 461 of SEQ ID NO: 1243567
cacucaagcccguguuaau

SEQ ID NO: 1425141 - RNA, 19 nt, Artificial Sequence
  Description of Artificial Sequence: Synthetic oligonucleotide
  Antisense strand to SEQ ID NO: 1425140
auuaacacgggcuugagug

SEQ ID NO: 1425142 - RNA, 19 nt, Artificial Sequence
  Description of Artificial Sequence: Synthetic oligonucleotide
  Sense strand starting at position 470 of SEQ ID NO: 1243567
ccguguuaaucccuacauu

SEQ ID NO: 1425143 - RNA, 19 nt, Artificial Sequence
  Description of Artificial Sequence: Synthetic oligonucleotide
  Antisense strand to SEQ ID NO: 1425142
aauguagggauuaacacgg

SEQ ID NO: 1425144 - RNA, 19 nt, Artificial Sequence
  Description of Artificial Sequence: Synthetic oligonucleotide
  Sense strand starting at position 471 of SEQ ID NO: 1243567
cguguuaaucccuacauua

SEQ ID NO: 1425145 - RNA, 19 nt, Artificial Sequence
  Description of Artificial Sequence: Synthetic oligonucleotide
  Antisense strand to SEQ ID NO: 1425144
uaauguagggauuaacacg

SEQ ID NO: 1425146 - RNA, 19 nt, Artificial Sequence
  Description of Artificial Sequence: Synthetic oligonucleotide
  Sense strand starting at position 508 of SEQ ID NO: 1243567
cuugguauuugcuauuauu

SEQ ID NO: 1425147 - RNA, 19 nt, Artificial Sequence
  Description of Artificial Sequence: Synthetic oligonucleotide
  Antisense strand to SEQ ID NO: 1425146
aauaauagcaaauaccaag

SEQ ID NO: 1425148 - RNA, 19 nt, Artificial Sequence
  Description of Artificial Sequence: Synthetic oligonucleotide
  Sense strand starting at position 552 of SEQ ID NO: 1243567
ucgguaauuuauuacauca

SEQ ID NO: 1425149 - RNA, 19 nt, Artificial Sequence
  Description of Artificial Sequence: Synthetic oligonucleotide
  Antisense strand to SEQ ID NO: 1425148
ugauguaauaaauuaccga

SEQ ID NO: 1425150 - RNA, 19 nt, Artificial Sequence
  Description of Artificial Sequence: Synthetic oligonucleotide
  Sense strand starting at position 554 of SEQ ID NO: 1243567
gguaauuuauuacaucagu

SEQ ID NO: 1425151 - RNA, 19 nt, Artificial Sequence
  Description of Artificial Sequence: Synthetic oligonucleotide
  Antisense strand to SEQ ID NO: 1425150
acugauguaauaaauuacc

SEQ ID NO: 1425152 - RNA, 19 nt, Artificial Sequence
  Description of Artificial Sequence: Synthetic oligonucleotide
  Sense strand starting at position 568 of SEQ ID NO: 1243567
ucaguuauccuguguguac

SEQ ID NO: 1425153 - RNA, 19 nt, Artificial Sequence
  Description of Artificial Sequence: Synthetic oligonucleotide
  Antisense strand to SEQ ID NO: 1425152
guacacacaggauaacuga

SEQ ID NO: 1425154 - RNA, 19 nt, Artificial Sequence
  Description of Artificial Sequence: Synthetic oligonucleotide
  Sense strand starting at position 645 of SEQ ID NO: 1243567
agauuaaaguaucaauggu

SEQ ID NO: 1425155 - RNA, 19 nt, Artificial Sequence
  Description of Artificial Sequence: Synthetic oligonucleotide
  Antisense strand to SEQ ID NO: 1425154
accauugauacuuuaaucu

SEQ ID NO: 1425156 - RNA, 19 nt, Artificial Sequence
  Description of Artificial Sequence: Synthetic oligonucleotide
  Sense strand starting at position 663 of SEQ ID NO: 1243567
uuauaauugugggugcaga

SEQ ID NO: 1425157 - RNA, 19 nt, Artificial Sequence
  Description of Artificial Sequence: Synthetic oligonucleotide
  Antisense strand to SEQ ID NO: 1425156
ucugcacccacaauuauaa

SEQ ID NO: 1425158 - RNA, 19 nt, Artificial Sequence
  Description of Artificial Sequence: Synthetic oligonucleotide
  Sense strand starting at position 664 of SEQ ID NO: 1243567
uauaauugugggugcagaa

SEQ ID NO: 1425159 - RNA, 19 nt, Artificial Sequence
  Description of Artificial Sequence: Synthetic oligonucleotide
  Antisense strand to SEQ ID NO: 1425158
uucugcacccacaauuaua

SEQ ID NO: 1425160 - RNA, 19 nt, Artificial Sequence
  Description of Artificial Sequence: Synthetic oligonucleotide
  Sense strand starting at position 674 of SEQ ID NO: 1243567
ggugcagaauaacuagaau

SEQ ID NO: 1425161 - RNA, 19 nt, Artificial Sequence
  Description of Artificial Sequence: Synthetic oligonucleotide
  Antisense strand to SEQ ID NO: 1425160
auucuaguuauucugcacc

SEQ ID NO: 1425162 - RNA, 19 nt, Artificial Sequence
  Description of Artificial Sequence: Synthetic oligonucleotide
  Sense strand starting at position 686 of SEQ ID NO: 1243567
cuagaauaacuauguuguc

SEQ ID NO: 1425163 - RNA, 19 nt, Artificial Sequence
  Description of Artificial Sequence: Synthetic oligonucleotide
  Antisense strand to SEQ ID NO: 1425162
gacaacauaguuauucuag

SEQ ID NO: 1425164 - RNA, 19 nt, Artificial Sequence
  Description of Artificial Sequence: Synthetic oligonucleotide
  Sense strand starting at position 691 of SEQ ID NO: 1243567
auaacuauguugucacaag

SEQ ID NO: 1425165 - RNA, 19 nt, Artificial Sequence
  Description of Artificial Sequence: Synthetic oligonucleotide
  Antisense strand to SEQ ID NO: 1425164
cuugugacaacauaguuau

SEQ ID NO: 1425166 - RNA, 19 nt, Artificial Sequence
  Description of Artificial Sequence: Synthetic oligonucleotide
  Sense strand starting at position 780 of SEQ ID NO: 1243567
aagauaaggugucaaagga

SEQ ID NO: 1425167 - RNA, 19 nt, Artificial Sequence
  Description of Artificial Sequence: Synthetic oligonucleotide
  Antisense strand to SEQ ID NO: 1425166
uccuuugacaccuuaucuu

SEQ ID NO: 1425168 - RNA, 19 nt, Artificial Sequence
  Description of Artificial Sequence: Synthetic oligonucleotide
  Sense strand starting at position 784 of SEQ ID NO: 1243567
uaaggugucaaaggauguu

SEQ ID NO: 1425169 - RNA, 19 nt, Artificial Sequence
  Description of Artificial Sequence: Synthetic oligonucleotide
  Antisense strand to SEQ ID NO: 1425168
aacauccuuugacaccuua

SEQ ID NO: 1425170 - RNA, 19 nt, Artificial Sequence
  Description of Artificial Sequence: Synthetic oligonucleotide
  Sense strand starting at position 901 of SEQ ID NO: 1243567
aggauuauaucuggacuua

SEQ ID NO: 1425171 - RNA, 19 nt, Artificial Sequence
  Description of Artificial Sequence: Synthetic oligonucleotide
  Antisense strand to SEQ ID NO: 1425170
uaaguccagauauaauccu

SEQ ID NO: 1425172 - RNA, 19 nt, Artificial Sequence
  Description of Artificial Sequence: Synthetic oligonucleotide
  Sense strand starting at position 934 of SEQ ID NO: 1243567
gagaaugcaucaguggaga

SEQ ID NO: 1425173 - RNA, 19 nt, Artificial Sequence
  Description of Artificial Sequence: Synthetic oligonucleotide
  Antisense strand to SEQ ID NO: 1425172
ucuccacugaugcauucuc

SEQ ID NO: 1425174 - RNA, 19 nt, Artificial Sequence
  Description of Artificial Sequence: Synthetic oligonucleotide
  Sense strand starting at position 936 of SEQ ID NO: 1243567
gaaugcaucaguggagaga

SEQ ID NO: 1425175 - RNA, 19 nt, Artificial Sequence
  Description of Artificial Sequence: Synthetic oligonucleotide
  Antisense strand to SEQ ID NO: 1425174
ucucuccacugaugcauuc

SEQ ID NO: 1425176 - RNA, 19 nt, Artificial Sequence
  Description of Artificial Sequence: Synthetic oligonucleotide
  Sense strand starting at position 964 of SEQ ID NO: 1243567
agaggaggcuacugcaauu

SEQ ID NO: 1425177 - RNA, 19 nt, Artificial Sequence
  Description of Artificial Sequence: Synthetic oligonucleotide
  Antisense strand to SEQ ID NO: 1425176
aauugcaguagccuccucu

SEQ ID NO: 1425178 - RNA, 19 nt, Artificial Sequence
  Description of Artificial Sequence: Synthetic oligonucleotide
  Sense strand starting at position 975 of SEQ ID NO: 1243567
cugcaauugccaggauaaa

SEQ ID NO: 1425179 - RNA, 19 nt, Artificial Sequence
  Description of Artificial Sequence: Synthetic oligonucleotide
  Antisense strand to SEQ ID NO: 1425178
uuuauccuggcaauugcag

SEQ ID NO: 1425180 - RNA, 19 nt, Artificial Sequence
  Description of Artificial Sequence: Synthetic oligonucleotide
  Sense strand starting at position 995 of SEQ ID NO: 1243567
cagaaugaagccugaagua

SEQ ID NO: 1425181 - RNA, 19 nt, Artificial Sequence
  Description of Artificial Sequence: Synthetic oligonucleotide
  Antisense strand to SEQ ID NO: 1425180
uacuucaggcuucauucug

SEQ ID NO: 1425182 - RNA, 19 nt, Artificial Sequence
  Description of Artificial Sequence: Synthetic oligonucleotide
  Sense strand starting at position 1089 of SEQ ID NO: 1243567
cacaguuggugcuccgaaa

SEQ ID NO: 1425183 - RNA, 19 nt, Artificial Sequence
  Description of Artificial Sequence: Synthetic oligonucleotide
  Antisense strand to SEQ ID NO: 1425182
uuucggagcaccaacugug

SEQ ID NO: 1425184 - RNA, 19 nt, Artificial Sequence
  Description of Artificial Sequence: Synthetic oligonucleotide
  Sense strand starting at position 2218 of SEQ ID NO: 1243567
gguaaaugcugcuggagag

SEQ ID NO: 1425185 - RNA, 19 nt, Artificial Sequence
  Description of Artificial Sequence: Synthetic oligonucleotide
  Antisense strand to SEQ ID NO: 1425184
cucuccagcagcauuuacc

SEQ ID NO: 1425186 - RNA, 19 nt, Artificial Sequence
  Description of Artificial Sequence: Synthetic oligonucleotide
  Sense strand starting at position 2219 of SEQ ID NO: 1243567
guaaaugcugcuggagaga

SEQ ID NO: 1425187 - RNA, 19 nt, Artificial Sequence
  Description of Artificial Sequence: Synthetic oligonucleotide
  Antisense strand to SEQ ID NO: 1425186
ucucuccagcagcauuuac

SEQ ID NO: 1425188 - RNA, 19 nt, Artificial Sequence
  Description of Artificial Sequence: Synthetic oligonucleotide
  Sense strand starting at position 2274 of SEQ ID NO: 1243567
gccagagacucacaucaga

SEQ ID NO: 1425189 - RNA, 19 nt, Artificial Sequence
  Description of Artificial Sequence: Synthetic oligonucleotide
  Antisense strand to SEQ ID NO: 1425188
ucugaugugagucucuggc

SEQ ID NO: 1425190 - RNA, 19 nt, Artificial Sequence
  Description of Artificial Sequence: Synthetic oligonucleotide
  Sense strand starting at position 2285 of SEQ ID NO: 1243567
acaucagagcccugaguca

SEQ ID NO: 1425191 - RNA, 19 nt, Artificial Sequence
  Description of Artificial Sequence: Synthetic oligonucleotide
  Antisense strand to SEQ ID NO: 1425190
ugacucagggcucugaugu

SEQ ID NO: 1425192 - RNA, 19 nt, Artificial Sequence
  Description of Artificial Sequence: Synthetic oligonucleotide
  Sense strand starting at position 2366 of SEQ ID NO: 1243567
aagauuagccgcuagagac

SEQ ID NO: 1425193 - RNA, 19 nt, Artificial Sequence
  Description of Artificial Sequence: Synthetic oligonucleotide
  Antisense strand to SEQ ID NO: 1425192
gucucuagcggcuaaucuu

SEQ ID NO: 1425194 - RNA, 19 nt, Artificial Sequence
  Description of Artificial Sequence: Synthetic oligonucleotide
  Sense strand starting at position 2406 of SEQ ID NO: 1243567
agauaaagucauugacgca

SEQ ID NO: 1425195 - RNA, 19 nt, Artificial Sequence
  Description of Artificial Sequence: Synthetic oligonucleotide
  Antisense strand to SEQ ID NO: 1425194
ugcgucaaugacuuuaucu

SEQ ID NO: 1425196 - RNA, 19 nt, Artificial Sequence
  Description of Artificial Sequence: Synthetic oligonucleotide
  Sense strand starting at position 2647 of SEQ ID NO: 1243567
ggagcuguguuuccagguu

SEQ ID NO: 1425197 - RNA, 19 nt, Artificial Sequence
  Description of Artificial Sequence: Synthetic oligonucleotide
  Antisense strand to SEQ ID NO: 1425196
aaccuggaaacacagcucc

SEQ ID NO: 1425198 - RNA, 19 nt, Artificial Sequence
  Description of Artificial Sequence: Synthetic oligonucleotide
  Sense strand starting at position 2775 of SEQ ID NO: 1243567
guaacugugguuuaugcau

SEQ ID NO: 1425199 - RNA, 19 nt, Artificial Sequence
  Description of Artificial Sequence: Synthetic oligonucleotide
  Antisense strand to SEQ ID NO: 1425198
augcauaaaccacaguuac

SEQ ID NO: 1425200 - RNA, 19 nt, Artificial Sequence
  Description of Artificial Sequence: Synthetic oligonucleotide
  Sense strand starting at position 2777 of SEQ ID NO: 1243567
aacugugguuuaugcauua

SEQ ID NO: 1425201 - RNA, 19 nt, Artificial Sequence
  Description of Artificial Sequence: Synthetic oligonucleotide
  Antisense strand to SEQ ID NO: 1425200
uaaugcauaaaccacaguu

SEQ ID NO: 1425202 - RNA, 19 nt, Artificial Sequence
  Description of Artificial Sequence: Synthetic oligonucleotide
  Sense strand starting at position 2806 of SEQ ID NO: 1243567
auuagcaucuuagugcuaa

SEQ ID NO: 1425203 - RNA, 19 nt, Artificial Sequence
  Description of Artificial Sequence: Synthetic oligonucleotide
  Antisense strand to SEQ ID NO: 1425202
uuagcacuaagaugcuaau

SEQ ID NO: 1425204 - RNA, 19 nt, Artificial Sequence
  Description of Artificial Sequence: Synthetic oligonucleotide
  Sense strand starting at position 3397 of SEQ ID NO: 1243567
aagagagacuguuaaggua

SEQ ID NO: 1425205 - RNA, 19 nt, Artificial Sequence
  Description of Artificial Sequence: Synthetic oligonucleotide
  Antisense strand to SEQ ID NO: 1425204
uaccuuaacagucucucuu

SEQ ID NO: 1425206 - RNA, 19 nt, Artificial Sequence
  Description of Artificial Sequence: Synthetic oligonucleotide
  Sense strand starting at position 3405 of SEQ ID NO: 1243567
cuguuaagguaguuauaug

SEQ ID NO: 1425207 - RNA, 19 nt, Artificial Sequence
  Description of Artificial Sequence: Synthetic oligonucleotide
  Antisense strand to SEQ ID NO: 1425206
cauauaacuaccuuaacag

SEQ ID NO: 1425208 - RNA, 19 nt, Artificial Sequence
  Description of Artificial Sequence: Synthetic oligonucleotide
  Sense strand starting at position 3694 of SEQ ID NO: 1243567
gagucagacugcgucucaa

SEQ ID NO: 1425209 - RNA, 19 nt, Artificial Sequence
  Description of Artificial Sequence: Synthetic oligonucleotide
  Antisense strand to SEQ ID NO: 1425208
uugagacgcagucugacuc

SEQ ID NO: 1425210 - RNA, 19 nt, Artificial Sequence
  Description of Artificial Sequence: Synthetic oligonucleotide
  Sense strand starting at position 122 of SEQ ID NO: 1243568
cccuuuggcucgguacuua

SEQ ID NO: 1425211 - RNA, 19 nt, Artificial Sequence
  Description of Artificial Sequence: Synthetic oligonucleotide
  Antisense strand to SEQ ID NO: 1425210
uaaguaccgagccaaaggg

SEQ ID NO: 1425212 - RNA, 19 nt, Artificial Sequence
  Description of Artificial Sequence: Synthetic oligonucleotide
  Sense strand starting at position 133 of SEQ ID NO: 1243568
gguacuuaucuuugacagc

SEQ ID NO: 1425213 - RNA, 19 nt, Artificial Sequence
  Description of Artificial Sequence: Synthetic oligonucleotide
  Antisense strand to SEQ ID NO: 1425212
gcugucaaagauaaguacc

SEQ ID NO: 1425214 - RNA, 19 nt, Artificial Sequence
  Description of Artificial Sequence: Synthetic oligonucleotide
  Sense strand starting at position 271 of SEQ ID NO: 1243568
gcccuuaauguaugucauu

SEQ ID NO: 1425215 - RNA, 19 nt, Artificial Sequence
  Description of Artificial Sequence: Synthetic oligonucleotide
  Antisense strand to SEQ ID NO: 1425214
aaugacauacauuaagggc

SEQ ID NO: 1425216 - RNA, 19 nt, Artificial Sequence
  Description of Artificial Sequence: Synthetic oligonucleotide
  Sense strand starting at position 307 of SEQ ID NO: 1243568
guauuaaacgcuugcaaac

SEQ ID NO: 1425217 - RNA, 19 nt, Artificial Sequence
  Description of Artificial Sequence: Synthetic oligonucleotide
  Antisense strand to SEQ ID NO: 1425216
guuugcaagcguuuaauac

SEQ ID NO: 1425218 - RNA, 19 nt, Artificial Sequence
  Description of Artificial Sequence: Synthetic oligonucleotide
  Sense strand starting at position 397 of SEQ ID NO: 1243568
ggagguuauaaagguuaga

SEQ ID NO: 1425219 - RNA, 19 nt, Artificial Sequence
  Description of Artificial Sequence: Synthetic oligonucleotide
  Antisense strand to SEQ ID NO: 1425218
ucuaaccuuuauaaccucc

SEQ ID NO: 1425220 - RNA, 19 nt, Artificial Sequence
  Description of Artificial Sequence: Synthetic oligonucleotide
  Sense strand starting at position 732 of SEQ ID NO: 1243568
guagcaaagcgugaugucu

SEQ ID NO: 1425221 - RNA, 19 nt, Artificial Sequence
  Description of Artificial Sequence: Synthetic oligonucleotide
  Antisense strand to SEQ ID NO: 1425220
agacaucacgcuuugcuac

SEQ ID NO: 1425222 - RNA, 19 nt, Artificial Sequence
  Description of Artificial Sequence: Synthetic oligonucleotide
  Sense strand starting at position 738 of SEQ ID NO: 1243568
aagcgugaugucuaacuaa

SEQ ID NO: 1425223 - RNA, 19 nt, Artificial Sequence
  Description of Artificial Sequence: Synthetic oligonucleotide
  Antisense strand to SEQ ID NO: 1425222
uuaguuagacaucacgcuu

SEQ ID NO: 1425224 - RNA, 19 nt, Artificial Sequence
  Description of Artificial Sequence: Synthetic oligonucleotide
  Sense strand starting at position 741 of SEQ ID NO: 1243568
cgugaugucuaacuaaggu

SEQ ID NO: 1425225 - RNA, 19 nt, Artificial Sequence
  Description of Artificial Sequence: Synthetic oligonucleotide
  Antisense strand to SEQ ID NO: 1425224
accuuaguuagacaucacg

SEQ ID NO: 1425226 - RNA, 19 nt, Artificial Sequence
  Description of Artificial Sequence: Synthetic oligonucleotide
  Sense strand starting at position 756 of SEQ ID NO: 1243568
aggucucucugacacucaa

SEQ ID NO: 1425227 - RNA, 19 nt, Artificial Sequence
  Description of Artificial Sequence: Synthetic oligonucleotide
  Antisense strand to SEQ ID NO: 1425226
uugagugucagagagaccu

SEQ ID NO: 1425228 - RNA, 19 nt, Artificial Sequence
  Description of Artificial Sequence: Synthetic oligonucleotide
  Sense strand starting at position 768 of SEQ ID NO: 1243568
cacucaagcccguguuaau

SEQ ID NO: 1425229 - RNA, 19 nt, Artificial Sequence
  Description of Artificial Sequence: Synthetic oligonucleotide
  Antisense strand to SEQ ID NO: 1425228
auuaacacgggcuugagug

SEQ ID NO: 1425230 - RNA, 19 nt, Artificial Sequence
  Description of Artificial Sequence: Synthetic oligonucleotide
  Sense strand starting at position 777 of SEQ ID NO: 1243568
ccguguuaaucccuacauu

SEQ ID NO: 1425231 - RNA, 19 nt, Artificial Sequence
  Description of Artificial Sequence: Synthetic oligonucleotide
  Antisense strand to SEQ ID NO: 1425230
aauguagggauuaacacgg

SEQ ID NO: 1425232 - RNA, 19 nt, Artificial Sequence
  Description of Artificial Sequence: Synthetic oligonucleotide
  Sense strand starting at position 778 of SEQ ID NO: 1243568
cguguuaaucccuacauua

SEQ ID NO: 1425233 - RNA, 19 nt, Artificial Sequence
  Description of Artificial Sequence: Synthetic oligonucleotide
  Antisense strand to SEQ ID NO: 1425232
uaauguagggauuaacacg

SEQ ID NO: 1425234 - RNA, 19 nt, Artificial Sequence
  Description of Artificial Sequence: Synthetic oligonucleotide
  Sense strand starting at position 815 of SEQ ID NO: 1243568
cuugguauuugcuauuauu

SEQ ID NO: 1425235 - RNA, 19 nt, Artificial Sequence
  Description of Artificial Sequence: Synthetic oligonucleotide
  Antisense strand to SEQ ID NO: 1425234
aauaauagcaaauaccaag

SEQ ID NO: 1425236 - RNA, 19 nt, Artificial Sequence
  Description of Artificial Sequence: Synthetic oligonucleotide
  Sense strand starting at position 859 of SEQ ID NO: 1243568
ucgguaauuuauuacauca

SEQ ID NO: 1425237 - RNA, 19 nt, Artificial Sequence
  Description of Artificial Sequence: Synthetic oligonucleotide
  Antisense strand to SEQ ID NO: 1425236
ugauguaauaaauuaccga

SEQ ID NO: 1425238 - RNA, 19 nt, Artificial Sequence
  Description of Artificial Sequence: Synthetic oligonucleotide
  Sense strand starting at position 861 of SEQ ID NO: 1243568
gguaauuuauuacaucagu

SEQ ID NO: 1425239 - RNA, 19 nt, Artificial Sequence
  Description of Artificial Sequence: Synthetic oligonucleotide
  Antisense strand to SEQ ID NO: 1425238
acugauguaauaaauuacc

SEQ ID NO: 1425240 - RNA, 19 nt, Artificial Sequence
  Description of Artificial Sequence: Synthetic oligonucleotide
  Sense strand starting at position 875 of SEQ ID NO: 1243568
ucaguuauccuguguguac

SEQ ID NO: 1425241 - RNA, 19 nt, Artificial Sequence
  Description of Artificial Sequence: Synthetic oligonucleotide
  Antisense strand to SEQ ID NO: 1425240
guacacacaggauaacuga

SEQ ID NO: 1425242 - RNA, 19 nt, Artificial Sequence
  Description of Artificial Sequence: Synthetic oligonucleotide
  Sense strand starting at position 952 of SEQ ID NO: 1243568
agauuaaaguaucaauggu

SEQ ID NO: 1425243 - RNA, 19 nt, Artificial Sequence
  Description of Artificial Sequence: Synthetic oligonucleotide
  Antisense strand to SEQ ID NO: 1425242
accauugauacuuuaaucu

SEQ ID NO: 1425244 - RNA, 19 nt, Artificial Sequence
  Description of Artificial Sequence: Synthetic oligonucleotide
  Sense strand starting at position 970 of SEQ ID NO: 1243568
uuauaauugugggugcaga

SEQ ID NO: 1425245 - RNA, 19 nt, Artificial Sequence
  Description of Artificial Sequence: Synthetic oligonucleotide
  Antisense strand to SEQ ID NO: 1425244
ucugcacccacaauuauaa

SEQ ID NO: 1425246 - RNA, 19 nt, Artificial Sequence
  Description of Artificial Sequence: Synthetic oligonucleotide
  Sense strand starting at position 971 of SEQ ID NO: 1243568
uauaauugugggugcagaa

SEQ ID NO: 1425247 - RNA, 19 nt, Artificial Sequence
  Description of Artificial Sequence: Synthetic oligonucleotide
  Antisense strand to SEQ ID NO: 1425246
uucugcacccacaauuaua

SEQ ID NO: 1425248 - RNA, 19 nt, Artificial Sequence
  Description of Artificial Sequence: Synthetic oligonucleotide
  Sense strand starting at position 981 of SEQ ID NO: 1243568
ggugcagaauaacuagaau

SEQ ID NO: 1425249 - RNA, 19 nt, Artificial Sequence
  Description of Artificial Sequence: Synthetic oligonucleotide
  Antisense strand to SEQ ID NO: 1425248
auucuaguuauucugcacc

SEQ ID NO: 1425250 - RNA, 19 nt, Artificial Sequence
  Description of Artificial Sequence: Synthetic oligonucleotide
  Sense strand starting at position 993 of SEQ ID NO: 1243568
cuagaauaacuauguuguc

SEQ ID NO: 1425251 - RNA, 19 nt, Artificial Sequence
  Description of Artificial Sequence: Synthetic oligonucleotide
  Antisense strand to SEQ ID NO: 1425250
gacaacauaguuauucuag

SEQ ID NO: 1425252 - RNA, 19 nt, Artificial Sequence
  Description of Artificial Sequence: Synthetic oligonucleotide
  Sense strand starting at position 998 of SEQ ID NO: 1243568
auaacuauguugucacaag

SEQ ID NO: 1425253 - RNA, 19 nt, Artificial Sequence
  Description of Artificial Sequence: Synthetic oligonucleotide
  Antisense strand to SEQ ID NO: 1425252
cuugugacaacauaguuau

SEQ ID NO: 1425254 - RNA, 19 nt, Artificial Sequence
  Description of Artificial Sequence: Synthetic oligonucleotide
  Sense strand starting at position 1087 of SEQ ID NO: 1243568
aagauaaggugucaaagga

SEQ ID NO: 1425255 - RNA, 19 nt, Artificial Sequence
  Description of Artificial Sequence: Synthetic oligonucleotide
  Antisense strand to SEQ ID NO: 1425254
uccuuugacaccuuaucuu

SEQ ID NO: 1425256 - RNA, 19 nt, Artificial Sequence
  Description of Artificial Sequence: Synthetic oligonucleotide
  Sense strand starting at position 1091 of SEQ ID NO: 1243568
uaaggugucaaaggauguu

SEQ ID NO: 1425257 - RNA, 19 nt, Artificial Sequence
  Description of Artificial Sequence: Synthetic oligonucleotide
  Antisense strand to SEQ ID NO: 1425256
aacauccuuugacaccuua

SEQ ID NO: 1425258 - RNA, 19 nt, Artificial Sequence
  Description of Artificial Sequence: Synthetic oligonucleotide
  Sense strand starting at position 1208 of SEQ ID NO: 1243568
aggauuauaucuggacuua

SEQ ID NO: 1425259 - RNA, 19 nt, Artificial Sequence
  Description of Artificial Sequence: Synthetic oligonucleotide
  Antisense strand to SEQ ID NO: 1425258
uaaguccagauauaauccu

SEQ ID NO: 1425260 - RNA, 19 nt, Artificial Sequence
  Description of Artificial Sequence: Synthetic oligonucleotide
  Sense strand starting at position 1241 of SEQ ID NO: 1243568
gagaaugcaucaguggaga

SEQ ID NO: 1425261 - RNA, 19 nt, Artificial Sequence
  Description of Artificial Sequence: Synthetic oligonucleotide
  Antisense strand to SEQ ID NO: 1425260
ucuccacugaugcauucuc

SEQ ID NO: 1425262 - RNA, 19 nt, Artificial Sequence
  Description of Artificial Sequence: Synthetic oligonucleotide
  Sense strand starting at position 1243 of SEQ ID NO: 1243568
gaaugcaucaguggagaga

SEQ ID NO: 1425263 - RNA, 19 nt, Artificial Sequence
  Description of Artificial Sequence: Synthetic oligonucleotide
  Antisense strand to SEQ ID NO: 1425262
ucucuccacugaugcauuc

SEQ ID NO: 1425264 - RNA, 19 nt, Artificial Sequence
  Description of Artificial Sequence: Synthetic oligonucleotide
  Sense strand starting at position 1282 of SEQ ID NO: 1243568
cugcaauugccaggauaaa

SEQ ID NO: 1425265 - RNA, 19 nt, Artificial Sequence
  Description of Artificial Sequence: Synthetic oligonucleotide
  Antisense strand to SEQ ID NO: 1425264
uuuauccuggcaauugcag

SEQ ID NO: 1425266 - RNA, 19 nt, Artificial Sequence
  Description of Artificial Sequence: Synthetic oligonucleotide
  Sense strand starting at position 1302 of SEQ ID NO: 1243568
cagaaugaagccugaagua

SEQ ID NO: 1425267 - RNA, 19 nt, Artificial Sequence
  Description of Artificial Sequence: Synthetic oligonucleotide
  Antisense strand to SEQ ID NO: 1425266
uacuucaggcuucauucug

SEQ ID NO: 1425268 - RNA, 19 nt, Artificial Sequence
  Description of Artificial Sequence: Synthetic oligonucleotide
  Sense strand starting at position 1396 of SEQ ID NO: 1243568
cacaguuggugcuccgaaa

SEQ ID NO: 1425269 - RNA, 19 nt, Artificial Sequence
  Description of Artificial Sequence: Synthetic oligonucleotide
  Antisense strand to SEQ ID NO: 1425268
uuucggagcaccaacugug

SEQ ID NO: 1425270 - RNA, 19 nt, Artificial Sequence
  Description of Artificial Sequence: Synthetic oligonucleotide
  Sense strand starting at position 2526 of SEQ ID NO: 1243568
guaaaugcugcuggagaga

SEQ ID NO: 1425271 - RNA, 19 nt, Artificial Sequence
  Description of Artificial Sequence: Synthetic oligonucleotide
  Antisense strand to SEQ ID NO: 1425270
ucucuccagcagcauuuac

SEQ ID NO: 1425272 - RNA, 19 nt, Artificial Sequence
  Description of Artificial Sequence: Synthetic oligonucleotide
  Sense strand starting at position 2581 of SEQ ID NO: 1243568
gccagagacucacaucaga

SEQ ID NO: 1425273 - RNA, 19 nt, Artificial Sequence
  Description of Artificial Sequence: Synthetic oligonucleotide
  Antisense strand to SEQ ID NO: 1425272
ucugaugugagucucuggc

SEQ ID NO: 1425274 - RNA, 19 nt, Artificial Sequence
  Description of Artificial Sequence: Synthetic oligonucleotide
  Sense strand starting at position 2592 of SEQ ID NO: 1243568
acaucagagcccugaguca

SEQ ID NO: 1425275 - RNA, 19 nt, Artificial Sequence
  Description of Artificial Sequence: Synthetic oligonucleotide
  Antisense strand to SEQ ID NO: 1425274
ugacucagggcucugaugu

SEQ ID NO: 1425276 - RNA, 19 nt, Artificial Sequence
  Description of Artificial Sequence: Synthetic oligonucleotide
  Sense strand starting at position 2673 of SEQ ID NO: 1243568
aagauuagccgcuagagac

SEQ ID NO: 1425277 - RNA, 19 nt, Artificial Sequence
  Description of Artificial Sequence: Synthetic oligonucleotide
  Antisense strand to SEQ ID NO: 1425276
gucucuagcggcuaaucuu

SEQ ID NO: 1425278 - RNA, 19 nt, Artificial Sequence
  Description of Artificial Sequence: Synthetic oligonucleotide
  Sense strand starting at position 2713 of SEQ ID NO: 1243568
agauaaagucauugacgca

SEQ ID NO: 1425279 - RNA, 19 nt, Artificial Sequence
  Description of Artificial Sequence: Synthetic oligonucleotide
  Antisense strand to SEQ ID NO: 1425278
ugcgucaaugacuuuaucu

SEQ ID NO: 1425280 - RNA, 19 nt, Artificial Sequence
  Description of Artificial Sequence: Synthetic oligonucleotide
  Sense strand starting at position 2954 of SEQ ID NO: 1243568
ggagcuguguuuccagguu

SEQ ID NO: 1425281 - RNA, 19 nt, Artificial Sequence
  Description of Artificial Sequence: Synthetic oligonucleotide
  Antisense strand to SEQ ID NO: 1425280
aaccuggaaacacagcucc

SEQ ID NO: 1425282 - RNA, 19 nt, Artificial Sequence
  Description of Artificial Sequence: Synthetic oligonucleotide
  Sense strand starting at position 3082 of SEQ ID NO: 1243568
guaacugugguuuaugcau

SEQ ID NO: 1425283 - RNA, 19 nt, Artificial Sequence
  Description of Artificial Sequence: Synthetic oligonucleotide
  Antisense strand to SEQ ID NO: 1425282
augcauaaaccacaguuac

SEQ ID NO: 1425284 - RNA, 19 nt, Artificial Sequence
  Description of Artificial Sequence: Synthetic oligonucleotide
  Sense strand starting at position 3113 of SEQ ID NO: 1243568
auuagcaucuuagugcuaa

SEQ ID NO: 1425285 - RNA, 19 nt, Artificial Sequence
  Description of Artificial Sequence: Synthetic oligonucleotide
  Antisense strand to SEQ ID NO: 1425284
uuagcacuaagaugcuaau

SEQ ID NO: 1425286 - RNA, 19 nt, Artificial Sequence
  Description of Artificial Sequence: Synthetic oligonucleotide
  Sense strand starting at position 3704 of SEQ ID NO: 1243568
aagagagacuguuaaggua

SEQ ID NO: 1425287 - RNA, 19 nt, Artificial Sequence
  Description of Artificial Sequence: Synthetic oligonucleotide
  Antisense strand to SEQ ID NO: 1425286
uaccuuaacagucucucuu

SEQ ID NO: 1425288 - RNA, 19 nt, Artificial Sequence
  Description of Artificial Sequence: Synthetic oligonucleotide
  Sense strand starting at position 3712 of SEQ ID NO: 1243568
cuguuaagguaguuauaug

SEQ ID NO: 1425289 - RNA, 19 nt, Artificial Sequence
  Description of Artificial Sequence: Synthetic oligonucleotide
  Antisense strand to SEQ ID NO: 1425288
cauauaacuaccuuaacag

SEQ ID NO: 1425290 - RNA, 19 nt, Artificial Sequence
  Description of Artificial Sequence: Synthetic oligonucleotide
  Sense strand starting at position 83 of SEQ ID NO: 1243569
cggugaucacaccaccaua

SEQ ID NO: 1425291 - RNA, 19 nt, Artificial Sequence
  Description of Artificial Sequence: Synthetic oligonucleotide
  Antisense strand to SEQ ID NO: 1425290
uaugguggugugaucaccg

SEQ ID NO: 1425292 - RNA, 19 nt, Artificial Sequence
  Description of Artificial Sequence: Synthetic oligonucleotide
  Sense strand starting at position 141 of SEQ ID NO: 1243569
acauguuuggccuacccua

SEQ ID NO: 1425293 - RNA, 19 nt, Artificial Sequence
  Description of Artificial Sequence: Synthetic oligonucleotide
  Antisense strand to SEQ ID NO: 1425292
uaggguaggccaaacaugu

SEQ ID NO: 1425294 - RNA, 19 nt, Artificial Sequence
  Description of Artificial Sequence: Synthetic oligonucleotide
  Sense strand starting at position 216 of SEQ ID NO: 1243569
agguuaaucaaagggugga

SEQ ID NO: 1425295 - RNA, 19 nt, Artificial Sequence
  Description of Artificial Sequence: Synthetic oligonucleotide
  Antisense strand to SEQ ID NO: 1425294
uccacccuuugauuaaccu

SEQ ID NO: 1425296 - RNA, 19 nt, Artificial Sequence
  Description of Artificial Sequence: Synthetic oligonucleotide
  Sense strand starting at position 241 of SEQ ID NO: 1243569
uuagccaaggcugagaaau

SEQ ID NO: 1425297 - RNA, 19 nt, Artificial Sequence
  Description of Artificial Sequence: Synthetic oligonucleotide
  Antisense strand to SEQ ID NO: 1425296
auuucucagccuuggcuaa

SEQ ID NO: 1425298 - RNA, 19 nt, Artificial Sequence
  Description of Artificial Sequence: Synthetic oligonucleotide
  Sense strand starting at position 264 of SEQ ID NO: 1243569
ugcaguugcuuuccucaaa

SEQ ID NO: 1425299 - RNA, 19 nt, Artificial Sequence
  Description of Artificial Sequence: Synthetic oligonucleotide
  Antisense strand to SEQ ID NO: 1425298
uuugaggaaagcaacugca

SEQ ID NO: 1425300 - RNA, 19 nt, Artificial Sequence
  Description of Artificial Sequence: Synthetic oligonucleotide
  Sense strand starting at position 1033 of SEQ ID NO: 1243569
guggaugaaugucaucuuu

SEQ ID NO: 1425301 - RNA, 19 nt, Artificial Sequence
  Description of Artificial Sequence: Synthetic oligonucleotide
  Antisense strand to SEQ ID NO: 1425300
aaagaugacauucauccac

SEQ ID NO: 1425302 - RNA, 19 nt, Artificial Sequence
  Description of Artificial Sequence: Synthetic oligonucleotide
  Sense strand starting at position 1035 of SEQ ID NO: 1243569
ggaugaaugucaucuuugu

SEQ ID NO: 1425303 - RNA, 19 nt, Artificial Sequence
  Description of Artificial Sequence: Synthetic oligonucleotide
  Antisense strand to SEQ ID NO: 1425302
acaaagaugacauucaucc

SEQ ID NO: 1425304 - RNA, 19 nt, Artificial Sequence
  Description of Artificial Sequence: Synthetic oligonucleotide
  Sense strand starting at position 1062 of SEQ ID NO: 1243569
cccuguuaauucccgggua

SEQ ID NO: 1425305 - RNA, 19 nt, Artificial Sequence
  Description of Artificial Sequence: Synthetic oligonucleotide
  Antisense strand to SEQ ID NO: 1425304
uacccgggaauuaacaggg

SEQ ID NO: 1425306 - RNA, 19 nt, Artificial Sequence
  Description of Artificial Sequence: Synthetic oligonucleotide
  Sense strand starting at position 1064 of SEQ ID NO: 1243569
cuguuaauucccggguaau

SEQ ID NO: 1425307 - RNA, 19 nt, Artificial Sequence
  Description of Artificial Sequence: Synthetic oligonucleotide
  Antisense strand to SEQ ID NO: 1425306
auuacccgggaauuaacag

SEQ ID NO: 1425308 - RNA, 19 nt, Artificial Sequence
  Description of Artificial Sequence: Synthetic oligonucleotide
  Sense strand starting at position 1065 of SEQ ID NO: 1243569
uguuaauucccggguaauu

SEQ ID NO: 1425309 - RNA, 19 nt, Artificial Sequence
  Description of Artificial Sequence: Synthetic oligonucleotide
  Antisense strand to SEQ ID NO: 1425308
aauuacccgggaauuaaca

SEQ ID NO: 1425310 - RNA, 19 nt, Artificial Sequence
  Description of Artificial Sequence: Synthetic oligonucleotide
  Sense strand starting at position 1239 of SEQ ID NO: 1243569
acgugaguucaggaguuga

SEQ ID NO: 1425311 - RNA, 19 nt, Artificial Sequence
  Description of Artificial Sequence: Synthetic oligonucleotide
  Antisense strand to SEQ ID NO: 1425310
ucaacuccugaacucacgu

SEQ ID NO: 1425312 - RNA, 19 nt, Artificial Sequence
  Description of Artificial Sequence: Synthetic oligonucleotide
  Sense strand starting at position 1471 of SEQ ID NO: 1243569
gauguuugcggucagagcu

SEQ ID NO: 1425313 - RNA, 19 nt, Artificial Sequence
  Description of Artificial Sequence: Synthetic oligonucleotide
  Antisense strand to SEQ ID NO: 1425312
agcucugaccgcaaacauc

SEQ ID NO: 1425314 - RNA, 19 nt, Artificial Sequence
  Description of Artificial Sequence: Synthetic oligonucleotide
  Sense strand starting at position 1478 of SEQ ID NO: 1243569
gcggucagagcucgagaau

SEQ ID NO: 1425315 - RNA, 19 nt, Artificial Sequence
  Description of Artificial Sequence: Synthetic oligonucleotide
  Antisense strand to SEQ ID NO: 1425314
auucucgagcucugaccgc

SEQ ID NO: 1425316 - RNA, 19 nt, Artificial Sequence
  Description of Artificial Sequence: Synthetic oligonucleotide
  Sense strand starting at position 1479 of SEQ ID NO: 1243569
cggucagagcucgagaauc

SEQ ID NO: 1425317 - RNA, 19 nt, Artificial Sequence
  Description of Artificial Sequence: Synthetic oligonucleotide
  Antisense strand to SEQ ID NO: 1425316
gauucucgagcucugaccg

SEQ ID NO: 1425318 - RNA, 19 nt, Artificial Sequence
  Description of Artificial Sequence: Synthetic oligonucleotide
  Sense strand starting at position 1481 of SEQ ID NO: 1243569
gucagagcucgagaaucgu

SEQ ID NO: 1425319 - RNA, 19 nt, Artificial Sequence
  Description of Artificial Sequence: Synthetic oligonucleotide
  Antisense strand to SEQ ID NO: 1425318
acgauucucgagcucugac

SEQ ID NO: 1425320 - RNA, 19 nt, Artificial Sequence
  Description of Artificial Sequence: Synthetic oligonucleotide
  Sense strand starting at position 1485 of SEQ ID NO: 1243569
gagcucgagaaucguuauu

SEQ ID NO: 1425321 - RNA, 19 nt, Artificial Sequence
  Description of Artificial Sequence: Synthetic oligonucleotide
  Antisense strand to SEQ ID NO: 1425320
aauaacgauucucgagcuc

SEQ ID NO: 1425322 - RNA, 19 nt, Artificial Sequence
  Description of Artificial Sequence: Synthetic oligonucleotide
  Sense strand starting at position 1508 of SEQ ID NO: 1243569
augauuagaguggguccua

SEQ ID NO: 1425323 - RNA, 19 nt, Artificial Sequence
  Description of Artificial Sequence: Synthetic oligonucleotide
  Antisense strand to SEQ ID NO: 1425322
uaggacccacucuaaucau

SEQ ID NO: 1425324 - RNA, 19 nt, Artificial Sequence
  Description of Artificial Sequence: Synthetic oligonucleotide
  Sense strand starting at position 1509 of SEQ ID NO: 1243569
ugauuagaguggguccuau

SEQ ID NO: 1425325 - RNA, 19 nt, Artificial Sequence
  Description of Artificial Sequence: Synthetic oligonucleotide
  Antisense strand to SEQ ID NO: 1425324
auaggacccacucuaauca

SEQ ID NO: 1425326 - RNA, 19 nt, Artificial Sequence
  Description of Artificial Sequence: Synthetic oligonucleotide
  Sense strand starting at position 1718 of SEQ ID NO: 1243569
ggcugcuuucccgucucau

SEQ ID NO: 1425327 - RNA, 19 nt, Artificial Sequence
  Description of Artificial Sequence: Synthetic oligonucleotide
  Antisense strand to SEQ ID NO: 1425326
augagacgggaaagcagcc

SEQ ID NO: 1425328 - RNA, 19 nt, Artificial Sequence
  Description of Artificial Sequence: Synthetic oligonucleotide
  Sense strand starting at position 1719 of SEQ ID NO: 1243569
gcugcuuucccgucucauc

SEQ ID NO: 1425329 - RNA, 19 nt, Artificial Sequence
  Description of Artificial Sequence: Synthetic oligonucleotide
  Antisense strand to SEQ ID NO: 1425328
gaugagacgggaaagcagc

SEQ ID NO: 1425330 - RNA, 19 nt, Artificial Sequence
  Description of Artificial Sequence: Synthetic oligonucleotide
  Sense strand starting at position 2015 of SEQ ID NO: 1243569
cggcauuguggguaacgua

SEQ ID NO: 1425331 - RNA, 19 nt, Artificial Sequence
  Description of Artificial Sequence: Synthetic oligonucleotide
  Antisense strand to SEQ ID NO: 1425330
uacguuacccacaaugccg

SEQ ID NO: 1425332 - RNA, 19 nt, Artificial Sequence
  Description of Artificial Sequence: Synthetic oligonucleotide
  Sense strand starting at position 2099 of SEQ ID NO: 1243569
cgacgugcacugugguuaa

SEQ ID NO: 1425333 - RNA, 19 nt, Artificial Sequence
  Description of Artificial Sequence: Synthetic oligonucleotide
  Antisense strand to SEQ ID NO: 1425332
uuaaccacagugcacgucg

SEQ ID NO: 1425334 - RNA, 19 nt, Artificial Sequence
  Description of Artificial Sequence: Synthetic oligonucleotide
  Sense strand starting at position 2111 of SEQ ID NO: 1243569
ugguuaaugugguccucaa

SEQ ID NO: 1425335 - RNA, 19 nt, Artificial Sequence
  Description of Artificial Sequence: Synthetic oligonucleotide
  Antisense strand to SEQ ID NO: 1425334
uugaggaccacauuaacca

SEQ ID NO: 1425336 - RNA, 19 nt, Artificial Sequence
  Description of Artificial Sequence: Synthetic oligonucleotide
  Sense strand starting at position 2134 of SEQ ID NO: 1243569
acgcauuguggguaacgua

SEQ ID NO: 1425337 - RNA, 19 nt, Artificial Sequence
  Description of Artificial Sequence: Synthetic oligonucleotide
  Antisense strand to SEQ ID NO: 1425336
uacguuacccacaaugcgu

SEQ ID NO: 1425338 - RNA, 19 nt, Artificial Sequence
  Description of Artificial Sequence: Synthetic oligonucleotide
  Sense strand starting at position 2552 of SEQ ID NO: 1243569
ggcagaaguuguucaagau

SEQ ID NO: 1425339 - RNA, 19 nt, Artificial Sequence
  Description of Artificial Sequence: Synthetic oligonucleotide
  Antisense strand to SEQ ID NO: 1425338
aucuugaacaacuucugcc

SEQ ID NO: 1425340 - RNA, 19 nt, Artificial Sequence
  Description of Artificial Sequence: Synthetic oligonucleotide
  Sense strand starting at position 2657 of SEQ ID NO: 1243569
gccugcuucuuucugacaa

SEQ ID NO: 1425341 - RNA, 19 nt, Artificial Sequence
  Description of Artificial Sequence: Synthetic oligonucleotide
  Antisense strand to SEQ ID NO: 1425340
uugucagaaagaagcaggc

SEQ ID NO: 1425342 - RNA, 19 nt, Artificial Sequence
  Description of Artificial Sequence: Synthetic oligonucleotide
  Sense strand starting at position 2686 of SEQ ID NO: 1243569
ggcaucaaucuuuguuguu

SEQ ID NO: 1425343 - RNA, 19 nt, Artificial Sequence
  Description of Artificial Sequence: Synthetic oligonucleotide
  Antisense strand to SEQ ID NO: 1425342
aacaacaaagauugaugcc

SEQ ID NO: 1425344 - RNA, 19 nt, Artificial Sequence
  Description of Artificial Sequence: Synthetic oligonucleotide
  Sense strand starting at position 2704 of SEQ ID NO: 1243569
uguuguuagagaugaaguc

SEQ ID NO: 1425345 - RNA, 19 nt, Artificial Sequence
  Description of Artificial Sequence: Synthetic oligonucleotide
  Antisense strand to SEQ ID NO: 1425344
gacuucaucucuaacaaca

SEQ ID NO: 1425346 - RNA, 19 nt, Artificial Sequence
  Description of Artificial Sequence: Synthetic oligonucleotide
  Sense strand starting at position 2823 of SEQ ID NO: 1243569
ucaauucuuguauguaugu

SEQ ID NO: 1425347 - RNA, 19 nt, Artificial Sequence
  Description of Artificial Sequence: Synthetic oligonucleotide
  Antisense strand to SEQ ID NO: 1425346
acauacauacaagaauuga

SEQ ID NO: 1425348 - RNA, 19 nt, Artificial Sequence
  Description of Artificial Sequence: Synthetic oligonucleotide
  Sense strand starting at position 2949 of SEQ ID NO: 1243569
accuaaccucccgaauagu

SEQ ID NO: 1425349 - RNA, 19 nt, Artificial Sequence
  Description of Artificial Sequence: Synthetic oligonucleotide
  Antisense strand to SEQ ID NO: 1425348
acuauucgggagguuaggu

SEQ ID NO: 1425350 - RNA, 19 nt, Artificial Sequence
  Description of Artificial Sequence: Synthetic oligonucleotide
  Sense strand starting at position 3132 of SEQ ID NO: 1243569
gcaucaauucuugagcauc

SEQ ID NO: 1425351 - RNA, 19 nt, Artificial Sequence
  Description of Artificial Sequence: Synthetic oligonucleotide
  Antisense strand to SEQ ID NO: 1425350
gaugcucaagaauugaugc

SEQ ID NO: 1425352 - RNA, 19 nt, Artificial Sequence
  Description of Artificial Sequence: Synthetic oligonucleotide
  Sense strand starting at position 3138 of SEQ ID NO: 1243569
auucuugagcaucaagcaa

SEQ ID NO: 1425353 - RNA, 19 nt, Artificial Sequence
  Description of Artificial Sequence: Synthetic oligonucleotide
  Antisense strand to SEQ ID NO: 1425352
uugcuugaugcucaagaau

SEQ ID NO: 1425354 - RNA, 19 nt, Artificial Sequence
  Description of Artificial Sequence: Synthetic oligonucleotide
  Sense strand starting at position 3173 of SEQ ID NO: 1243569
cuucguuucuuccucauuu

SEQ ID NO: 1425355 - RNA, 19 nt, Artificial Sequence
  Description of Artificial Sequence: Synthetic oligonucleotide
  Antisense strand to SEQ ID NO: 1425354
aaaugaggaagaaacgaag

SEQ ID NO: 1425356 - RNA, 19 nt, Artificial Sequence
  Description of Artificial Sequence: Synthetic oligonucleotide
  Sense strand starting at position 3174 of SEQ ID NO: 1243569
uucguuucuuccucauuua

SEQ ID NO: 1425357 - RNA, 19 nt, Artificial Sequence
  Description of Artificial Sequence: Synthetic oligonucleotide
  Antisense strand to SEQ ID NO: 1425356
uaaaugaggaagaaacgaa

SEQ ID NO: 1425358 - RNA, 19 nt, Artificial Sequence
  Description of Artificial Sequence: Synthetic oligonucleotide
  Sense strand starting at position 3177 of SEQ ID NO: 1243569
guuucuuccucauuuagua

SEQ ID NO: 1425359 - RNA, 19 nt, Artificial Sequence
  Description of Artificial Sequence: Synthetic oligonucleotide
  Antisense strand to SEQ ID NO: 1425358
uacuaaaugaggaagaaac

SEQ ID NO: 1425360 - RNA, 19 nt, Artificial Sequence
  Description of Artificial Sequence: Synthetic oligonucleotide
  Sense strand starting at position 3185 of SEQ ID NO: 1243569
cucauuuaguaauagaggu

SEQ ID NO: 1425361 - RNA, 19 nt, Artificial Sequence
  Description of Artificial Sequence: Synthetic oligonucleotide
  Antisense strand to SEQ ID NO: 1425360
accucuauuacuaaaugag

SEQ ID NO: 1425362 - RNA, 19 nt, Artificial Sequence
  Description of Artificial Sequence: Synthetic oligonucleotide
  Sense strand starting at position 3433 of SEQ ID NO: 1243569
uuuccucuuugguugaaca

SEQ ID NO: 1425363 - RNA, 19 nt, Artificial Sequence
  Description of Artificial Sequence: Synthetic oligonucleotide
  Antisense strand to SEQ ID NO: 1425362
uguucaaccaaagaggaaa

SEQ ID NO: 1425364 - RNA, 19 nt, Artificial Sequence
  Description of Artificial Sequence: Synthetic oligonucleotide
  Sense strand starting at position 3434 of SEQ ID NO: 1243569
uuccucuuugguugaacau

SEQ ID NO: 1425365 - RNA, 19 nt, Artificial Sequence
  Description of Artificial Sequence: Synthetic oligonucleotide
  Antisense strand to SEQ ID NO: 1425364
auguucaaccaaagaggaa

SEQ ID NO: 1425366 - RNA, 19 nt, Artificial Sequence
  Description of Artificial Sequence: Synthetic oligonucleotide
  Sense strand starting at position 3447 of SEQ ID NO: 1243569
gaacaugauccggaguuuc

SEQ ID NO: 1425367 - RNA, 19 nt, Artificial Sequence
  Description of Artificial Sequence: Synthetic oligonucleotide
  Antisense strand to SEQ ID NO: 1425366
gaaacuccggaucauguuc

SEQ ID NO: 1425368 - RNA, 19 nt, Artificial Sequence
  Description of Artificial Sequence: Synthetic oligonucleotide
  Sense strand starting at position 3905 of SEQ ID NO: 1243569
guuuccauaucuguuaaug

SEQ ID NO: 1425369 - RNA, 19 nt, Artificial Sequence
  Description of Artificial Sequence: Synthetic oligonucleotide
  Antisense strand to SEQ ID NO: 1425368
cauuaacagauauggaaac

SEQ ID NO: 1425370 - RNA, 19 nt, Artificial Sequence
  Description of Artificial Sequence: Synthetic oligonucleotide
  Sense strand starting at position 533 of SEQ ID NO: 1243570
caggaagaaucauaaagag

SEQ ID NO: 1425371 - RNA, 19 nt, Artificial Sequence
  Description of Artificial Sequence: Synthetic oligonucleotide
  Antisense strand to SEQ ID NO: 1425370
cucuuuaugauucuuccug

SEQ ID NO: 1425372 - RNA, 19 nt, Artificial Sequence
  Description of Artificial Sequence: Synthetic oligonucleotide
  Sense strand starting at position 661 of SEQ ID NO: 1243570
ucucuaacggugugauaaa

SEQ ID NO: 1425373 - RNA, 19 nt, Artificial Sequence
  Description of Artificial Sequence: Synthetic oligonucleotide
  Antisense strand to SEQ ID NO: 1425372
uuuaucacaccguuagaga

SEQ ID NO: 1425374 - RNA, 19 nt, Artificial Sequence
  Description of Artificial Sequence: Synthetic oligonucleotide
  Sense strand starting at position 672 of SEQ ID NO: 1243570
gugauaaauuaaucacuug

SEQ ID NO: 1425375 - RNA, 19 nt, Artificial Sequence
  Description of Artificial Sequence: Synthetic oligonucleotide
  Antisense strand to SEQ ID NO: 1425374
caagugauuaauuuaucac

SEQ ID NO: 1425376 - RNA, 19 nt, Artificial Sequence
  Description of Artificial Sequence: Synthetic oligonucleotide
  Sense strand starting at position 679 of SEQ ID NO: 1243570
auuaaucacuugggauuua

SEQ ID NO: 1425377 - RNA, 19 nt, Artificial Sequence
  Description of Artificial Sequence: Synthetic oligonucleotide
  Antisense strand to SEQ ID NO: 1425376
uaaaucccaagugauuaau

SEQ ID NO: 1425378 - RNA, 19 nt, Artificial Sequence
  Description of Artificial Sequence: Synthetic oligonucleotide
  Sense strand starting at position 680 of SEQ ID NO: 1243570
uuaaucacuugggauuuau

SEQ ID NO: 1425379 - RNA, 19 nt, Artificial Sequence
  Description of Artificial Sequence: Synthetic oligonucleotide
  Antisense strand to SEQ ID NO: 1425378
auaaaucccaagugauuaa

SEQ ID NO: 1425380 - RNA, 19 nt, Artificial Sequence
  Description of Artificial Sequence: Synthetic oligonucleotide
  Sense strand starting at position 690 of SEQ ID NO: 1243570
gggauuuauuauuacucaa

SEQ ID NO: 1425381 - RNA, 19 nt, Artificial Sequence
  Description of Artificial Sequence: Synthetic oligonucleotide
  Antisense strand to SEQ ID NO: 1425380
uugaguaauaauaaauccc

SEQ ID NO: 1425382 - RNA, 19 nt, Artificial Sequence
  Description of Artificial Sequence: Synthetic oligonucleotide
  Sense strand starting at position 710 of SEQ ID NO: 1243570
gaguguggagucuagaaau

SEQ ID NO: 1425383 - RNA, 19 nt, Artificial Sequence
  Description of Artificial Sequence: Synthetic oligonucleotide
  Antisense strand to SEQ ID NO: 1425382
auuucuagacuccacacuc

SEQ ID NO: 1425384 - RNA, 19 nt, Artificial Sequence
  Description of Artificial Sequence: Synthetic oligonucleotide
  Sense strand starting at position 716 of SEQ ID NO: 1243570
ggagucuagaaaugugcuu

SEQ ID NO: 1425385 - RNA, 19 nt, Artificial Sequence
  Description of Artificial Sequence: Synthetic oligonucleotide
  Antisense strand to SEQ ID NO: 1425384
aagcacauuucuagacucc

SEQ ID NO: 1425386 - RNA, 19 nt, Artificial Sequence
  Description of Artificial Sequence: Synthetic oligonucleotide
  Sense strand starting at position 852 of SEQ ID NO: 1243570
ccaggaguuccuuggcaaa

SEQ ID NO: 1425387 - RNA, 19 nt, Artificial Sequence
  Description of Artificial Sequence: Synthetic oligonucleotide
  Antisense strand to SEQ ID NO: 1425386
uuugccaaggaacuccugg

SEQ ID NO: 1425388 - RNA, 19 nt, Artificial Sequence
  Description of Artificial Sequence: Synthetic oligonucleotide
  Sense strand starting at position 1282 of SEQ ID NO: 1243570
uccagacggagcuaugaua

SEQ ID NO: 1425389 - RNA, 19 nt, Artificial Sequence
  Description of Artificial Sequence: Synthetic oligonucleotide
  Antisense strand to SEQ ID NO: 1425388
uaucauagcuccgucugga

SEQ ID NO: 1425390 - RNA, 19 nt, Artificial Sequence
  Description of Artificial Sequence: Synthetic oligonucleotide
  Sense strand starting at position 1293 of SEQ ID NO: 1243570
cuaugauaucagcacugca

SEQ ID NO: 1425391 - RNA, 19 nt, Artificial Sequence
  Description of Artificial Sequence: Synthetic oligonucleotide
  Antisense strand to SEQ ID NO: 1425390
ugcagugcugauaucauag

SEQ ID NO: 1425392 - RNA, 19 nt, Artificial Sequence
  Description of Artificial Sequence: Synthetic oligonucleotide
  Sense strand starting at position 1457 of SEQ ID NO: 1243570
uugguaaaccauuaugugu

SEQ ID NO: 1425393 - RNA, 19 nt, Artificial Sequence
  Description of Artificial Sequence: Synthetic oligonucleotide
  Antisense strand to SEQ ID NO: 1425392
acacauaaugguuuaccaa

SEQ ID NO: 1425394 - RNA, 19 nt, Artificial Sequence
  Description of Artificial Sequence: Synthetic oligonucleotide
  Sense strand starting at position 1476 of SEQ ID NO: 1243570
guggucuuggaacgaagaa

SEQ ID NO: 1425395 - RNA, 19 nt, Artificial Sequence
  Description of Artificial Sequence: Synthetic oligonucleotide
  Antisense strand to SEQ ID NO: 1425394
uucuucguuccaagaccac

SEQ ID NO: 1425396 - RNA, 19 nt, Artificial Sequence
  Description of Artificial Sequence: Synthetic oligonucleotide
  Sense strand starting at position 1488 of SEQ ID NO: 1243570
cgaagaacacuuggucaaa

SEQ ID NO: 1425397 - RNA, 19 nt, Artificial Sequence
  Description of Artificial Sequence: Synthetic oligonucleotide
  Antisense strand to SEQ ID NO: 1425396
uuugaccaaguguucuucg

SEQ ID NO: 1425398 - RNA, 19 nt, Artificial Sequence
  Description of Artificial Sequence: Synthetic oligonucleotide
  Sense strand starting at position 1584 of SEQ ID NO: 1243570
gaccgaaagcagcaauaaa

SEQ ID NO: 1425399 - RNA, 19 nt, Artificial Sequence
  Description of Artificial Sequence: Synthetic oligonucleotide
  Antisense strand to SEQ ID NO: 1425398
uuuauugcugcuuucgguc

SEQ ID NO: 1425400 - RNA, 19 nt, Artificial Sequence
  Description of Artificial Sequence: Synthetic oligonucleotide
  Sense strand starting at position 1867 of SEQ ID NO: 1243570
uaccgcuccgcgguuaaua

SEQ ID NO: 1425401 - RNA, 19 nt, Artificial Sequence
  Description of Artificial Sequence: Synthetic oligonucleotide
  Antisense strand to SEQ ID NO: 1425400
uauuaaccgcggagcggua

SEQ ID NO: 1425402 - RNA, 19 nt, Artificial Sequence
  Description of Artificial Sequence: Synthetic oligonucleotide
  Sense strand starting at position 1868 of SEQ ID NO: 1243570
accgcuccgcgguuaauaa

SEQ ID NO: 1425403 - RNA, 19 nt, Artificial Sequence
  Description of Artificial Sequence: Synthetic oligonucleotide
  Antisense strand to SEQ ID NO: 1425402
uuauuaaccgcggagcggu

SEQ ID NO: 1425404 - RNA, 19 nt, Artificial Sequence
  Description of Artificial Sequence: Synthetic oligonucleotide
  Sense strand starting at position 2056 of SEQ ID NO: 1243570
cuuugauuggucgaaguuc

SEQ ID NO: 1425405 - RNA, 19 nt, Artificial Sequence
  Description of Artificial Sequence: Synthetic oligonucleotide
  Antisense strand to SEQ ID NO: 1425404
gaacuucgaccaaucaaag

SEQ ID NO: 1425406 - RNA, 19 nt, Artificial Sequence
  Description of Artificial Sequence: Synthetic oligonucleotide
  Sense strand starting at position 2488 of SEQ ID NO: 1243570
gaaggaguaucuuugugua

SEQ ID NO: 1425407 - RNA, 19 nt, Artificial Sequence
  Description of Artificial Sequence: Synthetic oligonucleotide
  Antisense strand to SEQ ID NO: 1425406
uacacaaagauacuccuuc

SEQ ID NO: 1425408 - RNA, 19 nt, Artificial Sequence
  Description of Artificial Sequence: Synthetic oligonucleotide
  Sense strand starting at position 2566 of SEQ ID NO: 1243570
agaggcauuacguauugua

SEQ ID NO: 1425409 - RNA, 19 nt, Artificial Sequence
  Description of Artificial Sequence: Synthetic oligonucleotide
  Antisense strand to SEQ ID NO: 1425408
uacaauacguaaugccucu

SEQ ID NO: 1425410 - RNA, 19 nt, Artificial Sequence
  Description of Artificial Sequence: Synthetic oligonucleotide
  Sense strand starting at position 2628 of SEQ ID NO: 1243570
caggaucccacgcgagaau

SEQ ID NO: 1425411 - RNA, 19 nt, Artificial Sequence
  Description of Artificial Sequence: Synthetic oligonucleotide
  Antisense strand to SEQ ID NO: 1425410
auucucgcgugggauccug

SEQ ID NO: 1425412 - RNA, 19 nt, Artificial Sequence
  Description of Artificial Sequence: Synthetic oligonucleotide
  Sense strand starting at position 2640 of SEQ ID NO: 1243570
cgagaauagagccauaggu

SEQ ID NO: 1425413 - RNA, 19 nt, Artificial Sequence
  Description of Artificial Sequence: Synthetic oligonucleotide
  Antisense strand to SEQ ID NO: 1425412
accuauggcucuauucucg

SEQ ID NO: 1425414 - RNA, 19 nt, Artificial Sequence
  Description of Artificial Sequence: Synthetic oligonucleotide
  Sense strand starting at position 2714 of SEQ ID NO: 1243570
gccagucauuuccuauugu

SEQ ID NO: 1425415 - RNA, 19 nt, Artificial Sequence
  Description of Artificial Sequence: Synthetic oligonucleotide
  Antisense strand to SEQ ID NO: 1425414
acaauaggaaaugacuggc

SEQ ID NO: 1425416 - RNA, 19 nt, Artificial Sequence
  Description of Artificial Sequence: Synthetic oligonucleotide
  Sense strand starting at position 2806 of SEQ ID NO: 1243570
cacugauugguugguaauc

SEQ ID NO: 1425417 - RNA, 19 nt, Artificial Sequence
  Description of Artificial Sequence: Synthetic oligonucleotide
  Antisense strand to SEQ ID NO: 1425416
gauuaccaaccaaucagug

SEQ ID NO: 1425418 - RNA, 19 nt, Artificial Sequence
  Description of Artificial Sequence: Synthetic oligonucleotide
  Sense strand starting at position 2807 of SEQ ID NO: 1243570
acugauugguugguaaucu

SEQ ID NO: 1425419 - RNA, 19 nt, Artificial Sequence
  Description of Artificial Sequence: Synthetic oligonucleotide
  Antisense strand to SEQ ID NO: 1425418
agauuaccaaccaaucagu

SEQ ID NO: 1425420 - RNA, 19 nt, Artificial Sequence
  Description of Artificial Sequence: Synthetic oligonucleotide
  Sense strand starting at position 2818 of SEQ ID NO: 1243570
gguaaucuuggccaguuua

SEQ ID NO: 1425421 - RNA, 19 nt, Artificial Sequence
  Description of Artificial Sequence: Synthetic oligonucleotide
  Antisense strand to SEQ ID NO: 1425420
uaaacuggccaagauuacc

SEQ ID NO: 1425422 - RNA, 19 nt, Artificial Sequence
  Description of Artificial Sequence: Synthetic oligonucleotide
  Sense strand starting at position 2882 of SEQ ID NO: 1243570
ggcuaacucagaggguaau

SEQ ID NO: 1425423 - RNA, 19 nt, Artificial Sequence
  Description of Artificial Sequence: Synthetic oligonucleotide
  Antisense strand to SEQ ID NO: 1425422
auuacccucugaguuagcc

SEQ ID NO: 1425424 - RNA, 19 nt, Artificial Sequence
  Description of Artificial Sequence: Synthetic oligonucleotide
  Sense strand starting at position 2883 of SEQ ID NO: 1243570
gcuaacucagaggguaauu

SEQ ID NO: 1425425 - RNA, 19 nt, Artificial Sequence
  Description of Artificial Sequence: Synthetic oligonucleotide
  Antisense strand to SEQ ID NO: 1425424
aauuacccucugaguuagc

SEQ ID NO: 1425426 - RNA, 19 nt, Artificial Sequence
  Description of Artificial Sequence: Synthetic oligonucleotide
  Sense strand starting at position 2976 of SEQ ID NO: 1243570
aaugauagguaccuugaua

SEQ ID NO: 1425427 - RNA, 19 nt, Artificial Sequence
  Description of Artificial Sequence: Synthetic oligonucleotide
  Antisense strand to SEQ ID NO: 1425426
uaucaagguaccuaucauu

SEQ ID NO: 1425428 - RNA, 19 nt, Artificial Sequence
  Description of Artificial Sequence: Synthetic oligonucleotide
  Sense strand starting at position 3039 of SEQ ID NO: 1243570
ggcacauuccuguaucuaa

SEQ ID NO: 1425429 - RNA, 19 nt, Artificial Sequence
  Description of Artificial Sequence: Synthetic oligonucleotide
  Antisense strand to SEQ ID NO: 1425428
uuagauacaggaaugugcc

SEQ ID NO: 1425430 - RNA, 19 nt, Artificial Sequence
  Description of Artificial Sequence: Synthetic oligonucleotide
  Sense strand starting at position 3197 of SEQ ID NO: 1243570
caguuacagguugguuaau

SEQ ID NO: 1425431 - RNA, 19 nt, Artificial Sequence
  Description of Artificial Sequence: Synthetic oligonucleotide
  Antisense strand to SEQ ID NO: 1425430
auuaaccaaccuguaacug

SEQ ID NO: 1425432 - RNA, 19 nt, Artificial Sequence
  Description of Artificial Sequence: Synthetic oligonucleotide
  Sense strand starting at position 3271 of SEQ ID NO: 1243570
guugguaacguugacaaua

SEQ ID NO: 1425433 - RNA, 19 nt, Artificial Sequence
  Description of Artificial Sequence: Synthetic oligonucleotide
  Antisense strand to SEQ ID NO: 1425432
uauugucaacguuaccaac

SEQ ID NO: 1425434 - RNA, 19 nt, Artificial Sequence
  Description of Artificial Sequence: Synthetic oligonucleotide
  Sense strand starting at position 3441 of SEQ ID NO: 1243570
aaauuagggcuuuguuaca

SEQ ID NO: 1425435 - RNA, 19 nt, Artificial Sequence
  Description of Artificial Sequence: Synthetic oligonucleotide
  Antisense strand to SEQ ID NO: 1425434
uguaacaaagcccuaauuu

SEQ ID NO: 1425436 - RNA, 19 nt, Artificial Sequence
  Description of Artificial Sequence: Synthetic oligonucleotide
  Sense strand starting at position 3519 of SEQ ID NO: 1243570
augauaucucuugacagcu

SEQ ID NO: 1425437 - RNA, 19 nt, Artificial Sequence
  Description of Artificial Sequence: Synthetic oligonucleotide
  Antisense strand to SEQ ID NO: 1425436
agcugucaagagauaucau

SEQ ID NO: 1425438 - RNA, 19 nt, Artificial Sequence
  Description of Artificial Sequence: Synthetic oligonucleotide
  Sense strand starting at position 3619 of SEQ ID NO: 1243570
gaagaaugguaagaacaaa

SEQ ID NO: 1425439 - RNA, 19 nt, Artificial Sequence
  Description of Artificial Sequence: Synthetic oligonucleotide
  Antisense strand to SEQ ID NO: 1425438
uuuguucuuaccauucuuc

SEQ ID NO: 1425440 - RNA, 19 nt, Artificial Sequence
  Description of Artificial Sequence: Synthetic oligonucleotide
  Sense strand starting at position 3684 of SEQ ID NO: 1243570
gcuaauagccuguauauga

SEQ ID NO: 1425441 - RNA, 19 nt, Artificial Sequence
  Description of Artificial Sequence: Synthetic oligonucleotide
  Antisense strand to SEQ ID NO: 1425440
ucauauacaggcuauuagc

SEQ ID NO: 1425442 - RNA, 19 nt, Artificial Sequence
  Description of Artificial Sequence: Synthetic oligonucleotide
  Sense strand starting at position 3692 of SEQ ID NO: 1243570
ccuguauaugaagguguaa

SEQ ID NO: 1425443 - RNA, 19 nt, Artificial Sequence
  Description of Artificial Sequence: Synthetic oligonucleotide
  Antisense strand to SEQ ID NO: 1425442
uuacaccuucauauacagg

SEQ ID NO: 1425444 - RNA, 19 nt, Artificial Sequence
  Description of Artificial Sequence: Synthetic oligonucleotide
  Sense strand starting at position 3694 of SEQ ID NO: 1243570
uguauaugaagguguaagu

SEQ ID NO: 1425445 - RNA, 19 nt, Artificial Sequence
  Description of Artificial Sequence: Synthetic oligonucleotide
  Antisense strand to SEQ ID NO: 1425444
acuuacaccuucauauaca

SEQ ID NO: 1425446 - RNA, 19 nt, Artificial Sequence
  Description of Artificial Sequence: Synthetic oligonucleotide
  Sense strand starting at position 3716 of SEQ ID NO: 1243570
ggagauguucaugguugag

SEQ ID NO: 1425447 - RNA, 19 nt, Artificial Sequence
  Description of Artificial Sequence: Synthetic oligonucleotide
  Antisense strand to SEQ ID NO: 1425446
cucaaccaugaacaucucc

SEQ ID NO: 1425448 - RNA, 19 nt, Artificial Sequence
  Description of Artificial Sequence: Synthetic oligonucleotide
  Sense strand starting at position 3739 of SEQ ID NO: 1243570
ugugguguucacguaguca

SEQ ID NO: 1425449 - RNA, 19 nt, Artificial Sequence
  Description of Artificial Sequence: Synthetic oligonucleotide
  Antisense strand to SEQ ID NO: 1425448
ugacuacgugaacaccaca

SEQ ID NO: 1425450 - RNA, 19 nt, Artificial Sequence
  Description of Artificial Sequence: Synthetic oligonucleotide
  Sense strand starting at position 17 of SEQ ID NO: 1243571
ugaggguugcagugggaau

SEQ ID NO: 1425451 - RNA, 19 nt, Artificial Sequence
  Description of Artificial Sequence: Synthetic oligonucleotide
  Antisense strand to SEQ ID NO: 1425450
auucccacugcaacccuca

SEQ ID NO: 1425452 - RNA, 19 nt, Artificial Sequence
  Description of Artificial Sequence: Synthetic oligonucleotide
  Sense strand starting at position 18 of SEQ ID NO: 1243571
gaggguugcagugggaauu

SEQ ID NO: 1425453 - RNA, 19 nt, Artificial Sequence
  Description of Artificial Sequence: Synthetic oligonucleotide
  Antisense strand to SEQ ID NO: 1425452
aauucccacugcaacccuc

SEQ ID NO: 1425454 - RNA, 19 nt, Artificial Sequence
  Description of Artificial Sequence: Synthetic oligonucleotide
  Sense strand starting at position 30 of SEQ ID NO: 1243571
gggaauuccugagcacgca

SEQ ID NO: 1425455 - RNA, 19 nt, Artificial Sequence
  Description of Artificial Sequence: Synthetic oligonucleotide
  Antisense strand to SEQ ID NO: 1425454
ugcgugcucaggaauuccc

SEQ ID NO: 1425456 - RNA, 19 nt, Artificial Sequence
  Description of Artificial Sequence: Synthetic oligonucleotide
  Sense strand starting at position 31 of SEQ ID NO: 1243571
ggaauuccugagcacgcau

SEQ ID NO: 1425457 - RNA, 19 nt, Artificial Sequence
  Description of Artificial Sequence: Synthetic oligonucleotide
  Antisense strand to SEQ ID NO: 1425456
augcgugcucaggaauucc

SEQ ID NO: 1425458 - RNA, 19 nt, Artificial Sequence
  Description of Artificial Sequence: Synthetic oligonucleotide
  Sense strand starting at position 441 of SEQ ID NO: 1243571
gucuucuuuccggaaggaa

SEQ ID NO: 1425459 - RNA, 19 nt, Artificial Sequence
  Description of Artificial Sequence: Synthetic oligonucleotide
  Antisense strand to SEQ ID NO: 1425458
uuccuuccggaaagaagac

SEQ ID NO: 1425460 - RNA, 19 nt, Artificial Sequence
  Description of Artificial Sequence: Synthetic oligonucleotide
  Sense strand starting at position 569 of SEQ ID NO: 1243571
gggccaagguccucuguga

SEQ ID NO: 1425461 - RNA, 19 nt, Artificial Sequence
  Description of Artificial Sequence: Synthetic oligonucleotide
  Antisense strand to SEQ ID NO: 1425460
ucacagaggaccuuggccc

SEQ ID NO: 1425462 - RNA, 19 nt, Artificial Sequence
  Description of Artificial Sequence: Synthetic oligonucleotide
  Sense strand starting at position 641 of SEQ ID NO: 1243571
augacagacugauagaauc

SEQ ID NO: 1425463 - RNA, 19 nt, Artificial Sequence
  Description of Artificial Sequence: Synthetic oligonucleotide
  Antisense strand to SEQ ID NO: 1425462
gauucuaucagucugucau

SEQ ID NO: 1425464 - RNA, 19 nt, Artificial Sequence
  Description of Artificial Sequence: Synthetic oligonucleotide
  Sense strand starting at position 698 of SEQ ID NO: 1243571
cccacaaauugcucagaga

SEQ ID NO: 1425465 - RNA, 19 nt, Artificial Sequence
  Description of Artificial Sequence: Synthetic oligonucleotide
  Antisense strand to SEQ ID NO: 1425464
ucucugagcaauuuguggg

SEQ ID NO: 1425466 - RNA, 19 nt, Artificial Sequence
  Description of Artificial Sequence: Synthetic oligonucleotide
  Sense strand starting at position 712 of SEQ ID NO: 1243571
agagaauugcagcaucucu

SEQ ID NO: 1425467 - RNA, 19 nt, Artificial Sequence
  Description of Artificial Sequence: Synthetic oligonucleotide
  Antisense strand to SEQ ID NO: 1425466
agagaugcugcaauucucu

SEQ ID NO: 1425468 - RNA, 19 nt, Artificial Sequence
  Description of Artificial Sequence: Synthetic oligonucleotide
  Sense strand starting at position 742 of SEQ ID NO: 1243571
gauguaaacgucuacuuaa

SEQ ID NO: 1425469 - RNA, 19 nt, Artificial Sequence
  Description of Artificial Sequence: Synthetic oligonucleotide
  Antisense strand to SEQ ID NO: 1425468
uuaaguagacguuuacauc

SEQ ID NO: 1425470 - RNA, 19 nt, Artificial Sequence
  Description of Artificial Sequence: Synthetic oligonucleotide
  Sense strand starting at position 745 of SEQ ID NO: 1243571
guaaacgucuacuuaaaga

SEQ ID NO: 1425471 - RNA, 19 nt, Artificial Sequence
  Description of Artificial Sequence: Synthetic oligonucleotide
  Antisense strand to SEQ ID NO: 1425470
ucuuuaaguagacguuuac

SEQ ID NO: 1425472 - RNA, 19 nt, Artificial Sequence
  Description of Artificial Sequence: Synthetic oligonucleotide
  Sense strand starting at position 842 of SEQ ID NO: 1243571
ggcagaugucaccagccga

SEQ ID NO: 1425473 - RNA, 19 nt, Artificial Sequence
  Description of Artificial Sequence: Synthetic oligonucleotide
  Antisense strand to SEQ ID NO: 1425472
ucggcuggugacaucugcc

SEQ ID NO: 1425474 - RNA, 19 nt, Artificial Sequence
  Description of Artificial Sequence: Synthetic oligonucleotide
  Sense strand starting at position 858 of SEQ ID NO: 1243571
cgaagccuucuaugaacaa

SEQ ID NO: 1425475 - RNA, 19 nt, Artificial Sequence
  Description of Artificial Sequence: Synthetic oligonucleotide
  Antisense strand to SEQ ID NO: 1425474
uuguucauagaaggcuucg

SEQ ID NO: 1425476 - RNA, 19 nt, Artificial Sequence
  Description of Artificial Sequence: Synthetic oligonucleotide
  Sense strand starting at position 1227 of SEQ ID NO: 1243571
gaaggaguuugcucagggu

SEQ ID NO: 1425477 - RNA, 19 nt, Artificial Sequence
  Description of Artificial Sequence: Synthetic oligonucleotide
  Antisense strand to SEQ ID NO: 1425476
acccugagcaaacuccuuc

SEQ ID NO: 1425478 - RNA, 19 nt, Artificial Sequence
  Description of Artificial Sequence: Synthetic oligonucleotide
  Sense strand starting at position 1231 of SEQ ID NO: 1243571
gaguuugcucagggucauc

SEQ ID NO: 1425479 - RNA, 19 nt, Artificial Sequence
  Description of Artificial Sequence: Synthetic oligonucleotide
  Antisense strand to SEQ ID NO: 1425478
gaugacccugagcaaacuc

SEQ ID NO: 1425480 - RNA, 19 nt, Artificial Sequence
  Description of Artificial Sequence: Synthetic oligonucleotide
  Sense strand starting at position 1278 of SEQ ID NO: 1243571
ugagaaugcccagaguuug

SEQ ID NO: 1425481 - RNA, 19 nt, Artificial Sequence
  Description of Artificial Sequence: Synthetic oligonucleotide
  Antisense strand to SEQ ID NO: 1425480
caaacucugggcauucuca

SEQ ID NO: 1425482 - RNA, 19 nt, Artificial Sequence
  Description of Artificial Sequence: Synthetic oligonucleotide
  Sense strand starting at position 1339 of SEQ ID NO: 1243571
ugccuuguuuccucgaaug

SEQ ID NO: 1425483 - RNA, 19 nt, Artificial Sequence
  Description of Artificial Sequence: Synthetic oligonucleotide
  Antisense strand to SEQ ID NO: 1425482
cauucgaggaaacaaggca

SEQ ID NO: 1425484 - RNA, 19 nt, Artificial Sequence
  Description of Artificial Sequence: Synthetic oligonucleotide
  Sense strand starting at position 1341 of SEQ ID NO: 1243571
ccuuguuuccucgaaugga

SEQ ID NO: 1425485 - RNA, 19 nt, Artificial Sequence
  Description of Artificial Sequence: Synthetic oligonucleotide
  Antisense strand to SEQ ID NO: 1425484
uccauucgaggaaacaagg

SEQ ID NO: 1425486 - RNA, 19 nt, Artificial Sequence
  Description of Artificial Sequence: Synthetic oligonucleotide
  Sense strand starting at position 1396 of SEQ ID NO: 1243571
caccgaguucuccaucuga

SEQ ID NO: 1425487 - RNA, 19 nt, Artificial Sequence
  Description of Artificial Sequence: Synthetic oligonucleotide
  Antisense strand to SEQ ID NO: 1425486
ucagauggagaacucggug

SEQ ID NO: 1425488 - RNA, 19 nt, Artificial Sequence
  Description of Artificial Sequence: Synthetic oligonucleotide
  Sense strand starting at position 2208 of SEQ ID NO: 1243571
acgaacuggcguugucaga

SEQ ID NO: 1425489 - RNA, 19 nt, Artificial Sequence
  Description of Artificial Sequence: Synthetic oligonucleotide
  Antisense strand to SEQ ID NO: 1425488
ucugacaacgccaguucgu

SEQ ID NO: 1425490 - RNA, 19 nt, Artificial Sequence
  Description of Artificial Sequence: Synthetic oligonucleotide
  Sense strand starting at position 2215 of SEQ ID NO: 1243571
ggcguugucagaugaaaca

SEQ ID NO: 1425491 - RNA, 19 nt, Artificial Sequence
  Description of Artificial Sequence: Synthetic oligonucleotide
  Antisense strand to SEQ ID NO: 1425490
uguuucaucugacaacgcc

SEQ ID NO: 1425492 - RNA, 19 nt, Artificial Sequence
  Description of Artificial Sequence: Synthetic oligonucleotide
  Sense strand starting at position 2268 of SEQ ID NO: 1243571
ggucaugucuuaguguaag

SEQ ID NO: 1425493 - RNA, 19 nt, Artificial Sequence
  Description of Artificial Sequence: Synthetic oligonucleotide
  Antisense strand to SEQ ID NO: 1425492
cuuacacuaagacaugacc

SEQ ID NO: 1425494 - RNA, 19 nt, Artificial Sequence
  Description of Artificial Sequence: Synthetic oligonucleotide
  Sense strand starting at position 2271 of SEQ ID NO: 1243571
caugucuuaguguaaguau

SEQ ID NO: 1425495 - RNA, 19 nt, Artificial Sequence
  Description of Artificial Sequence: Synthetic oligonucleotide
  Antisense strand to SEQ ID NO: 1425494
auacuuacacuaagacaug

SEQ ID NO: 1425496 - RNA, 19 nt, Artificial Sequence
  Description of Artificial Sequence: Synthetic oligonucleotide
  Sense strand starting at position 2280 of SEQ ID NO: 1243571
guguaaguauagcccaaau

SEQ ID NO: 1425497 - RNA, 19 nt, Artificial Sequence
  Description of Artificial Sequence: Synthetic oligonucleotide
  Antisense strand to SEQ ID NO: 1425496
auuugggcuauacuuacac

SEQ ID NO: 1425498 - RNA, 19 nt, Artificial Sequence
  Description of Artificial Sequence: Synthetic oligonucleotide
  Sense strand starting at position 2282 of SEQ ID NO: 1243571
guaaguauagcccaaauau

SEQ ID NO: 1425499 - RNA, 19 nt, Artificial Sequence
  Description of Artificial Sequence: Synthetic oligonucleotide
  Antisense strand to SEQ ID NO: 1425498
auauuugggcuauacuuac

SEQ ID NO: 1425500 - RNA, 19 nt, Artificial Sequence
  Description of Artificial Sequence: Synthetic oligonucleotide
  Sense strand starting at position 2325 of SEQ ID NO: 1243571
ugcugcuccuuaucugaaa

SEQ ID NO: 1425501 - RNA, 19 nt, Artificial Sequence
  Description of Artificial Sequence: Synthetic oligonucleotide
  Antisense strand to SEQ ID NO: 1425500
uuucagauaaggagcagca

SEQ ID NO: 1425502 - RNA, 19 nt, Artificial Sequence
  Description of Artificial Sequence: Synthetic oligonucleotide
  Sense strand starting at position 2326 of SEQ ID NO: 1243571
gcugcuccuuaucugaaau

SEQ ID NO: 1425503 - RNA, 19 nt, Artificial Sequence
  Description of Artificial Sequence: Synthetic oligonucleotide
  Antisense strand to SEQ ID NO: 1425502
auuucagauaaggagcagc

SEQ ID NO: 1425504 - RNA, 19 nt, Artificial Sequence
  Description of Artificial Sequence: Synthetic oligonucleotide
  Sense strand starting at position 2377 of SEQ ID NO: 1243571
ugcuaaaucuggccaccuu

SEQ ID NO: 1425505 - RNA, 19 nt, Artificial Sequence
  Description of Artificial Sequence: Synthetic oligonucleotide
  Antisense strand to SEQ ID NO: 1425504
aagguggccagauuuagca

SEQ ID NO: 1425506 - RNA, 19 nt, Artificial Sequence
  Description of Artificial Sequence: Synthetic oligonucleotide
  Sense strand starting at position 2378 of SEQ ID NO: 1243571
gcuaaaucuggccaccuua

SEQ ID NO: 1425507 - RNA, 19 nt, Artificial Sequence
  Description of Artificial Sequence: Synthetic oligonucleotide
  Antisense strand to SEQ ID NO: 1425506
uaagguggccagauuuagc

SEQ ID NO: 1425508 - RNA, 19 nt, Artificial Sequence
  Description of Artificial Sequence: Synthetic oligonucleotide
  Sense strand starting at position 2401 of SEQ ID NO: 1243571
gaaaccggucucugguauu

SEQ ID NO: 1425509 - RNA, 19 nt, Artificial Sequence
  Description of Artificial Sequence: Synthetic oligonucleotide
  Antisense strand to SEQ ID NO: 1425508
aauaccagagaccgguuuc

SEQ ID NO: 1425510 - RNA, 19 nt, Artificial Sequence
  Description of Artificial Sequence: Synthetic oligonucleotide
  Sense strand starting at position 2743 of SEQ ID NO: 1243571
aguaaauuguaucaaugag

SEQ ID NO: 1425511 - RNA, 19 nt, Artificial Sequence
  Description of Artificial Sequence: Synthetic oligonucleotide
  Antisense strand to SEQ ID NO: 1425510
cucauugauacaauuuacu

SEQ ID NO: 1425512 - RNA, 19 nt, Artificial Sequence
  Description of Artificial Sequence: Synthetic oligonucleotide
  Sense strand starting at position 2753 of SEQ ID NO: 1243571
aucaaugagccugaacuuu

SEQ ID NO: 1425513 - RNA, 19 nt, Artificial Sequence
  Description of Artificial Sequence: Synthetic oligonucleotide
  Antisense strand to SEQ ID NO: 1425512
aaaguucaggcucauugau

SEQ ID NO: 1425514 - RNA, 19 nt, Artificial Sequence
  Description of Artificial Sequence: Synthetic oligonucleotide
  Sense strand starting at position 2796 of SEQ ID NO: 1243571
uugcucuugcuguaacaca

SEQ ID NO: 1425515 - RNA, 19 nt, Artificial Sequence
  Description of Artificial Sequence: Synthetic oligonucleotide
  Antisense strand to SEQ ID NO: 1425514
uguguuacagcaagagcaa

SEQ ID NO: 1425516 - RNA, 19 nt, Artificial Sequence
  Description of Artificial Sequence: Synthetic oligonucleotide
  Sense strand starting at position 2860 of SEQ ID NO: 1243571
gugauccaugcccagugaa

SEQ ID NO: 1425517 - RNA, 19 nt, Artificial Sequence
  Description of Artificial Sequence: Synthetic oligonucleotide
  Antisense strand to SEQ ID NO: 1425516
uucacugggcauggaucac

SEQ ID NO: 1425518 - RNA, 19 nt, Artificial Sequence
  Description of Artificial Sequence: Synthetic oligonucleotide
  Sense strand starting at position 2863 of SEQ ID NO: 1243571
auccaugcccagugaacuu

SEQ ID NO: 1425519 - RNA, 19 nt, Artificial Sequence
  Description of Artificial Sequence: Synthetic oligonucleotide
  Antisense strand to SEQ ID NO: 1425518
aaguucacugggcauggau

SEQ ID NO: 1425520 - RNA, 19 nt, Artificial Sequence
  Description of Artificial Sequence: Synthetic oligonucleotide
  Sense strand starting at position 2870 of SEQ ID NO: 1243571
cccagugaacuuggacuuu

SEQ ID NO: 1425521 - RNA, 19 nt, Artificial Sequence
  Description of Artificial Sequence: Synthetic oligonucleotide
  Antisense strand to SEQ ID NO: 1425520
aaaguccaaguucacuggg

SEQ ID NO: 1425522 - RNA, 19 nt, Artificial Sequence
  Description of Artificial Sequence: Synthetic oligonucleotide
  Sense strand starting at position 3710 of SEQ ID NO: 1243571
cgagaaacgcuugauccca

SEQ ID NO: 1425523 - RNA, 19 nt, Artificial Sequence
  Description of Artificial Sequence: Synthetic oligonucleotide
  Antisense strand to SEQ ID NO: 1425522
ugggaucaagcguuucucg

SEQ ID NO: 1425524 - RNA, 19 nt, Artificial Sequence
  Description of Artificial Sequence: Synthetic oligonucleotide
  Sense strand starting at position 3829 of SEQ ID NO: 1243571
aguuauuguaaggauguaa

SEQ ID NO: 1425525 - RNA, 19 nt, Artificial Sequence
  Description of Artificial Sequence: Synthetic oligonucleotide
  Antisense strand to SEQ ID NO: 1425524
uuacauccuuacaauaacu

SEQ ID NO: 1425526 - RNA, 19 nt, Artificial Sequence
  Description of Artificial Sequence: Synthetic oligonucleotide
  Sense strand starting at position 3887 of SEQ ID NO: 1243571
guaaucccagcuugaaauu

SEQ ID NO: 1425527 - RNA, 19 nt, Artificial Sequence
  Description of Artificial Sequence: Synthetic oligonucleotide
  Antisense strand to SEQ ID NO: 1425526
aauuucaagcugggauuac

SEQ ID NO: 1425528 - RNA, 19 nt, Artificial Sequence
  Description of Artificial Sequence: Synthetic oligonucleotide
  Sense strand starting at position 3960 of SEQ ID NO: 1243571
caugacuaacgcggugaaa

SEQ ID NO: 1425529 - RNA, 19 nt, Artificial Sequence
  Description of Artificial Sequence: Synthetic oligonucleotide
  Antisense strand to SEQ ID NO: 1425528
uuucaccgcguuagucaug

SEQ ID NO: 1425530 - RNA, 19 nt, Artificial Sequence
  Description of Artificial Sequence: Synthetic oligonucleotide
  Sense strand starting at position 68 of SEQ ID NO: 1243572
caggaaucaggcuguccau

SEQ ID NO: 1425531 - RNA, 19 nt, Artificial Sequence
  Description of Artificial Sequence: Synthetic oligonucleotide
  Antisense strand to SEQ ID NO: 1425530
auggacagccugauuccug

SEQ ID NO: 1425532 - RNA, 19 nt, Artificial Sequence
  Description of Artificial Sequence: Synthetic oligonucleotide
  Sense strand starting at position 212 of SEQ ID NO: 1243572
gaccuugggagucauguga

SEQ ID NO: 1425533 - RNA, 19 nt, Artificial Sequence
  Description of Artificial Sequence: Synthetic oligonucleotide
  Antisense strand to SEQ ID NO: 1425532
ucacaugacucccaagguc

SEQ ID NO: 1425534 - RNA, 19 nt, Artificial Sequence
  Description of Artificial Sequence: Synthetic oligonucleotide
  Sense strand starting at position 216 of SEQ ID NO: 1243572
uugggagucaugugagacu

SEQ ID NO: 1425535 - RNA, 19 nt, Artificial Sequence
  Description of Artificial Sequence: Synthetic oligonucleotide
  Antisense strand to SEQ ID NO: 1425534
agucucacaugacucccaa

SEQ ID NO: 1425536 - RNA, 19 nt, Artificial Sequence
  Description of Artificial Sequence: Synthetic oligonucleotide
  Sense strand starting at position 288 of SEQ ID NO: 1243572
ccugcuggcagugagaaua

SEQ ID NO: 1425537 - RNA, 19 nt, Artificial Sequence
  Description of Artificial Sequence: Synthetic oligonucleotide
  Antisense strand to SEQ ID NO: 1425536
uauucucacugccagcagg

SEQ ID NO: 1425538 - RNA, 19 nt, Artificial Sequence
  Description of Artificial Sequence: Synthetic oligonucleotide
  Sense strand starting at position 298 of SEQ ID NO: 1243572
gugagaauaggcuggagaa

SEQ ID NO: 1425539 - RNA, 19 nt, Artificial Sequence
  Description of Artificial Sequence: Synthetic oligonucleotide
  Antisense strand to SEQ ID NO: 1425538
uucuccagccuauucucac

SEQ ID NO: 1425540 - RNA, 19 nt, Artificial Sequence
  Description of Artificial Sequence: Synthetic oligonucleotide
  Sense strand starting at position 330 of SEQ ID NO: 1243572
agagguuucccaggcuaga

SEQ ID NO: 1425541 - RNA, 19 nt, Artificial Sequence
  Description of Artificial Sequence: Synthetic oligonucleotide
  Antisense strand to SEQ ID NO: 1425540
ucuagccugggaaaccucu

SEQ ID NO: 1425542 - RNA, 19 nt, Artificial Sequence
  Description of Artificial Sequence: Synthetic oligonucleotide
  Sense strand starting at position 509 of SEQ ID NO: 1243572
cugaauaggugcuccagaa

SEQ ID NO: 1425543 - RNA, 19 nt, Artificial Sequence
  Description of Artificial Sequence: Synthetic oligonucleotide
  Antisense strand to SEQ ID NO: 1425542
uucuggagcaccuauucag

SEQ ID NO: 1425544 - RNA, 19 nt, Artificial Sequence
  Description of Artificial Sequence: Synthetic oligonucleotide
  Sense strand starting at position 513 of SEQ ID NO: 1243572
auaggugcuccagaaacuu

SEQ ID NO: 1425545 - RNA, 19 nt, Artificial Sequence
  Description of Artificial Sequence: Synthetic oligonucleotide
  Antisense strand to SEQ ID NO: 1425544
aaguuucuggagcaccuau

SEQ ID NO: 1425546 - RNA, 19 nt, Artificial Sequence
  Description of Artificial Sequence: Synthetic oligonucleotide
  Sense strand starting at position 522 of SEQ ID NO: 1243572
ccagaaacuuuguugaaug

SEQ ID NO: 1425547 - RNA, 19 nt, Artificial Sequence
  Description of Artificial Sequence: Synthetic oligonucleotide
  Antisense strand to SEQ ID NO: 1425546
cauucaacaaaguuucugg

SEQ ID NO: 1425548 - RNA, 19 nt, Artificial Sequence
  Description of Artificial Sequence: Synthetic oligonucleotide
  Sense strand starting at position 544 of SEQ ID NO: 1243572
gaaugagugagaugucccu

SEQ ID NO: 1425549 - RNA, 19 nt, Artificial Sequence
  Description of Artificial Sequence: Synthetic oligonucleotide
  Antisense strand to SEQ ID NO: 1425548
agggacaucucacucauuc

SEQ ID NO: 1425550 - RNA, 19 nt, Artificial Sequence
  Description of Artificial Sequence: Synthetic oligonucleotide
  Sense strand starting at position 570 of SEQ ID NO: 1243572
ggaacaccuguuuggucua

SEQ ID NO: 1425551 - RNA, 19 nt, Artificial Sequence
  Description of Artificial Sequence: Synthetic oligonucleotide
  Antisense strand to SEQ ID NO: 1425550
uagaccaaacagguguucc

SEQ ID NO: 1425552 - RNA, 19 nt, Artificial Sequence
  Description of Artificial Sequence: Synthetic oligonucleotide
  Sense strand starting at position 573 of SEQ ID NO: 1243572
acaccuguuuggucuaaug

SEQ ID NO: 1425553 - RNA, 19 nt, Artificial Sequence
  Description of Artificial Sequence: Synthetic oligonucleotide
  Antisense strand to SEQ ID NO: 1425552
cauuagaccaaacaggugu

SEQ ID NO: 1425554 - RNA, 19 nt, Artificial Sequence
  Description of Artificial Sequence: Synthetic oligonucleotide
  Sense strand starting at position 584 of SEQ ID NO: 1243572
gucuaaugccuuuaaagau

SEQ ID NO: 1425555 - RNA, 19 nt, Artificial Sequence
  Description of Artificial Sequence: Synthetic oligonucleotide
  Antisense strand to SEQ ID NO: 1425554
aucuuuaaaggcauuagac

SEQ ID NO: 1425556 - RNA, 19 nt, Artificial Sequence
  Description of Artificial Sequence: Synthetic oligonucleotide
  Sense strand starting at position 593 of SEQ ID NO: 1243572
cuuuaaagaucaguuugca

SEQ ID NO: 1425557 - RNA, 19 nt, Artificial Sequence
  Description of Artificial Sequence: Synthetic oligonucleotide
  Antisense strand to SEQ ID NO: 1425556
ugcaaacugaucuuuaaag

SEQ ID NO: 1425558 - RNA, 19 nt, Artificial Sequence
  Description of Artificial Sequence: Synthetic oligonucleotide
  Sense strand starting at position 755 of SEQ ID NO: 1243572
gaacaaagcgcuugaagga

SEQ ID NO: 1425559 - RNA, 19 nt, Artificial Sequence
  Description of Artificial Sequence: Synthetic oligonucleotide
  Antisense strand to SEQ ID NO: 1425558
uccuucaagcgcuuuguuc

SEQ ID NO: 1425560 - RNA, 19 nt, Artificial Sequence
  Description of Artificial Sequence: Synthetic oligonucleotide
  Sense strand starting at position 960 of SEQ ID NO: 1243572
gaaguuagcguuuaggaag

SEQ ID NO: 1425561 - RNA, 19 nt, Artificial Sequence
  Description of Artificial Sequence: Synthetic oligonucleotide
  Antisense strand to SEQ ID NO: 1425560
cuuccuaaacgcuaacuuc

SEQ ID NO: 1425562 - RNA, 19 nt, Artificial Sequence
  Description of Artificial Sequence: Synthetic oligonucleotide
  Sense strand starting at position 967 of SEQ ID NO: 1243572
gcguuuaggaaguaaauua

SEQ ID NO: 1425563 - RNA, 19 nt, Artificial Sequence
  Description of Artificial Sequence: Synthetic oligonucleotide
  Antisense strand to SEQ ID NO: 1425562
uaauuuacuuccuaaacgc

SEQ ID NO: 1425564 - RNA, 19 nt, Artificial Sequence
  Description of Artificial Sequence: Synthetic oligonucleotide
  Sense strand starting at position 1004 of SEQ ID NO: 1243572
cuacuuaagcuccgagaau

SEQ ID NO: 1425565 - RNA, 19 nt, Artificial Sequence
  Description of Artificial Sequence: Synthetic oligonucleotide
  Antisense strand to SEQ ID NO: 1425564
auucucggagcuuaaguag

SEQ ID NO: 1425566 - RNA, 19 nt, Artificial Sequence
  Description of Artificial Sequence: Synthetic oligonucleotide
  Sense strand starting at position 1124 of SEQ ID NO: 1243572
guuugcucgggacagguaa

SEQ ID NO: 1425567 - RNA, 19 nt, Artificial Sequence
  Description of Artificial Sequence: Synthetic oligonucleotide
  Antisense strand to SEQ ID NO: 1425566
uuaccugucccgagcaaac

SEQ ID NO: 1425568 - RNA, 19 nt, Artificial Sequence
  Description of Artificial Sequence: Synthetic oligonucleotide
  Sense strand starting at position 1591 of SEQ ID NO: 1243572
cgaucccucuucccagaau

SEQ ID NO: 1425569 - RNA, 19 nt, Artificial Sequence
  Description of Artificial Sequence: Synthetic oligonucleotide
  Antisense strand to SEQ ID NO: 1425568
auucugggaagagggaucg

SEQ ID NO: 1425570 - RNA, 19 nt, Artificial Sequence
  Description of Artificial Sequence: Synthetic oligonucleotide
  Sense strand starting at position 1968 of SEQ ID NO: 1243572
ggaccaguucagggugacu

SEQ ID NO: 1425571 - RNA, 19 nt, Artificial Sequence
  Description of Artificial Sequence: Synthetic oligonucleotide
  Antisense strand to SEQ ID NO: 1425570
agucacccugaacuggucc

SEQ ID NO: 1425572 - RNA, 19 nt, Artificial Sequence
  Description of Artificial Sequence: Synthetic oligonucleotide
  Sense strand starting at position 2040 of SEQ ID NO: 1243572
gagcaucagcucuauggga

SEQ ID NO: 1425573 - RNA, 19 nt, Artificial Sequence
  Description of Artificial Sequence: Synthetic oligonucleotide
  Antisense strand to SEQ ID NO: 1425572
ucccauagagcugaugcuc

SEQ ID NO: 1425574 - RNA, 19 nt, Artificial Sequence
  Description of Artificial Sequence: Synthetic oligonucleotide
  Sense strand starting at position 2045 of SEQ ID NO: 1243572
ucagcucuaugggauuuaa

SEQ ID NO: 1425575 - RNA, 19 nt, Artificial Sequence
  Description of Artificial Sequence: Synthetic oligonucleotide
  Antisense strand to SEQ ID NO: 1425574
uuaaaucccauagagcuga

SEQ ID NO: 1425576 - RNA, 19 nt, Artificial Sequence
  Description of Artificial Sequence: Synthetic oligonucleotide
  Sense strand starting at position 2251 of SEQ ID NO: 1243572
cccggaaagcccuaucuca

SEQ ID NO: 1425577 - RNA, 19 nt, Artificial Sequence
  Description of Artificial Sequence: Synthetic oligonucleotide
  Antisense strand to SEQ ID NO: 1425576
ugagauagggcuuuccggg

SEQ ID NO: 1425578 - RNA, 19 nt, Artificial Sequence
  Description of Artificial Sequence: Synthetic oligonucleotide
  Sense strand starting at position 2393 of SEQ ID NO: 1243572
gccuuaaugcuugauggaa

SEQ ID NO: 1425579 - RNA, 19 nt, Artificial Sequence
  Description of Artificial Sequence: Synthetic oligonucleotide
  Antisense strand to SEQ ID NO: 1425578
uuccaucaagcauuaaggc

SEQ ID NO: 1425580 - RNA, 19 nt, Artificial Sequence
  Description of Artificial Sequence: Synthetic oligonucleotide
  Sense strand starting at position 2408 of SEQ ID NO: 1243572
ggaagucauggcugcagga

SEQ ID NO: 1425581 - RNA, 19 nt, Artificial Sequence
  Description of Artificial Sequence: Synthetic oligonucleotide
  Antisense strand to SEQ ID NO: 1425580
uccugcagccaugacuucc

SEQ ID NO: 1425582 - RNA, 19 nt, Artificial Sequence
  Description of Artificial Sequence: Synthetic oligonucleotide
  Sense strand starting at position 2410 of SEQ ID NO: 1243572
aagucauggcugcaggagu

SEQ ID NO: 1425583 - RNA, 19 nt, Artificial Sequence
  Description of Artificial Sequence: Synthetic oligonucleotide
  Antisense strand to SEQ ID NO: 1425582
acuccugcagccaugacuu

SEQ ID NO: 1425584 - RNA, 19 nt, Artificial Sequence
  Description of Artificial Sequence: Synthetic oligonucleotide
  Sense strand starting at position 2716 of SEQ ID NO: 1243572
aucacagucccaugggaua

SEQ ID NO: 1425585 - RNA, 19 nt, Artificial Sequence
  Description of Artificial Sequence: Synthetic oligonucleotide
  Antisense strand to SEQ ID NO: 1425584
uaucccaugggacugugau

SEQ ID NO: 1425586 - RNA, 19 nt, Artificial Sequence
  Description of Artificial Sequence: Synthetic oligonucleotide
  Sense strand starting at position 2729 of SEQ ID NO: 1243572
gggauaagguugcccauca

SEQ ID NO: 1425587 - RNA, 19 nt, Artificial Sequence
  Description of Artificial Sequence: Synthetic oligonucleotide
  Antisense strand to SEQ ID NO: 1425586
ugaugggcaaccuuauccc

SEQ ID NO: 1425588 - RNA, 19 nt, Artificial Sequence
  Description of Artificial Sequence: Synthetic oligonucleotide
  Sense strand starting at position 2730 of SEQ ID NO: 1243572
ggauaagguugcccaucau

SEQ ID NO: 1425589 - RNA, 19 nt, Artificial Sequence
  Description of Artificial Sequence: Synthetic oligonucleotide
  Antisense strand to SEQ ID NO: 1425588
augaugggcaaccuuaucc

SEQ ID NO: 1425590 - RNA, 19 nt, Artificial Sequence
  Description of Artificial Sequence: Synthetic oligonucleotide
  Sense strand starting at position 2783 of SEQ ID NO: 1243572
aagcgacugguguacuuaa

SEQ ID NO: 1425591 - RNA, 19 nt, Artificial Sequence
  Description of Artificial Sequence: Synthetic oligonucleotide
  Antisense strand to SEQ ID NO: 1425590
uuaaguacaccagucgcuu

SEQ ID NO: 1425592 - RNA, 19 nt, Artificial Sequence
  Description of Artificial Sequence: Synthetic oligonucleotide
  Sense strand starting at position 2834 of SEQ ID NO: 1243572
auuauuauuccugggcacu

SEQ ID NO: 1425593 - RNA, 19 nt, Artificial Sequence
  Description of Artificial Sequence: Synthetic oligonucleotide
  Antisense strand to SEQ ID NO: 1425592
agugcccaggaauaauaau

SEQ ID NO: 1425594 - RNA, 19 nt, Artificial Sequence
  Description of Artificial Sequence: Synthetic oligonucleotide
  Sense strand starting at position 2846 of SEQ ID NO: 1243572
gggcacugugguuaacacu

SEQ ID NO: 1425595 - RNA, 19 nt, Artificial Sequence
  Description of Artificial Sequence: Synthetic oligonucleotide
  Antisense strand to SEQ ID NO: 1425594
aguguuaaccacagugccc

SEQ ID NO: 1425596 - RNA, 19 nt, Artificial Sequence
  Description of Artificial Sequence: Synthetic oligonucleotide
  Sense strand starting at position 2869 of SEQ ID NO: 1243572
ugggcauaccucugagaug

SEQ ID NO: 1425597 - RNA, 19 nt, Artificial Sequence
  Description of Artificial Sequence: Synthetic oligonucleotide
  Antisense strand to SEQ ID NO: 1425596
caucucagagguaugccca

SEQ ID NO: 1425598 - RNA, 19 nt, Artificial Sequence
  Description of Artificial Sequence: Synthetic oligonucleotide
  Sense strand starting at position 2878 of SEQ ID NO: 1243572
cucugagaugcauggaaau

SEQ ID NO: 1425599 - RNA, 19 nt, Artificial Sequence
  Description of Artificial Sequence: Synthetic oligonucleotide
  Antisense strand to SEQ ID NO: 1425598
auuuccaugcaucucagag

SEQ ID NO: 1425600 - RNA, 19 nt, Artificial Sequence
  Description of Artificial Sequence: Synthetic oligonucleotide
  Sense strand starting at position 2900 of SEQ ID NO: 1243572
gcuuucuacccuugggaag

SEQ ID NO: 1425601 - RNA, 19 nt, Artificial Sequence
  Description of Artificial Sequence: Synthetic oligonucleotide
  Antisense strand to SEQ ID NO: 1425600
cuucccaaggguagaaagc

SEQ ID NO: 1425602 - RNA, 19 nt, Artificial Sequence
  Description of Artificial Sequence: Synthetic oligonucleotide
  Sense strand starting at position 2901 of SEQ ID NO: 1243572
cuuucuacccuugggaagu

SEQ ID NO: 1425603 - RNA, 19 nt, Artificial Sequence
  Description of Artificial Sequence: Synthetic oligonucleotide
  Antisense strand to SEQ ID NO: 1425602
acuucccaaggguagaaag

SEQ ID NO: 1425604 - RNA, 19 nt, Artificial Sequence
  Description of Artificial Sequence: Synthetic oligonucleotide
  Sense strand starting at position 2947 of SEQ ID NO: 1243572
agaggaauccugggagcgu

SEQ ID NO: 1425605 - RNA, 19 nt, Artificial Sequence
  Description of Artificial Sequence: Synthetic oligonucleotide
  Antisense strand to SEQ ID NO: 1425604
acgcucccaggauuccucu

SEQ ID NO: 1425606 - RNA, 19 nt, Artificial Sequence
  Description of Artificial Sequence: Synthetic oligonucleotide
  Sense strand starting at position 3933 of SEQ ID NO: 1243572
gcaggagaaucacuuaauu

SEQ ID NO: 1425607 - RNA, 19 nt, Artificial Sequence
  Description of Artificial Sequence: Synthetic oligonucleotide
  Antisense strand to SEQ ID NO: 1425606
aauuaagugauucuccugc

SEQ ID NO: 1425608 - RNA, 19 nt, Artificial Sequence
  Description of Artificial Sequence: Synthetic oligonucleotide
  Sense strand starting at position 3943 of SEQ ID NO: 1243572
cacuuaauucugggaggug

SEQ ID NO: 1425609 - RNA, 19 nt, Artificial Sequence
  Description of Artificial Sequence: Synthetic oligonucleotide
  Antisense strand to SEQ ID NO: 1425608
caccucccagaauuaagug

SEQ ID NO: 1425610 - RNA, 19 nt, Artificial Sequence
  Description of Artificial Sequence: Synthetic oligonucleotide
  Sense strand starting at position 212 of SEQ ID NO: 1243573
ugaauuaacuucgccucuu

SEQ ID NO: 1425611 - RNA, 19 nt, Artificial Sequence
  Description of Artificial Sequence: Synthetic oligonucleotide
  Antisense strand to SEQ ID NO: 1425610
aagaggcgaaguuaauuca

SEQ ID NO: 1425612 - RNA, 19 nt, Artificial Sequence
  Description of Artificial Sequence: Synthetic oligonucleotide
  Sense strand starting at position 293 of SEQ ID NO: 1243573
ggaccuaauuucuacuaga

SEQ ID NO: 1425613 - RNA, 19 nt, Artificial Sequence
  Description of Artificial Sequence: Synthetic oligonucleotide
  Antisense strand to SEQ ID NO: 1425612
ucuaguagaaauuaggucc

SEQ ID NO: 1425614 - RNA, 19 nt, Artificial Sequence
  Description of Artificial Sequence: Synthetic oligonucleotide
  Sense strand starting at position 336 of SEQ ID NO: 1243573
aaggcuucccugugcacaa

SEQ ID NO: 1425615 - RNA, 19 nt, Artificial Sequence
  Description of Artificial Sequence: Synthetic oligonucleotide
  Antisense strand to SEQ ID NO: 1425614
uugugcacagggaagccuu

SEQ ID NO: 1425616 - RNA, 19 nt, Artificial Sequence
  Description of Artificial Sequence: Synthetic oligonucleotide
  Sense strand starting at position 384 of SEQ ID NO: 1243573
uuaagucaucccuacaggu

SEQ ID NO: 1425617 - RNA, 19 nt, Artificial Sequence
  Description of Artificial Sequence: Synthetic oligonucleotide
  Antisense strand to SEQ ID NO: 1425616
accuguagggaugacuuaa

SEQ ID NO: 1425618 - RNA, 19 nt, Artificial Sequence
  Description of Artificial Sequence: Synthetic oligonucleotide
  Sense strand starting at position 484 of SEQ ID NO: 1243573
aggcauuacuguccuuuaa

SEQ ID NO: 1425619 - RNA, 19 nt, Artificial Sequence
  Description of Artificial Sequence: Synthetic oligonucleotide
  Antisense strand to SEQ ID NO: 1425618
uuaaaggacaguaaugccu

SEQ ID NO: 1425620 - RNA, 19 nt, Artificial Sequence
  Description of Artificial Sequence: Synthetic oligonucleotide
  Sense strand starting at position 486 of SEQ ID NO: 1243573
gcauuacuguccuuuaaga

SEQ ID NO: 1425621 - RNA, 19 nt, Artificial Sequence
  Description of Artificial Sequence: Synthetic oligonucleotide
  Antisense strand to SEQ ID NO: 1425620
ucuuaaaggacaguaaugc

SEQ ID NO: 1425622 - RNA, 19 nt, Artificial Sequence
  Description of Artificial Sequence: Synthetic oligonucleotide
  Sense strand starting at position 508 of SEQ ID NO: 1243573
guaggaaucugcucccuac

SEQ ID NO: 1425623 - RNA, 19 nt, Artificial Sequence
  Description of Artificial Sequence: Synthetic oligonucleotide
  Antisense strand to SEQ ID NO: 1425622
guagggagcagauuccuac

SEQ ID NO: 1425624 - RNA, 19 nt, Artificial Sequence
  Description of Artificial Sequence: Synthetic oligonucleotide
  Sense strand starting at position 511 of SEQ ID NO: 1243573
ggaaucugcucccuacaau

SEQ ID NO: 1425625 - RNA, 19 nt, Artificial Sequence
  Description of Artificial Sequence: Synthetic oligonucleotide
  Antisense strand to SEQ ID NO: 1425624
auuguagggagcagauucc

SEQ ID NO: 1425626 - RNA, 19 nt, Artificial Sequence
  Description of Artificial Sequence: Synthetic oligonucleotide
  Sense strand starting at position 662 of SEQ ID NO: 1243573
agcuguuuccuccaguuaa

SEQ ID NO: 1425627 - RNA, 19 nt, Artificial Sequence
  Description of Artificial Sequence: Synthetic oligonucleotide
  Antisense strand to SEQ ID NO: 1425626
uuaacuggaggaaacagcu

SEQ ID NO: 1425628 - RNA, 19 nt, Artificial Sequence
  Description of Artificial Sequence: Synthetic oligonucleotide
  Sense strand starting at position 1176 of SEQ ID NO: 1243573
aucuuccaucuugggaaua

SEQ ID NO: 1425629 - RNA, 19 nt, Artificial Sequence
  Description of Artificial Sequence: Synthetic oligonucleotide
  Antisense strand to SEQ ID NO: 1425628
uauucccaagauggaagau

SEQ ID NO: 1425630 - RNA, 19 nt, Artificial Sequence
  Description of Artificial Sequence: Synthetic oligonucleotide
  Sense strand starting at position 1195 of SEQ ID NO: 1243573
acaucaauaccagguugua

SEQ ID NO: 1425631 - RNA, 19 nt, Artificial Sequence
  Description of Artificial Sequence: Synthetic oligonucleotide
  Antisense strand to SEQ ID NO: 1425630
uacaaccugguauugaugu

SEQ ID NO: 1425632 - RNA, 19 nt, Artificial Sequence
  Description of Artificial Sequence: Synthetic oligonucleotide
  Sense strand starting at position 1253 of SEQ ID NO: 1243573
ugaucuuacccucaccagu

SEQ ID NO: 1425633 - RNA, 19 nt, Artificial Sequence
  Description of Artificial Sequence: Synthetic oligonucleotide
  Antisense strand to SEQ ID NO: 1425632
acuggugaggguaagauca

SEQ ID NO: 1425634 - RNA, 19 nt, Artificial Sequence
  Description of Artificial Sequence: Synthetic oligonucleotide
  Sense strand starting at position 1320 of SEQ ID NO: 1243573
gcaacucaugaagaguauu

SEQ ID NO: 1425635 - RNA, 19 nt, Artificial Sequence
  Description of Artificial Sequence: Synthetic oligonucleotide
  Antisense strand to SEQ ID NO: 1425634
aauacucuucaugaguugc

SEQ ID NO: 1425636 - RNA, 19 nt, Artificial Sequence
  Description of Artificial Sequence: Synthetic oligonucleotide
  Sense strand starting at position 1336 of SEQ ID NO: 1243573
auuauauuaccaugugcca

SEQ ID NO: 1425637 - RNA, 19 nt, Artificial Sequence
  Description of Artificial Sequence: Synthetic oligonucleotide
  Antisense strand to SEQ ID NO: 1425636
uggcacaugguaauauaau

SEQ ID NO: 1425638 - RNA, 19 nt, Artificial Sequence
  Description of Artificial Sequence: Synthetic oligonucleotide
  Sense strand starting at position 1403 of SEQ ID NO: 1243573
cggcaaugccuguuauucu

SEQ ID NO: 1425639 - RNA, 19 nt, Artificial Sequence
  Description of Artificial Sequence: Synthetic oligonucleotide
  Antisense strand to SEQ ID NO: 1425638
agaauaacaggcauugccg

SEQ ID NO: 1425640 - RNA, 19 nt, Artificial Sequence
  Description of Artificial Sequence: Synthetic oligonucleotide
  Sense strand starting at position 1586 of SEQ ID NO: 1243573
ccggaauucucaccucaca

SEQ ID NO: 1425641 - RNA, 19 nt, Artificial Sequence
  Description of Artificial Sequence: Synthetic oligonucleotide
  Antisense strand to SEQ ID NO: 1425640
ugugaggugagaauuccgg

SEQ ID NO: 1425642 - RNA, 19 nt, Artificial Sequence
  Description of Artificial Sequence: Synthetic oligonucleotide
  Sense strand starting at position 1988 of SEQ ID NO: 1243573
uuccuauuguuacuaggaa

SEQ ID NO: 1425643 - RNA, 19 nt, Artificial Sequence
  Description of Artificial Sequence: Synthetic oligonucleotide
  Antisense strand to SEQ ID NO: 1425642
uuccuaguaacaauaggaa

SEQ ID NO: 1425644 - RNA, 19 nt, Artificial Sequence
  Description of Artificial Sequence: Synthetic oligonucleotide
  Sense strand starting at position 2008 of SEQ ID NO: 1243573
caggaaguguccuuaggug

SEQ ID NO: 1425645 - RNA, 19 nt, Artificial Sequence
  Description of Artificial Sequence: Synthetic oligonucleotide
  Antisense strand to SEQ ID NO: 1425644
caccuaaggacacuuccug

SEQ ID NO: 1425646 - RNA, 19 nt, Artificial Sequence
  Description of Artificial Sequence: Synthetic oligonucleotide
  Sense strand starting at position 2012 of SEQ ID NO: 1243573
aaguguccuuaggugcaaa

SEQ ID NO: 1425647 - RNA, 19 nt, Artificial Sequence
  Description of Artificial Sequence: Synthetic oligonucleotide
  Antisense strand to SEQ ID NO: 1425646
uuugcaccuaaggacacuu

SEQ ID NO: 1425648 - RNA, 19 nt, Artificial Sequence
  Description of Artificial Sequence: Synthetic oligonucleotide
  Sense strand starting at position 2210 of SEQ ID NO: 1243573
aaucguuccggugcauauu

SEQ ID NO: 1425649 - RNA, 19 nt, Artificial Sequence
  Description of Artificial Sequence: Synthetic oligonucleotide
  Antisense strand to SEQ ID NO: 1425648
aauaugcaccggaacgauu

SEQ ID NO: 1425650 - RNA, 19 nt, Artificial Sequence
  Description of Artificial Sequence: Synthetic oligonucleotide
  Sense strand starting at position 2375 of SEQ ID NO: 1243573
uguggaauauaauuggacu

SEQ ID NO: 1425651 - RNA, 19 nt, Artificial Sequence
  Description of Artificial Sequence: Synthetic oligonucleotide
  Antisense strand to SEQ ID NO: 1425650
aguccaauuauauuccaca

SEQ ID NO: 1425652 - RNA, 19 nt, Artificial Sequence
  Description of Artificial Sequence: Synthetic oligonucleotide
  Sense strand starting at position 2376 of SEQ ID NO: 1243573
guggaauauaauuggacuu

SEQ ID NO: 1425653 - RNA, 19 nt, Artificial Sequence
  Description of Artificial Sequence: Synthetic oligonucleotide
  Antisense strand to SEQ ID NO: 1425652
aaguccaauuauauuccac

SEQ ID NO: 1425654 - RNA, 19 nt, Artificial Sequence
  Description of Artificial Sequence: Synthetic oligonucleotide
  Sense strand starting at position 2378 of SEQ ID NO: 1243573
ggaauauaauuggacuuag

SEQ ID NO: 1425655 - RNA, 19 nt, Artificial Sequence
  Description of Artificial Sequence: Synthetic oligonucleotide
  Antisense strand to SEQ ID NO: 1425654
cuaaguccaauuauauucc

SEQ ID NO: 1425656 - RNA, 19 nt, Artificial Sequence
  Description of Artificial Sequence: Synthetic oligonucleotide
  Sense strand starting at position 2434 of SEQ ID NO: 1243573
accuucugguucuugaaga

SEQ ID NO: 1425657 - RNA, 19 nt, Artificial Sequence
  Description of Artificial Sequence: Synthetic oligonucleotide
  Antisense strand to SEQ ID NO: 1425656
ucuucaagaaccagaaggu

SEQ ID NO: 1425658 - RNA, 19 nt, Artificial Sequence
  Description of Artificial Sequence: Synthetic oligonucleotide
  Sense strand starting at position 2611 of SEQ ID NO: 1243573
ugaggaagaucccucacuu

SEQ ID NO: 1425659 - RNA, 19 nt, Artificial Sequence
  Description of Artificial Sequence: Synthetic oligonucleotide
  Antisense strand to SEQ ID NO: 1425658
aagugagggaucuuccuca

SEQ ID NO: 1425660 - RNA, 19 nt, Artificial Sequence
  Description of Artificial Sequence: Synthetic oligonucleotide
  Sense strand starting at position 2749 of SEQ ID NO: 1243573
gcacaagucucaucaggua

SEQ ID NO: 1425661 - RNA, 19 nt, Artificial Sequence
  Description of Artificial Sequence: Synthetic oligonucleotide
  Antisense strand to SEQ ID NO: 1425660
uaccugaugagacuugugc

SEQ ID NO: 1425662 - RNA, 19 nt, Artificial Sequence
  Description of Artificial Sequence: Synthetic oligonucleotide
  Sense strand starting at position 3497 of SEQ ID NO: 1243573
aguauuccugagggcacua

SEQ ID NO: 1425663 - RNA, 19 nt, Artificial Sequence
  Description of Artificial Sequence: Synthetic oligonucleotide
  Antisense strand to SEQ ID NO: 1425662
uagugcccucaggaauacu

SEQ ID NO: 1425664 - RNA, 19 nt, Artificial Sequence
  Description of Artificial Sequence: Synthetic oligonucleotide
  Sense strand starting at position 3525 of SEQ ID NO: 1243573
guucuugaaggauguaaag

SEQ ID NO: 1425665 - RNA, 19 nt, Artificial Sequence
  Description of Artificial Sequence: Synthetic oligonucleotide
  Antisense strand to SEQ ID NO: 1425664
cuuuacauccuucaagaac

SEQ ID NO: 1425666 - RNA, 19 nt, Artificial Sequence
  Description of Artificial Sequence: Synthetic oligonucleotide
  Sense strand starting at position 3544 of SEQ ID NO: 1243573
gggcuuucccguuggagaa

SEQ ID NO: 1425667 - RNA, 19 nt, Artificial Sequence
  Description of Artificial Sequence: Synthetic oligonucleotide
  Antisense strand to SEQ ID NO: 1425666
uucuccaacgggaaagccc

SEQ ID NO: 1425668 - RNA, 19 nt, Artificial Sequence
  Description of Artificial Sequence: Synthetic oligonucleotide
  Sense strand starting at position 3545 of SEQ ID NO: 1243573
ggcuuucccguuggagaag

SEQ ID NO: 1425669 - RNA, 19 nt, Artificial Sequence
  Description of Artificial Sequence: Synthetic oligonucleotide
  Antisense strand to SEQ ID NO: 1425668
cuucuccaacgggaaagcc

SEQ ID NO: 1425670 - RNA, 19 nt, Artificial Sequence
  Description of Artificial Sequence: Synthetic oligonucleotide
  Sense strand starting at position 3604 of SEQ ID NO: 1243573
gguggaggauugagaauug

SEQ ID NO: 1425671 - RNA, 19 nt, Artificial Sequence
  Description of Artificial Sequence: Synthetic oligonucleotide
  Antisense strand to SEQ ID NO: 1425670
caauucucaauccuccacc

SEQ ID NO: 1425672 - RNA, 19 nt, Artificial Sequence
  Description of Artificial Sequence: Synthetic oligonucleotide
  Sense strand starting at position 3615 of SEQ ID NO: 1243573
gagaauuguggcuggaggu

SEQ ID NO: 1425673 - RNA, 19 nt, Artificial Sequence
  Description of Artificial Sequence: Synthetic oligonucleotide
  Antisense strand to SEQ ID NO: 1425672
accuccagccacaauucuc

SEQ ID NO: 1425674 - RNA, 19 nt, Artificial Sequence
  Description of Artificial Sequence: Synthetic oligonucleotide
  Sense strand starting at position 3616 of SEQ ID NO: 1243573
agaauuguggcuggagguu

SEQ ID NO: 1425675 - RNA, 19 nt, Artificial Sequence
  Description of Artificial Sequence: Synthetic oligonucleotide
  Antisense strand to SEQ ID NO: 1425674
aaccuccagccacaauucu

SEQ ID NO: 1425676 - RNA, 19 nt, Artificial Sequence
  Description of Artificial Sequence: Synthetic oligonucleotide
  Sense strand starting at position 3689 of SEQ ID NO: 1243573
uugggaucagguugugaac

SEQ ID NO: 1425677 - RNA, 19 nt, Artificial Sequence
  Description of Artificial Sequence: Synthetic oligonucleotide
  Antisense strand to SEQ ID NO: 1425676
guucacaaccugaucccaa

SEQ ID NO: 1425678 - RNA, 19 nt, Artificial Sequence
  Description of Artificial Sequence: Synthetic oligonucleotide
  Sense strand starting at position 3715 of SEQ ID NO: 1243573
guaggaggccuaggauaug

SEQ ID NO: 1425679 - RNA, 19 nt, Artificial Sequence
  Description of Artificial Sequence: Synthetic oligonucleotide
  Antisense strand to SEQ ID NO: 1425678
cauauccuaggccuccuac

SEQ ID NO: 1425680 - RNA, 19 nt, Artificial Sequence
  Description of Artificial Sequence: Synthetic oligonucleotide
  Sense strand starting at position 3798 of SEQ ID NO: 1243573
ggugacugcuuguuuagag

SEQ ID NO: 1425681 - RNA, 19 nt, Artificial Sequence
  Description of Artificial Sequence: Synthetic oligonucleotide
  Antisense strand to SEQ ID NO: 1425680
cucuaaacaagcagucacc

SEQ ID NO: 1425682 - RNA, 19 nt, Artificial Sequence
  Description of Artificial Sequence: Synthetic oligonucleotide
  Sense strand starting at position 3799 of SEQ ID NO: 1243573
gugacugcuuguuuagaga

SEQ ID NO: 1425683 - RNA, 19 nt, Artificial Sequence
  Description of Artificial Sequence: Synthetic oligonucleotide
  Antisense strand to SEQ ID NO: 1425682
ucucuaaacaagcagucac

SEQ ID NO: 1425684 - RNA, 19 nt, Artificial Sequence
  Description of Artificial Sequence: Synthetic oligonucleotide
  Sense strand starting at position 3806 of SEQ ID NO: 1243573
cuuguuuagagaugggaag

SEQ ID NO: 1425685 - RNA, 19 nt, Artificial Sequence
  Description of Artificial Sequence: Synthetic oligonucleotide
  Antisense strand to SEQ ID NO: 1425684
cuucccaucucuaaacaag

SEQ ID NO: 1425686 - RNA, 19 nt, Artificial Sequence
  Description of Artificial Sequence: Synthetic oligonucleotide
  Sense strand starting at position 3888 of SEQ ID NO: 1243573
uugaaucuuugcuugccua

SEQ ID NO: 1425687 - RNA, 19 nt, Artificial Sequence
  Description of Artificial Sequence: Synthetic oligonucleotide
  Antisense strand to SEQ ID NO: 1425686
uaggcaagcaaagauucaa

SEQ ID NO: 1425688 - RNA, 19 nt, Artificial Sequence
  Description of Artificial Sequence: Synthetic oligonucleotide
  Sense strand starting at position 3958 of SEQ ID NO: 1243573
aggcuucaucgccacgaca

SEQ ID NO: 1425689 - RNA, 19 nt, Artificial Sequence
  Description of Artificial Sequence: Synthetic oligonucleotide
  Antisense strand to SEQ ID NO: 1425688
ugucguggcgaugaagccu

SEQ ID NO: 1425690 - RNA, 19 nt, Artificial Sequence
  Description of Artificial Sequence: Synthetic oligonucleotide
  Sense strand starting at position 127 of SEQ ID NO: 1243574
uguauauagagauggaggu

SEQ ID NO: 1425691 - RNA, 19 nt, Artificial Sequence
  Description of Artificial Sequence: Synthetic oligonucleotide
  Antisense strand to SEQ ID NO: 1425690
accuccaucucuauauaca

SEQ ID NO: 1425692 - RNA, 19 nt, Artificial Sequence
  Description of Artificial Sequence: Synthetic oligonucleotide
  Sense strand starting at position 276 of SEQ ID NO: 1243574
uggugucaucuggacaaua

SEQ ID NO: 1425693 - RNA, 19 nt, Artificial Sequence
  Description of Artificial Sequence: Synthetic oligonucleotide
  Antisense strand to SEQ ID NO: 1425692
uauuguccagaugacacca

SEQ ID NO: 1425694 - RNA, 19 nt, Artificial Sequence
  Description of Artificial Sequence: Synthetic oligonucleotide
  Sense strand starting at position 278 of SEQ ID NO: 1243574
gugucaucuggacaauacu

SEQ ID NO: 1425695 - RNA, 19 nt, Artificial Sequence
  Description of Artificial Sequence: Synthetic oligonucleotide
  Antisense strand to SEQ ID NO: 1425694
aguauuguccagaugacac

SEQ ID NO: 1425696 - RNA, 19 nt, Artificial Sequence
  Description of Artificial Sequence: Synthetic oligonucleotide
  Sense strand starting at position 287 of SEQ ID NO: 1243574
ggacaauacuccuugcaag

SEQ ID NO: 1425697 - RNA, 19 nt, Artificial Sequence
  Description of Artificial Sequence: Synthetic oligonucleotide
  Antisense strand to SEQ ID NO: 1425696
cuugcaaggaguauugucc

SEQ ID NO: 1425698 - RNA, 19 nt, Artificial Sequence
  Description of Artificial Sequence: Synthetic oligonucleotide
  Sense strand starting at position 301 of SEQ ID NO: 1243574
gcaagcuuaccaugggcaa

SEQ ID NO: 1425699 - RNA, 19 nt, Artificial Sequence
  Description of Artificial Sequence: Synthetic oligonucleotide
  Antisense strand to SEQ ID NO: 1425698
uugcccaugguaagcuugc

SEQ ID NO: 1425700 - RNA, 19 nt, Artificial Sequence
  Description of Artificial Sequence: Synthetic oligonucleotide
  Sense strand starting at position 393 of SEQ ID NO: 1243574
augagugaauguuuguguu

SEQ ID NO: 1425701 - RNA, 19 nt, Artificial Sequence
  Description of Artificial Sequence: Synthetic oligonucleotide
  Antisense strand to SEQ ID NO: 1425700
aacacaaacauucacucau

SEQ ID NO: 1425702 - RNA, 19 nt, Artificial Sequence
  Description of Artificial Sequence: Synthetic oligonucleotide
  Sense strand starting at position 441 of SEQ ID NO: 1243574
cucucauugugacuguauu

SEQ ID NO: 1425703 - RNA, 19 nt, Artificial Sequence
  Description of Artificial Sequence: Synthetic oligonucleotide
  Antisense strand to SEQ ID NO: 1425702
aauacagucacaaugagag

SEQ ID NO: 1425704 - RNA, 19 nt, Artificial Sequence
  Description of Artificial Sequence: Synthetic oligonucleotide
  Sense strand starting at position 442 of SEQ ID NO: 1243574
ucucauugugacuguauuu

SEQ ID NO: 1425705 - RNA, 19 nt, Artificial Sequence
  Description of Artificial Sequence: Synthetic oligonucleotide
  Antisense strand to SEQ ID NO: 1425704
aaauacagucacaaugaga

SEQ ID NO: 1425706 - RNA, 19 nt, Artificial Sequence
  Description of Artificial Sequence: Synthetic oligonucleotide
  Sense strand starting at position 529 of SEQ ID NO: 1243574
ggauuagcguucuuaugag

SEQ ID NO: 1425707 - RNA, 19 nt, Artificial Sequence
  Description of Artificial Sequence: Synthetic oligonucleotide
  Antisense strand to SEQ ID NO: 1425706
cucauaagaacgcuaaucc

SEQ ID NO: 1425708 - RNA, 19 nt, Artificial Sequence
  Description of Artificial Sequence: Synthetic oligonucleotide
  Sense strand starting at position 616 of SEQ ID NO: 1243574
cucucugagcccugacuau

SEQ ID NO: 1425709 - RNA, 19 nt, Artificial Sequence
  Description of Artificial Sequence: Synthetic oligonucleotide
  Antisense strand to SEQ ID NO: 1425708
auagucagggcucagagag

SEQ ID NO: 1425710 - RNA, 19 nt, Artificial Sequence
  Description of Artificial Sequence: Synthetic oligonucleotide
  Sense strand starting at position 833 of SEQ ID NO: 1243574
acaguaggaguuugugaga

SEQ ID NO: 1425711 - RNA, 19 nt, Artificial Sequence
  Description of Artificial Sequence: Synthetic oligonucleotide
  Antisense strand to SEQ ID NO: 1425710
ucucacaaacuccuacugu

SEQ ID NO: 1425712 - RNA, 19 nt, Artificial Sequence
  Description of Artificial Sequence: Synthetic oligonucleotide
  Sense strand starting at position 844 of SEQ ID NO: 1243574
uugugagaauguccaccaa

SEQ ID NO: 1425713 - RNA, 19 nt, Artificial Sequence
  Description of Artificial Sequence: Synthetic oligonucleotide
  Antisense strand to SEQ ID NO: 1425712
uugguggacauucucacaa

SEQ ID NO: 1425714 - RNA, 19 nt, Artificial Sequence
  Description of Artificial Sequence: Synthetic oligonucleotide
  Sense strand starting at position 993 of SEQ ID NO: 1243574
ggaugaaguucugcugucu

SEQ ID NO: 1425715 - RNA, 19 nt, Artificial Sequence
  Description of Artificial Sequence: Synthetic oligonucleotide
  Antisense strand to SEQ ID NO: 1425714
agacagcagaacuucaucc

SEQ ID NO: 1425716 - RNA, 19 nt, Artificial Sequence
  Description of Artificial Sequence: Synthetic oligonucleotide
  Sense strand starting at position 1147 of SEQ ID NO: 1243574
gacguagugagcggaugaa

SEQ ID NO: 1425717 - RNA, 19 nt, Artificial Sequence
  Description of Artificial Sequence: Synthetic oligonucleotide
  Antisense strand to SEQ ID NO: 1425716
uucauccgcucacuacguc

SEQ ID NO: 1425718 - RNA, 19 nt, Artificial Sequence
  Description of Artificial Sequence: Synthetic oligonucleotide
  Sense strand starting at position 1157 of SEQ ID NO: 1243574
gcggaugaacccugcagaa

SEQ ID NO: 1425719 - RNA, 19 nt, Artificial Sequence
  Description of Artificial Sequence: Synthetic oligonucleotide
  Antisense strand to SEQ ID NO: 1425718
uucugcaggguucauccgc

SEQ ID NO: 1425720 - RNA, 19 nt, Artificial Sequence
  Description of Artificial Sequence: Synthetic oligonucleotide
  Sense strand starting at position 1172 of SEQ ID NO: 1243574
agaagugagcgcuaaucau

SEQ ID NO: 1425721 - RNA, 19 nt, Artificial Sequence
  Description of Artificial Sequence: Synthetic oligonucleotide
  Antisense strand to SEQ ID NO: 1425720
augauuagcgcucacuucu

SEQ ID NO: 1425722 - RNA, 19 nt, Artificial Sequence
  Description of Artificial Sequence: Synthetic oligonucleotide
  Sense strand starting at position 1355 of SEQ ID NO: 1243574
ugccuucuccaacgggaaa

SEQ ID NO: 1425723 - RNA, 19 nt, Artificial Sequence
  Description of Artificial Sequence: Synthetic oligonucleotide
  Antisense strand to SEQ ID NO: 1425722
uuucccguuggagaaggca

SEQ ID NO: 1425724 - RNA, 19 nt, Artificial Sequence
  Description of Artificial Sequence: Synthetic oligonucleotide
  Sense strand starting at position 1492 of SEQ ID NO: 1243574
gucccuuaaguuuguggga

SEQ ID NO: 1425725 - RNA, 19 nt, Artificial Sequence
  Description of Artificial Sequence: Synthetic oligonucleotide
  Antisense strand to SEQ ID NO: 1425724
ucccacaaacuuaagggac

SEQ ID NO: 1425726 - RNA, 19 nt, Artificial Sequence
  Description of Artificial Sequence: Synthetic oligonucleotide
  Sense strand starting at position 1743 of SEQ ID NO: 1243574
gggacaaaggcuugcaaga

SEQ ID NO: 1425727 - RNA, 19 nt, Artificial Sequence
  Description of Artificial Sequence: Synthetic oligonucleotide
  Antisense strand to SEQ ID NO: 1425726
ucuugcaagccuuuguccc

SEQ ID NO: 1425728 - RNA, 19 nt, Artificial Sequence
  Description of Artificial Sequence: Synthetic oligonucleotide
  Sense strand starting at position 2145 of SEQ ID NO: 1243574
gacguuuccuaccugauga

SEQ ID NO: 1425729 - RNA, 19 nt, Artificial Sequence
  Description of Artificial Sequence: Synthetic oligonucleotide
  Antisense strand to SEQ ID NO: 1425728
ucaucagguaggaaacguc

SEQ ID NO: 1425730 - RNA, 19 nt, Artificial Sequence
  Description of Artificial Sequence: Synthetic oligonucleotide
  Sense strand starting at position 2147 of SEQ ID NO: 1243574
cguuuccuaccugaugaga

SEQ ID NO: 1425731 - RNA, 19 nt, Artificial Sequence
  Description of Artificial Sequence: Synthetic oligonucleotide
  Antisense strand to SEQ ID NO: 1425730
ucucaucagguaggaaacg

SEQ ID NO: 1425732 - RNA, 19 nt, Artificial Sequence
  Description of Artificial Sequence: Synthetic oligonucleotide
  Sense strand starting at position 2296 of SEQ ID NO: 1243574
gagggaucuuccucagcua

SEQ ID NO: 1425733 - RNA, 19 nt, Artificial Sequence
  Description of Artificial Sequence: Synthetic oligonucleotide
  Antisense strand to SEQ ID NO: 1425732
uagcugaggaagaucccuc

SEQ ID NO: 1425734 - RNA, 19 nt, Artificial Sequence
  Description of Artificial Sequence: Synthetic oligonucleotide
  Sense strand starting at position 2299 of SEQ ID NO: 1243574
ggaucuuccucagcuagga

SEQ ID NO: 1425735 - RNA, 19 nt, Artificial Sequence
  Description of Artificial Sequence: Synthetic oligonucleotide
  Antisense strand to SEQ ID NO: 1425734
uccuagcugaggaagaucc

SEQ ID NO: 1425736 - RNA, 19 nt, Artificial Sequence
  Description of Artificial Sequence: Synthetic oligonucleotide
  Sense strand starting at position 2588 of SEQ ID NO: 1243574
cuccaucugccuugggaaa

SEQ ID NO: 1425737 - RNA, 19 nt, Artificial Sequence
  Description of Artificial Sequence: Synthetic oligonucleotide
  Antisense strand to SEQ ID NO: 1425736
uuucccaaggcagauggag

SEQ ID NO: 1425738 - RNA, 19 nt, Artificial Sequence
  Description of Artificial Sequence: Synthetic oligonucleotide
  Sense strand starting at position 2789 of SEQ ID NO: 1243574
cgugcagaccuagaacuua

SEQ ID NO: 1425739 - RNA, 19 nt, Artificial Sequence
  Description of Artificial Sequence: Synthetic oligonucleotide
  Antisense strand to SEQ ID NO: 1425738
uaaguucuaggucugcacg

SEQ ID NO: 1425740 - RNA, 19 nt, Artificial Sequence
  Description of Artificial Sequence: Synthetic oligonucleotide
  Sense strand starting at position 2906 of SEQ ID NO: 1243574
acuuccuguuuccuaguaa

SEQ ID NO: 1425741 - RNA, 19 nt, Artificial Sequence
  Description of Artificial Sequence: Synthetic oligonucleotide
  Antisense strand to SEQ ID NO: 1425740
uuacuaggaaacaggaagu

SEQ ID NO: 1425742 - RNA, 19 nt, Artificial Sequence
  Description of Artificial Sequence: Synthetic oligonucleotide
  Sense strand starting at position 3222 of SEQ ID NO: 1243574
ggcguccugagaggaaauu

SEQ ID NO: 1425743 - RNA, 19 nt, Artificial Sequence
  Description of Artificial Sequence: Synthetic oligonucleotide
  Antisense strand to SEQ ID NO: 1425742
aauuuccucucaggacgcc

SEQ ID NO: 1425744 - RNA, 19 nt, Artificial Sequence
  Description of Artificial Sequence: Synthetic oligonucleotide
  Sense strand starting at position 3312 of SEQ ID NO: 1243574
ggcuuugugaggugagaau

SEQ ID NO: 1425745 - RNA, 19 nt, Artificial Sequence
  Description of Artificial Sequence: Synthetic oligonucleotide
  Antisense strand to SEQ ID NO: 1425744
auucucaccucacaaagcc

SEQ ID NO: 1425746 - RNA, 19 nt, Artificial Sequence
  Description of Artificial Sequence: Synthetic oligonucleotide
  Sense strand starting at position 3353 of SEQ ID NO: 1243574
ggguuuacggucggagaca

SEQ ID NO: 1425747 - RNA, 19 nt, Artificial Sequence
  Description of Artificial Sequence: Synthetic oligonucleotide
  Antisense strand to SEQ ID NO: 1425746
ugucuccgaccguaaaccc

SEQ ID NO: 1425748 - RNA, 19 nt, Artificial Sequence
  Description of Artificial Sequence: Synthetic oligonucleotide
  Sense strand starting at position 3487 of SEQ ID NO: 1243574
uguuacgugaacuagaaua

SEQ ID NO: 1425749 - RNA, 19 nt, Artificial Sequence
  Description of Artificial Sequence: Synthetic oligonucleotide
  Antisense strand to SEQ ID NO: 1425748
uauucuaguucacguaaca

SEQ ID NO: 1425750 - RNA, 19 nt, Artificial Sequence
  Description of Artificial Sequence: Synthetic oligonucleotide
  Sense strand starting at position 3516 of SEQ ID NO: 1243574
ccguguguucugaggauug

SEQ ID NO: 1425751 - RNA, 19 nt, Artificial Sequence
  Description of Artificial Sequence: Synthetic oligonucleotide
  Antisense strand to SEQ ID NO: 1425750
caauccucagaacacacgg

SEQ ID NO: 1425752 - RNA, 19 nt, Artificial Sequence
  Description of Artificial Sequence: Synthetic oligonucleotide
  Sense strand starting at position 3518 of SEQ ID NO: 1243574
guguguucugaggauugag

SEQ ID NO: 1425753 - RNA, 19 nt, Artificial Sequence
  Description of Artificial Sequence: Synthetic oligonucleotide
  Antisense strand to SEQ ID NO: 1425752
cucaauccucagaacacac

SEQ ID NO: 1425754 - RNA, 19 nt, Artificial Sequence
  Description of Artificial Sequence: Synthetic oligonucleotide
  Sense strand starting at position 3521 of SEQ ID NO: 1243574
uguucugaggauugaguaa

SEQ ID NO: 1425755 - RNA, 19 nt, Artificial Sequence
  Description of Artificial Sequence: Synthetic oligonucleotide
  Antisense strand to SEQ ID NO: 1425754
uuacucaauccucagaaca

SEQ ID NO: 1425756 - RNA, 19 nt, Artificial Sequence
  Description of Artificial Sequence: Synthetic oligonucleotide
  Sense strand starting at position 3545 of SEQ ID NO: 1243574
ugaauauaguuagcacagu

SEQ ID NO: 1425757 - RNA, 19 nt, Artificial Sequence
  Description of Artificial Sequence: Synthetic oligonucleotide
  Antisense strand to SEQ ID NO: 1425756
acugugcuaacuauauuca

SEQ ID NO: 1425758 - RNA, 19 nt, Artificial Sequence
  Description of Artificial Sequence: Synthetic oligonucleotide
  Sense strand starting at position 3596 of SEQ ID NO: 1243574
aguugcugucaucaucagu

SEQ ID NO: 1425759 - RNA, 19 nt, Artificial Sequence
  Description of Artificial Sequence: Synthetic oligonucleotide
  Antisense strand to SEQ ID NO: 1425758
acugaugaugacagcaacu

SEQ ID NO: 1425760 - RNA, 19 nt, Artificial Sequence
  Description of Artificial Sequence: Synthetic oligonucleotide
  Sense strand starting at position 3599 of SEQ ID NO: 1243574
ugcugucaucaucaguauu

SEQ ID NO: 1425761 - RNA, 19 nt, Artificial Sequence
  Description of Artificial Sequence: Synthetic oligonucleotide
  Antisense strand to SEQ ID NO: 1425760
aauacugaugaugacagca

SEQ ID NO: 1425762 - RNA, 19 nt, Artificial Sequence
  Description of Artificial Sequence: Synthetic oligonucleotide
  Sense strand starting at position 3601 of SEQ ID NO: 1243574
cugucaucaucaguauuaa

SEQ ID NO: 1425763 - RNA, 19 nt, Artificial Sequence
  Description of Artificial Sequence: Synthetic oligonucleotide
  Antisense strand to SEQ ID NO: 1425762
uuaauacugaugaugacag

SEQ ID NO: 1425764 - RNA, 19 nt, Artificial Sequence
  Description of Artificial Sequence: Synthetic oligonucleotide
  Sense strand starting at position 3602 of SEQ ID NO: 1243574
ugucaucaucaguauuaag

SEQ ID NO: 1425765 - RNA, 19 nt, Artificial Sequence
  Description of Artificial Sequence: Synthetic oligonucleotide
  Antisense strand to SEQ ID NO: 1425764
cuuaauacugaugaugaca

SEQ ID NO: 1425766 - RNA, 19 nt, Artificial Sequence
  Description of Artificial Sequence: Synthetic oligonucleotide
  Sense strand starting at position 3736 of SEQ ID NO: 1243574
gauggaagauaguuugagu

SEQ ID NO: 1425767 - RNA, 19 nt, Artificial Sequence
  Description of Artificial Sequence: Synthetic oligonucleotide
  Antisense strand to SEQ ID NO: 1425766
acucaaacuaucuuccauc

SEQ ID NO: 1425768 - RNA, 19 nt, Artificial Sequence
  Description of Artificial Sequence: Synthetic oligonucleotide
  Sense strand starting at position 3747 of SEQ ID NO: 1243574
guuugaguucaagggaagu

SEQ ID NO: 1425769 - RNA, 19 nt, Artificial Sequence
  Description of Artificial Sequence: Synthetic oligonucleotide
  Antisense strand to SEQ ID NO: 1425768
acuucccuugaacucaaac

SEQ ID NO: 1425770 - RNA, 19 nt, Artificial Sequence
  Description of Artificial Sequence: Synthetic oligonucleotide
  Sense strand starting at position 177 of SEQ ID NO: 1243575
cgggacuagaaguguacau

SEQ ID NO: 1425771 - RNA, 19 nt, Artificial Sequence
  Description of Artificial Sequence: Synthetic oligonucleotide
  Antisense strand to SEQ ID NO: 1425770
auguacacuucuagucccg

SEQ ID NO: 1425772 - RNA, 19 nt, Artificial Sequence
  Description of Artificial Sequence: Synthetic oligonucleotide
  Sense strand starting at position 344 of SEQ ID NO: 1243575
agaaacaugucauuaaugu

SEQ ID NO: 1425773 - RNA, 19 nt, Artificial Sequence
  Description of Artificial Sequence: Synthetic oligonucleotide
  Antisense strand to SEQ ID NO: 1425772
acauuaaugacauguuucu

SEQ ID NO: 1425774 - RNA, 19 nt, Artificial Sequence
  Description of Artificial Sequence: Synthetic oligonucleotide
  Sense strand starting at position 357 of SEQ ID NO: 1243575
uaauguagaggcugagaaa

SEQ ID NO: 1425775 - RNA, 19 nt, Artificial Sequence
  Description of Artificial Sequence: Synthetic oligonucleotide
  Antisense strand to SEQ ID NO: 1425774
uuucucagccucuacauua

SEQ ID NO: 1425776 - RNA, 19 nt, Artificial Sequence
  Description of Artificial Sequence: Synthetic oligonucleotide
  Sense strand starting at position 627 of SEQ ID NO: 1243575
ggcucacuuuacccugaga

SEQ ID NO: 1425777 - RNA, 19 nt, Artificial Sequence
  Description of Artificial Sequence: Synthetic oligonucleotide
  Antisense strand to SEQ ID NO: 1425776
ucucaggguaaagugagcc

SEQ ID NO: 1425778 - RNA, 19 nt, Artificial Sequence
  Description of Artificial Sequence: Synthetic oligonucleotide
  Sense strand starting at position 897 of SEQ ID NO: 1243575
gguggaucuugagcuugga

SEQ ID NO: 1425779 - RNA, 19 nt, Artificial Sequence
  Description of Artificial Sequence: Synthetic oligonucleotide
  Antisense strand to SEQ ID NO: 1425778
uccaagcucaagauccacc

SEQ ID NO: 1425780 - RNA, 19 nt, Artificial Sequence
  Description of Artificial Sequence: Synthetic oligonucleotide
  Sense strand starting at position 1077 of SEQ ID NO: 1243575
gcucgggugccgucuugua

SEQ ID NO: 1425781 - RNA, 19 nt, Artificial Sequence
  Description of Artificial Sequence: Synthetic oligonucleotide
  Antisense strand to SEQ ID NO: 1425780
uacaagacggcacccgagc

SEQ ID NO: 1425782 - RNA, 19 nt, Artificial Sequence
  Description of Artificial Sequence: Synthetic oligonucleotide
  Sense strand starting at position 1277 of SEQ ID NO: 1243575
ggaaaugucuugguacagg

SEQ ID NO: 1425783 - RNA, 19 nt, Artificial Sequence
  Description of Artificial Sequence: Synthetic oligonucleotide
  Antisense strand to SEQ ID NO: 1425782
ccuguaccaagacauuucc

SEQ ID NO: 1425784 - RNA, 19 nt, Artificial Sequence
  Description of Artificial Sequence: Synthetic oligonucleotide
  Sense strand starting at position 1365 of SEQ ID NO: 1243575
cuuccauggccuuggugaa

SEQ ID NO: 1425785 - RNA, 19 nt, Artificial Sequence
  Description of Artificial Sequence: Synthetic oligonucleotide
  Antisense strand to SEQ ID NO: 1425784
uucaccaaggccauggaag

SEQ ID NO: 1425786 - RNA, 19 nt, Artificial Sequence
  Description of Artificial Sequence: Synthetic oligonucleotide
  Sense strand starting at position 1471 of SEQ ID NO: 1243575
cugcauuucucaccucgga

SEQ ID NO: 1425787 - RNA, 19 nt, Artificial Sequence
  Description of Artificial Sequence: Synthetic oligonucleotide
  Antisense strand to SEQ ID NO: 1425786
uccgaggugagaaaugcag

SEQ ID NO: 1425788 - RNA, 19 nt, Artificial Sequence
  Description of Artificial Sequence: Synthetic oligonucleotide
  Sense strand starting at position 1547 of SEQ ID NO: 1243575
cccugaucugcucauugaa

SEQ ID NO: 1425789 - RNA, 19 nt, Artificial Sequence
  Description of Artificial Sequence: Synthetic oligonucleotide
  Antisense strand to SEQ ID NO: 1425788
uucaaugagcagaucaggg

SEQ ID NO: 1425790 - RNA, 19 nt, Artificial Sequence
  Description of Artificial Sequence: Synthetic oligonucleotide
  Sense strand starting at position 1549 of SEQ ID NO: 1243575
cugaucugcucauugaaga

SEQ ID NO: 1425791 - RNA, 19 nt, Artificial Sequence
  Description of Artificial Sequence: Synthetic oligonucleotide
  Antisense strand to SEQ ID NO: 1425790
ucuucaaugagcagaucag

SEQ ID NO: 1425792 - RNA, 19 nt, Artificial Sequence
  Description of Artificial Sequence: Synthetic oligonucleotide
  Sense strand starting at position 1724 of SEQ ID NO: 1243575
ucagcucaguguccaagaa

SEQ ID NO: 1425793 - RNA, 19 nt, Artificial Sequence
  Description of Artificial Sequence: Synthetic oligonucleotide
  Antisense strand to SEQ ID NO: 1425792
uucuuggacacugagcuga

SEQ ID NO: 1425794 - RNA, 19 nt, Artificial Sequence
  Description of Artificial Sequence: Synthetic oligonucleotide
  Sense strand starting at position 1728 of SEQ ID NO: 1243575
cucaguguccaagaacuau

SEQ ID NO: 1425795 - RNA, 19 nt, Artificial Sequence
  Description of Artificial Sequence: Synthetic oligonucleotide
  Antisense strand to SEQ ID NO: 1425794
auaguucuuggacacugag

SEQ ID NO: 1425796 - RNA, 19 nt, Artificial Sequence
  Description of Artificial Sequence: Synthetic oligonucleotide
  Sense strand starting at position 1835 of SEQ ID NO: 1243575
gagccaaugggcuaaaucu

SEQ ID NO: 1425797 - RNA, 19 nt, Artificial Sequence
  Description of Artificial Sequence: Synthetic oligonucleotide
  Antisense strand to SEQ ID NO: 1425796
agauuuagcccauuggcuc

SEQ ID NO: 1425798 - RNA, 19 nt, Artificial Sequence
  Description of Artificial Sequence: Synthetic oligonucleotide
  Sense strand starting at position 1915 of SEQ ID NO: 1243575
gaugguuaguccucagaga

SEQ ID NO: 1425799 - RNA, 19 nt, Artificial Sequence
  Description of Artificial Sequence: Synthetic oligonucleotide
  Antisense strand to SEQ ID NO: 1425798
ucucugaggacuaaccauc

SEQ ID NO: 1425800 - RNA, 19 nt, Artificial Sequence
  Description of Artificial Sequence: Synthetic oligonucleotide
  Sense strand starting at position 1916 of SEQ ID NO: 1243575
augguuaguccucagagac

SEQ ID NO: 1425801 - RNA, 19 nt, Artificial Sequence
  Description of Artificial Sequence: Synthetic oligonucleotide
  Antisense strand to SEQ ID NO: 1425800
gucucugaggacuaaccau

SEQ ID NO: 1425802 - RNA, 19 nt, Artificial Sequence
  Description of Artificial Sequence: Synthetic oligonucleotide
  Sense strand starting at position 1948 of SEQ ID NO: 1243575
acagaauucuggccuugca

SEQ ID NO: 1425803 - RNA, 19 nt, Artificial Sequence
  Description of Artificial Sequence: Synthetic oligonucleotide
  Antisense strand to SEQ ID NO: 1425802
ugcaaggccagaauucugu

SEQ ID NO: 1425804 - RNA, 19 nt, Artificial Sequence
  Description of Artificial Sequence: Synthetic oligonucleotide
  Sense strand starting at position 2097 of SEQ ID NO: 1243575
gccucuuucugagucauaa

SEQ ID NO: 1425805 - RNA, 19 nt, Artificial Sequence
  Description of Artificial Sequence: Synthetic oligonucleotide
  Antisense strand to SEQ ID NO: 1425804
uuaugacucagaaagaggc

SEQ ID NO: 1425806 - RNA, 19 nt, Artificial Sequence
  Description of Artificial Sequence: Synthetic oligonucleotide
  Sense strand starting at position 2117 of SEQ ID NO: 1243575
ugauguaucugaucuaaca

SEQ ID NO: 1425807 - RNA, 19 nt, Artificial Sequence
  Description of Artificial Sequence: Synthetic oligonucleotide
  Antisense strand to SEQ ID NO: 1425806
uguuagaucagauacauca

SEQ ID NO: 1425808 - RNA, 19 nt, Artificial Sequence
  Description of Artificial Sequence: Synthetic oligonucleotide
  Sense strand starting at position 2159 of SEQ ID NO: 1243575
agcugagaucccuacuuuc

SEQ ID NO: 1425809 - RNA, 19 nt, Artificial Sequence
  Description of Artificial Sequence: Synthetic oligonucleotide
  Antisense strand to SEQ ID NO: 1425808
gaaaguagggaucucagcu

SEQ ID NO: 1425810 - RNA, 19 nt, Artificial Sequence
  Description of Artificial Sequence: Synthetic oligonucleotide
  Sense strand starting at position 2169 of SEQ ID NO: 1243575
ccuacuuucugguccagaa

SEQ ID NO: 1425811 - RNA, 19 nt, Artificial Sequence
  Description of Artificial Sequence: Synthetic oligonucleotide
  Antisense strand to SEQ ID NO: 1425810
uucuggaccagaaaguagg

SEQ ID NO: 1425812 - RNA, 19 nt, Artificial Sequence
  Description of Artificial Sequence: Synthetic oligonucleotide
  Sense strand starting at position 2219 of SEQ ID NO: 1243575
gaucaugguugggaggaaa

SEQ ID NO: 1425813 - RNA, 19 nt, Artificial Sequence
  Description of Artificial Sequence: Synthetic oligonucleotide
  Antisense strand to SEQ ID NO: 1425812
uuuccucccaaccaugauc

SEQ ID NO: 1425814 - RNA, 19 nt, Artificial Sequence
  Description of Artificial Sequence: Synthetic oligonucleotide
  Sense strand starting at position 2238 of SEQ ID NO: 1243575
caggauuaauggcuguauu

SEQ ID NO: 1425815 - RNA, 19 nt, Artificial Sequence
  Description of Artificial Sequence: Synthetic oligonucleotide
  Antisense strand to SEQ ID NO: 1425814
aauacagccauuaauccug

SEQ ID NO: 1425816 - RNA, 19 nt, Artificial Sequence
  Description of Artificial Sequence: Synthetic oligonucleotide
  Sense strand starting at position 2239 of SEQ ID NO: 1243575
aggauuaauggcuguauua

SEQ ID NO: 1425817 - RNA, 19 nt, Artificial Sequence
  Description of Artificial Sequence: Synthetic oligonucleotide
  Antisense strand to SEQ ID NO: 1425816
uaauacagccauuaauccu

SEQ ID NO: 1425818 - RNA, 19 nt, Artificial Sequence
  Description of Artificial Sequence: Synthetic oligonucleotide
  Sense strand starting at position 2241 of SEQ ID NO: 1243575
gauuaauggcuguauuagu

SEQ ID NO: 1425819 - RNA, 19 nt, Artificial Sequence
  Description of Artificial Sequence: Synthetic oligonucleotide
  Antisense strand to SEQ ID NO: 1425818
acuaauacagccauuaauc

SEQ ID NO: 1425820 - RNA, 19 nt, Artificial Sequence
  Description of Artificial Sequence: Synthetic oligonucleotide
  Sense strand starting at position 2246 of SEQ ID NO: 1243575
auggcuguauuagucuuaa

SEQ ID NO: 1425821 - RNA, 19 nt, Artificial Sequence
  Description of Artificial Sequence: Synthetic oligonucleotide
  Antisense strand to SEQ ID NO: 1425820
uuaagacuaauacagccau

SEQ ID NO: 1425822 - RNA, 19 nt, Artificial Sequence
  Description of Artificial Sequence: Synthetic oligonucleotide
  Sense strand starting at position 2446 of SEQ ID NO: 1243575
cagugaaaugaguguuguu

SEQ ID NO: 1425823 - RNA, 19 nt, Artificial Sequence
  Description of Artificial Sequence: Synthetic oligonucleotide
  Antisense strand to SEQ ID NO: 1425822
aacaacacucauuucacug

SEQ ID NO: 1425824 - RNA, 19 nt, Artificial Sequence
  Description of Artificial Sequence: Synthetic oligonucleotide
  Sense strand starting at position 2453 of SEQ ID NO: 1243575
augaguguuguuuauaaga

SEQ ID NO: 1425825 - RNA, 19 nt, Artificial Sequence
  Description of Artificial Sequence: Synthetic oligonucleotide
  Antisense strand to SEQ ID NO: 1425824
ucuuauaaacaacacucau

SEQ ID NO: 1425826 - RNA, 19 nt, Artificial Sequence
  Description of Artificial Sequence: Synthetic oligonucleotide
  Sense strand starting at position 2817 of SEQ ID NO: 1243575
gguggcuucuaaguuauga

SEQ ID NO: 1425827 - RNA, 19 nt, Artificial Sequence
  Description of Artificial Sequence: Synthetic oligonucleotide
  Antisense strand to SEQ ID NO: 1425826
ucauaacuuagaagccacc

SEQ ID NO: 1425828 - RNA, 19 nt, Artificial Sequence
  Description of Artificial Sequence: Synthetic oligonucleotide
  Sense strand starting at position 2986 of SEQ ID NO: 1243575
gggccacauccuuaaaguc

SEQ ID NO: 1425829 - RNA, 19 nt, Artificial Sequence
  Description of Artificial Sequence: Synthetic oligonucleotide
  Antisense strand to SEQ ID NO: 1425828
gacuuuaaggauguggccc

SEQ ID NO: 1425830 - RNA, 19 nt, Artificial Sequence
  Description of Artificial Sequence: Synthetic oligonucleotide
  Sense strand starting at position 3105 of SEQ ID NO: 1243575
ccuguucccugcucaagaa

SEQ ID NO: 1425831 - RNA, 19 nt, Artificial Sequence
  Description of Artificial Sequence: Synthetic oligonucleotide
  Antisense strand to SEQ ID NO: 1425830
uucuugagcagggaacagg

SEQ ID NO: 1425832 - RNA, 19 nt, Artificial Sequence
  Description of Artificial Sequence: Synthetic oligonucleotide
  Sense strand starting at position 3272 of SEQ ID NO: 1243575
aucuuauucucacuugguu

SEQ ID NO: 1425833 - RNA, 19 nt, Artificial Sequence
  Description of Artificial Sequence: Synthetic oligonucleotide
  Antisense strand to SEQ ID NO: 1425832
aaccaagugagaauaagau

SEQ ID NO: 1425834 - RNA, 19 nt, Artificial Sequence
  Description of Artificial Sequence: Synthetic oligonucleotide
  Sense strand starting at position 3275 of SEQ ID NO: 1243575
uuauucucacuugguuauu

SEQ ID NO: 1425835 - RNA, 19 nt, Artificial Sequence
  Description of Artificial Sequence: Synthetic oligonucleotide
  Antisense strand to SEQ ID NO: 1425834
aauaaccaagugagaauaa

SEQ ID NO: 1425836 - RNA, 19 nt, Artificial Sequence
  Description of Artificial Sequence: Synthetic oligonucleotide
  Sense strand starting at position 3411 of SEQ ID NO: 1243575
gggaacuaugaucguacca

SEQ ID NO: 1425837 - RNA, 19 nt, Artificial Sequence
  Description of Artificial Sequence: Synthetic oligonucleotide
  Antisense strand to SEQ ID NO: 1425836
ugguacgaucauaguuccc

SEQ ID NO: 1425838 - RNA, 19 nt, Artificial Sequence
  Description of Artificial Sequence: Synthetic oligonucleotide
  Sense strand starting at position 3508 of SEQ ID NO: 1243575
uguaguacugccuacuuga

SEQ ID NO: 1425839 - RNA, 19 nt, Artificial Sequence
  Description of Artificial Sequence: Synthetic oligonucleotide
  Antisense strand to SEQ ID NO: 1425838
ucaaguaggcaguacuaca

SEQ ID NO: 1425840 - RNA, 19 nt, Artificial Sequence
  Description of Artificial Sequence: Synthetic oligonucleotide
  Sense strand starting at position 3648 of SEQ ID NO: 1243575
gcuugaagauaaguuaaag

SEQ ID NO: 1425841 - RNA, 19 nt, Artificial Sequence
  Description of Artificial Sequence: Synthetic oligonucleotide
  Antisense strand to SEQ ID NO: 1425840
cuuuaacuuaucuucaagc

SEQ ID NO: 1425842 - RNA, 19 nt, Artificial Sequence
  Description of Artificial Sequence: Synthetic oligonucleotide
  Sense strand starting at position 3681 of SEQ ID NO: 1243575
ccuuucugaugacuugaau

SEQ ID NO: 1425843 - RNA, 19 nt, Artificial Sequence
  Description of Artificial Sequence: Synthetic oligonucleotide
  Antisense strand to SEQ ID NO: 1425842
auucaagucaucagaaagg

SEQ ID NO: 1425844 - RNA, 19 nt, Artificial Sequence
  Description of Artificial Sequence: Synthetic oligonucleotide
  Sense strand starting at position 3770 of SEQ ID NO: 1243575
ucuggagagucugccugau

SEQ ID NO: 1425845 - RNA, 19 nt, Artificial Sequence
  Description of Artificial Sequence: Synthetic oligonucleotide
  Antisense strand to SEQ ID NO: 1425844
aucaggcagacucuccaga

SEQ ID NO: 1425846 - RNA, 19 nt, Artificial Sequence
  Description of Artificial Sequence: Synthetic oligonucleotide
  Sense strand starting at position 3772 of SEQ ID NO: 1243575
uggagagucugccugauaa

SEQ ID NO: 1425847 - RNA, 19 nt, Artificial Sequence
  Description of Artificial Sequence: Synthetic oligonucleotide
  Antisense strand to SEQ ID NO: 1425846
uuaucaggcagacucucca

SEQ ID NO: 1425848 - RNA, 19 nt, Artificial Sequence
  Description of Artificial Sequence: Synthetic oligonucleotide
  Sense strand starting at position 3774 of SEQ ID NO: 1243575
gagagucugccugauaaug

SEQ ID NO: 1425849 - RNA, 19 nt, Artificial Sequence
  Description of Artificial Sequence: Synthetic oligonucleotide
  Antisense strand to SEQ ID NO: 1425848
cauuaucaggcagacucuc

SEQ ID NO: 1425850 - RNA, 19 nt, Artificial Sequence
  Description of Artificial Sequence: Synthetic oligonucleotide
  Sense strand starting at position 15 of SEQ ID NO: 1243576
acaguaggaguuugugaga

SEQ ID NO: 1425851 - RNA, 19 nt, Artificial Sequence
  Description of Artificial Sequence: Synthetic oligonucleotide
  Antisense strand to SEQ ID NO: 1425850
ucucacaaacuccuacugu

SEQ ID NO: 1425852 - RNA, 19 nt, Artificial Sequence
  Description of Artificial Sequence: Synthetic oligonucleotide
  Sense strand starting at position 26 of SEQ ID NO: 1243576
uugugagaauguccaccaa

SEQ ID NO: 1425853 - RNA, 19 nt, Artificial Sequence
  Description of Artificial Sequence: Synthetic oligonucleotide
  Antisense strand to SEQ ID NO: 1425852
uugguggacauucucacaa

SEQ ID NO: 1425854 - RNA, 19 nt, Artificial Sequence
  Description of Artificial Sequence: Synthetic oligonucleotide
  Sense strand starting at position 339 of SEQ ID NO: 1243576
gcggaugaacccugcagaa

SEQ ID NO: 1425855 - RNA, 19 nt, Artificial Sequence
  Description of Artificial Sequence: Synthetic oligonucleotide
  Antisense strand to SEQ ID NO: 1425854
uucugcaggguucauccgc

SEQ ID NO: 1425856 - RNA, 19 nt, Artificial Sequence
  Description of Artificial Sequence: Synthetic oligonucleotide
  Sense strand starting at position 354 of SEQ ID NO: 1243576
agaagugagcgcuaaucau

SEQ ID NO: 1425857 - RNA, 19 nt, Artificial Sequence
  Description of Artificial Sequence: Synthetic oligonucleotide
  Antisense strand to SEQ ID NO: 1425856
augauuagcgcucacuucu

SEQ ID NO: 1425858 - RNA, 19 nt, Artificial Sequence
  Description of Artificial Sequence: Synthetic oligonucleotide
  Sense strand starting at position 537 of SEQ ID NO: 1243576
ugccuucuccaacgggaaa

SEQ ID NO: 1425859 - RNA, 19 nt, Artificial Sequence
  Description of Artificial Sequence: Synthetic oligonucleotide
  Antisense strand to SEQ ID NO: 1425858
uuucccguuggagaaggca

SEQ ID NO: 1425860 - RNA, 19 nt, Artificial Sequence
  Description of Artificial Sequence: Synthetic oligonucleotide
  Sense strand starting at position 925 of SEQ ID NO: 1243576
gggacaaaggcuugcaaga

SEQ ID NO: 1425861 - RNA, 19 nt, Artificial Sequence
  Description of Artificial Sequence: Synthetic oligonucleotide
  Antisense strand to SEQ ID NO: 1425860
ucuugcaagccuuuguccc

SEQ ID NO: 1425862 - RNA, 19 nt, Artificial Sequence
  Description of Artificial Sequence: Synthetic oligonucleotide
  Sense strand starting at position 1327 of SEQ ID NO: 1243576
gacguuuccuaccugauga

SEQ ID NO: 1425863 - RNA, 19 nt, Artificial Sequence
  Description of Artificial Sequence: Synthetic oligonucleotide
  Antisense strand to SEQ ID NO: 1425862
ucaucagguaggaaacguc

SEQ ID NO: 1425864 - RNA, 19 nt, Artificial Sequence
  Description of Artificial Sequence: Synthetic oligonucleotide
  Sense strand starting at position 1329 of SEQ ID NO: 1243576
cguuuccuaccugaugaga

SEQ ID NO: 1425865 - RNA, 19 nt, Artificial Sequence
  Description of Artificial Sequence: Synthetic oligonucleotide
  Antisense strand to SEQ ID NO: 1425864
ucucaucagguaggaaacg

SEQ ID NO: 1425866 - RNA, 19 nt, Artificial Sequence
  Description of Artificial Sequence: Synthetic oligonucleotide
  Sense strand starting at position 1478 of SEQ ID NO: 1243576
gagggaucuuccucagcua

SEQ ID NO: 1425867 - RNA, 19 nt, Artificial Sequence
  Description of Artificial Sequence: Synthetic oligonucleotide
  Antisense strand to SEQ ID NO: 1425866
uagcugaggaagaucccuc

SEQ ID NO: 1425868 - RNA, 19 nt, Artificial Sequence
  Description of Artificial Sequence: Synthetic oligonucleotide
  Sense strand starting at position 1481 of SEQ ID NO: 1243576
ggaucuuccucagcuagga

SEQ ID NO: 1425869 - RNA, 19 nt, Artificial Sequence
  Description of Artificial Sequence: Synthetic oligonucleotide
  Antisense strand to SEQ ID NO: 1425868
uccuagcugaggaagaucc

SEQ ID NO: 1425870 - RNA, 19 nt, Artificial Sequence
  Description of Artificial Sequence: Synthetic oligonucleotide
  Sense strand starting at position 1770 of SEQ ID NO: 1243576
cuccaucugccuugggaaa

SEQ ID NO: 1425871 - RNA, 19 nt, Artificial Sequence
  Description of Artificial Sequence: Synthetic oligonucleotide
  Antisense strand to SEQ ID NO: 1425870
uuucccaaggcagauggag

SEQ ID NO: 1425872 - RNA, 19 nt, Artificial Sequence
  Description of Artificial Sequence: Synthetic oligonucleotide
  Sense strand starting at position 1971 of SEQ ID NO: 1243576
cgugcagaccuagaacuua

SEQ ID NO: 1425873 - RNA, 19 nt, Artificial Sequence
  Description of Artificial Sequence: Synthetic oligonucleotide
  Antisense strand to SEQ ID NO: 1425872
uaaguucuaggucugcacg

SEQ ID NO: 1425874 - RNA, 19 nt, Artificial Sequence
  Description of Artificial Sequence: Synthetic oligonucleotide
  Sense strand starting at position 2088 of SEQ ID NO: 1243576
acuuccuguuuccuaguaa

SEQ ID NO: 1425875 - RNA, 19 nt, Artificial Sequence
  Description of Artificial Sequence: Synthetic oligonucleotide
  Antisense strand to SEQ ID NO: 1425874
uuacuaggaaacaggaagu

SEQ ID NO: 1425876 - RNA, 19 nt, Artificial Sequence
  Description of Artificial Sequence: Synthetic oligonucleotide
  Sense strand starting at position 2404 of SEQ ID NO: 1243576
ggcguccugagaggaaauu

SEQ ID NO: 1425877 - RNA, 19 nt, Artificial Sequence
  Description of Artificial Sequence: Synthetic oligonucleotide
  Antisense strand to SEQ ID NO: 1425876
aauuuccucucaggacgcc

SEQ ID NO: 1425878 - RNA, 19 nt, Artificial Sequence
  Description of Artificial Sequence: Synthetic oligonucleotide
  Sense strand starting at position 2494 of SEQ ID NO: 1243576
ggcuuugugaggugagaau

SEQ ID NO: 1425879 - RNA, 19 nt, Artificial Sequence
  Description of Artificial Sequence: Synthetic oligonucleotide
  Antisense strand to SEQ ID NO: 1425878
auucucaccucacaaagcc

SEQ ID NO: 1425880 - RNA, 19 nt, Artificial Sequence
  Description of Artificial Sequence: Synthetic oligonucleotide
  Sense strand starting at position 2669 of SEQ ID NO: 1243576
uguuacgugaacuagaaua

SEQ ID NO: 1425881 - RNA, 19 nt, Artificial Sequence
  Description of Artificial Sequence: Synthetic oligonucleotide
  Antisense strand to SEQ ID NO: 1425880
uauucuaguucacguaaca

SEQ ID NO: 1425882 - RNA, 19 nt, Artificial Sequence
  Description of Artificial Sequence: Synthetic oligonucleotide
  Sense strand starting at position 2698 of SEQ ID NO: 1243576
ccguguguucugaggauug

SEQ ID NO: 1425883 - RNA, 19 nt, Artificial Sequence
  Description of Artificial Sequence: Synthetic oligonucleotide
  Antisense strand to SEQ ID NO: 1425882
caauccucagaacacacgg

SEQ ID NO: 1425884 - RNA, 19 nt, Artificial Sequence
  Description of Artificial Sequence: Synthetic oligonucleotide
  Sense strand starting at position 2700 of SEQ ID NO: 1243576
guguguucugaggauugag

SEQ ID NO: 1425885 - RNA, 19 nt, Artificial Sequence
  Description of Artificial Sequence: Synthetic oligonucleotide
  Antisense strand to SEQ ID NO: 1425884
cucaauccucagaacacac

SEQ ID NO: 1425886 - RNA, 19 nt, Artificial Sequence
  Description of Artificial Sequence: Synthetic oligonucleotide
  Sense strand starting at position 2703 of SEQ ID NO: 1243576
uguucugaggauugaguaa

SEQ ID NO: 1425887 - RNA, 19 nt, Artificial Sequence
  Description of Artificial Sequence: Synthetic oligonucleotide
  Antisense strand to SEQ ID NO: 1425886
uuacucaauccucagaaca

SEQ ID NO: 1425888 - RNA, 19 nt, Artificial Sequence
  Description of Artificial Sequence: Synthetic oligonucleotide
  Sense strand starting at position 2727 of SEQ ID NO: 1243576
ugaauauaguuagcacagu

SEQ ID NO: 1425889 - RNA, 19 nt, Artificial Sequence
  Description of Artificial Sequence: Synthetic oligonucleotide
  Antisense strand to SEQ ID NO: 1425888
acugugcuaacuauauuca

SEQ ID NO: 1425890 - RNA, 19 nt, Artificial Sequence
  Description of Artificial Sequence: Synthetic oligonucleotide
  Sense strand starting at position 2781 of SEQ ID NO: 1243576
ugcugucaucaucaguauu

SEQ ID NO: 1425891 - RNA, 19 nt, Artificial Sequence
  Description of Artificial Sequence: Synthetic oligonucleotide
  Antisense strand to SEQ ID NO: 1425890
aauacugaugaugacagca

SEQ ID NO: 1425892 - RNA, 19 nt, Artificial Sequence
  Description of Artificial Sequence: Synthetic oligonucleotide
  Sense strand starting at position 2783 of SEQ ID NO: 1243576
cugucaucaucaguauuaa

SEQ ID NO: 1425893 - RNA, 19 nt, Artificial Sequence
  Description of Artificial Sequence: Synthetic oligonucleotide
  Antisense strand to SEQ ID NO: 1425892
uuaauacugaugaugacag

SEQ ID NO: 1425894 - RNA, 19 nt, Artificial Sequence
  Description of Artificial Sequence: Synthetic oligonucleotide
  Sense strand starting at position 2784 of SEQ ID NO: 1243576
ugucaucaucaguauuaag

SEQ ID NO: 1425895 - RNA, 19 nt, Artificial Sequence
  Description of Artificial Sequence: Synthetic oligonucleotide
  Antisense strand to SEQ ID NO: 1425894
cuuaauacugaugaugaca

SEQ ID NO: 1425896 - RNA, 19 nt, Artificial Sequence
  Description of Artificial Sequence: Synthetic oligonucleotide
  Sense strand starting at position 2918 of SEQ ID NO: 1243576
gauggaagauaguuugagu

SEQ ID NO: 1425897 - RNA, 19 nt, Artificial Sequence
  Description of Artificial Sequence: Synthetic oligonucleotide
  Antisense strand to SEQ ID NO: 1425896
acucaaacuaucuuccauc

SEQ ID NO: 1425898 - RNA, 19 nt, Artificial Sequence
  Description of Artificial Sequence: Synthetic oligonucleotide
  Sense strand starting at position 2929 of SEQ ID NO: 1243576
guuugaguucaagggaagu

SEQ ID NO: 1425899 - RNA, 19 nt, Artificial Sequence
  Description of Artificial Sequence: Synthetic oligonucleotide
  Antisense strand to SEQ ID NO: 1425898
acuucccuugaacucaaac

SEQ ID NO: 1425900 - RNA, 19 nt, Artificial Sequence
  Description of Artificial Sequence: Synthetic oligonucleotide
  Sense strand starting at position 3416 of SEQ ID NO: 1243576
ucagcuauuaacuggagga

SEQ ID NO: 1425901 - RNA, 19 nt, Artificial Sequence
  Description of Artificial Sequence: Synthetic oligonucleotide
  Antisense strand to SEQ ID NO: 1425900
uccuccaguuaauagcuga

SEQ ID NO: 1425902 - RNA, 19 nt, Artificial Sequence
  Description of Artificial Sequence: Synthetic oligonucleotide
  Sense strand starting at position 3465 of SEQ ID NO: 1243576
cucuguuuagcugagagau

SEQ ID NO: 1425903 - RNA, 19 nt, Artificial Sequence
  Description of Artificial Sequence: Synthetic oligonucleotide
  Antisense strand to SEQ ID NO: 1425902
aucucucagcuaaacagag

SEQ ID NO: 1425904 - RNA, 19 nt, Artificial Sequence
  Description of Artificial Sequence: Synthetic oligonucleotide
  Sense strand starting at position 3471 of SEQ ID NO: 1243576
uuagcugagagaugaagua

SEQ ID NO: 1425905 - RNA, 19 nt, Artificial Sequence
  Description of Artificial Sequence: Synthetic oligonucleotide
  Antisense strand to SEQ ID NO: 1425904
uacuucaucucucagcuaa

SEQ ID NO: 1425906 - RNA, 19 nt, Artificial Sequence
  Description of Artificial Sequence: Synthetic oligonucleotide
  Sense strand starting at position 3499 of SEQ ID NO: 1243576
ggacuucucuuauugaaag

SEQ ID NO: 1425907 - RNA, 19 nt, Artificial Sequence
  Description of Artificial Sequence: Synthetic oligonucleotide
  Antisense strand to SEQ ID NO: 1425906
cuuucaauaagagaagucc

SEQ ID NO: 1425908 - RNA, 19 nt, Artificial Sequence
  Description of Artificial Sequence: Synthetic oligonucleotide
  Sense strand starting at position 3621 of SEQ ID NO: 1243576
uugagucuggucugaagaa

SEQ ID NO: 1425909 - RNA, 19 nt, Artificial Sequence
  Description of Artificial Sequence: Synthetic oligonucleotide
  Antisense strand to SEQ ID NO: 1425908
uucuucagaccagacucaa

SEQ ID NO: 1425910 - RNA, 19 nt, Artificial Sequence
  Description of Artificial Sequence: Synthetic oligonucleotide
  Sense strand starting at position 3639 of SEQ ID NO: 1243576
acauaacaggucugugauc

SEQ ID NO: 1425911 - RNA, 19 nt, Artificial Sequence
  Description of Artificial Sequence: Synthetic oligonucleotide
  Antisense strand to SEQ ID NO: 1425910
gaucacagaccuguuaugu

SEQ ID NO: 1425912 - RNA, 19 nt, Artificial Sequence
  Description of Artificial Sequence: Synthetic oligonucleotide
  Sense strand starting at position 3640 of SEQ ID NO: 1243576
cauaacaggucugugauca

SEQ ID NO: 1425913 - RNA, 19 nt, Artificial Sequence
  Description of Artificial Sequence: Synthetic oligonucleotide
  Antisense strand to SEQ ID NO: 1425912
ugaucacagaccuguuaug

SEQ ID NO: 1425914 - RNA, 19 nt, Artificial Sequence
  Description of Artificial Sequence: Synthetic oligonucleotide
  Sense strand starting at position 3644 of SEQ ID NO: 1243576
acaggucugugaucagaag

SEQ ID NO: 1425915 - RNA, 19 nt, Artificial Sequence
  Description of Artificial Sequence: Synthetic oligonucleotide
  Antisense strand to SEQ ID NO: 1425914
cuucugaucacagaccugu

SEQ ID NO: 1425916 - RNA, 19 nt, Artificial Sequence
  Description of Artificial Sequence: Synthetic oligonucleotide
  Sense strand starting at position 3645 of SEQ ID NO: 1243576
caggucugugaucagaagu

SEQ ID NO: 1425917 - RNA, 19 nt, Artificial Sequence
  Description of Artificial Sequence: Synthetic oligonucleotide
  Antisense strand to SEQ ID NO: 1425916
acuucugaucacagaccug

SEQ ID NO: 1425918 - RNA, 19 nt, Artificial Sequence
  Description of Artificial Sequence: Synthetic oligonucleotide
  Sense strand starting at position 3694 of SEQ ID NO: 1243576
uagcuauaccuguagggau

SEQ ID NO: 1425919 - RNA, 19 nt, Artificial Sequence
  Description of Artificial Sequence: Synthetic oligonucleotide
  Antisense strand to SEQ ID NO: 1425918
aucccuacagguauagcua

SEQ ID NO: 1425920 - RNA, 19 nt, Artificial Sequence
  Description of Artificial Sequence: Synthetic oligonucleotide
  Sense strand starting at position 3732 of SEQ ID NO: 1243576
uccuauauuugggaagcuu

SEQ ID NO: 1425921 - RNA, 19 nt, Artificial Sequence
  Description of Artificial Sequence: Synthetic oligonucleotide
  Antisense strand to SEQ ID NO: 1425920
aagcuucccaaauauagga

SEQ ID NO: 1425922 - RNA, 19 nt, Artificial Sequence
  Description of Artificial Sequence: Synthetic oligonucleotide
  Sense strand starting at position 3744 of SEQ ID NO: 1243576
gaagcuugugcacagggaa

SEQ ID NO: 1425923 - RNA, 19 nt, Artificial Sequence
  Description of Artificial Sequence: Synthetic oligonucleotide
  Antisense strand to SEQ ID NO: 1425922
uucccugugcacaagcuuc

SEQ ID NO: 1425924 - RNA, 19 nt, Artificial Sequence
  Description of Artificial Sequence: Synthetic oligonucleotide
  Sense strand starting at position 3768 of SEQ ID NO: 1243576
aaaugauggugccugcaga

SEQ ID NO: 1425925 - RNA, 19 nt, Artificial Sequence
  Description of Artificial Sequence: Synthetic oligonucleotide
  Antisense strand to SEQ ID NO: 1425924
ucugcaggcaccaucauuu

SEQ ID NO: 1425926 - RNA, 19 nt, Artificial Sequence
  Description of Artificial Sequence: Synthetic oligonucleotide
  Sense strand starting at position 3799 of SEQ ID NO: 1243576
gaaauuagguccuugggca

SEQ ID NO: 1425927 - RNA, 19 nt, Artificial Sequence
  Description of Artificial Sequence: Synthetic oligonucleotide
  Antisense strand to SEQ ID NO: 1425926
ugcccaaggaccuaauuuc

SEQ ID NO: 1425928 - RNA, 19 nt, Artificial Sequence
  Description of Artificial Sequence: Synthetic oligonucleotide
  Sense strand starting at position 3800 of SEQ ID NO: 1243576
aaauuagguccuugggcau

SEQ ID NO: 1425929 - RNA, 19 nt, Artificial Sequence
  Description of Artificial Sequence: Synthetic oligonucleotide
  Antisense strand to SEQ ID NO: 1425928
augcccaaggaccuaauuu

SEQ ID NO: 1425930 - RNA, 19 nt, Artificial Sequence
  Description of Artificial Sequence: Synthetic oligonucleotide
  Sense strand starting at position 75 of SEQ ID NO: 1243577
acugucucagguuauagaa

SEQ ID NO: 1425931 - RNA, 19 nt, Artificial Sequence
  Description of Artificial Sequence: Synthetic oligonucleotide
  Antisense strand to SEQ ID NO: 1425930
uucuauaaccugagacagu

SEQ ID NO: 1425932 - RNA, 19 nt, Artificial Sequence
  Description of Artificial Sequence: Synthetic oligonucleotide
  Sense strand starting at position 114 of SEQ ID NO: 1243577
gagggaaguucuguccagu

SEQ ID NO: 1425933 - RNA, 19 nt, Artificial Sequence
  Description of Artificial Sequence: Synthetic oligonucleotide
  Antisense strand to SEQ ID NO: 1425932
acuggacagaacuucccuc

SEQ ID NO: 1425934 - RNA, 19 nt, Artificial Sequence
  Description of Artificial Sequence: Synthetic oligonucleotide
  Sense strand starting at position 117 of SEQ ID NO: 1243577
ggaaguucuguccagugau

SEQ ID NO: 1425935 - RNA, 19 nt, Artificial Sequence
  Description of Artificial Sequence: Synthetic oligonucleotide
  Antisense strand to SEQ ID NO: 1425934
aucacuggacagaacuucc

SEQ ID NO: 1425936 - RNA, 19 nt, Artificial Sequence
  Description of Artificial Sequence: Synthetic oligonucleotide
  Sense strand starting at position 120 of SEQ ID NO: 1243577
aguucuguccagugauuaa

SEQ ID NO: 1425937 - RNA, 19 nt, Artificial Sequence
  Description of Artificial Sequence: Synthetic oligonucleotide
  Antisense strand to SEQ ID NO: 1425936
uuaaucacuggacagaacu

SEQ ID NO: 1425938 - RNA, 19 nt, Artificial Sequence
  Description of Artificial Sequence: Synthetic oligonucleotide
  Sense strand starting at position 124 of SEQ ID NO: 1243577
cuguccagugauuaacaca

SEQ ID NO: 1425939 - RNA, 19 nt, Artificial Sequence
  Description of Artificial Sequence: Synthetic oligonucleotide
  Antisense strand to SEQ ID NO: 1425938
uguguuaaucacuggacag

SEQ ID NO: 1425940 - RNA, 19 nt, Artificial Sequence
  Description of Artificial Sequence: Synthetic oligonucleotide
  Sense strand starting at position 255 of SEQ ID NO: 1243577
acugguuuagcugaguaga

SEQ ID NO: 1425941 - RNA, 19 nt, Artificial Sequence
  Description of Artificial Sequence: Synthetic oligonucleotide
  Antisense strand to SEQ ID NO: 1425940
ucuacucagcuaaaccagu

SEQ ID NO: 1425942 - RNA, 19 nt, Artificial Sequence
  Description of Artificial Sequence: Synthetic oligonucleotide
  Sense strand starting at position 257 of SEQ ID NO: 1243577
ugguuuagcugaguagaug

SEQ ID NO: 1425943 - RNA, 19 nt, Artificial Sequence
  Description of Artificial Sequence: Synthetic oligonucleotide
  Antisense strand to SEQ ID NO: 1425942
caucuacucagcuaaacca

SEQ ID NO: 1425944 - RNA, 19 nt, Artificial Sequence
  Description of Artificial Sequence: Synthetic oligonucleotide
  Sense strand starting at position 266 of SEQ ID NO: 1243577
ugaguagaugcauguuaag

SEQ ID NO: 1425945 - RNA, 19 nt, Artificial Sequence
  Description of Artificial Sequence: Synthetic oligonucleotide
  Antisense strand to SEQ ID NO: 1425944
cuuaacaugcaucuacuca

SEQ ID NO: 1425946 - RNA, 19 nt, Artificial Sequence
  Description of Artificial Sequence: Synthetic oligonucleotide
  Sense strand starting at position 272 of SEQ ID NO: 1243577
gaugcauguuaagcacuua

SEQ ID NO: 1425947 - RNA, 19 nt, Artificial Sequence
  Description of Artificial Sequence: Synthetic oligonucleotide
  Antisense strand to SEQ ID NO: 1425946
uaagugcuuaacaugcauc

SEQ ID NO: 1425948 - RNA, 19 nt, Artificial Sequence
  Description of Artificial Sequence: Synthetic oligonucleotide
  Sense strand starting at position 503 of SEQ ID NO: 1243577
gaauuucuuuagggaugcu

SEQ ID NO: 1425949 - RNA, 19 nt, Artificial Sequence
  Description of Artificial Sequence: Synthetic oligonucleotide
  Antisense strand to SEQ ID NO: 1425948
agcaucccuaaagaaauuc

SEQ ID NO: 1425950 - RNA, 19 nt, Artificial Sequence
  Description of Artificial Sequence: Synthetic oligonucleotide
  Sense strand starting at position 709 of SEQ ID NO: 1243577
ugggaauccugggagagaa

SEQ ID NO: 1425951 - RNA, 19 nt, Artificial Sequence
  Description of Artificial Sequence: Synthetic oligonucleotide
  Antisense strand to SEQ ID NO: 1425950
uucucucccaggauuccca

SEQ ID NO: 1425952 - RNA, 19 nt, Artificial Sequence
  Description of Artificial Sequence: Synthetic oligonucleotide
  Sense strand starting at position 751 of SEQ ID NO: 1243577
gaggccaucgugggaagau

SEQ ID NO: 1425953 - RNA, 19 nt, Artificial Sequence
  Description of Artificial Sequence: Synthetic oligonucleotide
  Antisense strand to SEQ ID NO: 1425952
aucuucccacgauggccuc

SEQ ID NO: 1425954 - RNA, 19 nt, Artificial Sequence
  Description of Artificial Sequence: Synthetic oligonucleotide
  Sense strand starting at position 1374 of SEQ ID NO: 1243577
cugcuagggauucgaggau

SEQ ID NO: 1425955 - RNA, 19 nt, Artificial Sequence
  Description of Artificial Sequence: Synthetic oligonucleotide
  Antisense strand to SEQ ID NO: 1425954
auccucgaaucccuagcag

SEQ ID NO: 1425956 - RNA, 19 nt, Artificial Sequence
  Description of Artificial Sequence: Synthetic oligonucleotide
  Sense strand starting at position 1389 of SEQ ID NO: 1243577
ggauucugauagggacaaa

SEQ ID NO: 1425957 - RNA, 19 nt, Artificial Sequence
  Description of Artificial Sequence: Synthetic oligonucleotide
  Antisense strand to SEQ ID NO: 1425956
uuugucccuaucagaaucc

SEQ ID NO: 1425958 - RNA, 19 nt, Artificial Sequence
  Description of Artificial Sequence: Synthetic oligonucleotide
  Sense strand starting at position 1409 of SEQ ID NO: 1243577
auaauuccucaguguuuau

SEQ ID NO: 1425959 - RNA, 19 nt, Artificial Sequence
  Description of Artificial Sequence: Synthetic oligonucleotide
  Antisense strand to SEQ ID NO: 1425958
auaaacacugaggaauuau

SEQ ID NO: 1425960 - RNA, 19 nt, Artificial Sequence
  Description of Artificial Sequence: Synthetic oligonucleotide
  Sense strand starting at position 1525 of SEQ ID NO: 1243577
ucuuaagggcgccauuauu

SEQ ID NO: 1425961 - RNA, 19 nt, Artificial Sequence
  Description of Artificial Sequence: Synthetic oligonucleotide
  Antisense strand to SEQ ID NO: 1425960
aauaauggcgcccuuaaga

SEQ ID NO: 1425962 - RNA, 19 nt, Artificial Sequence
  Description of Artificial Sequence: Synthetic oligonucleotide
  Sense strand starting at position 1532 of SEQ ID NO: 1243577
ggcgccauuauuugaccau

SEQ ID NO: 1425963 - RNA, 19 nt, Artificial Sequence
  Description of Artificial Sequence: Synthetic oligonucleotide
  Antisense strand to SEQ ID NO: 1425962
auggucaaauaauggcgcc

SEQ ID NO: 1425964 - RNA, 19 nt, Artificial Sequence
  Description of Artificial Sequence: Synthetic oligonucleotide
  Sense strand starting at position 1557 of SEQ ID NO: 1243577
uauggagccuuucugacuu

SEQ ID NO: 1425965 - RNA, 19 nt, Artificial Sequence
  Description of Artificial Sequence: Synthetic oligonucleotide
  Antisense strand to SEQ ID NO: 1425964
aagucagaaaggcuccaua

SEQ ID NO: 1425966 - RNA, 19 nt, Artificial Sequence
  Description of Artificial Sequence: Synthetic oligonucleotide
  Sense strand starting at position 1775 of SEQ ID NO: 1243577
cggugauuggccugggacu

SEQ ID NO: 1425967 - RNA, 19 nt, Artificial Sequence
  Description of Artificial Sequence: Synthetic oligonucleotide
  Antisense strand to SEQ ID NO: 1425966
agucccaggccaaucaccg

SEQ ID NO: 1425968 - RNA, 19 nt, Artificial Sequence
  Description of Artificial Sequence: Synthetic oligonucleotide
  Sense strand starting at position 1822 of SEQ ID NO: 1243577
ccugaagccucuguugaca

SEQ ID NO: 1425969 - RNA, 19 nt, Artificial Sequence
  Description of Artificial Sequence: Synthetic oligonucleotide
  Antisense strand to SEQ ID NO: 1425968
ugucaacagaggcuucagg

SEQ ID NO: 1425970 - RNA, 19 nt, Artificial Sequence
  Description of Artificial Sequence: Synthetic oligonucleotide
  Sense strand starting at position 2314 of SEQ ID NO: 1243577
acccaaugcuuggcuaauu

SEQ ID NO: 1425971 - RNA, 19 nt, Artificial Sequence
  Description of Artificial Sequence: Synthetic oligonucleotide
  Antisense strand to SEQ ID NO: 1425970
aauuagccaagcauugggu

SEQ ID NO: 1425972 - RNA, 19 nt, Artificial Sequence
  Description of Artificial Sequence: Synthetic oligonucleotide
  Sense strand starting at position 2813 of SEQ ID NO: 1243577
uuauuuacguuguuccaaa

SEQ ID NO: 1425973 - RNA, 19 nt, Artificial Sequence
  Description of Artificial Sequence: Synthetic oligonucleotide
  Antisense strand to SEQ ID NO: 1425972
uuuggaacaacguaaauaa

SEQ ID NO: 1425974 - RNA, 19 nt, Artificial Sequence
  Description of Artificial Sequence: Synthetic oligonucleotide
  Sense strand starting at position 2877 of SEQ ID NO: 1243577
ugggaaaccuuccuccuuu

SEQ ID NO: 1425975 - RNA, 19 nt, Artificial Sequence
  Description of Artificial Sequence: Synthetic oligonucleotide
  Antisense strand to SEQ ID NO: 1425974
aaaggaggaagguuuccca

SEQ ID NO: 1425976 - RNA, 19 nt, Artificial Sequence
  Description of Artificial Sequence: Synthetic oligonucleotide
  Sense strand starting at position 2878 of SEQ ID NO: 1243577
gggaaaccuuccuccuuua

SEQ ID NO: 1425977 - RNA, 19 nt, Artificial Sequence
  Description of Artificial Sequence: Synthetic oligonucleotide
  Antisense strand to SEQ ID NO: 1425976
uaaaggaggaagguuuccc

SEQ ID NO: 1425978 - RNA, 19 nt, Artificial Sequence
  Description of Artificial Sequence: Synthetic oligonucleotide
  Sense strand starting at position 2926 of SEQ ID NO: 1243577
ggccucaguucuucucaua

SEQ ID NO: 1425979 - RNA, 19 nt, Artificial Sequence
  Description of Artificial Sequence: Synthetic oligonucleotide
  Antisense strand to SEQ ID NO: 1425978
uaugagaagaacugaggcc

SEQ ID NO: 1425980 - RNA, 19 nt, Artificial Sequence
  Description of Artificial Sequence: Synthetic oligonucleotide
  Sense strand starting at position 3016 of SEQ ID NO: 1243577
caagaugggucauccucau

SEQ ID NO: 1425981 - RNA, 19 nt, Artificial Sequence
  Description of Artificial Sequence: Synthetic oligonucleotide
  Antisense strand to SEQ ID NO: 1425980
augaggaugacccaucuug

SEQ ID NO: 1425982 - RNA, 19 nt, Artificial Sequence
  Description of Artificial Sequence: Synthetic oligonucleotide
  Sense strand starting at position 3040 of SEQ ID NO: 1243577
guggcauuggacuguaaau

SEQ ID NO: 1425983 - RNA, 19 nt, Artificial Sequence
  Description of Artificial Sequence: Synthetic oligonucleotide
  Antisense strand to SEQ ID NO: 1425982
auuuacaguccaaugccac

SEQ ID NO: 1425984 - RNA, 19 nt, Artificial Sequence
  Description of Artificial Sequence: Synthetic oligonucleotide
  Sense strand starting at position 3042 of SEQ ID NO: 1243577
ggcauuggacuguaaauac

SEQ ID NO: 1425985 - RNA, 19 nt, Artificial Sequence
  Description of Artificial Sequence: Synthetic oligonucleotide
  Antisense strand to SEQ ID NO: 1425984
guauuuacaguccaaugcc

SEQ ID NO: 1425986 - RNA, 19 nt, Artificial Sequence
  Description of Artificial Sequence: Synthetic oligonucleotide
  Sense strand starting at position 3081 of SEQ ID NO: 1243577
uuuggaauauaccugcaau

SEQ ID NO: 1425987 - RNA, 19 nt, Artificial Sequence
  Description of Artificial Sequence: Synthetic oligonucleotide
  Antisense strand to SEQ ID NO: 1425986
auugcagguauauuccaaa

SEQ ID NO: 1425988 - RNA, 19 nt, Artificial Sequence
  Description of Artificial Sequence: Synthetic oligonucleotide
  Sense strand starting at position 3110 of SEQ ID NO: 1243577
gcagaauacuguuugcuaa

SEQ ID NO: 1425989 - RNA, 19 nt, Artificial Sequence
  Description of Artificial Sequence: Synthetic oligonucleotide
  Antisense strand to SEQ ID NO: 1425988
uuagcaaacaguauucugc

SEQ ID NO: 1425990 - RNA, 19 nt, Artificial Sequence
  Description of Artificial Sequence: Synthetic oligonucleotide
  Sense strand starting at position 3111 of SEQ ID NO: 1243577
cagaauacuguuugcuaag

SEQ ID NO: 1425991 - RNA, 19 nt, Artificial Sequence
  Description of Artificial Sequence: Synthetic oligonucleotide
  Antisense strand to SEQ ID NO: 1425990
cuuagcaaacaguauucug

SEQ ID NO: 1425992 - RNA, 19 nt, Artificial Sequence
  Description of Artificial Sequence: Synthetic oligonucleotide
  Sense strand starting at position 3137 of SEQ ID NO: 1243577
cugguugcuggagauaaca

SEQ ID NO: 1425993 - RNA, 19 nt, Artificial Sequence
  Description of Artificial Sequence: Synthetic oligonucleotide
  Antisense strand to SEQ ID NO: 1425992
uguuaucuccagcaaccag

SEQ ID NO: 1425994 - RNA, 19 nt, Artificial Sequence
  Description of Artificial Sequence: Synthetic oligonucleotide
  Sense strand starting at position 3279 of SEQ ID NO: 1243577
agucaagauuucuuugugu

SEQ ID NO: 1425995 - RNA, 19 nt, Artificial Sequence
  Description of Artificial Sequence: Synthetic oligonucleotide
  Antisense strand to SEQ ID NO: 1425994
acacaaagaaaucuugacu

SEQ ID NO: 1425996 - RNA, 19 nt, Artificial Sequence
  Description of Artificial Sequence: Synthetic oligonucleotide
  Sense strand starting at position 3281 of SEQ ID NO: 1243577
ucaagauuucuuuguguuu

SEQ ID NO: 1425997 - RNA, 19 nt, Artificial Sequence
  Description of Artificial Sequence: Synthetic oligonucleotide
  Antisense strand to SEQ ID NO: 1425996
aaacacaaagaaaucuuga

SEQ ID NO: 1425998 - RNA, 19 nt, Artificial Sequence
  Description of Artificial Sequence: Synthetic oligonucleotide
  Sense strand starting at position 3363 of SEQ ID NO: 1243577
aucucauaugcauauguua

SEQ ID NO: 1425999 - RNA, 19 nt, Artificial Sequence
  Description of Artificial Sequence: Synthetic oligonucleotide
  Antisense strand to SEQ ID NO: 1425998
uaacauaugcauaugagau

SEQ ID NO: 1426000 - RNA, 19 nt, Artificial Sequence
  Description of Artificial Sequence: Synthetic oligonucleotide
  Sense strand starting at position 3430 of SEQ ID NO: 1243577
uuacauuauuaccuugagu

SEQ ID NO: 1426001 - RNA, 19 nt, Artificial Sequence
  Description of Artificial Sequence: Synthetic oligonucleotide
  Antisense strand to SEQ ID NO: 1426000
acucaagguaauaauguaa

SEQ ID NO: 1426002 - RNA, 19 nt, Artificial Sequence
  Description of Artificial Sequence: Synthetic oligonucleotide
  Sense strand starting at position 3432 of SEQ ID NO: 1243577
acauuauuaccuugaguuc

SEQ ID NO: 1426003 - RNA, 19 nt, Artificial Sequence
  Description of Artificial Sequence: Synthetic oligonucleotide
  Antisense strand to SEQ ID NO: 1426002
gaacucaagguaauaaugu

SEQ ID NO: 1426004 - RNA, 19 nt, Artificial Sequence
  Description of Artificial Sequence: Synthetic oligonucleotide
  Sense strand starting at position 3468 of SEQ ID NO: 1243577
acuccauguggugaauacu

SEQ ID NO: 1426005 - RNA, 19 nt, Artificial Sequence
  Description of Artificial Sequence: Synthetic oligonucleotide
  Antisense strand to SEQ ID NO: 1426004
aguauucaccacauggagu

SEQ ID NO: 1426006 - RNA, 19 nt, Artificial Sequence
  Description of Artificial Sequence: Synthetic oligonucleotide
  Sense strand starting at position 3471 of SEQ ID NO: 1243577
ccauguggugaauacugua

SEQ ID NO: 1426007 - RNA, 19 nt, Artificial Sequence
  Description of Artificial Sequence: Synthetic oligonucleotide
  Antisense strand to SEQ ID NO: 1426006
uacaguauucaccacaugg

SEQ ID NO: 1426008 - RNA, 19 nt, Artificial Sequence
  Description of Artificial Sequence: Synthetic oligonucleotide
  Sense strand starting at position 3619 of SEQ ID NO: 1243577
ugcuuuaggccagaaguua

SEQ ID NO: 1426009 - RNA, 19 nt, Artificial Sequence
  Description of Artificial Sequence: Synthetic oligonucleotide
  Antisense strand to SEQ ID NO: 1426008
uaacuucuggccuaaagca

SEQ ID NO: 1426010 - RNA, 19 nt, Artificial Sequence
  Description of Artificial Sequence: Synthetic oligonucleotide
  Sense strand starting at position 272 of SEQ ID NO: 1243578
aaugaauagcucugggaug

SEQ ID NO: 1426011 - RNA, 19 nt, Artificial Sequence
  Description of Artificial Sequence: Synthetic oligonucleotide
  Antisense strand to SEQ ID NO: 1426010
caucccagagcuauucauu

SEQ ID NO: 1426012 - RNA, 19 nt, Artificial Sequence
  Description of Artificial Sequence: Synthetic oligonucleotide
  Sense strand starting at position 323 of SEQ ID NO: 1243578
ccaagugauuuagauauaa

SEQ ID NO: 1426013 - RNA, 19 nt, Artificial Sequence
  Description of Artificial Sequence: Synthetic oligonucleotide
  Antisense strand to SEQ ID NO: 1426012
uuauaucuaaaucacuugg

SEQ ID NO: 1426014 - RNA, 19 nt, Artificial Sequence
  Description of Artificial Sequence: Synthetic oligonucleotide
  Sense strand starting at position 334 of SEQ ID NO: 1243578
agauauaaccaauggccau

SEQ ID NO: 1426015 - RNA, 19 nt, Artificial Sequence
  Description of Artificial Sequence: Synthetic oligonucleotide
  Antisense strand to SEQ ID NO: 1426014
auggccauugguuauaucu

SEQ ID NO: 1426016 - RNA, 19 nt, Artificial Sequence
  Description of Artificial Sequence: Synthetic oligonucleotide
  Sense strand starting at position 395 of SEQ ID NO: 1243578
gaaauaucauggucagauc

SEQ ID NO: 1426017 - RNA, 19 nt, Artificial Sequence
  Description of Artificial Sequence: Synthetic oligonucleotide
  Antisense strand to SEQ ID NO: 1426016
gaucugaccaugauauuuc

SEQ ID NO: 1426018 - RNA, 19 nt, Artificial Sequence
  Description of Artificial Sequence: Synthetic oligonucleotide
  Sense strand starting at position 413 of SEQ ID NO: 1243578
cugaaucuuggacagcuau

SEQ ID NO: 1426019 - RNA, 19 nt, Artificial Sequence
  Description of Artificial Sequence: Synthetic oligonucleotide
  Antisense strand to SEQ ID NO: 1426018
auagcuguccaagauucag

SEQ ID NO: 1426020 - RNA, 19 nt, Artificial Sequence
  Description of Artificial Sequence: Synthetic oligonucleotide
  Sense strand starting at position 426 of SEQ ID NO: 1243578
agcuaucccuggucuugaa

SEQ ID NO: 1426021 - RNA, 19 nt, Artificial Sequence
  Description of Artificial Sequence: Synthetic oligonucleotide
  Antisense strand to SEQ ID NO: 1426020
uucaagaccagggauagcu

SEQ ID NO: 1426022 - RNA, 19 nt, Artificial Sequence
  Description of Artificial Sequence: Synthetic oligonucleotide
  Sense strand starting at position 441 of SEQ ID NO: 1243578
ugaagaaucuggcucugaa

SEQ ID NO: 1426023 - RNA, 19 nt, Artificial Sequence
  Description of Artificial Sequence: Synthetic oligonucleotide
  Antisense strand to SEQ ID NO: 1426022
uucagagccagauucuuca

SEQ ID NO: 1426024 - RNA, 19 nt, Artificial Sequence
  Description of Artificial Sequence: Synthetic oligonucleotide
  Sense strand starting at position 444 of SEQ ID NO: 1243578
agaaucuggcucugaaauu

SEQ ID NO: 1426025 - RNA, 19 nt, Artificial Sequence
  Description of Artificial Sequence: Synthetic oligonucleotide
  Antisense strand to SEQ ID NO: 1426024
aauuucagagccagauucu

SEQ ID NO: 1426026 - RNA, 19 nt, Artificial Sequence
  Description of Artificial Sequence: Synthetic oligonucleotide
  Sense strand starting at position 558 of SEQ ID NO: 1243578
gcaguauguccuucgcuga

SEQ ID NO: 1426027 - RNA, 19 nt, Artificial Sequence
  Description of Artificial Sequence: Synthetic oligonucleotide
  Antisense strand to SEQ ID NO: 1426026
ucagcgaaggacauacugc

SEQ ID NO: 1426028 - RNA, 19 nt, Artificial Sequence
  Description of Artificial Sequence: Synthetic oligonucleotide
  Sense strand starting at position 678 of SEQ ID NO: 1243578
uuaggaucucuuuggucca

SEQ ID NO: 1426029 - RNA, 19 nt, Artificial Sequence
  Description of Artificial Sequence: Synthetic oligonucleotide
  Antisense strand to SEQ ID NO: 1426028
uggaccaaagagauccuaa

SEQ ID NO: 1426030 - RNA, 19 nt, Artificial Sequence
  Description of Artificial Sequence: Synthetic oligonucleotide
  Sense strand starting at position 681 of SEQ ID NO: 1243578
ggaucucuuugguccaacu

SEQ ID NO: 1426031 - RNA, 19 nt, Artificial Sequence
  Description of Artificial Sequence: Synthetic oligonucleotide
  Antisense strand to SEQ ID NO: 1426030
aguuggaccaaagagaucc

SEQ ID NO: 1426032 - RNA, 19 nt, Artificial Sequence
  Description of Artificial Sequence: Synthetic oligonucleotide
  Sense strand starting at position 738 of SEQ ID NO: 1243578
gaggguagcaccuguuaaa

SEQ ID NO: 1426033 - RNA, 19 nt, Artificial Sequence
  Description of Artificial Sequence: Synthetic oligonucleotide
  Antisense strand to SEQ ID NO: 1426032
uuuaacaggugcuacccuc

SEQ ID NO: 1426034 - RNA, 19 nt, Artificial Sequence
  Description of Artificial Sequence: Synthetic oligonucleotide
  Sense strand starting at position 864 of SEQ ID NO: 1243578
gcaagacaauguuucuaca

SEQ ID NO: 1426035 - RNA, 19 nt, Artificial Sequence
  Description of Artificial Sequence: Synthetic oligonucleotide
  Antisense strand to SEQ ID NO: 1426034
uguagaaacauugucuugc

SEQ ID NO: 1426036 - RNA, 19 nt, Artificial Sequence
  Description of Artificial Sequence: Synthetic oligonucleotide
  Sense strand starting at position 948 of SEQ ID NO: 1243578
cagcuugcagacugacaua

SEQ ID NO: 1426037 - RNA, 19 nt, Artificial Sequence
  Description of Artificial Sequence: Synthetic oligonucleotide
  Antisense strand to SEQ ID NO: 1426036
uaugucagucugcaagcug

SEQ ID NO: 1426038 - RNA, 19 nt, Artificial Sequence
  Description of Artificial Sequence: Synthetic oligonucleotide
  Sense strand starting at position 964 of SEQ ID NO: 1243578
auaggaaucucuguguggu

SEQ ID NO: 1426039 - RNA, 19 nt, Artificial Sequence
  Description of Artificial Sequence: Synthetic oligonucleotide
  Antisense strand to SEQ ID NO: 1426038
accacacagagauuccuau

SEQ ID NO: 1426040 - RNA, 19 nt, Artificial Sequence
  Description of Artificial Sequence: Synthetic oligonucleotide
  Sense strand starting at position 965 of SEQ ID NO: 1243578
uaggaaucucuguguggug

SEQ ID NO: 1426041 - RNA, 19 nt, Artificial Sequence
  Description of Artificial Sequence: Synthetic oligonucleotide
  Antisense strand to SEQ ID NO: 1426040
caccacacagagauuccua

SEQ ID NO: 1426042 - RNA, 19 nt, Artificial Sequence
  Description of Artificial Sequence: Synthetic oligonucleotide
  Sense strand starting at position 967 of SEQ ID NO: 1243578
ggaaucucuguguggugga

SEQ ID NO: 1426043 - RNA, 19 nt, Artificial Sequence
  Description of Artificial Sequence: Synthetic oligonucleotide
  Antisense strand to SEQ ID NO: 1426042
uccaccacacagagauucc

SEQ ID NO: 1426044 - RNA, 19 nt, Artificial Sequence
  Description of Artificial Sequence: Synthetic oligonucleotide
  Sense strand starting at position 1119 of SEQ ID NO: 1243578
cgugguuauuuagcacuca

SEQ ID NO: 1426045 - RNA, 19 nt, Artificial Sequence
  Description of Artificial Sequence: Synthetic oligonucleotide
  Antisense strand to SEQ ID NO: 1426044
ugagugcuaaauaaccacg

SEQ ID NO: 1426046 - RNA, 19 nt, Artificial Sequence
  Description of Artificial Sequence: Synthetic oligonucleotide
  Sense strand starting at position 1195 of SEQ ID NO: 1243578
cagucaucgguguuucguu

SEQ ID NO: 1426047 - RNA, 19 nt, Artificial Sequence
  Description of Artificial Sequence: Synthetic oligonucleotide
  Antisense strand to SEQ ID NO: 1426046
aacgaaacaccgaugacug

SEQ ID NO: 1426048 - RNA, 19 nt, Artificial Sequence
  Description of Artificial Sequence: Synthetic oligonucleotide
  Sense strand starting at position 1202 of SEQ ID NO: 1243578
cgguguuucguuccaacca

SEQ ID NO: 1426049 - RNA, 19 nt, Artificial Sequence
  Description of Artificial Sequence: Synthetic oligonucleotide
  Antisense strand to SEQ ID NO: 1426048
ugguuggaacgaaacaccg

SEQ ID NO: 1426050 - RNA, 19 nt, Artificial Sequence
  Description of Artificial Sequence: Synthetic oligonucleotide
  Sense strand starting at position 1907 of SEQ ID NO: 1243578
cgccuuugccuggaacaca

SEQ ID NO: 1426051 - RNA, 19 nt, Artificial Sequence
  Description of Artificial Sequence: Synthetic oligonucleotide
  Antisense strand to SEQ ID NO: 1426050
uguguuccaggcaaaggcg

SEQ ID NO: 1426052 - RNA, 19 nt, Artificial Sequence
  Description of Artificial Sequence: Synthetic oligonucleotide
  Sense strand starting at position 1993 of SEQ ID NO: 1243578
aguguaauggcgcugcgau

SEQ ID NO: 1426053 - RNA, 19 nt, Artificial Sequence
  Description of Artificial Sequence: Synthetic oligonucleotide
  Antisense strand to SEQ ID NO: 1426052
aucgcagcgccauuacacu

SEQ ID NO: 1426054 - RNA, 19 nt, Artificial Sequence
  Description of Artificial Sequence: Synthetic oligonucleotide
  Sense strand starting at position 2040 of SEQ ID NO: 1243578
cccaauacgcgcguucauu

SEQ ID NO: 1426055 - RNA, 19 nt, Artificial Sequence
  Description of Artificial Sequence: Synthetic oligonucleotide
  Antisense strand to SEQ ID NO: 1426054
aaugaacgcgcguauuggg

SEQ ID NO: 1426056 - RNA, 19 nt, Artificial Sequence
  Description of Artificial Sequence: Synthetic oligonucleotide
  Sense strand starting at position 2306 of SEQ ID NO: 1243578
ccgaguuagagcugagauu

SEQ ID NO: 1426057 - RNA, 19 nt, Artificial Sequence
  Description of Artificial Sequence: Synthetic oligonucleotide
  Antisense strand to SEQ ID NO: 1426056
aaucucagcucuaacucgg

SEQ ID NO: 1426058 - RNA, 19 nt, Artificial Sequence
  Description of Artificial Sequence: Synthetic oligonucleotide
  Sense strand starting at position 2307 of SEQ ID NO: 1243578
cgaguuagagcugagauua

SEQ ID NO: 1426059 - RNA, 19 nt, Artificial Sequence
  Description of Artificial Sequence: Synthetic oligonucleotide
  Antisense strand to SEQ ID NO: 1426058
uaaucucagcucuaacucg

SEQ ID NO: 1426060 - RNA, 19 nt, Artificial Sequence
  Description of Artificial Sequence: Synthetic oligonucleotide
  Sense strand starting at position 2315 of SEQ ID NO: 1243578
agcugagauuauccugagu

SEQ ID NO: 1426061 - RNA, 19 nt, Artificial Sequence
  Description of Artificial Sequence: Synthetic oligonucleotide
  Antisense strand to SEQ ID NO: 1426060
acucaggauaaucucagcu

SEQ ID NO: 1426062 - RNA, 19 nt, Artificial Sequence
  Description of Artificial Sequence: Synthetic oligonucleotide
  Sense strand starting at position 2320 of SEQ ID NO: 1243578
agauuauccugaguuccuu

SEQ ID NO: 1426063 - RNA, 19 nt, Artificial Sequence
  Description of Artificial Sequence: Synthetic oligonucleotide
  Antisense strand to SEQ ID NO: 1426062
aaggaacucaggauaaucu

SEQ ID NO: 1426064 - RNA, 19 nt, Artificial Sequence
  Description of Artificial Sequence: Synthetic oligonucleotide
  Sense strand starting at position 2350 of SEQ ID NO: 1243578
cucagagcauccuugacuu

SEQ ID NO: 1426065 - RNA, 19 nt, Artificial Sequence
  Description of Artificial Sequence: Synthetic oligonucleotide
  Antisense strand to SEQ ID NO: 1426064
aagucaaggaugcucugag

SEQ ID NO: 1426066 - RNA, 19 nt, Artificial Sequence
  Description of Artificial Sequence: Synthetic oligonucleotide
  Sense strand starting at position 2364 of SEQ ID NO: 1243578
gacuuuggagaaugguuau

SEQ ID NO: 1426067 - RNA, 19 nt, Artificial Sequence
  Description of Artificial Sequence: Synthetic oligonucleotide
  Antisense strand to SEQ ID NO: 1426066
auaaccauucuccaaaguc

SEQ ID NO: 1426068 - RNA, 19 nt, Artificial Sequence
  Description of Artificial Sequence: Synthetic oligonucleotide
  Sense strand starting at position 2367 of SEQ ID NO: 1243578
uuuggagaaugguuaucuu

SEQ ID NO: 1426069 - RNA, 19 nt, Artificial Sequence
  Description of Artificial Sequence: Synthetic oligonucleotide
  Antisense strand to SEQ ID NO: 1426068
aagauaaccauucuccaaa

SEQ ID NO: 1426070 - RNA, 19 nt, Artificial Sequence
  Description of Artificial Sequence: Synthetic oligonucleotide
  Sense strand starting at position 2370 of SEQ ID NO: 1243578
ggagaaugguuaucuucuu

SEQ ID NO: 1426071 - RNA, 19 nt, Artificial Sequence
  Description of Artificial Sequence: Synthetic oligonucleotide
  Antisense strand to SEQ ID NO: 1426070
aagaagauaaccauucucc

SEQ ID NO: 1426072 - RNA, 19 nt, Artificial Sequence
  Description of Artificial Sequence: Synthetic oligonucleotide
  Sense strand starting at position 2371 of SEQ ID NO: 1243578
gagaaugguuaucuucuuu

SEQ ID NO: 1426073 - RNA, 19 nt, Artificial Sequence
  Description of Artificial Sequence: Synthetic oligonucleotide
  Antisense strand to SEQ ID NO: 1426072
aaagaagauaaccauucuc

SEQ ID NO: 1426074 - RNA, 19 nt, Artificial Sequence
  Description of Artificial Sequence: Synthetic oligonucleotide
  Sense strand starting at position 2406 of SEQ ID NO: 1243578
agggaauuaugguuagcau

SEQ ID NO: 1426075 - RNA, 19 nt, Artificial Sequence
  Description of Artificial Sequence: Synthetic oligonucleotide
  Antisense strand to SEQ ID NO: 1426074
augcuaaccauaauucccu

SEQ ID NO: 1426076 - RNA, 19 nt, Artificial Sequence
  Description of Artificial Sequence: Synthetic oligonucleotide
  Sense strand starting at position 2407 of SEQ ID NO: 1243578
gggaauuaugguuagcauu

SEQ ID NO: 1426077 - RNA, 19 nt, Artificial Sequence
  Description of Artificial Sequence: Synthetic oligonucleotide
  Antisense strand to SEQ ID NO: 1426076
aaugcuaaccauaauuccc

SEQ ID NO: 1426078 - RNA, 19 nt, Artificial Sequence
  Description of Artificial Sequence: Synthetic oligonucleotide
  Sense strand starting at position 2438 of SEQ ID NO: 1243578
gcgccaugcccagcauauu

SEQ ID NO: 1426079 - RNA, 19 nt, Artificial Sequence
  Description of Artificial Sequence: Synthetic oligonucleotide
  Antisense strand to SEQ ID NO: 1426078
aauaugcugggcauggcgc

SEQ ID NO: 1426080 - RNA, 19 nt, Artificial Sequence
  Description of Artificial Sequence: Synthetic oligonucleotide
  Sense strand starting at position 3341 of SEQ ID NO: 1243578
gugaaccaaugguuaucau

SEQ ID NO: 1426081 - RNA, 19 nt, Artificial Sequence
  Description of Artificial Sequence: Synthetic oligonucleotide
  Antisense strand to SEQ ID NO: 1426080
augauaaccauugguucac

SEQ ID NO: 1426082 - RNA, 19 nt, Artificial Sequence
  Description of Artificial Sequence: Synthetic oligonucleotide
  Sense strand starting at position 3392 of SEQ ID NO: 1243578
gggauuccaugaguuucca

SEQ ID NO: 1426083 - RNA, 19 nt, Artificial Sequence
  Description of Artificial Sequence: Synthetic oligonucleotide
  Antisense strand to SEQ ID NO: 1426082
uggaaacucauggaauccc

SEQ ID NO: 1426084 - RNA, 19 nt, Artificial Sequence
  Description of Artificial Sequence: Synthetic oligonucleotide
  Sense strand starting at position 3400 of SEQ ID NO: 1243578
augaguuuccagggccaua

SEQ ID NO: 1426085 - RNA, 19 nt, Artificial Sequence
  Description of Artificial Sequence: Synthetic oligonucleotide
  Antisense strand to SEQ ID NO: 1426084
uauggcccuggaaacucau

SEQ ID NO: 1426086 - RNA, 19 nt, Artificial Sequence
  Description of Artificial Sequence: Synthetic oligonucleotide
  Sense strand starting at position 3600 of SEQ ID NO: 1243578
cgugacauuuguucaacgu

SEQ ID NO: 1426087 - RNA, 19 nt, Artificial Sequence
  Description of Artificial Sequence: Synthetic oligonucleotide
  Antisense strand to SEQ ID NO: 1426086
acguugaacaaaugucacg

SEQ ID NO: 1426088 - RNA, 19 nt, Artificial Sequence
  Description of Artificial Sequence: Synthetic oligonucleotide
  Sense strand starting at position 3684 of SEQ ID NO: 1243578
gagcuuacagucuaguaaa

SEQ ID NO: 1426089 - RNA, 19 nt, Artificial Sequence
  Description of Artificial Sequence: Synthetic oligonucleotide
  Antisense strand to SEQ ID NO: 1426088
uuuacuagacuguaagcuc

SEQ ID NO: 1426090 - RNA, 19 nt, Artificial Sequence
  Description of Artificial Sequence: Synthetic oligonucleotide
  Sense strand starting at position 132 of SEQ ID NO: 1243579
gugaaacauucucugauca

SEQ ID NO: 1426091 - RNA, 19 nt, Artificial Sequence
  Description of Artificial Sequence: Synthetic oligonucleotide
  Antisense strand to SEQ ID NO: 1426090
ugaucagagaauguuucac

SEQ ID NO: 1426092 - RNA, 19 nt, Artificial Sequence
  Description of Artificial Sequence: Synthetic oligonucleotide
  Sense strand starting at position 133 of SEQ ID NO: 1243579
ugaaacauucucugaucag

SEQ ID NO: 1426093 - RNA, 19 nt, Artificial Sequence
  Description of Artificial Sequence: Synthetic oligonucleotide
  Antisense strand to SEQ ID NO: 1426092
cugaucagagaauguuuca

SEQ ID NO: 1426094 - RNA, 19 nt, Artificial Sequence
  Description of Artificial Sequence: Synthetic oligonucleotide
  Sense strand starting at position 273 of SEQ ID NO: 1243579
gugcuuuccuccucuugca

SEQ ID NO: 1426095 - RNA, 19 nt, Artificial Sequence
  Description of Artificial Sequence: Synthetic oligonucleotide
  Antisense strand to SEQ ID NO: 1426094
ugcaagaggaggaaagcac

SEQ ID NO: 1426096 - RNA, 19 nt, Artificial Sequence
  Description of Artificial Sequence: Synthetic oligonucleotide
  Sense strand starting at position 426 of SEQ ID NO: 1243579
accacauccgccugugaau

SEQ ID NO: 1426097 - RNA, 19 nt, Artificial Sequence
  Description of Artificial Sequence: Synthetic oligonucleotide
  Antisense strand to SEQ ID NO: 1426096
auucacaggcggauguggu

SEQ ID NO: 1426098 - RNA, 19 nt, Artificial Sequence
  Description of Artificial Sequence: Synthetic oligonucleotide
  Sense strand starting at position 595 of SEQ ID NO: 1243579
gaggucuucuaugccuagu

SEQ ID NO: 1426099 - RNA, 19 nt, Artificial Sequence
  Description of Artificial Sequence: Synthetic oligonucleotide
  Antisense strand to SEQ ID NO: 1426098
acuaggcauagaagaccuc

SEQ ID NO: 1426100 - RNA, 19 nt, Artificial Sequence
  Description of Artificial Sequence: Synthetic oligonucleotide
  Sense strand starting at position 597 of SEQ ID NO: 1243579
ggucuucuaugccuaguca

SEQ ID NO: 1426101 - RNA, 19 nt, Artificial Sequence
  Description of Artificial Sequence: Synthetic oligonucleotide
  Antisense strand to SEQ ID NO: 1426100
ugacuaggcauagaagacc

SEQ ID NO: 1426102 - RNA, 19 nt, Artificial Sequence
  Description of Artificial Sequence: Synthetic oligonucleotide
  Sense strand starting at position 605 of SEQ ID NO: 1243579
augccuagucaggguuauu

SEQ ID NO: 1426103 - RNA, 19 nt, Artificial Sequence
  Description of Artificial Sequence: Synthetic oligonucleotide
  Antisense strand to SEQ ID NO: 1426102
aauaacccugacuaggcau

SEQ ID NO: 1426104 - RNA, 19 nt, Artificial Sequence
  Description of Artificial Sequence: Synthetic oligonucleotide
  Sense strand starting at position 970 of SEQ ID NO: 1243579
accucuuucgagcaagaaa

SEQ ID NO: 1426105 - RNA, 19 nt, Artificial Sequence
  Description of Artificial Sequence: Synthetic oligonucleotide
  Antisense strand to SEQ ID NO: 1426104
uuucuugcucgaaagaggu

SEQ ID NO: 1426106 - RNA, 19 nt, Artificial Sequence
  Description of Artificial Sequence: Synthetic oligonucleotide
  Sense strand starting at position 973 of SEQ ID NO: 1243579
ucuuucgagcaagaaacau

SEQ ID NO: 1426107 - RNA, 19 nt, Artificial Sequence
  Description of Artificial Sequence: Synthetic oligonucleotide
  Antisense strand to SEQ ID NO: 1426106
auguuucuugcucgaaaga

SEQ ID NO: 1426108 - RNA, 19 nt, Artificial Sequence
  Description of Artificial Sequence: Synthetic oligonucleotide
  Sense strand starting at position 1075 of SEQ ID NO: 1243579
uggcauuaaagucggacau

SEQ ID NO: 1426109 - RNA, 19 nt, Artificial Sequence
  Description of Artificial Sequence: Synthetic oligonucleotide
  Antisense strand to SEQ ID NO: 1426108
auguccgacuuuaaugcca

SEQ ID NO: 1426110 - RNA, 19 nt, Artificial Sequence
  Description of Artificial Sequence: Synthetic oligonucleotide
  Sense strand starting at position 1087 of SEQ ID NO: 1243579
cggacauccagauagcagu

SEQ ID NO: 1426111 - RNA, 19 nt, Artificial Sequence
  Description of Artificial Sequence: Synthetic oligonucleotide
  Antisense strand to SEQ ID NO: 1426110
acugcuaucuggauguccg

SEQ ID NO: 1426112 - RNA, 19 nt, Artificial Sequence
  Description of Artificial Sequence: Synthetic oligonucleotide
  Sense strand starting at position 1118 of SEQ ID NO: 1243579
acagauauccacugucaca

SEQ ID NO: 1426113 - RNA, 19 nt, Artificial Sequence
  Description of Artificial Sequence: Synthetic oligonucleotide
  Antisense strand to SEQ ID NO: 1426112
ugugacaguggauaucugu

SEQ ID NO: 1426114 - RNA, 19 nt, Artificial Sequence
  Description of Artificial Sequence: Synthetic oligonucleotide
  Sense strand starting at position 1175 of SEQ ID NO: 1243579
gaauguuuguaauugacca

SEQ ID NO: 1426115 - RNA, 19 nt, Artificial Sequence
  Description of Artificial Sequence: Synthetic oligonucleotide
  Antisense strand to SEQ ID NO: 1426114
uggucaauuacaaacauuc

SEQ ID NO: 1426116 - RNA, 19 nt, Artificial Sequence
  Description of Artificial Sequence: Synthetic oligonucleotide
  Sense strand starting at position 1179 of SEQ ID NO: 1243579
guuuguaauugaccaauua

SEQ ID NO: 1426117 - RNA, 19 nt, Artificial Sequence
  Description of Artificial Sequence: Synthetic oligonucleotide
  Antisense strand to SEQ ID NO: 1426116
uaauuggucaauuacaaac

SEQ ID NO: 1426118 - RNA, 19 nt, Artificial Sequence
  Description of Artificial Sequence: Synthetic oligonucleotide
  Sense strand starting at position 1202 of SEQ ID NO: 1243579
agcacacuuucuguggaaa

SEQ ID NO: 1426119 - RNA, 19 nt, Artificial Sequence
  Description of Artificial Sequence: Synthetic oligonucleotide
  Antisense strand to SEQ ID NO: 1426118
uuuccacagaaagugugcu

SEQ ID NO: 1426120 - RNA, 19 nt, Artificial Sequence
  Description of Artificial Sequence: Synthetic oligonucleotide
  Sense strand starting at position 1203 of SEQ ID NO: 1243579
gcacacuuucuguggaaau

SEQ ID NO: 1426121 - RNA, 19 nt, Artificial Sequence
  Description of Artificial Sequence: Synthetic oligonucleotide
  Antisense strand to SEQ ID NO: 1426120
auuuccacagaaagugugc

SEQ ID NO: 1426122 - RNA, 19 nt, Artificial Sequence
  Description of Artificial Sequence: Synthetic oligonucleotide
  Sense strand starting at position 1205 of SEQ ID NO: 1243579
acacuuucuguggaaaugu

SEQ ID NO: 1426123 - RNA, 19 nt, Artificial Sequence
  Description of Artificial Sequence: Synthetic oligonucleotide
  Antisense strand to SEQ ID NO: 1426122
acauuuccacagaaagugu

SEQ ID NO: 1426124 - RNA, 19 nt, Artificial Sequence
  Description of Artificial Sequence: Synthetic oligonucleotide
  Sense strand starting at position 1248 of SEQ ID NO: 1243579
aagagagauugucccuauu

SEQ ID NO: 1426125 - RNA, 19 nt, Artificial Sequence
  Description of Artificial Sequence: Synthetic oligonucleotide
  Antisense strand to SEQ ID NO: 1426124
aauagggacaaucucucuu

SEQ ID NO: 1426126 - RNA, 19 nt, Artificial Sequence
  Description of Artificial Sequence: Synthetic oligonucleotide
  Sense strand starting at position 1288 of SEQ ID NO: 1243579
uaagcugagcccugggauu

SEQ ID NO: 1426127 - RNA, 19 nt, Artificial Sequence
  Description of Artificial Sequence: Synthetic oligonucleotide
  Antisense strand to SEQ ID NO: 1426126
aaucccagggcucagcuua

SEQ ID NO: 1426128 - RNA, 19 nt, Artificial Sequence
  Description of Artificial Sequence: Synthetic oligonucleotide
  Sense strand starting at position 1393 of SEQ ID NO: 1243579
ccuuuaacgcuuuaagggu

SEQ ID NO: 1426129 - RNA, 19 nt, Artificial Sequence
  Description of Artificial Sequence: Synthetic oligonucleotide
  Antisense strand to SEQ ID NO: 1426128
acccuuaaagcguuaaagg

SEQ ID NO: 1426130 - RNA, 19 nt, Artificial Sequence
  Description of Artificial Sequence: Synthetic oligonucleotide
  Sense strand starting at position 1419 of SEQ ID NO: 1243579
cuuaauuuguaagaggaaa

SEQ ID NO: 1426131 - RNA, 19 nt, Artificial Sequence
  Description of Artificial Sequence: Synthetic oligonucleotide
  Antisense strand to SEQ ID NO: 1426130
uuuccucuuacaaauuaag

SEQ ID NO: 1426132 - RNA, 19 nt, Artificial Sequence
  Description of Artificial Sequence: Synthetic oligonucleotide
  Sense strand starting at position 1517 of SEQ ID NO: 1243579
ucacguucucaccgcacaa

SEQ ID NO: 1426133 - RNA, 19 nt, Artificial Sequence
  Description of Artificial Sequence: Synthetic oligonucleotide
  Antisense strand to SEQ ID NO: 1426132
uugugcggugagaacguga

SEQ ID NO: 1426134 - RNA, 19 nt, Artificial Sequence
  Description of Artificial Sequence: Synthetic oligonucleotide
  Sense strand starting at position 2038 of SEQ ID NO: 1243579
acgccacugauuggguaaa

SEQ ID NO: 1426135 - RNA, 19 nt, Artificial Sequence
  Description of Artificial Sequence: Synthetic oligonucleotide
  Antisense strand to SEQ ID NO: 1426134
uuuacccaaucaguggcgu

SEQ ID NO: 1426136 - RNA, 19 nt, Artificial Sequence
  Description of Artificial Sequence: Synthetic oligonucleotide
  Sense strand starting at position 2157 of SEQ ID NO: 1243579
ugagcuuggacuugaaaug

SEQ ID NO: 1426137 - RNA, 19 nt, Artificial Sequence
  Description of Artificial Sequence: Synthetic oligonucleotide
  Antisense strand to SEQ ID NO: 1426136
cauuucaaguccaagcuca

SEQ ID NO: 1426138 - RNA, 19 nt, Artificial Sequence
  Description of Artificial Sequence: Synthetic oligonucleotide
  Sense strand starting at position 2211 of SEQ ID NO: 1243579
ggcaucuuauuagcuaauu

SEQ ID NO: 1426139 - RNA, 19 nt, Artificial Sequence
  Description of Artificial Sequence: Synthetic oligonucleotide
  Antisense strand to SEQ ID NO: 1426138
aauuagcuaauaagaugcc

SEQ ID NO: 1426140 - RNA, 19 nt, Artificial Sequence
  Description of Artificial Sequence: Synthetic oligonucleotide
  Sense strand starting at position 2338 of SEQ ID NO: 1243579
cccacugcucaggacauaa

SEQ ID NO: 1426141 - RNA, 19 nt, Artificial Sequence
  Description of Artificial Sequence: Synthetic oligonucleotide
  Antisense strand to SEQ ID NO: 1426140
uuauguccugagcaguggg

SEQ ID NO: 1426142 - RNA, 19 nt, Artificial Sequence
  Description of Artificial Sequence: Synthetic oligonucleotide
  Sense strand starting at position 2669 of SEQ ID NO: 1243579
ugcaaugggccuuaaacuu

SEQ ID NO: 1426143 - RNA, 19 nt, Artificial Sequence
  Description of Artificial Sequence: Synthetic oligonucleotide
  Antisense strand to SEQ ID NO: 1426142
aaguuuaaggcccauugca

SEQ ID NO: 1426144 - RNA, 19 nt, Artificial Sequence
  Description of Artificial Sequence: Synthetic oligonucleotide
  Sense strand starting at position 2781 of SEQ ID NO: 1243579
gucauuagcucuccacaag

SEQ ID NO: 1426145 - RNA, 19 nt, Artificial Sequence
  Description of Artificial Sequence: Synthetic oligonucleotide
  Antisense strand to SEQ ID NO: 1426144
cuuguggagagcuaaugac

SEQ ID NO: 1426146 - RNA, 19 nt, Artificial Sequence
  Description of Artificial Sequence: Synthetic oligonucleotide
  Sense strand starting at position 2799 of SEQ ID NO: 1243579
gcaucuaguuagcucuaaa

SEQ ID NO: 1426147 - RNA, 19 nt, Artificial Sequence
  Description of Artificial Sequence: Synthetic oligonucleotide
  Antisense strand to SEQ ID NO: 1426146
uuuagagcuaacuagaugc

SEQ ID NO: 1426148 - RNA, 19 nt, Artificial Sequence
  Description of Artificial Sequence: Synthetic oligonucleotide
  Sense strand starting at position 3030 of SEQ ID NO: 1243579
ucuccaaugacgggauguu

SEQ ID NO: 1426149 - RNA, 19 nt, Artificial Sequence
  Description of Artificial Sequence: Synthetic oligonucleotide
  Antisense strand to SEQ ID NO: 1426148
aacaucccgucauuggaga

SEQ ID NO: 1426150 - RNA, 19 nt, Artificial Sequence
  Description of Artificial Sequence: Synthetic oligonucleotide
  Sense strand starting at position 3192 of SEQ ID NO: 1243579
cuaguaaccuguuugacaa

SEQ ID NO: 1426151 - RNA, 19 nt, Artificial Sequence
  Description of Artificial Sequence: Synthetic oligonucleotide
  Antisense strand to SEQ ID NO: 1426150
uugucaaacagguuacuag

SEQ ID NO: 1426152 - RNA, 19 nt, Artificial Sequence
  Description of Artificial Sequence: Synthetic oligonucleotide
  Sense strand starting at position 3366 of SEQ ID NO: 1243579
aggugucuguuacccauaa

SEQ ID NO: 1426153 - RNA, 19 nt, Artificial Sequence
  Description of Artificial Sequence: Synthetic oligonucleotide
  Antisense strand to SEQ ID NO: 1426152
uuauggguaacagacaccu

SEQ ID NO: 1426154 - RNA, 19 nt, Artificial Sequence
  Description of Artificial Sequence: Synthetic oligonucleotide
  Sense strand starting at position 3367 of SEQ ID NO: 1243579
ggugucuguuacccauaaa

SEQ ID NO: 1426155 - RNA, 19 nt, Artificial Sequence
  Description of Artificial Sequence: Synthetic oligonucleotide
  Antisense strand to SEQ ID NO: 1426154
uuuauggguaacagacacc

SEQ ID NO: 1426156 - RNA, 19 nt, Artificial Sequence
  Description of Artificial Sequence: Synthetic oligonucleotide
  Sense strand starting at position 3370 of SEQ ID NO: 1243579
gucuguuacccauaaacaa

SEQ ID NO: 1426157 - RNA, 19 nt, Artificial Sequence
  Description of Artificial Sequence: Synthetic oligonucleotide
  Antisense strand to SEQ ID NO: 1426156
uuguuuauggguaacagac

SEQ ID NO: 1426158 - RNA, 19 nt, Artificial Sequence
  Description of Artificial Sequence: Synthetic oligonucleotide
  Sense strand starting at position 3542 of SEQ ID NO: 1243579
cagagcuagucucugcaga

SEQ ID NO: 1426159 - RNA, 19 nt, Artificial Sequence
  Description of Artificial Sequence: Synthetic oligonucleotide
  Antisense strand to SEQ ID NO: 1426158
ucugcagagacuagcucug

SEQ ID NO: 1426160 - RNA, 19 nt, Artificial Sequence
  Description of Artificial Sequence: Synthetic oligonucleotide
  Sense strand starting at position 3543 of SEQ ID NO: 1243579
agagcuagucucugcagaa

SEQ ID NO: 1426161 - RNA, 19 nt, Artificial Sequence
  Description of Artificial Sequence: Synthetic oligonucleotide
  Antisense strand to SEQ ID NO: 1426160
uucugcagagacuagcucu

SEQ ID NO: 1426162 - RNA, 19 nt, Artificial Sequence
  Description of Artificial Sequence: Synthetic oligonucleotide
  Sense strand starting at position 3544 of SEQ ID NO: 1243579
gagcuagucucugcagaag

SEQ ID NO: 1426163 - RNA, 19 nt, Artificial Sequence
  Description of Artificial Sequence: Synthetic oligonucleotide
  Antisense strand to SEQ ID NO: 1426162
cuucugcagagacuagcuc

SEQ ID NO: 1426164 - RNA, 19 nt, Artificial Sequence
  Description of Artificial Sequence: Synthetic oligonucleotide
  Sense strand starting at position 3721 of SEQ ID NO: 1243579
auauauuccgacuguagac

SEQ ID NO: 1426165 - RNA, 19 nt, Artificial Sequence
  Description of Artificial Sequence: Synthetic oligonucleotide
  Antisense strand to SEQ ID NO: 1426164
gucuacagucggaauauau

SEQ ID NO: 1426166 - RNA, 19 nt, Artificial Sequence
  Description of Artificial Sequence: Synthetic oligonucleotide
  Sense strand starting at position 3780 of SEQ ID NO: 1243579
ccagucagagccuguggua

SEQ ID NO: 1426167 - RNA, 19 nt, Artificial Sequence
  Description of Artificial Sequence: Synthetic oligonucleotide
  Antisense strand to SEQ ID NO: 1426166
uaccacaggcucugacugg

SEQ ID NO: 1426168 - RNA, 19 nt, Artificial Sequence
  Description of Artificial Sequence: Synthetic oligonucleotide
  Sense strand starting at position 3904 of SEQ ID NO: 1243579
ggccaaucaugauuaauaa

SEQ ID NO: 1426169 - RNA, 19 nt, Artificial Sequence
  Description of Artificial Sequence: Synthetic oligonucleotide
  Antisense strand to SEQ ID NO: 1426168
uuauuaaucaugauuggcc

SEQ ID NO: 1426170 - RNA, 19 nt, Artificial Sequence
  Description of Artificial Sequence: Synthetic oligonucleotide
  Sense strand starting at position 14 of SEQ ID NO: 1243580
cuguaaaugugcuccacca

SEQ ID NO: 1426171 - RNA, 19 nt, Artificial Sequence
  Description of Artificial Sequence: Synthetic oligonucleotide
  Antisense strand to SEQ ID NO: 1426170
ugguggagcacauuuacag

SEQ ID NO: 1426172 - RNA, 19 nt, Artificial Sequence
  Description of Artificial Sequence: Synthetic oligonucleotide
  Sense strand starting at position 16 of SEQ ID NO: 1243580
guaaaugugcuccaccagu

SEQ ID NO: 1426173 - RNA, 19 nt, Artificial Sequence
  Description of Artificial Sequence: Synthetic oligonucleotide
  Antisense strand to SEQ ID NO: 1426172
acugguggagcacauuuac

SEQ ID NO: 1426174 - RNA, 19 nt, Artificial Sequence
  Description of Artificial Sequence: Synthetic oligonucleotide
  Sense strand starting at position 268 of SEQ ID NO: 1243580
ucuggaaucugcugaaaga

SEQ ID NO: 1426175 - RNA, 19 nt, Artificial Sequence
  Description of Artificial Sequence: Synthetic oligonucleotide
  Antisense strand to SEQ ID NO: 1426174
ucuuucagcagauuccaga

SEQ ID NO: 1426176 - RNA, 19 nt, Artificial Sequence
  Description of Artificial Sequence: Synthetic oligonucleotide
  Sense strand starting at position 308 of SEQ ID NO: 1243580
uuggcucauccuggucauu

SEQ ID NO: 1426177 - RNA, 19 nt, Artificial Sequence
  Description of Artificial Sequence: Synthetic oligonucleotide
  Antisense strand to SEQ ID NO: 1426176
aaugaccaggaugagccaa

SEQ ID NO: 1426178 - RNA, 19 nt, Artificial Sequence
  Description of Artificial Sequence: Synthetic oligonucleotide
  Sense strand starting at position 310 of SEQ ID NO: 1243580
ggcucauccuggucauuga

SEQ ID NO: 1426179 - RNA, 19 nt, Artificial Sequence
  Description of Artificial Sequence: Synthetic oligonucleotide
  Antisense strand to SEQ ID NO: 1426178
ucaaugaccaggaugagcc

SEQ ID NO: 1426180 - RNA, 19 nt, Artificial Sequence
  Description of Artificial Sequence: Synthetic oligonucleotide
  Sense strand starting at position 311 of SEQ ID NO: 1243580
gcucauccuggucauugaa

SEQ ID NO: 1426181 - RNA, 19 nt, Artificial Sequence
  Description of Artificial Sequence: Synthetic oligonucleotide
  Antisense strand to SEQ ID NO: 1426180
uucaaugaccaggaugagc

SEQ ID NO: 1426182 - RNA, 19 nt, Artificial Sequence
  Description of Artificial Sequence: Synthetic oligonucleotide
  Sense strand starting at position 369 of SEQ ID NO: 1243580
cccgacugcuccuaggaga

SEQ ID NO: 1426183 - RNA, 19 nt, Artificial Sequence
  Description of Artificial Sequence: Synthetic oligonucleotide
  Antisense strand to SEQ ID NO: 1426182
ucuccuaggagcagucggg

SEQ ID NO: 1426184 - RNA, 19 nt, Artificial Sequence
  Description of Artificial Sequence: Synthetic oligonucleotide
  Sense strand starting at position 512 of SEQ ID NO: 1243580
cugggccugaucuggaaua

SEQ ID NO: 1426185 - RNA, 19 nt, Artificial Sequence
  Description of Artificial Sequence: Synthetic oligonucleotide
  Antisense strand to SEQ ID NO: 1426184
uauuccagaucaggcccag

SEQ ID NO: 1426186 - RNA, 19 nt, Artificial Sequence
  Description of Artificial Sequence: Synthetic oligonucleotide
  Sense strand starting at position 513 of SEQ ID NO: 1243580
ugggccugaucuggaauaa

SEQ ID NO: 1426187 - RNA, 19 nt, Artificial Sequence
  Description of Artificial Sequence: Synthetic oligonucleotide
  Antisense strand to SEQ ID NO: 1426186
uuauuccagaucaggccca

SEQ ID NO: 1426188 - RNA, 19 nt, Artificial Sequence
  Description of Artificial Sequence: Synthetic oligonucleotide
  Sense strand starting at position 716 of SEQ ID NO: 1243580
gggucaugauguggaggua

SEQ ID NO: 1426189 - RNA, 19 nt, Artificial Sequence
  Description of Artificial Sequence: Synthetic oligonucleotide
  Antisense strand to SEQ ID NO: 1426188
uaccuccacaucaugaccc

SEQ ID NO: 1426190 - RNA, 19 nt, Artificial Sequence
  Description of Artificial Sequence: Synthetic oligonucleotide
  Sense strand starting at position 803 of SEQ ID NO: 1243580
gauagaggaucgcuagagu

SEQ ID NO: 1426191 - RNA, 19 nt, Artificial Sequence
  Description of Artificial Sequence: Synthetic oligonucleotide
  Antisense strand to SEQ ID NO: 1426190
acucuagcgauccucuauc

SEQ ID NO: 1426192 - RNA, 19 nt, Artificial Sequence
  Description of Artificial Sequence: Synthetic oligonucleotide
  Sense strand starting at position 911 of SEQ ID NO: 1243580
uggcgagugccuuuacagu

SEQ ID NO: 1426193 - RNA, 19 nt, Artificial Sequence
  Description of Artificial Sequence: Synthetic oligonucleotide
  Antisense strand to SEQ ID NO: 1426192
acuguaaaggcacucgcca

SEQ ID NO: 1426194 - RNA, 19 nt, Artificial Sequence
  Description of Artificial Sequence: Synthetic oligonucleotide
  Sense strand starting at position 1942 of SEQ ID NO: 1243580
cugcgaguccauggucaga

SEQ ID NO: 1426195 - RNA, 19 nt, Artificial Sequence
  Description of Artificial Sequence: Synthetic oligonucleotide
  Antisense strand to SEQ ID NO: 1426194
ucugaccauggacucgcag

SEQ ID NO: 1426196 - RNA, 19 nt, Artificial Sequence
  Description of Artificial Sequence: Synthetic oligonucleotide
  Sense strand starting at position 2187 of SEQ ID NO: 1243580
ccggguuugcgggaacaaa

SEQ ID NO: 1426197 - RNA, 19 nt, Artificial Sequence
  Description of Artificial Sequence: Synthetic oligonucleotide
  Antisense strand to SEQ ID NO: 1426196
uuuguucccgcaaacccgg

SEQ ID NO: 1426198 - RNA, 19 nt, Artificial Sequence
  Description of Artificial Sequence: Synthetic oligonucleotide
  Sense strand starting at position 2332 of SEQ ID NO: 1243580
ucccaauguugagagcaaa

SEQ ID NO: 1426199 - RNA, 19 nt, Artificial Sequence
  Description of Artificial Sequence: Synthetic oligonucleotide
  Antisense strand to SEQ ID NO: 1426198
uuugcucucaacauuggga

SEQ ID NO: 1426200 - RNA, 19 nt, Artificial Sequence
  Description of Artificial Sequence: Synthetic oligonucleotide
  Sense strand starting at position 2371 of SEQ ID NO: 1243580
cgagacagaucucaauuac

SEQ ID NO: 1426201 - RNA, 19 nt, Artificial Sequence
  Description of Artificial Sequence: Synthetic oligonucleotide
  Antisense strand to SEQ ID NO: 1426200
guaauugagaucugucucg

SEQ ID NO: 1426202 - RNA, 19 nt, Artificial Sequence
  Description of Artificial Sequence: Synthetic oligonucleotide
  Sense strand starting at position 2382 of SEQ ID NO: 1243580
ucaauuacuugccaagguu

SEQ ID NO: 1426203 - RNA, 19 nt, Artificial Sequence
  Description of Artificial Sequence: Synthetic oligonucleotide
  Antisense strand to SEQ ID NO: 1426202
aaccuuggcaaguaauuga

SEQ ID NO: 1426204 - RNA, 19 nt, Artificial Sequence
  Description of Artificial Sequence: Synthetic oligonucleotide
  Sense strand starting at position 2422 of SEQ ID NO: 1243580
ucaggaaguccucacgaca

SEQ ID NO: 1426205 - RNA, 19 nt, Artificial Sequence
  Description of Artificial Sequence: Synthetic oligonucleotide
  Antisense strand to SEQ ID NO: 1426204
ugucgugaggacuuccuga

SEQ ID NO: 1426206 - RNA, 19 nt, Artificial Sequence
  Description of Artificial Sequence: Synthetic oligonucleotide
  Sense strand starting at position 2425 of SEQ ID NO: 1243580
ggaaguccucacgacaugu

SEQ ID NO: 1426207 - RNA, 19 nt, Artificial Sequence
  Description of Artificial Sequence: Synthetic oligonucleotide
  Antisense strand to SEQ ID NO: 1426206
acaugucgugaggacuucc

SEQ ID NO: 1426208 - RNA, 19 nt, Artificial Sequence
  Description of Artificial Sequence: Synthetic oligonucleotide
  Sense strand starting at position 2633 of SEQ ID NO: 1243580
uugagauucugauuagcgu

SEQ ID NO: 1426209 - RNA, 19 nt, Artificial Sequence
  Description of Artificial Sequence: Synthetic oligonucleotide
  Antisense strand to SEQ ID NO: 1426208
acgcuaaucagaaucucaa

SEQ ID NO: 1426210 - RNA, 19 nt, Artificial Sequence
  Description of Artificial Sequence: Synthetic oligonucleotide
  Sense strand starting at position 2634 of SEQ ID NO: 1243580
ugagauucugauuagcguu

SEQ ID NO: 1426211 - RNA, 19 nt, Artificial Sequence
  Description of Artificial Sequence: Synthetic oligonucleotide
  Antisense strand to SEQ ID NO: 1426210
aacgcuaaucagaaucuca

SEQ ID NO: 1426212 - RNA, 19 nt, Artificial Sequence
  Description of Artificial Sequence: Synthetic oligonucleotide
  Sense strand starting at position 2721 of SEQ ID NO: 1243580
gcagguuggcccuaagcaa

SEQ ID NO: 1426213 - RNA, 19 nt, Artificial Sequence
  Description of Artificial Sequence: Synthetic oligonucleotide
  Antisense strand to SEQ ID NO: 1426212
uugcuuagggccaaccugc

SEQ ID NO: 1426214 - RNA, 19 nt, Artificial Sequence
  Description of Artificial Sequence: Synthetic oligonucleotide
  Sense strand starting at position 2755 of SEQ ID NO: 1243580
uuuccuuuagcguagugau

SEQ ID NO: 1426215 - RNA, 19 nt, Artificial Sequence
  Description of Artificial Sequence: Synthetic oligonucleotide
  Antisense strand to SEQ ID NO: 1426214
aucacuacgcuaaaggaaa

SEQ ID NO: 1426216 - RNA, 19 nt, Artificial Sequence
  Description of Artificial Sequence: Synthetic oligonucleotide
  Sense strand starting at position 2827 of SEQ ID NO: 1243580
aggagaaccuccucuauug

SEQ ID NO: 1426217 - RNA, 19 nt, Artificial Sequence
  Description of Artificial Sequence: Synthetic oligonucleotide
  Antisense strand to SEQ ID NO: 1426216
caauagaggagguucuccu

SEQ ID NO: 1426218 - RNA, 19 nt, Artificial Sequence
  Description of Artificial Sequence: Synthetic oligonucleotide
  Sense strand starting at position 2861 of SEQ ID NO: 1243580
uugaaauucugggagcuuc

SEQ ID NO: 1426219 - RNA, 19 nt, Artificial Sequence
  Description of Artificial Sequence: Synthetic oligonucleotide
  Antisense strand to SEQ ID NO: 1426218
gaagcucccagaauuucaa

SEQ ID NO: 1426220 - RNA, 19 nt, Artificial Sequence
  Description of Artificial Sequence: Synthetic oligonucleotide
  Sense strand starting at position 3108 of SEQ ID NO: 1243580
gggucuuuaucucaguaaa

SEQ ID NO: 1426221 - RNA, 19 nt, Artificial Sequence
  Description of Artificial Sequence: Synthetic oligonucleotide
  Antisense strand to SEQ ID NO: 1426220
uuuacugagauaaagaccc

SEQ ID NO: 1426222 - RNA, 19 nt, Artificial Sequence
  Description of Artificial Sequence: Synthetic oligonucleotide
  Sense strand starting at position 3217 of SEQ ID NO: 1243580
gagucagagucaccuccaa

SEQ ID NO: 1426223 - RNA, 19 nt, Artificial Sequence
  Description of Artificial Sequence: Synthetic oligonucleotide
  Antisense strand to SEQ ID NO: 1426222
uuggaggugacucugacuc

SEQ ID NO: 1426224 - RNA, 19 nt, Artificial Sequence
  Description of Artificial Sequence: Synthetic oligonucleotide
  Sense strand starting at position 3250 of SEQ ID NO: 1243580
cuuaguggguucuuuaguu

SEQ ID NO: 1426225 - RNA, 19 nt, Artificial Sequence
  Description of Artificial Sequence: Synthetic oligonucleotide
  Antisense strand to SEQ ID NO: 1426224
aacuaaagaacccacuaag

SEQ ID NO: 1426226 - RNA, 19 nt, Artificial Sequence
  Description of Artificial Sequence: Synthetic oligonucleotide
  Sense strand starting at position 3255 of SEQ ID NO: 1243580
uggguucuuuaguugaauc

SEQ ID NO: 1426227 - RNA, 19 nt, Artificial Sequence
  Description of Artificial Sequence: Synthetic oligonucleotide
  Antisense strand to SEQ ID NO: 1426226
gauucaacuaaagaaccca

SEQ ID NO: 1426228 - RNA, 19 nt, Artificial Sequence
  Description of Artificial Sequence: Synthetic oligonucleotide
  Sense strand starting at position 3256 of SEQ ID NO: 1243580
ggguucuuuaguugaaucu

SEQ ID NO: 1426229 - RNA, 19 nt, Artificial Sequence
  Description of Artificial Sequence: Synthetic oligonucleotide
  Antisense strand to SEQ ID NO: 1426228
agauucaacuaaagaaccc

SEQ ID NO: 1426230 - RNA, 19 nt, Artificial Sequence
  Description of Artificial Sequence: Synthetic oligonucleotide
  Sense strand starting at position 3257 of SEQ ID NO: 1243580
gguucuuuaguugaaucua

SEQ ID NO: 1426231 - RNA, 19 nt, Artificial Sequence
  Description of Artificial Sequence: Synthetic oligonucleotide
  Antisense strand to SEQ ID NO: 1426230
uagauucaacuaaagaacc

SEQ ID NO: 1426232 - RNA, 19 nt, Artificial Sequence
  Description of Artificial Sequence: Synthetic oligonucleotide
  Sense strand starting at position 3265 of SEQ ID NO: 1243580
aguugaaucuaggcccaga

SEQ ID NO: 1426233 - RNA, 19 nt, Artificial Sequence
  Description of Artificial Sequence: Synthetic oligonucleotide
  Antisense strand to SEQ ID NO: 1426232
ucugggccuagauucaacu

SEQ ID NO: 1426234 - RNA, 19 nt, Artificial Sequence
  Description of Artificial Sequence: Synthetic oligonucleotide
  Sense strand starting at position 3284 of SEQ ID NO: 1243580
uugagaaucgccuguaauc

SEQ ID NO: 1426235 - RNA, 19 nt, Artificial Sequence
  Description of Artificial Sequence: Synthetic oligonucleotide
  Antisense strand to SEQ ID NO: 1426234
gauuacaggcgauucucaa

SEQ ID NO: 1426236 - RNA, 19 nt, Artificial Sequence
  Description of Artificial Sequence: Synthetic oligonucleotide
  Sense strand starting at position 3286 of SEQ ID NO: 1243580
gagaaucgccuguaauccu

SEQ ID NO: 1426237 - RNA, 19 nt, Artificial Sequence
  Description of Artificial Sequence: Synthetic oligonucleotide
  Antisense strand to SEQ ID NO: 1426236
aggauuacaggcgauucuc

SEQ ID NO: 1426238 - RNA, 19 nt, Artificial Sequence
  Description of Artificial Sequence: Synthetic oligonucleotide
  Sense strand starting at position 3350 of SEQ ID NO: 1243580
augagaucagccugcucaa

SEQ ID NO: 1426239 - RNA, 19 nt, Artificial Sequence
  Description of Artificial Sequence: Synthetic oligonucleotide
  Antisense strand to SEQ ID NO: 1426238
uugagcaggcugaucucau

SEQ ID NO: 1426240 - RNA, 19 nt, Artificial Sequence
  Description of Artificial Sequence: Synthetic oligonucleotide
  Sense strand starting at position 3353 of SEQ ID NO: 1243580
agaucagccugcucaacuu

SEQ ID NO: 1426241 - RNA, 19 nt, Artificial Sequence
  Description of Artificial Sequence: Synthetic oligonucleotide
  Antisense strand to SEQ ID NO: 1426240
aaguugagcaggcugaucu

SEQ ID NO: 1426242 - RNA, 19 nt, Artificial Sequence
  Description of Artificial Sequence: Synthetic oligonucleotide
  Sense strand starting at position 3359 of SEQ ID NO: 1243580
gccugcucaacuuaggaga

SEQ ID NO: 1426243 - RNA, 19 nt, Artificial Sequence
  Description of Artificial Sequence: Synthetic oligonucleotide
  Antisense strand to SEQ ID NO: 1426242
ucuccuaaguugagcaggc

SEQ ID NO: 1426244 - RNA, 19 nt, Artificial Sequence
  Description of Artificial Sequence: Synthetic oligonucleotide
  Sense strand starting at position 3581 of SEQ ID NO: 1243580
ucuuucuuccuauguguau

SEQ ID NO: 1426245 - RNA, 19 nt, Artificial Sequence
  Description of Artificial Sequence: Synthetic oligonucleotide
  Antisense strand to SEQ ID NO: 1426244
auacacauaggaagaaaga

SEQ ID NO: 1426246 - RNA, 19 nt, Artificial Sequence
  Description of Artificial Sequence: Synthetic oligonucleotide
  Sense strand starting at position 3682 of SEQ ID NO: 1243580
uaaggagccuugugcaaau

SEQ ID NO: 1426247 - RNA, 19 nt, Artificial Sequence
  Description of Artificial Sequence: Synthetic oligonucleotide
  Antisense strand to SEQ ID NO: 1426246
auuugcacaaggcuccuua

SEQ ID NO: 1426248 - RNA, 19 nt, Artificial Sequence
  Description of Artificial Sequence: Synthetic oligonucleotide
  Sense strand starting at position 3724 of SEQ ID NO: 1243580
auuaaacccuaggauagau

SEQ ID NO: 1426249 - RNA, 19 nt, Artificial Sequence
  Description of Artificial Sequence: Synthetic oligonucleotide
  Antisense strand to SEQ ID NO: 1426248
aucuauccuaggguuuaau

SEQ ID NO: 1426250 - RNA, 19 nt, Artificial Sequence
  Description of Artificial Sequence: Synthetic oligonucleotide
  Sense strand starting at position 4 of SEQ ID NO: 1243581
ccaguacauucugugaaua

SEQ ID NO: 1426251 - RNA, 19 nt, Artificial Sequence
  Description of Artificial Sequence: Synthetic oligonucleotide
  Antisense strand to SEQ ID NO: 1426250
uauucacagaauguacugg

SEQ ID NO: 1426252 - RNA, 19 nt, Artificial Sequence
  Description of Artificial Sequence: Synthetic oligonucleotide
  Sense strand starting at position 68 of SEQ ID NO: 1243581
auguauacauagcuaugau

SEQ ID NO: 1426253 - RNA, 19 nt, Artificial Sequence
  Description of Artificial Sequence: Synthetic oligonucleotide
  Antisense strand to SEQ ID NO: 1426252
aucauagcuauguauacau

SEQ ID NO: 1426254 - RNA, 19 nt, Artificial Sequence
  Description of Artificial Sequence: Synthetic oligonucleotide
  Sense strand starting at position 258 of SEQ ID NO: 1243581
ggugaaaccuucuuuauug

SEQ ID NO: 1426255 - RNA, 19 nt, Artificial Sequence
  Description of Artificial Sequence: Synthetic oligonucleotide
  Antisense strand to SEQ ID NO: 1426254
caauaaagaagguuucacc

SEQ ID NO: 1426256 - RNA, 19 nt, Artificial Sequence
  Description of Artificial Sequence: Synthetic oligonucleotide
  Sense strand starting at position 615 of SEQ ID NO: 1243581
gcaacaagaugcucaucau

SEQ ID NO: 1426257 - RNA, 19 nt, Artificial Sequence
  Description of Artificial Sequence: Synthetic oligonucleotide
  Antisense strand to SEQ ID NO: 1426256
augaugagcaucuuguugc

SEQ ID NO: 1426258 - RNA, 19 nt, Artificial Sequence
  Description of Artificial Sequence: Synthetic oligonucleotide
  Sense strand starting at position 653 of SEQ ID NO: 1243581
gggugccaugcagaugauu

SEQ ID NO: 1426259 - RNA, 19 nt, Artificial Sequence
  Description of Artificial Sequence: Synthetic oligonucleotide
  Antisense strand to SEQ ID NO: 1426258
aaucaucugcauggcaccc

SEQ ID NO: 1426260 - RNA, 19 nt, Artificial Sequence
  Description of Artificial Sequence: Synthetic oligonucleotide
  Sense strand starting at position 655 of SEQ ID NO: 1243581
gugccaugcagaugauuua

SEQ ID NO: 1426261 - RNA, 19 nt, Artificial Sequence
  Description of Artificial Sequence: Synthetic oligonucleotide
  Antisense strand to SEQ ID NO: 1426260
uaaaucaucugcauggcac

SEQ ID NO: 1426262 - RNA, 19 nt, Artificial Sequence
  Description of Artificial Sequence: Synthetic oligonucleotide
  Sense strand starting at position 943 of SEQ ID NO: 1243581
ugggauuacaggcgucaaa

SEQ ID NO: 1426263 - RNA, 19 nt, Artificial Sequence
  Description of Artificial Sequence: Synthetic oligonucleotide
  Antisense strand to SEQ ID NO: 1426262
uuugacgccuguaauccca

SEQ ID NO: 1426264 - RNA, 19 nt, Artificial Sequence
  Description of Artificial Sequence: Synthetic oligonucleotide
  Sense strand starting at position 995 of SEQ ID NO: 1243581
gcuuacuugaucuggagaa

SEQ ID NO: 1426265 - RNA, 19 nt, Artificial Sequence
  Description of Artificial Sequence: Synthetic oligonucleotide
  Antisense strand to SEQ ID NO: 1426264
uucuccagaucaaguaagc

SEQ ID NO: 1426266 - RNA, 19 nt, Artificial Sequence
  Description of Artificial Sequence: Synthetic oligonucleotide
  Sense strand starting at position 1140 of SEQ ID NO: 1243581
ugacgaugaaagugaaacu

SEQ ID NO: 1426267 - RNA, 19 nt, Artificial Sequence
  Description of Artificial Sequence: Synthetic oligonucleotide
  Antisense strand to SEQ ID NO: 1426266
aguuucacuuucaucguca

SEQ ID NO: 1426268 - RNA, 19 nt, Artificial Sequence
  Description of Artificial Sequence: Synthetic oligonucleotide
  Sense strand starting at position 1149 of SEQ ID NO: 1243581
aagugaaacuuucugcuga

SEQ ID NO: 1426269 - RNA, 19 nt, Artificial Sequence
  Description of Artificial Sequence: Synthetic oligonucleotide
  Antisense strand to SEQ ID NO: 1426268
ucagcagaaaguuucacuu

SEQ ID NO: 1426270 - RNA, 19 nt, Artificial Sequence
  Description of Artificial Sequence: Synthetic oligonucleotide
  Sense strand starting at position 1262 of SEQ ID NO: 1243581
ccgaaauucugcccaggau

SEQ ID NO: 1426271 - RNA, 19 nt, Artificial Sequence
  Description of Artificial Sequence: Synthetic oligonucleotide
  Antisense strand to SEQ ID NO: 1426270
auccugggcagaauuucgg

SEQ ID NO: 1426272 - RNA, 19 nt, Artificial Sequence
  Description of Artificial Sequence: Synthetic oligonucleotide
  Sense strand starting at position 1263 of SEQ ID NO: 1243581
cgaaauucugcccaggaug

SEQ ID NO: 1426273 - RNA, 19 nt, Artificial Sequence
  Description of Artificial Sequence: Synthetic oligonucleotide
  Antisense strand to SEQ ID NO: 1426272
cauccugggcagaauuucg

SEQ ID NO: 1426274 - RNA, 19 nt, Artificial Sequence
  Description of Artificial Sequence: Synthetic oligonucleotide
  Sense strand starting at position 1277 of SEQ ID NO: 1243581
ggaugccaccgguauucaa

SEQ ID NO: 1426275 - RNA, 19 nt, Artificial Sequence
  Description of Artificial Sequence: Synthetic oligonucleotide
  Antisense strand to SEQ ID NO: 1426274
uugaauaccgguggcaucc

SEQ ID NO: 1426276 - RNA, 19 nt, Artificial Sequence
  Description of Artificial Sequence: Synthetic oligonucleotide
  Sense strand starting at position 1986 of SEQ ID NO: 1243581
cuacuuccucgccagagaa

SEQ ID NO: 1426277 - RNA, 19 nt, Artificial Sequence
  Description of Artificial Sequence: Synthetic oligonucleotide
  Antisense strand to SEQ ID NO: 1426276
uucucuggcgaggaaguag

SEQ ID NO: 1426278 - RNA, 19 nt, Artificial Sequence
  Description of Artificial Sequence: Synthetic oligonucleotide
  Sense strand starting at position 2528 of SEQ ID NO: 1243581
ggaaauagcucuccuguug

SEQ ID NO: 1426279 - RNA, 19 nt, Artificial Sequence
  Description of Artificial Sequence: Synthetic oligonucleotide
  Antisense strand to SEQ ID NO: 1426278
caacaggagagcuauuucc

SEQ ID NO: 1426280 - RNA, 19 nt, Artificial Sequence
  Description of Artificial Sequence: Synthetic oligonucleotide
  Sense strand starting at position 2570 of SEQ ID NO: 1243581
ccaguauucuucccuggaa

SEQ ID NO: 1426281 - RNA, 19 nt, Artificial Sequence
  Description of Artificial Sequence: Synthetic oligonucleotide
  Antisense strand to SEQ ID NO: 1426280
uuccagggaagaauacugg

SEQ ID NO: 1426282 - RNA, 19 nt, Artificial Sequence
  Description of Artificial Sequence: Synthetic oligonucleotide
  Sense strand starting at position 2628 of SEQ ID NO: 1243581
cuaacauagucaccuggua

SEQ ID NO: 1426283 - RNA, 19 nt, Artificial Sequence
  Description of Artificial Sequence: Synthetic oligonucleotide
  Antisense strand to SEQ ID NO: 1426282
uaccaggugacuauguuag

SEQ ID NO: 1426284 - RNA, 19 nt, Artificial Sequence
  Description of Artificial Sequence: Synthetic oligonucleotide
  Sense strand starting at position 2681 of SEQ ID NO: 1243581
guuauaagaaucugagugu

SEQ ID NO: 1426285 - RNA, 19 nt, Artificial Sequence
  Description of Artificial Sequence: Synthetic oligonucleotide
  Antisense strand to SEQ ID NO: 1426284
acacucagauucuuauaac

SEQ ID NO: 1426286 - RNA, 19 nt, Artificial Sequence
  Description of Artificial Sequence: Synthetic oligonucleotide
  Sense strand starting at position 2750 of SEQ ID NO: 1243581
guaccaguugagggauuau

SEQ ID NO: 1426287 - RNA, 19 nt, Artificial Sequence
  Description of Artificial Sequence: Synthetic oligonucleotide
  Antisense strand to SEQ ID NO: 1426286
auaaucccucaacugguac

SEQ ID NO: 1426288 - RNA, 19 nt, Artificial Sequence
  Description of Artificial Sequence: Synthetic oligonucleotide
  Sense strand starting at position 2770 of SEQ ID NO: 1243581
uaauaaguccaguaugagu

SEQ ID NO: 1426289 - RNA, 19 nt, Artificial Sequence
  Description of Artificial Sequence: Synthetic oligonucleotide
  Antisense strand to SEQ ID NO: 1426288
acucauacuggacuuauua

SEQ ID NO: 1426290 - RNA, 19 nt, Artificial Sequence
  Description of Artificial Sequence: Synthetic oligonucleotide
  Sense strand starting at position 2820 of SEQ ID NO: 1243581
gcuuauaccagucaaggga

SEQ ID NO: 1426291 - RNA, 19 nt, Artificial Sequence
  Description of Artificial Sequence: Synthetic oligonucleotide
  Antisense strand to SEQ ID NO: 1426290
ucccuugacugguauaagc

SEQ ID NO: 1426292 - RNA, 19 nt, Artificial Sequence
  Description of Artificial Sequence: Synthetic oligonucleotide
  Sense strand starting at position 2835 of SEQ ID NO: 1243581
gggacuauuuauuaaguca

SEQ ID NO: 1426293 - RNA, 19 nt, Artificial Sequence
  Description of Artificial Sequence: Synthetic oligonucleotide
  Antisense strand to SEQ ID NO: 1426292
ugacuuaauaaauaguccc

SEQ ID NO: 1426294 - RNA, 19 nt, Artificial Sequence
  Description of Artificial Sequence: Synthetic oligonucleotide
  Sense strand starting at position 2864 of SEQ ID NO: 1243581
gccaauauugcagaguuga

SEQ ID NO: 1426295 - RNA, 19 nt, Artificial Sequence
  Description of Artificial Sequence: Synthetic oligonucleotide
  Antisense strand to SEQ ID NO: 1426294
ucaacucugcaauauuggc

SEQ ID NO: 1426296 - RNA, 19 nt, Artificial Sequence
  Description of Artificial Sequence: Synthetic oligonucleotide
  Sense strand starting at position 2872 of SEQ ID NO: 1243581
ugcagaguugaguaagaag

SEQ ID NO: 1426297 - RNA, 19 nt, Artificial Sequence
  Description of Artificial Sequence: Synthetic oligonucleotide
  Antisense strand to SEQ ID NO: 1426296
cuucuuacucaacucugca

SEQ ID NO: 1426298 - RNA, 19 nt, Artificial Sequence
  Description of Artificial Sequence: Synthetic oligonucleotide
  Sense strand starting at position 2886 of SEQ ID NO: 1243581
agaagucuuuguccuuaag

SEQ ID NO: 1426299 - RNA, 19 nt, Artificial Sequence
  Description of Artificial Sequence: Synthetic oligonucleotide
  Antisense strand to SEQ ID NO: 1426298
cuuaaggacaaagacuucu

SEQ ID NO: 1426300 - RNA, 19 nt, Artificial Sequence
  Description of Artificial Sequence: Synthetic oligonucleotide
  Sense strand starting at position 2889 of SEQ ID NO: 1243581
agucuuuguccuuaagcaa

SEQ ID NO: 1426301 - RNA, 19 nt, Artificial Sequence
  Description of Artificial Sequence: Synthetic oligonucleotide
  Antisense strand to SEQ ID NO: 1426300
uugcuuaaggacaaagacu

SEQ ID NO: 1426302 - RNA, 19 nt, Artificial Sequence
  Description of Artificial Sequence: Synthetic oligonucleotide
  Sense strand starting at position 2910 of SEQ ID NO: 1243581
ucuugaaaggacugagcaa

SEQ ID NO: 1426303 - RNA, 19 nt, Artificial Sequence
  Description of Artificial Sequence: Synthetic oligonucleotide
  Antisense strand to SEQ ID NO: 1426302
uugcucaguccuuucaaga

SEQ ID NO: 1426304 - RNA, 19 nt, Artificial Sequence
  Description of Artificial Sequence: Synthetic oligonucleotide
  Sense strand starting at position 2931 of SEQ ID NO: 1243581
ucgugaauaucaguaacac

SEQ ID NO: 1426305 - RNA, 19 nt, Artificial Sequence
  Description of Artificial Sequence: Synthetic oligonucleotide
  Antisense strand to SEQ ID NO: 1426304
guguuacugauauucacga

SEQ ID NO: 1426306 - RNA, 19 nt, Artificial Sequence
  Description of Artificial Sequence: Synthetic oligonucleotide
  Sense strand starting at position 2932 of SEQ ID NO: 1243581
cgugaauaucaguaacaca

SEQ ID NO: 1426307 - RNA, 19 nt, Artificial Sequence
  Description of Artificial Sequence: Synthetic oligonucleotide
  Antisense strand to SEQ ID NO: 1426306
uguguuacugauauucacg

SEQ ID NO: 1426308 - RNA, 19 nt, Artificial Sequence
  Description of Artificial Sequence: Synthetic oligonucleotide
  Sense strand starting at position 2970 of SEQ ID NO: 1243581
aacugaaugcugugagaac

SEQ ID NO: 1426309 - RNA, 19 nt, Artificial Sequence
  Description of Artificial Sequence: Synthetic oligonucleotide
  Antisense strand to SEQ ID NO: 1426308
guucucacagcauucaguu

SEQ ID NO: 1426310 - RNA, 19 nt, Artificial Sequence
  Description of Artificial Sequence: Synthetic oligonucleotide
  Sense strand starting at position 3120 of SEQ ID NO: 1243581
aacauuagacugugagauc

SEQ ID NO: 1426311 - RNA, 19 nt, Artificial Sequence
  Description of Artificial Sequence: Synthetic oligonucleotide
  Antisense strand to SEQ ID NO: 1426310
gaucucacagucuaauguu

SEQ ID NO: 1426312 - RNA, 19 nt, Artificial Sequence
  Description of Artificial Sequence: Synthetic oligonucleotide
  Sense strand starting at position 3132 of SEQ ID NO: 1243581
ugagaucuuagguacguuu

SEQ ID NO: 1426313 - RNA, 19 nt, Artificial Sequence
  Description of Artificial Sequence: Synthetic oligonucleotide
  Antisense strand to SEQ ID NO: 1426312
aaacguaccuaagaucuca

SEQ ID NO: 1426314 - RNA, 19 nt, Artificial Sequence
  Description of Artificial Sequence: Synthetic oligonucleotide
  Sense strand starting at position 3223 of SEQ ID NO: 1243581
gaguccuuugaaugggaau

SEQ ID NO: 1426315 - RNA, 19 nt, Artificial Sequence
  Description of Artificial Sequence: Synthetic oligonucleotide
  Antisense strand to SEQ ID NO: 1426314
auucccauucaaaggacuc

SEQ ID NO: 1426316 - RNA, 19 nt, Artificial Sequence
  Description of Artificial Sequence: Synthetic oligonucleotide
  Sense strand starting at position 3225 of SEQ ID NO: 1243581
guccuuugaaugggaauga

SEQ ID NO: 1426317 - RNA, 19 nt, Artificial Sequence
  Description of Artificial Sequence: Synthetic oligonucleotide
  Antisense strand to SEQ ID NO: 1426316
ucauucccauucaaaggac

SEQ ID NO: 1426318 - RNA, 19 nt, Artificial Sequence
  Description of Artificial Sequence: Synthetic oligonucleotide
  Sense strand starting at position 3649 of SEQ ID NO: 1243581
guaaguuuaaggugagaau

SEQ ID NO: 1426319 - RNA, 19 nt, Artificial Sequence
  Description of Artificial Sequence: Synthetic oligonucleotide
  Antisense strand to SEQ ID NO: 1426318
auucucaccuuaaacuuac

SEQ ID NO: 1426320 - RNA, 19 nt, Artificial Sequence
  Description of Artificial Sequence: Synthetic oligonucleotide
  Sense strand starting at position 3732 of SEQ ID NO: 1243581
uccucuuaggcauagaucu

SEQ ID NO: 1426321 - RNA, 19 nt, Artificial Sequence
  Description of Artificial Sequence: Synthetic oligonucleotide
  Antisense strand to SEQ ID NO: 1426320
agaucuaugccuaagagga

SEQ ID NO: 1426322 - RNA, 19 nt, Artificial Sequence
  Description of Artificial Sequence: Synthetic oligonucleotide
  Sense strand starting at position 3740 of SEQ ID NO: 1243581
ggcauagaucuugauccuu

SEQ ID NO: 1426323 - RNA, 19 nt, Artificial Sequence
  Description of Artificial Sequence: Synthetic oligonucleotide
  Antisense strand to SEQ ID NO: 1426322
aaggaucaagaucuaugcc

SEQ ID NO: 1426324 - RNA, 19 nt, Artificial Sequence
  Description of Artificial Sequence: Synthetic oligonucleotide
  Sense strand starting at position 3818 of SEQ ID NO: 1243581
auuugugucuaaguagguu

SEQ ID NO: 1426325 - RNA, 19 nt, Artificial Sequence
  Description of Artificial Sequence: Synthetic oligonucleotide
  Antisense strand to SEQ ID NO: 1426324
aaccuacuuagacacaaau

SEQ ID NO: 1426326 - RNA, 19 nt, Artificial Sequence
  Description of Artificial Sequence: Synthetic oligonucleotide
  Sense strand starting at position 3921 of SEQ ID NO: 1243581
cgccaucagcauuaagauu

SEQ ID NO: 1426327 - RNA, 19 nt, Artificial Sequence
  Description of Artificial Sequence: Synthetic oligonucleotide
  Antisense strand to SEQ ID NO: 1426326
aaucuuaaugcugauggcg

SEQ ID NO: 1426328 - RNA, 19 nt, Artificial Sequence
  Description of Artificial Sequence: Synthetic oligonucleotide
  Sense strand starting at position 3949 of SEQ ID NO: 1243581
uggcccaaugcugaauaua

SEQ ID NO: 1426329 - RNA, 19 nt, Artificial Sequence
  Description of Artificial Sequence: Synthetic oligonucleotide
  Antisense strand to SEQ ID NO: 1426328
uauauucagcauugggcca

SEQ ID NO: 1426330 - RNA, 19 nt, Artificial Sequence
  Description of Artificial Sequence: Synthetic oligonucleotide
  Sense strand starting at position 281 of SEQ ID NO: 1243582
ggcgguaaucccagcgcuu

SEQ ID NO: 1426331 - RNA, 19 nt, Artificial Sequence
  Description of Artificial Sequence: Synthetic oligonucleotide
  Antisense strand to SEQ ID NO: 1426330
aagcgcugggauuaccgcc

SEQ ID NO: 1426332 - RNA, 19 nt, Artificial Sequence
  Description of Artificial Sequence: Synthetic oligonucleotide
  Sense strand starting at position 282 of SEQ ID NO: 1243582
gcgguaaucccagcgcuuu

SEQ ID NO: 1426333 - RNA, 19 nt, Artificial Sequence
  Description of Artificial Sequence: Synthetic oligonucleotide
  Antisense strand to SEQ ID NO: 1426332
aaagcgcugggauuaccgc

SEQ ID NO: 1426334 - RNA, 19 nt, Artificial Sequence
  Description of Artificial Sequence: Synthetic oligonucleotide
  Sense strand starting at position 295 of SEQ ID NO: 1243582
cgcuuugggagguagagaa

SEQ ID NO: 1426335 - RNA, 19 nt, Artificial Sequence
  Description of Artificial Sequence: Synthetic oligonucleotide
  Antisense strand to SEQ ID NO: 1426334
uucucuaccucccaaagcg

SEQ ID NO: 1426336 - RNA, 19 nt, Artificial Sequence
  Description of Artificial Sequence: Synthetic oligonucleotide
  Sense strand starting at position 459 of SEQ ID NO: 1243582
cgcuuagcuccaggaguua

SEQ ID NO: 1426337 - RNA, 19 nt, Artificial Sequence
  Description of Artificial Sequence: Synthetic oligonucleotide
  Antisense strand to SEQ ID NO: 1426336
uaacuccuggagcuaagcg

SEQ ID NO: 1426338 - RNA, 19 nt, Artificial Sequence
  Description of Artificial Sequence: Synthetic oligonucleotide
  Sense strand starting at position 1285 of SEQ ID NO: 1243582
ucgucgucgcaguugagaa

SEQ ID NO: 1426339 - RNA, 19 nt, Artificial Sequence
  Description of Artificial Sequence: Synthetic oligonucleotide
  Antisense strand to SEQ ID NO: 1426338
uucucaacugcgacgacga

SEQ ID NO: 1426340 - RNA, 19 nt, Artificial Sequence
  Description of Artificial Sequence: Synthetic oligonucleotide
  Sense strand starting at position 1416 of SEQ ID NO: 1243582
guccguuugugucugacau

SEQ ID NO: 1426341 - RNA, 19 nt, Artificial Sequence
  Description of Artificial Sequence: Synthetic oligonucleotide
  Antisense strand to SEQ ID NO: 1426340
augucagacacaaacggac

SEQ ID NO: 1426342 - RNA, 19 nt, Artificial Sequence
  Description of Artificial Sequence: Synthetic oligonucleotide
  Sense strand starting at position 1417 of SEQ ID NO: 1243582
uccguuugugucugacauu

SEQ ID NO: 1426343 - RNA, 19 nt, Artificial Sequence
  Description of Artificial Sequence: Synthetic oligonucleotide
  Antisense strand to SEQ ID NO: 1426342
aaugucagacacaaacgga

SEQ ID NO: 1426344 - RNA, 19 nt, Artificial Sequence
  Description of Artificial Sequence: Synthetic oligonucleotide
  Sense strand starting at position 1418 of SEQ ID NO: 1243582
ccguuugugucugacauuu

SEQ ID NO: 1426345 - RNA, 19 nt, Artificial Sequence
  Description of Artificial Sequence: Synthetic oligonucleotide
  Antisense strand to SEQ ID NO: 1426344
aaaugucagacacaaacgg

SEQ ID NO: 1426346 - RNA, 19 nt, Artificial Sequence
  Description of Artificial Sequence: Synthetic oligonucleotide
  Sense strand starting at position 1506 of SEQ ID NO: 1243582
uggcuuguugccuccgauu

SEQ ID NO: 1426347 - RNA, 19 nt, Artificial Sequence
  Description of Artificial Sequence: Synthetic oligonucleotide
  Antisense strand to SEQ ID NO: 1426346
aaucggaggcaacaagcca

SEQ ID NO: 1426348 - RNA, 19 nt, Artificial Sequence
  Description of Artificial Sequence: Synthetic oligonucleotide
  Sense strand starting at position 1515 of SEQ ID NO: 1243582
gccuccgauuccuagggaa

SEQ ID NO: 1426349 - RNA, 19 nt, Artificial Sequence
  Description of Artificial Sequence: Synthetic oligonucleotide
  Antisense strand to SEQ ID NO: 1426348
uucccuaggaaucggaggc

SEQ ID NO: 1426350 - RNA, 19 nt, Artificial Sequence
  Description of Artificial Sequence: Synthetic oligonucleotide
  Sense strand starting at position 1517 of SEQ ID NO: 1243582
cuccgauuccuagggaaga

SEQ ID NO: 1426351 - RNA, 19 nt, Artificial Sequence
  Description of Artificial Sequence: Synthetic oligonucleotide
  Antisense strand to SEQ ID NO: 1426350
ucuucccuaggaaucggag

SEQ ID NO: 1426352 - RNA, 19 nt, Artificial Sequence
  Description of Artificial Sequence: Synthetic oligonucleotide
  Sense strand starting at position 1518 of SEQ ID NO: 1243582
uccgauuccuagggaagaa

SEQ ID NO: 1426353 - RNA, 19 nt, Artificial Sequence
  Description of Artificial Sequence: Synthetic oligonucleotide
  Antisense strand to SEQ ID NO: 1426352
uucuucccuaggaaucgga

SEQ ID NO: 1426354 - RNA, 19 nt, Artificial Sequence
  Description of Artificial Sequence: Synthetic oligonucleotide
  Sense strand starting at position 2034 of SEQ ID NO: 1243582
gcggguguauaaucagaaa

SEQ ID NO: 1426355 - RNA, 19 nt, Artificial Sequence
  Description of Artificial Sequence: Synthetic oligonucleotide
  Antisense strand to SEQ ID NO: 1426354
uuucugauuauacacccgc

SEQ ID NO: 1426356 - RNA, 19 nt, Artificial Sequence
  Description of Artificial Sequence: Synthetic oligonucleotide
  Sense strand starting at position 2037 of SEQ ID NO: 1243582
gguguauaaucagaaaugg

SEQ ID NO: 1426357 - RNA, 19 nt, Artificial Sequence
  Description of Artificial Sequence: Synthetic oligonucleotide
  Antisense strand to SEQ ID NO: 1426356
ccauuucugauuauacacc

SEQ ID NO: 1426358 - RNA, 19 nt, Artificial Sequence
  Description of Artificial Sequence: Synthetic oligonucleotide
  Sense strand starting at position 2109 of SEQ ID NO: 1243582
cgcagucgugcccaagaca

SEQ ID NO: 1426359 - RNA, 19 nt, Artificial Sequence
  Description of Artificial Sequence: Synthetic oligonucleotide
  Antisense strand to SEQ ID NO: 1426358
ugucuugggcacgacugcg

SEQ ID NO: 1426360 - RNA, 19 nt, Artificial Sequence
  Description of Artificial Sequence: Synthetic oligonucleotide
  Sense strand starting at position 2306 of SEQ ID NO: 1243582
cccgguuugcacgaacaaa

SEQ ID NO: 1426361 - RNA, 19 nt, Artificial Sequence
  Description of Artificial Sequence: Synthetic oligonucleotide
  Antisense strand to SEQ ID NO: 1426360
uuuguucgugcaaaccggg

SEQ ID NO: 1426362 - RNA, 19 nt, Artificial Sequence
  Description of Artificial Sequence: Synthetic oligonucleotide
  Sense strand starting at position 2433 of SEQ ID NO: 1243582
uuguccuuguuaucucaga

SEQ ID NO: 1426363 - RNA, 19 nt, Artificial Sequence
  Description of Artificial Sequence: Synthetic oligonucleotide
  Antisense strand to SEQ ID NO: 1426362
ucugagauaacaaggacaa

SEQ ID NO: 1426364 - RNA, 19 nt, Artificial Sequence
  Description of Artificial Sequence: Synthetic oligonucleotide
  Sense strand starting at position 2434 of SEQ ID NO: 1243582
uguccuuguuaucucagaa

SEQ ID NO: 1426365 - RNA, 19 nt, Artificial Sequence
  Description of Artificial Sequence: Synthetic oligonucleotide
  Antisense strand to SEQ ID NO: 1426364
uucugagauaacaaggaca

SEQ ID NO: 1426366 - RNA, 19 nt, Artificial Sequence
  Description of Artificial Sequence: Synthetic oligonucleotide
  Sense strand starting at position 2438 of SEQ ID NO: 1243582
cuuguuaucucagaaacag

SEQ ID NO: 1426367 - RNA, 19 nt, Artificial Sequence
  Description of Artificial Sequence: Synthetic oligonucleotide
  Antisense strand to SEQ ID NO: 1426366
cuguuucugagauaacaag

SEQ ID NO: 1426368 - RNA, 19 nt, Artificial Sequence
  Description of Artificial Sequence: Synthetic oligonucleotide
  Sense strand starting at position 2464 of SEQ ID NO: 1243582
gcagucucuucccaauguu

SEQ ID NO: 1426369 - RNA, 19 nt, Artificial Sequence
  Description of Artificial Sequence: Synthetic oligonucleotide
  Antisense strand to SEQ ID NO: 1426368
aacauugggaagagacugc

SEQ ID NO: 1426370 - RNA, 19 nt, Artificial Sequence
  Description of Artificial Sequence: Synthetic oligonucleotide
  Sense strand starting at position 2473 of SEQ ID NO: 1243582
ucccaauguugaguguaaa

SEQ ID NO: 1426371 - RNA, 19 nt, Artificial Sequence
  Description of Artificial Sequence: Synthetic oligonucleotide
  Antisense strand to SEQ ID NO: 1426370
uuuacacucaacauuggga

SEQ ID NO: 1426372 - RNA, 19 nt, Artificial Sequence
  Description of Artificial Sequence: Synthetic oligonucleotide
  Sense strand starting at position 2863 of SEQ ID NO: 1243582
gccugaaauucuggaaguu

SEQ ID NO: 1426373 - RNA, 19 nt, Artificial Sequence
  Description of Artificial Sequence: Synthetic oligonucleotide
  Antisense strand to SEQ ID NO: 1426372
aacuuccagaauuucaggc

SEQ ID NO: 1426374 - RNA, 19 nt, Artificial Sequence
  Description of Artificial Sequence: Synthetic oligonucleotide
  Sense strand starting at position 2876 of SEQ ID NO: 1243582
gaaguuucuagauggcgga

SEQ ID NO: 1426375 - RNA, 19 nt, Artificial Sequence
  Description of Artificial Sequence: Synthetic oligonucleotide
  Antisense strand to SEQ ID NO: 1426374
uccgccaucuagaaacuuc

SEQ ID NO: 1426376 - RNA, 19 nt, Artificial Sequence
  Description of Artificial Sequence: Synthetic oligonucleotide
  Sense strand starting at position 2910 of SEQ ID NO: 1243582
aggguaagguugagaaagu

SEQ ID NO: 1426377 - RNA, 19 nt, Artificial Sequence
  Description of Artificial Sequence: Synthetic oligonucleotide
  Antisense strand to SEQ ID NO: 1426376
acuuucucaaccuuacccu

SEQ ID NO: 1426378 - RNA, 19 nt, Artificial Sequence
  Description of Artificial Sequence: Synthetic oligonucleotide
  Sense strand starting at position 3110 of SEQ ID NO: 1243582
uagggucuuuaucuaguaa

SEQ ID NO: 1426379 - RNA, 19 nt, Artificial Sequence
  Description of Artificial Sequence: Synthetic oligonucleotide
  Antisense strand to SEQ ID NO: 1426378
uuacuagauaaagacccua

SEQ ID NO: 1426380 - RNA, 19 nt, Artificial Sequence
  Description of Artificial Sequence: Synthetic oligonucleotide
  Sense strand starting at position 3114 of SEQ ID NO: 1243582
gucuuuaucuaguaaaugu

SEQ ID NO: 1426381 - RNA, 19 nt, Artificial Sequence
  Description of Artificial Sequence: Synthetic oligonucleotide
  Antisense strand to SEQ ID NO: 1426380
acauuuacuagauaaagac

SEQ ID NO: 1426382 - RNA, 19 nt, Artificial Sequence
  Description of Artificial Sequence: Synthetic oligonucleotide
  Sense strand starting at position 3124 of SEQ ID NO: 1243582
aguaaaugucaccaacucu

SEQ ID NO: 1426383 - RNA, 19 nt, Artificial Sequence
  Description of Artificial Sequence: Synthetic oligonucleotide
  Antisense strand to SEQ ID NO: 1426382
agaguuggugacauuuacu

SEQ ID NO: 1426384 - RNA, 19 nt, Artificial Sequence
  Description of Artificial Sequence: Synthetic oligonucleotide
  Sense strand starting at position 3158 of SEQ ID NO: 1243582
cucacuuucugauggucua

SEQ ID NO: 1426385 - RNA, 19 nt, Artificial Sequence
  Description of Artificial Sequence: Synthetic oligonucleotide
  Antisense strand to SEQ ID NO: 1426384
uagaccaucagaaagugag

SEQ ID NO: 1426386 - RNA, 19 nt, Artificial Sequence
  Description of Artificial Sequence: Synthetic oligonucleotide
  Sense strand starting at position 3159 of SEQ ID NO: 1243582
ucacuuucugauggucuau

SEQ ID NO: 1426387 - RNA, 19 nt, Artificial Sequence
  Description of Artificial Sequence: Synthetic oligonucleotide
  Antisense strand to SEQ ID NO: 1426386
auagaccaucagaaaguga

SEQ ID NO: 1426388 - RNA, 19 nt, Artificial Sequence
  Description of Artificial Sequence: Synthetic oligonucleotide
  Sense strand starting at position 3170 of SEQ ID NO: 1243582
uggucuauucugugcucca

SEQ ID NO: 1426389 - RNA, 19 nt, Artificial Sequence
  Description of Artificial Sequence: Synthetic oligonucleotide
  Antisense strand to SEQ ID NO: 1426388
uggagcacagaauagacca

SEQ ID NO: 1426390 - RNA, 19 nt, Artificial Sequence
  Description of Artificial Sequence: Synthetic oligonucleotide
  Sense strand starting at position 3375 of SEQ ID NO: 1243582
agggucgugauccauugaa

SEQ ID NO: 1426391 - RNA, 19 nt, Artificial Sequence
  Description of Artificial Sequence: Synthetic oligonucleotide
  Antisense strand to SEQ ID NO: 1426390
uucaauggaucacgacccu

SEQ ID NO: 1426392 - RNA, 19 nt, Artificial Sequence
  Description of Artificial Sequence: Synthetic oligonucleotide
  Sense strand starting at position 3379 of SEQ ID NO: 1243582
ucgugauccauugaacaag

SEQ ID NO: 1426393 - RNA, 19 nt, Artificial Sequence
  Description of Artificial Sequence: Synthetic oligonucleotide
  Antisense strand to SEQ ID NO: 1426392
cuuguucaauggaucacga

SEQ ID NO: 1426394 - RNA, 19 nt, Artificial Sequence
  Description of Artificial Sequence: Synthetic oligonucleotide
  Sense strand starting at position 3619 of SEQ ID NO: 1243582
gcagaaauugggcguaaga

SEQ ID NO: 1426395 - RNA, 19 nt, Artificial Sequence
  Description of Artificial Sequence: Synthetic oligonucleotide
  Antisense strand to SEQ ID NO: 1426394
ucuuacgcccaauuucugc

SEQ ID NO: 1426396 - RNA, 19 nt, Artificial Sequence
  Description of Artificial Sequence: Synthetic oligonucleotide
  Sense strand starting at position 3667 of SEQ ID NO: 1243582
guguaugggagucagaguu

SEQ ID NO: 1426397 - RNA, 19 nt, Artificial Sequence
  Description of Artificial Sequence: Synthetic oligonucleotide
  Antisense strand to SEQ ID NO: 1426396
aacucugacucccauacac

SEQ ID NO: 1426398 - RNA, 19 nt, Artificial Sequence
  Description of Artificial Sequence: Synthetic oligonucleotide
  Sense strand starting at position 3675 of SEQ ID NO: 1243582
gagucagaguugccuccaa

SEQ ID NO: 1426399 - RNA, 19 nt, Artificial Sequence
  Description of Artificial Sequence: Synthetic oligonucleotide
  Antisense strand to SEQ ID NO: 1426398
uuggaggcaacucugacuc

SEQ ID NO: 1426400 - RNA, 19 nt, Artificial Sequence
  Description of Artificial Sequence: Synthetic oligonucleotide
  Sense strand starting at position 3711 of SEQ ID NO: 1243582
gugggcucuuuaguugaau

SEQ ID NO: 1426401 - RNA, 19 nt, Artificial Sequence
  Description of Artificial Sequence: Synthetic oligonucleotide
  Antisense strand to SEQ ID NO: 1426400
auucaacuaaagagcccac

SEQ ID NO: 1426402 - RNA, 19 nt, Artificial Sequence
  Description of Artificial Sequence: Synthetic oligonucleotide
  Sense strand starting at position 3713 of SEQ ID NO: 1243582
gggcucuuuaguugaaugu

SEQ ID NO: 1426403 - RNA, 19 nt, Artificial Sequence
  Description of Artificial Sequence: Synthetic oligonucleotide
  Antisense strand to SEQ ID NO: 1426402
acauucaacuaaagagccc

SEQ ID NO: 1426404 - RNA, 19 nt, Artificial Sequence
  Description of Artificial Sequence: Synthetic oligonucleotide
  Sense strand starting at position 3714 of SEQ ID NO: 1243582
ggcucuuuaguugaaugua

SEQ ID NO: 1426405 - RNA, 19 nt, Artificial Sequence
  Description of Artificial Sequence: Synthetic oligonucleotide
  Antisense strand to SEQ ID NO: 1426404
uacauucaacuaaagagcc

SEQ ID NO: 1426406 - RNA, 19 nt, Artificial Sequence
  Description of Artificial Sequence: Synthetic oligonucleotide
  Sense strand starting at position 3741 of SEQ ID NO: 1243582
uugagaaucgccuguaaug

SEQ ID NO: 1426407 - RNA, 19 nt, Artificial Sequence
  Description of Artificial Sequence: Synthetic oligonucleotide
  Antisense strand to SEQ ID NO: 1426406
cauuacaggcgauucucaa

SEQ ID NO: 1426408 - RNA, 19 nt, Artificial Sequence
  Description of Artificial Sequence: Synthetic oligonucleotide
  Sense strand starting at position 3743 of SEQ ID NO: 1243582
gagaaucgccuguaaugcu

SEQ ID NO: 1426409 - RNA, 19 nt, Artificial Sequence
  Description of Artificial Sequence: Synthetic oligonucleotide
  Antisense strand to SEQ ID NO: 1426408
agcauuacaggcgauucuc

SEQ ID NO: 1426410 - RNA, 19 nt, Artificial Sequence
  Description of Artificial Sequence: Synthetic oligonucleotide
  Sense strand starting at position 392 of SEQ ID NO: 1243583
acgaguucuggcuauagca

SEQ ID NO: 1426411 - RNA, 19 nt, Artificial Sequence
  Description of Artificial Sequence: Synthetic oligonucleotide
  Antisense strand to SEQ ID NO: 1426410
ugcuauagccagaacucgu

SEQ ID NO: 1426412 - RNA, 19 nt, Artificial Sequence
  Description of Artificial Sequence: Synthetic oligonucleotide
  Sense strand starting at position 394 of SEQ ID NO: 1243583
gaguucuggcuauagcacu

SEQ ID NO: 1426413 - RNA, 19 nt, Artificial Sequence
  Description of Artificial Sequence: Synthetic oligonucleotide
  Antisense strand to SEQ ID NO: 1426412
agugcuauagccagaacuc

SEQ ID NO: 1426414 - RNA, 19 nt, Artificial Sequence
  Description of Artificial Sequence: Synthetic oligonucleotide
  Sense strand starting at position 632 of SEQ ID NO: 1243583
guuugaugaggucagagcu

SEQ ID NO: 1426415 - RNA, 19 nt, Artificial Sequence
  Description of Artificial Sequence: Synthetic oligonucleotide
  Antisense strand to SEQ ID NO: 1426414
agcucugaccucaucaaac

SEQ ID NO: 1426416 - RNA, 19 nt, Artificial Sequence
  Description of Artificial Sequence: Synthetic oligonucleotide
  Sense strand starting at position 640 of SEQ ID NO: 1243583
aggucagagcucugggaga

SEQ ID NO: 1426417 - RNA, 19 nt, Artificial Sequence
  Description of Artificial Sequence: Synthetic oligonucleotide
  Antisense strand to SEQ ID NO: 1426416
ucucccagagcucugaccu

SEQ ID NO: 1426418 - RNA, 19 nt, Artificial Sequence
  Description of Artificial Sequence: Synthetic oligonucleotide
  Sense strand starting at position 642 of SEQ ID NO: 1243583
gucagagcucugggagaag

SEQ ID NO: 1426419 - RNA, 19 nt, Artificial Sequence
  Description of Artificial Sequence: Synthetic oligonucleotide
  Antisense strand to SEQ ID NO: 1426418
cuucucccagagcucugac

SEQ ID NO: 1426420 - RNA, 19 nt, Artificial Sequence
  Description of Artificial Sequence: Synthetic oligonucleotide
  Sense strand starting at position 753 of SEQ ID NO: 1243583
gcagaugccacagauguua

SEQ ID NO: 1426421 - RNA, 19 nt, Artificial Sequence
  Description of Artificial Sequence: Synthetic oligonucleotide
  Antisense strand to SEQ ID NO: 1426420
uaacaucuguggcaucugc

SEQ ID NO: 1426422 - RNA, 19 nt, Artificial Sequence
  Description of Artificial Sequence: Synthetic oligonucleotide
  Sense strand starting at position 971 of SEQ ID NO: 1243583
ggugaacuccuacggagau

SEQ ID NO: 1426423 - RNA, 19 nt, Artificial Sequence
  Description of Artificial Sequence: Synthetic oligonucleotide
  Antisense strand to SEQ ID NO: 1426422
aucuccguaggaguucacc

SEQ ID NO: 1426424 - RNA, 19 nt, Artificial Sequence
  Description of Artificial Sequence: Synthetic oligonucleotide
  Sense strand starting at position 1162 of SEQ ID NO: 1243583
gguucauagccagggcuuu

SEQ ID NO: 1426425 - RNA, 19 nt, Artificial Sequence
  Description of Artificial Sequence: Synthetic oligonucleotide
  Antisense strand to SEQ ID NO: 1426424
aaagcccuggcuaugaacc

SEQ ID NO: 1426426 - RNA, 19 nt, Artificial Sequence
  Description of Artificial Sequence: Synthetic oligonucleotide
  Sense strand starting at position 1189 of SEQ ID NO: 1243583
uaccuagggcucugggauu

SEQ ID NO: 1426427 - RNA, 19 nt, Artificial Sequence
  Description of Artificial Sequence: Synthetic oligonucleotide
  Antisense strand to SEQ ID NO: 1426426
aaucccagagcccuaggua

SEQ ID NO: 1426428 - RNA, 19 nt, Artificial Sequence
  Description of Artificial Sequence: Synthetic oligonucleotide
  Sense strand starting at position 1210 of SEQ ID NO: 1243583
aacucagggcucugagaau

SEQ ID NO: 1426429 - RNA, 19 nt, Artificial Sequence
  Description of Artificial Sequence: Synthetic oligonucleotide
  Antisense strand to SEQ ID NO: 1426428
auucucagagcccugaguu

SEQ ID NO: 1426430 - RNA, 19 nt, Artificial Sequence
  Description of Artificial Sequence: Synthetic oligonucleotide
  Sense strand starting at position 1235 of SEQ ID NO: 1243583
cagggcuucugggugcaaa

SEQ ID NO: 1426431 - RNA, 19 nt, Artificial Sequence
  Description of Artificial Sequence: Synthetic oligonucleotide
  Antisense strand to SEQ ID NO: 1426430
uuugcacccagaagcccug

SEQ ID NO: 1426432 - RNA, 19 nt, Artificial Sequence
  Description of Artificial Sequence: Synthetic oligonucleotide
  Sense strand starting at position 1384 of SEQ ID NO: 1243583
aaugguaucucuucgacuu

SEQ ID NO: 1426433 - RNA, 19 nt, Artificial Sequence
  Description of Artificial Sequence: Synthetic oligonucleotide
  Antisense strand to SEQ ID NO: 1426432
aagucgaagagauaccauu

SEQ ID NO: 1426434 - RNA, 19 nt, Artificial Sequence
  Description of Artificial Sequence: Synthetic oligonucleotide
  Sense strand starting at position 1385 of SEQ ID NO: 1243583
augguaucucuucgacuuc

SEQ ID NO: 1426435 - RNA, 19 nt, Artificial Sequence
  Description of Artificial Sequence: Synthetic oligonucleotide
  Antisense strand to SEQ ID NO: 1426434
gaagucgaagagauaccau

SEQ ID NO: 1426436 - RNA, 19 nt, Artificial Sequence
  Description of Artificial Sequence: Synthetic oligonucleotide
  Sense strand starting at position 1413 of SEQ ID NO: 1243583
acugccuucuugcugagaa

SEQ ID NO: 1426437 - RNA, 19 nt, Artificial Sequence
  Description of Artificial Sequence: Synthetic oligonucleotide
  Antisense strand to SEQ ID NO: 1426436
uucucagcaagaaggcagu

SEQ ID NO: 1426438 - RNA, 19 nt, Artificial Sequence
  Description of Artificial Sequence: Synthetic oligonucleotide
  Sense strand starting at position 1474 of SEQ ID NO: 1243583
gagaauccagaucguguga

SEQ ID NO: 1426439 - RNA, 19 nt, Artificial Sequence
  Description of Artificial Sequence: Synthetic oligonucleotide
  Antisense strand to SEQ ID NO: 1426438
ucacacgaucuggauucuc

SEQ ID NO: 1426440 - RNA, 19 nt, Artificial Sequence
  Description of Artificial Sequence: Synthetic oligonucleotide
  Sense strand starting at position 1562 of SEQ ID NO: 1243583
uagacaagugcugaaauuc

SEQ ID NO: 1426441 - RNA, 19 nt, Artificial Sequence
  Description of Artificial Sequence: Synthetic oligonucleotide
  Antisense strand to SEQ ID NO: 1426440
gaauuucagcacuugucua

SEQ ID NO: 1426442 - RNA, 19 nt, Artificial Sequence
  Description of Artificial Sequence: Synthetic oligonucleotide
  Sense strand starting at position 1728 of SEQ ID NO: 1243583
ccuccucaccucugaggua

SEQ ID NO: 1426443 - RNA, 19 nt, Artificial Sequence
  Description of Artificial Sequence: Synthetic oligonucleotide
  Antisense strand to SEQ ID NO: 1426442
uaccucagaggugaggagg

SEQ ID NO: 1426444 - RNA, 19 nt, Artificial Sequence
  Description of Artificial Sequence: Synthetic oligonucleotide
  Sense strand starting at position 1756 of SEQ ID NO: 1243583
gcuccucauuucgucagaa

SEQ ID NO: 1426445 - RNA, 19 nt, Artificial Sequence
  Description of Artificial Sequence: Synthetic oligonucleotide
  Antisense strand to SEQ ID NO: 1426444
uucugacgaaaugaggagc

SEQ ID NO: 1426446 - RNA, 19 nt, Artificial Sequence
  Description of Artificial Sequence: Synthetic oligonucleotide
  Sense strand starting at position 1760 of SEQ ID NO: 1243583
cucauuucgucagaacucu

SEQ ID NO: 1426447 - RNA, 19 nt, Artificial Sequence
  Description of Artificial Sequence: Synthetic oligonucleotide
  Antisense strand to SEQ ID NO: 1426446
agaguucugacgaaaugag

SEQ ID NO: 1426448 - RNA, 19 nt, Artificial Sequence
  Description of Artificial Sequence: Synthetic oligonucleotide
  Sense strand starting at position 1766 of SEQ ID NO: 1243583
ucgucagaacucugcacau

SEQ ID NO: 1426449 - RNA, 19 nt, Artificial Sequence
  Description of Artificial Sequence: Synthetic oligonucleotide
  Antisense strand to SEQ ID NO: 1426448
augugcagaguucugacga

SEQ ID NO: 1426450 - RNA, 19 nt, Artificial Sequence
  Description of Artificial Sequence: Synthetic oligonucleotide
  Sense strand starting at position 2294 of SEQ ID NO: 1243583
gguggaaacucguuggcau

SEQ ID NO: 1426451 - RNA, 19 nt, Artificial Sequence
  Description of Artificial Sequence: Synthetic oligonucleotide
  Antisense strand to SEQ ID NO: 1426450
augccaacgaguuuccacc

SEQ ID NO: 1426452 - RNA, 19 nt, Artificial Sequence
  Description of Artificial Sequence: Synthetic oligonucleotide
  Sense strand starting at position 2295 of SEQ ID NO: 1243583
guggaaacucguuggcauu

SEQ ID NO: 1426453 - RNA, 19 nt, Artificial Sequence
  Description of Artificial Sequence: Synthetic oligonucleotide
  Antisense strand to SEQ ID NO: 1426452
aaugccaacgaguuuccac

SEQ ID NO: 1426454 - RNA, 19 nt, Artificial Sequence
  Description of Artificial Sequence: Synthetic oligonucleotide
  Sense strand starting at position 2296 of SEQ ID NO: 1243583
uggaaacucguuggcauua

SEQ ID NO: 1426455 - RNA, 19 nt, Artificial Sequence
  Description of Artificial Sequence: Synthetic oligonucleotide
  Antisense strand to SEQ ID NO: 1426454
uaaugccaacgaguuucca

SEQ ID NO: 1426456 - RNA, 19 nt, Artificial Sequence
  Description of Artificial Sequence: Synthetic oligonucleotide
  Sense strand starting at position 2297 of SEQ ID NO: 1243583
ggaaacucguuggcauuaa

SEQ ID NO: 1426457 - RNA, 19 nt, Artificial Sequence
  Description of Artificial Sequence: Synthetic oligonucleotide
  Antisense strand to SEQ ID NO: 1426456
uuaaugccaacgaguuucc

SEQ ID NO: 1426458 - RNA, 19 nt, Artificial Sequence
  Description of Artificial Sequence: Synthetic oligonucleotide
  Sense strand starting at position 2760 of SEQ ID NO: 1243583
cuaggauaguugccaagga

SEQ ID NO: 1426459 - RNA, 19 nt, Artificial Sequence
  Description of Artificial Sequence: Synthetic oligonucleotide
  Antisense strand to SEQ ID NO: 1426458
uccuuggcaacuauccuag

SEQ ID NO: 1426460 - RNA, 19 nt, Artificial Sequence
  Description of Artificial Sequence: Synthetic oligonucleotide
  Sense strand starting at position 2764 of SEQ ID NO: 1243583
gauaguugccaaggagaca

SEQ ID NO: 1426461 - RNA, 19 nt, Artificial Sequence
  Description of Artificial Sequence: Synthetic oligonucleotide
  Antisense strand to SEQ ID NO: 1426460
ugucuccuuggcaacuauc

SEQ ID NO: 1426462 - RNA, 19 nt, Artificial Sequence
  Description of Artificial Sequence: Synthetic oligonucleotide
  Sense strand starting at position 2897 of SEQ ID NO: 1243583
guuaauggucgccagggaa

SEQ ID NO: 1426463 - RNA, 19 nt, Artificial Sequence
  Description of Artificial Sequence: Synthetic oligonucleotide
  Antisense strand to SEQ ID NO: 1426462
uucccuggcgaccauuaac

SEQ ID NO: 1426464 - RNA, 19 nt, Artificial Sequence
  Description of Artificial Sequence: Synthetic oligonucleotide
  Sense strand starting at position 3169 of SEQ ID NO: 1243583
gccugaguuuaacucaauc

SEQ ID NO: 1426465 - RNA, 19 nt, Artificial Sequence
  Description of Artificial Sequence: Synthetic oligonucleotide
  Antisense strand to SEQ ID NO: 1426464
gauugaguuaaacucaggc

SEQ ID NO: 1426466 - RNA, 19 nt, Artificial Sequence
  Description of Artificial Sequence: Synthetic oligonucleotide
  Sense strand starting at position 3195 of SEQ ID NO: 1243583
gccuuagucccuguuguua

SEQ ID NO: 1426467 - RNA, 19 nt, Artificial Sequence
  Description of Artificial Sequence: Synthetic oligonucleotide
  Antisense strand to SEQ ID NO: 1426466
uaacaacagggacuaaggc

SEQ ID NO: 1426468 - RNA, 19 nt, Artificial Sequence
  Description of Artificial Sequence: Synthetic oligonucleotide
  Sense strand starting at position 3199 of SEQ ID NO: 1243583
uagucccuguuguuagauu

SEQ ID NO: 1426469 - RNA, 19 nt, Artificial Sequence
  Description of Artificial Sequence: Synthetic oligonucleotide
  Antisense strand to SEQ ID NO: 1426468
aaucuaacaacagggacua

SEQ ID NO: 1426470 - RNA, 19 nt, Artificial Sequence
  Description of Artificial Sequence: Synthetic oligonucleotide
  Sense strand starting at position 3288 of SEQ ID NO: 1243583
uggccuucgaggcaucuaa

SEQ ID NO: 1426471 - RNA, 19 nt, Artificial Sequence
  Description of Artificial Sequence: Synthetic oligonucleotide
  Antisense strand to SEQ ID NO: 1426470
uuagaugccucgaaggcca

SEQ ID NO: 1426472 - RNA, 19 nt, Artificial Sequence
  Description of Artificial Sequence: Synthetic oligonucleotide
  Sense strand starting at position 3311 of SEQ ID NO: 1243583
ucuccagucuugucugacu

SEQ ID NO: 1426473 - RNA, 19 nt, Artificial Sequence
  Description of Artificial Sequence: Synthetic oligonucleotide
  Antisense strand to SEQ ID NO: 1426472
agucagacaagacuggaga

SEQ ID NO: 1426474 - RNA, 19 nt, Artificial Sequence
  Description of Artificial Sequence: Synthetic oligonucleotide
  Sense strand starting at position 3316 of SEQ ID NO: 1243583
agucuugucugacucgaau

SEQ ID NO: 1426475 - RNA, 19 nt, Artificial Sequence
  Description of Artificial Sequence: Synthetic oligonucleotide
  Antisense strand to SEQ ID NO: 1426474
auucgagucagacaagacu

SEQ ID NO: 1426476 - RNA, 19 nt, Artificial Sequence
  Description of Artificial Sequence: Synthetic oligonucleotide
  Sense strand starting at position 3379 of SEQ ID NO: 1243583
gcagcuuugaauugaggaa

SEQ ID NO: 1426477 - RNA, 19 nt, Artificial Sequence
  Description of Artificial Sequence: Synthetic oligonucleotide
  Antisense strand to SEQ ID NO: 1426476
uuccucaauucaaagcugc

SEQ ID NO: 1426478 - RNA, 19 nt, Artificial Sequence
  Description of Artificial Sequence: Synthetic oligonucleotide
  Sense strand starting at position 3394 of SEQ ID NO: 1243583
ggaagugagccuggacaga

SEQ ID NO: 1426479 - RNA, 19 nt, Artificial Sequence
  Description of Artificial Sequence: Synthetic oligonucleotide
  Antisense strand to SEQ ID NO: 1426478
ucuguccaggcucacuucc

SEQ ID NO: 1426480 - RNA, 19 nt, Artificial Sequence
  Description of Artificial Sequence: Synthetic oligonucleotide
  Sense strand starting at position 3449 of SEQ ID NO: 1243583
acgcuucgugcugaaacaa

SEQ ID NO: 1426481 - RNA, 19 nt, Artificial Sequence
  Description of Artificial Sequence: Synthetic oligonucleotide
  Antisense strand to SEQ ID NO: 1426480
uuguuucagcacgaagcgu

SEQ ID NO: 1426482 - RNA, 19 nt, Artificial Sequence
  Description of Artificial Sequence: Synthetic oligonucleotide
  Sense strand starting at position 3478 of SEQ ID NO: 1243583
guucuugacaguuaacgag

SEQ ID NO: 1426483 - RNA, 19 nt, Artificial Sequence
  Description of Artificial Sequence: Synthetic oligonucleotide
  Antisense strand to SEQ ID NO: 1426482
cucguuaacugucaagaac

SEQ ID NO: 1426484 - RNA, 19 nt, Artificial Sequence
  Description of Artificial Sequence: Synthetic oligonucleotide
  Sense strand starting at position 3518 of SEQ ID NO: 1243583
ggagccauggaucguguuu

SEQ ID NO: 1426485 - RNA, 19 nt, Artificial Sequence
  Description of Artificial Sequence: Synthetic oligonucleotide
  Antisense strand to SEQ ID NO: 1426484
aaacacgauccauggcucc

SEQ ID NO: 1426486 - RNA, 19 nt, Artificial Sequence
  Description of Artificial Sequence: Synthetic oligonucleotide
  Sense strand starting at position 3541 of SEQ ID NO: 1243583
gucgccuacccagacaaau

SEQ ID NO: 1426487 - RNA, 19 nt, Artificial Sequence
  Description of Artificial Sequence: Synthetic oligonucleotide
  Antisense strand to SEQ ID NO: 1426486
auuugucuggguaggcgac

SEQ ID NO: 1426488 - RNA, 19 nt, Artificial Sequence
  Description of Artificial Sequence: Synthetic oligonucleotide
  Sense strand starting at position 3568 of SEQ ID NO: 1243583
gagaauguuugggaggaag

SEQ ID NO: 1426489 - RNA, 19 nt, Artificial Sequence
  Description of Artificial Sequence: Synthetic oligonucleotide
  Antisense strand to SEQ ID NO: 1426488
cuuccucccaaacauucuc

SEQ ID NO: 1426490 - RNA, 19 nt, Artificial Sequence
  Description of Artificial Sequence: Synthetic oligonucleotide
  Sense strand starting at position 131 of SEQ ID NO: 1243584
gccauuucuggcuggauac

SEQ ID NO: 1426491 - RNA, 19 nt, Artificial Sequence
  Description of Artificial Sequence: Synthetic oligonucleotide
  Antisense strand to SEQ ID NO: 1426490
guauccagccagaaauggc

SEQ ID NO: 1426492 - RNA, 19 nt, Artificial Sequence
  Description of Artificial Sequence: Synthetic oligonucleotide
  Sense strand starting at position 774 of SEQ ID NO: 1243584
aaucgaggugcuuagaaca

SEQ ID NO: 1426493 - RNA, 19 nt, Artificial Sequence
  Description of Artificial Sequence: Synthetic oligonucleotide
  Antisense strand to SEQ ID NO: 1426492
uguucuaagcaccucgauu

SEQ ID NO: 1426494 - RNA, 19 nt, Artificial Sequence
  Description of Artificial Sequence: Synthetic oligonucleotide
  Sense strand starting at position 821 of SEQ ID NO: 1243584
aggguuagcuauuguuacu

SEQ ID NO: 1426495 - RNA, 19 nt, Artificial Sequence
  Description of Artificial Sequence: Synthetic oligonucleotide
  Antisense strand to SEQ ID NO: 1426494
aguaacaauagcuaacccu

SEQ ID NO: 1426496 - RNA, 19 nt, Artificial Sequence
  Description of Artificial Sequence: Synthetic oligonucleotide
  Sense strand starting at position 833 of SEQ ID NO: 1243584
uguuacuguugcuguugaa

SEQ ID NO: 1426497 - RNA, 19 nt, Artificial Sequence
  Description of Artificial Sequence: Synthetic oligonucleotide
  Antisense strand to SEQ ID NO: 1426496
uucaacagcaacaguaaca

SEQ ID NO: 1426498 - RNA, 19 nt, Artificial Sequence
  Description of Artificial Sequence: Synthetic oligonucleotide
  Sense strand starting at position 836 of SEQ ID NO: 1243584
uacuguugcuguugaacua

SEQ ID NO: 1426499 - RNA, 19 nt, Artificial Sequence
  Description of Artificial Sequence: Synthetic oligonucleotide
  Antisense strand to SEQ ID NO: 1426498
uaguucaacagcaacagua

SEQ ID NO: 1426500 - RNA, 19 nt, Artificial Sequence
  Description of Artificial Sequence: Synthetic oligonucleotide
  Sense strand starting at position 873 of SEQ ID NO: 1243584
cucuaaaucugaguuaagu

SEQ ID NO: 1426501 - RNA, 19 nt, Artificial Sequence
  Description of Artificial Sequence: Synthetic oligonucleotide
  Antisense strand to SEQ ID NO: 1426500
acuuaacucagauuuagag

SEQ ID NO: 1426502 - RNA, 19 nt, Artificial Sequence
  Description of Artificial Sequence: Synthetic oligonucleotide
  Sense strand starting at position 926 of SEQ ID NO: 1243584
gcagccaucacacgggauu

SEQ ID NO: 1426503 - RNA, 19 nt, Artificial Sequence
  Description of Artificial Sequence: Synthetic oligonucleotide
  Antisense strand to SEQ ID NO: 1426502
aaucccgugugauggcugc

SEQ ID NO: 1426504 - RNA, 19 nt, Artificial Sequence
  Description of Artificial Sequence: Synthetic oligonucleotide
  Sense strand starting at position 929 of SEQ ID NO: 1243584
gccaucacacgggauucua

SEQ ID NO: 1426505 - RNA, 19 nt, Artificial Sequence
  Description of Artificial Sequence: Synthetic oligonucleotide
  Antisense strand to SEQ ID NO: 1426504
uagaaucccgugugauggc

SEQ ID NO: 1426506 - RNA, 19 nt, Artificial Sequence
  Description of Artificial Sequence: Synthetic oligonucleotide
  Sense strand starting at position 940 of SEQ ID NO: 1243584
ggauucuaacugugugguu

SEQ ID NO: 1426507 - RNA, 19 nt, Artificial Sequence
  Description of Artificial Sequence: Synthetic oligonucleotide
  Antisense strand to SEQ ID NO: 1426506
aaccacacaguuagaaucc

SEQ ID NO: 1426508 - RNA, 19 nt, Artificial Sequence
  Description of Artificial Sequence: Synthetic oligonucleotide
  Sense strand starting at position 941 of SEQ ID NO: 1243584
gauucuaacugugugguua

SEQ ID NO: 1426509 - RNA, 19 nt, Artificial Sequence
  Description of Artificial Sequence: Synthetic oligonucleotide
  Antisense strand to SEQ ID NO: 1426508
uaaccacacaguuagaauc

SEQ ID NO: 1426510 - RNA, 19 nt, Artificial Sequence
  Description of Artificial Sequence: Synthetic oligonucleotide
  Sense strand starting at position 1145 of SEQ ID NO: 1243584
cuggcuucuaucugaggga

SEQ ID NO: 1426511 - RNA, 19 nt, Artificial Sequence
  Description of Artificial Sequence: Synthetic oligonucleotide
  Antisense strand to SEQ ID NO: 1426510
ucccucagauagaagccag

SEQ ID NO: 1426512 - RNA, 19 nt, Artificial Sequence
  Description of Artificial Sequence: Synthetic oligonucleotide
  Sense strand starting at position 1600 of SEQ ID NO: 1243584
ccuugaacaguucgaaucu

SEQ ID NO: 1426513 - RNA, 19 nt, Artificial Sequence
  Description of Artificial Sequence: Synthetic oligonucleotide
  Antisense strand to SEQ ID NO: 1426512
agauucgaacuguucaagg

SEQ ID NO: 1426514 - RNA, 19 nt, Artificial Sequence
  Description of Artificial Sequence: Synthetic oligonucleotide
  Sense strand starting at position 1639 of SEQ ID NO: 1243584
ccauccuugcgcugaguca

SEQ ID NO: 1426515 - RNA, 19 nt, Artificial Sequence
  Description of Artificial Sequence: Synthetic oligonucleotide
  Antisense strand to SEQ ID NO: 1426514
ugacucagcgcaaggaugg

SEQ ID NO: 1426516 - RNA, 19 nt, Artificial Sequence
  Description of Artificial Sequence: Synthetic oligonucleotide
  Sense strand starting at position 2102 of SEQ ID NO: 1243584
cucugcuccgcccgaaaua

SEQ ID NO: 1426517 - RNA, 19 nt, Artificial Sequence
  Description of Artificial Sequence: Synthetic oligonucleotide
  Antisense strand to SEQ ID NO: 1426516
uauuucgggcggagcagag

SEQ ID NO: 1426518 - RNA, 19 nt, Artificial Sequence
  Description of Artificial Sequence: Synthetic oligonucleotide
  Sense strand starting at position 2271 of SEQ ID NO: 1243584
cugggauauccuugaauac

SEQ ID NO: 1426519 - RNA, 19 nt, Artificial Sequence
  Description of Artificial Sequence: Synthetic oligonucleotide
  Antisense strand to SEQ ID NO: 1426518
guauucaaggauaucccag

SEQ ID NO: 1426520 - RNA, 19 nt, Artificial Sequence
  Description of Artificial Sequence: Synthetic oligonucleotide
  Sense strand starting at position 2361 of SEQ ID NO: 1243584
cgcuguucagcgucuuaca

SEQ ID NO: 1426521 - RNA, 19 nt, Artificial Sequence
  Description of Artificial Sequence: Synthetic oligonucleotide
  Antisense strand to SEQ ID NO: 1426520
uguaagacgcugaacagcg

SEQ ID NO: 1426522 - RNA, 19 nt, Artificial Sequence
  Description of Artificial Sequence: Synthetic oligonucleotide
  Sense strand starting at position 2375 of SEQ ID NO: 1243584
uuacauaccuggucucauu

SEQ ID NO: 1426523 - RNA, 19 nt, Artificial Sequence
  Description of Artificial Sequence: Synthetic oligonucleotide
  Antisense strand to SEQ ID NO: 1426522
aaugagaccagguauguaa

SEQ ID NO: 1426524 - RNA, 19 nt, Artificial Sequence
  Description of Artificial Sequence: Synthetic oligonucleotide
  Sense strand starting at position 2385 of SEQ ID NO: 1243584
ggucucauuugauccgcau

SEQ ID NO: 1426525 - RNA, 19 nt, Artificial Sequence
  Description of Artificial Sequence: Synthetic oligonucleotide
  Antisense strand to SEQ ID NO: 1426524
augcggaucaaaugagacc

SEQ ID NO: 1426526 - RNA, 19 nt, Artificial Sequence
  Description of Artificial Sequence: Synthetic oligonucleotide
  Sense strand starting at position 2429 of SEQ ID NO: 1243584
agaugagcucacugaaguu

SEQ ID NO: 1426527 - RNA, 19 nt, Artificial Sequence
  Description of Artificial Sequence: Synthetic oligonucleotide
  Antisense strand to SEQ ID NO: 1426526
aacuucagugagcucaucu

SEQ ID NO: 1426528 - RNA, 19 nt, Artificial Sequence
  Description of Artificial Sequence: Synthetic oligonucleotide
  Sense strand starting at position 2439 of SEQ ID NO: 1243584
acugaaguucagggaggua

SEQ ID NO: 1426529 - RNA, 19 nt, Artificial Sequence
  Description of Artificial Sequence: Synthetic oligonucleotide
  Antisense strand to SEQ ID NO: 1426528
uaccucccugaacuucagu

SEQ ID NO: 1426530 - RNA, 19 nt, Artificial Sequence
  Description of Artificial Sequence: Synthetic oligonucleotide
  Sense strand starting at position 2465 of SEQ ID NO: 1243584
uugccuaaguuacacgaua

SEQ ID NO: 1426531 - RNA, 19 nt, Artificial Sequence
  Description of Artificial Sequence: Synthetic oligonucleotide
  Antisense strand to SEQ ID NO: 1426530
uaucguguaacuuaggcaa

SEQ ID NO: 1426532 - RNA, 19 nt, Artificial Sequence
  Description of Artificial Sequence: Synthetic oligonucleotide
  Sense strand starting at position 2467 of SEQ ID NO: 1243584
gccuaaguuacacgauaag

SEQ ID NO: 1426533 - RNA, 19 nt, Artificial Sequence
  Description of Artificial Sequence: Synthetic oligonucleotide
  Antisense strand to SEQ ID NO: 1426532
cuuaucguguaacuuaggc

SEQ ID NO: 1426534 - RNA, 19 nt, Artificial Sequence
  Description of Artificial Sequence: Synthetic oligonucleotide
  Sense strand starting at position 2476 of SEQ ID NO: 1243584
acacgauaaggaugucaua

SEQ ID NO: 1426535 - RNA, 19 nt, Artificial Sequence
  Description of Artificial Sequence: Synthetic oligonucleotide
  Antisense strand to SEQ ID NO: 1426534
uaugacauccuuaucgugu

SEQ ID NO: 1426536 - RNA, 19 nt, Artificial Sequence
  Description of Artificial Sequence: Synthetic oligonucleotide
  Sense strand starting at position 2479 of SEQ ID NO: 1243584
cgauaaggaugucauagca

SEQ ID NO: 1426537 - RNA, 19 nt, Artificial Sequence
  Description of Artificial Sequence: Synthetic oligonucleotide
  Antisense strand to SEQ ID NO: 1426536
ugcuaugacauccuuaucg

SEQ ID NO: 1426538 - RNA, 19 nt, Artificial Sequence
  Description of Artificial Sequence: Synthetic oligonucleotide
  Sense strand starting at position 3156 of SEQ ID NO: 1243584
ccgagaucaugccauuggu

SEQ ID NO: 1426539 - RNA, 19 nt, Artificial Sequence
  Description of Artificial Sequence: Synthetic oligonucleotide
  Antisense strand to SEQ ID NO: 1426538
accaauggcaugaucucgg

SEQ ID NO: 1426540 - RNA, 19 nt, Artificial Sequence
  Description of Artificial Sequence: Synthetic oligonucleotide
  Sense strand starting at position 3166 of SEQ ID NO: 1243584
gccauuggucuccagccua

SEQ ID NO: 1426541 - RNA, 19 nt, Artificial Sequence
  Description of Artificial Sequence: Synthetic oligonucleotide
  Antisense strand to SEQ ID NO: 1426540
uaggcuggagaccaauggc

SEQ ID NO: 1426542 - RNA, 19 nt, Artificial Sequence
  Description of Artificial Sequence: Synthetic oligonucleotide
  Sense strand starting at position 3392 of SEQ ID NO: 1243584
ucaguaagugcuuacaagu

SEQ ID NO: 1426543 - RNA, 19 nt, Artificial Sequence
  Description of Artificial Sequence: Synthetic oligonucleotide
  Antisense strand to SEQ ID NO: 1426542
acuuguaagcacuuacuga

SEQ ID NO: 1426544 - RNA, 19 nt, Artificial Sequence
  Description of Artificial Sequence: Synthetic oligonucleotide
  Sense strand starting at position 3409 of SEQ ID NO: 1243584
guucuauguugucucuuua

SEQ ID NO: 1426545 - RNA, 19 nt, Artificial Sequence
  Description of Artificial Sequence: Synthetic oligonucleotide
  Antisense strand to SEQ ID NO: 1426544
uaaagagacaacauagaac

SEQ ID NO: 1426546 - RNA, 19 nt, Artificial Sequence
  Description of Artificial Sequence: Synthetic oligonucleotide
  Sense strand starting at position 3568 of SEQ ID NO: 1243584
accucucaggaaugaaguu

SEQ ID NO: 1426547 - RNA, 19 nt, Artificial Sequence
  Description of Artificial Sequence: Synthetic oligonucleotide
  Antisense strand to SEQ ID NO: 1426546
aacuucauuccugagaggu

SEQ ID NO: 1426548 - RNA, 19 nt, Artificial Sequence
  Description of Artificial Sequence: Synthetic oligonucleotide
  Sense strand starting at position 3620 of SEQ ID NO: 1243584
gggucaaaugccuggauac

SEQ ID NO: 1426549 - RNA, 19 nt, Artificial Sequence
  Description of Artificial Sequence: Synthetic oligonucleotide
  Antisense strand to SEQ ID NO: 1426548
guauccaggcauuugaccc

SEQ ID NO: 1426550 - RNA, 19 nt, Artificial Sequence
  Description of Artificial Sequence: Synthetic oligonucleotide
  Sense strand starting at position 3621 of SEQ ID NO: 1243584
ggucaaaugccuggauacu

SEQ ID NO: 1426551 - RNA, 19 nt, Artificial Sequence
  Description of Artificial Sequence: Synthetic oligonucleotide
  Antisense strand to SEQ ID NO: 1426550
aguauccaggcauuugacc

SEQ ID NO: 1426552 - RNA, 19 nt, Artificial Sequence
  Description of Artificial Sequence: Synthetic oligonucleotide
  Sense strand starting at position 3622 of SEQ ID NO: 1243584
gucaaaugccuggauacuc

SEQ ID NO: 1426553 - RNA, 19 nt, Artificial Sequence
  Description of Artificial Sequence: Synthetic oligonucleotide
  Antisense strand to SEQ ID NO: 1426552
gaguauccaggcauuugac

SEQ ID NO: 1426554 - RNA, 19 nt, Artificial Sequence
  Description of Artificial Sequence: Synthetic oligonucleotide
  Sense strand starting at position 61 of SEQ ID NO: 1243585
gcuggaugccucuggcaag

SEQ ID NO: 1426555 - RNA, 19 nt, Artificial Sequence
  Description of Artificial Sequence: Synthetic oligonucleotide
  Antisense strand to SEQ ID NO: 1426554
cuugccagaggcauccagc

SEQ ID NO: 1426556 - RNA, 19 nt, Artificial Sequence
  Description of Artificial Sequence: Synthetic oligonucleotide
  Sense strand starting at position 83 of SEQ ID NO: 1243585
ugauaagacucagagcaca

SEQ ID NO: 1426557 - RNA, 19 nt, Artificial Sequence
  Description of Artificial Sequence: Synthetic oligonucleotide
  Antisense strand to SEQ ID NO: 1426556
ugugcucugagucuuauca

SEQ ID NO: 1426558 - RNA, 19 nt, Artificial Sequence
  Description of Artificial Sequence: Synthetic oligonucleotide
  Sense strand starting at position 96 of SEQ ID NO: 1243585
agcacaacccucugggauu

SEQ ID NO: 1426559 - RNA, 19 nt, Artificial Sequence
  Description of Artificial Sequence: Synthetic oligonucleotide
  Antisense strand to SEQ ID NO: 1426558
aaucccagaggguugugcu

SEQ ID NO: 1426560 - RNA, 19 nt, Artificial Sequence
  Description of Artificial Sequence: Synthetic oligonucleotide
  Sense strand starting at position 132 of SEQ ID NO: 1243585
ccucuaaacggucaucuau

SEQ ID NO: 1426561 - RNA, 19 nt, Artificial Sequence
  Description of Artificial Sequence: Synthetic oligonucleotide
  Antisense strand to SEQ ID NO: 1426560
auagaugaccguuuagagg

SEQ ID NO: 1426562 - RNA, 19 nt, Artificial Sequence
  Description of Artificial Sequence: Synthetic oligonucleotide
  Sense strand starting at position 237 of SEQ ID NO: 1243585
gugacuaaggcugaacuca

SEQ ID NO: 1426563 - RNA, 19 nt, Artificial Sequence
  Description of Artificial Sequence: Synthetic oligonucleotide
  Antisense strand to SEQ ID NO: 1426562
ugaguucagccuuagucac

SEQ ID NO: 1426564 - RNA, 19 nt, Artificial Sequence
  Description of Artificial Sequence: Synthetic oligonucleotide
  Sense strand starting at position 282 of SEQ ID NO: 1243585
ggcauaaggugcuuacuau

SEQ ID NO: 1426565 - RNA, 19 nt, Artificial Sequence
  Description of Artificial Sequence: Synthetic oligonucleotide
  Antisense strand to SEQ ID NO: 1426564
auaguaagcaccuuaugcc

SEQ ID NO: 1426566 - RNA, 19 nt, Artificial Sequence
  Description of Artificial Sequence: Synthetic oligonucleotide
  Sense strand starting at position 283 of SEQ ID NO: 1243585
gcauaaggugcuuacuauc

SEQ ID NO: 1426567 - RNA, 19 nt, Artificial Sequence
  Description of Artificial Sequence: Synthetic oligonucleotide
  Antisense strand to SEQ ID NO: 1426566
gauaguaagcaccuuaugc

SEQ ID NO: 1426568 - RNA, 19 nt, Artificial Sequence
  Description of Artificial Sequence: Synthetic oligonucleotide
  Sense strand starting at position 370 of SEQ ID NO: 1243585
auuuaaacguaucacgaga

SEQ ID NO: 1426569 - RNA, 19 nt, Artificial Sequence
  Description of Artificial Sequence: Synthetic oligonucleotide
  Antisense strand to SEQ ID NO: 1426568
ucucgugauacguuuaaau

SEQ ID NO: 1426570 - RNA, 19 nt, Artificial Sequence
  Description of Artificial Sequence: Synthetic oligonucleotide
  Sense strand starting at position 1229 of SEQ ID NO: 1243585
gugguuucaguaggauaau

SEQ ID NO: 1426571 - RNA, 19 nt, Artificial Sequence
  Description of Artificial Sequence: Synthetic oligonucleotide
  Antisense strand to SEQ ID NO: 1426570
auuauccuacugaaaccac

SEQ ID NO: 1426572 - RNA, 19 nt, Artificial Sequence
  Description of Artificial Sequence: Synthetic oligonucleotide
  Sense strand starting at position 1240 of SEQ ID NO: 1243585
aggauaauguccuuacccu

SEQ ID NO: 1426573 - RNA, 19 nt, Artificial Sequence
  Description of Artificial Sequence: Synthetic oligonucleotide
  Antisense strand to SEQ ID NO: 1426572
aggguaaggacauuauccu

SEQ ID NO: 1426574 - RNA, 19 nt, Artificial Sequence
  Description of Artificial Sequence: Synthetic oligonucleotide
  Sense strand starting at position 1241 of SEQ ID NO: 1243585
ggauaauguccuuacccuu

SEQ ID NO: 1426575 - RNA, 19 nt, Artificial Sequence
  Description of Artificial Sequence: Synthetic oligonucleotide
  Antisense strand to SEQ ID NO: 1426574
aaggguaaggacauuaucc

SEQ ID NO: 1426576 - RNA, 19 nt, Artificial Sequence
  Description of Artificial Sequence: Synthetic oligonucleotide
  Sense strand starting at position 1288 of SEQ ID NO: 1243585
uuaaguaucaugugugcag

SEQ ID NO: 1426577 - RNA, 19 nt, Artificial Sequence
  Description of Artificial Sequence: Synthetic oligonucleotide
  Antisense strand to SEQ ID NO: 1426576
cugcacacaugauacuuaa

SEQ ID NO: 1426578 - RNA, 19 nt, Artificial Sequence
  Description of Artificial Sequence: Synthetic oligonucleotide
  Sense strand starting at position 1292 of SEQ ID NO: 1243585
guaucaugugugcaguuua

SEQ ID NO: 1426579 - RNA, 19 nt, Artificial Sequence
  Description of Artificial Sequence: Synthetic oligonucleotide
  Antisense strand to SEQ ID NO: 1426578
uaaacugcacacaugauac

SEQ ID NO: 1426580 - RNA, 19 nt, Artificial Sequence
  Description of Artificial Sequence: Synthetic oligonucleotide
  Sense strand starting at position 1344 of SEQ ID NO: 1243585
ccguaagguuuauuuauug

SEQ ID NO: 1426581 - RNA, 19 nt, Artificial Sequence
  Description of Artificial Sequence: Synthetic oligonucleotide
  Antisense strand to SEQ ID NO: 1426580
caauaaauaaaccuuacgg

SEQ ID NO: 1426582 - RNA, 19 nt, Artificial Sequence
  Description of Artificial Sequence: Synthetic oligonucleotide
  Sense strand starting at position 1402 of SEQ ID NO: 1243585
aaacgauugcaguggauau

SEQ ID NO: 1426583 - RNA, 19 nt, Artificial Sequence
  Description of Artificial Sequence: Synthetic oligonucleotide
  Antisense strand to SEQ ID NO: 1426582
auauccacugcaaucguuu

SEQ ID NO: 1426584 - RNA, 19 nt, Artificial Sequence
  Description of Artificial Sequence: Synthetic oligonucleotide
  Sense strand starting at position 1413 of SEQ ID NO: 1243585
guggauauuccuuguagca

SEQ ID NO: 1426585 - RNA, 19 nt, Artificial Sequence
  Description of Artificial Sequence: Synthetic oligonucleotide
  Antisense strand to SEQ ID NO: 1426584
ugcuacaaggaauauccac

SEQ ID NO: 1426586 - RNA, 19 nt, Artificial Sequence
  Description of Artificial Sequence: Synthetic oligonucleotide
  Sense strand starting at position 1513 of SEQ ID NO: 1243585
cguggauucgauuacucca

SEQ ID NO: 1426587 - RNA, 19 nt, Artificial Sequence
  Description of Artificial Sequence: Synthetic oligonucleotide
  Antisense strand to SEQ ID NO: 1426586
uggaguaaucgaauccacg

SEQ ID NO: 1426588 - RNA, 19 nt, Artificial Sequence
  Description of Artificial Sequence: Synthetic oligonucleotide
  Sense strand starting at position 1516 of SEQ ID NO: 1243585
ggauucgauuacuccaaga

SEQ ID NO: 1426589 - RNA, 19 nt, Artificial Sequence
  Description of Artificial Sequence: Synthetic oligonucleotide
  Antisense strand to SEQ ID NO: 1426588
ucuuggaguaaucgaaucc

SEQ ID NO: 1426590 - RNA, 19 nt, Artificial Sequence
  Description of Artificial Sequence: Synthetic oligonucleotide
  Sense strand starting at position 2640 of SEQ ID NO: 1243585
caggcauauugauccugga

SEQ ID NO: 1426591 - RNA, 19 nt, Artificial Sequence
  Description of Artificial Sequence: Synthetic oligonucleotide
  Antisense strand to SEQ ID NO: 1426590
uccaggaucaauaugccug

SEQ ID NO: 1426592 - RNA, 19 nt, Artificial Sequence
  Description of Artificial Sequence: Synthetic oligonucleotide
  Sense strand starting at position 2644 of SEQ ID NO: 1243585
cauauugauccuggaguuc

SEQ ID NO: 1426593 - RNA, 19 nt, Artificial Sequence
  Description of Artificial Sequence: Synthetic oligonucleotide
  Antisense strand to SEQ ID NO: 1426592
gaacuccaggaucaauaug

SEQ ID NO: 1426594 - RNA, 19 nt, Artificial Sequence
  Description of Artificial Sequence: Synthetic oligonucleotide
  Sense strand starting at position 2711 of SEQ ID NO: 1243585
agcgcaaugcccgacagau

SEQ ID NO: 1426595 - RNA, 19 nt, Artificial Sequence
  Description of Artificial Sequence: Synthetic oligonucleotide
  Antisense strand to SEQ ID NO: 1426594
aucugucgggcauugcgcu

SEQ ID NO: 1426596 - RNA, 19 nt, Artificial Sequence
  Description of Artificial Sequence: Synthetic oligonucleotide
  Sense strand starting at position 2755 of SEQ ID NO: 1243585
cugugugcuagugacacau

SEQ ID NO: 1426597 - RNA, 19 nt, Artificial Sequence
  Description of Artificial Sequence: Synthetic oligonucleotide
  Antisense strand to SEQ ID NO: 1426596
augugucacuagcacacag

SEQ ID NO: 1426598 - RNA, 19 nt, Artificial Sequence
  Description of Artificial Sequence: Synthetic oligonucleotide
  Sense strand starting at position 2759 of SEQ ID NO: 1243585
gugcuagugacacaugaac

SEQ ID NO: 1426599 - RNA, 19 nt, Artificial Sequence
  Description of Artificial Sequence: Synthetic oligonucleotide
  Antisense strand to SEQ ID NO: 1426598
guucaugugucacuagcac

SEQ ID NO: 1426600 - RNA, 19 nt, Artificial Sequence
  Description of Artificial Sequence: Synthetic oligonucleotide
  Sense strand starting at position 2864 of SEQ ID NO: 1243585
gcaguuuauaaugaaaggu

SEQ ID NO: 1426601 - RNA, 19 nt, Artificial Sequence
  Description of Artificial Sequence: Synthetic oligonucleotide
  Antisense strand to SEQ ID NO: 1426600
accuuucauuauaaacugc

SEQ ID NO: 1426602 - RNA, 19 nt, Artificial Sequence
  Description of Artificial Sequence: Synthetic oligonucleotide
  Sense strand starting at position 2873 of SEQ ID NO: 1243585
aaugaaaggugcuaagaca

SEQ ID NO: 1426603 - RNA, 19 nt, Artificial Sequence
  Description of Artificial Sequence: Synthetic oligonucleotide
  Antisense strand to SEQ ID NO: 1426602
ugucuuagcaccuuucauu

SEQ ID NO: 1426604 - RNA, 19 nt, Artificial Sequence
  Description of Artificial Sequence: Synthetic oligonucleotide
  Sense strand starting at position 2894 of SEQ ID NO: 1243585
ugguuagccgucugagaaa

SEQ ID NO: 1426605 - RNA, 19 nt, Artificial Sequence
  Description of Artificial Sequence: Synthetic oligonucleotide
  Antisense strand to SEQ ID NO: 1426604
uuucucagacggcuaacca

SEQ ID NO: 1426606 - RNA, 19 nt, Artificial Sequence
  Description of Artificial Sequence: Synthetic oligonucleotide
  Sense strand starting at position 2901 of SEQ ID NO: 1243585
ccgucugagaaaugaugaa

SEQ ID NO: 1426607 - RNA, 19 nt, Artificial Sequence
  Description of Artificial Sequence: Synthetic oligonucleotide
  Antisense strand to SEQ ID NO: 1426606
uucaucauuucucagacgg

SEQ ID NO: 1426608 - RNA, 19 nt, Artificial Sequence
  Description of Artificial Sequence: Synthetic oligonucleotide
  Sense strand starting at position 2994 of SEQ ID NO: 1243585
augugaaguguucacguga

SEQ ID NO: 1426609 - RNA, 19 nt, Artificial Sequence
  Description of Artificial Sequence: Synthetic oligonucleotide
  Antisense strand to SEQ ID NO: 1426608
ucacgugaacacuucacau

SEQ ID NO: 1426610 - RNA, 19 nt, Artificial Sequence
  Description of Artificial Sequence: Synthetic oligonucleotide
  Sense strand starting at position 3007 of SEQ ID NO: 1243585
acgugauuucguggcugau

SEQ ID NO: 1426611 - RNA, 19 nt, Artificial Sequence
  Description of Artificial Sequence: Synthetic oligonucleotide
  Antisense strand to SEQ ID NO: 1426610
aucagccacgaaaucacgu

SEQ ID NO: 1426612 - RNA, 19 nt, Artificial Sequence
  Description of Artificial Sequence: Synthetic oligonucleotide
  Sense strand starting at position 3009 of SEQ ID NO: 1243585
gugauuucguggcugauua

SEQ ID NO: 1426613 - RNA, 19 nt, Artificial Sequence
  Description of Artificial Sequence: Synthetic oligonucleotide
  Antisense strand to SEQ ID NO: 1426612
uaaucagccacgaaaucac

SEQ ID NO: 1426614 - RNA, 19 nt, Artificial Sequence
  Description of Artificial Sequence: Synthetic oligonucleotide
  Sense strand starting at position 3010 of SEQ ID NO: 1243585
ugauuucguggcugauuaa

SEQ ID NO: 1426615 - RNA, 19 nt, Artificial Sequence
  Description of Artificial Sequence: Synthetic oligonucleotide
  Antisense strand to SEQ ID NO: 1426614
uuaaucagccacgaaauca

SEQ ID NO: 1426616 - RNA, 19 nt, Artificial Sequence
  Description of Artificial Sequence: Synthetic oligonucleotide
  Sense strand starting at position 3013 of SEQ ID NO: 1243585
uuucguggcugauuaagaa

SEQ ID NO: 1426617 - RNA, 19 nt, Artificial Sequence
  Description of Artificial Sequence: Synthetic oligonucleotide
  Antisense strand to SEQ ID NO: 1426616
uucuuaaucagccacgaaa

SEQ ID NO: 1426618 - RNA, 19 nt, Artificial Sequence
  Description of Artificial Sequence: Synthetic oligonucleotide
  Sense strand starting at position 3094 of SEQ ID NO: 1243585
ucucacgcaccaugagauu

SEQ ID NO: 1426619 - RNA, 19 nt, Artificial Sequence
  Description of Artificial Sequence: Synthetic oligonucleotide
  Antisense strand to SEQ ID NO: 1426618
aaucucauggugcgugaga

SEQ ID NO: 1426620 - RNA, 19 nt, Artificial Sequence
  Description of Artificial Sequence: Synthetic oligonucleotide
  Sense strand starting at position 3106 of SEQ ID NO: 1243585
ugagauuacccacaggcuu

SEQ ID NO: 1426621 - RNA, 19 nt, Artificial Sequence
  Description of Artificial Sequence: Synthetic oligonucleotide
  Antisense strand to SEQ ID NO: 1426620
aagccuguggguaaucuca

SEQ ID NO: 1426622 - RNA, 19 nt, Artificial Sequence
  Description of Artificial Sequence: Synthetic oligonucleotide
  Sense strand starting at position 3255 of SEQ ID NO: 1243585
cugacaggugucugaguca

SEQ ID NO: 1426623 - RNA, 19 nt, Artificial Sequence
  Description of Artificial Sequence: Synthetic oligonucleotide
  Antisense strand to SEQ ID NO: 1426622
ugacucagacaccugucag

SEQ ID NO: 1426624 - RNA, 19 nt, Artificial Sequence
  Description of Artificial Sequence: Synthetic oligonucleotide
  Sense strand starting at position 3258 of SEQ ID NO: 1243585
acaggugucugagucacaa

SEQ ID NO: 1426625 - RNA, 19 nt, Artificial Sequence
  Description of Artificial Sequence: Synthetic oligonucleotide
  Antisense strand to SEQ ID NO: 1426624
uugugacucagacaccugu

SEQ ID NO: 1426626 - RNA, 19 nt, Artificial Sequence
  Description of Artificial Sequence: Synthetic oligonucleotide
  Sense strand starting at position 3400 of SEQ ID NO: 1243585
cacuaugaguguuugggau

SEQ ID NO: 1426627 - RNA, 19 nt, Artificial Sequence
  Description of Artificial Sequence: Synthetic oligonucleotide
  Antisense strand to SEQ ID NO: 1426626
aucccaaacacucauagug

SEQ ID NO: 1426628 - RNA, 19 nt, Artificial Sequence
  Description of Artificial Sequence: Synthetic oligonucleotide
  Sense strand starting at position 3406 of SEQ ID NO: 1243585
gaguguuugggauguguuu

SEQ ID NO: 1426629 - RNA, 19 nt, Artificial Sequence
  Description of Artificial Sequence: Synthetic oligonucleotide
  Antisense strand to SEQ ID NO: 1426628
aaacacaucccaaacacuc

SEQ ID NO: 1426630 - RNA, 19 nt, Artificial Sequence
  Description of Artificial Sequence: Synthetic oligonucleotide
  Sense strand starting at position 3569 of SEQ ID NO: 1243585
aggugcccaccuuguaauu

SEQ ID NO: 1426631 - RNA, 19 nt, Artificial Sequence
  Description of Artificial Sequence: Synthetic oligonucleotide
  Antisense strand to SEQ ID NO: 1426630
aauuacaaggugggcaccu

SEQ ID NO: 1426632 - RNA, 19 nt, Artificial Sequence
  Description of Artificial Sequence: Synthetic oligonucleotide
  Sense strand starting at position 3772 of SEQ ID NO: 1243585
cgaagucuugcucugucga

SEQ ID NO: 1426633 - RNA, 19 nt, Artificial Sequence
  Description of Artificial Sequence: Synthetic oligonucleotide
  Antisense strand to SEQ ID NO: 1426632
ucgacagagcaagacuucg

SEQ ID NO: 1426634 - RNA, 19 nt, Artificial Sequence
  Description of Artificial Sequence: Synthetic oligonucleotide
  Sense strand starting at position 21 of SEQ ID NO: 1243586
gggacagugagcugugauc

SEQ ID NO: 1426635 - RNA, 19 nt, Artificial Sequence
  Description of Artificial Sequence: Synthetic oligonucleotide
  Antisense strand to SEQ ID NO: 1426634
gaucacagcucacuguccc

SEQ ID NO: 1426636 - RNA, 19 nt, Artificial Sequence
  Description of Artificial Sequence: Synthetic oligonucleotide
  Sense strand starting at position 58 of SEQ ID NO: 1243586
cugggcaacucucuaauaa

SEQ ID NO: 1426637 - RNA, 19 nt, Artificial Sequence
  Description of Artificial Sequence: Synthetic oligonucleotide
  Antisense strand to SEQ ID NO: 1426636
uuauuagagaguugcccag

SEQ ID NO: 1426638 - RNA, 19 nt, Artificial Sequence
  Description of Artificial Sequence: Synthetic oligonucleotide
  Sense strand starting at position 411 of SEQ ID NO: 1243586
aacgcuuaacucuguguca

SEQ ID NO: 1426639 - RNA, 19 nt, Artificial Sequence
  Description of Artificial Sequence: Synthetic oligonucleotide
  Antisense strand to SEQ ID NO: 1426638
ugacacagaguuaagcguu

SEQ ID NO: 1426640 - RNA, 19 nt, Artificial Sequence
  Description of Artificial Sequence: Synthetic oligonucleotide
  Sense strand starting at position 476 of SEQ ID NO: 1243586
uccugaaccuguuuaugau

SEQ ID NO: 1426641 - RNA, 19 nt, Artificial Sequence
  Description of Artificial Sequence: Synthetic oligonucleotide
  Antisense strand to SEQ ID NO: 1426640
aucauaaacagguucagga

SEQ ID NO: 1426642 - RNA, 19 nt, Artificial Sequence
  Description of Artificial Sequence: Synthetic oligonucleotide
  Sense strand starting at position 485 of SEQ ID NO: 1243586
uguuuaugaucccuuuaca

SEQ ID NO: 1426643 - RNA, 19 nt, Artificial Sequence
  Description of Artificial Sequence: Synthetic oligonucleotide
  Antisense strand to SEQ ID NO: 1426642
uguaaagggaucauaaaca

SEQ ID NO: 1426644 - RNA, 19 nt, Artificial Sequence
  Description of Artificial Sequence: Synthetic oligonucleotide
  Sense strand starting at position 919 of SEQ ID NO: 1243586
ggaagaccuucugggaaca

SEQ ID NO: 1426645 - RNA, 19 nt, Artificial Sequence
  Description of Artificial Sequence: Synthetic oligonucleotide
  Antisense strand to SEQ ID NO: 1426644
uguucccagaaggucuucc

SEQ ID NO: 1426646 - RNA, 19 nt, Artificial Sequence
  Description of Artificial Sequence: Synthetic oligonucleotide
  Sense strand starting at position 938 of SEQ ID NO: 1243586
agcauuuauucugguauca

SEQ ID NO: 1426647 - RNA, 19 nt, Artificial Sequence
  Description of Artificial Sequence: Synthetic oligonucleotide
  Antisense strand to SEQ ID NO: 1426646
ugauaccagaauaaaugcu

SEQ ID NO: 1426648 - RNA, 19 nt, Artificial Sequence
  Description of Artificial Sequence: Synthetic oligonucleotide
  Sense strand starting at position 940 of SEQ ID NO: 1243586
cauuuauucugguaucagg

SEQ ID NO: 1426649 - RNA, 19 nt, Artificial Sequence
  Description of Artificial Sequence: Synthetic oligonucleotide
  Antisense strand to SEQ ID NO: 1426648
ccugauaccagaauaaaug

SEQ ID NO: 1426650 - RNA, 19 nt, Artificial Sequence
  Description of Artificial Sequence: Synthetic oligonucleotide
  Sense strand starting at position 1158 of SEQ ID NO: 1243586
uaugguuaaucgguuccau

SEQ ID NO: 1426651 - RNA, 19 nt, Artificial Sequence
  Description of Artificial Sequence: Synthetic oligonucleotide
  Antisense strand to SEQ ID NO: 1426650
auggaaccgauuaaccaua

SEQ ID NO: 1426652 - RNA, 19 nt, Artificial Sequence
  Description of Artificial Sequence: Synthetic oligonucleotide
  Sense strand starting at position 1180 of SEQ ID NO: 1243586
ucccaauuucgcuguucca

SEQ ID NO: 1426653 - RNA, 19 nt, Artificial Sequence
  Description of Artificial Sequence: Synthetic oligonucleotide
  Antisense strand to SEQ ID NO: 1426652
uggaacagcgaaauuggga

SEQ ID NO: 1426654 - RNA, 19 nt, Artificial Sequence
  Description of Artificial Sequence: Synthetic oligonucleotide
  Sense strand starting at position 1212 of SEQ ID NO: 1243586
cagugagaugaggacguuu

SEQ ID NO: 1426655 - RNA, 19 nt, Artificial Sequence
  Description of Artificial Sequence: Synthetic oligonucleotide
  Antisense strand to SEQ ID NO: 1426654
aaacguccucaucucacug

SEQ ID NO: 1426656 - RNA, 19 nt, Artificial Sequence
  Description of Artificial Sequence: Synthetic oligonucleotide
  Sense strand starting at position 1214 of SEQ ID NO: 1243586
gugagaugaggacguuucu

SEQ ID NO: 1426657 - RNA, 19 nt, Artificial Sequence
  Description of Artificial Sequence: Synthetic oligonucleotide
  Antisense strand to SEQ ID NO: 1426656
agaaacguccucaucucac

SEQ ID NO: 1426658 - RNA, 19 nt, Artificial Sequence
  Description of Artificial Sequence: Synthetic oligonucleotide
  Sense strand starting at position 1475 of SEQ ID NO: 1243586
aaauccugcgaaggagaaa

SEQ ID NO: 1426659 - RNA, 19 nt, Artificial Sequence
  Description of Artificial Sequence: Synthetic oligonucleotide
  Antisense strand to SEQ ID NO: 1426658
uuucuccuucgcaggauuu

SEQ ID NO: 1426660 - RNA, 19 nt, Artificial Sequence
  Description of Artificial Sequence: Synthetic oligonucleotide
  Sense strand starting at position 1846 of SEQ ID NO: 1243586
acccuuucugccuggcaaa

SEQ ID NO: 1426661 - RNA, 19 nt, Artificial Sequence
  Description of Artificial Sequence: Synthetic oligonucleotide
  Antisense strand to SEQ ID NO: 1426660
uuugccaggcagaaagggu

SEQ ID NO: 1426662 - RNA, 19 nt, Artificial Sequence
  Description of Artificial Sequence: Synthetic oligonucleotide
  Sense strand starting at position 1899 of SEQ ID NO: 1243586
uuuccugucuuuccucaga

SEQ ID NO: 1426663 - RNA, 19 nt, Artificial Sequence
  Description of Artificial Sequence: Synthetic oligonucleotide
  Antisense strand to SEQ ID NO: 1426662
ucugaggaaagacaggaaa

SEQ ID NO: 1426664 - RNA, 19 nt, Artificial Sequence
  Description of Artificial Sequence: Synthetic oligonucleotide
  Sense strand starting at position 1901 of SEQ ID NO: 1243586
uccugucuuuccucagaca

SEQ ID NO: 1426665 - RNA, 19 nt, Artificial Sequence
  Description of Artificial Sequence: Synthetic oligonucleotide
  Antisense strand to SEQ ID NO: 1426664
ugucugaggaaagacagga

SEQ ID NO: 1426666 - RNA, 19 nt, Artificial Sequence
  Description of Artificial Sequence: Synthetic oligonucleotide
  Sense strand starting at position 1914 of SEQ ID NO: 1243586
cagacaaguccguaaggga

SEQ ID NO: 1426667 - RNA, 19 nt, Artificial Sequence
  Description of Artificial Sequence: Synthetic oligonucleotide
  Antisense strand to SEQ ID NO: 1426666
ucccuuacggacuugucug

SEQ ID NO: 1426668 - RNA, 19 nt, Artificial Sequence
  Description of Artificial Sequence: Synthetic oligonucleotide
  Sense strand starting at position 2123 of SEQ ID NO: 1243586
uuuggaguggccuguuuga

SEQ ID NO: 1426669 - RNA, 19 nt, Artificial Sequence
  Description of Artificial Sequence: Synthetic oligonucleotide
  Antisense strand to SEQ ID NO: 1426668
ucaaacaggccacuccaaa

SEQ ID NO: 1426670 - RNA, 19 nt, Artificial Sequence
  Description of Artificial Sequence: Synthetic oligonucleotide
  Sense strand starting at position 2224 of SEQ ID NO: 1243586
gacggucuccuaggagaga

SEQ ID NO: 1426671 - RNA, 19 nt, Artificial Sequence
  Description of Artificial Sequence: Synthetic oligonucleotide
  Antisense strand to SEQ ID NO: 1426670
ucucuccuaggagaccguc

SEQ ID NO: 1426672 - RNA, 19 nt, Artificial Sequence
  Description of Artificial Sequence: Synthetic oligonucleotide
  Sense strand starting at position 2258 of SEQ ID NO: 1243586
acgcgacuuccuucugcua

SEQ ID NO: 1426673 - RNA, 19 nt, Artificial Sequence
  Description of Artificial Sequence: Synthetic oligonucleotide
  Antisense strand to SEQ ID NO: 1426672
uagcagaaggaagucgcgu

SEQ ID NO: 1426674 - RNA, 19 nt, Artificial Sequence
  Description of Artificial Sequence: Synthetic oligonucleotide
  Sense strand starting at position 2283 of SEQ ID NO: 1243586
ugagaagucuuagggcaga

SEQ ID NO: 1426675 - RNA, 19 nt, Artificial Sequence
  Description of Artificial Sequence: Synthetic oligonucleotide
  Antisense strand to SEQ ID NO: 1426674
ucugcccuaagacuucuca

SEQ ID NO: 1426676 - RNA, 19 nt, Artificial Sequence
  Description of Artificial Sequence: Synthetic oligonucleotide
  Sense strand starting at position 2313 of SEQ ID NO: 1243586
agggcuucgaggugaguaa

SEQ ID NO: 1426677 - RNA, 19 nt, Artificial Sequence
  Description of Artificial Sequence: Synthetic oligonucleotide
  Antisense strand to SEQ ID NO: 1426676
uuacucaccucgaagcccu

SEQ ID NO: 1426678 - RNA, 19 nt, Artificial Sequence
  Description of Artificial Sequence: Synthetic oligonucleotide
  Sense strand starting at position 2314 of SEQ ID NO: 1243586
gggcuucgaggugaguaaa

SEQ ID NO: 1426679 - RNA, 19 nt, Artificial Sequence
  Description of Artificial Sequence: Synthetic oligonucleotide
  Antisense strand to SEQ ID NO: 1426678
uuuacucaccucgaagccc

SEQ ID NO: 1426680 - RNA, 19 nt, Artificial Sequence
  Description of Artificial Sequence: Synthetic oligonucleotide
  Sense strand starting at position 2390 of SEQ ID NO: 1243586
agcuuugagcucugaguac

SEQ ID NO: 1426681 - RNA, 19 nt, Artificial Sequence
  Description of Artificial Sequence: Synthetic oligonucleotide
  Antisense strand to SEQ ID NO: 1426680
guacucagagcucaaagcu

SEQ ID NO: 1426682 - RNA, 19 nt, Artificial Sequence
  Description of Artificial Sequence: Synthetic oligonucleotide
  Sense strand starting at position 2444 of SEQ ID NO: 1243586
ggauccuacccaggaucua

SEQ ID NO: 1426683 - RNA, 19 nt, Artificial Sequence
  Description of Artificial Sequence: Synthetic oligonucleotide
  Antisense strand to SEQ ID NO: 1426682
uagauccuggguaggaucc

SEQ ID NO: 1426684 - RNA, 19 nt, Artificial Sequence
  Description of Artificial Sequence: Synthetic oligonucleotide
  Sense strand starting at position 2485 of SEQ ID NO: 1243586
acagaugucuucccuuaua

SEQ ID NO: 1426685 - RNA, 19 nt, Artificial Sequence
  Description of Artificial Sequence: Synthetic oligonucleotide
  Antisense strand to SEQ ID NO: 1426684
uauaagggaagacaucugu

SEQ ID NO: 1426686 - RNA, 19 nt, Artificial Sequence
  Description of Artificial Sequence: Synthetic oligonucleotide
  Sense strand starting at position 2488 of SEQ ID NO: 1243586
gaugucuucccuuauagag

SEQ ID NO: 1426687 - RNA, 19 nt, Artificial Sequence
  Description of Artificial Sequence: Synthetic oligonucleotide
  Antisense strand to SEQ ID NO: 1426686
cucuauaagggaagacauc

SEQ ID NO: 1426688 - RNA, 19 nt, Artificial Sequence
  Description of Artificial Sequence: Synthetic oligonucleotide
  Sense strand starting at position 2490 of SEQ ID NO: 1243586
ugucuucccuuauagagau

SEQ ID NO: 1426689 - RNA, 19 nt, Artificial Sequence
  Description of Artificial Sequence: Synthetic oligonucleotide
  Antisense strand to SEQ ID NO: 1426688
aucucuauaagggaagaca

SEQ ID NO: 1426690 - RNA, 19 nt, Artificial Sequence
  Description of Artificial Sequence: Synthetic oligonucleotide
  Sense strand starting at position 2735 of SEQ ID NO: 1243586
cgguuaaggacuuagggua

SEQ ID NO: 1426691 - RNA, 19 nt, Artificial Sequence
  Description of Artificial Sequence: Synthetic oligonucleotide
  Antisense strand to SEQ ID NO: 1426690
uacccuaaguccuuaaccg

SEQ ID NO: 1426692 - RNA, 19 nt, Artificial Sequence
  Description of Artificial Sequence: Synthetic oligonucleotide
  Sense strand starting at position 3133 of SEQ ID NO: 1243586
aucugagucuugucucaau

SEQ ID NO: 1426693 - RNA, 19 nt, Artificial Sequence
  Description of Artificial Sequence: Synthetic oligonucleotide
  Antisense strand to SEQ ID NO: 1426692
auugagacaagacucagau

SEQ ID NO: 1426694 - RNA, 19 nt, Artificial Sequence
  Description of Artificial Sequence: Synthetic oligonucleotide
  Sense strand starting at position 3167 of SEQ ID NO: 1243586
aauuacagcugauauguga

SEQ ID NO: 1426695 - RNA, 19 nt, Artificial Sequence
  Description of Artificial Sequence: Synthetic oligonucleotide
  Antisense strand to SEQ ID NO: 1426694
ucacauaucagcuguaauu

SEQ ID NO: 1426696 - RNA, 19 nt, Artificial Sequence
  Description of Artificial Sequence: Synthetic oligonucleotide
  Sense strand starting at position 3171 of SEQ ID NO: 1243586
acagcugauaugugaguaa

SEQ ID NO: 1426697 - RNA, 19 nt, Artificial Sequence
  Description of Artificial Sequence: Synthetic oligonucleotide
  Antisense strand to SEQ ID NO: 1426696
uuacucacauaucagcugu

SEQ ID NO: 1426698 - RNA, 19 nt, Artificial Sequence
  Description of Artificial Sequence: Synthetic oligonucleotide
  Sense strand starting at position 3174 of SEQ ID NO: 1243586
gcugauaugugaguaauaa

SEQ ID NO: 1426699 - RNA, 19 nt, Artificial Sequence
  Description of Artificial Sequence: Synthetic oligonucleotide
  Antisense strand to SEQ ID NO: 1426698
uuauuacucacauaucagc

SEQ ID NO: 1426700 - RNA, 19 nt, Artificial Sequence
  Description of Artificial Sequence: Synthetic oligonucleotide
  Sense strand starting at position 3198 of SEQ ID NO: 1243586
ggaaacgaaucagauaauc

SEQ ID NO: 1426701 - RNA, 19 nt, Artificial Sequence
  Description of Artificial Sequence: Synthetic oligonucleotide
  Antisense strand to SEQ ID NO: 1426700
gauuaucugauucguuucc

SEQ ID NO: 1426702 - RNA, 19 nt, Artificial Sequence
  Description of Artificial Sequence: Synthetic oligonucleotide
  Sense strand starting at position 3203 of SEQ ID NO: 1243586
cgaaucagauaaucucuua

SEQ ID NO: 1426703 - RNA, 19 nt, Artificial Sequence
  Description of Artificial Sequence: Synthetic oligonucleotide
  Antisense strand to SEQ ID NO: 1426702
uaagagauuaucugauucg

SEQ ID NO: 1426704 - RNA, 19 nt, Artificial Sequence
  Description of Artificial Sequence: Synthetic oligonucleotide
  Sense strand starting at position 3267 of SEQ ID NO: 1243586
agaggaacguucuagaugu

SEQ ID NO: 1426705 - RNA, 19 nt, Artificial Sequence
  Description of Artificial Sequence: Synthetic oligonucleotide
  Antisense strand to SEQ ID NO: 1426704
acaucuagaacguuccucu

SEQ ID NO: 1426706 - RNA, 19 nt, Artificial Sequence
  Description of Artificial Sequence: Synthetic oligonucleotide
  Sense strand starting at position 3269 of SEQ ID NO: 1243586
aggaacguucuagauguau

SEQ ID NO: 1426707 - RNA, 19 nt, Artificial Sequence
  Description of Artificial Sequence: Synthetic oligonucleotide
  Antisense strand to SEQ ID NO: 1426706
auacaucuagaacguuccu

SEQ ID NO: 1426708 - RNA, 19 nt, Artificial Sequence
  Description of Artificial Sequence: Synthetic oligonucleotide
  Sense strand starting at position 3347 of SEQ ID NO: 1243586
ugugaauucggccgggugu

SEQ ID NO: 1426709 - RNA, 19 nt, Artificial Sequence
  Description of Artificial Sequence: Synthetic oligonucleotide
  Antisense strand to SEQ ID NO: 1426708
acacccggccgaauucaca

SEQ ID NO: 1426710 - RNA, 19 nt, Artificial Sequence
  Description of Artificial Sequence: Synthetic oligonucleotide
  Sense strand starting at position 3407 of SEQ ID NO: 1243586
guguguggaucacuuaaag

SEQ ID NO: 1426711 - RNA, 19 nt, Artificial Sequence
  Description of Artificial Sequence: Synthetic oligonucleotide
  Antisense strand to SEQ ID NO: 1426710
cuuuaagugauccacacac

SEQ ID NO: 1426712 - RNA, 19 nt, Artificial Sequence
  Description of Artificial Sequence: Synthetic oligonucleotide
  Sense strand starting at position 3651 of SEQ ID NO: 1243586
gugaauucaguugggugua

SEQ ID NO: 1426713 - RNA, 19 nt, Artificial Sequence
  Description of Artificial Sequence: Synthetic oligonucleotide
  Antisense strand to SEQ ID NO: 1426712
uacacccaacugaauucac

SEQ ID NO: 1426714 - RNA, 19 nt, Artificial Sequence
  Description of Artificial Sequence: Synthetic oligonucleotide
  Sense strand starting at position 234 of SEQ ID NO: 1243587
cugaaacuguaagauaaag

SEQ ID NO: 1426715 - RNA, 19 nt, Artificial Sequence
  Description of Artificial Sequence: Synthetic oligonucleotide
  Antisense strand to SEQ ID NO: 1426714
cuuuaucuuacaguuucag

SEQ ID NO: 1426716 - RNA, 19 nt, Artificial Sequence
  Description of Artificial Sequence: Synthetic oligonucleotide
  Sense strand starting at position 253 of SEQ ID NO: 1243587
guaauaaagucccuucuga

SEQ ID NO: 1426717 - RNA, 19 nt, Artificial Sequence
  Description of Artificial Sequence: Synthetic oligonucleotide
  Antisense strand to SEQ ID NO: 1426716
ucagaagggacuuuauuac

SEQ ID NO: 1426718 - RNA, 19 nt, Artificial Sequence
  Description of Artificial Sequence: Synthetic oligonucleotide
  Sense strand starting at position 337 of SEQ ID NO: 1243587
augagugucugcguauuua

SEQ ID NO: 1426719 - RNA, 19 nt, Artificial Sequence
  Description of Artificial Sequence: Synthetic oligonucleotide
  Antisense strand to SEQ ID NO: 1426718
uaaauacgcagacacucau

SEQ ID NO: 1426720 - RNA, 19 nt, Artificial Sequence
  Description of Artificial Sequence: Synthetic oligonucleotide
  Sense strand starting at position 341 of SEQ ID NO: 1243587
gugucugcguauuuaaauc

SEQ ID NO: 1426721 - RNA, 19 nt, Artificial Sequence
  Description of Artificial Sequence: Synthetic oligonucleotide
  Antisense strand to SEQ ID NO: 1426720
gauuuaaauacgcagacac

SEQ ID NO: 1426722 - RNA, 19 nt, Artificial Sequence
  Description of Artificial Sequence: Synthetic oligonucleotide
  Sense strand starting at position 759 of SEQ ID NO: 1243587
auagauagcugccugaaca

SEQ ID NO: 1426723 - RNA, 19 nt, Artificial Sequence
  Description of Artificial Sequence: Synthetic oligonucleotide
  Antisense strand to SEQ ID NO: 1426722
uguucaggcagcuaucuau

SEQ ID NO: 1426724 - RNA, 19 nt, Artificial Sequence
  Description of Artificial Sequence: Synthetic oligonucleotide
  Sense strand starting at position 790 of SEQ ID NO: 1243587
acagguaaacggugagauu

SEQ ID NO: 1426725 - RNA, 19 nt, Artificial Sequence
  Description of Artificial Sequence: Synthetic oligonucleotide
  Antisense strand to SEQ ID NO: 1426724
aaucucaccguuuaccugu

SEQ ID NO: 1426726 - RNA, 19 nt, Artificial Sequence
  Description of Artificial Sequence: Synthetic oligonucleotide
  Sense strand starting at position 866 of SEQ ID NO: 1243587
gguuaagaguccucgggaa

SEQ ID NO: 1426727 - RNA, 19 nt, Artificial Sequence
  Description of Artificial Sequence: Synthetic oligonucleotide
  Antisense strand to SEQ ID NO: 1426726
uucccgaggacucuuaacc

SEQ ID NO: 1426728 - RNA, 19 nt, Artificial Sequence
  Description of Artificial Sequence: Synthetic oligonucleotide
  Sense strand starting at position 912 of SEQ ID NO: 1243587
ucugcucucccacagguau

SEQ ID NO: 1426729 - RNA, 19 nt, Artificial Sequence
  Description of Artificial Sequence: Synthetic oligonucleotide
  Antisense strand to SEQ ID NO: 1426728
auaccugugggagagcaga

SEQ ID NO: 1426730 - RNA, 19 nt, Artificial Sequence
  Description of Artificial Sequence: Synthetic oligonucleotide
  Sense strand starting at position 981 of SEQ ID NO: 1243587
agugaaaucucagcuugau

SEQ ID NO: 1426731 - RNA, 19 nt, Artificial Sequence
  Description of Artificial Sequence: Synthetic oligonucleotide
  Antisense strand to SEQ ID NO: 1426730
aucaagcugagauuucacu

SEQ ID NO: 1426732 - RNA, 19 nt, Artificial Sequence
  Description of Artificial Sequence: Synthetic oligonucleotide
  Sense strand starting at position 1034 of SEQ ID NO: 1243587
gcaguucccacggagcaaa

SEQ ID NO: 1426733 - RNA, 19 nt, Artificial Sequence
  Description of Artificial Sequence: Synthetic oligonucleotide
  Antisense strand to SEQ ID NO: 1426732
uuugcuccgugggaacugc

SEQ ID NO: 1426734 - RNA, 19 nt, Artificial Sequence
  Description of Artificial Sequence: Synthetic oligonucleotide
  Sense strand starting at position 1065 of SEQ ID NO: 1243587
gaauccaagugaucuguau

SEQ ID NO: 1426735 - RNA, 19 nt, Artificial Sequence
  Description of Artificial Sequence: Synthetic oligonucleotide
  Antisense strand to SEQ ID NO: 1426734
auacagaucacuuggauuc

SEQ ID NO: 1426736 - RNA, 19 nt, Artificial Sequence
  Description of Artificial Sequence: Synthetic oligonucleotide
  Sense strand starting at position 1072 of SEQ ID NO: 1243587
agugaucuguaucugccaa

SEQ ID NO: 1426737 - RNA, 19 nt, Artificial Sequence
  Description of Artificial Sequence: Synthetic oligonucleotide
  Antisense strand to SEQ ID NO: 1426736
uuggcagauacagaucacu

SEQ ID NO: 1426738 - RNA, 19 nt, Artificial Sequence
  Description of Artificial Sequence: Synthetic oligonucleotide
  Sense strand starting at position 1102 of SEQ ID NO: 1243587
caagaaagcuggucacuua

SEQ ID NO: 1426739 - RNA, 19 nt, Artificial Sequence
  Description of Artificial Sequence: Synthetic oligonucleotide
  Antisense strand to SEQ ID NO: 1426738
uaagugaccagcuuucuug

SEQ ID NO: 1426740 - RNA, 19 nt, Artificial Sequence
  Description of Artificial Sequence: Synthetic oligonucleotide
  Sense strand starting at position 1165 of SEQ ID NO: 1243587
ugucuaaucagccgagaug

SEQ ID NO: 1426741 - RNA, 19 nt, Artificial Sequence
  Description of Artificial Sequence: Synthetic oligonucleotide
  Antisense strand to SEQ ID NO: 1426740
caucucggcugauuagaca

SEQ ID NO: 1426742 - RNA, 19 nt, Artificial Sequence
  Description of Artificial Sequence: Synthetic oligonucleotide
  Sense strand starting at position 1210 of SEQ ID NO: 1243587
ccagguaaauucccaggaa

SEQ ID NO: 1426743 - RNA, 19 nt, Artificial Sequence
  Description of Artificial Sequence: Synthetic oligonucleotide
  Antisense strand to SEQ ID NO: 1426742
uuccugggaauuuaccugg

SEQ ID NO: 1426744 - RNA, 19 nt, Artificial Sequence
  Description of Artificial Sequence: Synthetic oligonucleotide
  Sense strand starting at position 1213 of SEQ ID NO: 1243587
gguaaauucccaggaauua

SEQ ID NO: 1426745 - RNA, 19 nt, Artificial Sequence
  Description of Artificial Sequence: Synthetic oligonucleotide
  Antisense strand to SEQ ID NO: 1426744
uaauuccugggaauuuacc

SEQ ID NO: 1426746 - RNA, 19 nt, Artificial Sequence
  Description of Artificial Sequence: Synthetic oligonucleotide
  Sense strand starting at position 2250 of SEQ ID NO: 1243587
gaccuuccuggacguguaa

SEQ ID NO: 1426747 - RNA, 19 nt, Artificial Sequence
  Description of Artificial Sequence: Synthetic oligonucleotide
  Antisense strand to SEQ ID NO: 1426746
uuacacguccaggaagguc

SEQ ID NO: 1426748 - RNA, 19 nt, Artificial Sequence
  Description of Artificial Sequence: Synthetic oligonucleotide
  Sense strand starting at position 2516 of SEQ ID NO: 1243587
gggaaaucuugagauuucu

SEQ ID NO: 1426749 - RNA, 19 nt, Artificial Sequence
  Description of Artificial Sequence: Synthetic oligonucleotide
  Antisense strand to SEQ ID NO: 1426748
agaaaucucaagauuuccc

SEQ ID NO: 1426750 - RNA, 19 nt, Artificial Sequence
  Description of Artificial Sequence: Synthetic oligonucleotide
  Sense strand starting at position 2552 of SEQ ID NO: 1243587
cugacaugauucucaacug

SEQ ID NO: 1426751 - RNA, 19 nt, Artificial Sequence
  Description of Artificial Sequence: Synthetic oligonucleotide
  Antisense strand to SEQ ID NO: 1426750
caguugagaaucaugucag

SEQ ID NO: 1426752 - RNA, 19 nt, Artificial Sequence
  Description of Artificial Sequence: Synthetic oligonucleotide
  Sense strand starting at position 2617 of SEQ ID NO: 1243587
acuguugucacuugaggga

SEQ ID NO: 1426753 - RNA, 19 nt, Artificial Sequence
  Description of Artificial Sequence: Synthetic oligonucleotide
  Antisense strand to SEQ ID NO: 1426752
ucccucaagugacaacagu

SEQ ID NO: 1426754 - RNA, 19 nt, Artificial Sequence
  Description of Artificial Sequence: Synthetic oligonucleotide
  Sense strand starting at position 2621 of SEQ ID NO: 1243587
uugucacuugagggauguu

SEQ ID NO: 1426755 - RNA, 19 nt, Artificial Sequence
  Description of Artificial Sequence: Synthetic oligonucleotide
  Antisense strand to SEQ ID NO: 1426754
aacaucccucaagugacaa

SEQ ID NO: 1426756 - RNA, 19 nt, Artificial Sequence
  Description of Artificial Sequence: Synthetic oligonucleotide
  Sense strand starting at position 2622 of SEQ ID NO: 1243587
ugucacuugagggauguuu

SEQ ID NO: 1426757 - RNA, 19 nt, Artificial Sequence
  Description of Artificial Sequence: Synthetic oligonucleotide
  Antisense strand to SEQ ID NO: 1426756
aaacaucccucaagugaca

SEQ ID NO: 1426758 - RNA, 19 nt, Artificial Sequence
  Description of Artificial Sequence: Synthetic oligonucleotide
  Sense strand starting at position 2973 of SEQ ID NO: 1243587
acgcacuucuagucaaaca

SEQ ID NO: 1426759 - RNA, 19 nt, Artificial Sequence
  Description of Artificial Sequence: Synthetic oligonucleotide
  Antisense strand to SEQ ID NO: 1426758
uguuugacuagaagugcgu

SEQ ID NO: 1426760 - RNA, 19 nt, Artificial Sequence
  Description of Artificial Sequence: Synthetic oligonucleotide
  Sense strand starting at position 3273 of SEQ ID NO: 1243587
gguuguugugccaguuaag

SEQ ID NO: 1426761 - RNA, 19 nt, Artificial Sequence
  Description of Artificial Sequence: Synthetic oligonucleotide
  Antisense strand to SEQ ID NO: 1426760
cuuaacuggcacaacaacc

SEQ ID NO: 1426762 - RNA, 19 nt, Artificial Sequence
  Description of Artificial Sequence: Synthetic oligonucleotide
  Sense strand starting at position 3274 of SEQ ID NO: 1243587
guuguugugccaguuaagu

SEQ ID NO: 1426763 - RNA, 19 nt, Artificial Sequence
  Description of Artificial Sequence: Synthetic oligonucleotide
  Antisense strand to SEQ ID NO: 1426762
acuuaacuggcacaacaac

SEQ ID NO: 1426764 - RNA, 19 nt, Artificial Sequence
  Description of Artificial Sequence: Synthetic oligonucleotide
  Sense strand starting at position 3330 of SEQ ID NO: 1243587
gugauuacuggcugcacaa

SEQ ID NO: 1426765 - RNA, 19 nt, Artificial Sequence
  Description of Artificial Sequence: Synthetic oligonucleotide
  Antisense strand to SEQ ID NO: 1426764
uugugcagccaguaaucac

SEQ ID NO: 1426766 - RNA, 19 nt, Artificial Sequence
  Description of Artificial Sequence: Synthetic oligonucleotide
  Sense strand starting at position 3377 of SEQ ID NO: 1243587
ugcugauaaagugacaagu

SEQ ID NO: 1426767 - RNA, 19 nt, Artificial Sequence
  Description of Artificial Sequence: Synthetic oligonucleotide
  Antisense strand to SEQ ID NO: 1426766
acuugucacuuuaucagca

SEQ ID NO: 1426768 - RNA, 19 nt, Artificial Sequence
  Description of Artificial Sequence: Synthetic oligonucleotide
  Sense strand starting at position 3387 of SEQ ID NO: 1243587
gugacaaguccugguauuu

SEQ ID NO: 1426769 - RNA, 19 nt, Artificial Sequence
  Description of Artificial Sequence: Synthetic oligonucleotide
  Antisense strand to SEQ ID NO: 1426768
aaauaccaggacuugucac

SEQ ID NO: 1426770 - RNA, 19 nt, Artificial Sequence
  Description of Artificial Sequence: Synthetic oligonucleotide
  Sense strand starting at position 3392 of SEQ ID NO: 1243587
aaguccugguauuugcaua

SEQ ID NO: 1426771 - RNA, 19 nt, Artificial Sequence
  Description of Artificial Sequence: Synthetic oligonucleotide
  Antisense strand to SEQ ID NO: 1426770
uaugcaaauaccaggacuu

SEQ ID NO: 1426772 - RNA, 19 nt, Artificial Sequence
  Description of Artificial Sequence: Synthetic oligonucleotide
  Sense strand starting at position 3753 of SEQ ID NO: 1243587
aguaauucuugaucaguuu

SEQ ID NO: 1426773 - RNA, 19 nt, Artificial Sequence
  Description of Artificial Sequence: Synthetic oligonucleotide
  Antisense strand to SEQ ID NO: 1426772
aaacugaucaagaauuacu

SEQ ID NO: 1426774 - RNA, 19 nt, Artificial Sequence
  Description of Artificial Sequence: Synthetic oligonucleotide
  Sense strand starting at position 3756 of SEQ ID NO: 1243587
aauucuugaucaguuugga

SEQ ID NO: 1426775 - RNA, 19 nt, Artificial Sequence
  Description of Artificial Sequence: Synthetic oligonucleotide
  Antisense strand to SEQ ID NO: 1426774
uccaaacugaucaagaauu

SEQ ID NO: 1426776 - RNA, 19 nt, Artificial Sequence
  Description of Artificial Sequence: Synthetic oligonucleotide
  Sense strand starting at position 3764 of SEQ ID NO: 1243587
aucaguuuggacugaggga

SEQ ID NO: 1426777 - RNA, 19 nt, Artificial Sequence
  Description of Artificial Sequence: Synthetic oligonucleotide
  Antisense strand to SEQ ID NO: 1426776
ucccucaguccaaacugau

SEQ ID NO: 1426778 - RNA, 19 nt, Artificial Sequence
  Description of Artificial Sequence: Synthetic oligonucleotide
  Sense strand starting at position 3779 of SEQ ID NO: 1243587
gggauacaaguauggcuuu

SEQ ID NO: 1426779 - RNA, 19 nt, Artificial Sequence
  Description of Artificial Sequence: Synthetic oligonucleotide
  Antisense strand to SEQ ID NO: 1426778
aaagccauacuuguauccc

SEQ ID NO: 1426780 - RNA, 19 nt, Artificial Sequence
  Description of Artificial Sequence: Synthetic oligonucleotide
  Sense strand starting at position 3782 of SEQ ID NO: 1243587
auacaaguauggcuuuauu

SEQ ID NO: 1426781 - RNA, 19 nt, Artificial Sequence
  Description of Artificial Sequence: Synthetic oligonucleotide
  Antisense strand to SEQ ID NO: 1426780
aauaaagccauacuuguau

SEQ ID NO: 1426782 - RNA, 19 nt, Artificial Sequence
  Description of Artificial Sequence: Synthetic oligonucleotide
  Sense strand starting at position 3785 of SEQ ID NO: 1243587
caaguauggcuuuauuaug

SEQ ID NO: 1426783 - RNA, 19 nt, Artificial Sequence
  Description of Artificial Sequence: Synthetic oligonucleotide
  Antisense strand to SEQ ID NO: 1426782
cauaauaaagccauacuug

SEQ ID NO: 1426784 - RNA, 19 nt, Artificial Sequence
  Description of Artificial Sequence: Synthetic oligonucleotide
  Sense strand starting at position 3807 of SEQ ID NO: 1243587
cuuuaaagcugacuuaguu

SEQ ID NO: 1426785 - RNA, 19 nt, Artificial Sequence
  Description of Artificial Sequence: Synthetic oligonucleotide
  Antisense strand to SEQ ID NO: 1426784
aacuaagucagcuuuaaag

SEQ ID NO: 1426786 - RNA, 19 nt, Artificial Sequence
  Description of Artificial Sequence: Synthetic oligonucleotide
  Sense strand starting at position 3844 of SEQ ID NO: 1243587
guagcaaacagguaaaguu

SEQ ID NO: 1426787 - RNA, 19 nt, Artificial Sequence
  Description of Artificial Sequence: Synthetic oligonucleotide
  Antisense strand to SEQ ID NO: 1426786
aacuuuaccuguuugcuac

SEQ ID NO: 1426788 - RNA, 19 nt, Artificial Sequence
  Description of Artificial Sequence: Synthetic oligonucleotide
  Sense strand starting at position 3857 of SEQ ID NO: 1243587
aaaguuugccuccagugaa

SEQ ID NO: 1426789 - RNA, 19 nt, Artificial Sequence
  Description of Artificial Sequence: Synthetic oligonucleotide
  Antisense strand to SEQ ID NO: 1426788
uucacuggaggcaaacuuu

SEQ ID NO: 1426790 - RNA, 19 nt, Artificial Sequence
  Description of Artificial Sequence: Synthetic oligonucleotide
  Sense strand starting at position 3872 of SEQ ID NO: 1243587
ugaaauuucuuggaugcau

SEQ ID NO: 1426791 - RNA, 19 nt, Artificial Sequence
  Description of Artificial Sequence: Synthetic oligonucleotide
  Antisense strand to SEQ ID NO: 1426790
augcauccaagaaauuuca

SEQ ID NO: 1426792 - RNA, 19 nt, Artificial Sequence
  Description of Artificial Sequence: Synthetic oligonucleotide
  Sense strand starting at position 3899 of SEQ ID NO: 1243587
uguaauguugggcagcuua

SEQ ID NO: 1426793 - RNA, 19 nt, Artificial Sequence
  Description of Artificial Sequence: Synthetic oligonucleotide
  Antisense strand to SEQ ID NO: 1426792
uaagcugcccaacauuaca

SEQ ID NO: 1426794 - RNA, 19 nt, Artificial Sequence
  Description of Artificial Sequence: Synthetic oligonucleotide
  Sense strand starting at position 48 of SEQ ID NO: 1243588
ggaagcagugaaugaauau

SEQ ID NO: 1426795 - RNA, 19 nt, Artificial Sequence
  Description of Artificial Sequence: Synthetic oligonucleotide
  Antisense strand to SEQ ID NO: 1426794
auauucauucacugcuucc

SEQ ID NO: 1426796 - RNA, 19 nt, Artificial Sequence
  Description of Artificial Sequence: Synthetic oligonucleotide
  Sense strand starting at position 55 of SEQ ID NO: 1243588
gugaaugaauaucacacuu

SEQ ID NO: 1426797 - RNA, 19 nt, Artificial Sequence
  Description of Artificial Sequence: Synthetic oligonucleotide
  Antisense strand to SEQ ID NO: 1426796
aagugugauauucauucac

SEQ ID NO: 1426798 - RNA, 19 nt, Artificial Sequence
  Description of Artificial Sequence: Synthetic oligonucleotide
  Sense strand starting at position 75 of SEQ ID NO: 1243588
ggauuuccuauaugugugu

SEQ ID NO: 1426799 - RNA, 19 nt, Artificial Sequence
  Description of Artificial Sequence: Synthetic oligonucleotide
  Antisense strand to SEQ ID NO: 1426798
acacacauauaggaaaucc

SEQ ID NO: 1426800 - RNA, 19 nt, Artificial Sequence
  Description of Artificial Sequence: Synthetic oligonucleotide
  Sense strand starting at position 883 of SEQ ID NO: 1243588
cugaaacuguaagauaaag

SEQ ID NO: 1426801 - RNA, 19 nt, Artificial Sequence
  Description of Artificial Sequence: Synthetic oligonucleotide
  Antisense strand to SEQ ID NO: 1426800
cuuuaucuuacaguuucag

SEQ ID NO: 1426802 - RNA, 19 nt, Artificial Sequence
  Description of Artificial Sequence: Synthetic oligonucleotide
  Sense strand starting at position 902 of SEQ ID NO: 1243588
guaauaaagucccuucuga

SEQ ID NO: 1426803 - RNA, 19 nt, Artificial Sequence
  Description of Artificial Sequence: Synthetic oligonucleotide
  Antisense strand to SEQ ID NO: 1426802
ucagaagggacuuuauuac

SEQ ID NO: 1426804 - RNA, 19 nt, Artificial Sequence
  Description of Artificial Sequence: Synthetic oligonucleotide
  Sense strand starting at position 982 of SEQ ID NO: 1243588
agagaugagugucugcgua

SEQ ID NO: 1426805 - RNA, 19 nt, Artificial Sequence
  Description of Artificial Sequence: Synthetic oligonucleotide
  Antisense strand to SEQ ID NO: 1426804
uacgcagacacucaucucu

SEQ ID NO: 1426806 - RNA, 19 nt, Artificial Sequence
  Description of Artificial Sequence: Synthetic oligonucleotide
  Sense strand starting at position 986 of SEQ ID NO: 1243588
augagugucugcguauuua

SEQ ID NO: 1426807 - RNA, 19 nt, Artificial Sequence
  Description of Artificial Sequence: Synthetic oligonucleotide
  Antisense strand to SEQ ID NO: 1426806
uaaauacgcagacacucau

SEQ ID NO: 1426808 - RNA, 19 nt, Artificial Sequence
  Description of Artificial Sequence: Synthetic oligonucleotide
  Sense strand starting at position 990 of SEQ ID NO: 1243588
gugucugcguauuuaaauc

SEQ ID NO: 1426809 - RNA, 19 nt, Artificial Sequence
  Description of Artificial Sequence: Synthetic oligonucleotide
  Antisense strand to SEQ ID NO: 1426808
gauuuaaauacgcagacac

SEQ ID NO: 1426810 - RNA, 19 nt, Artificial Sequence
  Description of Artificial Sequence: Synthetic oligonucleotide
  Sense strand starting at position 1408 of SEQ ID NO: 1243588
auagauagcugccugaaca

SEQ ID NO: 1426811 - RNA, 19 nt, Artificial Sequence
  Description of Artificial Sequence: Synthetic oligonucleotide
  Antisense strand to SEQ ID NO: 1426810
uguucaggcagcuaucuau

SEQ ID NO: 1426812 - RNA, 19 nt, Artificial Sequence
  Description of Artificial Sequence: Synthetic oligonucleotide
  Sense strand starting at position 1439 of SEQ ID NO: 1243588
acagguaaacggugagauu

SEQ ID NO: 1426813 - RNA, 19 nt, Artificial Sequence
  Description of Artificial Sequence: Synthetic oligonucleotide
  Antisense strand to SEQ ID NO: 1426812
aaucucaccguuuaccugu

SEQ ID NO: 1426814 - RNA, 19 nt, Artificial Sequence
  Description of Artificial Sequence: Synthetic oligonucleotide
  Sense strand starting at position 1515 of SEQ ID NO: 1243588
gguuaagaguccucgggaa

SEQ ID NO: 1426815 - RNA, 19 nt, Artificial Sequence
  Description of Artificial Sequence: Synthetic oligonucleotide
  Antisense strand to SEQ ID NO: 1426814
uucccgaggacucuuaacc

SEQ ID NO: 1426816 - RNA, 19 nt, Artificial Sequence
  Description of Artificial Sequence: Synthetic oligonucleotide
  Sense strand starting at position 1561 of SEQ ID NO: 1243588
ucugcucucccacagguau

SEQ ID NO: 1426817 - RNA, 19 nt, Artificial Sequence
  Description of Artificial Sequence: Synthetic oligonucleotide
  Antisense strand to SEQ ID NO: 1426816
auaccugugggagagcaga

SEQ ID NO: 1426818 - RNA, 19 nt, Artificial Sequence
  Description of Artificial Sequence: Synthetic oligonucleotide
  Sense strand starting at position 1630 of SEQ ID NO: 1243588
agugaaaucucagcuugau

SEQ ID NO: 1426819 - RNA, 19 nt, Artificial Sequence
  Description of Artificial Sequence: Synthetic oligonucleotide
  Antisense strand to SEQ ID NO: 1426818
aucaagcugagauuucacu

SEQ ID NO: 1426820 - RNA, 19 nt, Artificial Sequence
  Description of Artificial Sequence: Synthetic oligonucleotide
  Sense strand starting at position 1683 of SEQ ID NO: 1243588
gcaguucccacggagcaaa

SEQ ID NO: 1426821 - RNA, 19 nt, Artificial Sequence
  Description of Artificial Sequence: Synthetic oligonucleotide
  Antisense strand to SEQ ID NO: 1426820
uuugcuccgugggaacugc

SEQ ID NO: 1426822 - RNA, 19 nt, Artificial Sequence
  Description of Artificial Sequence: Synthetic oligonucleotide
  Sense strand starting at position 1714 of SEQ ID NO: 1243588
gaauccaagugaucuguau

SEQ ID NO: 1426823 - RNA, 19 nt, Artificial Sequence
  Description of Artificial Sequence: Synthetic oligonucleotide
  Antisense strand to SEQ ID NO: 1426822
auacagaucacuuggauuc

SEQ ID NO: 1426824 - RNA, 19 nt, Artificial Sequence
  Description of Artificial Sequence: Synthetic oligonucleotide
  Sense strand starting at position 1721 of SEQ ID NO: 1243588
agugaucuguaucugccaa

SEQ ID NO: 1426825 - RNA, 19 nt, Artificial Sequence
  Description of Artificial Sequence: Synthetic oligonucleotide
  Antisense strand to SEQ ID NO: 1426824
uuggcagauacagaucacu

SEQ ID NO: 1426826 - RNA, 19 nt, Artificial Sequence
  Description of Artificial Sequence: Synthetic oligonucleotide
  Sense strand starting at position 1751 of SEQ ID NO: 1243588
caagaaagcuggucacuua

SEQ ID NO: 1426827 - RNA, 19 nt, Artificial Sequence
  Description of Artificial Sequence: Synthetic oligonucleotide
  Antisense strand to SEQ ID NO: 1426826
uaagugaccagcuuucuug

SEQ ID NO: 1426828 - RNA, 19 nt, Artificial Sequence
  Description of Artificial Sequence: Synthetic oligonucleotide
  Sense strand starting at position 1812 of SEQ ID NO: 1243588
cgugucuaaucagccgaga

SEQ ID NO: 1426829 - RNA, 19 nt, Artificial Sequence
  Description of Artificial Sequence: Synthetic oligonucleotide
  Antisense strand to SEQ ID NO: 1426828
ucucggcugauuagacacg

SEQ ID NO: 1426830 - RNA, 19 nt, Artificial Sequence
  Description of Artificial Sequence: Synthetic oligonucleotide
  Sense strand starting at position 1814 of SEQ ID NO: 1243588
ugucuaaucagccgagaug

SEQ ID NO: 1426831 - RNA, 19 nt, Artificial Sequence
  Description of Artificial Sequence: Synthetic oligonucleotide
  Antisense strand to SEQ ID NO: 1426830
caucucggcugauuagaca

SEQ ID NO: 1426832 - RNA, 19 nt, Artificial Sequence
  Description of Artificial Sequence: Synthetic oligonucleotide
  Sense strand starting at position 1859 of SEQ ID NO: 1243588
ccagguaaauucccaggaa

SEQ ID NO: 1426833 - RNA, 19 nt, Artificial Sequence
  Description of Artificial Sequence: Synthetic oligonucleotide
  Antisense strand to SEQ ID NO: 1426832
uuccugggaauuuaccugg

SEQ ID NO: 1426834 - RNA, 19 nt, Artificial Sequence
  Description of Artificial Sequence: Synthetic oligonucleotide
  Sense strand starting at position 1860 of SEQ ID NO: 1243588
cagguaaauucccaggaau

SEQ ID NO: 1426835 - RNA, 19 nt, Artificial Sequence
  Description of Artificial Sequence: Synthetic oligonucleotide
  Antisense strand to SEQ ID NO: 1426834
auuccugggaauuuaccug

SEQ ID NO: 1426836 - RNA, 19 nt, Artificial Sequence
  Description of Artificial Sequence: Synthetic oligonucleotide
  Sense strand starting at position 1862 of SEQ ID NO: 1243588
gguaaauucccaggaauua

SEQ ID NO: 1426837 - RNA, 19 nt, Artificial Sequence
  Description of Artificial Sequence: Synthetic oligonucleotide
  Antisense strand to SEQ ID NO: 1426836
uaauuccugggaauuuacc

SEQ ID NO: 1426838 - RNA, 19 nt, Artificial Sequence
  Description of Artificial Sequence: Synthetic oligonucleotide
  Sense strand starting at position 2899 of SEQ ID NO: 1243588
gaccuuccuggacguguaa

SEQ ID NO: 1426839 - RNA, 19 nt, Artificial Sequence
  Description of Artificial Sequence: Synthetic oligonucleotide
  Antisense strand to SEQ ID NO: 1426838
uuacacguccaggaagguc

SEQ ID NO: 1426840 - RNA, 19 nt, Artificial Sequence
  Description of Artificial Sequence: Synthetic oligonucleotide
  Sense strand starting at position 3165 of SEQ ID NO: 1243588
gggaaaucuugagauuucu

SEQ ID NO: 1426841 - RNA, 19 nt, Artificial Sequence
  Description of Artificial Sequence: Synthetic oligonucleotide
  Antisense strand to SEQ ID NO: 1426840
agaaaucucaagauuuccc

SEQ ID NO: 1426842 - RNA, 19 nt, Artificial Sequence
  Description of Artificial Sequence: Synthetic oligonucleotide
  Sense strand starting at position 3201 of SEQ ID NO: 1243588
cugacaugauucucaacug

SEQ ID NO: 1426843 - RNA, 19 nt, Artificial Sequence
  Description of Artificial Sequence: Synthetic oligonucleotide
  Antisense strand to SEQ ID NO: 1426842
caguugagaaucaugucag

SEQ ID NO: 1426844 - RNA, 19 nt, Artificial Sequence
  Description of Artificial Sequence: Synthetic oligonucleotide
  Sense strand starting at position 3202 of SEQ ID NO: 1243588
ugacaugauucucaacuga

SEQ ID NO: 1426845 - RNA, 19 nt, Artificial Sequence
  Description of Artificial Sequence: Synthetic oligonucleotide
  Antisense strand to SEQ ID NO: 1426844
ucaguugagaaucauguca

SEQ ID NO: 1426846 - RNA, 19 nt, Artificial Sequence
  Description of Artificial Sequence: Synthetic oligonucleotide
  Sense strand starting at position 3266 of SEQ ID NO: 1243588
acuguugucacuugaggga

SEQ ID NO: 1426847 - RNA, 19 nt, Artificial Sequence
  Description of Artificial Sequence: Synthetic oligonucleotide
  Antisense strand to SEQ ID NO: 1426846
ucccucaagugacaacagu

SEQ ID NO: 1426848 - RNA, 19 nt, Artificial Sequence
  Description of Artificial Sequence: Synthetic oligonucleotide
  Sense strand starting at position 3270 of SEQ ID NO: 1243588
uugucacuugagggauguu

SEQ ID NO: 1426849 - RNA, 19 nt, Artificial Sequence
  Description of Artificial Sequence: Synthetic oligonucleotide
  Antisense strand to SEQ ID NO: 1426848
aacaucccucaagugacaa

SEQ ID NO: 1426850 - RNA, 19 nt, Artificial Sequence
  Description of Artificial Sequence: Synthetic oligonucleotide
  Sense strand starting at position 3271 of SEQ ID NO: 1243588
ugucacuugagggauguuu

SEQ ID NO: 1426851 - RNA, 19 nt, Artificial Sequence
  Description of Artificial Sequence: Synthetic oligonucleotide
  Antisense strand to SEQ ID NO: 1426850
aaacaucccucaagugaca

SEQ ID NO: 1426852 - RNA, 19 nt, Artificial Sequence
  Description of Artificial Sequence: Synthetic oligonucleotide
  Sense strand starting at position 3622 of SEQ ID NO: 1243588
acgcacuucuagucaaaca

SEQ ID NO: 1426853 - RNA, 19 nt, Artificial Sequence
  Description of Artificial Sequence: Synthetic oligonucleotide
  Antisense strand to SEQ ID NO: 1426852
uguuugacuagaagugcgu

SEQ ID NO: 1426854 - RNA, 19 nt, Artificial Sequence
  Description of Artificial Sequence: Synthetic oligonucleotide
  Sense strand starting at position 3769 of SEQ ID NO: 1243588
gagaucugguauuagaaga

SEQ ID NO: 1426855 - RNA, 19 nt, Artificial Sequence
  Description of Artificial Sequence: Synthetic oligonucleotide
  Antisense strand to SEQ ID NO: 1426854
ucuucuaauaccagaucuc

SEQ ID NO: 1426856 - RNA, 19 nt, Artificial Sequence
  Description of Artificial Sequence: Synthetic oligonucleotide
  Sense strand starting at position 3821 of SEQ ID NO: 1243588
gccuguugacuuugggcaa

SEQ ID NO: 1426857 - RNA, 19 nt, Artificial Sequence
  Description of Artificial Sequence: Synthetic oligonucleotide
  Antisense strand to SEQ ID NO: 1426856
uugcccaaagucaacaggc

SEQ ID NO: 1426858 - RNA, 19 nt, Artificial Sequence
  Description of Artificial Sequence: Synthetic oligonucleotide
  Sense strand starting at position 3857 of SEQ ID NO: 1243588
agccucugcuuccuaagau

SEQ ID NO: 1426859 - RNA, 19 nt, Artificial Sequence
  Description of Artificial Sequence: Synthetic oligonucleotide
  Antisense strand to SEQ ID NO: 1426858
aucuuaggaagcagaggcu

SEQ ID NO: 1426860 - RNA, 19 nt, Artificial Sequence
  Description of Artificial Sequence: Synthetic oligonucleotide
  Sense strand starting at position 3893 of SEQ ID NO: 1243588
gcaauaauuccuggccuuu

SEQ ID NO: 1426861 - RNA, 19 nt, Artificial Sequence
  Description of Artificial Sequence: Synthetic oligonucleotide
  Antisense strand to SEQ ID NO: 1426860
aaaggccaggaauuauugc

SEQ ID NO: 1426862 - RNA, 19 nt, Artificial Sequence
  Description of Artificial Sequence: Synthetic oligonucleotide
  Sense strand starting at position 3906 of SEQ ID NO: 1243588
gccuuuacucuccgagggu

SEQ ID NO: 1426863 - RNA, 19 nt, Artificial Sequence
  Description of Artificial Sequence: Synthetic oligonucleotide
  Antisense strand to SEQ ID NO: 1426862
acccucggagaguaaaggc

SEQ ID NO: 1426864 - RNA, 19 nt, Artificial Sequence
  Description of Artificial Sequence: Synthetic oligonucleotide
  Sense strand starting at position 3922 of SEQ ID NO: 1243588
gguuguugugccaguuaag

SEQ ID NO: 1426865 - RNA, 19 nt, Artificial Sequence
  Description of Artificial Sequence: Synthetic oligonucleotide
  Antisense strand to SEQ ID NO: 1426864
cuuaacuggcacaacaacc

SEQ ID NO: 1426866 - RNA, 19 nt, Artificial Sequence
  Description of Artificial Sequence: Synthetic oligonucleotide
  Sense strand starting at position 3923 of SEQ ID NO: 1243588
guuguugugccaguuaagu

SEQ ID NO: 1426867 - RNA, 19 nt, Artificial Sequence
  Description of Artificial Sequence: Synthetic oligonucleotide
  Antisense strand to SEQ ID NO: 1426866
acuuaacuggcacaacaac

SEQ ID NO: 1426868 - RNA, 19 nt, Artificial Sequence
  Description of Artificial Sequence: Synthetic oligonucleotide
  Sense strand starting at position 3925 of SEQ ID NO: 1243588
uguugugccaguuaaguaa

SEQ ID NO: 1426869 - RNA, 19 nt, Artificial Sequence
  Description of Artificial Sequence: Synthetic oligonucleotide
  Antisense strand to SEQ ID NO: 1426868
uuacuuaacuggcacaaca

SEQ ID NO: 1426870 - RNA, 19 nt, Artificial Sequence
  Description of Artificial Sequence: Synthetic oligonucleotide
  Sense strand starting at position 3978 of SEQ ID NO: 1243588
cgugauuacuggcugcaca

SEQ ID NO: 1426871 - RNA, 19 nt, Artificial Sequence
  Description of Artificial Sequence: Synthetic oligonucleotide
  Antisense strand to SEQ ID NO: 1426870
ugugcagccaguaaucacg

SEQ ID NO: 1426872 - RNA, 19 nt, Artificial Sequence
  Description of Artificial Sequence: Synthetic oligonucleotide
  Sense strand starting at position 3979 of SEQ ID NO: 1243588
gugauuacuggcugcacaa

SEQ ID NO: 1426873 - RNA, 19 nt, Artificial Sequence
  Description of Artificial Sequence: Synthetic oligonucleotide
  Antisense strand to SEQ ID NO: 1426872
uugugcagccaguaaucac

SEQ ID NO: 1426874 - RNA, 19 nt, Artificial Sequence
  Description of Artificial Sequence: Synthetic oligonucleotide
  Sense strand starting at position 35 of SEQ ID NO: 1243589
ccucucuuccaauggauga

SEQ ID NO: 1426875 - RNA, 19 nt, Artificial Sequence
  Description of Artificial Sequence: Synthetic oligonucleotide
  Antisense strand to SEQ ID NO: 1426874
ucauccauuggaagagagg

SEQ ID NO: 1426876 - RNA, 19 nt, Artificial Sequence
  Description of Artificial Sequence: Synthetic oligonucleotide
  Sense strand starting at position 142 of SEQ ID NO: 1243589
augaguaacucacagggau

SEQ ID NO: 1426877 - RNA, 19 nt, Artificial Sequence
  Description of Artificial Sequence: Synthetic oligonucleotide
  Antisense strand to SEQ ID NO: 1426876
aucccugugaguuacucau

SEQ ID NO: 1426878 - RNA, 19 nt, Artificial Sequence
  Description of Artificial Sequence: Synthetic oligonucleotide
  Sense strand starting at position 165 of SEQ ID NO: 1243589
gguugagauugcucccuac

SEQ ID NO: 1426879 - RNA, 19 nt, Artificial Sequence
  Description of Artificial Sequence: Synthetic oligonucleotide
  Antisense strand to SEQ ID NO: 1426878
guagggagcaaucucaacc

SEQ ID NO: 1426880 - RNA, 19 nt, Artificial Sequence
  Description of Artificial Sequence: Synthetic oligonucleotide
  Sense strand starting at position 168 of SEQ ID NO: 1243589
ugagauugcucccuacuga

SEQ ID NO: 1426881 - RNA, 19 nt, Artificial Sequence
  Description of Artificial Sequence: Synthetic oligonucleotide
  Antisense strand to SEQ ID NO: 1426880
ucaguagggagcaaucuca

SEQ ID NO: 1426882 - RNA, 19 nt, Artificial Sequence
  Description of Artificial Sequence: Synthetic oligonucleotide
  Sense strand starting at position 259 of SEQ ID NO: 1243589
cagugcuagcugcacauua

SEQ ID NO: 1426883 - RNA, 19 nt, Artificial Sequence
  Description of Artificial Sequence: Synthetic oligonucleotide
  Antisense strand to SEQ ID NO: 1426882
uaaugugcagcuagcacug

SEQ ID NO: 1426884 - RNA, 19 nt, Artificial Sequence
  Description of Artificial Sequence: Synthetic oligonucleotide
  Sense strand starting at position 275 of SEQ ID NO: 1243589
uuaggauuaccugggagcu

SEQ ID NO: 1426885 - RNA, 19 nt, Artificial Sequence
  Description of Artificial Sequence: Synthetic oligonucleotide
  Antisense strand to SEQ ID NO: 1426884
agcucccagguaauccuaa

SEQ ID NO: 1426886 - RNA, 19 nt, Artificial Sequence
  Description of Artificial Sequence: Synthetic oligonucleotide
  Sense strand starting at position 276 of SEQ ID NO: 1243589
uaggauuaccugggagcuu

SEQ ID NO: 1426887 - RNA, 19 nt, Artificial Sequence
  Description of Artificial Sequence: Synthetic oligonucleotide
  Antisense strand to SEQ ID NO: 1426886
aagcucccagguaauccua

SEQ ID NO: 1426888 - RNA, 19 nt, Artificial Sequence
  Description of Artificial Sequence: Synthetic oligonucleotide
  Sense strand starting at position 360 of SEQ ID NO: 1243589
uagcuaaaugguuaucugu

SEQ ID NO: 1426889 - RNA, 19 nt, Artificial Sequence
  Description of Artificial Sequence: Synthetic oligonucleotide
  Antisense strand to SEQ ID NO: 1426888
acagauaaccauuuagcua

SEQ ID NO: 1426890 - RNA, 19 nt, Artificial Sequence
  Description of Artificial Sequence: Synthetic oligonucleotide
  Sense strand starting at position 362 of SEQ ID NO: 1243589
gcuaaaugguuaucuguuu

SEQ ID NO: 1426891 - RNA, 19 nt, Artificial Sequence
  Description of Artificial Sequence: Synthetic oligonucleotide
  Antisense strand to SEQ ID NO: 1426890
aaacagauaaccauuuagc

SEQ ID NO: 1426892 - RNA, 19 nt, Artificial Sequence
  Description of Artificial Sequence: Synthetic oligonucleotide
  Sense strand starting at position 363 of SEQ ID NO: 1243589
cuaaaugguuaucuguuua

SEQ ID NO: 1426893 - RNA, 19 nt, Artificial Sequence
  Description of Artificial Sequence: Synthetic oligonucleotide
  Antisense strand to SEQ ID NO: 1426892
uaaacagauaaccauuuag

SEQ ID NO: 1426894 - RNA, 19 nt, Artificial Sequence
  Description of Artificial Sequence: Synthetic oligonucleotide
  Sense strand starting at position 367 of SEQ ID NO: 1243589
augguuaucuguuuauccu

SEQ ID NO: 1426895 - RNA, 19 nt, Artificial Sequence
  Description of Artificial Sequence: Synthetic oligonucleotide
  Antisense strand to SEQ ID NO: 1426894
aggauaaacagauaaccau

SEQ ID NO: 1426896 - RNA, 19 nt, Artificial Sequence
  Description of Artificial Sequence: Synthetic oligonucleotide
  Sense strand starting at position 373 of SEQ ID NO: 1243589
aucuguuuauccucaguua

SEQ ID NO: 1426897 - RNA, 19 nt, Artificial Sequence
  Description of Artificial Sequence: Synthetic oligonucleotide
  Antisense strand to SEQ ID NO: 1426896
uaacugaggauaaacagau

SEQ ID NO: 1426898 - RNA, 19 nt, Artificial Sequence
  Description of Artificial Sequence: Synthetic oligonucleotide
  Sense strand starting at position 427 of SEQ ID NO: 1243589
gaguaaugggcacaccgua

SEQ ID NO: 1426899 - RNA, 19 nt, Artificial Sequence
  Description of Artificial Sequence: Synthetic oligonucleotide
  Antisense strand to SEQ ID NO: 1426898
uacggugugcccauuacuc

SEQ ID NO: 1426900 - RNA, 19 nt, Artificial Sequence
  Description of Artificial Sequence: Synthetic oligonucleotide
  Sense strand starting at position 442 of SEQ ID NO: 1243589
cguacaguauuauuauuga

SEQ ID NO: 1426901 - RNA, 19 nt, Artificial Sequence
  Description of Artificial Sequence: Synthetic oligonucleotide
  Antisense strand to SEQ ID NO: 1426900
ucaauaauaauacuguacg

SEQ ID NO: 1426902 - RNA, 19 nt, Artificial Sequence
  Description of Artificial Sequence: Synthetic oligonucleotide
  Sense strand starting at position 464 of SEQ ID NO: 1243589
uuauuaguauuagagacag

SEQ ID NO: 1426903 - RNA, 19 nt, Artificial Sequence
  Description of Artificial Sequence: Synthetic oligonucleotide
  Antisense strand to SEQ ID NO: 1426902
cugucucuaauacuaauaa

SEQ ID NO: 1426904 - RNA, 19 nt, Artificial Sequence
  Description of Artificial Sequence: Synthetic oligonucleotide
  Sense strand starting at position 861 of SEQ ID NO: 1243589
acccucucagcuuaagagu

SEQ ID NO: 1426905 - RNA, 19 nt, Artificial Sequence
  Description of Artificial Sequence: Synthetic oligonucleotide
  Antisense strand to SEQ ID NO: 1426904
acucuuaagcugagagggu

SEQ ID NO: 1426906 - RNA, 19 nt, Artificial Sequence
  Description of Artificial Sequence: Synthetic oligonucleotide
  Sense strand starting at position 870 of SEQ ID NO: 1243589
gcuuaagaguaucugcuaa

SEQ ID NO: 1426907 - RNA, 19 nt, Artificial Sequence
  Description of Artificial Sequence: Synthetic oligonucleotide
  Antisense strand to SEQ ID NO: 1426906
uuagcagauacucuuaagc

SEQ ID NO: 1426908 - RNA, 19 nt, Artificial Sequence
  Description of Artificial Sequence: Synthetic oligonucleotide
  Sense strand starting at position 872 of SEQ ID NO: 1243589
uuaagaguaucugcuaagu

SEQ ID NO: 1426909 - RNA, 19 nt, Artificial Sequence
  Description of Artificial Sequence: Synthetic oligonucleotide
  Antisense strand to SEQ ID NO: 1426908
acuuagcagauacucuuaa

SEQ ID NO: 1426910 - RNA, 19 nt, Artificial Sequence
  Description of Artificial Sequence: Synthetic oligonucleotide
  Sense strand starting at position 1048 of SEQ ID NO: 1243589
gccggagaaucgcugggaa

SEQ ID NO: 1426911 - RNA, 19 nt, Artificial Sequence
  Description of Artificial Sequence: Synthetic oligonucleotide
  Antisense strand to SEQ ID NO: 1426910
uucccagcgauucuccggc

SEQ ID NO: 1426912 - RNA, 19 nt, Artificial Sequence
  Description of Artificial Sequence: Synthetic oligonucleotide
  Sense strand starting at position 1050 of SEQ ID NO: 1243589
cggagaaucgcugggaaac

SEQ ID NO: 1426913 - RNA, 19 nt, Artificial Sequence
  Description of Artificial Sequence: Synthetic oligonucleotide
  Antisense strand to SEQ ID NO: 1426912
guuucccagcgauucuccg

SEQ ID NO: 1426914 - RNA, 19 nt, Artificial Sequence
  Description of Artificial Sequence: Synthetic oligonucleotide
  Sense strand starting at position 2522 of SEQ ID NO: 1243589
gaugcuuaagugggaggau

SEQ ID NO: 1426915 - RNA, 19 nt, Artificial Sequence
  Description of Artificial Sequence: Synthetic oligonucleotide
  Antisense strand to SEQ ID NO: 1426914
auccucccacuuaagcauc

SEQ ID NO: 1426916 - RNA, 19 nt, Artificial Sequence
  Description of Artificial Sequence: Synthetic oligonucleotide
  Sense strand starting at position 3056 of SEQ ID NO: 1243589
ccaguuaauagcuguggga

SEQ ID NO: 1426917 - RNA, 19 nt, Artificial Sequence
  Description of Artificial Sequence: Synthetic oligonucleotide
  Antisense strand to SEQ ID NO: 1426916
ucccacagcuauuaacugg

SEQ ID NO: 1426918 - RNA, 19 nt, Artificial Sequence
  Description of Artificial Sequence: Synthetic oligonucleotide
  Sense strand starting at position 3058 of SEQ ID NO: 1243589
aguuaauagcugugggagu

SEQ ID NO: 1426919 - RNA, 19 nt, Artificial Sequence
  Description of Artificial Sequence: Synthetic oligonucleotide
  Antisense strand to SEQ ID NO: 1426918
acucccacagcuauuaacu

SEQ ID NO: 1426920 - RNA, 19 nt, Artificial Sequence
  Description of Artificial Sequence: Synthetic oligonucleotide
  Sense strand starting at position 3060 of SEQ ID NO: 1243589
uuaauagcugugggaguuu

SEQ ID NO: 1426921 - RNA, 19 nt, Artificial Sequence
  Description of Artificial Sequence: Synthetic oligonucleotide
  Antisense strand to SEQ ID NO: 1426920
aaacucccacagcuauuaa

SEQ ID NO: 1426922 - RNA, 19 nt, Artificial Sequence
  Description of Artificial Sequence: Synthetic oligonucleotide
  Sense strand starting at position 3087 of SEQ ID NO: 1243589
uggugaaucuaaucucugu

SEQ ID NO: 1426923 - RNA, 19 nt, Artificial Sequence
  Description of Artificial Sequence: Synthetic oligonucleotide
  Antisense strand to SEQ ID NO: 1426922
acagagauuagauucacca

SEQ ID NO: 1426924 - RNA, 19 nt, Artificial Sequence
  Description of Artificial Sequence: Synthetic oligonucleotide
  Sense strand starting at position 3163 of SEQ ID NO: 1243589
gguugcugggaagauucaa

SEQ ID NO: 1426925 - RNA, 19 nt, Artificial Sequence
  Description of Artificial Sequence: Synthetic oligonucleotide
  Antisense strand to SEQ ID NO: 1426924
uugaaucuucccagcaacc

SEQ ID NO: 1426926 - RNA, 19 nt, Artificial Sequence
  Description of Artificial Sequence: Synthetic oligonucleotide
  Sense strand starting at position 3193 of SEQ ID NO: 1243589
aagugaagagcuuagcaca

SEQ ID NO: 1426927 - RNA, 19 nt, Artificial Sequence
  Description of Artificial Sequence: Synthetic oligonucleotide
  Antisense strand to SEQ ID NO: 1426926
ugugcuaagcucuucacuu

SEQ ID NO: 1426928 - RNA, 19 nt, Artificial Sequence
  Description of Artificial Sequence: Synthetic oligonucleotide
  Sense strand starting at position 3235 of SEQ ID NO: 1243589
cagugaauguuagucaguu

SEQ ID NO: 1426929 - RNA, 19 nt, Artificial Sequence
  Description of Artificial Sequence: Synthetic oligonucleotide
  Antisense strand to SEQ ID NO: 1426928
aacugacuaacauucacug

SEQ ID NO: 1426930 - RNA, 19 nt, Artificial Sequence
  Description of Artificial Sequence: Synthetic oligonucleotide
  Sense strand starting at position 3236 of SEQ ID NO: 1243589
agugaauguuagucaguug

SEQ ID NO: 1426931 - RNA, 19 nt, Artificial Sequence
  Description of Artificial Sequence: Synthetic oligonucleotide
  Antisense strand to SEQ ID NO: 1426930
caacugacuaacauucacu

SEQ ID NO: 1426932 - RNA, 19 nt, Artificial Sequence
  Description of Artificial Sequence: Synthetic oligonucleotide
  Sense strand starting at position 3265 of SEQ ID NO: 1243589
cagccaucugcugagauag

SEQ ID NO: 1426933 - RNA, 19 nt, Artificial Sequence
  Description of Artificial Sequence: Synthetic oligonucleotide
  Antisense strand to SEQ ID NO: 1426932
cuaucucagcagauggcug

SEQ ID NO: 1426934 - RNA, 19 nt, Artificial Sequence
  Description of Artificial Sequence: Synthetic oligonucleotide
  Sense strand starting at position 3275 of SEQ ID NO: 1243589
cugagauaguucccaguga

SEQ ID NO: 1426935 - RNA, 19 nt, Artificial Sequence
  Description of Artificial Sequence: Synthetic oligonucleotide
  Antisense strand to SEQ ID NO: 1426934
ucacugggaacuaucucag

SEQ ID NO: 1426936 - RNA, 19 nt, Artificial Sequence
  Description of Artificial Sequence: Synthetic oligonucleotide
  Sense strand starting at position 3279 of SEQ ID NO: 1243589
gauaguucccagugauccu

SEQ ID NO: 1426937 - RNA, 19 nt, Artificial Sequence
  Description of Artificial Sequence: Synthetic oligonucleotide
  Antisense strand to SEQ ID NO: 1426936
aggaucacugggaacuauc

SEQ ID NO: 1426938 - RNA, 19 nt, Artificial Sequence
  Description of Artificial Sequence: Synthetic oligonucleotide
  Sense strand starting at position 3350 of SEQ ID NO: 1243589
gucuaugugaccuguggaa

SEQ ID NO: 1426939 - RNA, 19 nt, Artificial Sequence
  Description of Artificial Sequence: Synthetic oligonucleotide
  Antisense strand to SEQ ID NO: 1426938
uuccacaggucacauagac

SEQ ID NO: 1426940 - RNA, 19 nt, Artificial Sequence
  Description of Artificial Sequence: Synthetic oligonucleotide
  Sense strand starting at position 3352 of SEQ ID NO: 1243589
cuaugugaccuguggaaua

SEQ ID NO: 1426941 - RNA, 19 nt, Artificial Sequence
  Description of Artificial Sequence: Synthetic oligonucleotide
  Antisense strand to SEQ ID NO: 1426940
uauuccacaggucacauag

SEQ ID NO: 1426942 - RNA, 19 nt, Artificial Sequence
  Description of Artificial Sequence: Synthetic oligonucleotide
  Sense strand starting at position 3354 of SEQ ID NO: 1243589
augugaccuguggaauacu

SEQ ID NO: 1426943 - RNA, 19 nt, Artificial Sequence
  Description of Artificial Sequence: Synthetic oligonucleotide
  Antisense strand to SEQ ID NO: 1426942
aguauuccacaggucacau

SEQ ID NO: 1426944 - RNA, 19 nt, Artificial Sequence
  Description of Artificial Sequence: Synthetic oligonucleotide
  Sense strand starting at position 3364 of SEQ ID NO: 1243589
uggaauacuauaggaguuu

SEQ ID NO: 1426945 - RNA, 19 nt, Artificial Sequence
  Description of Artificial Sequence: Synthetic oligonucleotide
  Antisense strand to SEQ ID NO: 1426944
aaacuccuauaguauucca

SEQ ID NO: 1426946 - RNA, 19 nt, Artificial Sequence
  Description of Artificial Sequence: Synthetic oligonucleotide
  Sense strand starting at position 3373 of SEQ ID NO: 1243589
auaggaguuucuuucuuuc

SEQ ID NO: 1426947 - RNA, 19 nt, Artificial Sequence
  Description of Artificial Sequence: Synthetic oligonucleotide
  Antisense strand to SEQ ID NO: 1426946
gaaagaaagaaacuccuau

SEQ ID NO: 1426948 - RNA, 19 nt, Artificial Sequence
  Description of Artificial Sequence: Synthetic oligonucleotide
  Sense strand starting at position 3718 of SEQ ID NO: 1243589
uggcaagaauuacuuauaa

SEQ ID NO: 1426949 - RNA, 19 nt, Artificial Sequence
  Description of Artificial Sequence: Synthetic oligonucleotide
  Antisense strand to SEQ ID NO: 1426948
uuauaaguaauucuugcca

SEQ ID NO: 1426950 - RNA, 19 nt, Artificial Sequence
  Description of Artificial Sequence: Synthetic oligonucleotide
  Sense strand starting at position 3775 of SEQ ID NO: 1243589
uuauucugaggccaguauu

SEQ ID NO: 1426951 - RNA, 19 nt, Artificial Sequence
  Description of Artificial Sequence: Synthetic oligonucleotide
  Antisense strand to SEQ ID NO: 1426950
aauacuggccucagaauaa

SEQ ID NO: 1426952 - RNA, 19 nt, Artificial Sequence
  Description of Artificial Sequence: Synthetic oligonucleotide
  Sense strand starting at position 3949 of SEQ ID NO: 1243589
cgguuagcuuaacuuauga

SEQ ID NO: 1426953 - RNA, 19 nt, Artificial Sequence
  Description of Artificial Sequence: Synthetic oligonucleotide
  Antisense strand to SEQ ID NO: 1426952
ucauaaguuaagcuaaccg

SEQ ID NO: 1426954 - RNA, 19 nt, Artificial Sequence
  Description of Artificial Sequence: Synthetic oligonucleotide
  Sense strand starting at position 450 of SEQ ID NO: 1243590
gagugagagcccuaaucca

SEQ ID NO: 1426955 - RNA, 19 nt, Artificial Sequence
  Description of Artificial Sequence: Synthetic oligonucleotide
  Antisense strand to SEQ ID NO: 1426954
uggauuagggcucucacuc

SEQ ID NO: 1426956 - RNA, 19 nt, Artificial Sequence
  Description of Artificial Sequence: Synthetic oligonucleotide
  Sense strand starting at position 504 of SEQ ID NO: 1243590
acacucuguuuaggagaca

SEQ ID NO: 1426957 - RNA, 19 nt, Artificial Sequence
  Description of Artificial Sequence: Synthetic oligonucleotide
  Antisense strand to SEQ ID NO: 1426956
ugucuccuaaacagagugu

SEQ ID NO: 1426958 - RNA, 19 nt, Artificial Sequence
  Description of Artificial Sequence: Synthetic oligonucleotide
  Sense strand starting at position 709 of SEQ ID NO: 1243590
cgccgugagucccuaaauc

SEQ ID NO: 1426959 - RNA, 19 nt, Artificial Sequence
  Description of Artificial Sequence: Synthetic oligonucleotide
  Antisense strand to SEQ ID NO: 1426958
gauuuagggacucacggcg

SEQ ID NO: 1426960 - RNA, 19 nt, Artificial Sequence
  Description of Artificial Sequence: Synthetic oligonucleotide
  Sense strand starting at position 2154 of SEQ ID NO: 1243590
gggcguuagccacagaaac

SEQ ID NO: 1426961 - RNA, 19 nt, Artificial Sequence
  Description of Artificial Sequence: Synthetic oligonucleotide
  Antisense strand to SEQ ID NO: 1426960
guuucuguggcuaacgccc

SEQ ID NO: 1426962 - RNA, 19 nt, Artificial Sequence
  Description of Artificial Sequence: Synthetic oligonucleotide
  Sense strand starting at position 2386 of SEQ ID NO: 1243590
ggacgugauguccauucuu

SEQ ID NO: 1426963 - RNA, 19 nt, Artificial Sequence
  Description of Artificial Sequence: Synthetic oligonucleotide
  Antisense strand to SEQ ID NO: 1426962
aagaauggacaucacgucc

SEQ ID NO: 1426964 - RNA, 19 nt, Artificial Sequence
  Description of Artificial Sequence: Synthetic oligonucleotide
  Sense strand starting at position 2546 of SEQ ID NO: 1243590
ggcuuaagcaaaugaguag

SEQ ID NO: 1426965 - RNA, 19 nt, Artificial Sequence
  Description of Artificial Sequence: Synthetic oligonucleotide
  Antisense strand to SEQ ID NO: 1426964
cuacucauuugcuuaagcc

SEQ ID NO: 1426966 - RNA, 19 nt, Artificial Sequence
  Description of Artificial Sequence: Synthetic oligonucleotide
  Sense strand starting at position 2549 of SEQ ID NO: 1243590
uuaagcaaaugaguagauu

SEQ ID NO: 1426967 - RNA, 19 nt, Artificial Sequence
  Description of Artificial Sequence: Synthetic oligonucleotide
  Antisense strand to SEQ ID NO: 1426966
aaucuacucauuugcuuaa

SEQ ID NO: 1426968 - RNA, 19 nt, Artificial Sequence
  Description of Artificial Sequence: Synthetic oligonucleotide
  Sense strand starting at position 2557 of SEQ ID NO: 1243590
augaguagauuccuuagcu

SEQ ID NO: 1426969 - RNA, 19 nt, Artificial Sequence
  Description of Artificial Sequence: Synthetic oligonucleotide
  Antisense strand to SEQ ID NO: 1426968
agcuaaggaaucuacucau

SEQ ID NO: 1426970 - RNA, 19 nt, Artificial Sequence
  Description of Artificial Sequence: Synthetic oligonucleotide
  Sense strand starting at position 2558 of SEQ ID NO: 1243590
ugaguagauuccuuagcua

SEQ ID NO: 1426971 - RNA, 19 nt, Artificial Sequence
  Description of Artificial Sequence: Synthetic oligonucleotide
  Antisense strand to SEQ ID NO: 1426970
uagcuaaggaaucuacuca

SEQ ID NO: 1426972 - RNA, 19 nt, Artificial Sequence
  Description of Artificial Sequence: Synthetic oligonucleotide
  Sense strand starting at position 2614 of SEQ ID NO: 1243590
agugaauagauauggguau

SEQ ID NO: 1426973 - RNA, 19 nt, Artificial Sequence
  Description of Artificial Sequence: Synthetic oligonucleotide
  Antisense strand to SEQ ID NO: 1426972
auacccauaucuauucacu

SEQ ID NO: 1426974 - RNA, 19 nt, Artificial Sequence
  Description of Artificial Sequence: Synthetic oligonucleotide
  Sense strand starting at position 2621 of SEQ ID NO: 1243590
agauauggguauggaaaua

SEQ ID NO: 1426975 - RNA, 19 nt, Artificial Sequence
  Description of Artificial Sequence: Synthetic oligonucleotide
  Antisense strand to SEQ ID NO: 1426974
uauuuccauacccauaucu

SEQ ID NO: 1426976 - RNA, 19 nt, Artificial Sequence
  Description of Artificial Sequence: Synthetic oligonucleotide
  Sense strand starting at position 2646 of SEQ ID NO: 1243590
cgcagcuagaagugauuau

SEQ ID NO: 1426977 - RNA, 19 nt, Artificial Sequence
  Description of Artificial Sequence: Synthetic oligonucleotide
  Antisense strand to SEQ ID NO: 1426976
auaaucacuucuagcugcg

SEQ ID NO: 1426978 - RNA, 19 nt, Artificial Sequence
  Description of Artificial Sequence: Synthetic oligonucleotide
  Sense strand starting at position 2647 of SEQ ID NO: 1243590
gcagcuagaagugauuaua

SEQ ID NO: 1426979 - RNA, 19 nt, Artificial Sequence
  Description of Artificial Sequence: Synthetic oligonucleotide
  Antisense strand to SEQ ID NO: 1426978
uauaaucacuucuagcugc

SEQ ID NO: 1426980 - RNA, 19 nt, Artificial Sequence
  Description of Artificial Sequence: Synthetic oligonucleotide
  Sense strand starting at position 2746 of SEQ ID NO: 1243590
guggguacucaauaggugu

SEQ ID NO: 1426981 - RNA, 19 nt, Artificial Sequence
  Description of Artificial Sequence: Synthetic oligonucleotide
  Antisense strand to SEQ ID NO: 1426980
acaccuauugaguacccac

SEQ ID NO: 1426982 - RNA, 19 nt, Artificial Sequence
  Description of Artificial Sequence: Synthetic oligonucleotide
  Sense strand starting at position 2748 of SEQ ID NO: 1243590
ggguacucaauagguguau

SEQ ID NO: 1426983 - RNA, 19 nt, Artificial Sequence
  Description of Artificial Sequence: Synthetic oligonucleotide
  Antisense strand to SEQ ID NO: 1426982
auacaccuauugaguaccc

SEQ ID NO: 1426984 - RNA, 19 nt, Artificial Sequence
  Description of Artificial Sequence: Synthetic oligonucleotide
  Sense strand starting at position 2749 of SEQ ID NO: 1243590
gguacucaauagguguauu

SEQ ID NO: 1426985 - RNA, 19 nt, Artificial Sequence
  Description of Artificial Sequence: Synthetic oligonucleotide
  Antisense strand to SEQ ID NO: 1426984
aauacaccuauugaguacc

SEQ ID NO: 1426986 - RNA, 19 nt, Artificial Sequence
  Description of Artificial Sequence: Synthetic oligonucleotide
  Sense strand starting at position 2752 of SEQ ID NO: 1243590
acucaauagguguauuguu

SEQ ID NO: 1426987 - RNA, 19 nt, Artificial Sequence
  Description of Artificial Sequence: Synthetic oligonucleotide
  Antisense strand to SEQ ID NO: 1426986
aacaauacaccuauugagu

SEQ ID NO: 1426988 - RNA, 19 nt, Artificial Sequence
  Description of Artificial Sequence: Synthetic oligonucleotide
  Sense strand starting at position 2779 of SEQ ID NO: 1243590
cugaaucauuugcaaggga

SEQ ID NO: 1426989 - RNA, 19 nt, Artificial Sequence
  Description of Artificial Sequence: Synthetic oligonucleotide
  Antisense strand to SEQ ID NO: 1426988
ucccuugcaaaugauucag

SEQ ID NO: 1426990 - RNA, 19 nt, Artificial Sequence
  Description of Artificial Sequence: Synthetic oligonucleotide
  Sense strand starting at position 2796 of SEQ ID NO: 1243590
gaguguuccuuugcuaccu

SEQ ID NO: 1426991 - RNA, 19 nt, Artificial Sequence
  Description of Artificial Sequence: Synthetic oligonucleotide
  Antisense strand to SEQ ID NO: 1426990
agguagcaaaggaacacuc

SEQ ID NO: 1426992 - RNA, 19 nt, Artificial Sequence
  Description of Artificial Sequence: Synthetic oligonucleotide
  Sense strand starting at position 2817 of SEQ ID NO: 1243590
agccgucuuucuccuauau

SEQ ID NO: 1426993 - RNA, 19 nt, Artificial Sequence
  Description of Artificial Sequence: Synthetic oligonucleotide
  Antisense strand to SEQ ID NO: 1426992
auauaggagaaagacggcu

SEQ ID NO: 1426994 - RNA, 19 nt, Artificial Sequence
  Description of Artificial Sequence: Synthetic oligonucleotide
  Sense strand starting at position 2819 of SEQ ID NO: 1243590
ccgucuuucuccuauauuc

SEQ ID NO: 1426995 - RNA, 19 nt, Artificial Sequence
  Description of Artificial Sequence: Synthetic oligonucleotide
  Antisense strand to SEQ ID NO: 1426994
gaauauaggagaaagacgg

SEQ ID NO: 1426996 - RNA, 19 nt, Artificial Sequence
  Description of Artificial Sequence: Synthetic oligonucleotide
  Sense strand starting at position 2893 of SEQ ID NO: 1243590
acguaaucucgcccuguca

SEQ ID NO: 1426997 - RNA, 19 nt, Artificial Sequence
  Description of Artificial Sequence: Synthetic oligonucleotide
  Antisense strand to SEQ ID NO: 1426996
ugacagggcgagauuacgu

SEQ ID NO: 1426998 - RNA, 19 nt, Artificial Sequence
  Description of Artificial Sequence: Synthetic oligonucleotide
  Sense strand starting at position 3690 of SEQ ID NO: 1243590
auaguagagaugggaguuu

SEQ ID NO: 1426999 - RNA, 19 nt, Artificial Sequence
  Description of Artificial Sequence: Synthetic oligonucleotide
  Antisense strand to SEQ ID NO: 1426998
aaacucccaucucuacuau

SEQ ID NO: 1427000 - RNA, 19 nt, Artificial Sequence
  Description of Artificial Sequence: Synthetic oligonucleotide
  Sense strand starting at position 3793 of SEQ ID NO: 1243590
cacugugacugcugaacaa

SEQ ID NO: 1427001 - RNA, 19 nt, Artificial Sequence
  Description of Artificial Sequence: Synthetic oligonucleotide
  Antisense strand to SEQ ID NO: 1427000
uuguucagcagucacagug

SEQ ID NO: 1427002 - RNA, 19 nt, Artificial Sequence
  Description of Artificial Sequence: Synthetic oligonucleotide
  Sense strand starting at position 3828 of SEQ ID NO: 1243590
aggugcuggcugugaguau

SEQ ID NO: 1427003 - RNA, 19 nt, Artificial Sequence
  Description of Artificial Sequence: Synthetic oligonucleotide
  Antisense strand to SEQ ID NO: 1427002
auacucacagccagcaccu

SEQ ID NO: 1427004 - RNA, 19 nt, Artificial Sequence
  Description of Artificial Sequence: Synthetic oligonucleotide
  Sense strand starting at position 3832 of SEQ ID NO: 1243590
gcuggcugugaguaucaca

SEQ ID NO: 1427005 - RNA, 19 nt, Artificial Sequence
  Description of Artificial Sequence: Synthetic oligonucleotide
  Antisense strand to SEQ ID NO: 1427004
ugugauacucacagccagc

SEQ ID NO: 1427006 - RNA, 19 nt, Artificial Sequence
  Description of Artificial Sequence: Synthetic oligonucleotide
  Sense strand starting at position 3965 of SEQ ID NO: 1243590
gcccgucacagguauugau

SEQ ID NO: 1427007 - RNA, 19 nt, Artificial Sequence
  Description of Artificial Sequence: Synthetic oligonucleotide
  Antisense strand to SEQ ID NO: 1427006
aucaauaccugugacgggc

SEQ ID NO: 1427008 - RNA, 19 nt, Artificial Sequence
  Description of Artificial Sequence: Synthetic oligonucleotide
  Sense strand starting at position 3972 of SEQ ID NO: 1243590
acagguauugauuguucca

SEQ ID NO: 1427009 - RNA, 19 nt, Artificial Sequence
  Description of Artificial Sequence: Synthetic oligonucleotide
  Antisense strand to SEQ ID NO: 1427008
uggaacaaucaauaccugu

SEQ ID NO: 1427010 - RNA, 19 nt, Artificial Sequence
  Description of Artificial Sequence: Synthetic oligonucleotide
  Sense strand starting at position 3974 of SEQ ID NO: 1243590
agguauugauuguuccauu

SEQ ID NO: 1427011 - RNA, 19 nt, Artificial Sequence
  Description of Artificial Sequence: Synthetic oligonucleotide
  Antisense strand to SEQ ID NO: 1427010
aauggaacaaucaauaccu

SEQ ID NO: 1427012 - RNA, 19 nt, Artificial Sequence
  Description of Artificial Sequence: Synthetic oligonucleotide
  Sense strand starting at position 3975 of SEQ ID NO: 1243590
gguauugauuguuccauug

SEQ ID NO: 1427013 - RNA, 19 nt, Artificial Sequence
  Description of Artificial Sequence: Synthetic oligonucleotide
  Antisense strand to SEQ ID NO: 1427012
caauggaacaaucaauacc

SEQ ID NO: 1427014 - RNA, 19 nt, Artificial Sequence
  Description of Artificial Sequence: Synthetic oligonucleotide
  Sense strand starting at position 77 of SEQ ID NO: 1243591
ugagauaaaucuguguuua

SEQ ID NO: 1427015 - RNA, 19 nt, Artificial Sequence
  Description of Artificial Sequence: Synthetic oligonucleotide
  Antisense strand to SEQ ID NO: 1427014
uaaacacagauuuaucuca

SEQ ID NO: 1427016 - RNA, 19 nt, Artificial Sequence
  Description of Artificial Sequence: Synthetic oligonucleotide
  Sense strand starting at position 78 of SEQ ID NO: 1243591
gagauaaaucuguguuuau

SEQ ID NO: 1427017 - RNA, 19 nt, Artificial Sequence
  Description of Artificial Sequence: Synthetic oligonucleotide
  Antisense strand to SEQ ID NO: 1427016
auaaacacagauuuaucuc

SEQ ID NO: 1427018 - RNA, 19 nt, Artificial Sequence
  Description of Artificial Sequence: Synthetic oligonucleotide
  Sense strand starting at position 104 of SEQ ID NO: 1243591
ccuuaauuaugagcauaag

SEQ ID NO: 1427019 - RNA, 19 nt, Artificial Sequence
  Description of Artificial Sequence: Synthetic oligonucleotide
  Antisense strand to SEQ ID NO: 1427018
cuuaugcucauaauuaagg

SEQ ID NO: 1427020 - RNA, 19 nt, Artificial Sequence
  Description of Artificial Sequence: Synthetic oligonucleotide
  Sense strand starting at position 151 of SEQ ID NO: 1243591
caguaacaugaugagcauu

SEQ ID NO: 1427021 - RNA, 19 nt, Artificial Sequence
  Description of Artificial Sequence: Synthetic oligonucleotide
  Antisense strand to SEQ ID NO: 1427020
aaugcucaucauguuacug

SEQ ID NO: 1427022 - RNA, 19 nt, Artificial Sequence
  Description of Artificial Sequence: Synthetic oligonucleotide
  Sense strand starting at position 171 of SEQ ID NO: 1243591
ugauacauauccuugggua

SEQ ID NO: 1427023 - RNA, 19 nt, Artificial Sequence
  Description of Artificial Sequence: Synthetic oligonucleotide
  Antisense strand to SEQ ID NO: 1427022
uacccaaggauauguauca

SEQ ID NO: 1427024 - RNA, 19 nt, Artificial Sequence
  Description of Artificial Sequence: Synthetic oligonucleotide
  Sense strand starting at position 172 of SEQ ID NO: 1243591
gauacauauccuuggguaa

SEQ ID NO: 1427025 - RNA, 19 nt, Artificial Sequence
  Description of Artificial Sequence: Synthetic oligonucleotide
  Antisense strand to SEQ ID NO: 1427024
uuacccaaggauauguauc

SEQ ID NO: 1427026 - RNA, 19 nt, Artificial Sequence
  Description of Artificial Sequence: Synthetic oligonucleotide
  Sense strand starting at position 173 of SEQ ID NO: 1243591
auacauauccuuggguaac

SEQ ID NO: 1427027 - RNA, 19 nt, Artificial Sequence
  Description of Artificial Sequence: Synthetic oligonucleotide
  Antisense strand to SEQ ID NO: 1427026
guuacccaaggauauguau

SEQ ID NO: 1427028 - RNA, 19 nt, Artificial Sequence
  Description of Artificial Sequence: Synthetic oligonucleotide
  Sense strand starting at position 913 of SEQ ID NO: 1243591
ugagguguaaccugaggca

SEQ ID NO: 1427029 - RNA, 19 nt, Artificial Sequence
  Description of Artificial Sequence: Synthetic oligonucleotide
  Antisense strand to SEQ ID NO: 1427028
ugccucagguuacaccuca

SEQ ID NO: 1427030 - RNA, 19 nt, Artificial Sequence
  Description of Artificial Sequence: Synthetic oligonucleotide
  Sense strand starting at position 990 of SEQ ID NO: 1243591
uggagcucucauuaauauc

SEQ ID NO: 1427031 - RNA, 19 nt, Artificial Sequence
  Description of Artificial Sequence: Synthetic oligonucleotide
  Antisense strand to SEQ ID NO: 1427030
gauauuaaugagagcucca

SEQ ID NO: 1427032 - RNA, 19 nt, Artificial Sequence
  Description of Artificial Sequence: Synthetic oligonucleotide
  Sense strand starting at position 1054 of SEQ ID NO: 1243591
agaagaugugccugggaaa

SEQ ID NO: 1427033 - RNA, 19 nt, Artificial Sequence
  Description of Artificial Sequence: Synthetic oligonucleotide
  Antisense strand to SEQ ID NO: 1427032
uuucccaggcacaucuucu

SEQ ID NO: 1427034 - RNA, 19 nt, Artificial Sequence
  Description of Artificial Sequence: Synthetic oligonucleotide
  Sense strand starting at position 1055 of SEQ ID NO: 1243591
gaagaugugccugggaaau

SEQ ID NO: 1427035 - RNA, 19 nt, Artificial Sequence
  Description of Artificial Sequence: Synthetic oligonucleotide
  Antisense strand to SEQ ID NO: 1427034
auuucccaggcacaucuuc

SEQ ID NO: 1427036 - RNA, 19 nt, Artificial Sequence
  Description of Artificial Sequence: Synthetic oligonucleotide
  Sense strand starting at position 1196 of SEQ ID NO: 1243591
auuacaucccagcggaauu

SEQ ID NO: 1427037 - RNA, 19 nt, Artificial Sequence
  Description of Artificial Sequence: Synthetic oligonucleotide
  Antisense strand to SEQ ID NO: 1427036
aauuccgcugggauguaau

SEQ ID NO: 1427038 - RNA, 19 nt, Artificial Sequence
  Description of Artificial Sequence: Synthetic oligonucleotide
  Sense strand starting at position 1287 of SEQ ID NO: 1243591
gcaugauagcaauaguuuc

SEQ ID NO: 1427039 - RNA, 19 nt, Artificial Sequence
  Description of Artificial Sequence: Synthetic oligonucleotide
  Antisense strand to SEQ ID NO: 1427038
gaaacuauugcuaucaugc

SEQ ID NO: 1427040 - RNA, 19 nt, Artificial Sequence
  Description of Artificial Sequence: Synthetic oligonucleotide
  Sense strand starting at position 1403 of SEQ ID NO: 1243591
ggagcauagacgugagacu

SEQ ID NO: 1427041 - RNA, 19 nt, Artificial Sequence
  Description of Artificial Sequence: Synthetic oligonucleotide
  Antisense strand to SEQ ID NO: 1427040
agucucacgucuaugcucc

SEQ ID NO: 1427042 - RNA, 19 nt, Artificial Sequence
  Description of Artificial Sequence: Synthetic oligonucleotide
  Sense strand starting at position 1432 of SEQ ID NO: 1243591
uugagaagguggucagaga

SEQ ID NO: 1427043 - RNA, 19 nt, Artificial Sequence
  Description of Artificial Sequence: Synthetic oligonucleotide
  Antisense strand to SEQ ID NO: 1427042
ucucugaccaccuucucaa

SEQ ID NO: 1427044 - RNA, 19 nt, Artificial Sequence
  Description of Artificial Sequence: Synthetic oligonucleotide
  Sense strand starting at position 1445 of SEQ ID NO: 1243591
cagagaagugauggguuaa

SEQ ID NO: 1427045 - RNA, 19 nt, Artificial Sequence
  Description of Artificial Sequence: Synthetic oligonucleotide
  Antisense strand to SEQ ID NO: 1427044
uuaacccaucacuucucug

SEQ ID NO: 1427046 - RNA, 19 nt, Artificial Sequence
  Description of Artificial Sequence: Synthetic oligonucleotide
  Sense strand starting at position 1446 of SEQ ID NO: 1243591
agagaagugauggguuaau

SEQ ID NO: 1427047 - RNA, 19 nt, Artificial Sequence
  Description of Artificial Sequence: Synthetic oligonucleotide
  Antisense strand to SEQ ID NO: 1427046
auuaacccaucacuucucu

SEQ ID NO: 1427048 - RNA, 19 nt, Artificial Sequence
  Description of Artificial Sequence: Synthetic oligonucleotide
  Sense strand starting at position 1527 of SEQ ID NO: 1243591
gauggugucuuucuccaga

SEQ ID NO: 1427049 - RNA, 19 nt, Artificial Sequence
  Description of Artificial Sequence: Synthetic oligonucleotide
  Antisense strand to SEQ ID NO: 1427048
ucuggagaaagacaccauc

SEQ ID NO: 1427050 - RNA, 19 nt, Artificial Sequence
  Description of Artificial Sequence: Synthetic oligonucleotide
  Sense strand starting at position 1680 of SEQ ID NO: 1243591
ugguaugugcaccagagau

SEQ ID NO: 1427051 - RNA, 19 nt, Artificial Sequence
  Description of Artificial Sequence: Synthetic oligonucleotide
  Antisense strand to SEQ ID NO: 1427050
aucucuggugcacauacca

SEQ ID NO: 1427052 - RNA, 19 nt, Artificial Sequence
  Description of Artificial Sequence: Synthetic oligonucleotide
  Sense strand starting at position 1682 of SEQ ID NO: 1243591
guaugugcaccagagauua

SEQ ID NO: 1427053 - RNA, 19 nt, Artificial Sequence
  Description of Artificial Sequence: Synthetic oligonucleotide
  Antisense strand to SEQ ID NO: 1427052
uaaucucuggugcacauac

SEQ ID NO: 1427054 - RNA, 19 nt, Artificial Sequence
  Description of Artificial Sequence: Synthetic oligonucleotide
  Sense strand starting at position 1775 of SEQ ID NO: 1243591
gagcauccaugucuaggau

SEQ ID NO: 1427055 - RNA, 19 nt, Artificial Sequence
  Description of Artificial Sequence: Synthetic oligonucleotide
  Antisense strand to SEQ ID NO: 1427054
auccuagacauggaugcuc

SEQ ID NO: 1427056 - RNA, 19 nt, Artificial Sequence
  Description of Artificial Sequence: Synthetic oligonucleotide
  Sense strand starting at position 1776 of SEQ ID NO: 1243591
agcauccaugucuaggauu

SEQ ID NO: 1427057 - RNA, 19 nt, Artificial Sequence
  Description of Artificial Sequence: Synthetic oligonucleotide
  Antisense strand to SEQ ID NO: 1427056
aauccuagacauggaugcu

SEQ ID NO: 1427058 - RNA, 19 nt, Artificial Sequence
  Description of Artificial Sequence: Synthetic oligonucleotide
  Sense strand starting at position 1787 of SEQ ID NO: 1243591
cuaggauucugcuccggaa

SEQ ID NO: 1427059 - RNA, 19 nt, Artificial Sequence
  Description of Artificial Sequence: Synthetic oligonucleotide
  Antisense strand to SEQ ID NO: 1427058
uuccggagcagaauccuag

SEQ ID NO: 1427060 - RNA, 19 nt, Artificial Sequence
  Description of Artificial Sequence: Synthetic oligonucleotide
  Sense strand starting at position 2538 of SEQ ID NO: 1243591
auauguguuccacacucuu

SEQ ID NO: 1427061 - RNA, 19 nt, Artificial Sequence
  Description of Artificial Sequence: Synthetic oligonucleotide
  Antisense strand to SEQ ID NO: 1427060
aagaguguggaacacauau

SEQ ID NO: 1427062 - RNA, 19 nt, Artificial Sequence
  Description of Artificial Sequence: Synthetic oligonucleotide
  Sense strand starting at position 2568 of SEQ ID NO: 1243591
ucuuaaaguuugcugauuu

SEQ ID NO: 1427063 - RNA, 19 nt, Artificial Sequence
  Description of Artificial Sequence: Synthetic oligonucleotide
  Antisense strand to SEQ ID NO: 1427062
aaaucagcaaacuuuaaga

SEQ ID NO: 1427064 - RNA, 19 nt, Artificial Sequence
  Description of Artificial Sequence: Synthetic oligonucleotide
  Sense strand starting at position 2582 of SEQ ID NO: 1243591
gauuuauuauuacaaggug

SEQ ID NO: 1427065 - RNA, 19 nt, Artificial Sequence
  Description of Artificial Sequence: Synthetic oligonucleotide
  Antisense strand to SEQ ID NO: 1427064
caccuuguaauaauaaauc

SEQ ID NO: 1427066 - RNA, 19 nt, Artificial Sequence
  Description of Artificial Sequence: Synthetic oligonucleotide
  Sense strand starting at position 2622 of SEQ ID NO: 1243591
cuggguucuauguaucaug

SEQ ID NO: 1427067 - RNA, 19 nt, Artificial Sequence
  Description of Artificial Sequence: Synthetic oligonucleotide
  Antisense strand to SEQ ID NO: 1427066
caugauacauagaacccag

SEQ ID NO: 1427068 - RNA, 19 nt, Artificial Sequence
  Description of Artificial Sequence: Synthetic oligonucleotide
  Sense strand starting at position 2928 of SEQ ID NO: 1243591
ucagaucugugaguacuga

SEQ ID NO: 1427069 - RNA, 19 nt, Artificial Sequence
  Description of Artificial Sequence: Synthetic oligonucleotide
  Antisense strand to SEQ ID NO: 1427068
ucaguacucacagaucuga

SEQ ID NO: 1427070 - RNA, 19 nt, Artificial Sequence
  Description of Artificial Sequence: Synthetic oligonucleotide
  Sense strand starting at position 2947 of SEQ ID NO: 1243591
caugaaagaugucugcaau

SEQ ID NO: 1427071 - RNA, 19 nt, Artificial Sequence
  Description of Artificial Sequence: Synthetic oligonucleotide
  Antisense strand to SEQ ID NO: 1427070
auugcagacaucuuucaug

SEQ ID NO: 1427072 - RNA, 19 nt, Artificial Sequence
  Description of Artificial Sequence: Synthetic oligonucleotide
  Sense strand starting at position 2948 of SEQ ID NO: 1243591
augaaagaugucugcaaua

SEQ ID NO: 1427073 - RNA, 19 nt, Artificial Sequence
  Description of Artificial Sequence: Synthetic oligonucleotide
  Antisense strand to SEQ ID NO: 1427072
uauugcagacaucuuucau

SEQ ID NO: 1427074 - RNA, 19 nt, Artificial Sequence
  Description of Artificial Sequence: Synthetic oligonucleotide
  Sense strand starting at position 2980 of SEQ ID NO: 1243591
agggcuauauaucuacuau

SEQ ID NO: 1427075 - RNA, 19 nt, Artificial Sequence
  Description of Artificial Sequence: Synthetic oligonucleotide
  Antisense strand to SEQ ID NO: 1427074
auaguagauauauagcccu

SEQ ID NO: 1427076 - RNA, 19 nt, Artificial Sequence
  Description of Artificial Sequence: Synthetic oligonucleotide
  Sense strand starting at position 3513 of SEQ ID NO: 1243591
uagccagaauggucuccua

SEQ ID NO: 1427077 - RNA, 19 nt, Artificial Sequence
  Description of Artificial Sequence: Synthetic oligonucleotide
  Antisense strand to SEQ ID NO: 1427076
uaggagaccauucuggcua

SEQ ID NO: 1427078 - RNA, 19 nt, Artificial Sequence
  Description of Artificial Sequence: Synthetic oligonucleotide
  Sense strand starting at position 3569 of SEQ ID NO: 1243591
gggauuaguggcugauaca

SEQ ID NO: 1427079 - RNA, 19 nt, Artificial Sequence
  Description of Artificial Sequence: Synthetic oligonucleotide
  Antisense strand to SEQ ID NO: 1427078
uguaucagccacuaauccc

SEQ ID NO: 1427080 - RNA, 19 nt, Artificial Sequence
  Description of Artificial Sequence: Synthetic oligonucleotide
  Sense strand starting at position 3570 of SEQ ID NO: 1243591
ggauuaguggcugauacag

SEQ ID NO: 1427081 - RNA, 19 nt, Artificial Sequence
  Description of Artificial Sequence: Synthetic oligonucleotide
  Antisense strand to SEQ ID NO: 1427080
cuguaucagccacuaaucc

SEQ ID NO: 1427082 - RNA, 19 nt, Artificial Sequence
  Description of Artificial Sequence: Synthetic oligonucleotide
  Sense strand starting at position 3580 of SEQ ID NO: 1243591
cugauacaguguuucuuga

SEQ ID NO: 1427083 - RNA, 19 nt, Artificial Sequence
  Description of Artificial Sequence: Synthetic oligonucleotide
  Antisense strand to SEQ ID NO: 1427082
ucaagaaacacuguaucag

SEQ ID NO: 1427084 - RNA, 19 nt, Artificial Sequence
  Description of Artificial Sequence: Synthetic oligonucleotide
  Sense strand starting at position 3582 of SEQ ID NO: 1243591
gauacaguguuucuugacu

SEQ ID NO: 1427085 - RNA, 19 nt, Artificial Sequence
  Description of Artificial Sequence: Synthetic oligonucleotide
  Antisense strand to SEQ ID NO: 1427084
agucaagaaacacuguauc

SEQ ID NO: 1427086 - RNA, 19 nt, Artificial Sequence
  Description of Artificial Sequence: Synthetic oligonucleotide
  Sense strand starting at position 3620 of SEQ ID NO: 1243591
cacugauuagcuggguaca

SEQ ID NO: 1427087 - RNA, 19 nt, Artificial Sequence
  Description of Artificial Sequence: Synthetic oligonucleotide
  Antisense strand to SEQ ID NO: 1427086
uguacccagcuaaucagug

SEQ ID NO: 1427088 - RNA, 19 nt, Artificial Sequence
  Description of Artificial Sequence: Synthetic oligonucleotide
  Sense strand starting at position 3821 of SEQ ID NO: 1243591
uaugguaugaguuaugaug

SEQ ID NO: 1427089 - RNA, 19 nt, Artificial Sequence
  Description of Artificial Sequence: Synthetic oligonucleotide
  Antisense strand to SEQ ID NO: 1427088
caucauaacucauaccaua

SEQ ID NO: 1427090 - RNA, 19 nt, Artificial Sequence
  Description of Artificial Sequence: Synthetic oligonucleotide
  Sense strand starting at position 3830 of SEQ ID NO: 1243591
aguuaugauguccagugua

SEQ ID NO: 1427091 - RNA, 19 nt, Artificial Sequence
  Description of Artificial Sequence: Synthetic oligonucleotide
  Antisense strand to SEQ ID NO: 1427090
uacacuggacaucauaacu

SEQ ID NO: 1427092 - RNA, 19 nt, Artificial Sequence
  Description of Artificial Sequence: Synthetic oligonucleotide
  Sense strand starting at position 3946 of SEQ ID NO: 1243591
gugugacugcugucacguu

SEQ ID NO: 1427093 - RNA, 19 nt, Artificial Sequence
  Description of Artificial Sequence: Synthetic oligonucleotide
  Antisense strand to SEQ ID NO: 1427092
aacgugacagcagucacac

SEQ ID NO: 1427094 - RNA, 19 nt, Artificial Sequence
  Description of Artificial Sequence: Synthetic oligonucleotide
  Sense strand starting at position 357 of SEQ ID NO: 1243592
gauggagugccucaaucac

SEQ ID NO: 1427095 - RNA, 19 nt, Artificial Sequence
  Description of Artificial Sequence: Synthetic oligonucleotide
  Antisense strand to SEQ ID NO: 1427094
gugauugaggcacuccauc

SEQ ID NO: 1427096 - RNA, 19 nt, Artificial Sequence
  Description of Artificial Sequence: Synthetic oligonucleotide
  Sense strand starting at position 409 of SEQ ID NO: 1243592
aggagcugugucuaguuca

SEQ ID NO: 1427097 - RNA, 19 nt, Artificial Sequence
  Description of Artificial Sequence: Synthetic oligonucleotide
  Antisense strand to SEQ ID NO: 1427096
ugaacuagacacagcuccu

SEQ ID NO: 1427098 - RNA, 19 nt, Artificial Sequence
  Description of Artificial Sequence: Synthetic oligonucleotide
  Sense strand starting at position 417 of SEQ ID NO: 1243592
ugucuaguucaaugagugu

SEQ ID NO: 1427099 - RNA, 19 nt, Artificial Sequence
  Description of Artificial Sequence: Synthetic oligonucleotide
  Antisense strand to SEQ ID NO: 1427098
acacucauugaacuagaca

SEQ ID NO: 1427100 - RNA, 19 nt, Artificial Sequence
  Description of Artificial Sequence: Synthetic oligonucleotide
  Sense strand starting at position 452 of SEQ ID NO: 1243592
guugcuucagugucuguua

SEQ ID NO: 1427101 - RNA, 19 nt, Artificial Sequence
  Description of Artificial Sequence: Synthetic oligonucleotide
  Antisense strand to SEQ ID NO: 1427100
uaacagacacugaagcaac

SEQ ID NO: 1427102 - RNA, 19 nt, Artificial Sequence
  Description of Artificial Sequence: Synthetic oligonucleotide
  Sense strand starting at position 459 of SEQ ID NO: 1243592
cagugucuguuagcagaaa

SEQ ID NO: 1427103 - RNA, 19 nt, Artificial Sequence
  Description of Artificial Sequence: Synthetic oligonucleotide
  Antisense strand to SEQ ID NO: 1427102
uuucugcuaacagacacug

SEQ ID NO: 1427104 - RNA, 19 nt, Artificial Sequence
  Description of Artificial Sequence: Synthetic oligonucleotide
  Sense strand starting at position 480 of SEQ ID NO: 1243592
agggaauggcagugauucu

SEQ ID NO: 1427105 - RNA, 19 nt, Artificial Sequence
  Description of Artificial Sequence: Synthetic oligonucleotide
  Antisense strand to SEQ ID NO: 1427104
agaaucacugccauucccu

SEQ ID NO: 1427106 - RNA, 19 nt, Artificial Sequence
  Description of Artificial Sequence: Synthetic oligonucleotide
  Sense strand starting at position 489 of SEQ ID NO: 1243592
cagugauucuggccaucuc

SEQ ID NO: 1427107 - RNA, 19 nt, Artificial Sequence
  Description of Artificial Sequence: Synthetic oligonucleotide
  Antisense strand to SEQ ID NO: 1427106
gagauggccagaaucacug

SEQ ID NO: 1427108 - RNA, 19 nt, Artificial Sequence
  Description of Artificial Sequence: Synthetic oligonucleotide
  Sense strand starting at position 544 of SEQ ID NO: 1243592
gucugugauaaaugaucag

SEQ ID NO: 1427109 - RNA, 19 nt, Artificial Sequence
  Description of Artificial Sequence: Synthetic oligonucleotide
  Antisense strand to SEQ ID NO: 1427108
cugaucauuuaucacagac

SEQ ID NO: 1427110 - RNA, 19 nt, Artificial Sequence
  Description of Artificial Sequence: Synthetic oligonucleotide
  Sense strand starting at position 1027 of SEQ ID NO: 1243592
ggagccaagguuugcuuua

SEQ ID NO: 1427111 - RNA, 19 nt, Artificial Sequence
  Description of Artificial Sequence: Synthetic oligonucleotide
  Antisense strand to SEQ ID NO: 1427110
uaaagcaaaccuuggcucc

SEQ ID NO: 1427112 - RNA, 19 nt, Artificial Sequence
  Description of Artificial Sequence: Synthetic oligonucleotide
  Sense strand starting at position 1037 of SEQ ID NO: 1243592
uuugcuuuaggcugagagu

SEQ ID NO: 1427113 - RNA, 19 nt, Artificial Sequence
  Description of Artificial Sequence: Synthetic oligonucleotide
  Antisense strand to SEQ ID NO: 1427112
acucucagccuaaagcaaa

SEQ ID NO: 1427114 - RNA, 19 nt, Artificial Sequence
  Description of Artificial Sequence: Synthetic oligonucleotide
  Sense strand starting at position 1048 of SEQ ID NO: 1243592
cugagaguguaggucuaga

SEQ ID NO: 1427115 - RNA, 19 nt, Artificial Sequence
  Description of Artificial Sequence: Synthetic oligonucleotide
  Antisense strand to SEQ ID NO: 1427114
ucuagaccuacacucucag

SEQ ID NO: 1427116 - RNA, 19 nt, Artificial Sequence
  Description of Artificial Sequence: Synthetic oligonucleotide
  Sense strand starting at position 1053 of SEQ ID NO: 1243592
aguguaggucuagaacaca

SEQ ID NO: 1427117 - RNA, 19 nt, Artificial Sequence
  Description of Artificial Sequence: Synthetic oligonucleotide
  Antisense strand to SEQ ID NO: 1427116
uguguucuagaccuacacu

SEQ ID NO: 1427118 - RNA, 19 nt, Artificial Sequence
  Description of Artificial Sequence: Synthetic oligonucleotide
  Sense strand starting at position 1072 of SEQ ID NO: 1243592
gugccaaagcucugaaaca

SEQ ID NO: 1427119 - RNA, 19 nt, Artificial Sequence
  Description of Artificial Sequence: Synthetic oligonucleotide
  Antisense strand to SEQ ID NO: 1427118
uguuucagagcuuuggcac

SEQ ID NO: 1427120 - RNA, 19 nt, Artificial Sequence
  Description of Artificial Sequence: Synthetic oligonucleotide
  Sense strand starting at position 1130 of SEQ ID NO: 1243592
cuagccuuagccgaaauau

SEQ ID NO: 1427121 - RNA, 19 nt, Artificial Sequence
  Description of Artificial Sequence: Synthetic oligonucleotide
  Antisense strand to SEQ ID NO: 1427120
auauuucggcuaaggcuag

SEQ ID NO: 1427122 - RNA, 19 nt, Artificial Sequence
  Description of Artificial Sequence: Synthetic oligonucleotide
  Sense strand starting at position 1217 of SEQ ID NO: 1243592
ccggaaucuccaggugaga

SEQ ID NO: 1427123 - RNA, 19 nt, Artificial Sequence
  Description of Artificial Sequence: Synthetic oligonucleotide
  Antisense strand to SEQ ID NO: 1427122
ucucaccuggagauuccgg

SEQ ID NO: 1427124 - RNA, 19 nt, Artificial Sequence
  Description of Artificial Sequence: Synthetic oligonucleotide
  Sense strand starting at position 1219 of SEQ ID NO: 1243592
ggaaucuccaggugagauc

SEQ ID NO: 1427125 - RNA, 19 nt, Artificial Sequence
  Description of Artificial Sequence: Synthetic oligonucleotide
  Antisense strand to SEQ ID NO: 1427124
gaucucaccuggagauucc

SEQ ID NO: 1427126 - RNA, 19 nt, Artificial Sequence
  Description of Artificial Sequence: Synthetic oligonucleotide
  Sense strand starting at position 1255 of SEQ ID NO: 1243592
agagguggaauucgagaca

SEQ ID NO: 1427127 - RNA, 19 nt, Artificial Sequence
  Description of Artificial Sequence: Synthetic oligonucleotide
  Antisense strand to SEQ ID NO: 1427126
ugucucgaauuccaccucu

SEQ ID NO: 1427128 - RNA, 19 nt, Artificial Sequence
  Description of Artificial Sequence: Synthetic oligonucleotide
  Sense strand starting at position 1258 of SEQ ID NO: 1243592
gguggaauucgagacaagu

SEQ ID NO: 1427129 - RNA, 19 nt, Artificial Sequence
  Description of Artificial Sequence: Synthetic oligonucleotide
  Antisense strand to SEQ ID NO: 1427128
acuugucucgaauuccacc

SEQ ID NO: 1427130 - RNA, 19 nt, Artificial Sequence
  Description of Artificial Sequence: Synthetic oligonucleotide
  Sense strand starting at position 1548 of SEQ ID NO: 1243592
ugauuuguuguuuguugga

SEQ ID NO: 1427131 - RNA, 19 nt, Artificial Sequence
  Description of Artificial Sequence: Synthetic oligonucleotide
  Antisense strand to SEQ ID NO: 1427130
uccaacaaacaacaaauca

SEQ ID NO: 1427132 - RNA, 19 nt, Artificial Sequence
  Description of Artificial Sequence: Synthetic oligonucleotide
  Sense strand starting at position 1651 of SEQ ID NO: 1243592
acaggaaguucugcgaucu

SEQ ID NO: 1427133 - RNA, 19 nt, Artificial Sequence
  Description of Artificial Sequence: Synthetic oligonucleotide
  Antisense strand to SEQ ID NO: 1427132
agaucgcagaacuuccugu

SEQ ID NO: 1427134 - RNA, 19 nt, Artificial Sequence
  Description of Artificial Sequence: Synthetic oligonucleotide
  Sense strand starting at position 1652 of SEQ ID NO: 1243592
caggaaguucugcgaucuc

SEQ ID NO: 1427135 - RNA, 19 nt, Artificial Sequence
  Description of Artificial Sequence: Synthetic oligonucleotide
  Antisense strand to SEQ ID NO: 1427134
gagaucgcagaacuuccug

SEQ ID NO: 1427136 - RNA, 19 nt, Artificial Sequence
  Description of Artificial Sequence: Synthetic oligonucleotide
  Sense strand starting at position 2032 of SEQ ID NO: 1243592
agaguuaacccuuaagcuc

SEQ ID NO: 1427137 - RNA, 19 nt, Artificial Sequence
  Description of Artificial Sequence: Synthetic oligonucleotide
  Antisense strand to SEQ ID NO: 1427136
gagcuuaaggguuaacucu

SEQ ID NO: 1427138 - RNA, 19 nt, Artificial Sequence
  Description of Artificial Sequence: Synthetic oligonucleotide
  Sense strand starting at position 2269 of SEQ ID NO: 1243592
cgugacuacucuuugcaau

SEQ ID NO: 1427139 - RNA, 19 nt, Artificial Sequence
  Description of Artificial Sequence: Synthetic oligonucleotide
  Antisense strand to SEQ ID NO: 1427138
auugcaaagaguagucacg

SEQ ID NO: 1427140 - RNA, 19 nt, Artificial Sequence
  Description of Artificial Sequence: Synthetic oligonucleotide
  Sense strand starting at position 2372 of SEQ ID NO: 1243592
gcuuacauucuagggcaaa

SEQ ID NO: 1427141 - RNA, 19 nt, Artificial Sequence
  Description of Artificial Sequence: Synthetic oligonucleotide
  Antisense strand to SEQ ID NO: 1427140
uuugcccuagaauguaagc

SEQ ID NO: 1427142 - RNA, 19 nt, Artificial Sequence
  Description of Artificial Sequence: Synthetic oligonucleotide
  Sense strand starting at position 2438 of SEQ ID NO: 1243592
ggcagaguuugcuccaucu

SEQ ID NO: 1427143 - RNA, 19 nt, Artificial Sequence
  Description of Artificial Sequence: Synthetic oligonucleotide
  Antisense strand to SEQ ID NO: 1427142
agauggagcaaacucugcc

SEQ ID NO: 1427144 - RNA, 19 nt, Artificial Sequence
  Description of Artificial Sequence: Synthetic oligonucleotide
  Sense strand starting at position 2505 of SEQ ID NO: 1243592
caacuuuaccgaugacgaa

SEQ ID NO: 1427145 - RNA, 19 nt, Artificial Sequence
  Description of Artificial Sequence: Synthetic oligonucleotide
  Antisense strand to SEQ ID NO: 1427144
uucgucaucgguaaaguug

SEQ ID NO: 1427146 - RNA, 19 nt, Artificial Sequence
  Description of Artificial Sequence: Synthetic oligonucleotide
  Sense strand starting at position 3268 of SEQ ID NO: 1243592
cuuuaaucaccugagguca

SEQ ID NO: 1427147 - RNA, 19 nt, Artificial Sequence
  Description of Artificial Sequence: Synthetic oligonucleotide
  Antisense strand to SEQ ID NO: 1427146
ugaccucaggugauuaaag

SEQ ID NO: 1427148 - RNA, 19 nt, Artificial Sequence
  Description of Artificial Sequence: Synthetic oligonucleotide
  Sense strand starting at position 3518 of SEQ ID NO: 1243592
ccucucguugcugaaugau

SEQ ID NO: 1427149 - RNA, 19 nt, Artificial Sequence
  Description of Artificial Sequence: Synthetic oligonucleotide
  Antisense strand to SEQ ID NO: 1427148
aucauucagcaacgagagg

SEQ ID NO: 1427150 - RNA, 19 nt, Artificial Sequence
  Description of Artificial Sequence: Synthetic oligonucleotide
  Sense strand starting at position 3615 of SEQ ID NO: 1243592
ucucauaugucucugguga

SEQ ID NO: 1427151 - RNA, 19 nt, Artificial Sequence
  Description of Artificial Sequence: Synthetic oligonucleotide
  Antisense strand to SEQ ID NO: 1427150
ucaccagagacauaugaga

SEQ ID NO: 1427152 - RNA, 19 nt, Artificial Sequence
  Description of Artificial Sequence: Synthetic oligonucleotide
  Sense strand starting at position 3616 of SEQ ID NO: 1243592
cucauaugucucuggugac

SEQ ID NO: 1427153 - RNA, 19 nt, Artificial Sequence
  Description of Artificial Sequence: Synthetic oligonucleotide
  Antisense strand to SEQ ID NO: 1427152
gucaccagagacauaugag

SEQ ID NO: 1427154 - RNA, 19 nt, Artificial Sequence
  Description of Artificial Sequence: Synthetic oligonucleotide
  Sense strand starting at position 3620 of SEQ ID NO: 1243592
uaugucucuggugaccaua

SEQ ID NO: 1427155 - RNA, 19 nt, Artificial Sequence
  Description of Artificial Sequence: Synthetic oligonucleotide
  Antisense strand to SEQ ID NO: 1427154
uauggucaccagagacaua

SEQ ID NO: 1427156 - RNA, 19 nt, Artificial Sequence
  Description of Artificial Sequence: Synthetic oligonucleotide
  Sense strand starting at position 3622 of SEQ ID NO: 1243592
ugucucuggugaccauaua

SEQ ID NO: 1427157 - RNA, 19 nt, Artificial Sequence
  Description of Artificial Sequence: Synthetic oligonucleotide
  Antisense strand to SEQ ID NO: 1427156
uauauggucaccagagaca

SEQ ID NO: 1427158 - RNA, 19 nt, Artificial Sequence
  Description of Artificial Sequence: Synthetic oligonucleotide
  Sense strand starting at position 3623 of SEQ ID NO: 1243592
gucucuggugaccauauau

SEQ ID NO: 1427159 - RNA, 19 nt, Artificial Sequence
  Description of Artificial Sequence: Synthetic oligonucleotide
  Antisense strand to SEQ ID NO: 1427158
auauauggucaccagagac

SEQ ID NO: 1427160 - RNA, 19 nt, Artificial Sequence
  Description of Artificial Sequence: Synthetic oligonucleotide
  Sense strand starting at position 3642 of SEQ ID NO: 1243592
gggacagcagucugaagua

SEQ ID NO: 1427161 - RNA, 19 nt, Artificial Sequence
  Description of Artificial Sequence: Synthetic oligonucleotide
  Antisense strand to SEQ ID NO: 1427160
uacuucagacugcuguccc

SEQ ID NO: 1427162 - RNA, 19 nt, Artificial Sequence
  Description of Artificial Sequence: Synthetic oligonucleotide
  Sense strand starting at position 3674 of SEQ ID NO: 1243592
gugagagguuagguuuauc

SEQ ID NO: 1427163 - RNA, 19 nt, Artificial Sequence
  Description of Artificial Sequence: Synthetic oligonucleotide
  Antisense strand to SEQ ID NO: 1427162
gauaaaccuaaccucucac

SEQ ID NO: 1427164 - RNA, 19 nt, Artificial Sequence
  Description of Artificial Sequence: Synthetic oligonucleotide
  Sense strand starting at position 3677 of SEQ ID NO: 1243592
agagguuagguuuaucuuu

SEQ ID NO: 1427165 - RNA, 19 nt, Artificial Sequence
  Description of Artificial Sequence: Synthetic oligonucleotide
  Antisense strand to SEQ ID NO: 1427164
aaagauaaaccuaaccucu

SEQ ID NO: 1427166 - RNA, 19 nt, Artificial Sequence
  Description of Artificial Sequence: Synthetic oligonucleotide
  Sense strand starting at position 3682 of SEQ ID NO: 1243592
uuagguuuaucuuugggag

SEQ ID NO: 1427167 - RNA, 19 nt, Artificial Sequence
  Description of Artificial Sequence: Synthetic oligonucleotide
  Antisense strand to SEQ ID NO: 1427166
cucccaaagauaaaccuaa

SEQ ID NO: 1427168 - RNA, 19 nt, Artificial Sequence
  Description of Artificial Sequence: Synthetic oligonucleotide
  Sense strand starting at position 3715 of SEQ ID NO: 1243592
uguguacuccgaggucuga

SEQ ID NO: 1427169 - RNA, 19 nt, Artificial Sequence
  Description of Artificial Sequence: Synthetic oligonucleotide
  Antisense strand to SEQ ID NO: 1427168
ucagaccucggaguacaca

SEQ ID NO: 1427170 - RNA, 19 nt, Artificial Sequence
  Description of Artificial Sequence: Synthetic oligonucleotide
  Sense strand starting at position 3831 of SEQ ID NO: 1243592
uguuuccucgaauggcuua

SEQ ID NO: 1427171 - RNA, 19 nt, Artificial Sequence
  Description of Artificial Sequence: Synthetic oligonucleotide
  Antisense strand to SEQ ID NO: 1427170
uaagccauucgaggaaaca

SEQ ID NO: 1427172 - RNA, 19 nt, Artificial Sequence
  Description of Artificial Sequence: Synthetic oligonucleotide
  Sense strand starting at position 3956 of SEQ ID NO: 1243592
uaggaacagcucuggaaau

SEQ ID NO: 1427173 - RNA, 19 nt, Artificial Sequence
  Description of Artificial Sequence: Synthetic oligonucleotide
  Antisense strand to SEQ ID NO: 1427172
auuuccagagcuguuccua

SEQ ID NO: 1427174 - RNA, 19 nt, Artificial Sequence
  Description of Artificial Sequence: Synthetic oligonucleotide
  Sense strand starting at position 399 of SEQ ID NO: 1243593
ccaugauugugccacaguc

SEQ ID NO: 1427175 - RNA, 19 nt, Artificial Sequence
  Description of Artificial Sequence: Synthetic oligonucleotide
  Antisense strand to SEQ ID NO: 1427174
gacuguggcacaaucaugg

SEQ ID NO: 1427176 - RNA, 19 nt, Artificial Sequence
  Description of Artificial Sequence: Synthetic oligonucleotide
  Sense strand starting at position 699 of SEQ ID NO: 1243593
cgccuuauucucuggcaca

SEQ ID NO: 1427177 - RNA, 19 nt, Artificial Sequence
  Description of Artificial Sequence: Synthetic oligonucleotide
  Antisense strand to SEQ ID NO: 1427176
ugugccagagaauaaggcg

SEQ ID NO: 1427178 - RNA, 19 nt, Artificial Sequence
  Description of Artificial Sequence: Synthetic oligonucleotide
  Sense strand starting at position 700 of SEQ ID NO: 1243593
gccuuauucucuggcacau

SEQ ID NO: 1427179 - RNA, 19 nt, Artificial Sequence
  Description of Artificial Sequence: Synthetic oligonucleotide
  Antisense strand to SEQ ID NO: 1427178
augugccagagaauaaggc

SEQ ID NO: 1427180 - RNA, 19 nt, Artificial Sequence
  Description of Artificial Sequence: Synthetic oligonucleotide
  Sense strand starting at position 729 of SEQ ID NO: 1243593
caggcacuccuguaucaag

SEQ ID NO: 1427181 - RNA, 19 nt, Artificial Sequence
  Description of Artificial Sequence: Synthetic oligonucleotide
  Antisense strand to SEQ ID NO: 1427180
cuugauacaggagugccug

SEQ ID NO: 1427182 - RNA, 19 nt, Artificial Sequence
  Description of Artificial Sequence: Synthetic oligonucleotide
  Sense strand starting at position 749 of SEQ ID NO: 1243593
gcagaaacccuuggugagu

SEQ ID NO: 1427183 - RNA, 19 nt, Artificial Sequence
  Description of Artificial Sequence: Synthetic oligonucleotide
  Antisense strand to SEQ ID NO: 1427182
acucaccaaggguuucugc

SEQ ID NO: 1427184 - RNA, 19 nt, Artificial Sequence
  Description of Artificial Sequence: Synthetic oligonucleotide
  Sense strand starting at position 755 of SEQ ID NO: 1243593
acccuuggugagugaggaa

SEQ ID NO: 1427185 - RNA, 19 nt, Artificial Sequence
  Description of Artificial Sequence: Synthetic oligonucleotide
  Antisense strand to SEQ ID NO: 1427184
uuccucacucaccaagggu

SEQ ID NO: 1427186 - RNA, 19 nt, Artificial Sequence
  Description of Artificial Sequence: Synthetic oligonucleotide
  Sense strand starting at position 797 of SEQ ID NO: 1243593
cugaaaugcuuccuaggac

SEQ ID NO: 1427187 - RNA, 19 nt, Artificial Sequence
  Description of Artificial Sequence: Synthetic oligonucleotide
  Antisense strand to SEQ ID NO: 1427186
guccuaggaagcauuucag

SEQ ID NO: 1427188 - RNA, 19 nt, Artificial Sequence
  Description of Artificial Sequence: Synthetic oligonucleotide
  Sense strand starting at position 798 of SEQ ID NO: 1243593
ugaaaugcuuccuaggacu

SEQ ID NO: 1427189 - RNA, 19 nt, Artificial Sequence
  Description of Artificial Sequence: Synthetic oligonucleotide
  Antisense strand to SEQ ID NO: 1427188
aguccuaggaagcauuuca

SEQ ID NO: 1427190 - RNA, 19 nt, Artificial Sequence
  Description of Artificial Sequence: Synthetic oligonucleotide
  Sense strand starting at position 918 of SEQ ID NO: 1243593
gcuccugaucucgggaacu

SEQ ID NO: 1427191 - RNA, 19 nt, Artificial Sequence
  Description of Artificial Sequence: Synthetic oligonucleotide
  Antisense strand to SEQ ID NO: 1427190
aguucccgagaucaggagc

SEQ ID NO: 1427192 - RNA, 19 nt, Artificial Sequence
  Description of Artificial Sequence: Synthetic oligonucleotide
  Sense strand starting at position 920 of SEQ ID NO: 1243593
uccugaucucgggaacucu

SEQ ID NO: 1427193 - RNA, 19 nt, Artificial Sequence
  Description of Artificial Sequence: Synthetic oligonucleotide
  Antisense strand to SEQ ID NO: 1427192
agaguucccgagaucagga

SEQ ID NO: 1427194 - RNA, 19 nt, Artificial Sequence
  Description of Artificial Sequence: Synthetic oligonucleotide
  Sense strand starting at position 989 of SEQ ID NO: 1243593
gggaggaagugcuguuaga

SEQ ID NO: 1427195 - RNA, 19 nt, Artificial Sequence
  Description of Artificial Sequence: Synthetic oligonucleotide
  Antisense strand to SEQ ID NO: 1427194
ucuaacagcacuuccuccc

SEQ ID NO: 1427196 - RNA, 19 nt, Artificial Sequence
  Description of Artificial Sequence: Synthetic oligonucleotide
  Sense strand starting at position 1338 of SEQ ID NO: 1243593
ggcucuuccgcaggcaauu

SEQ ID NO: 1427197 - RNA, 19 nt, Artificial Sequence
  Description of Artificial Sequence: Synthetic oligonucleotide
  Antisense strand to SEQ ID NO: 1427196
aauugccugcggaagagcc

SEQ ID NO: 1427198 - RNA, 19 nt, Artificial Sequence
  Description of Artificial Sequence: Synthetic oligonucleotide
  Sense strand starting at position 1425 of SEQ ID NO: 1243593
ggacaacucuugccagcau

SEQ ID NO: 1427199 - RNA, 19 nt, Artificial Sequence
  Description of Artificial Sequence: Synthetic oligonucleotide
  Antisense strand to SEQ ID NO: 1427198
augcuggcaagaguugucc

SEQ ID NO: 1427200 - RNA, 19 nt, Artificial Sequence
  Description of Artificial Sequence: Synthetic oligonucleotide
  Sense strand starting at position 1597 of SEQ ID NO: 1243593
aagugaaguuuccagagau

SEQ ID NO: 1427201 - RNA, 19 nt, Artificial Sequence
  Description of Artificial Sequence: Synthetic oligonucleotide
  Antisense strand to SEQ ID NO: 1427200
aucucuggaaacuucacuu

SEQ ID NO: 1427202 - RNA, 19 nt, Artificial Sequence
  Description of Artificial Sequence: Synthetic oligonucleotide
  Sense strand starting at position 2058 of SEQ ID NO: 1243593
gggacugauucuccaagca

SEQ ID NO: 1427203 - RNA, 19 nt, Artificial Sequence
  Description of Artificial Sequence: Synthetic oligonucleotide
  Antisense strand to SEQ ID NO: 1427202
ugcuuggagaaucaguccc

SEQ ID NO: 1427204 - RNA, 19 nt, Artificial Sequence
  Description of Artificial Sequence: Synthetic oligonucleotide
  Sense strand starting at position 2151 of SEQ ID NO: 1243593
aggugaacacccuggguua

SEQ ID NO: 1427205 - RNA, 19 nt, Artificial Sequence
  Description of Artificial Sequence: Synthetic oligonucleotide
  Antisense strand to SEQ ID NO: 1427204
uaacccaggguguucaccu

SEQ ID NO: 1427206 - RNA, 19 nt, Artificial Sequence
  Description of Artificial Sequence: Synthetic oligonucleotide
  Sense strand starting at position 2200 of SEQ ID NO: 1243593
cugggucauccauguuaaa

SEQ ID NO: 1427207 - RNA, 19 nt, Artificial Sequence
  Description of Artificial Sequence: Synthetic oligonucleotide
  Antisense strand to SEQ ID NO: 1427206
uuuaacauggaugacccag

SEQ ID NO: 1427208 - RNA, 19 nt, Artificial Sequence
  Description of Artificial Sequence: Synthetic oligonucleotide
  Sense strand starting at position 2330 of SEQ ID NO: 1243593
acugacaguucuguauuau

SEQ ID NO: 1427209 - RNA, 19 nt, Artificial Sequence
  Description of Artificial Sequence: Synthetic oligonucleotide
  Antisense strand to SEQ ID NO: 1427208
auaauacagaacugucagu

SEQ ID NO: 1427210 - RNA, 19 nt, Artificial Sequence
  Description of Artificial Sequence: Synthetic oligonucleotide
  Sense strand starting at position 2331 of SEQ ID NO: 1243593
cugacaguucuguauuauc

SEQ ID NO: 1427211 - RNA, 19 nt, Artificial Sequence
  Description of Artificial Sequence: Synthetic oligonucleotide
  Antisense strand to SEQ ID NO: 1427210
gauaauacagaacugucag

SEQ ID NO: 1427212 - RNA, 19 nt, Artificial Sequence
  Description of Artificial Sequence: Synthetic oligonucleotide
  Sense strand starting at position 2639 of SEQ ID NO: 1243593
gagcgagacucagaucaaa

SEQ ID NO: 1427213 - RNA, 19 nt, Artificial Sequence
  Description of Artificial Sequence: Synthetic oligonucleotide
  Antisense strand to SEQ ID NO: 1427212
uuugaucugagucucgcuc

SEQ ID NO: 1427214 - RNA, 19 nt, Artificial Sequence
  Description of Artificial Sequence: Synthetic oligonucleotide
  Sense strand starting at position 2686 of SEQ ID NO: 1243593
uuucccaagugauuaaagu

SEQ ID NO: 1427215 - RNA, 19 nt, Artificial Sequence
  Description of Artificial Sequence: Synthetic oligonucleotide
  Antisense strand to SEQ ID NO: 1427214
acuuuaaucacuugggaaa

SEQ ID NO: 1427216 - RNA, 19 nt, Artificial Sequence
  Description of Artificial Sequence: Synthetic oligonucleotide
  Sense strand starting at position 2702 of SEQ ID NO: 1243593
agugaccaucccugaaaga

SEQ ID NO: 1427217 - RNA, 19 nt, Artificial Sequence
  Description of Artificial Sequence: Synthetic oligonucleotide
  Antisense strand to SEQ ID NO: 1427216
ucuuucagggauggucacu

SEQ ID NO: 1427218 - RNA, 19 nt, Artificial Sequence
  Description of Artificial Sequence: Synthetic oligonucleotide
  Sense strand starting at position 2735 of SEQ ID NO: 1243593
uucccuucuuccugaugua

SEQ ID NO: 1427219 - RNA, 19 nt, Artificial Sequence
  Description of Artificial Sequence: Synthetic oligonucleotide
  Antisense strand to SEQ ID NO: 1427218
uacaucaggaagaagggaa

SEQ ID NO: 1427220 - RNA, 19 nt, Artificial Sequence
  Description of Artificial Sequence: Synthetic oligonucleotide
  Sense strand starting at position 2778 of SEQ ID NO: 1243593
caagauggauccuggccaa

SEQ ID NO: 1427221 - RNA, 19 nt, Artificial Sequence
  Description of Artificial Sequence: Synthetic oligonucleotide
  Antisense strand to SEQ ID NO: 1427220
uuggccaggauccaucuug

SEQ ID NO: 1427222 - RNA, 19 nt, Artificial Sequence
  Description of Artificial Sequence: Synthetic oligonucleotide
  Sense strand starting at position 3084 of SEQ ID NO: 1243593
ccaaauugcugagauuaag

SEQ ID NO: 1427223 - RNA, 19 nt, Artificial Sequence
  Description of Artificial Sequence: Synthetic oligonucleotide
  Antisense strand to SEQ ID NO: 1427222
cuuaaucucagcaauuugg

SEQ ID NO: 1427224 - RNA, 19 nt, Artificial Sequence
  Description of Artificial Sequence: Synthetic oligonucleotide
  Sense strand starting at position 3092 of SEQ ID NO: 1243593
cugagauuaaggcgugaac

SEQ ID NO: 1427225 - RNA, 19 nt, Artificial Sequence
  Description of Artificial Sequence: Synthetic oligonucleotide
  Antisense strand to SEQ ID NO: 1427224
guucacgccuuaaucucag

SEQ ID NO: 1427226 - RNA, 19 nt, Artificial Sequence
  Description of Artificial Sequence: Synthetic oligonucleotide
  Sense strand starting at position 3094 of SEQ ID NO: 1243593
gagauuaaggcgugaacca

SEQ ID NO: 1427227 - RNA, 19 nt, Artificial Sequence
  Description of Artificial Sequence: Synthetic oligonucleotide
  Antisense strand to SEQ ID NO: 1427226
ugguucacgccuuaaucuc

SEQ ID NO: 1427228 - RNA, 19 nt, Artificial Sequence
  Description of Artificial Sequence: Synthetic oligonucleotide
  Sense strand starting at position 3585 of SEQ ID NO: 1243593
cggugauucucguccguca

SEQ ID NO: 1427229 - RNA, 19 nt, Artificial Sequence
  Description of Artificial Sequence: Synthetic oligonucleotide
  Antisense strand to SEQ ID NO: 1427228
ugacggacgagaaucaccg

SEQ ID NO: 1427230 - RNA, 19 nt, Artificial Sequence
  Description of Artificial Sequence: Synthetic oligonucleotide
  Sense strand starting at position 3589 of SEQ ID NO: 1243593
gauucucguccgucagcuu

SEQ ID NO: 1427231 - RNA, 19 nt, Artificial Sequence
  Description of Artificial Sequence: Synthetic oligonucleotide
  Antisense strand to SEQ ID NO: 1427230
aagcugacggacgagaauc

SEQ ID NO: 1427232 - RNA, 19 nt, Artificial Sequence
  Description of Artificial Sequence: Synthetic oligonucleotide
  Sense strand starting at position 3597 of SEQ ID NO: 1243593
uccgucagcuucgugagua

SEQ ID NO: 1427233 - RNA, 19 nt, Artificial Sequence
  Description of Artificial Sequence: Synthetic oligonucleotide
  Antisense strand to SEQ ID NO: 1427232
uacucacgaagcugacgga

SEQ ID NO: 1427234 - RNA, 19 nt, Artificial Sequence
  Description of Artificial Sequence: Synthetic oligonucleotide
  Sense strand starting at position 3598 of SEQ ID NO: 1243593
ccgucagcuucgugaguag

SEQ ID NO: 1427235 - RNA, 19 nt, Artificial Sequence
  Description of Artificial Sequence: Synthetic oligonucleotide
  Antisense strand to SEQ ID NO: 1427234
cuacucacgaagcugacgg

SEQ ID NO: 1427236 - RNA, 19 nt, Artificial Sequence
  Description of Artificial Sequence: Synthetic oligonucleotide
  Sense strand starting at position 3859 of SEQ ID NO: 1243593
caaagaaauuggccugagu

SEQ ID NO: 1427237 - RNA, 19 nt, Artificial Sequence
  Description of Artificial Sequence: Synthetic oligonucleotide
  Antisense strand to SEQ ID NO: 1427236
acucaggccaauuucuuug

SEQ ID NO: 1427238 - RNA, 19 nt, Artificial Sequence
  Description of Artificial Sequence: Synthetic oligonucleotide
  Sense strand starting at position 3861 of SEQ ID NO: 1243593
aagaaauuggccugaguua

SEQ ID NO: 1427239 - RNA, 19 nt, Artificial Sequence
  Description of Artificial Sequence: Synthetic oligonucleotide
  Antisense strand to SEQ ID NO: 1427238
uaacucaggccaauuucuu

SEQ ID NO: 1427240 - RNA, 19 nt, Artificial Sequence
  Description of Artificial Sequence: Synthetic oligonucleotide
  Sense strand starting at position 3862 of SEQ ID NO: 1243593
agaaauuggccugaguuac

SEQ ID NO: 1427241 - RNA, 19 nt, Artificial Sequence
  Description of Artificial Sequence: Synthetic oligonucleotide
  Antisense strand to SEQ ID NO: 1427240
guaacucaggccaauuucu

SEQ ID NO: 1427242 - RNA, 19 nt, Artificial Sequence
  Description of Artificial Sequence: Synthetic oligonucleotide
  Sense strand starting at position 3873 of SEQ ID NO: 1243593
ugaguuacucagugucaua

SEQ ID NO: 1427243 - RNA, 19 nt, Artificial Sequence
  Description of Artificial Sequence: Synthetic oligonucleotide
  Antisense strand to SEQ ID NO: 1427242
uaugacacugaguaacuca

SEQ ID NO: 1427244 - RNA, 19 nt, Artificial Sequence
  Description of Artificial Sequence: Synthetic oligonucleotide
  Sense strand starting at position 3893 of SEQ ID NO: 1243593
aaaguaagugccuguagga

SEQ ID NO: 1427245 - RNA, 19 nt, Artificial Sequence
  Description of Artificial Sequence: Synthetic oligonucleotide
  Antisense strand to SEQ ID NO: 1427244
uccuacaggcacuuacuuu

SEQ ID NO: 1427246 - RNA, 19 nt, Artificial Sequence
  Description of Artificial Sequence: Synthetic oligonucleotide
  Sense strand starting at position 312 of SEQ ID NO: 1243594
auugguaaauugggcaaau

SEQ ID NO: 1427247 - RNA, 19 nt, Artificial Sequence
  Description of Artificial Sequence: Synthetic oligonucleotide
  Antisense strand to SEQ ID NO: 1427246
auuugcccaauuuaccaau

SEQ ID NO: 1427248 - RNA, 19 nt, Artificial Sequence
  Description of Artificial Sequence: Synthetic oligonucleotide
  Sense strand starting at position 314 of SEQ ID NO: 1243594
ugguaaauugggcaaaugu

SEQ ID NO: 1427249 - RNA, 19 nt, Artificial Sequence
  Description of Artificial Sequence: Synthetic oligonucleotide
  Antisense strand to SEQ ID NO: 1427248
acauuugcccaauuuacca

SEQ ID NO: 1427250 - RNA, 19 nt, Artificial Sequence
  Description of Artificial Sequence: Synthetic oligonucleotide
  Sense strand starting at position 323 of SEQ ID NO: 1243594
gggcaaauguaagaucaga

SEQ ID NO: 1427251 - RNA, 19 nt, Artificial Sequence
  Description of Artificial Sequence: Synthetic oligonucleotide
  Antisense strand to SEQ ID NO: 1427250
ucugaucuuacauuugccc

SEQ ID NO: 1427252 - RNA, 19 nt, Artificial Sequence
  Description of Artificial Sequence: Synthetic oligonucleotide
  Sense strand starting at position 328 of SEQ ID NO: 1243594
aauguaagaucagaguugu

SEQ ID NO: 1427253 - RNA, 19 nt, Artificial Sequence
  Description of Artificial Sequence: Synthetic oligonucleotide
  Antisense strand to SEQ ID NO: 1427252
acaacucugaucuuacauu

SEQ ID NO: 1427254 - RNA, 19 nt, Artificial Sequence
  Description of Artificial Sequence: Synthetic oligonucleotide
  Sense strand starting at position 334 of SEQ ID NO: 1243594
agaucagaguugucuccaa

SEQ ID NO: 1427255 - RNA, 19 nt, Artificial Sequence
  Description of Artificial Sequence: Synthetic oligonucleotide
  Antisense strand to SEQ ID NO: 1427254
uuggagacaacucugaucu

SEQ ID NO: 1427256 - RNA, 19 nt, Artificial Sequence
  Description of Artificial Sequence: Synthetic oligonucleotide
  Sense strand starting at position 389 of SEQ ID NO: 1243594
gagugagccuguuuacaag

SEQ ID NO: 1427257 - RNA, 19 nt, Artificial Sequence
  Description of Artificial Sequence: Synthetic oligonucleotide
  Antisense strand to SEQ ID NO: 1427256
cuuguaaacaggcucacuc

SEQ ID NO: 1427258 - RNA, 19 nt, Artificial Sequence
  Description of Artificial Sequence: Synthetic oligonucleotide
  Sense strand starting at position 395 of SEQ ID NO: 1243594
gccuguuuacaagaggaca

SEQ ID NO: 1427259 - RNA, 19 nt, Artificial Sequence
  Description of Artificial Sequence: Synthetic oligonucleotide
  Antisense strand to SEQ ID NO: 1427258
uguccucuuguaaacaggc

SEQ ID NO: 1427260 - RNA, 19 nt, Artificial Sequence
  Description of Artificial Sequence: Synthetic oligonucleotide
  Sense strand starting at position 454 of SEQ ID NO: 1243594
caguuuauguaaggcaaua

SEQ ID NO: 1427261 - RNA, 19 nt, Artificial Sequence
  Description of Artificial Sequence: Synthetic oligonucleotide
  Antisense strand to SEQ ID NO: 1427260
uauugccuuacauaaacug

SEQ ID NO: 1427262 - RNA, 19 nt, Artificial Sequence
  Description of Artificial Sequence: Synthetic oligonucleotide
  Sense strand starting at position 644 of SEQ ID NO: 1243594
guguuaggauuacaaguau

SEQ ID NO: 1427263 - RNA, 19 nt, Artificial Sequence
  Description of Artificial Sequence: Synthetic oligonucleotide
  Antisense strand to SEQ ID NO: 1427262
auacuuguaauccuaacac

SEQ ID NO: 1427264 - RNA, 19 nt, Artificial Sequence
  Description of Artificial Sequence: Synthetic oligonucleotide
  Sense strand starting at position 854 of SEQ ID NO: 1243594
uaaugaguuuguguugguu

SEQ ID NO: 1427265 - RNA, 19 nt, Artificial Sequence
  Description of Artificial Sequence: Synthetic oligonucleotide
  Antisense strand to SEQ ID NO: 1427264
aaccaacacaaacucauua

SEQ ID NO: 1427266 - RNA, 19 nt, Artificial Sequence
  Description of Artificial Sequence: Synthetic oligonucleotide
  Sense strand starting at position 890 of SEQ ID NO: 1243594
cagauuaaagcagaucgua

SEQ ID NO: 1427267 - RNA, 19 nt, Artificial Sequence
  Description of Artificial Sequence: Synthetic oligonucleotide
  Antisense strand to SEQ ID NO: 1427266
uacgaucugcuuuaaucug

SEQ ID NO: 1427268 - RNA, 19 nt, Artificial Sequence
  Description of Artificial Sequence: Synthetic oligonucleotide
  Sense strand starting at position 893 of SEQ ID NO: 1243594
auuaaagcagaucguaauu

SEQ ID NO: 1427269 - RNA, 19 nt, Artificial Sequence
  Description of Artificial Sequence: Synthetic oligonucleotide
  Antisense strand to SEQ ID NO: 1427268
aauuacgaucugcuuuaau

SEQ ID NO: 1427270 - RNA, 19 nt, Artificial Sequence
  Description of Artificial Sequence: Synthetic oligonucleotide
  Sense strand starting at position 895 of SEQ ID NO: 1243594
uaaagcagaucguaauuua

SEQ ID NO: 1427271 - RNA, 19 nt, Artificial Sequence
  Description of Artificial Sequence: Synthetic oligonucleotide
  Antisense strand to SEQ ID NO: 1427270
uaaauuacgaucugcuuua

SEQ ID NO: 1427272 - RNA, 19 nt, Artificial Sequence
  Description of Artificial Sequence: Synthetic oligonucleotide
  Sense strand starting at position 939 of SEQ ID NO: 1243594
cucaccaugugguauuaaa

SEQ ID NO: 1427273 - RNA, 19 nt, Artificial Sequence
  Description of Artificial Sequence: Synthetic oligonucleotide
  Antisense strand to SEQ ID NO: 1427272
uuuaauaccacauggugag

SEQ ID NO: 1427274 - RNA, 19 nt, Artificial Sequence
  Description of Artificial Sequence: Synthetic oligonucleotide
  Sense strand starting at position 982 of SEQ ID NO: 1243594
ugaauauacucaggacuac

SEQ ID NO: 1427275 - RNA, 19 nt, Artificial Sequence
  Description of Artificial Sequence: Synthetic oligonucleotide
  Antisense strand to SEQ ID NO: 1427274
guaguccugaguauauuca

SEQ ID NO: 1427276 - RNA, 19 nt, Artificial Sequence
  Description of Artificial Sequence: Synthetic oligonucleotide
  Sense strand starting at position 994 of SEQ ID NO: 1243594
ggacuacugagcuguacac

SEQ ID NO: 1427277 - RNA, 19 nt, Artificial Sequence
  Description of Artificial Sequence: Synthetic oligonucleotide
  Antisense strand to SEQ ID NO: 1427276
guguacagcucaguagucc

SEQ ID NO: 1427278 - RNA, 19 nt, Artificial Sequence
  Description of Artificial Sequence: Synthetic oligonucleotide
  Sense strand starting at position 1020 of SEQ ID NO: 1243594
ugguuaugaugguaaaugu

SEQ ID NO: 1427279 - RNA, 19 nt, Artificial Sequence
  Description of Artificial Sequence: Synthetic oligonucleotide
  Antisense strand to SEQ ID NO: 1427278
acauuuaccaucauaacca

SEQ ID NO: 1427280 - RNA, 19 nt, Artificial Sequence
  Description of Artificial Sequence: Synthetic oligonucleotide
  Sense strand starting at position 1169 of SEQ ID NO: 1243594
gcauuauuauuguuagcac

SEQ ID NO: 1427281 - RNA, 19 nt, Artificial Sequence
  Description of Artificial Sequence: Synthetic oligonucleotide
  Antisense strand to SEQ ID NO: 1427280
gugcuaacaauaauaaugc

SEQ ID NO: 1427282 - RNA, 19 nt, Artificial Sequence
  Description of Artificial Sequence: Synthetic oligonucleotide
  Sense strand starting at position 1207 of SEQ ID NO: 1243594
aacugagagcgaugaagua

SEQ ID NO: 1427283 - RNA, 19 nt, Artificial Sequence
  Description of Artificial Sequence: Synthetic oligonucleotide
  Antisense strand to SEQ ID NO: 1427282
uacuucaucgcucucaguu

SEQ ID NO: 1427284 - RNA, 19 nt, Artificial Sequence
  Description of Artificial Sequence: Synthetic oligonucleotide
  Sense strand starting at position 1314 of SEQ ID NO: 1243594
ugccuuaccuggcugaaga

SEQ ID NO: 1427285 - RNA, 19 nt, Artificial Sequence
  Description of Artificial Sequence: Synthetic oligonucleotide
  Antisense strand to SEQ ID NO: 1427284
ucuucagccagguaaggca

SEQ ID NO: 1427286 - RNA, 19 nt, Artificial Sequence
  Description of Artificial Sequence: Synthetic oligonucleotide
  Sense strand starting at position 1315 of SEQ ID NO: 1243594
gccuuaccuggcugaagaa

SEQ ID NO: 1427287 - RNA, 19 nt, Artificial Sequence
  Description of Artificial Sequence: Synthetic oligonucleotide
  Antisense strand to SEQ ID NO: 1427286
uucuucagccagguaaggc

SEQ ID NO: 1427288 - RNA, 19 nt, Artificial Sequence
  Description of Artificial Sequence: Synthetic oligonucleotide
  Sense strand starting at position 1511 of SEQ ID NO: 1243594
gagccagguugauagguuu

SEQ ID NO: 1427289 - RNA, 19 nt, Artificial Sequence
  Description of Artificial Sequence: Synthetic oligonucleotide
  Antisense strand to SEQ ID NO: 1427288
aaaccuaucaaccuggcuc

SEQ ID NO: 1427290 - RNA, 19 nt, Artificial Sequence
  Description of Artificial Sequence: Synthetic oligonucleotide
  Sense strand starting at position 1546 of SEQ ID NO: 1243594
uuuauugaguacucagaac

SEQ ID NO: 1427291 - RNA, 19 nt, Artificial Sequence
  Description of Artificial Sequence: Synthetic oligonucleotide
  Antisense strand to SEQ ID NO: 1427290
guucugaguacucaauaaa

SEQ ID NO: 1427292 - RNA, 19 nt, Artificial Sequence
  Description of Artificial Sequence: Synthetic oligonucleotide
  Sense strand starting at position 3707 of SEQ ID NO: 1243594
cuggguaauguuugguauc

SEQ ID NO: 1427293 - RNA, 19 nt, Artificial Sequence
  Description of Artificial Sequence: Synthetic oligonucleotide
  Antisense strand to SEQ ID NO: 1427292
gauaccaaacauuacccag

SEQ ID NO: 1427294 - RNA, 19 nt, Artificial Sequence
  Description of Artificial Sequence: Synthetic oligonucleotide
  Sense strand starting at position 3708 of SEQ ID NO: 1243594
uggguaauguuugguaucu

SEQ ID NO: 1427295 - RNA, 19 nt, Artificial Sequence
  Description of Artificial Sequence: Synthetic oligonucleotide
  Antisense strand to SEQ ID NO: 1427294
agauaccaaacauuaccca

SEQ ID NO: 1427296 - RNA, 19 nt, Artificial Sequence
  Description of Artificial Sequence: Synthetic oligonucleotide
  Sense strand starting at position 3709 of SEQ ID NO: 1243594
ggguaauguuugguaucug

SEQ ID NO: 1427297 - RNA, 19 nt, Artificial Sequence
  Description of Artificial Sequence: Synthetic oligonucleotide
  Antisense strand to SEQ ID NO: 1427296
cagauaccaaacauuaccc

SEQ ID NO: 1427298 - RNA, 19 nt, Artificial Sequence
  Description of Artificial Sequence: Synthetic oligonucleotide
  Sense strand starting at position 3737 of SEQ ID NO: 1243594
cuauuuaagucucagaagu

SEQ ID NO: 1427299 - RNA, 19 nt, Artificial Sequence
  Description of Artificial Sequence: Synthetic oligonucleotide
  Antisense strand to SEQ ID NO: 1427298
acuucugagacuuaaauag

SEQ ID NO: 1427300 - RNA, 19 nt, Artificial Sequence
  Description of Artificial Sequence: Synthetic oligonucleotide
  Sense strand starting at position 3785 of SEQ ID NO: 1243594
gccucuaucugggaaccua

SEQ ID NO: 1427301 - RNA, 19 nt, Artificial Sequence
  Description of Artificial Sequence: Synthetic oligonucleotide
  Antisense strand to SEQ ID NO: 1427300
uagguucccagauagaggc

SEQ ID NO: 1427302 - RNA, 19 nt, Artificial Sequence
  Description of Artificial Sequence: Synthetic oligonucleotide
  Sense strand starting at position 3793 of SEQ ID NO: 1243594
cugggaaccuauccugagu

SEQ ID NO: 1427303 - RNA, 19 nt, Artificial Sequence
  Description of Artificial Sequence: Synthetic oligonucleotide
  Antisense strand to SEQ ID NO: 1427302
acucaggauagguucccag

SEQ ID NO: 1427304 - RNA, 19 nt, Artificial Sequence
  Description of Artificial Sequence: Synthetic oligonucleotide
  Sense strand starting at position 3795 of SEQ ID NO: 1243594
gggaaccuauccugaguua

SEQ ID NO: 1427305 - RNA, 19 nt, Artificial Sequence
  Description of Artificial Sequence: Synthetic oligonucleotide
  Antisense strand to SEQ ID NO: 1427304
uaacucaggauagguuccc

SEQ ID NO: 1427306 - RNA, 19 nt, Artificial Sequence
  Description of Artificial Sequence: Synthetic oligonucleotide
  Sense strand starting at position 3806 of SEQ ID NO: 1243594
cugaguuauuaacagguuu

SEQ ID NO: 1427307 - RNA, 19 nt, Artificial Sequence
  Description of Artificial Sequence: Synthetic oligonucleotide
  Antisense strand to SEQ ID NO: 1427306
aaaccuguuaauaacucag

SEQ ID NO: 1427308 - RNA, 19 nt, Artificial Sequence
  Description of Artificial Sequence: Synthetic oligonucleotide
  Sense strand starting at position 3864 of SEQ ID NO: 1243594
ggaccaagguucuuaccau

SEQ ID NO: 1427309 - RNA, 19 nt, Artificial Sequence
  Description of Artificial Sequence: Synthetic oligonucleotide
  Antisense strand to SEQ ID NO: 1427308
augguaagaaccuuggucc

SEQ ID NO: 1427310 - RNA, 19 nt, Artificial Sequence
  Description of Artificial Sequence: Synthetic oligonucleotide
  Sense strand starting at position 3892 of SEQ ID NO: 1243594
caccuugugucaccagaag

SEQ ID NO: 1427311 - RNA, 19 nt, Artificial Sequence
  Description of Artificial Sequence: Synthetic oligonucleotide
  Antisense strand to SEQ ID NO: 1427310
cuucuggugacacaaggug

SEQ ID NO: 1427312 - RNA, 19 nt, Artificial Sequence
  Description of Artificial Sequence: Synthetic oligonucleotide
  Sense strand starting at position 3908 of SEQ ID NO: 1243594
aaguaauuguaagguucuu

SEQ ID NO: 1427313 - RNA, 19 nt, Artificial Sequence
  Description of Artificial Sequence: Synthetic oligonucleotide
  Antisense strand to SEQ ID NO: 1427312
aagaaccuuacaauuacuu

SEQ ID NO: 1427314 - RNA, 19 nt, Artificial Sequence
  Description of Artificial Sequence: Synthetic oligonucleotide
  Sense strand starting at position 3913 of SEQ ID NO: 1243594
auuguaagguucuuaaauc

SEQ ID NO: 1427315 - RNA, 19 nt, Artificial Sequence
  Description of Artificial Sequence: Synthetic oligonucleotide
  Antisense strand to SEQ ID NO: 1427314
gauuuaagaaccuuacaau

SEQ ID NO: 1427316 - RNA, 19 nt, Artificial Sequence
  Description of Artificial Sequence: Synthetic oligonucleotide
  Sense strand starting at position 3975 of SEQ ID NO: 1243594
gcagaauucuuagcagaua

SEQ ID NO: 1427317 - RNA, 19 nt, Artificial Sequence
  Description of Artificial Sequence: Synthetic oligonucleotide
  Antisense strand to SEQ ID NO: 1427316
uaucugcuaagaauucugc

SEQ ID NO: 1427318 - RNA, 19 nt, Artificial Sequence
  Description of Artificial Sequence: Synthetic oligonucleotide
  Sense strand starting at position 90 of SEQ ID NO: 1243595
gccuguggccuguacucau

SEQ ID NO: 1427319 - RNA, 19 nt, Artificial Sequence
  Description of Artificial Sequence: Synthetic oligonucleotide
  Antisense strand to SEQ ID NO: 1427318
augaguacaggccacaggc

SEQ ID NO: 1427320 - RNA, 19 nt, Artificial Sequence
  Description of Artificial Sequence: Synthetic oligonucleotide
  Sense strand starting at position 109 of SEQ ID NO: 1243595
cucuccaguucuggaggaa

SEQ ID NO: 1427321 - RNA, 19 nt, Artificial Sequence
  Description of Artificial Sequence: Synthetic oligonucleotide
  Antisense strand to SEQ ID NO: 1427320
uuccuccagaacuggagag

SEQ ID NO: 1427322 - RNA, 19 nt, Artificial Sequence
  Description of Artificial Sequence: Synthetic oligonucleotide
  Sense strand starting at position 518 of SEQ ID NO: 1243595
gcgcacacauggucugaua

SEQ ID NO: 1427323 - RNA, 19 nt, Artificial Sequence
  Description of Artificial Sequence: Synthetic oligonucleotide
  Antisense strand to SEQ ID NO: 1427322
uaucagaccaugugugcgc

SEQ ID NO: 1427324 - RNA, 19 nt, Artificial Sequence
  Description of Artificial Sequence: Synthetic oligonucleotide
  Sense strand starting at position 520 of SEQ ID NO: 1243595
gcacacauggucugauacu

SEQ ID NO: 1427325 - RNA, 19 nt, Artificial Sequence
  Description of Artificial Sequence: Synthetic oligonucleotide
  Antisense strand to SEQ ID NO: 1427324
aguaucagaccaugugugc

SEQ ID NO: 1427326 - RNA, 19 nt, Artificial Sequence
  Description of Artificial Sequence: Synthetic oligonucleotide
  Sense strand starting at position 939 of SEQ ID NO: 1243595
guauguaucuggccucuuu

SEQ ID NO: 1427327 - RNA, 19 nt, Artificial Sequence
  Description of Artificial Sequence: Synthetic oligonucleotide
  Antisense strand to SEQ ID NO: 1427326
aaagaggccagauacauac

SEQ ID NO: 1427328 - RNA, 19 nt, Artificial Sequence
  Description of Artificial Sequence: Synthetic oligonucleotide
  Sense strand starting at position 1073 of SEQ ID NO: 1243595
cccucucagccagaaggau

SEQ ID NO: 1427329 - RNA, 19 nt, Artificial Sequence
  Description of Artificial Sequence: Synthetic oligonucleotide
  Antisense strand to SEQ ID NO: 1427328
auccuucuggcugagaggg

SEQ ID NO: 1427330 - RNA, 19 nt, Artificial Sequence
  Description of Artificial Sequence: Synthetic oligonucleotide
  Sense strand starting at position 1357 of SEQ ID NO: 1243595
ugguccuuugggugcaaga

SEQ ID NO: 1427331 - RNA, 19 nt, Artificial Sequence
  Description of Artificial Sequence: Synthetic oligonucleotide
  Antisense strand to SEQ ID NO: 1427330
ucuugcacccaaaggacca

SEQ ID NO: 1427332 - RNA, 19 nt, Artificial Sequence
  Description of Artificial Sequence: Synthetic oligonucleotide
  Sense strand starting at position 1359 of SEQ ID NO: 1243595
guccuuugggugcaagauc

SEQ ID NO: 1427333 - RNA, 19 nt, Artificial Sequence
  Description of Artificial Sequence: Synthetic oligonucleotide
  Antisense strand to SEQ ID NO: 1427332
gaucuugcacccaaaggac

SEQ ID NO: 1427334 - RNA, 19 nt, Artificial Sequence
  Description of Artificial Sequence: Synthetic oligonucleotide
  Sense strand starting at position 1367 of SEQ ID NO: 1243595
ggugcaagauccuguggca

SEQ ID NO: 1427335 - RNA, 19 nt, Artificial Sequence
  Description of Artificial Sequence: Synthetic oligonucleotide
  Antisense strand to SEQ ID NO: 1427334
ugccacaggaucuugcacc

SEQ ID NO: 1427336 - RNA, 19 nt, Artificial Sequence
  Description of Artificial Sequence: Synthetic oligonucleotide
  Sense strand starting at position 1639 of SEQ ID NO: 1243595
gcacucuugucucccaaga

SEQ ID NO: 1427337 - RNA, 19 nt, Artificial Sequence
  Description of Artificial Sequence: Synthetic oligonucleotide
  Antisense strand to SEQ ID NO: 1427336
ucuugggagacaagagugc

SEQ ID NO: 1427338 - RNA, 19 nt, Artificial Sequence
  Description of Artificial Sequence: Synthetic oligonucleotide
  Sense strand starting at position 1668 of SEQ ID NO: 1243595
auuugcaguucuuagagga

SEQ ID NO: 1427339 - RNA, 19 nt, Artificial Sequence
  Description of Artificial Sequence: Synthetic oligonucleotide
  Antisense strand to SEQ ID NO: 1427338
uccucuaagaacugcaaau

SEQ ID NO: 1427340 - RNA, 19 nt, Artificial Sequence
  Description of Artificial Sequence: Synthetic oligonucleotide
  Sense strand starting at position 1771 of SEQ ID NO: 1243595
agaagcuccuguuccuaaa

SEQ ID NO: 1427341 - RNA, 19 nt, Artificial Sequence
  Description of Artificial Sequence: Synthetic oligonucleotide
  Antisense strand to SEQ ID NO: 1427340
uuuaggaacaggagcuucu

SEQ ID NO: 1427342 - RNA, 19 nt, Artificial Sequence
  Description of Artificial Sequence: Synthetic oligonucleotide
  Sense strand starting at position 2000 of SEQ ID NO: 1243595
cgagcuaucccaggcagga

SEQ ID NO: 1427343 - RNA, 19 nt, Artificial Sequence
  Description of Artificial Sequence: Synthetic oligonucleotide
  Antisense strand to SEQ ID NO: 1427342
uccugccugggauagcucg

SEQ ID NO: 1427344 - RNA, 19 nt, Artificial Sequence
  Description of Artificial Sequence: Synthetic oligonucleotide
  Sense strand starting at position 2294 of SEQ ID NO: 1243595
gcacuuuaaguacguucua

SEQ ID NO: 1427345 - RNA, 19 nt, Artificial Sequence
  Description of Artificial Sequence: Synthetic oligonucleotide
  Antisense strand to SEQ ID NO: 1427344
uagaacguacuuaaagugc

SEQ ID NO: 1427346 - RNA, 19 nt, Artificial Sequence
  Description of Artificial Sequence: Synthetic oligonucleotide
  Sense strand starting at position 2667 of SEQ ID NO: 1243595
gaggaagcuucugcuccua

SEQ ID NO: 1427347 - RNA, 19 nt, Artificial Sequence
  Description of Artificial Sequence: Synthetic oligonucleotide
  Antisense strand to SEQ ID NO: 1427346
uaggagcagaagcuuccuc

SEQ ID NO: 1427348 - RNA, 19 nt, Artificial Sequence
  Description of Artificial Sequence: Synthetic oligonucleotide
  Sense strand starting at position 2779 of SEQ ID NO: 1243595
ggauacgcgucuccuuuaa

SEQ ID NO: 1427349 - RNA, 19 nt, Artificial Sequence
  Description of Artificial Sequence: Synthetic oligonucleotide
  Antisense strand to SEQ ID NO: 1427348
uuaaaggagacgcguaucc

SEQ ID NO: 1427350 - RNA, 19 nt, Artificial Sequence
  Description of Artificial Sequence: Synthetic oligonucleotide
  Sense strand starting at position 2783 of SEQ ID NO: 1243595
acgcgucuccuuuaaucca

SEQ ID NO: 1427351 - RNA, 19 nt, Artificial Sequence
  Description of Artificial Sequence: Synthetic oligonucleotide
  Antisense strand to SEQ ID NO: 1427350
uggauuaaaggagacgcgu

SEQ ID NO: 1427352 - RNA, 19 nt, Artificial Sequence
  Description of Artificial Sequence: Synthetic oligonucleotide
  Sense strand starting at position 2812 of SEQ ID NO: 1243595
cggccaaaugaguauuaac

SEQ ID NO: 1427353 - RNA, 19 nt, Artificial Sequence
  Description of Artificial Sequence: Synthetic oligonucleotide
  Antisense strand to SEQ ID NO: 1427352
guuaauacucauuuggccg

SEQ ID NO: 1427354 - RNA, 19 nt, Artificial Sequence
  Description of Artificial Sequence: Synthetic oligonucleotide
  Sense strand starting at position 2821 of SEQ ID NO: 1243595
gaguauuaaccacguuaua

SEQ ID NO: 1427355 - RNA, 19 nt, Artificial Sequence
  Description of Artificial Sequence: Synthetic oligonucleotide
  Antisense strand to SEQ ID NO: 1427354
uauaacgugguuaauacuc

SEQ ID NO: 1427356 - RNA, 19 nt, Artificial Sequence
  Description of Artificial Sequence: Synthetic oligonucleotide
  Sense strand starting at position 2918 of SEQ ID NO: 1243595
gggucagccuccugacaug

SEQ ID NO: 1427357 - RNA, 19 nt, Artificial Sequence
  Description of Artificial Sequence: Synthetic oligonucleotide
  Antisense strand to SEQ ID NO: 1427356
caugucaggaggcugaccc

SEQ ID NO: 1427358 - RNA, 19 nt, Artificial Sequence
  Description of Artificial Sequence: Synthetic oligonucleotide
  Sense strand starting at position 2999 of SEQ ID NO: 1243595
ucaugauucuccugcuggu

SEQ ID NO: 1427359 - RNA, 19 nt, Artificial Sequence
  Description of Artificial Sequence: Synthetic oligonucleotide
  Antisense strand to SEQ ID NO: 1427358
accagcaggagaaucauga

SEQ ID NO: 1427360 - RNA, 19 nt, Artificial Sequence
  Description of Artificial Sequence: Synthetic oligonucleotide
  Sense strand starting at position 3283 of SEQ ID NO: 1243595
ggucauguccaagaccuca

SEQ ID NO: 1427361 - RNA, 19 nt, Artificial Sequence
  Description of Artificial Sequence: Synthetic oligonucleotide
  Antisense strand to SEQ ID NO: 1427360
ugaggucuuggacaugacc

SEQ ID NO: 1427362 - RNA, 19 nt, Artificial Sequence
  Description of Artificial Sequence: Synthetic oligonucleotide
  Sense strand starting at position 3717 of SEQ ID NO: 1243595
guauguuaaacauggugaa

SEQ ID NO: 1427363 - RNA, 19 nt, Artificial Sequence
  Description of Artificial Sequence: Synthetic oligonucleotide
  Antisense strand to SEQ ID NO: 1427362
uucaccauguuuaacauac

SEQ ID NO: 1427364 - RNA, 19 nt, Artificial Sequence
  Description of Artificial Sequence: Synthetic oligonucleotide
  Sense strand starting at position 3718 of SEQ ID NO: 1243595
uauguuaaacauggugaaa

SEQ ID NO: 1427365 - RNA, 19 nt, Artificial Sequence
  Description of Artificial Sequence: Synthetic oligonucleotide
  Antisense strand to SEQ ID NO: 1427364
uuucaccauguuuaacaua

SEQ ID NO: 1427366 - RNA, 19 nt, Artificial Sequence
  Description of Artificial Sequence: Synthetic oligonucleotide
  Sense strand starting at position 3720 of SEQ ID NO: 1243595
uguuaaacauggugaaacu

SEQ ID NO: 1427367 - RNA, 19 nt, Artificial Sequence
  Description of Artificial Sequence: Synthetic oligonucleotide
  Antisense strand to SEQ ID NO: 1427366
aguuucaccauguuuaaca

SEQ ID NO: 1427368 - RNA, 19 nt, Artificial Sequence
  Description of Artificial Sequence: Synthetic oligonucleotide
  Sense strand starting at position 3786 of SEQ ID NO: 1243595
gggugaucgcugggaccuu

SEQ ID NO: 1427369 - RNA, 19 nt, Artificial Sequence
  Description of Artificial Sequence: Synthetic oligonucleotide
  Antisense strand to SEQ ID NO: 1427368
aaggucccagcgaucaccc

SEQ ID NO: 1427370 - RNA, 19 nt, Artificial Sequence
  Description of Artificial Sequence: Synthetic oligonucleotide
  Sense strand starting at position 3798 of SEQ ID NO: 1243595
ggaccuuuguccuggucaa

SEQ ID NO: 1427371 - RNA, 19 nt, Artificial Sequence
  Description of Artificial Sequence: Synthetic oligonucleotide
  Antisense strand to SEQ ID NO: 1427370
uugaccaggacaaaggucc

SEQ ID NO: 1427372 - RNA, 19 nt, Artificial Sequence
  Description of Artificial Sequence: Synthetic oligonucleotide
  Sense strand starting at position 3799 of SEQ ID NO: 1243595
gaccuuuguccuggucaac

SEQ ID NO: 1427373 - RNA, 19 nt, Artificial Sequence
  Description of Artificial Sequence: Synthetic oligonucleotide
  Antisense strand to SEQ ID NO: 1427372
guugaccaggacaaagguc

SEQ ID NO: 1427374 - RNA, 19 nt, Artificial Sequence
  Description of Artificial Sequence: Synthetic oligonucleotide
  Sense strand starting at position 164 of SEQ ID NO: 1243596
cagucaaaguguugggauu

SEQ ID NO: 1427375 - RNA, 19 nt, Artificial Sequence
  Description of Artificial Sequence: Synthetic oligonucleotide
  Antisense strand to SEQ ID NO: 1427374
aaucccaacacuuugacug

SEQ ID NO: 1427376 - RNA, 19 nt, Artificial Sequence
  Description of Artificial Sequence: Synthetic oligonucleotide
  Sense strand starting at position 166 of SEQ ID NO: 1243596
gucaaaguguugggauuuc

SEQ ID NO: 1427377 - RNA, 19 nt, Artificial Sequence
  Description of Artificial Sequence: Synthetic oligonucleotide
  Antisense strand to SEQ ID NO: 1427376
gaaaucccaacacuuugac

SEQ ID NO: 1427378 - RNA, 19 nt, Artificial Sequence
  Description of Artificial Sequence: Synthetic oligonucleotide
  Sense strand starting at position 746 of SEQ ID NO: 1243596
aggugaucaggugauccau

SEQ ID NO: 1427379 - RNA, 19 nt, Artificial Sequence
  Description of Artificial Sequence: Synthetic oligonucleotide
  Antisense strand to SEQ ID NO: 1427378
auggaucaccugaucaccu

SEQ ID NO: 1427380 - RNA, 19 nt, Artificial Sequence
  Description of Artificial Sequence: Synthetic oligonucleotide
  Sense strand starting at position 1244 of SEQ ID NO: 1243596
auaguacaacaaugguuaa

SEQ ID NO: 1427381 - RNA, 19 nt, Artificial Sequence
  Description of Artificial Sequence: Synthetic oligonucleotide
  Antisense strand to SEQ ID NO: 1427380
uuaaccauuguuguacuau

SEQ ID NO: 1427382 - RNA, 19 nt, Artificial Sequence
  Description of Artificial Sequence: Synthetic oligonucleotide
  Sense strand starting at position 1254 of SEQ ID NO: 1243596
aaugguuaagcuuaucgaa

SEQ ID NO: 1427383 - RNA, 19 nt, Artificial Sequence
  Description of Artificial Sequence: Synthetic oligonucleotide
  Antisense strand to SEQ ID NO: 1427382
uucgauaagcuuaaccauu

SEQ ID NO: 1427384 - RNA, 19 nt, Artificial Sequence
  Description of Artificial Sequence: Synthetic oligonucleotide
  Sense strand starting at position 1257 of SEQ ID NO: 1243596
gguuaagcuuaucgaagga

SEQ ID NO: 1427385 - RNA, 19 nt, Artificial Sequence
  Description of Artificial Sequence: Synthetic oligonucleotide
  Antisense strand to SEQ ID NO: 1427384
uccuucgauaagcuuaacc

SEQ ID NO: 1427386 - RNA, 19 nt, Artificial Sequence
  Description of Artificial Sequence: Synthetic oligonucleotide
  Sense strand starting at position 1261 of SEQ ID NO: 1243596
aagcuuaucgaaggagcua

SEQ ID NO: 1427387 - RNA, 19 nt, Artificial Sequence
  Description of Artificial Sequence: Synthetic oligonucleotide
  Antisense strand to SEQ ID NO: 1427386
uagcuccuucgauaagcuu

SEQ ID NO: 1427388 - RNA, 19 nt, Artificial Sequence
  Description of Artificial Sequence: Synthetic oligonucleotide
  Sense strand starting at position 1262 of SEQ ID NO: 1243596
agcuuaucgaaggagcuaa

SEQ ID NO: 1427389 - RNA, 19 nt, Artificial Sequence
  Description of Artificial Sequence: Synthetic oligonucleotide
  Antisense strand to SEQ ID NO: 1427388
uuagcuccuucgauaagcu

SEQ ID NO: 1427390 - RNA, 19 nt, Artificial Sequence
  Description of Artificial Sequence: Synthetic oligonucleotide
  Sense strand starting at position 1313 of SEQ ID NO: 1243596
ccaauugcccaaugagaug

SEQ ID NO: 1427391 - RNA, 19 nt, Artificial Sequence
  Description of Artificial Sequence: Synthetic oligonucleotide
  Antisense strand to SEQ ID NO: 1427390
caucucauugggcaauugg

SEQ ID NO: 1427392 - RNA, 19 nt, Artificial Sequence
  Description of Artificial Sequence: Synthetic oligonucleotide
  Sense strand starting at position 1318 of SEQ ID NO: 1243596
ugcccaaugagaugaguau

SEQ ID NO: 1427393 - RNA, 19 nt, Artificial Sequence
  Description of Artificial Sequence: Synthetic oligonucleotide
  Antisense strand to SEQ ID NO: 1427392
auacucaucucauugggca

SEQ ID NO: 1427394 - RNA, 19 nt, Artificial Sequence
  Description of Artificial Sequence: Synthetic oligonucleotide
  Sense strand starting at position 1319 of SEQ ID NO: 1243596
gcccaaugagaugaguauu

SEQ ID NO: 1427395 - RNA, 19 nt, Artificial Sequence
  Description of Artificial Sequence: Synthetic oligonucleotide
  Antisense strand to SEQ ID NO: 1427394
aauacucaucucauugggc

SEQ ID NO: 1427396 - RNA, 19 nt, Artificial Sequence
  Description of Artificial Sequence: Synthetic oligonucleotide
  Sense strand starting at position 1322 of SEQ ID NO: 1243596
caaugagaugaguauugcu

SEQ ID NO: 1427397 - RNA, 19 nt, Artificial Sequence
  Description of Artificial Sequence: Synthetic oligonucleotide
  Antisense strand to SEQ ID NO: 1427396
agcaauacucaucucauug

SEQ ID NO: 1427398 - RNA, 19 nt, Artificial Sequence
  Description of Artificial Sequence: Synthetic oligonucleotide
  Sense strand starting at position 1363 of SEQ ID NO: 1243596
ugagcaaauuaagaugaaa

SEQ ID NO: 1427399 - RNA, 19 nt, Artificial Sequence
  Description of Artificial Sequence: Synthetic oligonucleotide
  Antisense strand to SEQ ID NO: 1427398
uuucaucuuaauuugcuca

SEQ ID NO: 1427400 - RNA, 19 nt, Artificial Sequence
  Description of Artificial Sequence: Synthetic oligonucleotide
  Sense strand starting at position 1385 of SEQ ID NO: 1243596
aguuaaucagugugccuau

SEQ ID NO: 1427401 - RNA, 19 nt, Artificial Sequence
  Description of Artificial Sequence: Synthetic oligonucleotide
  Antisense strand to SEQ ID NO: 1427400
auaggcacacugauuaacu

SEQ ID NO: 1427402 - RNA, 19 nt, Artificial Sequence
  Description of Artificial Sequence: Synthetic oligonucleotide
  Sense strand starting at position 1386 of SEQ ID NO: 1243596
guuaaucagugugccuauu

SEQ ID NO: 1427403 - RNA, 19 nt, Artificial Sequence
  Description of Artificial Sequence: Synthetic oligonucleotide
  Antisense strand to SEQ ID NO: 1427402
aauaggcacacugauuaac

SEQ ID NO: 1427404 - RNA, 19 nt, Artificial Sequence
  Description of Artificial Sequence: Synthetic oligonucleotide
  Sense strand starting at position 1409 of SEQ ID NO: 1243596
uagauuaguaaguggcagu

SEQ ID NO: 1427405 - RNA, 19 nt, Artificial Sequence
  Description of Artificial Sequence: Synthetic oligonucleotide
  Antisense strand to SEQ ID NO: 1427404
acugccacuuacuaaucua

SEQ ID NO: 1427406 - RNA, 19 nt, Artificial Sequence
  Description of Artificial Sequence: Synthetic oligonucleotide
  Sense strand starting at position 2776 of SEQ ID NO: 1243596
augcaaagucauugcagca

SEQ ID NO: 1427407 - RNA, 19 nt, Artificial Sequence
  Description of Artificial Sequence: Synthetic oligonucleotide
  Antisense strand to SEQ ID NO: 1427406
ugcugcaaugacuuugcau

SEQ ID NO: 1427408 - RNA, 19 nt, Artificial Sequence
  Description of Artificial Sequence: Synthetic oligonucleotide
  Sense strand starting at position 2890 of SEQ ID NO: 1243596
guggugucggccucgagau

SEQ ID NO: 1427409 - RNA, 19 nt, Artificial Sequence
  Description of Artificial Sequence: Synthetic oligonucleotide
  Antisense strand to SEQ ID NO: 1427408
aucucgaggccgacaccac

SEQ ID NO: 1427410 - RNA, 19 nt, Artificial Sequence
  Description of Artificial Sequence: Synthetic oligonucleotide
  Sense strand starting at position 2891 of SEQ ID NO: 1243596
uggugucggccucgagauu

SEQ ID NO: 1427411 - RNA, 19 nt, Artificial Sequence
  Description of Artificial Sequence: Synthetic oligonucleotide
  Antisense strand to SEQ ID NO: 1427410
aaucucgaggccgacacca

SEQ ID NO: 1427412 - RNA, 19 nt, Artificial Sequence
  Description of Artificial Sequence: Synthetic oligonucleotide
  Sense strand starting at position 2892 of SEQ ID NO: 1243596
ggugucggccucgagauuu

SEQ ID NO: 1427413 - RNA, 19 nt, Artificial Sequence
  Description of Artificial Sequence: Synthetic oligonucleotide
  Antisense strand to SEQ ID NO: 1427412
aaaucucgaggccgacacc

SEQ ID NO: 1427414 - RNA, 19 nt, Artificial Sequence
  Description of Artificial Sequence: Synthetic oligonucleotide
  Sense strand starting at position 2900 of SEQ ID NO: 1243596
ccucgagauuuagagacgu

SEQ ID NO: 1427415 - RNA, 19 nt, Artificial Sequence
  Description of Artificial Sequence: Synthetic oligonucleotide
  Antisense strand to SEQ ID NO: 1427414
acgucucuaaaucucgagg

SEQ ID NO: 1427416 - RNA, 19 nt, Artificial Sequence
  Description of Artificial Sequence: Synthetic oligonucleotide
  Sense strand starting at position 3193 of SEQ ID NO: 1243596
cagggaacuuugugaguaa

SEQ ID NO: 1427417 - RNA, 19 nt, Artificial Sequence
  Description of Artificial Sequence: Synthetic oligonucleotide
  Antisense strand to SEQ ID NO: 1427416
uuacucacaaaguucccug

SEQ ID NO: 1427418 - RNA, 19 nt, Artificial Sequence
  Description of Artificial Sequence: Synthetic oligonucleotide
  Sense strand starting at position 3194 of SEQ ID NO: 1243596
agggaacuuugugaguaaa

SEQ ID NO: 1427419 - RNA, 19 nt, Artificial Sequence
  Description of Artificial Sequence: Synthetic oligonucleotide
  Antisense strand to SEQ ID NO: 1427418
uuuacucacaaaguucccu

SEQ ID NO: 1427420 - RNA, 19 nt, Artificial Sequence
  Description of Artificial Sequence: Synthetic oligonucleotide
  Sense strand starting at position 3277 of SEQ ID NO: 1243596
cgggauugaugacuccuaa

SEQ ID NO: 1427421 - RNA, 19 nt, Artificial Sequence
  Description of Artificial Sequence: Synthetic oligonucleotide
  Antisense strand to SEQ ID NO: 1427420
uuaggagucaucaaucccg

SEQ ID NO: 1427422 - RNA, 19 nt, Artificial Sequence
  Description of Artificial Sequence: Synthetic oligonucleotide
  Sense strand starting at position 3284 of SEQ ID NO: 1243596
gaugacuccuaagugcaua

SEQ ID NO: 1427423 - RNA, 19 nt, Artificial Sequence
  Description of Artificial Sequence: Synthetic oligonucleotide
  Antisense strand to SEQ ID NO: 1427422
uaugcacuuaggagucauc

SEQ ID NO: 1427424 - RNA, 19 nt, Artificial Sequence
  Description of Artificial Sequence: Synthetic oligonucleotide
  Sense strand starting at position 3402 of SEQ ID NO: 1243596
aucugacucccguaugguu

SEQ ID NO: 1427425 - RNA, 19 nt, Artificial Sequence
  Description of Artificial Sequence: Synthetic oligonucleotide
  Antisense strand to SEQ ID NO: 1427424
aaccauacgggagucagau

SEQ ID NO: 1427426 - RNA, 19 nt, Artificial Sequence
  Description of Artificial Sequence: Synthetic oligonucleotide
  Sense strand starting at position 3425 of SEQ ID NO: 1243596
gggugaugcuagugaguau

SEQ ID NO: 1427427 - RNA, 19 nt, Artificial Sequence
  Description of Artificial Sequence: Synthetic oligonucleotide
  Antisense strand to SEQ ID NO: 1427426
auacucacuagcaucaccc

SEQ ID NO: 1427428 - RNA, 19 nt, Artificial Sequence
  Description of Artificial Sequence: Synthetic oligonucleotide
  Sense strand starting at position 3426 of SEQ ID NO: 1243596
ggugaugcuagugaguaua

SEQ ID NO: 1427429 - RNA, 19 nt, Artificial Sequence
  Description of Artificial Sequence: Synthetic oligonucleotide
  Antisense strand to SEQ ID NO: 1427428
uauacucacuagcaucacc

SEQ ID NO: 1427430 - RNA, 19 nt, Artificial Sequence
  Description of Artificial Sequence: Synthetic oligonucleotide
  Sense strand starting at position 3429 of SEQ ID NO: 1243596
gaugcuagugaguauagca

SEQ ID NO: 1427431 - RNA, 19 nt, Artificial Sequence
  Description of Artificial Sequence: Synthetic oligonucleotide
  Antisense strand to SEQ ID NO: 1427430
ugcuauacucacuagcauc

SEQ ID NO: 1427432 - RNA, 19 nt, Artificial Sequence
  Description of Artificial Sequence: Synthetic oligonucleotide
  Sense strand starting at position 3457 of SEQ ID NO: 1243596
aacaaagaggcuugucauc

SEQ ID NO: 1427433 - RNA, 19 nt, Artificial Sequence
  Description of Artificial Sequence: Synthetic oligonucleotide
  Antisense strand to SEQ ID NO: 1427432
gaugacaagccucuuuguu

SEQ ID NO: 1427434 - RNA, 19 nt, Artificial Sequence
  Description of Artificial Sequence: Synthetic oligonucleotide
  Sense strand starting at position 3459 of SEQ ID NO: 1243596
caaagaggcuugucaucau

SEQ ID NO: 1427435 - RNA, 19 nt, Artificial Sequence
  Description of Artificial Sequence: Synthetic oligonucleotide
  Antisense strand to SEQ ID NO: 1427434
augaugacaagccucuuug

SEQ ID NO: 1427436 - RNA, 19 nt, Artificial Sequence
  Description of Artificial Sequence: Synthetic oligonucleotide
  Sense strand starting at position 3462 of SEQ ID NO: 1243596
agaggcuugucaucauaaa

SEQ ID NO: 1427437 - RNA, 19 nt, Artificial Sequence
  Description of Artificial Sequence: Synthetic oligonucleotide
  Antisense strand to SEQ ID NO: 1427436
uuuaugaugacaagccucu

SEQ ID NO: 1427438 - RNA, 19 nt, Artificial Sequence
  Description of Artificial Sequence: Synthetic oligonucleotide
  Sense strand starting at position 3463 of SEQ ID NO: 1243596
gaggcuugucaucauaaac

SEQ ID NO: 1427439 - RNA, 19 nt, Artificial Sequence
  Description of Artificial Sequence: Synthetic oligonucleotide
  Antisense strand to SEQ ID NO: 1427438
guuuaugaugacaagccuc

SEQ ID NO: 1427440 - RNA, 19 nt, Artificial Sequence
  Description of Artificial Sequence: Synthetic oligonucleotide
  Sense strand starting at position 3524 of SEQ ID NO: 1243596
gaaugugaauuccuaucag

SEQ ID NO: 1427441 - RNA, 19 nt, Artificial Sequence
  Description of Artificial Sequence: Synthetic oligonucleotide
  Antisense strand to SEQ ID NO: 1427440
cugauaggaauucacauuc

SEQ ID NO: 1427442 - RNA, 19 nt, Artificial Sequence
  Description of Artificial Sequence: Synthetic oligonucleotide
  Sense strand starting at position 3528 of SEQ ID NO: 1243596
gugaauuccuaucaguaau

SEQ ID NO: 1427443 - RNA, 19 nt, Artificial Sequence
  Description of Artificial Sequence: Synthetic oligonucleotide
  Antisense strand to SEQ ID NO: 1427442
auuacugauaggaauucac

SEQ ID NO: 1427444 - RNA, 19 nt, Artificial Sequence
  Description of Artificial Sequence: Synthetic oligonucleotide
  Sense strand starting at position 3793 of SEQ ID NO: 1243596
gugacaacggcuugagaag

SEQ ID NO: 1427445 - RNA, 19 nt, Artificial Sequence
  Description of Artificial Sequence: Synthetic oligonucleotide
  Antisense strand to SEQ ID NO: 1427444
cuucucaagccguugucac

SEQ ID NO: 1427446 - RNA, 19 nt, Artificial Sequence
  Description of Artificial Sequence: Synthetic oligonucleotide
  Sense strand starting at position 3858 of SEQ ID NO: 1243596
ggcagaagugacugcugau

SEQ ID NO: 1427447 - RNA, 19 nt, Artificial Sequence
  Description of Artificial Sequence: Synthetic oligonucleotide
  Antisense strand to SEQ ID NO: 1427446
aucagcagucacuucugcc

SEQ ID NO: 1427448 - RNA, 19 nt, Artificial Sequence
  Description of Artificial Sequence: Synthetic oligonucleotide
  Sense strand starting at position 3968 of SEQ ID NO: 1243596
aggcaacagcucugagacu

SEQ ID NO: 1427449 - RNA, 19 nt, Artificial Sequence
  Description of Artificial Sequence: Synthetic oligonucleotide
  Antisense strand to SEQ ID NO: 1427448
agucucagagcuguugccu

SEQ ID NO: 1427450 - RNA, 19 nt, Artificial Sequence
  Description of Artificial Sequence: Synthetic oligonucleotide
  Sense strand starting at position 3969 of SEQ ID NO: 1243596
ggcaacagcucugagacuu

SEQ ID NO: 1427451 - RNA, 19 nt, Artificial Sequence
  Description of Artificial Sequence: Synthetic oligonucleotide
  Antisense strand to SEQ ID NO: 1427450
aagucucagagcuguugcc

SEQ ID NO: 1427452 - RNA, 19 nt, Artificial Sequence
  Description of Artificial Sequence: Synthetic oligonucleotide
  Sense strand starting at position 3977 of SEQ ID NO: 1243596
cucugagacuuggaaggaa

SEQ ID NO: 1427453 - RNA, 19 nt, Artificial Sequence
  Description of Artificial Sequence: Synthetic oligonucleotide
  Antisense strand to SEQ ID NO: 1427452
uuccuuccaagucucagag

SEQ ID NO: 1427454 - RNA, 19 nt, Artificial Sequence
  Description of Artificial Sequence: Synthetic oligonucleotide
  Sense strand starting at position 81 of SEQ ID NO: 1243597
gagaccuucuauggauacu

SEQ ID NO: 1427455 - RNA, 19 nt, Artificial Sequence
  Description of Artificial Sequence: Synthetic oligonucleotide
  Antisense strand to SEQ ID NO: 1427454
aguauccauagaaggucuc

SEQ ID NO: 1427456 - RNA, 19 nt, Artificial Sequence
  Description of Artificial Sequence: Synthetic oligonucleotide
  Sense strand starting at position 91 of SEQ ID NO: 1243597
auggauacuugaggucaca

SEQ ID NO: 1427457 - RNA, 19 nt, Artificial Sequence
  Description of Artificial Sequence: Synthetic oligonucleotide
  Antisense strand to SEQ ID NO: 1427456
ugugaccucaaguauccau

SEQ ID NO: 1427458 - RNA, 19 nt, Artificial Sequence
  Description of Artificial Sequence: Synthetic oligonucleotide
  Sense strand starting at position 206 of SEQ ID NO: 1243597
ugaacauguucucucaugu

SEQ ID NO: 1427459 - RNA, 19 nt, Artificial Sequence
  Description of Artificial Sequence: Synthetic oligonucleotide
  Antisense strand to SEQ ID NO: 1427458
acaugagagaacauguuca

SEQ ID NO: 1427460 - RNA, 19 nt, Artificial Sequence
  Description of Artificial Sequence: Synthetic oligonucleotide
  Sense strand starting at position 732 of SEQ ID NO: 1243597
gccaguaugccugguuaau

SEQ ID NO: 1427461 - RNA, 19 nt, Artificial Sequence
  Description of Artificial Sequence: Synthetic oligonucleotide
  Antisense strand to SEQ ID NO: 1427460
auuaaccaggcauacuggc

SEQ ID NO: 1427462 - RNA, 19 nt, Artificial Sequence
  Description of Artificial Sequence: Synthetic oligonucleotide
  Sense strand starting at position 888 of SEQ ID NO: 1243597
gcgagagauucugucucaa

SEQ ID NO: 1427463 - RNA, 19 nt, Artificial Sequence
  Description of Artificial Sequence: Synthetic oligonucleotide
  Antisense strand to SEQ ID NO: 1427462
uugagacagaaucucucgc

SEQ ID NO: 1427464 - RNA, 19 nt, Artificial Sequence
  Description of Artificial Sequence: Synthetic oligonucleotide
  Sense strand starting at position 972 of SEQ ID NO: 1243597
guguuauuauccuccucuu

SEQ ID NO: 1427465 - RNA, 19 nt, Artificial Sequence
  Description of Artificial Sequence: Synthetic oligonucleotide
  Antisense strand to SEQ ID NO: 1427464
aagaggaggauaauaacac

SEQ ID NO: 1427466 - RNA, 19 nt, Artificial Sequence
  Description of Artificial Sequence: Synthetic oligonucleotide
  Sense strand starting at position 1026 of SEQ ID NO: 1243597
guaccuaguccucaucaca

SEQ ID NO: 1427467 - RNA, 19 nt, Artificial Sequence
  Description of Artificial Sequence: Synthetic oligonucleotide
  Antisense strand to SEQ ID NO: 1427466
ugugaugaggacuagguac

SEQ ID NO: 1427468 - RNA, 19 nt, Artificial Sequence
  Description of Artificial Sequence: Synthetic oligonucleotide
  Sense strand starting at position 1243 of SEQ ID NO: 1243597
ucguuuaggucucuacuga

SEQ ID NO: 1427469 - RNA, 19 nt, Artificial Sequence
  Description of Artificial Sequence: Synthetic oligonucleotide
  Antisense strand to SEQ ID NO: 1427468
ucaguagagaccuaaacga

SEQ ID NO: 1427470 - RNA, 19 nt, Artificial Sequence
  Description of Artificial Sequence: Synthetic oligonucleotide
  Sense strand starting at position 1244 of SEQ ID NO: 1243597
cguuuaggucucuacugaa

SEQ ID NO: 1427471 - RNA, 19 nt, Artificial Sequence
  Description of Artificial Sequence: Synthetic oligonucleotide
  Antisense strand to SEQ ID NO: 1427470
uucaguagagaccuaaacg

SEQ ID NO: 1427472 - RNA, 19 nt, Artificial Sequence
  Description of Artificial Sequence: Synthetic oligonucleotide
  Sense strand starting at position 1389 of SEQ ID NO: 1243597
cuguguuguucaccgguua

SEQ ID NO: 1427473 - RNA, 19 nt, Artificial Sequence
  Description of Artificial Sequence: Synthetic oligonucleotide
  Antisense strand to SEQ ID NO: 1427472
uaaccggugaacaacacag

SEQ ID NO: 1427474 - RNA, 19 nt, Artificial Sequence
  Description of Artificial Sequence: Synthetic oligonucleotide
  Sense strand starting at position 1407 of SEQ ID NO: 1243597
auccuuacagccuggaaua

SEQ ID NO: 1427475 - RNA, 19 nt, Artificial Sequence
  Description of Artificial Sequence: Synthetic oligonucleotide
  Antisense strand to SEQ ID NO: 1427474
uauuccaggcuguaaggau

SEQ ID NO: 1427476 - RNA, 19 nt, Artificial Sequence
  Description of Artificial Sequence: Synthetic oligonucleotide
  Sense strand starting at position 1408 of SEQ ID NO: 1243597
uccuuacagccuggaauaa

SEQ ID NO: 1427477 - RNA, 19 nt, Artificial Sequence
  Description of Artificial Sequence: Synthetic oligonucleotide
  Antisense strand to SEQ ID NO: 1427476
uuauuccaggcuguaagga

SEQ ID NO: 1427478 - RNA, 19 nt, Artificial Sequence
  Description of Artificial Sequence: Synthetic oligonucleotide
  Sense strand starting at position 1409 of SEQ ID NO: 1243597
ccuuacagccuggaauaau

SEQ ID NO: 1427479 - RNA, 19 nt, Artificial Sequence
  Description of Artificial Sequence: Synthetic oligonucleotide
  Antisense strand to SEQ ID NO: 1427478
auuauuccaggcuguaagg

SEQ ID NO: 1427480 - RNA, 19 nt, Artificial Sequence
  Description of Artificial Sequence: Synthetic oligonucleotide
  Sense strand starting at position 1418 of SEQ ID NO: 1243597
cuggaauaauaucuagcau

SEQ ID NO: 1427481 - RNA, 19 nt, Artificial Sequence
  Description of Artificial Sequence: Synthetic oligonucleotide
  Antisense strand to SEQ ID NO: 1427480
augcuagauauuauuccag

SEQ ID NO: 1427482 - RNA, 19 nt, Artificial Sequence
  Description of Artificial Sequence: Synthetic oligonucleotide
  Sense strand starting at position 1432 of SEQ ID NO: 1243597
agcauauguuaugucuaga

SEQ ID NO: 1427483 - RNA, 19 nt, Artificial Sequence
  Description of Artificial Sequence: Synthetic oligonucleotide
  Antisense strand to SEQ ID NO: 1427482
ucuagacauaacauaugcu

SEQ ID NO: 1427484 - RNA, 19 nt, Artificial Sequence
  Description of Artificial Sequence: Synthetic oligonucleotide
  Sense strand starting at position 1437 of SEQ ID NO: 1243597
auguuaugucuagauaagc

SEQ ID NO: 1427485 - RNA, 19 nt, Artificial Sequence
  Description of Artificial Sequence: Synthetic oligonucleotide
  Antisense strand to SEQ ID NO: 1427484
gcuuaucuagacauaacau

SEQ ID NO: 1427486 - RNA, 19 nt, Artificial Sequence
  Description of Artificial Sequence: Synthetic oligonucleotide
  Sense strand starting at position 1549 of SEQ ID NO: 1243597
gcauuucggccugagcaca

SEQ ID NO: 1427487 - RNA, 19 nt, Artificial Sequence
  Description of Artificial Sequence: Synthetic oligonucleotide
  Antisense strand to SEQ ID NO: 1427486
ugugcucaggccgaaaugc

SEQ ID NO: 1427488 - RNA, 19 nt, Artificial Sequence
  Description of Artificial Sequence: Synthetic oligonucleotide
  Sense strand starting at position 1900 of SEQ ID NO: 1243597
guaccucucgggcauaacu

SEQ ID NO: 1427489 - RNA, 19 nt, Artificial Sequence
  Description of Artificial Sequence: Synthetic oligonucleotide
  Antisense strand to SEQ ID NO: 1427488
aguuaugcccgagagguac

SEQ ID NO: 1427490 - RNA, 19 nt, Artificial Sequence
  Description of Artificial Sequence: Synthetic oligonucleotide
  Sense strand starting at position 2058 of SEQ ID NO: 1243597
uggaaugcgguuuggauaa

SEQ ID NO: 1427491 - RNA, 19 nt, Artificial Sequence
  Description of Artificial Sequence: Synthetic oligonucleotide
  Antisense strand to SEQ ID NO: 1427490
uuauccaaaccgcauucca

SEQ ID NO: 1427492 - RNA, 19 nt, Artificial Sequence
  Description of Artificial Sequence: Synthetic oligonucleotide
  Sense strand starting at position 2097 of SEQ ID NO: 1243597
gcauauuugcuggguuguu

SEQ ID NO: 1427493 - RNA, 19 nt, Artificial Sequence
  Description of Artificial Sequence: Synthetic oligonucleotide
  Antisense strand to SEQ ID NO: 1427492
aacaacccagcaaauaugc

SEQ ID NO: 1427494 - RNA, 19 nt, Artificial Sequence
  Description of Artificial Sequence: Synthetic oligonucleotide
  Sense strand starting at position 2111 of SEQ ID NO: 1243597
uuguuuaacgacuguucua

SEQ ID NO: 1427495 - RNA, 19 nt, Artificial Sequence
  Description of Artificial Sequence: Synthetic oligonucleotide
  Antisense strand to SEQ ID NO: 1427494
uagaacagucguuaaacaa

SEQ ID NO: 1427496 - RNA, 19 nt, Artificial Sequence
  Description of Artificial Sequence: Synthetic oligonucleotide
  Sense strand starting at position 2124 of SEQ ID NO: 1243597
guucuaaggcuuuacaaag

SEQ ID NO: 1427497 - RNA, 19 nt, Artificial Sequence
  Description of Artificial Sequence: Synthetic oligonucleotide
  Antisense strand to SEQ ID NO: 1427496
cuuuguaaagccuuagaac

SEQ ID NO: 1427498 - RNA, 19 nt, Artificial Sequence
  Description of Artificial Sequence: Synthetic oligonucleotide
  Sense strand starting at position 2195 of SEQ ID NO: 1243597
ggacaaggcacgugguuua

SEQ ID NO: 1427499 - RNA, 19 nt, Artificial Sequence
  Description of Artificial Sequence: Synthetic oligonucleotide
  Antisense strand to SEQ ID NO: 1427498
uaaaccacgugccuugucc

SEQ ID NO: 1427500 - RNA, 19 nt, Artificial Sequence
  Description of Artificial Sequence: Synthetic oligonucleotide
  Sense strand starting at position 2235 of SEQ ID NO: 1243597
ggauguaaguauucuggcu

SEQ ID NO: 1427501 - RNA, 19 nt, Artificial Sequence
  Description of Artificial Sequence: Synthetic oligonucleotide
  Antisense strand to SEQ ID NO: 1427500
agccagaauacuuacaucc

SEQ ID NO: 1427502 - RNA, 19 nt, Artificial Sequence
  Description of Artificial Sequence: Synthetic oligonucleotide
  Sense strand starting at position 2240 of SEQ ID NO: 1243597
uaaguauucuggcugcgga

SEQ ID NO: 1427503 - RNA, 19 nt, Artificial Sequence
  Description of Artificial Sequence: Synthetic oligonucleotide
  Antisense strand to SEQ ID NO: 1427502
uccgcagccagaauacuua

SEQ ID NO: 1427504 - RNA, 19 nt, Artificial Sequence
  Description of Artificial Sequence: Synthetic oligonucleotide
  Sense strand starting at position 2241 of SEQ ID NO: 1243597
aaguauucuggcugcggaa

SEQ ID NO: 1427505 - RNA, 19 nt, Artificial Sequence
  Description of Artificial Sequence: Synthetic oligonucleotide
  Antisense strand to SEQ ID NO: 1427504
uuccgcagccagaauacuu

SEQ ID NO: 1427506 - RNA, 19 nt, Artificial Sequence
  Description of Artificial Sequence: Synthetic oligonucleotide
  Sense strand starting at position 2253 of SEQ ID NO: 1243597
ugcggaaucccagcgcaua

SEQ ID NO: 1427507 - RNA, 19 nt, Artificial Sequence
  Description of Artificial Sequence: Synthetic oligonucleotide
  Antisense strand to SEQ ID NO: 1427506
uaugcgcugggauuccgca

SEQ ID NO: 1427508 - RNA, 19 nt, Artificial Sequence
  Description of Artificial Sequence: Synthetic oligonucleotide
  Sense strand starting at position 2735 of SEQ ID NO: 1243597
ugacuaacgcggugaaauc

SEQ ID NO: 1427509 - RNA, 19 nt, Artificial Sequence
  Description of Artificial Sequence: Synthetic oligonucleotide
  Antisense strand to SEQ ID NO: 1427508
gauuucaccgcguuaguca

SEQ ID NO: 1427510 - RNA, 19 nt, Artificial Sequence
  Description of Artificial Sequence: Synthetic oligonucleotide
  Sense strand starting at position 3439 of SEQ ID NO: 1243597
gugaacugagaucgcgaua

SEQ ID NO: 1427511 - RNA, 19 nt, Artificial Sequence
  Description of Artificial Sequence: Synthetic oligonucleotide
  Antisense strand to SEQ ID NO: 1427510
uaucgcgaucucaguucac

SEQ ID NO: 1427512 - RNA, 19 nt, Artificial Sequence
  Description of Artificial Sequence: Synthetic oligonucleotide
  Sense strand starting at position 3558 of SEQ ID NO: 1243597
ugucaaauaucugaaacga

SEQ ID NO: 1427513 - RNA, 19 nt, Artificial Sequence
  Description of Artificial Sequence: Synthetic oligonucleotide
  Antisense strand to SEQ ID NO: 1427512
ucguuucagauauuugaca

SEQ ID NO: 1427514 - RNA, 19 nt, Artificial Sequence
  Description of Artificial Sequence: Synthetic oligonucleotide
  Sense strand starting at position 3585 of SEQ ID NO: 1243597
auggaacacucucauuguu

SEQ ID NO: 1427515 - RNA, 19 nt, Artificial Sequence
  Description of Artificial Sequence: Synthetic oligonucleotide
  Antisense strand to SEQ ID NO: 1427514
aacaaugagaguguuccau

SEQ ID NO: 1427516 - RNA, 19 nt, Artificial Sequence
  Description of Artificial Sequence: Synthetic oligonucleotide
  Sense strand starting at position 3592 of SEQ ID NO: 1243597
acucucauuguucguagga

SEQ ID NO: 1427517 - RNA, 19 nt, Artificial Sequence
  Description of Artificial Sequence: Synthetic oligonucleotide
  Antisense strand to SEQ ID NO: 1427516
uccuacgaacaaugagagu

SEQ ID NO: 1427518 - RNA, 19 nt, Artificial Sequence
  Description of Artificial Sequence: Synthetic oligonucleotide
  Sense strand starting at position 3601 of SEQ ID NO: 1243597
guucguaggagugagaauu

SEQ ID NO: 1427519 - RNA, 19 nt, Artificial Sequence
  Description of Artificial Sequence: Synthetic oligonucleotide
  Antisense strand to SEQ ID NO: 1427518
aauucucacuccuacgaac

SEQ ID NO: 1427520 - RNA, 19 nt, Artificial Sequence
  Description of Artificial Sequence: Synthetic oligonucleotide
  Sense strand starting at position 3607 of SEQ ID NO: 1243597
aggagugagaauugguaca

SEQ ID NO: 1427521 - RNA, 19 nt, Artificial Sequence
  Description of Artificial Sequence: Synthetic oligonucleotide
  Antisense strand to SEQ ID NO: 1427520
uguaccaauucucacuccu

SEQ ID NO: 1427522 - RNA, 19 nt, Artificial Sequence
  Description of Artificial Sequence: Synthetic oligonucleotide
  Sense strand starting at position 3609 of SEQ ID NO: 1243597
gagugagaauugguacaau

SEQ ID NO: 1427523 - RNA, 19 nt, Artificial Sequence
  Description of Artificial Sequence: Synthetic oligonucleotide
  Antisense strand to SEQ ID NO: 1427522
auuguaccaauucucacuc

SEQ ID NO: 1427524 - RNA, 19 nt, Artificial Sequence
  Description of Artificial Sequence: Synthetic oligonucleotide
  Sense strand starting at position 3766 of SEQ ID NO: 1243597
uguugauugcaauauuguu

SEQ ID NO: 1427525 - RNA, 19 nt, Artificial Sequence
  Description of Artificial Sequence: Synthetic oligonucleotide
  Antisense strand to SEQ ID NO: 1427524
aacaauauugcaaucaaca

SEQ ID NO: 1427526 - RNA, 19 nt, Artificial Sequence
  Description of Artificial Sequence: Synthetic oligonucleotide
  Sense strand starting at position 3771 of SEQ ID NO: 1243597
auugcaauauuguuugcaa

SEQ ID NO: 1427527 - RNA, 19 nt, Artificial Sequence
  Description of Artificial Sequence: Synthetic oligonucleotide
  Antisense strand to SEQ ID NO: 1427526
uugcaaacaauauugcaau

SEQ ID NO: 1427528 - RNA, 19 nt, Artificial Sequence
  Description of Artificial Sequence: Synthetic oligonucleotide
  Sense strand starting at position 3772 of SEQ ID NO: 1243597
uugcaauauuguuugcaaa

SEQ ID NO: 1427529 - RNA, 19 nt, Artificial Sequence
  Description of Artificial Sequence: Synthetic oligonucleotide
  Antisense strand to SEQ ID NO: 1427528
uuugcaaacaauauugcaa

SEQ ID NO: 1427530 - RNA, 19 nt, Artificial Sequence
  Description of Artificial Sequence: Synthetic oligonucleotide
  Sense strand starting at position 3773 of SEQ ID NO: 1243597
ugcaauauuguuugcaaau

SEQ ID NO: 1427531 - RNA, 19 nt, Artificial Sequence
  Description of Artificial Sequence: Synthetic oligonucleotide
  Antisense strand to SEQ ID NO: 1427530
auuugcaaacaauauugca

SEQ ID NO: 1427532 - RNA, 19 nt, Artificial Sequence
  Description of Artificial Sequence: Synthetic oligonucleotide
  Sense strand starting at position 3774 of SEQ ID NO: 1243597
gcaauauuguuugcaaaug

SEQ ID NO: 1427533 - RNA, 19 nt, Artificial Sequence
  Description of Artificial Sequence: Synthetic oligonucleotide
  Antisense strand to SEQ ID NO: 1427532
cauuugcaaacaauauugc

SEQ ID NO: 1427534 - RNA, 19 nt, Artificial Sequence
  Description of Artificial Sequence: Synthetic oligonucleotide
  Sense strand starting at position 72 of SEQ ID NO: 1243598
ggcuuuagauuccuuauga

SEQ ID NO: 1427535 - RNA, 19 nt, Artificial Sequence
  Description of Artificial Sequence: Synthetic oligonucleotide
  Antisense strand to SEQ ID NO: 1427534
ucauaaggaaucuaaagcc

SEQ ID NO: 1427536 - RNA, 19 nt, Artificial Sequence
  Description of Artificial Sequence: Synthetic oligonucleotide
  Sense strand starting at position 734 of SEQ ID NO: 1243598
ccauuuaucucauaguuga

SEQ ID NO: 1427537 - RNA, 19 nt, Artificial Sequence
  Description of Artificial Sequence: Synthetic oligonucleotide
  Antisense strand to SEQ ID NO: 1427536
ucaacuaugagauaaaugg

SEQ ID NO: 1427538 - RNA, 19 nt, Artificial Sequence
  Description of Artificial Sequence: Synthetic oligonucleotide
  Sense strand starting at position 749 of SEQ ID NO: 1243598
uugaacguccuuuacgaaa

SEQ ID NO: 1427539 - RNA, 19 nt, Artificial Sequence
  Description of Artificial Sequence: Synthetic oligonucleotide
  Antisense strand to SEQ ID NO: 1427538
uuucguaaaggacguucaa

SEQ ID NO: 1427540 - RNA, 19 nt, Artificial Sequence
  Description of Artificial Sequence: Synthetic oligonucleotide
  Sense strand starting at position 859 of SEQ ID NO: 1243598
caucuacuagugggaucua

SEQ ID NO: 1427541 - RNA, 19 nt, Artificial Sequence
  Description of Artificial Sequence: Synthetic oligonucleotide
  Antisense strand to SEQ ID NO: 1427540
uagaucccacuaguagaug

SEQ ID NO: 1427542 - RNA, 19 nt, Artificial Sequence
  Description of Artificial Sequence: Synthetic oligonucleotide
  Sense strand starting at position 870 of SEQ ID NO: 1243598
gggaucuauuucuaugacu

SEQ ID NO: 1427543 - RNA, 19 nt, Artificial Sequence
  Description of Artificial Sequence: Synthetic oligonucleotide
  Antisense strand to SEQ ID NO: 1427542
agucauagaaauagauccc

SEQ ID NO: 1427544 - RNA, 19 nt, Artificial Sequence
  Description of Artificial Sequence: Synthetic oligonucleotide
  Sense strand starting at position 1004 of SEQ ID NO: 1243598
gcuuauucuggcuaaacag

SEQ ID NO: 1427545 - RNA, 19 nt, Artificial Sequence
  Description of Artificial Sequence: Synthetic oligonucleotide
  Antisense strand to SEQ ID NO: 1427544
cuguuuagccagaauaagc

SEQ ID NO: 1427546 - RNA, 19 nt, Artificial Sequence
  Description of Artificial Sequence: Synthetic oligonucleotide
  Sense strand starting at position 1110 of SEQ ID NO: 1243598
ucaagucuaaagcgggauu

SEQ ID NO: 1427547 - RNA, 19 nt, Artificial Sequence
  Description of Artificial Sequence: Synthetic oligonucleotide
  Antisense strand to SEQ ID NO: 1427546
aaucccgcuuuagacuuga

SEQ ID NO: 1427548 - RNA, 19 nt, Artificial Sequence
  Description of Artificial Sequence: Synthetic oligonucleotide
  Sense strand starting at position 1113 of SEQ ID NO: 1243598
agucuaaagcgggauuacu

SEQ ID NO: 1427549 - RNA, 19 nt, Artificial Sequence
  Description of Artificial Sequence: Synthetic oligonucleotide
  Antisense strand to SEQ ID NO: 1427548
aguaaucccgcuuuagacu

SEQ ID NO: 1427550 - RNA, 19 nt, Artificial Sequence
  Description of Artificial Sequence: Synthetic oligonucleotide
  Sense strand starting at position 1133 of SEQ ID NO: 1243598
ccagcuagacucugaacau

SEQ ID NO: 1427551 - RNA, 19 nt, Artificial Sequence
  Description of Artificial Sequence: Synthetic oligonucleotide
  Antisense strand to SEQ ID NO: 1427550
auguucagagucuagcugg

SEQ ID NO: 1427552 - RNA, 19 nt, Artificial Sequence
  Description of Artificial Sequence: Synthetic oligonucleotide
  Sense strand starting at position 1186 of SEQ ID NO: 1243598
cugaacaagugucuugaga

SEQ ID NO: 1427553 - RNA, 19 nt, Artificial Sequence
  Description of Artificial Sequence: Synthetic oligonucleotide
  Antisense strand to SEQ ID NO: 1427552
ucucaagacacuuguucag

SEQ ID NO: 1427554 - RNA, 19 nt, Artificial Sequence
  Description of Artificial Sequence: Synthetic oligonucleotide
  Sense strand starting at position 2080 of SEQ ID NO: 1243598
accgcuucugucgcugaga

SEQ ID NO: 1427555 - RNA, 19 nt, Artificial Sequence
  Description of Artificial Sequence: Synthetic oligonucleotide
  Antisense strand to SEQ ID NO: 1427554
ucucagcgacagaagcggu

SEQ ID NO: 1427556 - RNA, 19 nt, Artificial Sequence
  Description of Artificial Sequence: Synthetic oligonucleotide
  Sense strand starting at position 2146 of SEQ ID NO: 1243598
ucgagauuugugcgagauu

SEQ ID NO: 1427557 - RNA, 19 nt, Artificial Sequence
  Description of Artificial Sequence: Synthetic oligonucleotide
  Antisense strand to SEQ ID NO: 1427556
aaucucgcacaaaucucga

SEQ ID NO: 1427558 - RNA, 19 nt, Artificial Sequence
  Description of Artificial Sequence: Synthetic oligonucleotide
  Sense strand starting at position 2157 of SEQ ID NO: 1243598
gcgagauucgcuuaggaau

SEQ ID NO: 1427559 - RNA, 19 nt, Artificial Sequence
  Description of Artificial Sequence: Synthetic oligonucleotide
  Antisense strand to SEQ ID NO: 1427558
auuccuaagcgaaucucgc

SEQ ID NO: 1427560 - RNA, 19 nt, Artificial Sequence
  Description of Artificial Sequence: Synthetic oligonucleotide
  Sense strand starting at position 2286 of SEQ ID NO: 1243598
caaagcagguuugucauuu

SEQ ID NO: 1427561 - RNA, 19 nt, Artificial Sequence
  Description of Artificial Sequence: Synthetic oligonucleotide
  Antisense strand to SEQ ID NO: 1427560
aaaugacaaaccugcuuug

SEQ ID NO: 1427562 - RNA, 19 nt, Artificial Sequence
  Description of Artificial Sequence: Synthetic oligonucleotide
  Sense strand starting at position 2295 of SEQ ID NO: 1243598
uuugucauuucgcaauuua

SEQ ID NO: 1427563 - RNA, 19 nt, Artificial Sequence
  Description of Artificial Sequence: Synthetic oligonucleotide
  Antisense strand to SEQ ID NO: 1427562
uaaauugcgaaaugacaaa

SEQ ID NO: 1427564 - RNA, 19 nt, Artificial Sequence
  Description of Artificial Sequence: Synthetic oligonucleotide
  Sense strand starting at position 2369 of SEQ ID NO: 1243598
auccuaugucagggauaug

SEQ ID NO: 1427565 - RNA, 19 nt, Artificial Sequence
  Description of Artificial Sequence: Synthetic oligonucleotide
  Antisense strand to SEQ ID NO: 1427564
cauaucccugacauaggau

SEQ ID NO: 1427566 - RNA, 19 nt, Artificial Sequence
  Description of Artificial Sequence: Synthetic oligonucleotide
  Sense strand starting at position 2442 of SEQ ID NO: 1243598
aaucgcuguggcuaaagau

SEQ ID NO: 1427567 - RNA, 19 nt, Artificial Sequence
  Description of Artificial Sequence: Synthetic oligonucleotide
  Antisense strand to SEQ ID NO: 1427566
aucuuuagccacagcgauu

SEQ ID NO: 1427568 - RNA, 19 nt, Artificial Sequence
  Description of Artificial Sequence: Synthetic oligonucleotide
  Sense strand starting at position 2515 of SEQ ID NO: 1243598
uguggauuacuccacugca

SEQ ID NO: 1427569 - RNA, 19 nt, Artificial Sequence
  Description of Artificial Sequence: Synthetic oligonucleotide
  Antisense strand to SEQ ID NO: 1427568
ugcaguggaguaauccaca

SEQ ID NO: 1427570 - RNA, 19 nt, Artificial Sequence
  Description of Artificial Sequence: Synthetic oligonucleotide
  Sense strand starting at position 2518 of SEQ ID NO: 1243598
ggauuacuccacugcauac

SEQ ID NO: 1427571 - RNA, 19 nt, Artificial Sequence
  Description of Artificial Sequence: Synthetic oligonucleotide
  Antisense strand to SEQ ID NO: 1427570
guaugcaguggaguaaucc

SEQ ID NO: 1427572 - RNA, 19 nt, Artificial Sequence
  Description of Artificial Sequence: Synthetic oligonucleotide
  Sense strand starting at position 2539 of SEQ ID NO: 1243598
cucgguauugauuaucuuu

SEQ ID NO: 1427573 - RNA, 19 nt, Artificial Sequence
  Description of Artificial Sequence: Synthetic oligonucleotide
  Antisense strand to SEQ ID NO: 1427572
aaagauaaucaauaccgag

SEQ ID NO: 1427574 - RNA, 19 nt, Artificial Sequence
  Description of Artificial Sequence: Synthetic oligonucleotide
  Sense strand starting at position 2758 of SEQ ID NO: 1243598
caggcacugcuagauaaga

SEQ ID NO: 1427575 - RNA, 19 nt, Artificial Sequence
  Description of Artificial Sequence: Synthetic oligonucleotide
  Antisense strand to SEQ ID NO: 1427574
ucuuaucuagcagugccug

SEQ ID NO: 1427576 - RNA, 19 nt, Artificial Sequence
  Description of Artificial Sequence: Synthetic oligonucleotide
  Sense strand starting at position 2760 of SEQ ID NO: 1243598
ggcacugcuagauaagaua

SEQ ID NO: 1427577 - RNA, 19 nt, Artificial Sequence
  Description of Artificial Sequence: Synthetic oligonucleotide
  Antisense strand to SEQ ID NO: 1427576
uaucuuaucuagcagugcc

SEQ ID NO: 1427578 - RNA, 19 nt, Artificial Sequence
  Description of Artificial Sequence: Synthetic oligonucleotide
  Sense strand starting at position 2779 of SEQ ID NO: 1243598
caagauaaguaaguuggau

SEQ ID NO: 1427579 - RNA, 19 nt, Artificial Sequence
  Description of Artificial Sequence: Synthetic oligonucleotide
  Antisense strand to SEQ ID NO: 1427578
auccaacuuacuuaucuug

SEQ ID NO: 1427580 - RNA, 19 nt, Artificial Sequence
  Description of Artificial Sequence: Synthetic oligonucleotide
  Sense strand starting at position 2781 of SEQ ID NO: 1243598
agauaaguaaguuggauuc

SEQ ID NO: 1427581 - RNA, 19 nt, Artificial Sequence
  Description of Artificial Sequence: Synthetic oligonucleotide
  Antisense strand to SEQ ID NO: 1427580
gaauccaacuuacuuaucu

SEQ ID NO: 1427582 - RNA, 19 nt, Artificial Sequence
  Description of Artificial Sequence: Synthetic oligonucleotide
  Sense strand starting at position 2859 of SEQ ID NO: 1243598
agggaugauaagugugacu

SEQ ID NO: 1427583 - RNA, 19 nt, Artificial Sequence
  Description of Artificial Sequence: Synthetic oligonucleotide
  Antisense strand to SEQ ID NO: 1427582
agucacacuuaucaucccu

SEQ ID NO: 1427584 - RNA, 19 nt, Artificial Sequence
  Description of Artificial Sequence: Synthetic oligonucleotide
  Sense strand starting at position 2861 of SEQ ID NO: 1243598
ggaugauaagugugacuac

SEQ ID NO: 1427585 - RNA, 19 nt, Artificial Sequence
  Description of Artificial Sequence: Synthetic oligonucleotide
  Antisense strand to SEQ ID NO: 1427584
guagucacacuuaucaucc

SEQ ID NO: 1427586 - RNA, 19 nt, Artificial Sequence
  Description of Artificial Sequence: Synthetic oligonucleotide
  Sense strand starting at position 2872 of SEQ ID NO: 1243598
gugacuacaaaguggucua

SEQ ID NO: 1427587 - RNA, 19 nt, Artificial Sequence
  Description of Artificial Sequence: Synthetic oligonucleotide
  Antisense strand to SEQ ID NO: 1427586
uagaccacuuuguagucac

SEQ ID NO: 1427588 - RNA, 19 nt, Artificial Sequence
  Description of Artificial Sequence: Synthetic oligonucleotide
  Sense strand starting at position 2892 of SEQ ID NO: 1243598
ucuuaugguaucuguugga

SEQ ID NO: 1427589 - RNA, 19 nt, Artificial Sequence
  Description of Artificial Sequence: Synthetic oligonucleotide
  Antisense strand to SEQ ID NO: 1427588
uccaacagauaccauaaga

SEQ ID NO: 1427590 - RNA, 19 nt, Artificial Sequence
  Description of Artificial Sequence: Synthetic oligonucleotide
  Sense strand starting at position 2908 of SEQ ID NO: 1243598
ggagguugccuguagagac

SEQ ID NO: 1427591 - RNA, 19 nt, Artificial Sequence
  Description of Artificial Sequence: Synthetic oligonucleotide
  Antisense strand to SEQ ID NO: 1427590
gucucuacaggcaaccucc

SEQ ID NO: 1427592 - RNA, 19 nt, Artificial Sequence
  Description of Artificial Sequence: Synthetic oligonucleotide
  Sense strand starting at position 3184 of SEQ ID NO: 1243598
uaaaguggcccuugaagaa

SEQ ID NO: 1427593 - RNA, 19 nt, Artificial Sequence
  Description of Artificial Sequence: Synthetic oligonucleotide
  Antisense strand to SEQ ID NO: 1427592
uucuucaagggccacuuua

SEQ ID NO: 1427594 - RNA, 19 nt, Artificial Sequence
  Description of Artificial Sequence: Synthetic oligonucleotide
  Sense strand starting at position 3331 of SEQ ID NO: 1243598
aagagagcuuagccuaaga

SEQ ID NO: 1427595 - RNA, 19 nt, Artificial Sequence
  Description of Artificial Sequence: Synthetic oligonucleotide
  Antisense strand to SEQ ID NO: 1427594
ucuuaggcuaagcucucuu

SEQ ID NO: 1427596 - RNA, 19 nt, Artificial Sequence
  Description of Artificial Sequence: Synthetic oligonucleotide
  Sense strand starting at position 3521 of SEQ ID NO: 1243598
uauguuggguacuuacaau

SEQ ID NO: 1427597 - RNA, 19 nt, Artificial Sequence
  Description of Artificial Sequence: Synthetic oligonucleotide
  Antisense strand to SEQ ID NO: 1427596
auuguaaguacccaacaua

SEQ ID NO: 1427598 - RNA, 19 nt, Artificial Sequence
  Description of Artificial Sequence: Synthetic oligonucleotide
  Sense strand starting at position 3546 of SEQ ID NO: 1243598
aaaccuggccuuugaggua

SEQ ID NO: 1427599 - RNA, 19 nt, Artificial Sequence
  Description of Artificial Sequence: Synthetic oligonucleotide
  Antisense strand to SEQ ID NO: 1427598
uaccucaaaggccagguuu

SEQ ID NO: 1427600 - RNA, 19 nt, Artificial Sequence
  Description of Artificial Sequence: Synthetic oligonucleotide
  Sense strand starting at position 3551 of SEQ ID NO: 1243598
uggccuuugagguaaagag

SEQ ID NO: 1427601 - RNA, 19 nt, Artificial Sequence
  Description of Artificial Sequence: Synthetic oligonucleotide
  Antisense strand to SEQ ID NO: 1427600
cucuuuaccucaaaggcca

SEQ ID NO: 1427602 - RNA, 19 nt, Artificial Sequence
  Description of Artificial Sequence: Synthetic oligonucleotide
  Sense strand starting at position 3588 of SEQ ID NO: 1243598
ggaggugagucacugcaga

SEQ ID NO: 1427603 - RNA, 19 nt, Artificial Sequence
  Description of Artificial Sequence: Synthetic oligonucleotide
  Antisense strand to SEQ ID NO: 1427602
ucugcagugacucaccucc

SEQ ID NO: 1427604 - RNA, 19 nt, Artificial Sequence
  Description of Artificial Sequence: Synthetic oligonucleotide
  Sense strand starting at position 3666 of SEQ ID NO: 1243598
ggcaaacacucagcagaaa

SEQ ID NO: 1427605 - RNA, 19 nt, Artificial Sequence
  Description of Artificial Sequence: Synthetic oligonucleotide
  Antisense strand to SEQ ID NO: 1427604
uuucugcugaguguuugcc

SEQ ID NO: 1427606 - RNA, 19 nt, Artificial Sequence
  Description of Artificial Sequence: Synthetic oligonucleotide
  Sense strand starting at position 3757 of SEQ ID NO: 1243598
aggaaucaagaccguucua

SEQ ID NO: 1427607 - RNA, 19 nt, Artificial Sequence
  Description of Artificial Sequence: Synthetic oligonucleotide
  Antisense strand to SEQ ID NO: 1427606
uagaacggucuugauuccu

SEQ ID NO: 1427608 - RNA, 19 nt, Artificial Sequence
  Description of Artificial Sequence: Synthetic oligonucleotide
  Sense strand starting at position 3817 of SEQ ID NO: 1243598
ccuuauacugaagguagaa

SEQ ID NO: 1427609 - RNA, 19 nt, Artificial Sequence
  Description of Artificial Sequence: Synthetic oligonucleotide
  Antisense strand to SEQ ID NO: 1427608
uucuaccuucaguauaagg

SEQ ID NO: 1427610 - RNA, 19 nt, Artificial Sequence
  Description of Artificial Sequence: Synthetic oligonucleotide
  Sense strand starting at position 3879 of SEQ ID NO: 1243598
uuaagaugcaacugagagu

SEQ ID NO: 1427611 - RNA, 19 nt, Artificial Sequence
  Description of Artificial Sequence: Synthetic oligonucleotide
  Antisense strand to SEQ ID NO: 1427610
acucucaguugcaucuuaa

SEQ ID NO: 1427612 - RNA, 19 nt, Artificial Sequence
  Description of Artificial Sequence: Synthetic oligonucleotide
  Sense strand starting at position 3890 of SEQ ID NO: 1243598
cugagaguaguugaggcaa

SEQ ID NO: 1427613 - RNA, 19 nt, Artificial Sequence
  Description of Artificial Sequence: Synthetic oligonucleotide
  Antisense strand to SEQ ID NO: 1427612
uugccucaacuacucucag

SEQ ID NO: 1427614 - RNA, 19 nt, Artificial Sequence
  Description of Artificial Sequence: Synthetic oligonucleotide
  Sense strand starting at position 80 of SEQ ID NO: 1243599
acugucggcccaugucaua

SEQ ID NO: 1427615 - RNA, 19 nt, Artificial Sequence
  Description of Artificial Sequence: Synthetic oligonucleotide
  Antisense strand to SEQ ID NO: 1427614
uaugacaugggccgacagu

SEQ ID NO: 1427616 - RNA, 19 nt, Artificial Sequence
  Description of Artificial Sequence: Synthetic oligonucleotide
  Sense strand starting at position 87 of SEQ ID NO: 1243599
gcccaugucauagauggga

SEQ ID NO: 1427617 - RNA, 19 nt, Artificial Sequence
  Description of Artificial Sequence: Synthetic oligonucleotide
  Antisense strand to SEQ ID NO: 1427616
ucccaucuaugacaugggc

SEQ ID NO: 1427618 - RNA, 19 nt, Artificial Sequence
  Description of Artificial Sequence: Synthetic oligonucleotide
  Sense strand starting at position 363 of SEQ ID NO: 1243599
cagcaucuugcagaggaga

SEQ ID NO: 1427619 - RNA, 19 nt, Artificial Sequence
  Description of Artificial Sequence: Synthetic oligonucleotide
  Antisense strand to SEQ ID NO: 1427618
ucuccucugcaagaugcug

SEQ ID NO: 1427620 - RNA, 19 nt, Artificial Sequence
  Description of Artificial Sequence: Synthetic oligonucleotide
  Sense strand starting at position 365 of SEQ ID NO: 1243599
gcaucuugcagaggagaga

SEQ ID NO: 1427621 - RNA, 19 nt, Artificial Sequence
  Description of Artificial Sequence: Synthetic oligonucleotide
  Antisense strand to SEQ ID NO: 1427620
ucucuccucugcaagaugc

SEQ ID NO: 1427622 - RNA, 19 nt, Artificial Sequence
  Description of Artificial Sequence: Synthetic oligonucleotide
  Sense strand starting at position 452 of SEQ ID NO: 1243599
acagcuguuuacccagaga

SEQ ID NO: 1427623 - RNA, 19 nt, Artificial Sequence
  Description of Artificial Sequence: Synthetic oligonucleotide
  Antisense strand to SEQ ID NO: 1427622
ucucuggguaaacagcugu

SEQ ID NO: 1427624 - RNA, 19 nt, Artificial Sequence
  Description of Artificial Sequence: Synthetic oligonucleotide
  Sense strand starting at position 761 of SEQ ID NO: 1243599
ggaagucauuucugagcaa

SEQ ID NO: 1427625 - RNA, 19 nt, Artificial Sequence
  Description of Artificial Sequence: Synthetic oligonucleotide
  Antisense strand to SEQ ID NO: 1427624
uugcucagaaaugacuucc

SEQ ID NO: 1427626 - RNA, 19 nt, Artificial Sequence
  Description of Artificial Sequence: Synthetic oligonucleotide
  Sense strand starting at position 762 of SEQ ID NO: 1243599
gaagucauuucugagcaag

SEQ ID NO: 1427627 - RNA, 19 nt, Artificial Sequence
  Description of Artificial Sequence: Synthetic oligonucleotide
  Antisense strand to SEQ ID NO: 1427626
cuugcucagaaaugacuuc

SEQ ID NO: 1427628 - RNA, 19 nt, Artificial Sequence
  Description of Artificial Sequence: Synthetic oligonucleotide
  Sense strand starting at position 935 of SEQ ID NO: 1243599
gagaucacgucacaugcaa

SEQ ID NO: 1427629 - RNA, 19 nt, Artificial Sequence
  Description of Artificial Sequence: Synthetic oligonucleotide
  Antisense strand to SEQ ID NO: 1427628
uugcaugugacgugaucuc

SEQ ID NO: 1427630 - RNA, 19 nt, Artificial Sequence
  Description of Artificial Sequence: Synthetic oligonucleotide
  Sense strand starting at position 1048 of SEQ ID NO: 1243599
gggauuaucucccacucag

SEQ ID NO: 1427631 - RNA, 19 nt, Artificial Sequence
  Description of Artificial Sequence: Synthetic oligonucleotide
  Antisense strand to SEQ ID NO: 1427630
cugagugggagauaauccc

SEQ ID NO: 1427632 - RNA, 19 nt, Artificial Sequence
  Description of Artificial Sequence: Synthetic oligonucleotide
  Sense strand starting at position 1114 of SEQ ID NO: 1243599
cugcuuccuggugacagau

SEQ ID NO: 1427633 - RNA, 19 nt, Artificial Sequence
  Description of Artificial Sequence: Synthetic oligonucleotide
  Antisense strand to SEQ ID NO: 1427632
aucugucaccaggaagcag

SEQ ID NO: 1427634 - RNA, 19 nt, Artificial Sequence
  Description of Artificial Sequence: Synthetic oligonucleotide
  Sense strand starting at position 1420 of SEQ ID NO: 1243599
ugggcagggcucugagaau

SEQ ID NO: 1427635 - RNA, 19 nt, Artificial Sequence
  Description of Artificial Sequence: Synthetic oligonucleotide
  Antisense strand to SEQ ID NO: 1427634
auucucagagcccugccca

SEQ ID NO: 1427636 - RNA, 19 nt, Artificial Sequence
  Description of Artificial Sequence: Synthetic oligonucleotide
  Sense strand starting at position 1765 of SEQ ID NO: 1243599
aggguuaauuuccaugcaa

SEQ ID NO: 1427637 - RNA, 19 nt, Artificial Sequence
  Description of Artificial Sequence: Synthetic oligonucleotide
  Antisense strand to SEQ ID NO: 1427636
uugcauggaaauuaacccu

SEQ ID NO: 1427638 - RNA, 19 nt, Artificial Sequence
  Description of Artificial Sequence: Synthetic oligonucleotide
  Sense strand starting at position 2444 of SEQ ID NO: 1243599
aacggaagucgugaauggu

SEQ ID NO: 1427639 - RNA, 19 nt, Artificial Sequence
  Description of Artificial Sequence: Synthetic oligonucleotide
  Antisense strand to SEQ ID NO: 1427638
accauucacgacuuccguu

SEQ ID NO: 1427640 - RNA, 19 nt, Artificial Sequence
  Description of Artificial Sequence: Synthetic oligonucleotide
  Sense strand starting at position 2447 of SEQ ID NO: 1243599
ggaagucgugaaugguaag

SEQ ID NO: 1427641 - RNA, 19 nt, Artificial Sequence
  Description of Artificial Sequence: Synthetic oligonucleotide
  Antisense strand to SEQ ID NO: 1427640
cuuaccauucacgacuucc

SEQ ID NO: 1427642 - RNA, 19 nt, Artificial Sequence
  Description of Artificial Sequence: Synthetic oligonucleotide
  Sense strand starting at position 2448 of SEQ ID NO: 1243599
gaagucgugaaugguaagu

SEQ ID NO: 1427643 - RNA, 19 nt, Artificial Sequence
  Description of Artificial Sequence: Synthetic oligonucleotide
  Antisense strand to SEQ ID NO: 1427642
acuuaccauucacgacuuc

SEQ ID NO: 1427644 - RNA, 19 nt, Artificial Sequence
  Description of Artificial Sequence: Synthetic oligonucleotide
  Sense strand starting at position 2459 of SEQ ID NO: 1243599
ugguaagucgugagugggu

SEQ ID NO: 1427645 - RNA, 19 nt, Artificial Sequence
  Description of Artificial Sequence: Synthetic oligonucleotide
  Antisense strand to SEQ ID NO: 1427644
acccacucacgacuuacca

SEQ ID NO: 1427646 - RNA, 19 nt, Artificial Sequence
  Description of Artificial Sequence: Synthetic oligonucleotide
  Sense strand starting at position 2460 of SEQ ID NO: 1243599
gguaagucgugagugggua

SEQ ID NO: 1427647 - RNA, 19 nt, Artificial Sequence
  Description of Artificial Sequence: Synthetic oligonucleotide
  Antisense strand to SEQ ID NO: 1427646
uacccacucacgacuuacc

SEQ ID NO: 1427648 - RNA, 19 nt, Artificial Sequence
  Description of Artificial Sequence: Synthetic oligonucleotide
  Sense strand starting at position 2505 of SEQ ID NO: 1243599
ggguacuccuagguggaaa

SEQ ID NO: 1427649 - RNA, 19 nt, Artificial Sequence
  Description of Artificial Sequence: Synthetic oligonucleotide
  Antisense strand to SEQ ID NO: 1427648
uuuccaccuaggaguaccc

SEQ ID NO: 1427650 - RNA, 19 nt, Artificial Sequence
  Description of Artificial Sequence: Synthetic oligonucleotide
  Sense strand starting at position 2820 of SEQ ID NO: 1243599
cccuauguuucucccagga

SEQ ID NO: 1427651 - RNA, 19 nt, Artificial Sequence
  Description of Artificial Sequence: Synthetic oligonucleotide
  Antisense strand to SEQ ID NO: 1427650
uccugggagaaacauaggg

SEQ ID NO: 1427652 - RNA, 19 nt, Artificial Sequence
  Description of Artificial Sequence: Synthetic oligonucleotide
  Sense strand starting at position 2822 of SEQ ID NO: 1243599
cuauguuucucccaggauc

SEQ ID NO: 1427653 - RNA, 19 nt, Artificial Sequence
  Description of Artificial Sequence: Synthetic oligonucleotide
  Antisense strand to SEQ ID NO: 1427652
gauccugggagaaacauag

SEQ ID NO: 1427654 - RNA, 19 nt, Artificial Sequence
  Description of Artificial Sequence: Synthetic oligonucleotide
  Sense strand starting at position 2920 of SEQ ID NO: 1243599
agaguuaaaguucagugga

SEQ ID NO: 1427655 - RNA, 19 nt, Artificial Sequence
  Description of Artificial Sequence: Synthetic oligonucleotide
  Antisense strand to SEQ ID NO: 1427654
uccacugaacuuuaacucu

SEQ ID NO: 1427656 - RNA, 19 nt, Artificial Sequence
  Description of Artificial Sequence: Synthetic oligonucleotide
  Sense strand starting at position 3234 of SEQ ID NO: 1243599
gagacuugcaguugaguuu

SEQ ID NO: 1427657 - RNA, 19 nt, Artificial Sequence
  Description of Artificial Sequence: Synthetic oligonucleotide
  Antisense strand to SEQ ID NO: 1427656
aaacucaacugcaagucuc

SEQ ID NO: 1427658 - RNA, 19 nt, Artificial Sequence
  Description of Artificial Sequence: Synthetic oligonucleotide
  Sense strand starting at position 3240 of SEQ ID NO: 1243599
ugcaguugaguuugaugca

SEQ ID NO: 1427659 - RNA, 19 nt, Artificial Sequence
  Description of Artificial Sequence: Synthetic oligonucleotide
  Antisense strand to SEQ ID NO: 1427658
ugcaucaaacucaacugca

SEQ ID NO: 1427660 - RNA, 19 nt, Artificial Sequence
  Description of Artificial Sequence: Synthetic oligonucleotide
  Sense strand starting at position 3315 of SEQ ID NO: 1243599
cacucauucugggaccaga

SEQ ID NO: 1427661 - RNA, 19 nt, Artificial Sequence
  Description of Artificial Sequence: Synthetic oligonucleotide
  Antisense strand to SEQ ID NO: 1427660
ucuggucccagaaugagug

SEQ ID NO: 1427662 - RNA, 19 nt, Artificial Sequence
  Description of Artificial Sequence: Synthetic oligonucleotide
  Sense strand starting at position 3412 of SEQ ID NO: 1243599
uuaggacuuuagggagaga

SEQ ID NO: 1427663 - RNA, 19 nt, Artificial Sequence
  Description of Artificial Sequence: Synthetic oligonucleotide
  Antisense strand to SEQ ID NO: 1427662
ucucucccuaaaguccuaa

SEQ ID NO: 1427664 - RNA, 19 nt, Artificial Sequence
  Description of Artificial Sequence: Synthetic oligonucleotide
  Sense strand starting at position 3541 of SEQ ID NO: 1243599
guaggaaguuuccuccuaa

SEQ ID NO: 1427665 - RNA, 19 nt, Artificial Sequence
  Description of Artificial Sequence: Synthetic oligonucleotide
  Antisense strand to SEQ ID NO: 1427664
uuaggaggaaacuuccuac

SEQ ID NO: 1427666 - RNA, 19 nt, Artificial Sequence
  Description of Artificial Sequence: Synthetic oligonucleotide
  Sense strand starting at position 3545 of SEQ ID NO: 1243599
gaaguuuccuccuaacagg

SEQ ID NO: 1427667 - RNA, 19 nt, Artificial Sequence
  Description of Artificial Sequence: Synthetic oligonucleotide
  Antisense strand to SEQ ID NO: 1427666
ccuguuaggaggaaacuuc

SEQ ID NO: 1427668 - RNA, 19 nt, Artificial Sequence
  Description of Artificial Sequence: Synthetic oligonucleotide
  Sense strand starting at position 3730 of SEQ ID NO: 1243599
ugccguugcagguaaagaa

SEQ ID NO: 1427669 - RNA, 19 nt, Artificial Sequence
  Description of Artificial Sequence: Synthetic oligonucleotide
  Antisense strand to SEQ ID NO: 1427668
uucuuuaccugcaacggca

SEQ ID NO: 1427670 - RNA, 19 nt, Artificial Sequence
  Description of Artificial Sequence: Synthetic oligonucleotide
  Sense strand starting at position 3938 of SEQ ID NO: 1243599
auggcauacccucaugagu

SEQ ID NO: 1427671 - RNA, 19 nt, Artificial Sequence
  Description of Artificial Sequence: Synthetic oligonucleotide
  Antisense strand to SEQ ID NO: 1427670
acucaugaggguaugccau

SEQ ID NO: 1427672 - RNA, 19 nt, Artificial Sequence
  Description of Artificial Sequence: Synthetic oligonucleotide
  Sense strand starting at position 3940 of SEQ ID NO: 1243599
ggcauacccucaugagucu

SEQ ID NO: 1427673 - RNA, 19 nt, Artificial Sequence
  Description of Artificial Sequence: Synthetic oligonucleotide
  Antisense strand to SEQ ID NO: 1427672
agacucaugaggguaugcc

SEQ ID NO: 1427674 - RNA, 19 nt, Artificial Sequence
  Description of Artificial Sequence: Synthetic oligonucleotide
  Sense strand starting at position 344 of SEQ ID NO: 1243600
gggcuugagaucugauagc

SEQ ID NO: 1427675 - RNA, 19 nt, Artificial Sequence
  Description of Artificial Sequence: Synthetic oligonucleotide
  Antisense strand to SEQ ID NO: 1427674
gcuaucagaucucaagccc

SEQ ID NO: 1427676 - RNA, 19 nt, Artificial Sequence
  Description of Artificial Sequence: Synthetic oligonucleotide
  Sense strand starting at position 354 of SEQ ID NO: 1243600
ucugauagcucuggaggga

SEQ ID NO: 1427677 - RNA, 19 nt, Artificial Sequence
  Description of Artificial Sequence: Synthetic oligonucleotide
  Antisense strand to SEQ ID NO: 1427676
ucccuccagagcuaucaga

SEQ ID NO: 1427678 - RNA, 19 nt, Artificial Sequence
  Description of Artificial Sequence: Synthetic oligonucleotide
  Sense strand starting at position 571 of SEQ ID NO: 1243600
gccugagugaaaggcuaau

SEQ ID NO: 1427679 - RNA, 19 nt, Artificial Sequence
  Description of Artificial Sequence: Synthetic oligonucleotide
  Antisense strand to SEQ ID NO: 1427678
auuagccuuucacucaggc

SEQ ID NO: 1427680 - RNA, 19 nt, Artificial Sequence
  Description of Artificial Sequence: Synthetic oligonucleotide
  Sense strand starting at position 1141 of SEQ ID NO: 1243600
caaggagaccuccgugagu

SEQ ID NO: 1427681 - RNA, 19 nt, Artificial Sequence
  Description of Artificial Sequence: Synthetic oligonucleotide
  Antisense strand to SEQ ID NO: 1427680
acucacggaggucuccuug

SEQ ID NO: 1427682 - RNA, 19 nt, Artificial Sequence
  Description of Artificial Sequence: Synthetic oligonucleotide
  Sense strand starting at position 1481 of SEQ ID NO: 1243600
aggcucaguuguuccauga

SEQ ID NO: 1427683 - RNA, 19 nt, Artificial Sequence
  Description of Artificial Sequence: Synthetic oligonucleotide
  Antisense strand to SEQ ID NO: 1427682
ucauggaacaacugagccu

SEQ ID NO: 1427684 - RNA, 19 nt, Artificial Sequence
  Description of Artificial Sequence: Synthetic oligonucleotide
  Sense strand starting at position 1839 of SEQ ID NO: 1243600
cccacaguccugugggaga

SEQ ID NO: 1427685 - RNA, 19 nt, Artificial Sequence
  Description of Artificial Sequence: Synthetic oligonucleotide
  Antisense strand to SEQ ID NO: 1427684
ucucccacaggacuguggg

SEQ ID NO: 1427686 - RNA, 19 nt, Artificial Sequence
  Description of Artificial Sequence: Synthetic oligonucleotide
  Sense strand starting at position 1891 of SEQ ID NO: 1243600
ggagcauuccuggaugucu

SEQ ID NO: 1427687 - RNA, 19 nt, Artificial Sequence
  Description of Artificial Sequence: Synthetic oligonucleotide
  Antisense strand to SEQ ID NO: 1427686
agacauccaggaaugcucc

SEQ ID NO: 1427688 - RNA, 19 nt, Artificial Sequence
  Description of Artificial Sequence: Synthetic oligonucleotide
  Sense strand starting at position 2140 of SEQ ID NO: 1243600
gcacauuccugcgcugaga

SEQ ID NO: 1427689 - RNA, 19 nt, Artificial Sequence
  Description of Artificial Sequence: Synthetic oligonucleotide
  Antisense strand to SEQ ID NO: 1427688
ucucagcgcaggaaugugc

SEQ ID NO: 1427690 - RNA, 19 nt, Artificial Sequence
  Description of Artificial Sequence: Synthetic oligonucleotide
  Sense strand starting at position 2157 of SEQ ID NO: 1243600
gagccaaagucuccaaagu

SEQ ID NO: 1427691 - RNA, 19 nt, Artificial Sequence
  Description of Artificial Sequence: Synthetic oligonucleotide
  Antisense strand to SEQ ID NO: 1427690
acuuuggagacuuuggcuc

SEQ ID NO: 1427692 - RNA, 19 nt, Artificial Sequence
  Description of Artificial Sequence: Synthetic oligonucleotide
  Sense strand starting at position 2343 of SEQ ID NO: 1243600
gcuggugaguccgaggaca

SEQ ID NO: 1427693 - RNA, 19 nt, Artificial Sequence
  Description of Artificial Sequence: Synthetic oligonucleotide
  Antisense strand to SEQ ID NO: 1427692
uguccucggacucaccagc

SEQ ID NO: 1427694 - RNA, 19 nt, Artificial Sequence
  Description of Artificial Sequence: Synthetic oligonucleotide
  Sense strand starting at position 2734 of SEQ ID NO: 1243600
ugccgauacagcgugcaau

SEQ ID NO: 1427695 - RNA, 19 nt, Artificial Sequence
  Description of Artificial Sequence: Synthetic oligonucleotide
  Antisense strand to SEQ ID NO: 1427694
auugcacgcuguaucggca

SEQ ID NO: 1427696 - RNA, 19 nt, Artificial Sequence
  Description of Artificial Sequence: Synthetic oligonucleotide
  Sense strand starting at position 3381 of SEQ ID NO: 1243600
ggcccauucugcgucauga

SEQ ID NO: 1427697 - RNA, 19 nt, Artificial Sequence
  Description of Artificial Sequence: Synthetic oligonucleotide
  Antisense strand to SEQ ID NO: 1427696
ucaugacgcagaaugggcc

SEQ ID NO: 1427698 - RNA, 19 nt, Artificial Sequence
  Description of Artificial Sequence: Synthetic oligonucleotide
  Sense strand starting at position 3382 of SEQ ID NO: 1243600
gcccauucugcgucaugac

SEQ ID NO: 1427699 - RNA, 19 nt, Artificial Sequence
  Description of Artificial Sequence: Synthetic oligonucleotide
  Antisense strand to SEQ ID NO: 1427698
gucaugacgcagaaugggc

SEQ ID NO: 1427700 - RNA, 19 nt, Artificial Sequence
  Description of Artificial Sequence: Synthetic oligonucleotide
  Sense strand starting at position 3383 of SEQ ID NO: 1243600
cccauucugcgucaugaca

SEQ ID NO: 1427701 - RNA, 19 nt, Artificial Sequence
  Description of Artificial Sequence: Synthetic oligonucleotide
  Antisense strand to SEQ ID NO: 1427700
ugucaugacgcagaauggg

SEQ ID NO: 1427702 - RNA, 19 nt, Artificial Sequence
  Description of Artificial Sequence: Synthetic oligonucleotide
  Sense strand starting at position 3385 of SEQ ID NO: 1243600
cauucugcgucaugacaua

SEQ ID NO: 1427703 - RNA, 19 nt, Artificial Sequence
  Description of Artificial Sequence: Synthetic oligonucleotide
  Antisense strand to SEQ ID NO: 1427702
uaugucaugacgcagaaug

SEQ ID NO: 1427704 - RNA, 19 nt, Artificial Sequence
  Description of Artificial Sequence: Synthetic oligonucleotide
  Sense strand starting at position 3422 of SEQ ID NO: 1243600
cugggacugucucccaaau

SEQ ID NO: 1427705 - RNA, 19 nt, Artificial Sequence
  Description of Artificial Sequence: Synthetic oligonucleotide
  Antisense strand to SEQ ID NO: 1427704
auuugggagacagucccag

SEQ ID NO: 1427706 - RNA, 19 nt, Artificial Sequence
  Description of Artificial Sequence: Synthetic oligonucleotide
  Sense strand starting at position 3453 of SEQ ID NO: 1243600
agcugagucaugggucacu

SEQ ID NO: 1427707 - RNA, 19 nt, Artificial Sequence
  Description of Artificial Sequence: Synthetic oligonucleotide
  Antisense strand to SEQ ID NO: 1427706
agugacccaugacucagcu

SEQ ID NO: 1427708 - RNA, 19 nt, Artificial Sequence
  Description of Artificial Sequence: Synthetic oligonucleotide
  Sense strand starting at position 3458 of SEQ ID NO: 1243600
agucaugggucacuuagua

SEQ ID NO: 1427709 - RNA, 19 nt, Artificial Sequence
  Description of Artificial Sequence: Synthetic oligonucleotide
  Antisense strand to SEQ ID NO: 1427708
uacuaagugacccaugacu

SEQ ID NO: 1427710 - RNA, 19 nt, Artificial Sequence
  Description of Artificial Sequence: Synthetic oligonucleotide
  Sense strand starting at position 3462 of SEQ ID NO: 1243600
augggucacuuaguaggaa

SEQ ID NO: 1427711 - RNA, 19 nt, Artificial Sequence
  Description of Artificial Sequence: Synthetic oligonucleotide
  Antisense strand to SEQ ID NO: 1427710
uuccuacuaagugacccau

SEQ ID NO: 1427712 - RNA, 19 nt, Artificial Sequence
  Description of Artificial Sequence: Synthetic oligonucleotide
  Sense strand starting at position 3547 of SEQ ID NO: 1243600
ccugacuucuccuggcgua

SEQ ID NO: 1427713 - RNA, 19 nt, Artificial Sequence
  Description of Artificial Sequence: Synthetic oligonucleotide
  Antisense strand to SEQ ID NO: 1427712
uacgccaggagaagucagg

SEQ ID NO: 1427714 - RNA, 19 nt, Artificial Sequence
  Description of Artificial Sequence: Synthetic oligonucleotide
  Sense strand starting at position 3550 of SEQ ID NO: 1243600
gacuucuccuggcguagga

SEQ ID NO: 1427715 - RNA, 19 nt, Artificial Sequence
  Description of Artificial Sequence: Synthetic oligonucleotide
  Antisense strand to SEQ ID NO: 1427714
uccuacgccaggagaaguc

SEQ ID NO: 1427716 - RNA, 19 nt, Artificial Sequence
  Description of Artificial Sequence: Synthetic oligonucleotide
  Sense strand starting at position 3636 of SEQ ID NO: 1243600
gggugucauuugcucauca

SEQ ID NO: 1427717 - RNA, 19 nt, Artificial Sequence
  Description of Artificial Sequence: Synthetic oligonucleotide
  Antisense strand to SEQ ID NO: 1427716
ugaugagcaaaugacaccc

SEQ ID NO: 1427718 - RNA, 19 nt, Artificial Sequence
  Description of Artificial Sequence: Synthetic oligonucleotide
  Sense strand starting at position 3644 of SEQ ID NO: 1243600
uuugcucaucagcaggaau

SEQ ID NO: 1427719 - RNA, 19 nt, Artificial Sequence
  Description of Artificial Sequence: Synthetic oligonucleotide
  Antisense strand to SEQ ID NO: 1427718
auuccugcugaugagcaaa

SEQ ID NO: 1427720 - RNA, 19 nt, Artificial Sequence
  Description of Artificial Sequence: Synthetic oligonucleotide
  Sense strand starting at position 81 of SEQ ID NO: 1243601
ugaaacuuagauuggguua

SEQ ID NO: 1427721 - RNA, 19 nt, Artificial Sequence
  Description of Artificial Sequence: Synthetic oligonucleotide
  Antisense strand to SEQ ID NO: 1427720
uaacccaaucuaaguuuca

SEQ ID NO: 1427722 - RNA, 19 nt, Artificial Sequence
  Description of Artificial Sequence: Synthetic oligonucleotide
  Sense strand starting at position 84 of SEQ ID NO: 1243601
aacuuagauuggguuaacu

SEQ ID NO: 1427723 - RNA, 19 nt, Artificial Sequence
  Description of Artificial Sequence: Synthetic oligonucleotide
  Antisense strand to SEQ ID NO: 1427722
aguuaacccaaucuaaguu

SEQ ID NO: 1427724 - RNA, 19 nt, Artificial Sequence
  Description of Artificial Sequence: Synthetic oligonucleotide
  Sense strand starting at position 168 of SEQ ID NO: 1243601
uuagucuuagaaggcagau

SEQ ID NO: 1427725 - RNA, 19 nt, Artificial Sequence
  Description of Artificial Sequence: Synthetic oligonucleotide
  Antisense strand to SEQ ID NO: 1427724
aucugccuucuaagacuaa

SEQ ID NO: 1427726 - RNA, 19 nt, Artificial Sequence
  Description of Artificial Sequence: Synthetic oligonucleotide
  Sense strand starting at position 178 of SEQ ID NO: 1243601
aaggcagauccagguucua

SEQ ID NO: 1427727 - RNA, 19 nt, Artificial Sequence
  Description of Artificial Sequence: Synthetic oligonucleotide
  Antisense strand to SEQ ID NO: 1427726
uagaaccuggaucugccuu

SEQ ID NO: 1427728 - RNA, 19 nt, Artificial Sequence
  Description of Artificial Sequence: Synthetic oligonucleotide
  Sense strand starting at position 189 of SEQ ID NO: 1243601
agguucuaugcuuauauca

SEQ ID NO: 1427729 - RNA, 19 nt, Artificial Sequence
  Description of Artificial Sequence: Synthetic oligonucleotide
  Antisense strand to SEQ ID NO: 1427728
ugauauaagcauagaaccu

SEQ ID NO: 1427730 - RNA, 19 nt, Artificial Sequence
  Description of Artificial Sequence: Synthetic oligonucleotide
  Sense strand starting at position 244 of SEQ ID NO: 1243601
cccaauuguuaacugagaa

SEQ ID NO: 1427731 - RNA, 19 nt, Artificial Sequence
  Description of Artificial Sequence: Synthetic oligonucleotide
  Antisense strand to SEQ ID NO: 1427730
uucucaguuaacaauuggg

SEQ ID NO: 1427732 - RNA, 19 nt, Artificial Sequence
  Description of Artificial Sequence: Synthetic oligonucleotide
  Sense strand starting at position 257 of SEQ ID NO: 1243601
ugagaaaccuaauuagcau

SEQ ID NO: 1427733 - RNA, 19 nt, Artificial Sequence
  Description of Artificial Sequence: Synthetic oligonucleotide
  Antisense strand to SEQ ID NO: 1427732
augcuaauuagguuucuca

SEQ ID NO: 1427734 - RNA, 19 nt, Artificial Sequence
  Description of Artificial Sequence: Synthetic oligonucleotide
  Sense strand starting at position 366 of SEQ ID NO: 1243601
auauguagacacggugaaa

SEQ ID NO: 1427735 - RNA, 19 nt, Artificial Sequence
  Description of Artificial Sequence: Synthetic oligonucleotide
  Antisense strand to SEQ ID NO: 1427734
uuucaccgugucuacauau

SEQ ID NO: 1427736 - RNA, 19 nt, Artificial Sequence
  Description of Artificial Sequence: Synthetic oligonucleotide
  Sense strand starting at position 387 of SEQ ID NO: 1243601
auuacuucugauuagugua

SEQ ID NO: 1427737 - RNA, 19 nt, Artificial Sequence
  Description of Artificial Sequence: Synthetic oligonucleotide
  Antisense strand to SEQ ID NO: 1427736
uacacuaaucagaaguaau

SEQ ID NO: 1427738 - RNA, 19 nt, Artificial Sequence
  Description of Artificial Sequence: Synthetic oligonucleotide
  Sense strand starting at position 392 of SEQ ID NO: 1243601
uucugauuaguguacugau

SEQ ID NO: 1427739 - RNA, 19 nt, Artificial Sequence
  Description of Artificial Sequence: Synthetic oligonucleotide
  Antisense strand to SEQ ID NO: 1427738
aucaguacacuaaucagaa

SEQ ID NO: 1427740 - RNA, 19 nt, Artificial Sequence
  Description of Artificial Sequence: Synthetic oligonucleotide
  Sense strand starting at position 704 of SEQ ID NO: 1243601
guuguuaugcaacacauua

SEQ ID NO: 1427741 - RNA, 19 nt, Artificial Sequence
  Description of Artificial Sequence: Synthetic oligonucleotide
  Antisense strand to SEQ ID NO: 1427740
uaauguguugcauaacaac

SEQ ID NO: 1427742 - RNA, 19 nt, Artificial Sequence
  Description of Artificial Sequence: Synthetic oligonucleotide
  Sense strand starting at position 749 of SEQ ID NO: 1243601
gccuuauaaccaggaaguu

SEQ ID NO: 1427743 - RNA, 19 nt, Artificial Sequence
  Description of Artificial Sequence: Synthetic oligonucleotide
  Antisense strand to SEQ ID NO: 1427742
aacuuccugguuauaaggc

SEQ ID NO: 1427744 - RNA, 19 nt, Artificial Sequence
  Description of Artificial Sequence: Synthetic oligonucleotide
  Sense strand starting at position 1098 of SEQ ID NO: 1243601
accaaaugaugcuugaaau

SEQ ID NO: 1427745 - RNA, 19 nt, Artificial Sequence
  Description of Artificial Sequence: Synthetic oligonucleotide
  Antisense strand to SEQ ID NO: 1427744
auuucaagcaucauuuggu

SEQ ID NO: 1427746 - RNA, 19 nt, Artificial Sequence
  Description of Artificial Sequence: Synthetic oligonucleotide
  Sense strand starting at position 1099 of SEQ ID NO: 1243601
ccaaaugaugcuugaaauu

SEQ ID NO: 1427747 - RNA, 19 nt, Artificial Sequence
  Description of Artificial Sequence: Synthetic oligonucleotide
  Antisense strand to SEQ ID NO: 1427746
aauuucaagcaucauuugg

SEQ ID NO: 1427748 - RNA, 19 nt, Artificial Sequence
  Description of Artificial Sequence: Synthetic oligonucleotide
  Sense strand starting at position 1273 of SEQ ID NO: 1243601
aguaguguuaaauaucuga

SEQ ID NO: 1427749 - RNA, 19 nt, Artificial Sequence
  Description of Artificial Sequence: Synthetic oligonucleotide
  Antisense strand to SEQ ID NO: 1427748
ucagauauuuaacacuacu

SEQ ID NO: 1427750 - RNA, 19 nt, Artificial Sequence
  Description of Artificial Sequence: Synthetic oligonucleotide
  Sense strand starting at position 1276 of SEQ ID NO: 1243601
aguguuaaauaucugagag

SEQ ID NO: 1427751 - RNA, 19 nt, Artificial Sequence
  Description of Artificial Sequence: Synthetic oligonucleotide
  Antisense strand to SEQ ID NO: 1427750
cucucagauauuuaacacu

SEQ ID NO: 1427752 - RNA, 19 nt, Artificial Sequence
  Description of Artificial Sequence: Synthetic oligonucleotide
  Sense strand starting at position 1277 of SEQ ID NO: 1243601
guguuaaauaucugagagu

SEQ ID NO: 1427753 - RNA, 19 nt, Artificial Sequence
  Description of Artificial Sequence: Synthetic oligonucleotide
  Antisense strand to SEQ ID NO: 1427752
acucucagauauuuaacac

SEQ ID NO: 1427754 - RNA, 19 nt, Artificial Sequence
  Description of Artificial Sequence: Synthetic oligonucleotide
  Sense strand starting at position 1312 of SEQ ID NO: 1243601
ugugauaauguguaaguua

SEQ ID NO: 1427755 - RNA, 19 nt, Artificial Sequence
  Description of Artificial Sequence: Synthetic oligonucleotide
  Antisense strand to SEQ ID NO: 1427754
uaacuuacacauuaucaca

SEQ ID NO: 1427756 - RNA, 19 nt, Artificial Sequence
  Description of Artificial Sequence: Synthetic oligonucleotide
  Sense strand starting at position 1315 of SEQ ID NO: 1243601
gauaauguguaaguuaaag

SEQ ID NO: 1427757 - RNA, 19 nt, Artificial Sequence
  Description of Artificial Sequence: Synthetic oligonucleotide
  Antisense strand to SEQ ID NO: 1427756
cuuuaacuuacacauuauc

SEQ ID NO: 1427758 - RNA, 19 nt, Artificial Sequence
  Description of Artificial Sequence: Synthetic oligonucleotide
  Sense strand starting at position 1323 of SEQ ID NO: 1243601
guaaguuaaagugauugcu

SEQ ID NO: 1427759 - RNA, 19 nt, Artificial Sequence
  Description of Artificial Sequence: Synthetic oligonucleotide
  Antisense strand to SEQ ID NO: 1427758
agcaaucacuuuaacuuac

SEQ ID NO: 1427760 - RNA, 19 nt, Artificial Sequence
  Description of Artificial Sequence: Synthetic oligonucleotide
  Sense strand starting at position 1332 of SEQ ID NO: 1243601
agugauugcuuucuauuua

SEQ ID NO: 1427761 - RNA, 19 nt, Artificial Sequence
  Description of Artificial Sequence: Synthetic oligonucleotide
  Antisense strand to SEQ ID NO: 1427760
uaaauagaaagcaaucacu

SEQ ID NO: 1427762 - RNA, 19 nt, Artificial Sequence
  Description of Artificial Sequence: Synthetic oligonucleotide
  Sense strand starting at position 1665 of SEQ ID NO: 1243601
uugagaauugcuuacauau

SEQ ID NO: 1427763 - RNA, 19 nt, Artificial Sequence
  Description of Artificial Sequence: Synthetic oligonucleotide
  Antisense strand to SEQ ID NO: 1427762
auauguaagcaauucucaa

SEQ ID NO: 1427764 - RNA, 19 nt, Artificial Sequence
  Description of Artificial Sequence: Synthetic oligonucleotide
  Sense strand starting at position 1917 of SEQ ID NO: 1243601
gcacaauuagaaugaaguu

SEQ ID NO: 1427765 - RNA, 19 nt, Artificial Sequence
  Description of Artificial Sequence: Synthetic oligonucleotide
  Antisense strand to SEQ ID NO: 1427764
aacuucauucuaauugugc

SEQ ID NO: 1427766 - RNA, 19 nt, Artificial Sequence
  Description of Artificial Sequence: Synthetic oligonucleotide
  Sense strand starting at position 2139 of SEQ ID NO: 1243601
ucuuacagaucuccacgau

SEQ ID NO: 1427767 - RNA, 19 nt, Artificial Sequence
  Description of Artificial Sequence: Synthetic oligonucleotide
  Antisense strand to SEQ ID NO: 1427766
aucguggagaucuguaaga

SEQ ID NO: 1427768 - RNA, 19 nt, Artificial Sequence
  Description of Artificial Sequence: Synthetic oligonucleotide
  Sense strand starting at position 2184 of SEQ ID NO: 1243601
ccgaguucucuccaaagaa

SEQ ID NO: 1427769 - RNA, 19 nt, Artificial Sequence
  Description of Artificial Sequence: Synthetic oligonucleotide
  Antisense strand to SEQ ID NO: 1427768
uucuuuggagagaacucgg

SEQ ID NO: 1427770 - RNA, 19 nt, Artificial Sequence
  Description of Artificial Sequence: Synthetic oligonucleotide
  Sense strand starting at position 2428 of SEQ ID NO: 1243601
ccuuauuagucaguaaaca

SEQ ID NO: 1427771 - RNA, 19 nt, Artificial Sequence
  Description of Artificial Sequence: Synthetic oligonucleotide
  Antisense strand to SEQ ID NO: 1427770
uguuuacugacuaauaagg

SEQ ID NO: 1427772 - RNA, 19 nt, Artificial Sequence
  Description of Artificial Sequence: Synthetic oligonucleotide
  Sense strand starting at position 2429 of SEQ ID NO: 1243601
cuuauuagucaguaaacac

SEQ ID NO: 1427773 - RNA, 19 nt, Artificial Sequence
  Description of Artificial Sequence: Synthetic oligonucleotide
  Antisense strand to SEQ ID NO: 1427772
guguuuacugacuaauaag

SEQ ID NO: 1427774 - RNA, 19 nt, Artificial Sequence
  Description of Artificial Sequence: Synthetic oligonucleotide
  Sense strand starting at position 2439 of SEQ ID NO: 1243601
aguaaacacucacucagua

SEQ ID NO: 1427775 - RNA, 19 nt, Artificial Sequence
  Description of Artificial Sequence: Synthetic oligonucleotide
  Antisense strand to SEQ ID NO: 1427774
uacugagugaguguuuacu

SEQ ID NO: 1427776 - RNA, 19 nt, Artificial Sequence
  Description of Artificial Sequence: Synthetic oligonucleotide
  Sense strand starting at position 2501 of SEQ ID NO: 1243601
gaaauauaagguuggugau

SEQ ID NO: 1427777 - RNA, 19 nt, Artificial Sequence
  Description of Artificial Sequence: Synthetic oligonucleotide
  Antisense strand to SEQ ID NO: 1427776
aucaccaaccuuauauuuc

SEQ ID NO: 1427778 - RNA, 19 nt, Artificial Sequence
  Description of Artificial Sequence: Synthetic oligonucleotide
  Sense strand starting at position 2627 of SEQ ID NO: 1243601
ugaacuguacacuguaaau

SEQ ID NO: 1427779 - RNA, 19 nt, Artificial Sequence
  Description of Artificial Sequence: Synthetic oligonucleotide
  Antisense strand to SEQ ID NO: 1427778
auuuacaguguacaguuca

SEQ ID NO: 1427780 - RNA, 19 nt, Artificial Sequence
  Description of Artificial Sequence: Synthetic oligonucleotide
  Sense strand starting at position 2832 of SEQ ID NO: 1243601
uguuuacaagagcauguau

SEQ ID NO: 1427781 - RNA, 19 nt, Artificial Sequence
  Description of Artificial Sequence: Synthetic oligonucleotide
  Antisense strand to SEQ ID NO: 1427780
auacaugcucuuguaaaca

SEQ ID NO: 1427782 - RNA, 19 nt, Artificial Sequence
  Description of Artificial Sequence: Synthetic oligonucleotide
  Sense strand starting at position 2895 of SEQ ID NO: 1243601
acaugauugugacuacuca

SEQ ID NO: 1427783 - RNA, 19 nt, Artificial Sequence
  Description of Artificial Sequence: Synthetic oligonucleotide
  Antisense strand to SEQ ID NO: 1427782
ugaguagucacaaucaugu

SEQ ID NO: 1427784 - RNA, 19 nt, Artificial Sequence
  Description of Artificial Sequence: Synthetic oligonucleotide
  Sense strand starting at position 3277 of SEQ ID NO: 1243601
guacuuuguaccgagaaag

SEQ ID NO: 1427785 - RNA, 19 nt, Artificial Sequence
  Description of Artificial Sequence: Synthetic oligonucleotide
  Antisense strand to SEQ ID NO: 1427784
cuuucucgguacaaaguac

SEQ ID NO: 1427786 - RNA, 19 nt, Artificial Sequence
  Description of Artificial Sequence: Synthetic oligonucleotide
  Sense strand starting at position 3330 of SEQ ID NO: 1243601
acagaugucuuauuacaca

SEQ ID NO: 1427787 - RNA, 19 nt, Artificial Sequence
  Description of Artificial Sequence: Synthetic oligonucleotide
  Antisense strand to SEQ ID NO: 1427786
uguguaauaagacaucugu

SEQ ID NO: 1427788 - RNA, 19 nt, Artificial Sequence
  Description of Artificial Sequence: Synthetic oligonucleotide
  Sense strand starting at position 3577 of SEQ ID NO: 1243601
caauacauggguuguacaa

SEQ ID NO: 1427789 - RNA, 19 nt, Artificial Sequence
  Description of Artificial Sequence: Synthetic oligonucleotide
  Antisense strand to SEQ ID NO: 1427788
uuguacaacccauguauug

SEQ ID NO: 1427790 - RNA, 19 nt, Artificial Sequence
  Description of Artificial Sequence: Synthetic oligonucleotide
  Sense strand starting at position 3584 of SEQ ID NO: 1243601
uggguuguacaaggaagua

SEQ ID NO: 1427791 - RNA, 19 nt, Artificial Sequence
  Description of Artificial Sequence: Synthetic oligonucleotide
  Antisense strand to SEQ ID NO: 1427790
uacuuccuuguacaaccca

SEQ ID NO: 1427792 - RNA, 19 nt, Artificial Sequence
  Description of Artificial Sequence: Synthetic oligonucleotide
  Sense strand starting at position 3644 of SEQ ID NO: 1243601
augaaauucugguucuuau

SEQ ID NO: 1427793 - RNA, 19 nt, Artificial Sequence
  Description of Artificial Sequence: Synthetic oligonucleotide
  Antisense strand to SEQ ID NO: 1427792
auaagaaccagaauuucau

SEQ ID NO: 1427794 - RNA, 19 nt, Artificial Sequence
  Description of Artificial Sequence: Synthetic oligonucleotide
  Sense strand starting at position 3737 of SEQ ID NO: 1243601
uuccaaagucaaugaggua

SEQ ID NO: 1427795 - RNA, 19 nt, Artificial Sequence
  Description of Artificial Sequence: Synthetic oligonucleotide
  Antisense strand to SEQ ID NO: 1427794
uaccucauugacuuuggaa

SEQ ID NO: 1427796 - RNA, 19 nt, Artificial Sequence
  Description of Artificial Sequence: Synthetic oligonucleotide
  Sense strand starting at position 3907 of SEQ ID NO: 1243601
auguuccaagagugaugaa

SEQ ID NO: 1427797 - RNA, 19 nt, Artificial Sequence
  Description of Artificial Sequence: Synthetic oligonucleotide
  Antisense strand to SEQ ID NO: 1427796
uucaucacucuuggaacau

SEQ ID NO: 1427798 - RNA, 19 nt, Artificial Sequence
  Description of Artificial Sequence: Synthetic oligonucleotide
  Sense strand starting at position 3929 of SEQ ID NO: 1243601
aaagguauggcuuaauucu

SEQ ID NO: 1427799 - RNA, 19 nt, Artificial Sequence
  Description of Artificial Sequence: Synthetic oligonucleotide
  Antisense strand to SEQ ID NO: 1427798
agaauuaagccauaccuuu

SEQ ID NO: 1427800 - RNA, 19 nt, Artificial Sequence
  Description of Artificial Sequence: Synthetic oligonucleotide
  Sense strand starting at position 275 of SEQ ID NO: 1243602
auguaugcuguggguacaa

SEQ ID NO: 1427801 - RNA, 19 nt, Artificial Sequence
  Description of Artificial Sequence: Synthetic oligonucleotide
  Antisense strand to SEQ ID NO: 1427800
uuguacccacagcauacau

SEQ ID NO: 1427802 - RNA, 19 nt, Artificial Sequence
  Description of Artificial Sequence: Synthetic oligonucleotide
  Sense strand starting at position 277 of SEQ ID NO: 1243602
guaugcuguggguacaaau

SEQ ID NO: 1427803 - RNA, 19 nt, Artificial Sequence
  Description of Artificial Sequence: Synthetic oligonucleotide
  Antisense strand to SEQ ID NO: 1427802
auuuguacccacagcauac

SEQ ID NO: 1427804 - RNA, 19 nt, Artificial Sequence
  Description of Artificial Sequence: Synthetic oligonucleotide
  Sense strand starting at position 286 of SEQ ID NO: 1243602
ggguacaaaucugugucau

SEQ ID NO: 1427805 - RNA, 19 nt, Artificial Sequence
  Description of Artificial Sequence: Synthetic oligonucleotide
  Antisense strand to SEQ ID NO: 1427804
augacacagauuuguaccc

SEQ ID NO: 1427806 - RNA, 19 nt, Artificial Sequence
  Description of Artificial Sequence: Synthetic oligonucleotide
  Sense strand starting at position 287 of SEQ ID NO: 1243602
gguacaaaucugugucaua

SEQ ID NO: 1427807 - RNA, 19 nt, Artificial Sequence
  Description of Artificial Sequence: Synthetic oligonucleotide
  Antisense strand to SEQ ID NO: 1427806
uaugacacagauuuguacc

SEQ ID NO: 1427808 - RNA, 19 nt, Artificial Sequence
  Description of Artificial Sequence: Synthetic oligonucleotide
  Sense strand starting at position 288 of SEQ ID NO: 1243602
guacaaaucugugucauaa

SEQ ID NO: 1427809 - RNA, 19 nt, Artificial Sequence
  Description of Artificial Sequence: Synthetic oligonucleotide
  Antisense strand to SEQ ID NO: 1427808
uuaugacacagauuuguac

SEQ ID NO: 1427810 - RNA, 19 nt, Artificial Sequence
  Description of Artificial Sequence: Synthetic oligonucleotide
  Sense strand starting at position 374 of SEQ ID NO: 1243602
gaaucaaaguuauugugga

SEQ ID NO: 1427811 - RNA, 19 nt, Artificial Sequence
  Description of Artificial Sequence: Synthetic oligonucleotide
  Antisense strand to SEQ ID NO: 1427810
uccacaauaacuuugauuc

SEQ ID NO: 1427812 - RNA, 19 nt, Artificial Sequence
  Description of Artificial Sequence: Synthetic oligonucleotide
  Sense strand starting at position 379 of SEQ ID NO: 1243602
aaaguuauuguggaauguu

SEQ ID NO: 1427813 - RNA, 19 nt, Artificial Sequence
  Description of Artificial Sequence: Synthetic oligonucleotide
  Antisense strand to SEQ ID NO: 1427812
aacauuccacaauaacuuu

SEQ ID NO: 1427814 - RNA, 19 nt, Artificial Sequence
  Description of Artificial Sequence: Synthetic oligonucleotide
  Sense strand starting at position 387 of SEQ ID NO: 1243602
uguggaauguuaguucaug

SEQ ID NO: 1427815 - RNA, 19 nt, Artificial Sequence
  Description of Artificial Sequence: Synthetic oligonucleotide
  Antisense strand to SEQ ID NO: 1427814
caugaacuaacauuccaca

SEQ ID NO: 1427816 - RNA, 19 nt, Artificial Sequence
  Description of Artificial Sequence: Synthetic oligonucleotide
  Sense strand starting at position 388 of SEQ ID NO: 1243602
guggaauguuaguucauga

SEQ ID NO: 1427817 - RNA, 19 nt, Artificial Sequence
  Description of Artificial Sequence: Synthetic oligonucleotide
  Antisense strand to SEQ ID NO: 1427816
ucaugaacuaacauuccac

SEQ ID NO: 1427818 - RNA, 19 nt, Artificial Sequence
  Description of Artificial Sequence: Synthetic oligonucleotide
  Sense strand starting at position 764 of SEQ ID NO: 1243602
cccuaauugcaguggacau

SEQ ID NO: 1427819 - RNA, 19 nt, Artificial Sequence
  Description of Artificial Sequence: Synthetic oligonucleotide
  Antisense strand to SEQ ID NO: 1427818
auguccacugcaauuaggg

SEQ ID NO: 1427820 - RNA, 19 nt, Artificial Sequence
  Description of Artificial Sequence: Synthetic oligonucleotide
  Sense strand starting at position 837 of SEQ ID NO: 1243602
cgcaguaaacugcauguaa

SEQ ID NO: 1427821 - RNA, 19 nt, Artificial Sequence
  Description of Artificial Sequence: Synthetic oligonucleotide
  Antisense strand to SEQ ID NO: 1427820
uuacaugcaguuuacugcg

SEQ ID NO: 1427822 - RNA, 19 nt, Artificial Sequence
  Description of Artificial Sequence: Synthetic oligonucleotide
  Sense strand starting at position 915 of SEQ ID NO: 1243602
caagcugucucucuuagga

SEQ ID NO: 1427823 - RNA, 19 nt, Artificial Sequence
  Description of Artificial Sequence: Synthetic oligonucleotide
  Antisense strand to SEQ ID NO: 1427822
uccuaagagagacagcuug

SEQ ID NO: 1427824 - RNA, 19 nt, Artificial Sequence
  Description of Artificial Sequence: Synthetic oligonucleotide
  Sense strand starting at position 956 of SEQ ID NO: 1243602
agcaaucugucagcucuga

SEQ ID NO: 1427825 - RNA, 19 nt, Artificial Sequence
  Description of Artificial Sequence: Synthetic oligonucleotide
  Antisense strand to SEQ ID NO: 1427824
ucagagcugacagauugcu

SEQ ID NO: 1427826 - RNA, 19 nt, Artificial Sequence
  Description of Artificial Sequence: Synthetic oligonucleotide
  Sense strand starting at position 978 of SEQ ID NO: 1243602
guaaacaaggcaugugaaa

SEQ ID NO: 1427827 - RNA, 19 nt, Artificial Sequence
  Description of Artificial Sequence: Synthetic oligonucleotide
  Antisense strand to SEQ ID NO: 1427826
uuucacaugccuuguuuac

SEQ ID NO: 1427828 - RNA, 19 nt, Artificial Sequence
  Description of Artificial Sequence: Synthetic oligonucleotide
  Sense strand starting at position 985 of SEQ ID NO: 1243602
aggcaugugaaauagggua

SEQ ID NO: 1427829 - RNA, 19 nt, Artificial Sequence
  Description of Artificial Sequence: Synthetic oligonucleotide
  Antisense strand to SEQ ID NO: 1427828
uacccuauuucacaugccu

SEQ ID NO: 1427830 - RNA, 19 nt, Artificial Sequence
  Description of Artificial Sequence: Synthetic oligonucleotide
  Sense strand starting at position 987 of SEQ ID NO: 1243602
gcaugugaaauaggguaga

SEQ ID NO: 1427831 - RNA, 19 nt, Artificial Sequence
  Description of Artificial Sequence: Synthetic oligonucleotide
  Antisense strand to SEQ ID NO: 1427830
ucuacccuauuucacaugc

SEQ ID NO: 1427832 - RNA, 19 nt, Artificial Sequence
  Description of Artificial Sequence: Synthetic oligonucleotide
  Sense strand starting at position 1024 of SEQ ID NO: 1243602
ccauaucaacagugguacu

SEQ ID NO: 1427833 - RNA, 19 nt, Artificial Sequence
  Description of Artificial Sequence: Synthetic oligonucleotide
  Antisense strand to SEQ ID NO: 1427832
aguaccacuguugauaugg

SEQ ID NO: 1427834 - RNA, 19 nt, Artificial Sequence
  Description of Artificial Sequence: Synthetic oligonucleotide
  Sense strand starting at position 1088 of SEQ ID NO: 1243602
gaagaagccuuagcuuuga

SEQ ID NO: 1427835 - RNA, 19 nt, Artificial Sequence
  Description of Artificial Sequence: Synthetic oligonucleotide
  Antisense strand to SEQ ID NO: 1427834
ucaaagcuaaggcuucuuc

SEQ ID NO: 1427836 - RNA, 19 nt, Artificial Sequence
  Description of Artificial Sequence: Synthetic oligonucleotide
  Sense strand starting at position 1126 of SEQ ID NO: 1243602
aagucuuaaugcucaggga

SEQ ID NO: 1427837 - RNA, 19 nt, Artificial Sequence
  Description of Artificial Sequence: Synthetic oligonucleotide
  Antisense strand to SEQ ID NO: 1427836
ucccugagcauuaagacuu

SEQ ID NO: 1427838 - RNA, 19 nt, Artificial Sequence
  Description of Artificial Sequence: Synthetic oligonucleotide
  Sense strand starting at position 1130 of SEQ ID NO: 1243602
cuuaaugcucagggagaau

SEQ ID NO: 1427839 - RNA, 19 nt, Artificial Sequence
  Description of Artificial Sequence: Synthetic oligonucleotide
  Antisense strand to SEQ ID NO: 1427838
auucucccugagcauuaag

SEQ ID NO: 1427840 - RNA, 19 nt, Artificial Sequence
  Description of Artificial Sequence: Synthetic oligonucleotide
  Sense strand starting at position 1293 of SEQ ID NO: 1243602
auggaacuaucguuguaag

SEQ ID NO: 1427841 - RNA, 19 nt, Artificial Sequence
  Description of Artificial Sequence: Synthetic oligonucleotide
  Antisense strand to SEQ ID NO: 1427840
cuuacaacgauaguuccau

SEQ ID NO: 1427842 - RNA, 19 nt, Artificial Sequence
  Description of Artificial Sequence: Synthetic oligonucleotide
  Sense strand starting at position 1294 of SEQ ID NO: 1243602
uggaacuaucguuguaaga

SEQ ID NO: 1427843 - RNA, 19 nt, Artificial Sequence
  Description of Artificial Sequence: Synthetic oligonucleotide
  Antisense strand to SEQ ID NO: 1427842
ucuuacaacgauaguucca

SEQ ID NO: 1427844 - RNA, 19 nt, Artificial Sequence
  Description of Artificial Sequence: Synthetic oligonucleotide
  Sense strand starting at position 1353 of SEQ ID NO: 1243602
accauugggcccuggauau

SEQ ID NO: 1427845 - RNA, 19 nt, Artificial Sequence
  Description of Artificial Sequence: Synthetic oligonucleotide
  Antisense strand to SEQ ID NO: 1427844
auauccagggcccaauggu

SEQ ID NO: 1427846 - RNA, 19 nt, Artificial Sequence
  Description of Artificial Sequence: Synthetic oligonucleotide
  Sense strand starting at position 1392 of SEQ ID NO: 1243602
uguguaacacaauggagaa

SEQ ID NO: 1427847 - RNA, 19 nt, Artificial Sequence
  Description of Artificial Sequence: Synthetic oligonucleotide
  Antisense strand to SEQ ID NO: 1427846
uucuccauuguguuacaca

SEQ ID NO: 1427848 - RNA, 19 nt, Artificial Sequence
  Description of Artificial Sequence: Synthetic oligonucleotide
  Sense strand starting at position 1422 of SEQ ID NO: 1243602
gcucucuggcuggaggaua

SEQ ID NO: 1427849 - RNA, 19 nt, Artificial Sequence
  Description of Artificial Sequence: Synthetic oligonucleotide
  Antisense strand to SEQ ID NO: 1427848
uauccuccagccagagagc

SEQ ID NO: 1427850 - RNA, 19 nt, Artificial Sequence
  Description of Artificial Sequence: Synthetic oligonucleotide
  Sense strand starting at position 1567 of SEQ ID NO: 1243602
auccuauuagugugacaaa

SEQ ID NO: 1427851 - RNA, 19 nt, Artificial Sequence
  Description of Artificial Sequence: Synthetic oligonucleotide
  Antisense strand to SEQ ID NO: 1427850
uuugucacacuaauaggau

SEQ ID NO: 1427852 - RNA, 19 nt, Artificial Sequence
  Description of Artificial Sequence: Synthetic oligonucleotide
  Sense strand starting at position 1578 of SEQ ID NO: 1243602
gugacaaaggcuugagaaa

SEQ ID NO: 1427853 - RNA, 19 nt, Artificial Sequence
  Description of Artificial Sequence: Synthetic oligonucleotide
  Antisense strand to SEQ ID NO: 1427852
uuucucaagccuuugucac

SEQ ID NO: 1427854 - RNA, 19 nt, Artificial Sequence
  Description of Artificial Sequence: Synthetic oligonucleotide
  Sense strand starting at position 1618 of SEQ ID NO: 1243602
uguccaaauccagacuguu

SEQ ID NO: 1427855 - RNA, 19 nt, Artificial Sequence
  Description of Artificial Sequence: Synthetic oligonucleotide
  Antisense strand to SEQ ID NO: 1427854
aacagucuggauuuggaca

SEQ ID NO: 1427856 - RNA, 19 nt, Artificial Sequence
  Description of Artificial Sequence: Synthetic oligonucleotide
  Sense strand starting at position 1844 of SEQ ID NO: 1243602
gcaaaugaagcauguagaa

SEQ ID NO: 1427857 - RNA, 19 nt, Artificial Sequence
  Description of Artificial Sequence: Synthetic oligonucleotide
  Antisense strand to SEQ ID NO: 1427856
uucuacaugcuucauuugc

SEQ ID NO: 1427858 - RNA, 19 nt, Artificial Sequence
  Description of Artificial Sequence: Synthetic oligonucleotide
  Sense strand starting at position 2392 of SEQ ID NO: 1243602
auggaaacuuuagaacaga

SEQ ID NO: 1427859 - RNA, 19 nt, Artificial Sequence
  Description of Artificial Sequence: Synthetic oligonucleotide
  Antisense strand to SEQ ID NO: 1427858
ucuguucuaaaguuuccau

SEQ ID NO: 1427860 - RNA, 19 nt, Artificial Sequence
  Description of Artificial Sequence: Synthetic oligonucleotide
  Sense strand starting at position 3089 of SEQ ID NO: 1243602
uuauaauuagacugcugaa

SEQ ID NO: 1427861 - RNA, 19 nt, Artificial Sequence
  Description of Artificial Sequence: Synthetic oligonucleotide
  Antisense strand to SEQ ID NO: 1427860
uucagcagucuaauuauaa

SEQ ID NO: 1427862 - RNA, 19 nt, Artificial Sequence
  Description of Artificial Sequence: Synthetic oligonucleotide
  Sense strand starting at position 3137 of SEQ ID NO: 1243602
gucagagaacaaugaugua

SEQ ID NO: 1427863 - RNA, 19 nt, Artificial Sequence
  Description of Artificial Sequence: Synthetic oligonucleotide
  Antisense strand to SEQ ID NO: 1427862
uacaucauuguucucugac

SEQ ID NO: 1427864 - RNA, 19 nt, Artificial Sequence
  Description of Artificial Sequence: Synthetic oligonucleotide
  Sense strand starting at position 3173 of SEQ ID NO: 1243602
caauuugaaugagagcaga

SEQ ID NO: 1427865 - RNA, 19 nt, Artificial Sequence
  Description of Artificial Sequence: Synthetic oligonucleotide
  Antisense strand to SEQ ID NO: 1427864
ucugcucucauucaaauug

SEQ ID NO: 1427866 - RNA, 19 nt, Artificial Sequence
  Description of Artificial Sequence: Synthetic oligonucleotide
  Sense strand starting at position 3184 of SEQ ID NO: 1243602
agagcagacuucucauaag

SEQ ID NO: 1427867 - RNA, 19 nt, Artificial Sequence
  Description of Artificial Sequence: Synthetic oligonucleotide
  Antisense strand to SEQ ID NO: 1427866
cuuaugagaagucugcucu

SEQ ID NO: 1427868 - RNA, 19 nt, Artificial Sequence
  Description of Artificial Sequence: Synthetic oligonucleotide
  Sense strand starting at position 3331 of SEQ ID NO: 1243602
gacucaauugaguacaugu

SEQ ID NO: 1427869 - RNA, 19 nt, Artificial Sequence
  Description of Artificial Sequence: Synthetic oligonucleotide
  Antisense strand to SEQ ID NO: 1427868
acauguacucaauugaguc

SEQ ID NO: 1427870 - RNA, 19 nt, Artificial Sequence
  Description of Artificial Sequence: Synthetic oligonucleotide
  Sense strand starting at position 3671 of SEQ ID NO: 1243602
gaggcagaauugcuuaaau

SEQ ID NO: 1427871 - RNA, 19 nt, Artificial Sequence
  Description of Artificial Sequence: Synthetic oligonucleotide
  Antisense strand to SEQ ID NO: 1427870
auuuaagcaauucugccuc

SEQ ID NO: 1427872 - RNA, 19 nt, Artificial Sequence
  Description of Artificial Sequence: Synthetic oligonucleotide
  Sense strand starting at position 3673 of SEQ ID NO: 1243602
ggcagaauugcuuaaaucu

SEQ ID NO: 1427873 - RNA, 19 nt, Artificial Sequence
  Description of Artificial Sequence: Synthetic oligonucleotide
  Antisense strand to SEQ ID NO: 1427872
agauuuaagcaauucugcc

SEQ ID NO: 1427874 - RNA, 19 nt, Artificial Sequence
  Description of Artificial Sequence: Synthetic oligonucleotide
  Sense strand starting at position 3795 of SEQ ID NO: 1243602
gaaguacugcuauaugcua

SEQ ID NO: 1427875 - RNA, 19 nt, Artificial Sequence
  Description of Artificial Sequence: Synthetic oligonucleotide
  Antisense strand to SEQ ID NO: 1427874
uagcauauagcaguacuuc

SEQ ID NO: 1427876 - RNA, 19 nt, Artificial Sequence
  Description of Artificial Sequence: Synthetic oligonucleotide
  Sense strand starting at position 3931 of SEQ ID NO: 1243602
ccaacuggugauugucaga

SEQ ID NO: 1427877 - RNA, 19 nt, Artificial Sequence
  Description of Artificial Sequence: Synthetic oligonucleotide
  Antisense strand to SEQ ID NO: 1427876
ucugacaaucaccaguugg

SEQ ID NO: 1427878 - RNA, 19 nt, Artificial Sequence
  Description of Artificial Sequence: Synthetic oligonucleotide
  Sense strand starting at position 3960 of SEQ ID NO: 1243602
aguaaagaaugaggagaaa

SEQ ID NO: 1427879 - RNA, 19 nt, Artificial Sequence
  Description of Artificial Sequence: Synthetic oligonucleotide
  Antisense strand to SEQ ID NO: 1427878
uuucuccucauucuuuacu

SEQ ID NO: 1427880 - RNA, 19 nt, Artificial Sequence
  Description of Artificial Sequence: Synthetic oligonucleotide
  Sense strand starting at position 141 of SEQ ID NO: 1243603
gcuaguugucaauauaauu

SEQ ID NO: 1427881 - RNA, 19 nt, Artificial Sequence
  Description of Artificial Sequence: Synthetic oligonucleotide
  Antisense strand to SEQ ID NO: 1427880
aauuauauugacaacuagc

SEQ ID NO: 1427882 - RNA, 19 nt, Artificial Sequence
  Description of Artificial Sequence: Synthetic oligonucleotide
  Sense strand starting at position 319 of SEQ ID NO: 1243603
aguuaugacuuaguacaau

SEQ ID NO: 1427883 - RNA, 19 nt, Artificial Sequence
  Description of Artificial Sequence: Synthetic oligonucleotide
  Antisense strand to SEQ ID NO: 1427882
auuguacuaagucauaacu

SEQ ID NO: 1427884 - RNA, 19 nt, Artificial Sequence
  Description of Artificial Sequence: Synthetic oligonucleotide
  Sense strand starting at position 409 of SEQ ID NO: 1243603
ucgguacucuuggcacaua

SEQ ID NO: 1427885 - RNA, 19 nt, Artificial Sequence
  Description of Artificial Sequence: Synthetic oligonucleotide
  Antisense strand to SEQ ID NO: 1427884
uaugugccaagaguaccga

SEQ ID NO: 1427886 - RNA, 19 nt, Artificial Sequence
  Description of Artificial Sequence: Synthetic oligonucleotide
  Sense strand starting at position 412 of SEQ ID NO: 1243603
guacucuuggcacauagua

SEQ ID NO: 1427887 - RNA, 19 nt, Artificial Sequence
  Description of Artificial Sequence: Synthetic oligonucleotide
  Antisense strand to SEQ ID NO: 1427886
uacuaugugccaagaguac

SEQ ID NO: 1427888 - RNA, 19 nt, Artificial Sequence
  Description of Artificial Sequence: Synthetic oligonucleotide
  Sense strand starting at position 425 of SEQ ID NO: 1243603
auaguaugguaucuggaau

SEQ ID NO: 1427889 - RNA, 19 nt, Artificial Sequence
  Description of Artificial Sequence: Synthetic oligonucleotide
  Antisense strand to SEQ ID NO: 1427888
auuccagauaccauacuau

SEQ ID NO: 1427890 - RNA, 19 nt, Artificial Sequence
  Description of Artificial Sequence: Synthetic oligonucleotide
  Sense strand starting at position 426 of SEQ ID NO: 1243603
uaguaugguaucuggaaug

SEQ ID NO: 1427891 - RNA, 19 nt, Artificial Sequence
  Description of Artificial Sequence: Synthetic oligonucleotide
  Antisense strand to SEQ ID NO: 1427890
cauuccagauaccauacua

SEQ ID NO: 1427892 - RNA, 19 nt, Artificial Sequence
  Description of Artificial Sequence: Synthetic oligonucleotide
  Sense strand starting at position 687 of SEQ ID NO: 1243603
ucuuauagugaauguaaga

SEQ ID NO: 1427893 - RNA, 19 nt, Artificial Sequence
  Description of Artificial Sequence: Synthetic oligonucleotide
  Antisense strand to SEQ ID NO: 1427892
ucuuacauucacuauaaga

SEQ ID NO: 1427894 - RNA, 19 nt, Artificial Sequence
  Description of Artificial Sequence: Synthetic oligonucleotide
  Sense strand starting at position 715 of SEQ ID NO: 1243603
acuaaaucuguuugaaagg

SEQ ID NO: 1427895 - RNA, 19 nt, Artificial Sequence
  Description of Artificial Sequence: Synthetic oligonucleotide
  Antisense strand to SEQ ID NO: 1427894
ccuuucaaacagauuuagu

SEQ ID NO: 1427896 - RNA, 19 nt, Artificial Sequence
  Description of Artificial Sequence: Synthetic oligonucleotide
  Sense strand starting at position 716 of SEQ ID NO: 1243603
cuaaaucuguuugaaagga

SEQ ID NO: 1427897 - RNA, 19 nt, Artificial Sequence
  Description of Artificial Sequence: Synthetic oligonucleotide
  Antisense strand to SEQ ID NO: 1427896
uccuuucaaacagauuuag

SEQ ID NO: 1427898 - RNA, 19 nt, Artificial Sequence
  Description of Artificial Sequence: Synthetic oligonucleotide
  Sense strand starting at position 767 of SEQ ID NO: 1243603
acgccucuuuaguuugauu

SEQ ID NO: 1427899 - RNA, 19 nt, Artificial Sequence
  Description of Artificial Sequence: Synthetic oligonucleotide
  Antisense strand to SEQ ID NO: 1427898
aaucaaacuaaagaggcgu

SEQ ID NO: 1427900 - RNA, 19 nt, Artificial Sequence
  Description of Artificial Sequence: Synthetic oligonucleotide
  Sense strand starting at position 959 of SEQ ID NO: 1243603
cugagaccuuaauaaguua

SEQ ID NO: 1427901 - RNA, 19 nt, Artificial Sequence
  Description of Artificial Sequence: Synthetic oligonucleotide
  Antisense strand to SEQ ID NO: 1427900
uaacuuauuaaggucucag

SEQ ID NO: 1427902 - RNA, 19 nt, Artificial Sequence
  Description of Artificial Sequence: Synthetic oligonucleotide
  Sense strand starting at position 1080 of SEQ ID NO: 1243603
ggcuuaaagcuguagucca

SEQ ID NO: 1427903 - RNA, 19 nt, Artificial Sequence
  Description of Artificial Sequence: Synthetic oligonucleotide
  Antisense strand to SEQ ID NO: 1427902
uggacuacagcuuuaagcc

SEQ ID NO: 1427904 - RNA, 19 nt, Artificial Sequence
  Description of Artificial Sequence: Synthetic oligonucleotide
  Sense strand starting at position 1085 of SEQ ID NO: 1243603
aaagcuguaguccagcaaa

SEQ ID NO: 1427905 - RNA, 19 nt, Artificial Sequence
  Description of Artificial Sequence: Synthetic oligonucleotide
  Antisense strand to SEQ ID NO: 1427904
uuugcuggacuacagcuuu

SEQ ID NO: 1427906 - RNA, 19 nt, Artificial Sequence
  Description of Artificial Sequence: Synthetic oligonucleotide
  Sense strand starting at position 1088 of SEQ ID NO: 1243603
gcuguaguccagcaaauac

SEQ ID NO: 1427907 - RNA, 19 nt, Artificial Sequence
  Description of Artificial Sequence: Synthetic oligonucleotide
  Antisense strand to SEQ ID NO: 1427906
guauuugcuggacuacagc

SEQ ID NO: 1427908 - RNA, 19 nt, Artificial Sequence
  Description of Artificial Sequence: Synthetic oligonucleotide
  Sense strand starting at position 1127 of SEQ ID NO: 1243603
ucagaacgcccuuguagaa

SEQ ID NO: 1427909 - RNA, 19 nt, Artificial Sequence
  Description of Artificial Sequence: Synthetic oligonucleotide
  Antisense strand to SEQ ID NO: 1427908
uucuacaagggcguucuga

SEQ ID NO: 1427910 - RNA, 19 nt, Artificial Sequence
  Description of Artificial Sequence: Synthetic oligonucleotide
  Sense strand starting at position 1143 of SEQ ID NO: 1243603
gaaaguaaacgugguuauu

SEQ ID NO: 1427911 - RNA, 19 nt, Artificial Sequence
  Description of Artificial Sequence: Synthetic oligonucleotide
  Antisense strand to SEQ ID NO: 1427910
aauaaccacguuuacuuuc

SEQ ID NO: 1427912 - RNA, 19 nt, Artificial Sequence
  Description of Artificial Sequence: Synthetic oligonucleotide
  Sense strand starting at position 1145 of SEQ ID NO: 1243603
aaguaaacgugguuauuau

SEQ ID NO: 1427913 - RNA, 19 nt, Artificial Sequence
  Description of Artificial Sequence: Synthetic oligonucleotide
  Antisense strand to SEQ ID NO: 1427912
auaauaaccacguuuacuu

SEQ ID NO: 1427914 - RNA, 19 nt, Artificial Sequence
  Description of Artificial Sequence: Synthetic oligonucleotide
  Sense strand starting at position 1146 of SEQ ID NO: 1243603
aguaaacgugguuauuauc

SEQ ID NO: 1427915 - RNA, 19 nt, Artificial Sequence
  Description of Artificial Sequence: Synthetic oligonucleotide
  Antisense strand to SEQ ID NO: 1427914
gauaauaaccacguuuacu

SEQ ID NO: 1427916 - RNA, 19 nt, Artificial Sequence
  Description of Artificial Sequence: Synthetic oligonucleotide
  Sense strand starting at position 1329 of SEQ ID NO: 1243603
cucccaaacugugucauga

SEQ ID NO: 1427917 - RNA, 19 nt, Artificial Sequence
  Description of Artificial Sequence: Synthetic oligonucleotide
  Antisense strand to SEQ ID NO: 1427916
ucaugacacaguuugggag

SEQ ID NO: 1427918 - RNA, 19 nt, Artificial Sequence
  Description of Artificial Sequence: Synthetic oligonucleotide
  Sense strand starting at position 1342 of SEQ ID NO: 1243603
ucaugagaucugcgcauuu

SEQ ID NO: 1427919 - RNA, 19 nt, Artificial Sequence
  Description of Artificial Sequence: Synthetic oligonucleotide
  Antisense strand to SEQ ID NO: 1427918
aaaugcgcagaucucauga

SEQ ID NO: 1427920 - RNA, 19 nt, Artificial Sequence
  Description of Artificial Sequence: Synthetic oligonucleotide
  Sense strand starting at position 1442 of SEQ ID NO: 1243603
agcuguucagacggaaauu

SEQ ID NO: 1427921 - RNA, 19 nt, Artificial Sequence
  Description of Artificial Sequence: Synthetic oligonucleotide
  Antisense strand to SEQ ID NO: 1427920
aauuuccgucugaacagcu

SEQ ID NO: 1427922 - RNA, 19 nt, Artificial Sequence
  Description of Artificial Sequence: Synthetic oligonucleotide
  Sense strand starting at position 1478 of SEQ ID NO: 1243603
uccuucuuucccugagguu

SEQ ID NO: 1427923 - RNA, 19 nt, Artificial Sequence
  Description of Artificial Sequence: Synthetic oligonucleotide
  Antisense strand to SEQ ID NO: 1427922
aaccucagggaaagaagga

SEQ ID NO: 1427924 - RNA, 19 nt, Artificial Sequence
  Description of Artificial Sequence: Synthetic oligonucleotide
  Sense strand starting at position 2603 of SEQ ID NO: 1243603
gaguguccucaucaaagac

SEQ ID NO: 1427925 - RNA, 19 nt, Artificial Sequence
  Description of Artificial Sequence: Synthetic oligonucleotide
  Antisense strand to SEQ ID NO: 1427924
gucuuugaugaggacacuc

SEQ ID NO: 1427926 - RNA, 19 nt, Artificial Sequence
  Description of Artificial Sequence: Synthetic oligonucleotide
  Sense strand starting at position 2847 of SEQ ID NO: 1243603
cugucaauccuguguacau

SEQ ID NO: 1427927 - RNA, 19 nt, Artificial Sequence
  Description of Artificial Sequence: Synthetic oligonucleotide
  Antisense strand to SEQ ID NO: 1427926
auguacacaggauugacag

SEQ ID NO: 1427928 - RNA, 19 nt, Artificial Sequence
  Description of Artificial Sequence: Synthetic oligonucleotide
  Sense strand starting at position 2848 of SEQ ID NO: 1243603
ugucaauccuguguacauc

SEQ ID NO: 1427929 - RNA, 19 nt, Artificial Sequence
  Description of Artificial Sequence: Synthetic oligonucleotide
  Antisense strand to SEQ ID NO: 1427928
gauguacacaggauugaca

SEQ ID NO: 1427930 - RNA, 19 nt, Artificial Sequence
  Description of Artificial Sequence: Synthetic oligonucleotide
  Sense strand starting at position 2849 of SEQ ID NO: 1243603
gucaauccuguguacauca

SEQ ID NO: 1427931 - RNA, 19 nt, Artificial Sequence
  Description of Artificial Sequence: Synthetic oligonucleotide
  Antisense strand to SEQ ID NO: 1427930
ugauguacacaggauugac

SEQ ID NO: 1427932 - RNA, 19 nt, Artificial Sequence
  Description of Artificial Sequence: Synthetic oligonucleotide
  Sense strand starting at position 2879 of SEQ ID NO: 1243603
uuuacuugucuuuguguua

SEQ ID NO: 1427933 - RNA, 19 nt, Artificial Sequence
  Description of Artificial Sequence: Synthetic oligonucleotide
  Antisense strand to SEQ ID NO: 1427932
uaacacaaagacaaguaaa

SEQ ID NO: 1427934 - RNA, 19 nt, Artificial Sequence
  Description of Artificial Sequence: Synthetic oligonucleotide
  Sense strand starting at position 2880 of SEQ ID NO: 1243603
uuacuugucuuuguguuau

SEQ ID NO: 1427935 - RNA, 19 nt, Artificial Sequence
  Description of Artificial Sequence: Synthetic oligonucleotide
  Antisense strand to SEQ ID NO: 1427934
auaacacaaagacaaguaa

SEQ ID NO: 1427936 - RNA, 19 nt, Artificial Sequence
  Description of Artificial Sequence: Synthetic oligonucleotide
  Sense strand starting at position 2894 of SEQ ID NO: 1243603
guuaucugcuucucgaauu

SEQ ID NO: 1427937 - RNA, 19 nt, Artificial Sequence
  Description of Artificial Sequence: Synthetic oligonucleotide
  Antisense strand to SEQ ID NO: 1427936
aauucgagaagcagauaac

SEQ ID NO: 1427938 - RNA, 19 nt, Artificial Sequence
  Description of Artificial Sequence: Synthetic oligonucleotide
  Sense strand starting at position 3018 of SEQ ID NO: 1243603
uucaaagagguucgucaga

SEQ ID NO: 1427939 - RNA, 19 nt, Artificial Sequence
  Description of Artificial Sequence: Synthetic oligonucleotide
  Antisense strand to SEQ ID NO: 1427938
ucugacgaaccucuuugaa

SEQ ID NO: 1427940 - RNA, 19 nt, Artificial Sequence
  Description of Artificial Sequence: Synthetic oligonucleotide
  Sense strand starting at position 3020 of SEQ ID NO: 1243603
caaagagguucgucagaau

SEQ ID NO: 1427941 - RNA, 19 nt, Artificial Sequence
  Description of Artificial Sequence: Synthetic oligonucleotide
  Antisense strand to SEQ ID NO: 1427940
auucugacgaaccucuuug

SEQ ID NO: 1427942 - RNA, 19 nt, Artificial Sequence
  Description of Artificial Sequence: Synthetic oligonucleotide
  Sense strand starting at position 3029 of SEQ ID NO: 1243603
ucgucagaauccuugauga

SEQ ID NO: 1427943 - RNA, 19 nt, Artificial Sequence
  Description of Artificial Sequence: Synthetic oligonucleotide
  Antisense strand to SEQ ID NO: 1427942
ucaucaaggauucugacga

SEQ ID NO: 1427944 - RNA, 19 nt, Artificial Sequence
  Description of Artificial Sequence: Synthetic oligonucleotide
  Sense strand starting at position 3176 of SEQ ID NO: 1243603
cuguuacuacacuguaaua

SEQ ID NO: 1427945 - RNA, 19 nt, Artificial Sequence
  Description of Artificial Sequence: Synthetic oligonucleotide
  Antisense strand to SEQ ID NO: 1427944
uauuacaguguaguaacag

SEQ ID NO: 1427946 - RNA, 19 nt, Artificial Sequence
  Description of Artificial Sequence: Synthetic oligonucleotide
  Sense strand starting at position 3178 of SEQ ID NO: 1243603
guuacuacacuguaauaug

SEQ ID NO: 1427947 - RNA, 19 nt, Artificial Sequence
  Description of Artificial Sequence: Synthetic oligonucleotide
  Antisense strand to SEQ ID NO: 1427946
cauauuacaguguaguaac

SEQ ID NO: 1427948 - RNA, 19 nt, Artificial Sequence
  Description of Artificial Sequence: Synthetic oligonucleotide
  Sense strand starting at position 3532 of SEQ ID NO: 1243603
cacagaucccgguagcagu

SEQ ID NO: 1427949 - RNA, 19 nt, Artificial Sequence
  Description of Artificial Sequence: Synthetic oligonucleotide
  Antisense strand to SEQ ID NO: 1427948
acugcuaccgggaucugug

SEQ ID NO: 1427950 - RNA, 19 nt, Artificial Sequence
  Description of Artificial Sequence: Synthetic oligonucleotide
  Sense strand starting at position 3676 of SEQ ID NO: 1243603
cugauauauucugucucuu

SEQ ID NO: 1427951 - RNA, 19 nt, Artificial Sequence
  Description of Artificial Sequence: Synthetic oligonucleotide
  Antisense strand to SEQ ID NO: 1427950
aagagacagaauauaucag

SEQ ID NO: 1427952 - RNA, 19 nt, Artificial Sequence
  Description of Artificial Sequence: Synthetic oligonucleotide
  Sense strand starting at position 3726 of SEQ ID NO: 1243603
uucucaauggccuaggauu

SEQ ID NO: 1427953 - RNA, 19 nt, Artificial Sequence
  Description of Artificial Sequence: Synthetic oligonucleotide
  Antisense strand to SEQ ID NO: 1427952
aauccuaggccauugagaa

SEQ ID NO: 1427954 - RNA, 19 nt, Artificial Sequence
  Description of Artificial Sequence: Synthetic oligonucleotide
  Sense strand starting at position 3910 of SEQ ID NO: 1243603
cuuguaauguucucuguca

SEQ ID NO: 1427955 - RNA, 19 nt, Artificial Sequence
  Description of Artificial Sequence: Synthetic oligonucleotide
  Antisense strand to SEQ ID NO: 1427954
ugacagagaacauuacaag

SEQ ID NO: 1427956 - RNA, 19 nt, Artificial Sequence
  Description of Artificial Sequence: Synthetic oligonucleotide
  Sense strand starting at position 3911 of SEQ ID NO: 1243603
uuguaauguucucugucau

SEQ ID NO: 1427957 - RNA, 19 nt, Artificial Sequence
  Description of Artificial Sequence: Synthetic oligonucleotide
  Antisense strand to SEQ ID NO: 1427956
augacagagaacauuacaa

SEQ ID NO: 1427958 - RNA, 19 nt, Artificial Sequence
  Description of Artificial Sequence: Synthetic oligonucleotide
  Sense strand starting at position 3912 of SEQ ID NO: 1243603
uguaauguucucugucauu

SEQ ID NO: 1427959 - RNA, 19 nt, Artificial Sequence
  Description of Artificial Sequence: Synthetic oligonucleotide
  Antisense strand to SEQ ID NO: 1427958
aaugacagagaacauuaca

SEQ ID NO: 1427960 - RNA, 19 nt, Artificial Sequence
  Description of Artificial Sequence: Synthetic oligonucleotide
  Sense strand starting at position 282 of SEQ ID NO: 1243604
uugggcuagucaucuguga

SEQ ID NO: 1427961 - RNA, 19 nt, Artificial Sequence
  Description of Artificial Sequence: Synthetic oligonucleotide
  Antisense strand to SEQ ID NO: 1427960
ucacagaugacuagcccaa

SEQ ID NO: 1427962 - RNA, 19 nt, Artificial Sequence
  Description of Artificial Sequence: Synthetic oligonucleotide
  Sense strand starting at position 286 of SEQ ID NO: 1243604
gcuagucaucugugauuag

SEQ ID NO: 1427963 - RNA, 19 nt, Artificial Sequence
  Description of Artificial Sequence: Synthetic oligonucleotide
  Antisense strand to SEQ ID NO: 1427962
cuaaucacagaugacuagc

SEQ ID NO: 1427964 - RNA, 19 nt, Artificial Sequence
  Description of Artificial Sequence: Synthetic oligonucleotide
  Sense strand starting at position 336 of SEQ ID NO: 1243604
gguguuaguugaucauaau

SEQ ID NO: 1427965 - RNA, 19 nt, Artificial Sequence
  Description of Artificial Sequence: Synthetic oligonucleotide
  Antisense strand to SEQ ID NO: 1427964
auuaugaucaacuaacacc

SEQ ID NO: 1427966 - RNA, 19 nt, Artificial Sequence
  Description of Artificial Sequence: Synthetic oligonucleotide
  Sense strand starting at position 337 of SEQ ID NO: 1243604
guguuaguugaucauaauu

SEQ ID NO: 1427967 - RNA, 19 nt, Artificial Sequence
  Description of Artificial Sequence: Synthetic oligonucleotide
  Antisense strand to SEQ ID NO: 1427966
aauuaugaucaacuaacac

SEQ ID NO: 1427968 - RNA, 19 nt, Artificial Sequence
  Description of Artificial Sequence: Synthetic oligonucleotide
  Sense strand starting at position 450 of SEQ ID NO: 1243604
acuucuuggcucuaagugu

SEQ ID NO: 1427969 - RNA, 19 nt, Artificial Sequence
  Description of Artificial Sequence: Synthetic oligonucleotide
  Antisense strand to SEQ ID NO: 1427968
acacuuagagccaagaagu

SEQ ID NO: 1427970 - RNA, 19 nt, Artificial Sequence
  Description of Artificial Sequence: Synthetic oligonucleotide
  Sense strand starting at position 456 of SEQ ID NO: 1243604
uggcucuaaguguauaaca

SEQ ID NO: 1427971 - RNA, 19 nt, Artificial Sequence
  Description of Artificial Sequence: Synthetic oligonucleotide
  Antisense strand to SEQ ID NO: 1427970
uguuauacacuuagagcca

SEQ ID NO: 1427972 - RNA, 19 nt, Artificial Sequence
  Description of Artificial Sequence: Synthetic oligonucleotide
  Sense strand starting at position 458 of SEQ ID NO: 1243604
gcucuaaguguauaacauu

SEQ ID NO: 1427973 - RNA, 19 nt, Artificial Sequence
  Description of Artificial Sequence: Synthetic oligonucleotide
  Antisense strand to SEQ ID NO: 1427972
aauguuauacacuuagagc

SEQ ID NO: 1427974 - RNA, 19 nt, Artificial Sequence
  Description of Artificial Sequence: Synthetic oligonucleotide
  Sense strand starting at position 465 of SEQ ID NO: 1243604
guguauaacauuugguagu

SEQ ID NO: 1427975 - RNA, 19 nt, Artificial Sequence
  Description of Artificial Sequence: Synthetic oligonucleotide
  Antisense strand to SEQ ID NO: 1427974
acuaccaaauguuauacac

SEQ ID NO: 1427976 - RNA, 19 nt, Artificial Sequence
  Description of Artificial Sequence: Synthetic oligonucleotide
  Sense strand starting at position 693 of SEQ ID NO: 1243604
aagagugcuaaccguggaa

SEQ ID NO: 1427977 - RNA, 19 nt, Artificial Sequence
  Description of Artificial Sequence: Synthetic oligonucleotide
  Antisense strand to SEQ ID NO: 1427976
uuccacgguuagcacucuu

SEQ ID NO: 1427978 - RNA, 19 nt, Artificial Sequence
  Description of Artificial Sequence: Synthetic oligonucleotide
  Sense strand starting at position 695 of SEQ ID NO: 1243604
gagugcuaaccguggaaag

SEQ ID NO: 1427979 - RNA, 19 nt, Artificial Sequence
  Description of Artificial Sequence: Synthetic oligonucleotide
  Antisense strand to SEQ ID NO: 1427978
cuuuccacgguuagcacuc

SEQ ID NO: 1427980 - RNA, 19 nt, Artificial Sequence
  Description of Artificial Sequence: Synthetic oligonucleotide
  Sense strand starting at position 696 of SEQ ID NO: 1243604
agugcuaaccguggaaaga

SEQ ID NO: 1427981 - RNA, 19 nt, Artificial Sequence
  Description of Artificial Sequence: Synthetic oligonucleotide
  Antisense strand to SEQ ID NO: 1427980
ucuuuccacgguuagcacu

SEQ ID NO: 1427982 - RNA, 19 nt, Artificial Sequence
  Description of Artificial Sequence: Synthetic oligonucleotide
  Sense strand starting at position 831 of SEQ ID NO: 1243604
uagccuauucgcugaagga

SEQ ID NO: 1427983 - RNA, 19 nt, Artificial Sequence
  Description of Artificial Sequence: Synthetic oligonucleotide
  Antisense strand to SEQ ID NO: 1427982
uccuucagcgaauaggcua

SEQ ID NO: 1427984 - RNA, 19 nt, Artificial Sequence
  Description of Artificial Sequence: Synthetic oligonucleotide
  Sense strand starting at position 832 of SEQ ID NO: 1243604
agccuauucgcugaaggag

SEQ ID NO: 1427985 - RNA, 19 nt, Artificial Sequence
  Description of Artificial Sequence: Synthetic oligonucleotide
  Antisense strand to SEQ ID NO: 1427984
cuccuucagcgaauaggcu

SEQ ID NO: 1427986 - RNA, 19 nt, Artificial Sequence
  Description of Artificial Sequence: Synthetic oligonucleotide
  Sense strand starting at position 1049 of SEQ ID NO: 1243604
aaggcagagugauuauuau

SEQ ID NO: 1427987 - RNA, 19 nt, Artificial Sequence
  Description of Artificial Sequence: Synthetic oligonucleotide
  Antisense strand to SEQ ID NO: 1427986
auaauaaucacucugccuu

SEQ ID NO: 1427988 - RNA, 19 nt, Artificial Sequence
  Description of Artificial Sequence: Synthetic oligonucleotide
  Sense strand starting at position 1142 of SEQ ID NO: 1243604
uuuggccuuguaugagaga

SEQ ID NO: 1427989 - RNA, 19 nt, Artificial Sequence
  Description of Artificial Sequence: Synthetic oligonucleotide
  Antisense strand to SEQ ID NO: 1427988
ucucucauacaaggccaaa

SEQ ID NO: 1427990 - RNA, 19 nt, Artificial Sequence
  Description of Artificial Sequence: Synthetic oligonucleotide
  Sense strand starting at position 1209 of SEQ ID NO: 1243604
agccauuucuuguucuuua

SEQ ID NO: 1427991 - RNA, 19 nt, Artificial Sequence
  Description of Artificial Sequence: Synthetic oligonucleotide
  Antisense strand to SEQ ID NO: 1427990
uaaagaacaagaaauggcu

SEQ ID NO: 1427992 - RNA, 19 nt, Artificial Sequence
  Description of Artificial Sequence: Synthetic oligonucleotide
  Sense strand starting at position 1405 of SEQ ID NO: 1243604
ggcucaaacuacuugaaac

SEQ ID NO: 1427993 - RNA, 19 nt, Artificial Sequence
  Description of Artificial Sequence: Synthetic oligonucleotide
  Antisense strand to SEQ ID NO: 1427992
guuucaaguaguuugagcc

SEQ ID NO: 1427994 - RNA, 19 nt, Artificial Sequence
  Description of Artificial Sequence: Synthetic oligonucleotide
  Sense strand starting at position 1416 of SEQ ID NO: 1243604
cuugaaacuugauucugag

SEQ ID NO: 1427995 - RNA, 19 nt, Artificial Sequence
  Description of Artificial Sequence: Synthetic oligonucleotide
  Antisense strand to SEQ ID NO: 1427994
cucagaaucaaguuucaag

SEQ ID NO: 1427996 - RNA, 19 nt, Artificial Sequence
  Description of Artificial Sequence: Synthetic oligonucleotide
  Sense strand starting at position 1531 of SEQ ID NO: 1243604
auaaaucacacgggaaagu

SEQ ID NO: 1427997 - RNA, 19 nt, Artificial Sequence
  Description of Artificial Sequence: Synthetic oligonucleotide
  Antisense strand to SEQ ID NO: 1427996
acuuucccgugugauuuau

SEQ ID NO: 1427998 - RNA, 19 nt, Artificial Sequence
  Description of Artificial Sequence: Synthetic oligonucleotide
  Sense strand starting at position 1592 of SEQ ID NO: 1243604
ucguuucuguaaccucaaa

SEQ ID NO: 1427999 - RNA, 19 nt, Artificial Sequence
  Description of Artificial Sequence: Synthetic oligonucleotide
  Antisense strand to SEQ ID NO: 1427998
uuugagguuacagaaacga

SEQ ID NO: 1428000 - RNA, 19 nt, Artificial Sequence
  Description of Artificial Sequence: Synthetic oligonucleotide
  Sense strand starting at position 1753 of SEQ ID NO: 1243604
agucuuaggucuuuaacau

SEQ ID NO: 1428001 - RNA, 19 nt, Artificial Sequence
  Description of Artificial Sequence: Synthetic oligonucleotide
  Antisense strand to SEQ ID NO: 1428000
auguuaaagaccuaagacu

SEQ ID NO: 1428002 - RNA, 19 nt, Artificial Sequence
  Description of Artificial Sequence: Synthetic oligonucleotide
  Sense strand starting at position 1754 of SEQ ID NO: 1243604
gucuuaggucuuuaacaua

SEQ ID NO: 1428003 - RNA, 19 nt, Artificial Sequence
  Description of Artificial Sequence: Synthetic oligonucleotide
  Antisense strand to SEQ ID NO: 1428002
uauguuaaagaccuaagac

SEQ ID NO: 1428004 - RNA, 19 nt, Artificial Sequence
  Description of Artificial Sequence: Synthetic oligonucleotide
  Sense strand starting at position 1777 of SEQ ID NO: 1243604
acauaagaauugggaaaca

SEQ ID NO: 1428005 - RNA, 19 nt, Artificial Sequence
  Description of Artificial Sequence: Synthetic oligonucleotide
  Antisense strand to SEQ ID NO: 1428004
uguuucccaauucuuaugu

SEQ ID NO: 1428006 - RNA, 19 nt, Artificial Sequence
  Description of Artificial Sequence: Synthetic oligonucleotide
  Sense strand starting at position 1927 of SEQ ID NO: 1243604
ugucuagguaacgauuaca

SEQ ID NO: 1428007 - RNA, 19 nt, Artificial Sequence
  Description of Artificial Sequence: Synthetic oligonucleotide
  Antisense strand to SEQ ID NO: 1428006
uguaaucguuaccuagaca

SEQ ID NO: 1428008 - RNA, 19 nt, Artificial Sequence
  Description of Artificial Sequence: Synthetic oligonucleotide
  Sense strand starting at position 1930 of SEQ ID NO: 1243604
cuagguaacgauuacaacu

SEQ ID NO: 1428009 - RNA, 19 nt, Artificial Sequence
  Description of Artificial Sequence: Synthetic oligonucleotide
  Antisense strand to SEQ ID NO: 1428008
aguuguaaucguuaccuag

SEQ ID NO: 1428010 - RNA, 19 nt, Artificial Sequence
  Description of Artificial Sequence: Synthetic oligonucleotide
  Sense strand starting at position 2097 of SEQ ID NO: 1243604
auuauucugcaaggaaaug

SEQ ID NO: 1428011 - RNA, 19 nt, Artificial Sequence
  Description of Artificial Sequence: Synthetic oligonucleotide
  Antisense strand to SEQ ID NO: 1428010
cauuuccuugcagaauaau

SEQ ID NO: 1428012 - RNA, 19 nt, Artificial Sequence
  Description of Artificial Sequence: Synthetic oligonucleotide
  Sense strand starting at position 2399 of SEQ ID NO: 1243604
cagaguauucuggagcuga

SEQ ID NO: 1428013 - RNA, 19 nt, Artificial Sequence
  Description of Artificial Sequence: Synthetic oligonucleotide
  Antisense strand to SEQ ID NO: 1428012
ucagcuccagaauacucug

SEQ ID NO: 1428014 - RNA, 19 nt, Artificial Sequence
  Description of Artificial Sequence: Synthetic oligonucleotide
  Sense strand starting at position 2446 of SEQ ID NO: 1243604
cauaguacgccuuggagaa

SEQ ID NO: 1428015 - RNA, 19 nt, Artificial Sequence
  Description of Artificial Sequence: Synthetic oligonucleotide
  Antisense strand to SEQ ID NO: 1428014
uucuccaaggcguacuaug

SEQ ID NO: 1428016 - RNA, 19 nt, Artificial Sequence
  Description of Artificial Sequence: Synthetic oligonucleotide
  Sense strand starting at position 2447 of SEQ ID NO: 1243604
auaguacgccuuggagaaa

SEQ ID NO: 1428017 - RNA, 19 nt, Artificial Sequence
  Description of Artificial Sequence: Synthetic oligonucleotide
  Antisense strand to SEQ ID NO: 1428016
uuucuccaaggcguacuau

SEQ ID NO: 1428018 - RNA, 19 nt, Artificial Sequence
  Description of Artificial Sequence: Synthetic oligonucleotide
  Sense strand starting at position 2458 of SEQ ID NO: 1243604
uggagaaacuccuaggaca

SEQ ID NO: 1428019 - RNA, 19 nt, Artificial Sequence
  Description of Artificial Sequence: Synthetic oligonucleotide
  Antisense strand to SEQ ID NO: 1428018
uguccuaggaguuucucca

SEQ ID NO: 1428020 - RNA, 19 nt, Artificial Sequence
  Description of Artificial Sequence: Synthetic oligonucleotide
  Sense strand starting at position 2674 of SEQ ID NO: 1243604
cucucugcucuguaaagag

SEQ ID NO: 1428021 - RNA, 19 nt, Artificial Sequence
  Description of Artificial Sequence: Synthetic oligonucleotide
  Antisense strand to SEQ ID NO: 1428020
cucuuuacagagcagagag

SEQ ID NO: 1428022 - RNA, 19 nt, Artificial Sequence
  Description of Artificial Sequence: Synthetic oligonucleotide
  Sense strand starting at position 3033 of SEQ ID NO: 1243604
aauagucaacagugaaaug

SEQ ID NO: 1428023 - RNA, 19 nt, Artificial Sequence
  Description of Artificial Sequence: Synthetic oligonucleotide
  Antisense strand to SEQ ID NO: 1428022
cauuucacuguugacuauu

SEQ ID NO: 1428024 - RNA, 19 nt, Artificial Sequence
  Description of Artificial Sequence: Synthetic oligonucleotide
  Sense strand starting at position 3086 of SEQ ID NO: 1243604
cguuaauaaagguguucua

SEQ ID NO: 1428025 - RNA, 19 nt, Artificial Sequence
  Description of Artificial Sequence: Synthetic oligonucleotide
  Antisense strand to SEQ ID NO: 1428024
uagaacaccuuuauuaacg

SEQ ID NO: 1428026 - RNA, 19 nt, Artificial Sequence
  Description of Artificial Sequence: Synthetic oligonucleotide
  Sense strand starting at position 3089 of SEQ ID NO: 1243604
uaauaaagguguucuaaag

SEQ ID NO: 1428027 - RNA, 19 nt, Artificial Sequence
  Description of Artificial Sequence: Synthetic oligonucleotide
  Antisense strand to SEQ ID NO: 1428026
cuuuagaacaccuuuauua

SEQ ID NO: 1428028 - RNA, 19 nt, Artificial Sequence
  Description of Artificial Sequence: Synthetic oligonucleotide
  Sense strand starting at position 3409 of SEQ ID NO: 1243604
ugaccuguuuccucuuacu

SEQ ID NO: 1428029 - RNA, 19 nt, Artificial Sequence
  Description of Artificial Sequence: Synthetic oligonucleotide
  Antisense strand to SEQ ID NO: 1428028
aguaagaggaaacagguca

SEQ ID NO: 1428030 - RNA, 19 nt, Artificial Sequence
  Description of Artificial Sequence: Synthetic oligonucleotide
  Sense strand starting at position 3527 of SEQ ID NO: 1243604
cauggaagugguggguaaa

SEQ ID NO: 1428031 - RNA, 19 nt, Artificial Sequence
  Description of Artificial Sequence: Synthetic oligonucleotide
  Antisense strand to SEQ ID NO: 1428030
uuuacccaccacuuccaug

SEQ ID NO: 1428032 - RNA, 19 nt, Artificial Sequence
  Description of Artificial Sequence: Synthetic oligonucleotide
  Sense strand starting at position 3682 of SEQ ID NO: 1243604
uuuaaaguuucccuuaagu

SEQ ID NO: 1428033 - RNA, 19 nt, Artificial Sequence
  Description of Artificial Sequence: Synthetic oligonucleotide
  Antisense strand to SEQ ID NO: 1428032
acuuaagggaaacuuuaaa

SEQ ID NO: 1428034 - RNA, 19 nt, Artificial Sequence
  Description of Artificial Sequence: Synthetic oligonucleotide
  Sense strand starting at position 3784 of SEQ ID NO: 1243604
gccugaacuugguccuuga

SEQ ID NO: 1428035 - RNA, 19 nt, Artificial Sequence
  Description of Artificial Sequence: Synthetic oligonucleotide
  Antisense strand to SEQ ID NO: 1428034
ucaaggaccaaguucaggc

SEQ ID NO: 1428036 - RNA, 19 nt, Artificial Sequence
  Description of Artificial Sequence: Synthetic oligonucleotide
  Sense strand starting at position 3787 of SEQ ID NO: 1243604
ugaacuugguccuugaaag

SEQ ID NO: 1428037 - RNA, 19 nt, Artificial Sequence
  Description of Artificial Sequence: Synthetic oligonucleotide
  Antisense strand to SEQ ID NO: 1428036
cuuucaaggaccaaguuca

SEQ ID NO: 1428038 - RNA, 19 nt, Artificial Sequence
  Description of Artificial Sequence: Synthetic oligonucleotide
  Sense strand starting at position 3788 of SEQ ID NO: 1243604
gaacuugguccuugaaagg

SEQ ID NO: 1428039 - RNA, 19 nt, Artificial Sequence
  Description of Artificial Sequence: Synthetic oligonucleotide
  Antisense strand to SEQ ID NO: 1428038
ccuuucaaggaccaaguuc

SEQ ID NO: 1428040 - RNA, 19 nt, Artificial Sequence
  Description of Artificial Sequence: Synthetic oligonucleotide
  Sense strand starting at position 8 of SEQ ID NO: 1243605
ucucauuuaugggacagga

SEQ ID NO: 1428041 - RNA, 19 nt, Artificial Sequence
  Description of Artificial Sequence: Synthetic oligonucleotide
  Antisense strand to SEQ ID NO: 1428040
uccugucccauaaaugaga

SEQ ID NO: 1428042 - RNA, 19 nt, Artificial Sequence
  Description of Artificial Sequence: Synthetic oligonucleotide
  Sense strand starting at position 42 of SEQ ID NO: 1243605
ugcuacuuucuagagccaa

SEQ ID NO: 1428043 - RNA, 19 nt, Artificial Sequence
  Description of Artificial Sequence: Synthetic oligonucleotide
  Antisense strand to SEQ ID NO: 1428042
uuggcucuagaaaguagca

SEQ ID NO: 1428044 - RNA, 19 nt, Artificial Sequence
  Description of Artificial Sequence: Synthetic oligonucleotide
  Sense strand starting at position 119 of SEQ ID NO: 1243605
cucagagaacacugcuaga

SEQ ID NO: 1428045 - RNA, 19 nt, Artificial Sequence
  Description of Artificial Sequence: Synthetic oligonucleotide
  Antisense strand to SEQ ID NO: 1428044
ucuagcaguguucucugag

SEQ ID NO: 1428046 - RNA, 19 nt, Artificial Sequence
  Description of Artificial Sequence: Synthetic oligonucleotide
  Sense strand starting at position 375 of SEQ ID NO: 1243605
auguucuuugcucaagauu

SEQ ID NO: 1428047 - RNA, 19 nt, Artificial Sequence
  Description of Artificial Sequence: Synthetic oligonucleotide
  Antisense strand to SEQ ID NO: 1428046
aaucuugagcaaagaacau

SEQ ID NO: 1428048 - RNA, 19 nt, Artificial Sequence
  Description of Artificial Sequence: Synthetic oligonucleotide
  Sense strand starting at position 378 of SEQ ID NO: 1243605
uucuuugcucaagauugaa

SEQ ID NO: 1428049 - RNA, 19 nt, Artificial Sequence
  Description of Artificial Sequence: Synthetic oligonucleotide
  Antisense strand to SEQ ID NO: 1428048
uucaaucuugagcaaagaa

SEQ ID NO: 1428050 - RNA, 19 nt, Artificial Sequence
  Description of Artificial Sequence: Synthetic oligonucleotide
  Sense strand starting at position 381 of SEQ ID NO: 1243605
uuugcucaagauugaacuu

SEQ ID NO: 1428051 - RNA, 19 nt, Artificial Sequence
  Description of Artificial Sequence: Synthetic oligonucleotide
  Antisense strand to SEQ ID NO: 1428050
aaguucaaucuugagcaaa

SEQ ID NO: 1428052 - RNA, 19 nt, Artificial Sequence
  Description of Artificial Sequence: Synthetic oligonucleotide
  Sense strand starting at position 479 of SEQ ID NO: 1243605
ugcaauuaucuauagaagu

SEQ ID NO: 1428053 - RNA, 19 nt, Artificial Sequence
  Description of Artificial Sequence: Synthetic oligonucleotide
  Antisense strand to SEQ ID NO: 1428052
acuucuauagauaauugca

SEQ ID NO: 1428054 - RNA, 19 nt, Artificial Sequence
  Description of Artificial Sequence: Synthetic oligonucleotide
  Sense strand starting at position 496 of SEQ ID NO: 1243605
guauaaugccgcucucugu

SEQ ID NO: 1428055 - RNA, 19 nt, Artificial Sequence
  Description of Artificial Sequence: Synthetic oligonucleotide
  Antisense strand to SEQ ID NO: 1428054
acagagagcggcauuauac

SEQ ID NO: 1428056 - RNA, 19 nt, Artificial Sequence
  Description of Artificial Sequence: Synthetic oligonucleotide
  Sense strand starting at position 505 of SEQ ID NO: 1243605
cgcucucuguaagcaauuu

SEQ ID NO: 1428057 - RNA, 19 nt, Artificial Sequence
  Description of Artificial Sequence: Synthetic oligonucleotide
  Antisense strand to SEQ ID NO: 1428056
aaauugcuuacagagagcg

SEQ ID NO: 1428058 - RNA, 19 nt, Artificial Sequence
  Description of Artificial Sequence: Synthetic oligonucleotide
  Sense strand starting at position 925 of SEQ ID NO: 1243605
agaggaugaucuccucacu

SEQ ID NO: 1428059 - RNA, 19 nt, Artificial Sequence
  Description of Artificial Sequence: Synthetic oligonucleotide
  Antisense strand to SEQ ID NO: 1428058
agugaggagaucauccucu

SEQ ID NO: 1428060 - RNA, 19 nt, Artificial Sequence
  Description of Artificial Sequence: Synthetic oligonucleotide
  Sense strand starting at position 1066 of SEQ ID NO: 1243605
uuauguaaaggcuagcaaa

SEQ ID NO: 1428061 - RNA, 19 nt, Artificial Sequence
  Description of Artificial Sequence: Synthetic oligonucleotide
  Antisense strand to SEQ ID NO: 1428060
uuugcuagccuuuacauaa

SEQ ID NO: 1428062 - RNA, 19 nt, Artificial Sequence
  Description of Artificial Sequence: Synthetic oligonucleotide
  Sense strand starting at position 1277 of SEQ ID NO: 1243605
cacuguauccaacgaguaa

SEQ ID NO: 1428063 - RNA, 19 nt, Artificial Sequence
  Description of Artificial Sequence: Synthetic oligonucleotide
  Antisense strand to SEQ ID NO: 1428062
uuacucguuggauacagug

SEQ ID NO: 1428064 - RNA, 19 nt, Artificial Sequence
  Description of Artificial Sequence: Synthetic oligonucleotide
  Sense strand starting at position 1550 of SEQ ID NO: 1243605
acacucaguuauguuuaaa

SEQ ID NO: 1428065 - RNA, 19 nt, Artificial Sequence
  Description of Artificial Sequence: Synthetic oligonucleotide
  Antisense strand to SEQ ID NO: 1428064
uuuaaacauaacugagugu

SEQ ID NO: 1428066 - RNA, 19 nt, Artificial Sequence
  Description of Artificial Sequence: Synthetic oligonucleotide
  Sense strand starting at position 1687 of SEQ ID NO: 1243605
cugcauagaugauugucau

SEQ ID NO: 1428067 - RNA, 19 nt, Artificial Sequence
  Description of Artificial Sequence: Synthetic oligonucleotide
  Antisense strand to SEQ ID NO: 1428066
augacaaucaucuaugcag

SEQ ID NO: 1428068 - RNA, 19 nt, Artificial Sequence
  Description of Artificial Sequence: Synthetic oligonucleotide
  Sense strand starting at position 1849 of SEQ ID NO: 1243605
aaucuagagguaugguuua

SEQ ID NO: 1428069 - RNA, 19 nt, Artificial Sequence
  Description of Artificial Sequence: Synthetic oligonucleotide
  Antisense strand to SEQ ID NO: 1428068
uaaaccauaccucuagauu

SEQ ID NO: 1428070 - RNA, 19 nt, Artificial Sequence
  Description of Artificial Sequence: Synthetic oligonucleotide
  Sense strand starting at position 1854 of SEQ ID NO: 1243605
agagguaugguuuauccac

SEQ ID NO: 1428071 - RNA, 19 nt, Artificial Sequence
  Description of Artificial Sequence: Synthetic oligonucleotide
  Antisense strand to SEQ ID NO: 1428070
guggauaaaccauaccucu

SEQ ID NO: 1428072 - RNA, 19 nt, Artificial Sequence
  Description of Artificial Sequence: Synthetic oligonucleotide
  Sense strand starting at position 1874 of SEQ ID NO: 1243605
gagcuccuuguuuagaaga

SEQ ID NO: 1428073 - RNA, 19 nt, Artificial Sequence
  Description of Artificial Sequence: Synthetic oligonucleotide
  Antisense strand to SEQ ID NO: 1428072
ucuucuaaacaaggagcuc

SEQ ID NO: 1428074 - RNA, 19 nt, Artificial Sequence
  Description of Artificial Sequence: Synthetic oligonucleotide
  Sense strand starting at position 1879 of SEQ ID NO: 1243605
ccuuguuuagaagaaaguu

SEQ ID NO: 1428075 - RNA, 19 nt, Artificial Sequence
  Description of Artificial Sequence: Synthetic oligonucleotide
  Antisense strand to SEQ ID NO: 1428074
aacuuucuucuaaacaagg

SEQ ID NO: 1428076 - RNA, 19 nt, Artificial Sequence
  Description of Artificial Sequence: Synthetic oligonucleotide
  Sense strand starting at position 2163 of SEQ ID NO: 1243605
agauuauuguggcuaauac

SEQ ID NO: 1428077 - RNA, 19 nt, Artificial Sequence
  Description of Artificial Sequence: Synthetic oligonucleotide
  Antisense strand to SEQ ID NO: 1428076
guauuagccacaauaaucu

SEQ ID NO: 1428078 - RNA, 19 nt, Artificial Sequence
  Description of Artificial Sequence: Synthetic oligonucleotide
  Sense strand starting at position 2198 of SEQ ID NO: 1243605
gucuuuaagccaugagaaa

SEQ ID NO: 1428079 - RNA, 19 nt, Artificial Sequence
  Description of Artificial Sequence: Synthetic oligonucleotide
  Antisense strand to SEQ ID NO: 1428078
uuucucauggcuuaaagac

SEQ ID NO: 1428080 - RNA, 19 nt, Artificial Sequence
  Description of Artificial Sequence: Synthetic oligonucleotide
  Sense strand starting at position 2275 of SEQ ID NO: 1243605
uugacagcuuuaccuagau

SEQ ID NO: 1428081 - RNA, 19 nt, Artificial Sequence
  Description of Artificial Sequence: Synthetic oligonucleotide
  Antisense strand to SEQ ID NO: 1428080
aucuagguaaagcugucaa

SEQ ID NO: 1428082 - RNA, 19 nt, Artificial Sequence
  Description of Artificial Sequence: Synthetic oligonucleotide
  Sense strand starting at position 2394 of SEQ ID NO: 1243605
uuuccaagugucugaagau

SEQ ID NO: 1428083 - RNA, 19 nt, Artificial Sequence
  Description of Artificial Sequence: Synthetic oligonucleotide
  Antisense strand to SEQ ID NO: 1428082
aucuucagacacuuggaaa

SEQ ID NO: 1428084 - RNA, 19 nt, Artificial Sequence
  Description of Artificial Sequence: Synthetic oligonucleotide
  Sense strand starting at position 2521 of SEQ ID NO: 1243605
augaucuaucuuggcagau

SEQ ID NO: 1428085 - RNA, 19 nt, Artificial Sequence
  Description of Artificial Sequence: Synthetic oligonucleotide
  Antisense strand to SEQ ID NO: 1428084
aucugccaagauagaucau

SEQ ID NO: 1428086 - RNA, 19 nt, Artificial Sequence
  Description of Artificial Sequence: Synthetic oligonucleotide
  Sense strand starting at position 2522 of SEQ ID NO: 1243605
ugaucuaucuuggcagaua

SEQ ID NO: 1428087 - RNA, 19 nt, Artificial Sequence
  Description of Artificial Sequence: Synthetic oligonucleotide
  Antisense strand to SEQ ID NO: 1428086
uaucugccaagauagauca

SEQ ID NO: 1428088 - RNA, 19 nt, Artificial Sequence
  Description of Artificial Sequence: Synthetic oligonucleotide
  Sense strand starting at position 2525 of SEQ ID NO: 1243605
ucuaucuuggcagauauuc

SEQ ID NO: 1428089 - RNA, 19 nt, Artificial Sequence
  Description of Artificial Sequence: Synthetic oligonucleotide
  Antisense strand to SEQ ID NO: 1428088
gaauaucugccaagauaga

SEQ ID NO: 1428090 - RNA, 19 nt, Artificial Sequence
  Description of Artificial Sequence: Synthetic oligonucleotide
  Sense strand starting at position 2534 of SEQ ID NO: 1243605
gcagauauuccauaggcac

SEQ ID NO: 1428091 - RNA, 19 nt, Artificial Sequence
  Description of Artificial Sequence: Synthetic oligonucleotide
  Antisense strand to SEQ ID NO: 1428090
gugccuauggaauaucugc

SEQ ID NO: 1428092 - RNA, 19 nt, Artificial Sequence
  Description of Artificial Sequence: Synthetic oligonucleotide
  Sense strand starting at position 2574 of SEQ ID NO: 1243605
ugguguugaguggaauauu

SEQ ID NO: 1428093 - RNA, 19 nt, Artificial Sequence
  Description of Artificial Sequence: Synthetic oligonucleotide
  Antisense strand to SEQ ID NO: 1428092
aauauuccacucaacacca

SEQ ID NO: 1428094 - RNA, 19 nt, Artificial Sequence
  Description of Artificial Sequence: Synthetic oligonucleotide
  Sense strand starting at position 2667 of SEQ ID NO: 1243605
ccuaguucuguugauuacu

SEQ ID NO: 1428095 - RNA, 19 nt, Artificial Sequence
  Description of Artificial Sequence: Synthetic oligonucleotide
  Antisense strand to SEQ ID NO: 1428094
aguaaucaacagaacuagg

SEQ ID NO: 1428096 - RNA, 19 nt, Artificial Sequence
  Description of Artificial Sequence: Synthetic oligonucleotide
  Sense strand starting at position 2997 of SEQ ID NO: 1243605
cagaguggcaguuaugauc

SEQ ID NO: 1428097 - RNA, 19 nt, Artificial Sequence
  Description of Artificial Sequence: Synthetic oligonucleotide
  Antisense strand to SEQ ID NO: 1428096
gaucauaacugccacucug

SEQ ID NO: 1428098 - RNA, 19 nt, Artificial Sequence
  Description of Artificial Sequence: Synthetic oligonucleotide
  Sense strand starting at position 3249 of SEQ ID NO: 1243605
gaguuucuuguagauggca

SEQ ID NO: 1428099 - RNA, 19 nt, Artificial Sequence
  Description of Artificial Sequence: Synthetic oligonucleotide
  Antisense strand to SEQ ID NO: 1428098
ugccaucuacaagaaacuc

SEQ ID NO: 1428100 - RNA, 19 nt, Artificial Sequence
  Description of Artificial Sequence: Synthetic oligonucleotide
  Sense strand starting at position 3442 of SEQ ID NO: 1243605
gcuuucuuguugguuauuu

SEQ ID NO: 1428101 - RNA, 19 nt, Artificial Sequence
  Description of Artificial Sequence: Synthetic oligonucleotide
  Antisense strand to SEQ ID NO: 1428100
aaauaaccaacaagaaagc

SEQ ID NO: 1428102 - RNA, 19 nt, Artificial Sequence
  Description of Artificial Sequence: Synthetic oligonucleotide
  Sense strand starting at position 3501 of SEQ ID NO: 1243605
guuucuuaacuguaucuau

SEQ ID NO: 1428103 - RNA, 19 nt, Artificial Sequence
  Description of Artificial Sequence: Synthetic oligonucleotide
  Antisense strand to SEQ ID NO: 1428102
auagauacaguuaagaaac

SEQ ID NO: 1428104 - RNA, 19 nt, Artificial Sequence
  Description of Artificial Sequence: Synthetic oligonucleotide
  Sense strand starting at position 3573 of SEQ ID NO: 1243605
ugacaugcuuuacccagaa

SEQ ID NO: 1428105 - RNA, 19 nt, Artificial Sequence
  Description of Artificial Sequence: Synthetic oligonucleotide
  Antisense strand to SEQ ID NO: 1428104
uucuggguaaagcauguca

SEQ ID NO: 1428106 - RNA, 19 nt, Artificial Sequence
  Description of Artificial Sequence: Synthetic oligonucleotide
  Sense strand starting at position 3849 of SEQ ID NO: 1243605
uugcaacaucuugacaagu

SEQ ID NO: 1428107 - RNA, 19 nt, Artificial Sequence
  Description of Artificial Sequence: Synthetic oligonucleotide
  Antisense strand to SEQ ID NO: 1428106
acuugucaagauguugcaa

SEQ ID NO: 1428108 - RNA, 19 nt, Artificial Sequence
  Description of Artificial Sequence: Synthetic oligonucleotide
  Sense strand starting at position 3864 of SEQ ID NO: 1243605
aaguauauacuguggugau

SEQ ID NO: 1428109 - RNA, 19 nt, Artificial Sequence
  Description of Artificial Sequence: Synthetic oligonucleotide
  Antisense strand to SEQ ID NO: 1428108
aucaccacaguauauacuu

SEQ ID NO: 1428110 - RNA, 19 nt, Artificial Sequence
  Description of Artificial Sequence: Synthetic oligonucleotide
  Sense strand starting at position 3868 of SEQ ID NO: 1243605
auauacuguggugauuaua

SEQ ID NO: 1428111 - RNA, 19 nt, Artificial Sequence
  Description of Artificial Sequence: Synthetic oligonucleotide
  Antisense strand to SEQ ID NO: 1428110
uauaaucaccacaguauau

SEQ ID NO: 1428112 - RNA, 19 nt, Artificial Sequence
  Description of Artificial Sequence: Synthetic oligonucleotide
  Sense strand starting at position 3876 of SEQ ID NO: 1243605
uggugauuauacuuccuag

SEQ ID NO: 1428113 - RNA, 19 nt, Artificial Sequence
  Description of Artificial Sequence: Synthetic oligonucleotide
  Antisense strand to SEQ ID NO: 1428112
cuaggaaguauaaucacca

SEQ ID NO: 1428114 - RNA, 19 nt, Artificial Sequence
  Description of Artificial Sequence: Synthetic oligonucleotide
  Sense strand starting at position 3959 of SEQ ID NO: 1243605
cagacaugucaaggguugu

SEQ ID NO: 1428115 - RNA, 19 nt, Artificial Sequence
  Description of Artificial Sequence: Synthetic oligonucleotide
  Antisense strand to SEQ ID NO: 1428114
acaacccuugacaugucug

SEQ ID NO: 1428116 - RNA, 19 nt, Artificial Sequence
  Description of Artificial Sequence: Synthetic oligonucleotide
  Sense strand starting at position 3960 of SEQ ID NO: 1243605
agacaugucaaggguuguu

SEQ ID NO: 1428117 - RNA, 19 nt, Artificial Sequence
  Description of Artificial Sequence: Synthetic oligonucleotide
  Antisense strand to SEQ ID NO: 1428116
aacaacccuugacaugucu

SEQ ID NO: 1428118 - RNA, 19 nt, Artificial Sequence
  Description of Artificial Sequence: Synthetic oligonucleotide
  Sense strand starting at position 3969 of SEQ ID NO: 1243605
aaggguuguugggcauaaa

SEQ ID NO: 1428119 - RNA, 19 nt, Artificial Sequence
  Description of Artificial Sequence: Synthetic oligonucleotide
  Antisense strand to SEQ ID NO: 1428118
uuuaugcccaacaacccuu

SEQ ID NO: 1428120 - RNA, 19 nt, Artificial Sequence
  Description of Artificial Sequence: Synthetic oligonucleotide
  Sense strand starting at position 198 of SEQ ID NO: 1243606
guugaagagaaaugugauu

SEQ ID NO: 1428121 - RNA, 19 nt, Artificial Sequence
  Description of Artificial Sequence: Synthetic oligonucleotide
  Antisense strand to SEQ ID NO: 1428120
aaucacauuucucuucaac

SEQ ID NO: 1428122 - RNA, 19 nt, Artificial Sequence
  Description of Artificial Sequence: Synthetic oligonucleotide
  Sense strand starting at position 203 of SEQ ID NO: 1243606
agagaaaugugauuggcag

SEQ ID NO: 1428123 - RNA, 19 nt, Artificial Sequence
  Description of Artificial Sequence: Synthetic oligonucleotide
  Antisense strand to SEQ ID NO: 1428122
cugccaaucacauuucucu

SEQ ID NO: 1428124 - RNA, 19 nt, Artificial Sequence
  Description of Artificial Sequence: Synthetic oligonucleotide
  Sense strand starting at position 205 of SEQ ID NO: 1243606
agaaaugugauuggcagaa

SEQ ID NO: 1428125 - RNA, 19 nt, Artificial Sequence
  Description of Artificial Sequence: Synthetic oligonucleotide
  Antisense strand to SEQ ID NO: 1428124
uucugccaaucacauuucu

SEQ ID NO: 1428126 - RNA, 19 nt, Artificial Sequence
  Description of Artificial Sequence: Synthetic oligonucleotide
  Sense strand starting at position 494 of SEQ ID NO: 1243606
gcaagaaaccucuagaagc

SEQ ID NO: 1428127 - RNA, 19 nt, Artificial Sequence
  Description of Artificial Sequence: Synthetic oligonucleotide
  Antisense strand to SEQ ID NO: 1428126
gcuucuagagguuucuugc

SEQ ID NO: 1428128 - RNA, 19 nt, Artificial Sequence
  Description of Artificial Sequence: Synthetic oligonucleotide
  Sense strand starting at position 622 of SEQ ID NO: 1243606
agagcuguaagaugauaac

SEQ ID NO: 1428129 - RNA, 19 nt, Artificial Sequence
  Description of Artificial Sequence: Synthetic oligonucleotide
  Antisense strand to SEQ ID NO: 1428128
guuaucaucuuacagcucu

SEQ ID NO: 1428130 - RNA, 19 nt, Artificial Sequence
  Description of Artificial Sequence: Synthetic oligonucleotide
  Sense strand starting at position 628 of SEQ ID NO: 1243606
guaagaugauaacucuguu

SEQ ID NO: 1428131 - RNA, 19 nt, Artificial Sequence
  Description of Artificial Sequence: Synthetic oligonucleotide
  Antisense strand to SEQ ID NO: 1428130
aacagaguuaucaucuuac

SEQ ID NO: 1428132 - RNA, 19 nt, Artificial Sequence
  Description of Artificial Sequence: Synthetic oligonucleotide
  Sense strand starting at position 767 of SEQ ID NO: 1243606
gaagacauugcuggacauu

SEQ ID NO: 1428133 - RNA, 19 nt, Artificial Sequence
  Description of Artificial Sequence: Synthetic oligonucleotide
  Antisense strand to SEQ ID NO: 1428132
aauguccagcaaugucuuc

SEQ ID NO: 1428134 - RNA, 19 nt, Artificial Sequence
  Description of Artificial Sequence: Synthetic oligonucleotide
  Sense strand starting at position 820 of SEQ ID NO: 1243606
agggcauggacuuauguuu

SEQ ID NO: 1428135 - RNA, 19 nt, Artificial Sequence
  Description of Artificial Sequence: Synthetic oligonucleotide
  Antisense strand to SEQ ID NO: 1428134
aaacauaaguccaugcccu

SEQ ID NO: 1428136 - RNA, 19 nt, Artificial Sequence
  Description of Artificial Sequence: Synthetic oligonucleotide
  Sense strand starting at position 927 of SEQ ID NO: 1243606
uggaaauccugccugaaac

SEQ ID NO: 1428137 - RNA, 19 nt, Artificial Sequence
  Description of Artificial Sequence: Synthetic oligonucleotide
  Antisense strand to SEQ ID NO: 1428136
guuucaggcaggauuucca

SEQ ID NO: 1428138 - RNA, 19 nt, Artificial Sequence
  Description of Artificial Sequence: Synthetic oligonucleotide
  Sense strand starting at position 928 of SEQ ID NO: 1243606
ggaaauccugccugaaacc

SEQ ID NO: 1428139 - RNA, 19 nt, Artificial Sequence
  Description of Artificial Sequence: Synthetic oligonucleotide
  Antisense strand to SEQ ID NO: 1428138
gguuucaggcaggauuucc

SEQ ID NO: 1428140 - RNA, 19 nt, Artificial Sequence
  Description of Artificial Sequence: Synthetic oligonucleotide
  Sense strand starting at position 969 of SEQ ID NO: 1243606
gaaaucaagcggugauaaa

SEQ ID NO: 1428141 - RNA, 19 nt, Artificial Sequence
  Description of Artificial Sequence: Synthetic oligonucleotide
  Antisense strand to SEQ ID NO: 1428140
uuuaucaccgcuugauuuc

SEQ ID NO: 1428142 - RNA, 19 nt, Artificial Sequence
  Description of Artificial Sequence: Synthetic oligonucleotide
  Sense strand starting at position 970 of SEQ ID NO: 1243606
aaaucaagcggugauaaac

SEQ ID NO: 1428143 - RNA, 19 nt, Artificial Sequence
  Description of Artificial Sequence: Synthetic oligonucleotide
  Antisense strand to SEQ ID NO: 1428142
guuuaucaccgcuugauuu

SEQ ID NO: 1428144 - RNA, 19 nt, Artificial Sequence
  Description of Artificial Sequence: Synthetic oligonucleotide
  Sense strand starting at position 979 of SEQ ID NO: 1243606
ggugauaaaccucaguauc

SEQ ID NO: 1428145 - RNA, 19 nt, Artificial Sequence
  Description of Artificial Sequence: Synthetic oligonucleotide
  Antisense strand to SEQ ID NO: 1428144
gauacugagguuuaucacc

SEQ ID NO: 1428146 - RNA, 19 nt, Artificial Sequence
  Description of Artificial Sequence: Synthetic oligonucleotide
  Sense strand starting at position 981 of SEQ ID NO: 1243606
ugauaaaccucaguaucug

SEQ ID NO: 1428147 - RNA, 19 nt, Artificial Sequence
  Description of Artificial Sequence: Synthetic oligonucleotide
  Antisense strand to SEQ ID NO: 1428146
cagauacugagguuuauca

SEQ ID NO: 1428148 - RNA, 19 nt, Artificial Sequence
  Description of Artificial Sequence: Synthetic oligonucleotide
  Sense strand starting at position 992 of SEQ ID NO: 1243606
aguaucugaaaggguuaaa

SEQ ID NO: 1428149 - RNA, 19 nt, Artificial Sequence
  Description of Artificial Sequence: Synthetic oligonucleotide
  Antisense strand to SEQ ID NO: 1428148
uuuaacccuuucagauacu

SEQ ID NO: 1428150 - RNA, 19 nt, Artificial Sequence
  Description of Artificial Sequence: Synthetic oligonucleotide
  Sense strand starting at position 1120 of SEQ ID NO: 1243606
auuuaucucugagcguuaa

SEQ ID NO: 1428151 - RNA, 19 nt, Artificial Sequence
  Description of Artificial Sequence: Synthetic oligonucleotide
  Antisense strand to SEQ ID NO: 1428150
uuaacgcucagagauaaau

SEQ ID NO: 1428152 - RNA, 19 nt, Artificial Sequence
  Description of Artificial Sequence: Synthetic oligonucleotide
  Sense strand starting at position 1157 of SEQ ID NO: 1243606
cugaacaucuuaguguaaa

SEQ ID NO: 1428153 - RNA, 19 nt, Artificial Sequence
  Description of Artificial Sequence: Synthetic oligonucleotide
  Antisense strand to SEQ ID NO: 1428152
uuuacacuaagauguucag

SEQ ID NO: 1428154 - RNA, 19 nt, Artificial Sequence
  Description of Artificial Sequence: Synthetic oligonucleotide
  Sense strand starting at position 1799 of SEQ ID NO: 1243606
uggcaugccuauuuauagu

SEQ ID NO: 1428155 - RNA, 19 nt, Artificial Sequence
  Description of Artificial Sequence: Synthetic oligonucleotide
  Antisense strand to SEQ ID NO: 1428154
acuauaaauaggcaugcca

SEQ ID NO: 1428156 - RNA, 19 nt, Artificial Sequence
  Description of Artificial Sequence: Synthetic oligonucleotide
  Sense strand starting at position 1922 of SEQ ID NO: 1243606
cugcauguucuggaggaga

SEQ ID NO: 1428157 - RNA, 19 nt, Artificial Sequence
  Description of Artificial Sequence: Synthetic oligonucleotide
  Antisense strand to SEQ ID NO: 1428156
ucuccuccagaacaugcag

SEQ ID NO: 1428158 - RNA, 19 nt, Artificial Sequence
  Description of Artificial Sequence: Synthetic oligonucleotide
  Sense strand starting at position 1924 of SEQ ID NO: 1243606
gcauguucuggaggagaau

SEQ ID NO: 1428159 - RNA, 19 nt, Artificial Sequence
  Description of Artificial Sequence: Synthetic oligonucleotide
  Antisense strand to SEQ ID NO: 1428158
auucuccuccagaacaugc

SEQ ID NO: 1428160 - RNA, 19 nt, Artificial Sequence
  Description of Artificial Sequence: Synthetic oligonucleotide
  Sense strand starting at position 2012 of SEQ ID NO: 1243606
auacaaauuucccaggaga

SEQ ID NO: 1428161 - RNA, 19 nt, Artificial Sequence
  Description of Artificial Sequence: Synthetic oligonucleotide
  Antisense strand to SEQ ID NO: 1428160
ucuccugggaaauuuguau

SEQ ID NO: 1428162 - RNA, 19 nt, Artificial Sequence
  Description of Artificial Sequence: Synthetic oligonucleotide
  Sense strand starting at position 2025 of SEQ ID NO: 1243606
aggagaaucuggucucagu

SEQ ID NO: 1428163 - RNA, 19 nt, Artificial Sequence
  Description of Artificial Sequence: Synthetic oligonucleotide
  Antisense strand to SEQ ID NO: 1428162
acugagaccagauucuccu

SEQ ID NO: 1428164 - RNA, 19 nt, Artificial Sequence
  Description of Artificial Sequence: Synthetic oligonucleotide
  Sense strand starting at position 2077 of SEQ ID NO: 1243606
uggugauuucuuugcuguu

SEQ ID NO: 1428165 - RNA, 19 nt, Artificial Sequence
  Description of Artificial Sequence: Synthetic oligonucleotide
  Antisense strand to SEQ ID NO: 1428164
aacagcaaagaaaucacca

SEQ ID NO: 1428166 - RNA, 19 nt, Artificial Sequence
  Description of Artificial Sequence: Synthetic oligonucleotide
  Sense strand starting at position 2078 of SEQ ID NO: 1243606
ggugauuucuuugcuguuu

SEQ ID NO: 1428167 - RNA, 19 nt, Artificial Sequence
  Description of Artificial Sequence: Synthetic oligonucleotide
  Antisense strand to SEQ ID NO: 1428166
aaacagcaaagaaaucacc

SEQ ID NO: 1428168 - RNA, 19 nt, Artificial Sequence
  Description of Artificial Sequence: Synthetic oligonucleotide
  Sense strand starting at position 2147 of SEQ ID NO: 1243606
gaugguuggcuggacauau

SEQ ID NO: 1428169 - RNA, 19 nt, Artificial Sequence
  Description of Artificial Sequence: Synthetic oligonucleotide
  Antisense strand to SEQ ID NO: 1428168
auauguccagccaaccauc

SEQ ID NO: 1428170 - RNA, 19 nt, Artificial Sequence
  Description of Artificial Sequence: Synthetic oligonucleotide
  Sense strand starting at position 2151 of SEQ ID NO: 1243606
guuggcuggacauaucaaa

SEQ ID NO: 1428171 - RNA, 19 nt, Artificial Sequence
  Description of Artificial Sequence: Synthetic oligonucleotide
  Antisense strand to SEQ ID NO: 1428170
uuugauauguccagccaac

SEQ ID NO: 1428172 - RNA, 19 nt, Artificial Sequence
  Description of Artificial Sequence: Synthetic oligonucleotide
  Sense strand starting at position 2191 of SEQ ID NO: 1243606
aggagaaucuagccuuucu

SEQ ID NO: 1428173 - RNA, 19 nt, Artificial Sequence
  Description of Artificial Sequence: Synthetic oligonucleotide
  Antisense strand to SEQ ID NO: 1428172
agaaaggcuagauucuccu

SEQ ID NO: 1428174 - RNA, 19 nt, Artificial Sequence
  Description of Artificial Sequence: Synthetic oligonucleotide
  Sense strand starting at position 2231 of SEQ ID NO: 1243606
gcccuaaugggagaguuga

SEQ ID NO: 1428175 - RNA, 19 nt, Artificial Sequence
  Description of Artificial Sequence: Synthetic oligonucleotide
  Antisense strand to SEQ ID NO: 1428174
ucaacucucccauuagggc

SEQ ID NO: 1428176 - RNA, 19 nt, Artificial Sequence
  Description of Artificial Sequence: Synthetic oligonucleotide
  Sense strand starting at position 2563 of SEQ ID NO: 1243606
cgagcagaaucuuuagaga

SEQ ID NO: 1428177 - RNA, 19 nt, Artificial Sequence
  Description of Artificial Sequence: Synthetic oligonucleotide
  Antisense strand to SEQ ID NO: 1428176
ucucuaaagauucugcucg

SEQ ID NO: 1428178 - RNA, 19 nt, Artificial Sequence
  Description of Artificial Sequence: Synthetic oligonucleotide
  Sense strand starting at position 2700 of SEQ ID NO: 1243606
uuuccaguauuguuagaga

SEQ ID NO: 1428179 - RNA, 19 nt, Artificial Sequence
  Description of Artificial Sequence: Synthetic oligonucleotide
  Antisense strand to SEQ ID NO: 1428178
ucucuaacaauacuggaaa

SEQ ID NO: 1428180 - RNA, 19 nt, Artificial Sequence
  Description of Artificial Sequence: Synthetic oligonucleotide
  Sense strand starting at position 2763 of SEQ ID NO: 1243606
caucuuauguaaguagaag

SEQ ID NO: 1428181 - RNA, 19 nt, Artificial Sequence
  Description of Artificial Sequence: Synthetic oligonucleotide
  Antisense strand to SEQ ID NO: 1428180
cuucuacuuacauaagaug

SEQ ID NO: 1428182 - RNA, 19 nt, Artificial Sequence
  Description of Artificial Sequence: Synthetic oligonucleotide
  Sense strand starting at position 3065 of SEQ ID NO: 1243606
uuauaugcgauccagaagu

SEQ ID NO: 1428183 - RNA, 19 nt, Artificial Sequence
  Description of Artificial Sequence: Synthetic oligonucleotide
  Antisense strand to SEQ ID NO: 1428182
acuucuggaucgcauauaa

SEQ ID NO: 1428184 - RNA, 19 nt, Artificial Sequence
  Description of Artificial Sequence: Synthetic oligonucleotide
  Sense strand starting at position 3110 of SEQ ID NO: 1243606
ggcugaacuccugaaucca

SEQ ID NO: 1428185 - RNA, 19 nt, Artificial Sequence
  Description of Artificial Sequence: Synthetic oligonucleotide
  Antisense strand to SEQ ID NO: 1428184
uggauucaggaguucagcc

SEQ ID NO: 1428186 - RNA, 19 nt, Artificial Sequence
  Description of Artificial Sequence: Synthetic oligonucleotide
  Sense strand starting at position 3306 of SEQ ID NO: 1243606
aguaacuuguuuccuagaa

SEQ ID NO: 1428187 - RNA, 19 nt, Artificial Sequence
  Description of Artificial Sequence: Synthetic oligonucleotide
  Antisense strand to SEQ ID NO: 1428186
uucuaggaaacaaguuacu

SEQ ID NO: 1428188 - RNA, 19 nt, Artificial Sequence
  Description of Artificial Sequence: Synthetic oligonucleotide
  Sense strand starting at position 3307 of SEQ ID NO: 1243606
guaacuuguuuccuagaag

SEQ ID NO: 1428189 - RNA, 19 nt, Artificial Sequence
  Description of Artificial Sequence: Synthetic oligonucleotide
  Antisense strand to SEQ ID NO: 1428188
cuucuaggaaacaaguuac

SEQ ID NO: 1428190 - RNA, 19 nt, Artificial Sequence
  Description of Artificial Sequence: Synthetic oligonucleotide
  Sense strand starting at position 3337 of SEQ ID NO: 1243606
uagguuagagcuuaugagu

SEQ ID NO: 1428191 - RNA, 19 nt, Artificial Sequence
  Description of Artificial Sequence: Synthetic oligonucleotide
  Antisense strand to SEQ ID NO: 1428190
acucauaagcucuaaccua

SEQ ID NO: 1428192 - RNA, 19 nt, Artificial Sequence
  Description of Artificial Sequence: Synthetic oligonucleotide
  Sense strand starting at position 3352 of SEQ ID NO: 1243606
gaguucuggaccuaguuga

SEQ ID NO: 1428193 - RNA, 19 nt, Artificial Sequence
  Description of Artificial Sequence: Synthetic oligonucleotide
  Antisense strand to SEQ ID NO: 1428192
ucaacuagguccagaacuc

SEQ ID NO: 1428194 - RNA, 19 nt, Artificial Sequence
  Description of Artificial Sequence: Synthetic oligonucleotide
  Sense strand starting at position 3813 of SEQ ID NO: 1243606
cgacguauuuacucuuaua

SEQ ID NO: 1428195 - RNA, 19 nt, Artificial Sequence
  Description of Artificial Sequence: Synthetic oligonucleotide
  Antisense strand to SEQ ID NO: 1428194
uauaagaguaaauacgucg

SEQ ID NO: 1428196 - RNA, 19 nt, Artificial Sequence
  Description of Artificial Sequence: Synthetic oligonucleotide
  Sense strand starting at position 3863 of SEQ ID NO: 1243606
aaacaaucccaugggaguu

SEQ ID NO: 1428197 - RNA, 19 nt, Artificial Sequence
  Description of Artificial Sequence: Synthetic oligonucleotide
  Antisense strand to SEQ ID NO: 1428196
aacucccaugggauuguuu

SEQ ID NO: 1428198 - RNA, 19 nt, Artificial Sequence
  Description of Artificial Sequence: Synthetic oligonucleotide
  Sense strand starting at position 3942 of SEQ ID NO: 1243606
agcauuuauugugucuaag

SEQ ID NO: 1428199 - RNA, 19 nt, Artificial Sequence
  Description of Artificial Sequence: Synthetic oligonucleotide
  Antisense strand to SEQ ID NO: 1428198
cuuagacacaauaaaugcu

SEQ ID NO: 1428200 - RNA, 19 nt, Artificial Sequence
  Description of Artificial Sequence: Synthetic oligonucleotide
  Sense strand starting at position 54 of SEQ ID NO: 1243607
gccagaggaugucugaaca

SEQ ID NO: 1428201 - RNA, 19 nt, Artificial Sequence
  Description of Artificial Sequence: Synthetic oligonucleotide
  Antisense strand to SEQ ID NO: 1428200
uguucagacauccucuggc

SEQ ID NO: 1428202 - RNA, 19 nt, Artificial Sequence
  Description of Artificial Sequence: Synthetic oligonucleotide
  Sense strand starting at position 116 of SEQ ID NO: 1243607
ggagaccugucucuguaga

SEQ ID NO: 1428203 - RNA, 19 nt, Artificial Sequence
  Description of Artificial Sequence: Synthetic oligonucleotide
  Antisense strand to SEQ ID NO: 1428202
ucuacagagacaggucucc

SEQ ID NO: 1428204 - RNA, 19 nt, Artificial Sequence
  Description of Artificial Sequence: Synthetic oligonucleotide
  Sense strand starting at position 118 of SEQ ID NO: 1243607
agaccugucucuguagagu

SEQ ID NO: 1428205 - RNA, 19 nt, Artificial Sequence
  Description of Artificial Sequence: Synthetic oligonucleotide
  Antisense strand to SEQ ID NO: 1428204
acucuacagagacaggucu

SEQ ID NO: 1428206 - RNA, 19 nt, Artificial Sequence
  Description of Artificial Sequence: Synthetic oligonucleotide
  Sense strand starting at position 286 of SEQ ID NO: 1243607
aaggaagugugcucaugag

SEQ ID NO: 1428207 - RNA, 19 nt, Artificial Sequence
  Description of Artificial Sequence: Synthetic oligonucleotide
  Antisense strand to SEQ ID NO: 1428206
cucaugagcacacuuccuu

SEQ ID NO: 1428208 - RNA, 19 nt, Artificial Sequence
  Description of Artificial Sequence: Synthetic oligonucleotide
  Sense strand starting at position 290 of SEQ ID NO: 1243607
aagugugcucaugaggcaa

SEQ ID NO: 1428209 - RNA, 19 nt, Artificial Sequence
  Description of Artificial Sequence: Synthetic oligonucleotide
  Antisense strand to SEQ ID NO: 1428208
uugccucaugagcacacuu

SEQ ID NO: 1428210 - RNA, 19 nt, Artificial Sequence
  Description of Artificial Sequence: Synthetic oligonucleotide
  Sense strand starting at position 341 of SEQ ID NO: 1243607
ccuguccaugcugaauaau

SEQ ID NO: 1428211 - RNA, 19 nt, Artificial Sequence
  Description of Artificial Sequence: Synthetic oligonucleotide
  Antisense strand to SEQ ID NO: 1428210
auuauucagcauggacagg

SEQ ID NO: 1428212 - RNA, 19 nt, Artificial Sequence
  Description of Artificial Sequence: Synthetic oligonucleotide
  Sense strand starting at position 344 of SEQ ID NO: 1243607
guccaugcugaauaauaca

SEQ ID NO: 1428213 - RNA, 19 nt, Artificial Sequence
  Description of Artificial Sequence: Synthetic oligonucleotide
  Antisense strand to SEQ ID NO: 1428212
uguauuauucagcauggac

SEQ ID NO: 1428214 - RNA, 19 nt, Artificial Sequence
  Description of Artificial Sequence: Synthetic oligonucleotide
  Sense strand starting at position 418 of SEQ ID NO: 1243607
cggauuaaccuuuggguca

SEQ ID NO: 1428215 - RNA, 19 nt, Artificial Sequence
  Description of Artificial Sequence: Synthetic oligonucleotide
  Antisense strand to SEQ ID NO: 1428214
ugacccaaagguuaauccg

SEQ ID NO: 1428216 - RNA, 19 nt, Artificial Sequence
  Description of Artificial Sequence: Synthetic oligonucleotide
  Sense strand starting at position 554 of SEQ ID NO: 1243607
agagcauagcuccagacuu

SEQ ID NO: 1428217 - RNA, 19 nt, Artificial Sequence
  Description of Artificial Sequence: Synthetic oligonucleotide
  Antisense strand to SEQ ID NO: 1428216
aagucuggagcuaugcucu

SEQ ID NO: 1428218 - RNA, 19 nt, Artificial Sequence
  Description of Artificial Sequence: Synthetic oligonucleotide
  Sense strand starting at position 556 of SEQ ID NO: 1243607
agcauagcuccagacuuau

SEQ ID NO: 1428219 - RNA, 19 nt, Artificial Sequence
  Description of Artificial Sequence: Synthetic oligonucleotide
  Antisense strand to SEQ ID NO: 1428218
auaagucuggagcuaugcu

SEQ ID NO: 1428220 - RNA, 19 nt, Artificial Sequence
  Description of Artificial Sequence: Synthetic oligonucleotide
  Sense strand starting at position 598 of SEQ ID NO: 1243607
gcacgaacucuuggguaac

SEQ ID NO: 1428221 - RNA, 19 nt, Artificial Sequence
  Description of Artificial Sequence: Synthetic oligonucleotide
  Antisense strand to SEQ ID NO: 1428220
guuacccaagaguucgugc

SEQ ID NO: 1428222 - RNA, 19 nt, Artificial Sequence
  Description of Artificial Sequence: Synthetic oligonucleotide
  Sense strand starting at position 654 of SEQ ID NO: 1243607
ggcauauauguacaaauac

SEQ ID NO: 1428223 - RNA, 19 nt, Artificial Sequence
  Description of Artificial Sequence: Synthetic oligonucleotide
  Antisense strand to SEQ ID NO: 1428222
guauuuguacauauaugcc

SEQ ID NO: 1428224 - RNA, 19 nt, Artificial Sequence
  Description of Artificial Sequence: Synthetic oligonucleotide
  Sense strand starting at position 784 of SEQ ID NO: 1243607
gaucacuugccucauagag

SEQ ID NO: 1428225 - RNA, 19 nt, Artificial Sequence
  Description of Artificial Sequence: Synthetic oligonucleotide
  Antisense strand to SEQ ID NO: 1428224
cucuaugaggcaagugauc

SEQ ID NO: 1428226 - RNA, 19 nt, Artificial Sequence
  Description of Artificial Sequence: Synthetic oligonucleotide
  Sense strand starting at position 792 of SEQ ID NO: 1243607
gccucauagaggcaaguaa

SEQ ID NO: 1428227 - RNA, 19 nt, Artificial Sequence
  Description of Artificial Sequence: Synthetic oligonucleotide
  Antisense strand to SEQ ID NO: 1428226
uuacuugccucuaugaggc

SEQ ID NO: 1428228 - RNA, 19 nt, Artificial Sequence
  Description of Artificial Sequence: Synthetic oligonucleotide
  Sense strand starting at position 828 of SEQ ID NO: 1243607
gaaagcuccuaggcuguau

SEQ ID NO: 1428229 - RNA, 19 nt, Artificial Sequence
  Description of Artificial Sequence: Synthetic oligonucleotide
  Antisense strand to SEQ ID NO: 1428228
auacagccuaggagcuuuc

SEQ ID NO: 1428230 - RNA, 19 nt, Artificial Sequence
  Description of Artificial Sequence: Synthetic oligonucleotide
  Sense strand starting at position 892 of SEQ ID NO: 1243607
ugaagagcagccugucuua

SEQ ID NO: 1428231 - RNA, 19 nt, Artificial Sequence
  Description of Artificial Sequence: Synthetic oligonucleotide
  Antisense strand to SEQ ID NO: 1428230
uaagacaggcugcucuuca

SEQ ID NO: 1428232 - RNA, 19 nt, Artificial Sequence
  Description of Artificial Sequence: Synthetic oligonucleotide
  Sense strand starting at position 895 of SEQ ID NO: 1243607
agagcagccugucuuagaa

SEQ ID NO: 1428233 - RNA, 19 nt, Artificial Sequence
  Description of Artificial Sequence: Synthetic oligonucleotide
  Antisense strand to SEQ ID NO: 1428232
uucuaagacaggcugcucu

SEQ ID NO: 1428234 - RNA, 19 nt, Artificial Sequence
  Description of Artificial Sequence: Synthetic oligonucleotide
  Sense strand starting at position 1203 of SEQ ID NO: 1243607
cuuucuccaucugugagaa

SEQ ID NO: 1428235 - RNA, 19 nt, Artificial Sequence
  Description of Artificial Sequence: Synthetic oligonucleotide
  Antisense strand to SEQ ID NO: 1428234
uucucacagauggagaaag

SEQ ID NO: 1428236 - RNA, 19 nt, Artificial Sequence
  Description of Artificial Sequence: Synthetic oligonucleotide
  Sense strand starting at position 1204 of SEQ ID NO: 1243607
uuucuccaucugugagaag

SEQ ID NO: 1428237 - RNA, 19 nt, Artificial Sequence
  Description of Artificial Sequence: Synthetic oligonucleotide
  Antisense strand to SEQ ID NO: 1428236
cuucucacagauggagaaa

SEQ ID NO: 1428238 - RNA, 19 nt, Artificial Sequence
  Description of Artificial Sequence: Synthetic oligonucleotide
  Sense strand starting at position 1355 of SEQ ID NO: 1243607
aggaaaccuuccuaagaag

SEQ ID NO: 1428239 - RNA, 19 nt, Artificial Sequence
  Description of Artificial Sequence: Synthetic oligonucleotide
  Antisense strand to SEQ ID NO: 1428238
cuucuuaggaagguuuccu

SEQ ID NO: 1428240 - RNA, 19 nt, Artificial Sequence
  Description of Artificial Sequence: Synthetic oligonucleotide
  Sense strand starting at position 2292 of SEQ ID NO: 1243607
gccgaugagucauugagua

SEQ ID NO: 1428241 - RNA, 19 nt, Artificial Sequence
  Description of Artificial Sequence: Synthetic oligonucleotide
  Antisense strand to SEQ ID NO: 1428240
uacucaaugacucaucggc

SEQ ID NO: 1428242 - RNA, 19 nt, Artificial Sequence
  Description of Artificial Sequence: Synthetic oligonucleotide
  Sense strand starting at position 2352 of SEQ ID NO: 1243607
aaaggaaucuuugagaagg

SEQ ID NO: 1428243 - RNA, 19 nt, Artificial Sequence
  Description of Artificial Sequence: Synthetic oligonucleotide
  Antisense strand to SEQ ID NO: 1428242
ccuucucaaagauuccuuu

SEQ ID NO: 1428244 - RNA, 19 nt, Artificial Sequence
  Description of Artificial Sequence: Synthetic oligonucleotide
  Sense strand starting at position 2354 of SEQ ID NO: 1243607
aggaaucuuugagaagguc

SEQ ID NO: 1428245 - RNA, 19 nt, Artificial Sequence
  Description of Artificial Sequence: Synthetic oligonucleotide
  Antisense strand to SEQ ID NO: 1428244
gaccuucucaaagauuccu

SEQ ID NO: 1428246 - RNA, 19 nt, Artificial Sequence
  Description of Artificial Sequence: Synthetic oligonucleotide
  Sense strand starting at position 2415 of SEQ ID NO: 1243607
aagggcuucugugcucaau

SEQ ID NO: 1428247 - RNA, 19 nt, Artificial Sequence
  Description of Artificial Sequence: Synthetic oligonucleotide
  Antisense strand to SEQ ID NO: 1428246
auugagcacagaagcccuu

SEQ ID NO: 1428248 - RNA, 19 nt, Artificial Sequence
  Description of Artificial Sequence: Synthetic oligonucleotide
  Sense strand starting at position 3072 of SEQ ID NO: 1243607
aggaauucucccuggcaaa

SEQ ID NO: 1428249 - RNA, 19 nt, Artificial Sequence
  Description of Artificial Sequence: Synthetic oligonucleotide
  Antisense strand to SEQ ID NO: 1428248
uuugccagggagaauuccu

SEQ ID NO: 1428250 - RNA, 19 nt, Artificial Sequence
  Description of Artificial Sequence: Synthetic oligonucleotide
  Sense strand starting at position 3073 of SEQ ID NO: 1243607
ggaauucucccuggcaaau

SEQ ID NO: 1428251 - RNA, 19 nt, Artificial Sequence
  Description of Artificial Sequence: Synthetic oligonucleotide
  Antisense strand to SEQ ID NO: 1428250
auuugccagggagaauucc

SEQ ID NO: 1428252 - RNA, 19 nt, Artificial Sequence
  Description of Artificial Sequence: Synthetic oligonucleotide
  Sense strand starting at position 3220 of SEQ ID NO: 1243607
ggugggagccaguaagagu

SEQ ID NO: 1428253 - RNA, 19 nt, Artificial Sequence
  Description of Artificial Sequence: Synthetic oligonucleotide
  Antisense strand to SEQ ID NO: 1428252
acucuuacuggcucccacc

SEQ ID NO: 1428254 - RNA, 19 nt, Artificial Sequence
  Description of Artificial Sequence: Synthetic oligonucleotide
  Sense strand starting at position 3292 of SEQ ID NO: 1243607
agggaagucuccuuggcua

SEQ ID NO: 1428255 - RNA, 19 nt, Artificial Sequence
  Description of Artificial Sequence: Synthetic oligonucleotide
  Antisense strand to SEQ ID NO: 1428254
uagccaaggagacuucccu

SEQ ID NO: 1428256 - RNA, 19 nt, Artificial Sequence
  Description of Artificial Sequence: Synthetic oligonucleotide
  Sense strand starting at position 3294 of SEQ ID NO: 1243607
ggaagucuccuuggcuaua

SEQ ID NO: 1428257 - RNA, 19 nt, Artificial Sequence
  Description of Artificial Sequence: Synthetic oligonucleotide
  Antisense strand to SEQ ID NO: 1428256
uauagccaaggagacuucc

SEQ ID NO: 1428258 - RNA, 19 nt, Artificial Sequence
  Description of Artificial Sequence: Synthetic oligonucleotide
  Sense strand starting at position 3304 of SEQ ID NO: 1243607
uuggcuauaggcuaucaga

SEQ ID NO: 1428259 - RNA, 19 nt, Artificial Sequence
  Description of Artificial Sequence: Synthetic oligonucleotide
  Antisense strand to SEQ ID NO: 1428258
ucugauagccuauagccaa

SEQ ID NO: 1428260 - RNA, 19 nt, Artificial Sequence
  Description of Artificial Sequence: Synthetic oligonucleotide
  Sense strand starting at position 3324 of SEQ ID NO: 1243607
ccaagaucuggcugggcau

SEQ ID NO: 1428261 - RNA, 19 nt, Artificial Sequence
  Description of Artificial Sequence: Synthetic oligonucleotide
  Antisense strand to SEQ ID NO: 1428260
augcccagccagaucuugg

SEQ ID NO: 1428262 - RNA, 19 nt, Artificial Sequence
  Description of Artificial Sequence: Synthetic oligonucleotide
  Sense strand starting at position 3566 of SEQ ID NO: 1243607
uuaugaagagucugucuuc

SEQ ID NO: 1428263 - RNA, 19 nt, Artificial Sequence
  Description of Artificial Sequence: Synthetic oligonucleotide
  Antisense strand to SEQ ID NO: 1428262
gaagacagacucuucauaa

SEQ ID NO: 1428264 - RNA, 19 nt, Artificial Sequence
  Description of Artificial Sequence: Synthetic oligonucleotide
  Sense strand starting at position 3569 of SEQ ID NO: 1243607
ugaagagucugucuucccu

SEQ ID NO: 1428265 - RNA, 19 nt, Artificial Sequence
  Description of Artificial Sequence: Synthetic oligonucleotide
  Antisense strand to SEQ ID NO: 1428264
agggaagacagacucuuca

SEQ ID NO: 1428266 - RNA, 19 nt, Artificial Sequence
  Description of Artificial Sequence: Synthetic oligonucleotide
  Sense strand starting at position 3581 of SEQ ID NO: 1243607
cuucccugcuaaucugaga

SEQ ID NO: 1428267 - RNA, 19 nt, Artificial Sequence
  Description of Artificial Sequence: Synthetic oligonucleotide
  Antisense strand to SEQ ID NO: 1428266
ucucagauuagcagggaag

SEQ ID NO: 1428268 - RNA, 19 nt, Artificial Sequence
  Description of Artificial Sequence: Synthetic oligonucleotide
  Sense strand starting at position 3662 of SEQ ID NO: 1243607
gugugaucucaauaagcuc

SEQ ID NO: 1428269 - RNA, 19 nt, Artificial Sequence
  Description of Artificial Sequence: Synthetic oligonucleotide
  Antisense strand to SEQ ID NO: 1428268
gagcuuauugagaucacac

SEQ ID NO: 1428270 - RNA, 19 nt, Artificial Sequence
  Description of Artificial Sequence: Synthetic oligonucleotide
  Sense strand starting at position 3680 of SEQ ID NO: 1243607
ccuugaugccucugggacu

SEQ ID NO: 1428271 - RNA, 19 nt, Artificial Sequence
  Description of Artificial Sequence: Synthetic oligonucleotide
  Antisense strand to SEQ ID NO: 1428270
agucccagaggcaucaagg

SEQ ID NO: 1428272 - RNA, 19 nt, Artificial Sequence
  Description of Artificial Sequence: Synthetic oligonucleotide
  Sense strand starting at position 3716 of SEQ ID NO: 1243607
uggacagggugauaucuaa

SEQ ID NO: 1428273 - RNA, 19 nt, Artificial Sequence
  Description of Artificial Sequence: Synthetic oligonucleotide
  Antisense strand to SEQ ID NO: 1428272
uuagauaucacccugucca

SEQ ID NO: 1428274 - RNA, 19 nt, Artificial Sequence
  Description of Artificial Sequence: Synthetic oligonucleotide
  Sense strand starting at position 3723 of SEQ ID NO: 1243607
ggugauaucuaagcucucu

SEQ ID NO: 1428275 - RNA, 19 nt, Artificial Sequence
  Description of Artificial Sequence: Synthetic oligonucleotide
  Antisense strand to SEQ ID NO: 1428274
agagagcuuagauaucacc

SEQ ID NO: 1428276 - RNA, 19 nt, Artificial Sequence
  Description of Artificial Sequence: Synthetic oligonucleotide
  Sense strand starting at position 3928 of SEQ ID NO: 1243607
accagauugcucugggcuu

SEQ ID NO: 1428277 - RNA, 19 nt, Artificial Sequence
  Description of Artificial Sequence: Synthetic oligonucleotide
  Antisense strand to SEQ ID NO: 1428276
aagcccagagcaaucuggu

SEQ ID NO: 1428278 - RNA, 19 nt, Artificial Sequence
  Description of Artificial Sequence: Synthetic oligonucleotide
  Sense strand starting at position 3930 of SEQ ID NO: 1243607
cagauugcucugggcuuga

SEQ ID NO: 1428279 - RNA, 19 nt, Artificial Sequence
  Description of Artificial Sequence: Synthetic oligonucleotide
  Antisense strand to SEQ ID NO: 1428278
ucaagcccagagcaaucug

SEQ ID NO: 1428280 - RNA, 19 nt, Artificial Sequence
  Description of Artificial Sequence: Synthetic oligonucleotide
  Sense strand starting at position 646 of SEQ ID NO: 1243608
cucagagacugugaguaaa

SEQ ID NO: 1428281 - RNA, 19 nt, Artificial Sequence
  Description of Artificial Sequence: Synthetic oligonucleotide
  Antisense strand to SEQ ID NO: 1428280
uuuacucacagucucugag

SEQ ID NO: 1428282 - RNA, 19 nt, Artificial Sequence
  Description of Artificial Sequence: Synthetic oligonucleotide
  Sense strand starting at position 648 of SEQ ID NO: 1243608
cagagacugugaguaaaca

SEQ ID NO: 1428283 - RNA, 19 nt, Artificial Sequence
  Description of Artificial Sequence: Synthetic oligonucleotide
  Antisense strand to SEQ ID NO: 1428282
uguuuacucacagucucug

SEQ ID NO: 1428284 - RNA, 19 nt, Artificial Sequence
  Description of Artificial Sequence: Synthetic oligonucleotide
  Sense strand starting at position 659 of SEQ ID NO: 1243608
aguaaacauucugggcaga

SEQ ID NO: 1428285 - RNA, 19 nt, Artificial Sequence
  Description of Artificial Sequence: Synthetic oligonucleotide
  Antisense strand to SEQ ID NO: 1428284
ucugcccagaauguuuacu

SEQ ID NO: 1428286 - RNA, 19 nt, Artificial Sequence
  Description of Artificial Sequence: Synthetic oligonucleotide
  Sense strand starting at position 660 of SEQ ID NO: 1243608
guaaacauucugggcagau

SEQ ID NO: 1428287 - RNA, 19 nt, Artificial Sequence
  Description of Artificial Sequence: Synthetic oligonucleotide
  Antisense strand to SEQ ID NO: 1428286
aucugcccagaauguuuac

SEQ ID NO: 1428288 - RNA, 19 nt, Artificial Sequence
  Description of Artificial Sequence: Synthetic oligonucleotide
  Sense strand starting at position 672 of SEQ ID NO: 1243608
ggcagauaaucguuugcaa

SEQ ID NO: 1428289 - RNA, 19 nt, Artificial Sequence
  Description of Artificial Sequence: Synthetic oligonucleotide
  Antisense strand to SEQ ID NO: 1428288
uugcaaacgauuaucugcc

SEQ ID NO: 1428290 - RNA, 19 nt, Artificial Sequence
  Description of Artificial Sequence: Synthetic oligonucleotide
  Sense strand starting at position 674 of SEQ ID NO: 1243608
cagauaaucguuugcaauu

SEQ ID NO: 1428291 - RNA, 19 nt, Artificial Sequence
  Description of Artificial Sequence: Synthetic oligonucleotide
  Antisense strand to SEQ ID NO: 1428290
aauugcaaacgauuaucug

SEQ ID NO: 1428292 - RNA, 19 nt, Artificial Sequence
  Description of Artificial Sequence: Synthetic oligonucleotide
  Sense strand starting at position 675 of SEQ ID NO: 1243608
agauaaucguuugcaauug

SEQ ID NO: 1428293 - RNA, 19 nt, Artificial Sequence
  Description of Artificial Sequence: Synthetic oligonucleotide
  Antisense strand to SEQ ID NO: 1428292
caauugcaaacgauuaucu

SEQ ID NO: 1428294 - RNA, 19 nt, Artificial Sequence
  Description of Artificial Sequence: Synthetic oligonucleotide
  Sense strand starting at position 683 of SEQ ID NO: 1243608
guuugcaauugcuuccaga

SEQ ID NO: 1428295 - RNA, 19 nt, Artificial Sequence
  Description of Artificial Sequence: Synthetic oligonucleotide
  Antisense strand to SEQ ID NO: 1428294
ucuggaagcaauugcaaac

SEQ ID NO: 1428296 - RNA, 19 nt, Artificial Sequence
  Description of Artificial Sequence: Synthetic oligonucleotide
  Sense strand starting at position 704 of SEQ ID NO: 1243608
gcucuuugcugagcuguua

SEQ ID NO: 1428297 - RNA, 19 nt, Artificial Sequence
  Description of Artificial Sequence: Synthetic oligonucleotide
  Antisense strand to SEQ ID NO: 1428296
uaacagcucagcaaagagc

SEQ ID NO: 1428298 - RNA, 19 nt, Artificial Sequence
  Description of Artificial Sequence: Synthetic oligonucleotide
  Sense strand starting at position 716 of SEQ ID NO: 1243608
gcuguuaagcugugggcua

SEQ ID NO: 1428299 - RNA, 19 nt, Artificial Sequence
  Description of Artificial Sequence: Synthetic oligonucleotide
  Antisense strand to SEQ ID NO: 1428298
uagcccacagcuuaacagc

SEQ ID NO: 1428300 - RNA, 19 nt, Artificial Sequence
  Description of Artificial Sequence: Synthetic oligonucleotide
  Sense strand starting at position 728 of SEQ ID NO: 1243608
ugggcuaagugguaaaugu

SEQ ID NO: 1428301 - RNA, 19 nt, Artificial Sequence
  Description of Artificial Sequence: Synthetic oligonucleotide
  Antisense strand to SEQ ID NO: 1428300
acauuuaccacuuagccca

SEQ ID NO: 1428302 - RNA, 19 nt, Artificial Sequence
  Description of Artificial Sequence: Synthetic oligonucleotide
  Sense strand starting at position 735 of SEQ ID NO: 1243608
agugguaaaugucagguau

SEQ ID NO: 1428303 - RNA, 19 nt, Artificial Sequence
  Description of Artificial Sequence: Synthetic oligonucleotide
  Antisense strand to SEQ ID NO: 1428302
auaccugacauuuaccacu

SEQ ID NO: 1428304 - RNA, 19 nt, Artificial Sequence
  Description of Artificial Sequence: Synthetic oligonucleotide
  Sense strand starting at position 739 of SEQ ID NO: 1243608
guaaaugucagguaucucu

SEQ ID NO: 1428305 - RNA, 19 nt, Artificial Sequence
  Description of Artificial Sequence: Synthetic oligonucleotide
  Antisense strand to SEQ ID NO: 1428304
agagauaccugacauuuac

SEQ ID NO: 1428306 - RNA, 19 nt, Artificial Sequence
  Description of Artificial Sequence: Synthetic oligonucleotide
  Sense strand starting at position 773 of SEQ ID NO: 1243608
gugcucagauugcuaggau

SEQ ID NO: 1428307 - RNA, 19 nt, Artificial Sequence
  Description of Artificial Sequence: Synthetic oligonucleotide
  Antisense strand to SEQ ID NO: 1428306
auccuagcaaucugagcac

SEQ ID NO: 1428308 - RNA, 19 nt, Artificial Sequence
  Description of Artificial Sequence: Synthetic oligonucleotide
  Sense strand starting at position 774 of SEQ ID NO: 1243608
ugcucagauugcuaggaua

SEQ ID NO: 1428309 - RNA, 19 nt, Artificial Sequence
  Description of Artificial Sequence: Synthetic oligonucleotide
  Antisense strand to SEQ ID NO: 1428308
uauccuagcaaucugagca

SEQ ID NO: 1428310 - RNA, 19 nt, Artificial Sequence
  Description of Artificial Sequence: Synthetic oligonucleotide
  Sense strand starting at position 776 of SEQ ID NO: 1243608
cucagauugcuaggauaca

SEQ ID NO: 1428311 - RNA, 19 nt, Artificial Sequence
  Description of Artificial Sequence: Synthetic oligonucleotide
  Antisense strand to SEQ ID NO: 1428310
uguauccuagcaaucugag

SEQ ID NO: 1428312 - RNA, 19 nt, Artificial Sequence
  Description of Artificial Sequence: Synthetic oligonucleotide
  Sense strand starting at position 777 of SEQ ID NO: 1243608
ucagauugcuaggauacag

SEQ ID NO: 1428313 - RNA, 19 nt, Artificial Sequence
  Description of Artificial Sequence: Synthetic oligonucleotide
  Antisense strand to SEQ ID NO: 1428312
cuguauccuagcaaucuga

SEQ ID NO: 1428314 - RNA, 19 nt, Artificial Sequence
  Description of Artificial Sequence: Synthetic oligonucleotide
  Sense strand starting at position 859 of SEQ ID NO: 1243608
agcugaguccaucgaugac

SEQ ID NO: 1428315 - RNA, 19 nt, Artificial Sequence
  Description of Artificial Sequence: Synthetic oligonucleotide
  Antisense strand to SEQ ID NO: 1428314
gucaucgauggacucagcu

SEQ ID NO: 1428316 - RNA, 19 nt, Artificial Sequence
  Description of Artificial Sequence: Synthetic oligonucleotide
  Sense strand starting at position 865 of SEQ ID NO: 1243608
guccaucgaugaccuuuaa

SEQ ID NO: 1428317 - RNA, 19 nt, Artificial Sequence
  Description of Artificial Sequence: Synthetic oligonucleotide
  Antisense strand to SEQ ID NO: 1428316
uuaaaggucaucgauggac

SEQ ID NO: 1428318 - RNA, 19 nt, Artificial Sequence
  Description of Artificial Sequence: Synthetic oligonucleotide
  Sense strand starting at position 893 of SEQ ID NO: 1243608
cccgguucugucuagauua

SEQ ID NO: 1428319 - RNA, 19 nt, Artificial Sequence
  Description of Artificial Sequence: Synthetic oligonucleotide
  Antisense strand to SEQ ID NO: 1428318
uaaucuagacagaaccggg

SEQ ID NO: 1428320 - RNA, 19 nt, Artificial Sequence
  Description of Artificial Sequence: Synthetic oligonucleotide
  Sense strand starting at position 895 of SEQ ID NO: 1243608
cgguucugucuagauuaca

SEQ ID NO: 1428321 - RNA, 19 nt, Artificial Sequence
  Description of Artificial Sequence: Synthetic oligonucleotide
  Antisense strand to SEQ ID NO: 1428320
uguaaucuagacagaaccg

SEQ ID NO: 1428322 - RNA, 19 nt, Artificial Sequence
  Description of Artificial Sequence: Synthetic oligonucleotide
  Sense strand starting at position 917 of SEQ ID NO: 1243608
uuuggaaggcuuuggaaga

SEQ ID NO: 1428323 - RNA, 19 nt, Artificial Sequence
  Description of Artificial Sequence: Synthetic oligonucleotide
  Antisense strand to SEQ ID NO: 1428322
ucuuccaaagccuuccaaa

SEQ ID NO: 1428324 - RNA, 19 nt, Artificial Sequence
  Description of Artificial Sequence: Synthetic oligonucleotide
  Sense strand starting at position 918 of SEQ ID NO: 1243608
uuggaaggcuuuggaagau

SEQ ID NO: 1428325 - RNA, 19 nt, Artificial Sequence
  Description of Artificial Sequence: Synthetic oligonucleotide
  Antisense strand to SEQ ID NO: 1428324
aucuuccaaagccuuccaa

SEQ ID NO: 1428326 - RNA, 19 nt, Artificial Sequence
  Description of Artificial Sequence: Synthetic oligonucleotide
  Sense strand starting at position 927 of SEQ ID NO: 1243608
uuuggaagauguguucaga

SEQ ID NO: 1428327 - RNA, 19 nt, Artificial Sequence
  Description of Artificial Sequence: Synthetic oligonucleotide
  Antisense strand to SEQ ID NO: 1428326
ucugaacacaucuuccaaa

SEQ ID NO: 1428328 - RNA, 19 nt, Artificial Sequence
  Description of Artificial Sequence: Synthetic oligonucleotide
  Sense strand starting at position 973 of SEQ ID NO: 1243608
guuccaaugcuaugcauag

SEQ ID NO: 1428329 - RNA, 19 nt, Artificial Sequence
  Description of Artificial Sequence: Synthetic oligonucleotide
  Antisense strand to SEQ ID NO: 1428328
cuaugcauagcauuggaac

SEQ ID NO: 1428330 - RNA, 19 nt, Artificial Sequence
  Description of Artificial Sequence: Synthetic oligonucleotide
  Sense strand starting at position 984 of SEQ ID NO: 1243608
augcauagcuguuucugau

SEQ ID NO: 1428331 - RNA, 19 nt, Artificial Sequence
  Description of Artificial Sequence: Synthetic oligonucleotide
  Antisense strand to SEQ ID NO: 1428330
aucagaaacagcuaugcau

SEQ ID NO: 1428332 - RNA, 19 nt, Artificial Sequence
  Description of Artificial Sequence: Synthetic oligonucleotide
  Sense strand starting at position 988 of SEQ ID NO: 1243608
auagcuguuucugauucuu

SEQ ID NO: 1428333 - RNA, 19 nt, Artificial Sequence
  Description of Artificial Sequence: Synthetic oligonucleotide
  Antisense strand to SEQ ID NO: 1428332
aagaaucagaaacagcuau

SEQ ID NO: 1428334 - RNA, 19 nt, Artificial Sequence
  Description of Artificial Sequence: Synthetic oligonucleotide
  Sense strand starting at position 990 of SEQ ID NO: 1243608
agcuguuucugauucuuag

SEQ ID NO: 1428335 - RNA, 19 nt, Artificial Sequence
  Description of Artificial Sequence: Synthetic oligonucleotide
  Antisense strand to SEQ ID NO: 1428334
cuaagaaucagaaacagcu

SEQ ID NO: 1428336 - RNA, 19 nt, Artificial Sequence
  Description of Artificial Sequence: Synthetic oligonucleotide
  Sense strand starting at position 1369 of SEQ ID NO: 1243608
ggaagaugaccggguagua

SEQ ID NO: 1428337 - RNA, 19 nt, Artificial Sequence
  Description of Artificial Sequence: Synthetic oligonucleotide
  Antisense strand to SEQ ID NO: 1428336
uacuacccggucaucuucc

SEQ ID NO: 1428338 - RNA, 19 nt, Artificial Sequence
  Description of Artificial Sequence: Synthetic oligonucleotide
  Sense strand starting at position 2352 of SEQ ID NO: 1243608
cccucagaggccgaugaaa

SEQ ID NO: 1428339 - RNA, 19 nt, Artificial Sequence
  Description of Artificial Sequence: Synthetic oligonucleotide
  Antisense strand to SEQ ID NO: 1428338
uuucaucggccucugaggg

SEQ ID NO: 1428340 - RNA, 19 nt, Artificial Sequence
  Description of Artificial Sequence: Synthetic oligonucleotide
  Sense strand starting at position 2707 of SEQ ID NO: 1243608
ccgagagucagucggagaa

SEQ ID NO: 1428341 - RNA, 19 nt, Artificial Sequence
  Description of Artificial Sequence: Synthetic oligonucleotide
  Antisense strand to SEQ ID NO: 1428340
uucuccgacugacucucgg

SEQ ID NO: 1428342 - RNA, 19 nt, Artificial Sequence
  Description of Artificial Sequence: Synthetic oligonucleotide
  Sense strand starting at position 2708 of SEQ ID NO: 1243608
cgagagucagucggagaaa

SEQ ID NO: 1428343 - RNA, 19 nt, Artificial Sequence
  Description of Artificial Sequence: Synthetic oligonucleotide
  Antisense strand to SEQ ID NO: 1428342
uuucuccgacugacucucg

SEQ ID NO: 1428344 - RNA, 19 nt, Artificial Sequence
  Description of Artificial Sequence: Synthetic oligonucleotide
  Sense strand starting at position 2831 of SEQ ID NO: 1243608
guuuccaagcuuugggaua

SEQ ID NO: 1428345 - RNA, 19 nt, Artificial Sequence
  Description of Artificial Sequence: Synthetic oligonucleotide
  Antisense strand to SEQ ID NO: 1428344
uaucccaaagcuuggaaac

SEQ ID NO: 1428346 - RNA, 19 nt, Artificial Sequence
  Description of Artificial Sequence: Synthetic oligonucleotide
  Sense strand starting at position 2836 of SEQ ID NO: 1243608
caagcuuugggauaggcau

SEQ ID NO: 1428347 - RNA, 19 nt, Artificial Sequence
  Description of Artificial Sequence: Synthetic oligonucleotide
  Antisense strand to SEQ ID NO: 1428346
augccuaucccaaagcuug

SEQ ID NO: 1428348 - RNA, 19 nt, Artificial Sequence
  Description of Artificial Sequence: Synthetic oligonucleotide
  Sense strand starting at position 2986 of SEQ ID NO: 1243608
cgaccaaucucuuucuaga

SEQ ID NO: 1428349 - RNA, 19 nt, Artificial Sequence
  Description of Artificial Sequence: Synthetic oligonucleotide
  Antisense strand to SEQ ID NO: 1428348
ucuagaaagagauuggucg

SEQ ID NO: 1428350 - RNA, 19 nt, Artificial Sequence
  Description of Artificial Sequence: Synthetic oligonucleotide
  Sense strand starting at position 3250 of SEQ ID NO: 1243608
gcaggucacaccgacaaau

SEQ ID NO: 1428351 - RNA, 19 nt, Artificial Sequence
  Description of Artificial Sequence: Synthetic oligonucleotide
  Antisense strand to SEQ ID NO: 1428350
auuugucggugugaccugc

SEQ ID NO: 1428352 - RNA, 19 nt, Artificial Sequence
  Description of Artificial Sequence: Synthetic oligonucleotide
  Sense strand starting at position 3409 of SEQ ID NO: 1243608
gggaccugcugagacgaau

SEQ ID NO: 1428353 - RNA, 19 nt, Artificial Sequence
  Description of Artificial Sequence: Synthetic oligonucleotide
  Antisense strand to SEQ ID NO: 1428352
auucgucucagcagguccc

SEQ ID NO: 1428354 - RNA, 19 nt, Artificial Sequence
  Description of Artificial Sequence: Synthetic oligonucleotide
  Sense strand starting at position 3845 of SEQ ID NO: 1243608
gcucaaagcgcuuugccaa

SEQ ID NO: 1428355 - RNA, 19 nt, Artificial Sequence
  Description of Artificial Sequence: Synthetic oligonucleotide
  Antisense strand to SEQ ID NO: 1428354
uuggcaaagcgcuuugagc

SEQ ID NO: 1428356 - RNA, 19 nt, Artificial Sequence
  Description of Artificial Sequence: Synthetic oligonucleotide
  Sense strand starting at position 3846 of SEQ ID NO: 1243608
cucaaagcgcuuugccaaa

SEQ ID NO: 1428357 - RNA, 19 nt, Artificial Sequence
  Description of Artificial Sequence: Synthetic oligonucleotide
  Antisense strand to SEQ ID NO: 1428356
uuuggcaaagcgcuuugag

SEQ ID NO: 1428358 - RNA, 19 nt, Artificial Sequence
  Description of Artificial Sequence: Synthetic oligonucleotide
  Sense strand starting at position 3863 of SEQ ID NO: 1243608
aaaguucguccuggaagga

SEQ ID NO: 1428359 - RNA, 19 nt, Artificial Sequence
  Description of Artificial Sequence: Synthetic oligonucleotide
  Antisense strand to SEQ ID NO: 1428358
uccuuccaggacgaacuuu

SEQ ID NO: 1428360 - RNA, 19 nt, Artificial Sequence
  Description of Artificial Sequence: Synthetic oligonucleotide
  Sense strand starting at position 200 of SEQ ID NO: 1243609
agugaagcuacgugagcua

SEQ ID NO: 1428361 - RNA, 19 nt, Artificial Sequence
  Description of Artificial Sequence: Synthetic oligonucleotide
  Antisense strand to SEQ ID NO: 1428360
uagcucacguagcuucacu

SEQ ID NO: 1428362 - RNA, 19 nt, Artificial Sequence
  Description of Artificial Sequence: Synthetic oligonucleotide
  Sense strand starting at position 203 of SEQ ID NO: 1243609
gaagcuacgugagcuauga

SEQ ID NO: 1428363 - RNA, 19 nt, Artificial Sequence
  Description of Artificial Sequence: Synthetic oligonucleotide
  Antisense strand to SEQ ID NO: 1428362
ucauagcucacguagcuuc

SEQ ID NO: 1428364 - RNA, 19 nt, Artificial Sequence
  Description of Artificial Sequence: Synthetic oligonucleotide
  Sense strand starting at position 585 of SEQ ID NO: 1243609
ggagcuguguggccuuaga

SEQ ID NO: 1428365 - RNA, 19 nt, Artificial Sequence
  Description of Artificial Sequence: Synthetic oligonucleotide
  Antisense strand to SEQ ID NO: 1428364
ucuaaggccacacagcucc

SEQ ID NO: 1428366 - RNA, 19 nt, Artificial Sequence
  Description of Artificial Sequence: Synthetic oligonucleotide
  Sense strand starting at position 621 of SEQ ID NO: 1243609
cugagcuacuguuuccaca

SEQ ID NO: 1428367 - RNA, 19 nt, Artificial Sequence
  Description of Artificial Sequence: Synthetic oligonucleotide
  Antisense strand to SEQ ID NO: 1428366
uguggaaacaguagcucag

SEQ ID NO: 1428368 - RNA, 19 nt, Artificial Sequence
  Description of Artificial Sequence: Synthetic oligonucleotide
  Sense strand starting at position 673 of SEQ ID NO: 1243609
aagguaguuguacagauua

SEQ ID NO: 1428369 - RNA, 19 nt, Artificial Sequence
  Description of Artificial Sequence: Synthetic oligonucleotide
  Antisense strand to SEQ ID NO: 1428368
uaaucuguacaacuaccuu

SEQ ID NO: 1428370 - RNA, 19 nt, Artificial Sequence
  Description of Artificial Sequence: Synthetic oligonucleotide
  Sense strand starting at position 675 of SEQ ID NO: 1243609
gguaguuguacagauuaau

SEQ ID NO: 1428371 - RNA, 19 nt, Artificial Sequence
  Description of Artificial Sequence: Synthetic oligonucleotide
  Antisense strand to SEQ ID NO: 1428370
auuaaucuguacaacuacc

SEQ ID NO: 1428372 - RNA, 19 nt, Artificial Sequence
  Description of Artificial Sequence: Synthetic oligonucleotide
  Sense strand starting at position 702 of SEQ ID NO: 1243609
agaagugauuuccaucaug

SEQ ID NO: 1428373 - RNA, 19 nt, Artificial Sequence
  Description of Artificial Sequence: Synthetic oligonucleotide
  Antisense strand to SEQ ID NO: 1428372
caugauggaaaucacuucu

SEQ ID NO: 1428374 - RNA, 19 nt, Artificial Sequence
  Description of Artificial Sequence: Synthetic oligonucleotide
  Sense strand starting at position 751 of SEQ ID NO: 1243609
ccaggaaucuauguucuca

SEQ ID NO: 1428375 - RNA, 19 nt, Artificial Sequence
  Description of Artificial Sequence: Synthetic oligonucleotide
  Antisense strand to SEQ ID NO: 1428374
ugagaacauagauuccugg

SEQ ID NO: 1428376 - RNA, 19 nt, Artificial Sequence
  Description of Artificial Sequence: Synthetic oligonucleotide
  Sense strand starting at position 817 of SEQ ID NO: 1243609
cccuaucuguugcuagaag

SEQ ID NO: 1428377 - RNA, 19 nt, Artificial Sequence
  Description of Artificial Sequence: Synthetic oligonucleotide
  Antisense strand to SEQ ID NO: 1428376
cuucuagcaacagauaggg

SEQ ID NO: 1428378 - RNA, 19 nt, Artificial Sequence
  Description of Artificial Sequence: Synthetic oligonucleotide
  Sense strand starting at position 835 of SEQ ID NO: 1243609
gccugcucccagcaguuau

SEQ ID NO: 1428379 - RNA, 19 nt, Artificial Sequence
  Description of Artificial Sequence: Synthetic oligonucleotide
  Antisense strand to SEQ ID NO: 1428378
auaacugcugggagcaggc

SEQ ID NO: 1428380 - RNA, 19 nt, Artificial Sequence
  Description of Artificial Sequence: Synthetic oligonucleotide
  Sense strand starting at position 988 of SEQ ID NO: 1243609
uugggaaguucuucugaag

SEQ ID NO: 1428381 - RNA, 19 nt, Artificial Sequence
  Description of Artificial Sequence: Synthetic oligonucleotide
  Antisense strand to SEQ ID NO: 1428380
cuucagaagaacuucccaa

SEQ ID NO: 1428382 - RNA, 19 nt, Artificial Sequence
  Description of Artificial Sequence: Synthetic oligonucleotide
  Sense strand starting at position 1030 of SEQ ID NO: 1243609
auagaaugaucgccagcau

SEQ ID NO: 1428383 - RNA, 19 nt, Artificial Sequence
  Description of Artificial Sequence: Synthetic oligonucleotide
  Antisense strand to SEQ ID NO: 1428382
augcuggcgaucauucuau

SEQ ID NO: 1428384 - RNA, 19 nt, Artificial Sequence
  Description of Artificial Sequence: Synthetic oligonucleotide
  Sense strand starting at position 1031 of SEQ ID NO: 1243609
uagaaugaucgccagcauc

SEQ ID NO: 1428385 - RNA, 19 nt, Artificial Sequence
  Description of Artificial Sequence: Synthetic oligonucleotide
  Antisense strand to SEQ ID NO: 1428384
gaugcuggcgaucauucua

SEQ ID NO: 1428386 - RNA, 19 nt, Artificial Sequence
  Description of Artificial Sequence: Synthetic oligonucleotide
  Sense strand starting at position 1075 of SEQ ID NO: 1243609
ucuggauugacccguggga

SEQ ID NO: 1428387 - RNA, 19 nt, Artificial Sequence
  Description of Artificial Sequence: Synthetic oligonucleotide
  Antisense strand to SEQ ID NO: 1428386
ucccacgggucaauccaga

SEQ ID NO: 1428388 - RNA, 19 nt, Artificial Sequence
  Description of Artificial Sequence: Synthetic oligonucleotide
  Sense strand starting at position 1077 of SEQ ID NO: 1243609
uggauugacccgugggaac

SEQ ID NO: 1428389 - RNA, 19 nt, Artificial Sequence
  Description of Artificial Sequence: Synthetic oligonucleotide
  Antisense strand to SEQ ID NO: 1428388
guucccacgggucaaucca

SEQ ID NO: 1428390 - RNA, 19 nt, Artificial Sequence
  Description of Artificial Sequence: Synthetic oligonucleotide
  Sense strand starting at position 2206 of SEQ ID NO: 1243609
gaugaaauugaccaagcgu

SEQ ID NO: 1428391 - RNA, 19 nt, Artificial Sequence
  Description of Artificial Sequence: Synthetic oligonucleotide
  Antisense strand to SEQ ID NO: 1428390
acgcuuggucaauuucauc

SEQ ID NO: 1428392 - RNA, 19 nt, Artificial Sequence
  Description of Artificial Sequence: Synthetic oligonucleotide
  Sense strand starting at position 2221 of SEQ ID NO: 1243609
gcguaaugugagggacuca

SEQ ID NO: 1428393 - RNA, 19 nt, Artificial Sequence
  Description of Artificial Sequence: Synthetic oligonucleotide
  Antisense strand to SEQ ID NO: 1428392
ugagucccucacauuacgc

SEQ ID NO: 1428394 - RNA, 19 nt, Artificial Sequence
  Description of Artificial Sequence: Synthetic oligonucleotide
  Sense strand starting at position 2345 of SEQ ID NO: 1243609
ggagguaugggcugugguu

SEQ ID NO: 1428395 - RNA, 19 nt, Artificial Sequence
  Description of Artificial Sequence: Synthetic oligonucleotide
  Antisense strand to SEQ ID NO: 1428394
aaccacagcccauaccucc

SEQ ID NO: 1428396 - RNA, 19 nt, Artificial Sequence
  Description of Artificial Sequence: Synthetic oligonucleotide
  Sense strand starting at position 2398 of SEQ ID NO: 1243609
ccaggauccuguucugauu

SEQ ID NO: 1428397 - RNA, 19 nt, Artificial Sequence
  Description of Artificial Sequence: Synthetic oligonucleotide
  Antisense strand to SEQ ID NO: 1428396
aaucagaacaggauccugg

SEQ ID NO: 1428398 - RNA, 19 nt, Artificial Sequence
  Description of Artificial Sequence: Synthetic oligonucleotide
  Sense strand starting at position 2556 of SEQ ID NO: 1243609
ugaccauauuggucccuua

SEQ ID NO: 1428399 - RNA, 19 nt, Artificial Sequence
  Description of Artificial Sequence: Synthetic oligonucleotide
  Antisense strand to SEQ ID NO: 1428398
uaagggaccaauaugguca

SEQ ID NO: 1428400 - RNA, 19 nt, Artificial Sequence
  Description of Artificial Sequence: Synthetic oligonucleotide
  Sense strand starting at position 2601 of SEQ ID NO: 1243609
gucauuggaugggugucaa

SEQ ID NO: 1428401 - RNA, 19 nt, Artificial Sequence
  Description of Artificial Sequence: Synthetic oligonucleotide
  Antisense strand to SEQ ID NO: 1428400
uugacacccauccaaugac

SEQ ID NO: 1428402 - RNA, 19 nt, Artificial Sequence
  Description of Artificial Sequence: Synthetic oligonucleotide
  Sense strand starting at position 2628 of SEQ ID NO: 1243609
ggagcucaaugucuguuaa

SEQ ID NO: 1428403 - RNA, 19 nt, Artificial Sequence
  Description of Artificial Sequence: Synthetic oligonucleotide
  Antisense strand to SEQ ID NO: 1428402
uuaacagacauugagcucc

SEQ ID NO: 1428404 - RNA, 19 nt, Artificial Sequence
  Description of Artificial Sequence: Synthetic oligonucleotide
  Sense strand starting at position 2629 of SEQ ID NO: 1243609
gagcucaaugucuguuaaa

SEQ ID NO: 1428405 - RNA, 19 nt, Artificial Sequence
  Description of Artificial Sequence: Synthetic oligonucleotide
  Antisense strand to SEQ ID NO: 1428404
uuuaacagacauugagcuc

SEQ ID NO: 1428406 - RNA, 19 nt, Artificial Sequence
  Description of Artificial Sequence: Synthetic oligonucleotide
  Sense strand starting at position 2630 of SEQ ID NO: 1243609
agcucaaugucuguuaaau

SEQ ID NO: 1428407 - RNA, 19 nt, Artificial Sequence
  Description of Artificial Sequence: Synthetic oligonucleotide
  Antisense strand to SEQ ID NO: 1428406
auuuaacagacauugagcu

SEQ ID NO: 1428408 - RNA, 19 nt, Artificial Sequence
  Description of Artificial Sequence: Synthetic oligonucleotide
  Sense strand starting at position 2700 of SEQ ID NO: 1243609
uggguucugugcucaggaa

SEQ ID NO: 1428409 - RNA, 19 nt, Artificial Sequence
  Description of Artificial Sequence: Synthetic oligonucleotide
  Antisense strand to SEQ ID NO: 1428408
uuccugagcacagaaccca

SEQ ID NO: 1428410 - RNA, 19 nt, Artificial Sequence
  Description of Artificial Sequence: Synthetic oligonucleotide
  Sense strand starting at position 2842 of SEQ ID NO: 1243609
guggaugaagagugagcua

SEQ ID NO: 1428411 - RNA, 19 nt, Artificial Sequence
  Description of Artificial Sequence: Synthetic oligonucleotide
  Antisense strand to SEQ ID NO: 1428410
uagcucacucuucauccac

SEQ ID NO: 1428412 - RNA, 19 nt, Artificial Sequence
  Description of Artificial Sequence: Synthetic oligonucleotide
  Sense strand starting at position 2906 of SEQ ID NO: 1243609
aaagcaucuugguuaagga

SEQ ID NO: 1428413 - RNA, 19 nt, Artificial Sequence
  Description of Artificial Sequence: Synthetic oligonucleotide
  Antisense strand to SEQ ID NO: 1428412
uccuuaaccaagaugcuuu

SEQ ID NO: 1428414 - RNA, 19 nt, Artificial Sequence
  Description of Artificial Sequence: Synthetic oligonucleotide
  Sense strand starting at position 3158 of SEQ ID NO: 1243609
gggagaaugucugucucuc

SEQ ID NO: 1428415 - RNA, 19 nt, Artificial Sequence
  Description of Artificial Sequence: Synthetic oligonucleotide
  Antisense strand to SEQ ID NO: 1428414
gagagacagacauucuccc

SEQ ID NO: 1428416 - RNA, 19 nt, Artificial Sequence
  Description of Artificial Sequence: Synthetic oligonucleotide
  Sense strand starting at position 3211 of SEQ ID NO: 1243609
gggugaugggcuuagaacu

SEQ ID NO: 1428417 - RNA, 19 nt, Artificial Sequence
  Description of Artificial Sequence: Synthetic oligonucleotide
  Antisense strand to SEQ ID NO: 1428416
aguucuaagcccaucaccc

SEQ ID NO: 1428418 - RNA, 19 nt, Artificial Sequence
  Description of Artificial Sequence: Synthetic oligonucleotide
  Sense strand starting at position 3219 of SEQ ID NO: 1243609
ggcuuagaacuuugagccu

SEQ ID NO: 1428419 - RNA, 19 nt, Artificial Sequence
  Description of Artificial Sequence: Synthetic oligonucleotide
  Antisense strand to SEQ ID NO: 1428418
aggcucaaaguucuaagcc

SEQ ID NO: 1428420 - RNA, 19 nt, Artificial Sequence
  Description of Artificial Sequence: Synthetic oligonucleotide
  Sense strand starting at position 3236 of SEQ ID NO: 1243609
cuaugaucagcuuaggcau

SEQ ID NO: 1428421 - RNA, 19 nt, Artificial Sequence
  Description of Artificial Sequence: Synthetic oligonucleotide
  Antisense strand to SEQ ID NO: 1428420
augccuaagcugaucauag

SEQ ID NO: 1428422 - RNA, 19 nt, Artificial Sequence
  Description of Artificial Sequence: Synthetic oligonucleotide
  Sense strand starting at position 3243 of SEQ ID NO: 1243609
cagcuuaggcaucagagau

SEQ ID NO: 1428423 - RNA, 19 nt, Artificial Sequence
  Description of Artificial Sequence: Synthetic oligonucleotide
  Antisense strand to SEQ ID NO: 1428422
aucucugaugccuaagcug

SEQ ID NO: 1428424 - RNA, 19 nt, Artificial Sequence
  Description of Artificial Sequence: Synthetic oligonucleotide
  Sense strand starting at position 3273 of SEQ ID NO: 1243609
ggccaucugcuuuaucuga

SEQ ID NO: 1428425 - RNA, 19 nt, Artificial Sequence
  Description of Artificial Sequence: Synthetic oligonucleotide
  Antisense strand to SEQ ID NO: 1428424
ucagauaaagcagauggcc

SEQ ID NO: 1428426 - RNA, 19 nt, Artificial Sequence
  Description of Artificial Sequence: Synthetic oligonucleotide
  Sense strand starting at position 3459 of SEQ ID NO: 1243609
cugauaacccugcagugau

SEQ ID NO: 1428427 - RNA, 19 nt, Artificial Sequence
  Description of Artificial Sequence: Synthetic oligonucleotide
  Antisense strand to SEQ ID NO: 1428426
aucacugcaggguuaucag

SEQ ID NO: 1428428 - RNA, 19 nt, Artificial Sequence
  Description of Artificial Sequence: Synthetic oligonucleotide
  Sense strand starting at position 3462 of SEQ ID NO: 1243609
auaacccugcagugauaau

SEQ ID NO: 1428429 - RNA, 19 nt, Artificial Sequence
  Description of Artificial Sequence: Synthetic oligonucleotide
  Antisense strand to SEQ ID NO: 1428428
auuaucacugcaggguuau

SEQ ID NO: 1428430 - RNA, 19 nt, Artificial Sequence
  Description of Artificial Sequence: Synthetic oligonucleotide
  Sense strand starting at position 3485 of SEQ ID NO: 1243609
acaauagcauuauuaguga

SEQ ID NO: 1428431 - RNA, 19 nt, Artificial Sequence
  Description of Artificial Sequence: Synthetic oligonucleotide
  Antisense strand to SEQ ID NO: 1428430
ucacuaauaaugcuauugu

SEQ ID NO: 1428432 - RNA, 19 nt, Artificial Sequence
  Description of Artificial Sequence: Synthetic oligonucleotide
  Sense strand starting at position 3527 of SEQ ID NO: 1243609
cauuaugugccagguagua

SEQ ID NO: 1428433 - RNA, 19 nt, Artificial Sequence
  Description of Artificial Sequence: Synthetic oligonucleotide
  Antisense strand to SEQ ID NO: 1428432
uacuaccuggcacauaaug

SEQ ID NO: 1428434 - RNA, 19 nt, Artificial Sequence
  Description of Artificial Sequence: Synthetic oligonucleotide
  Sense strand starting at position 3529 of SEQ ID NO: 1243609
uuaugugccagguaguaua

SEQ ID NO: 1428435 - RNA, 19 nt, Artificial Sequence
  Description of Artificial Sequence: Synthetic oligonucleotide
  Antisense strand to SEQ ID NO: 1428434
uauacuaccuggcacauaa

SEQ ID NO: 1428436 - RNA, 19 nt, Artificial Sequence
  Description of Artificial Sequence: Synthetic oligonucleotide
  Sense strand starting at position 3584 of SEQ ID NO: 1243609
acaauaauugcauguggua

SEQ ID NO: 1428437 - RNA, 19 nt, Artificial Sequence
  Description of Artificial Sequence: Synthetic oligonucleotide
  Antisense strand to SEQ ID NO: 1428436
uaccacaugcaauuauugu

SEQ ID NO: 1428438 - RNA, 19 nt, Artificial Sequence
  Description of Artificial Sequence: Synthetic oligonucleotide
  Sense strand starting at position 3705 of SEQ ID NO: 1243609
agaguuggagucugguaag

SEQ ID NO: 1428439 - RNA, 19 nt, Artificial Sequence
  Description of Artificial Sequence: Synthetic oligonucleotide
  Antisense strand to SEQ ID NO: 1428438
cuuaccagacuccaacucu

SEQ ID NO: 1428440 - RNA, 19 nt, Artificial Sequence
  Description of Artificial Sequence: Synthetic oligonucleotide
  Sense strand starting at position 11 of SEQ ID NO: 1243610
cccggcauucgagaaaggu

SEQ ID NO: 1428441 - RNA, 19 nt, Artificial Sequence
  Description of Artificial Sequence: Synthetic oligonucleotide
  Antisense strand to SEQ ID NO: 1428440
accuuucucgaaugccggg

SEQ ID NO: 1428442 - RNA, 19 nt, Artificial Sequence
  Description of Artificial Sequence: Synthetic oligonucleotide
  Sense strand starting at position 166 of SEQ ID NO: 1243610
gcaggacaccucugagaug

SEQ ID NO: 1428443 - RNA, 19 nt, Artificial Sequence
  Description of Artificial Sequence: Synthetic oligonucleotide
  Antisense strand to SEQ ID NO: 1428442
caucucagagguguccugc

SEQ ID NO: 1428444 - RNA, 19 nt, Artificial Sequence
  Description of Artificial Sequence: Synthetic oligonucleotide
  Sense strand starting at position 311 of SEQ ID NO: 1243610
ccugguccuccaggagaau

SEQ ID NO: 1428445 - RNA, 19 nt, Artificial Sequence
  Description of Artificial Sequence: Synthetic oligonucleotide
  Antisense strand to SEQ ID NO: 1428444
auucuccuggaggaccagg

SEQ ID NO: 1428446 - RNA, 19 nt, Artificial Sequence
  Description of Artificial Sequence: Synthetic oligonucleotide
  Sense strand starting at position 320 of SEQ ID NO: 1243610
ccaggagaaugggauauaa

SEQ ID NO: 1428447 - RNA, 19 nt, Artificial Sequence
  Description of Artificial Sequence: Synthetic oligonucleotide
  Antisense strand to SEQ ID NO: 1428446
uuauaucccauucuccugg

SEQ ID NO: 1428448 - RNA, 19 nt, Artificial Sequence
  Description of Artificial Sequence: Synthetic oligonucleotide
  Sense strand starting at position 331 of SEQ ID NO: 1243610
ggauauaauugcggaggca

SEQ ID NO: 1428449 - RNA, 19 nt, Artificial Sequence
  Description of Artificial Sequence: Synthetic oligonucleotide
  Antisense strand to SEQ ID NO: 1428448
ugccuccgcaauuauaucc

SEQ ID NO: 1428450 - RNA, 19 nt, Artificial Sequence
  Description of Artificial Sequence: Synthetic oligonucleotide
  Sense strand starting at position 332 of SEQ ID NO: 1243610
gauauaauugcggaggcaa

SEQ ID NO: 1428451 - RNA, 19 nt, Artificial Sequence
  Description of Artificial Sequence: Synthetic oligonucleotide
  Antisense strand to SEQ ID NO: 1428450
uugccuccgcaauuauauc

SEQ ID NO: 1428452 - RNA, 19 nt, Artificial Sequence
  Description of Artificial Sequence: Synthetic oligonucleotide
  Sense strand starting at position 334 of SEQ ID NO: 1243610
uauaauugcggaggcaaau

SEQ ID NO: 1428453 - RNA, 19 nt, Artificial Sequence
  Description of Artificial Sequence: Synthetic oligonucleotide
  Antisense strand to SEQ ID NO: 1428452
auuugccuccgcaauuaua

SEQ ID NO: 1428454 - RNA, 19 nt, Artificial Sequence
  Description of Artificial Sequence: Synthetic oligonucleotide
  Sense strand starting at position 343 of SEQ ID NO: 1243610
ggaggcaaaugucuagagu

SEQ ID NO: 1428455 - RNA, 19 nt, Artificial Sequence
  Description of Artificial Sequence: Synthetic oligonucleotide
  Antisense strand to SEQ ID NO: 1428454
acucuagacauuugccucc

SEQ ID NO: 1428456 - RNA, 19 nt, Artificial Sequence
  Description of Artificial Sequence: Synthetic oligonucleotide
  Sense strand starting at position 344 of SEQ ID NO: 1243610
gaggcaaaugucuagaguu

SEQ ID NO: 1428457 - RNA, 19 nt, Artificial Sequence
  Description of Artificial Sequence: Synthetic oligonucleotide
  Antisense strand to SEQ ID NO: 1428456
aacucuagacauuugccuc

SEQ ID NO: 1428458 - RNA, 19 nt, Artificial Sequence
  Description of Artificial Sequence: Synthetic oligonucleotide
  Sense strand starting at position 346 of SEQ ID NO: 1243610
ggcaaaugucuagaguucu

SEQ ID NO: 1428459 - RNA, 19 nt, Artificial Sequence
  Description of Artificial Sequence: Synthetic oligonucleotide
  Antisense strand to SEQ ID NO: 1428458
agaacucuagacauuugcc

SEQ ID NO: 1428460 - RNA, 19 nt, Artificial Sequence
  Description of Artificial Sequence: Synthetic oligonucleotide
  Sense strand starting at position 352 of SEQ ID NO: 1243610
ugucuagaguucugagcau

SEQ ID NO: 1428461 - RNA, 19 nt, Artificial Sequence
  Description of Artificial Sequence: Synthetic oligonucleotide
  Antisense strand to SEQ ID NO: 1428460
augcucagaacucuagaca

SEQ ID NO: 1428462 - RNA, 19 nt, Artificial Sequence
  Description of Artificial Sequence: Synthetic oligonucleotide
  Sense strand starting at position 356 of SEQ ID NO: 1243610
uagaguucugagcaucuga

SEQ ID NO: 1428463 - RNA, 19 nt, Artificial Sequence
  Description of Artificial Sequence: Synthetic oligonucleotide
  Antisense strand to SEQ ID NO: 1428462
ucagaugcucagaacucua

SEQ ID NO: 1428464 - RNA, 19 nt, Artificial Sequence
  Description of Artificial Sequence: Synthetic oligonucleotide
  Sense strand starting at position 363 of SEQ ID NO: 1243610
cugagcaucugagcagaau

SEQ ID NO: 1428465 - RNA, 19 nt, Artificial Sequence
  Description of Artificial Sequence: Synthetic oligonucleotide
  Antisense strand to SEQ ID NO: 1428464
auucugcucagaugcucag

SEQ ID NO: 1428466 - RNA, 19 nt, Artificial Sequence
  Description of Artificial Sequence: Synthetic oligonucleotide
  Sense strand starting at position 975 of SEQ ID NO: 1243610
ucgccuagcagucugcaaa

SEQ ID NO: 1428467 - RNA, 19 nt, Artificial Sequence
  Description of Artificial Sequence: Synthetic oligonucleotide
  Antisense strand to SEQ ID NO: 1428466
uuugcagacugcuaggcga

SEQ ID NO: 1428468 - RNA, 19 nt, Artificial Sequence
  Description of Artificial Sequence: Synthetic oligonucleotide
  Sense strand starting at position 1020 of SEQ ID NO: 1243610
cucccuucucgacacagaa

SEQ ID NO: 1428469 - RNA, 19 nt, Artificial Sequence
  Description of Artificial Sequence: Synthetic oligonucleotide
  Antisense strand to SEQ ID NO: 1428468
uucugugucgagaagggag

SEQ ID NO: 1428470 - RNA, 19 nt, Artificial Sequence
  Description of Artificial Sequence: Synthetic oligonucleotide
  Sense strand starting at position 1066 of SEQ ID NO: 1243610
gguggaagcucugagaggu

SEQ ID NO: 1428471 - RNA, 19 nt, Artificial Sequence
  Description of Artificial Sequence: Synthetic oligonucleotide
  Antisense strand to SEQ ID NO: 1428470
accucucagagcuuccacc

SEQ ID NO: 1428472 - RNA, 19 nt, Artificial Sequence
  Description of Artificial Sequence: Synthetic oligonucleotide
  Sense strand starting at position 1232 of SEQ ID NO: 1243610
gggucacugcugcagagaa

SEQ ID NO: 1428473 - RNA, 19 nt, Artificial Sequence
  Description of Artificial Sequence: Synthetic oligonucleotide
  Antisense strand to SEQ ID NO: 1428472
uucucugcagcagugaccc

SEQ ID NO: 1428474 - RNA, 19 nt, Artificial Sequence
  Description of Artificial Sequence: Synthetic oligonucleotide
  Sense strand starting at position 1890 of SEQ ID NO: 1243610
cgcacuccuccaggagaaa

SEQ ID NO: 1428475 - RNA, 19 nt, Artificial Sequence
  Description of Artificial Sequence: Synthetic oligonucleotide
  Antisense strand to SEQ ID NO: 1428474
uuucuccuggaggagugcg

SEQ ID NO: 1428476 - RNA, 19 nt, Artificial Sequence
  Description of Artificial Sequence: Synthetic oligonucleotide
  Sense strand starting at position 1910 of SEQ ID NO: 1243610
acaucuucguccuccagaa

SEQ ID NO: 1428477 - RNA, 19 nt, Artificial Sequence
  Description of Artificial Sequence: Synthetic oligonucleotide
  Antisense strand to SEQ ID NO: 1428476
uucuggaggacgaagaugu

SEQ ID NO: 1428478 - RNA, 19 nt, Artificial Sequence
  Description of Artificial Sequence: Synthetic oligonucleotide
  Sense strand starting at position 2634 of SEQ ID NO: 1243610
ggagucaggcuuugcaaca

SEQ ID NO: 1428479 - RNA, 19 nt, Artificial Sequence
  Description of Artificial Sequence: Synthetic oligonucleotide
  Antisense strand to SEQ ID NO: 1428478
uguugcaaagccugacucc

SEQ ID NO: 1428480 - RNA, 19 nt, Artificial Sequence
  Description of Artificial Sequence: Synthetic oligonucleotide
  Sense strand starting at position 3394 of SEQ ID NO: 1243610
cuggcuuauuaacaggaau

SEQ ID NO: 1428481 - RNA, 19 nt, Artificial Sequence
  Description of Artificial Sequence: Synthetic oligonucleotide
  Antisense strand to SEQ ID NO: 1428480
auuccuguuaauaagccag

SEQ ID NO: 1428482 - RNA, 19 nt, Artificial Sequence
  Description of Artificial Sequence: Synthetic oligonucleotide
  Sense strand starting at position 3397 of SEQ ID NO: 1243610
gcuuauuaacaggaaugcu

SEQ ID NO: 1428483 - RNA, 19 nt, Artificial Sequence
  Description of Artificial Sequence: Synthetic oligonucleotide
  Antisense strand to SEQ ID NO: 1428482
agcauuccuguuaauaagc

SEQ ID NO: 1428484 - RNA, 19 nt, Artificial Sequence
  Description of Artificial Sequence: Synthetic oligonucleotide
  Sense strand starting at position 3459 of SEQ ID NO: 1243610
cauggugccgucuaaauga

SEQ ID NO: 1428485 - RNA, 19 nt, Artificial Sequence
  Description of Artificial Sequence: Synthetic oligonucleotide
  Antisense strand to SEQ ID NO: 1428484
ucauuuagacggcaccaug

SEQ ID NO: 1428486 - RNA, 19 nt, Artificial Sequence
  Description of Artificial Sequence: Synthetic oligonucleotide
  Sense strand starting at position 3681 of SEQ ID NO: 1243610
agccuuugaucagggaacu

SEQ ID NO: 1428487 - RNA, 19 nt, Artificial Sequence
  Description of Artificial Sequence: Synthetic oligonucleotide
  Antisense strand to SEQ ID NO: 1428486
aguucccugaucaaaggcu

SEQ ID NO: 1428488 - RNA, 19 nt, Artificial Sequence
  Description of Artificial Sequence: Synthetic oligonucleotide
  Sense strand starting at position 3682 of SEQ ID NO: 1243610
gccuuugaucagggaacug

SEQ ID NO: 1428489 - RNA, 19 nt, Artificial Sequence
  Description of Artificial Sequence: Synthetic oligonucleotide
  Antisense strand to SEQ ID NO: 1428488
caguucccugaucaaaggc

SEQ ID NO: 1428490 - RNA, 19 nt, Artificial Sequence
  Description of Artificial Sequence: Synthetic oligonucleotide
  Sense strand starting at position 3773 of SEQ ID NO: 1243610
cugccuggguggguuauaa

SEQ ID NO: 1428491 - RNA, 19 nt, Artificial Sequence
  Description of Artificial Sequence: Synthetic oligonucleotide
  Antisense strand to SEQ ID NO: 1428490
uuauaacccacccaggcag

SEQ ID NO: 1428492 - RNA, 19 nt, Artificial Sequence
  Description of Artificial Sequence: Synthetic oligonucleotide
  Sense strand starting at position 402 of SEQ ID NO: 1243611
uccuaugagcacuagcaga

SEQ ID NO: 1428493 - RNA, 19 nt, Artificial Sequence
  Description of Artificial Sequence: Synthetic oligonucleotide
  Antisense strand to SEQ ID NO: 1428492
ucugcuagugcucauagga

SEQ ID NO: 1428494 - RNA, 19 nt, Artificial Sequence
  Description of Artificial Sequence: Synthetic oligonucleotide
  Sense strand starting at position 477 of SEQ ID NO: 1243611
cccauuuccuugguacagu

SEQ ID NO: 1428495 - RNA, 19 nt, Artificial Sequence
  Description of Artificial Sequence: Synthetic oligonucleotide
  Antisense strand to SEQ ID NO: 1428494
acuguaccaaggaaauggg

SEQ ID NO: 1428496 - RNA, 19 nt, Artificial Sequence
  Description of Artificial Sequence: Synthetic oligonucleotide
  Sense strand starting at position 478 of SEQ ID NO: 1243611
ccauuuccuugguacagua

SEQ ID NO: 1428497 - RNA, 19 nt, Artificial Sequence
  Description of Artificial Sequence: Synthetic oligonucleotide
  Antisense strand to SEQ ID NO: 1428496
uacuguaccaaggaaaugg

SEQ ID NO: 1428498 - RNA, 19 nt, Artificial Sequence
  Description of Artificial Sequence: Synthetic oligonucleotide
  Sense strand starting at position 882 of SEQ ID NO: 1243611
uccacagugucaccuguaa

SEQ ID NO: 1428499 - RNA, 19 nt, Artificial Sequence
  Description of Artificial Sequence: Synthetic oligonucleotide
  Antisense strand to SEQ ID NO: 1428498
uuacaggugacacugugga

SEQ ID NO: 1428500 - RNA, 19 nt, Artificial Sequence
  Description of Artificial Sequence: Synthetic oligonucleotide
  Sense strand starting at position 902 of SEQ ID NO: 1243611
ggugaagucucagccuaug

SEQ ID NO: 1428501 - RNA, 19 nt, Artificial Sequence
  Description of Artificial Sequence: Synthetic oligonucleotide
  Antisense strand to SEQ ID NO: 1428500
cauaggcugagacuucacc

SEQ ID NO: 1428502 - RNA, 19 nt, Artificial Sequence
  Description of Artificial Sequence: Synthetic oligonucleotide
  Sense strand starting at position 905 of SEQ ID NO: 1243611
gaagucucagccuaugagu

SEQ ID NO: 1428503 - RNA, 19 nt, Artificial Sequence
  Description of Artificial Sequence: Synthetic oligonucleotide
  Antisense strand to SEQ ID NO: 1428502
acucauaggcugagacuuc

SEQ ID NO: 1428504 - RNA, 19 nt, Artificial Sequence
  Description of Artificial Sequence: Synthetic oligonucleotide
  Sense strand starting at position 913 of SEQ ID NO: 1243611
agccuaugagucugucuuu

SEQ ID NO: 1428505 - RNA, 19 nt, Artificial Sequence
  Description of Artificial Sequence: Synthetic oligonucleotide
  Antisense strand to SEQ ID NO: 1428504
aaagacagacucauaggcu

SEQ ID NO: 1428506 - RNA, 19 nt, Artificial Sequence
  Description of Artificial Sequence: Synthetic oligonucleotide
  Sense strand starting at position 984 of SEQ ID NO: 1243611
gugagaucuacaggcaaca

SEQ ID NO: 1428507 - RNA, 19 nt, Artificial Sequence
  Description of Artificial Sequence: Synthetic oligonucleotide
  Antisense strand to SEQ ID NO: 1428506
uguugccuguagaucucac

SEQ ID NO: 1428508 - RNA, 19 nt, Artificial Sequence
  Description of Artificial Sequence: Synthetic oligonucleotide
  Sense strand starting at position 1027 of SEQ ID NO: 1243611
guuagucauuucugcacca

SEQ ID NO: 1428509 - RNA, 19 nt, Artificial Sequence
  Description of Artificial Sequence: Synthetic oligonucleotide
  Antisense strand to SEQ ID NO: 1428508
uggugcagaaaugacuaac

SEQ ID NO: 1428510 - RNA, 19 nt, Artificial Sequence
  Description of Artificial Sequence: Synthetic oligonucleotide
  Sense strand starting at position 1051 of SEQ ID NO: 1243611
uugugucagcuugagucau

SEQ ID NO: 1428511 - RNA, 19 nt, Artificial Sequence
  Description of Artificial Sequence: Synthetic oligonucleotide
  Antisense strand to SEQ ID NO: 1428510
augacucaagcugacacaa

SEQ ID NO: 1428512 - RNA, 19 nt, Artificial Sequence
  Description of Artificial Sequence: Synthetic oligonucleotide
  Sense strand starting at position 1055 of SEQ ID NO: 1243611
gucagcuugagucauggga

SEQ ID NO: 1428513 - RNA, 19 nt, Artificial Sequence
  Description of Artificial Sequence: Synthetic oligonucleotide
  Antisense strand to SEQ ID NO: 1428512
ucccaugacucaagcugac

SEQ ID NO: 1428514 - RNA, 19 nt, Artificial Sequence
  Description of Artificial Sequence: Synthetic oligonucleotide
  Sense strand starting at position 1057 of SEQ ID NO: 1243611
cagcuugagucaugggaag

SEQ ID NO: 1428515 - RNA, 19 nt, Artificial Sequence
  Description of Artificial Sequence: Synthetic oligonucleotide
  Antisense strand to SEQ ID NO: 1428514
cuucccaugacucaagcug

SEQ ID NO: 1428516 - RNA, 19 nt, Artificial Sequence
  Description of Artificial Sequence: Synthetic oligonucleotide
  Sense strand starting at position 1059 of SEQ ID NO: 1243611
gcuugagucaugggaagac

SEQ ID NO: 1428517 - RNA, 19 nt, Artificial Sequence
  Description of Artificial Sequence: Synthetic oligonucleotide
  Antisense strand to SEQ ID NO: 1428516
gucuucccaugacucaagc

SEQ ID NO: 1428518 - RNA, 19 nt, Artificial Sequence
  Description of Artificial Sequence: Synthetic oligonucleotide
  Sense strand starting at position 1143 of SEQ ID NO: 1243611
uaggcaucacugcaggaua

SEQ ID NO: 1428519 - RNA, 19 nt, Artificial Sequence
  Description of Artificial Sequence: Synthetic oligonucleotide
  Antisense strand to SEQ ID NO: 1428518
uauccugcagugaugccua

SEQ ID NO: 1428520 - RNA, 19 nt, Artificial Sequence
  Description of Artificial Sequence: Synthetic oligonucleotide
  Sense strand starting at position 1145 of SEQ ID NO: 1243611
ggcaucacugcaggauaaa

SEQ ID NO: 1428521 - RNA, 19 nt, Artificial Sequence
  Description of Artificial Sequence: Synthetic oligonucleotide
  Antisense strand to SEQ ID NO: 1428520
uuuauccugcagugaugcc

SEQ ID NO: 1428522 - RNA, 19 nt, Artificial Sequence
  Description of Artificial Sequence: Synthetic oligonucleotide
  Sense strand starting at position 1371 of SEQ ID NO: 1243611
ugacauggcucagaugaca

SEQ ID NO: 1428523 - RNA, 19 nt, Artificial Sequence
  Description of Artificial Sequence: Synthetic oligonucleotide
  Antisense strand to SEQ ID NO: 1428522
ugucaucugagccauguca

SEQ ID NO: 1428524 - RNA, 19 nt, Artificial Sequence
  Description of Artificial Sequence: Synthetic oligonucleotide
  Sense strand starting at position 1521 of SEQ ID NO: 1243611
uccaauggauucucuaagu

SEQ ID NO: 1428525 - RNA, 19 nt, Artificial Sequence
  Description of Artificial Sequence: Synthetic oligonucleotide
  Antisense strand to SEQ ID NO: 1428524
acuuagagaauccauugga

SEQ ID NO: 1428526 - RNA, 19 nt, Artificial Sequence
  Description of Artificial Sequence: Synthetic oligonucleotide
  Sense strand starting at position 1683 of SEQ ID NO: 1243611
ucgcucguucagccagaau

SEQ ID NO: 1428527 - RNA, 19 nt, Artificial Sequence
  Description of Artificial Sequence: Synthetic oligonucleotide
  Antisense strand to SEQ ID NO: 1428526
auucuggcugaacgagcga

SEQ ID NO: 1428528 - RNA, 19 nt, Artificial Sequence
  Description of Artificial Sequence: Synthetic oligonucleotide
  Sense strand starting at position 1696 of SEQ ID NO: 1243611
cagaauucugcagacgcau

SEQ ID NO: 1428529 - RNA, 19 nt, Artificial Sequence
  Description of Artificial Sequence: Synthetic oligonucleotide
  Antisense strand to SEQ ID NO: 1428528
augcgucugcagaauucug

SEQ ID NO: 1428530 - RNA, 19 nt, Artificial Sequence
  Description of Artificial Sequence: Synthetic oligonucleotide
  Sense strand starting at position 1944 of SEQ ID NO: 1243611
gugugcugugucucuuuaa

SEQ ID NO: 1428531 - RNA, 19 nt, Artificial Sequence
  Description of Artificial Sequence: Synthetic oligonucleotide
  Antisense strand to SEQ ID NO: 1428530
uuaaagagacacagcacac

SEQ ID NO: 1428532 - RNA, 19 nt, Artificial Sequence
  Description of Artificial Sequence: Synthetic oligonucleotide
  Sense strand starting at position 1945 of SEQ ID NO: 1243611
ugugcugugucucuuuaag

SEQ ID NO: 1428533 - RNA, 19 nt, Artificial Sequence
  Description of Artificial Sequence: Synthetic oligonucleotide
  Antisense strand to SEQ ID NO: 1428532
cuuaaagagacacagcaca

SEQ ID NO: 1428534 - RNA, 19 nt, Artificial Sequence
  Description of Artificial Sequence: Synthetic oligonucleotide
  Sense strand starting at position 1947 of SEQ ID NO: 1243611
ugcugugucucuuuaagga

SEQ ID NO: 1428535 - RNA, 19 nt, Artificial Sequence
  Description of Artificial Sequence: Synthetic oligonucleotide
  Antisense strand to SEQ ID NO: 1428534
uccuuaaagagacacagca

SEQ ID NO: 1428536 - RNA, 19 nt, Artificial Sequence
  Description of Artificial Sequence: Synthetic oligonucleotide
  Sense strand starting at position 2242 of SEQ ID NO: 1243611
gaucaucccgccggacaaa

SEQ ID NO: 1428537 - RNA, 19 nt, Artificial Sequence
  Description of Artificial Sequence: Synthetic oligonucleotide
  Antisense strand to SEQ ID NO: 1428536
uuuguccggcgggaugauc

SEQ ID NO: 1428538 - RNA, 19 nt, Artificial Sequence
  Description of Artificial Sequence: Synthetic oligonucleotide
  Sense strand starting at position 2832 of SEQ ID NO: 1243611
cugagaucguaccacuaac

SEQ ID NO: 1428539 - RNA, 19 nt, Artificial Sequence
  Description of Artificial Sequence: Synthetic oligonucleotide
  Antisense strand to SEQ ID NO: 1428538
guuagugguacgaucucag

SEQ ID NO: 1428540 - RNA, 19 nt, Artificial Sequence
  Description of Artificial Sequence: Synthetic oligonucleotide
  Sense strand starting at position 2911 of SEQ ID NO: 1243611
uaacaaugugugggagcau

SEQ ID NO: 1428541 - RNA, 19 nt, Artificial Sequence
  Description of Artificial Sequence: Synthetic oligonucleotide
  Antisense strand to SEQ ID NO: 1428540
augcucccacacauuguua

SEQ ID NO: 1428542 - RNA, 19 nt, Artificial Sequence
  Description of Artificial Sequence: Synthetic oligonucleotide
  Sense strand starting at position 2912 of SEQ ID NO: 1243611
aacaaugugugggagcauu

SEQ ID NO: 1428543 - RNA, 19 nt, Artificial Sequence
  Description of Artificial Sequence: Synthetic oligonucleotide
  Antisense strand to SEQ ID NO: 1428542
aaugcucccacacauuguu

SEQ ID NO: 1428544 - RNA, 19 nt, Artificial Sequence
  Description of Artificial Sequence: Synthetic oligonucleotide
  Sense strand starting at position 3344 of SEQ ID NO: 1243611
ugccaagagcguugagaac

SEQ ID NO: 1428545 - RNA, 19 nt, Artificial Sequence
  Description of Artificial Sequence: Synthetic oligonucleotide
  Antisense strand to SEQ ID NO: 1428544
guucucaacgcucuuggca

SEQ ID NO: 1428546 - RNA, 19 nt, Artificial Sequence
  Description of Artificial Sequence: Synthetic oligonucleotide
  Sense strand starting at position 3433 of SEQ ID NO: 1243611
ccaucacacugcuuuggau

SEQ ID NO: 1428547 - RNA, 19 nt, Artificial Sequence
  Description of Artificial Sequence: Synthetic oligonucleotide
  Antisense strand to SEQ ID NO: 1428546
auccaaagcagugugaugg

SEQ ID NO: 1428548 - RNA, 19 nt, Artificial Sequence
  Description of Artificial Sequence: Synthetic oligonucleotide
  Sense strand starting at position 3448 of SEQ ID NO: 1243611
ggauguccuuccuacuaaa

SEQ ID NO: 1428549 - RNA, 19 nt, Artificial Sequence
  Description of Artificial Sequence: Synthetic oligonucleotide
  Antisense strand to SEQ ID NO: 1428548
uuuaguaggaaggacaucc

SEQ ID NO: 1428550 - RNA, 19 nt, Artificial Sequence
  Description of Artificial Sequence: Synthetic oligonucleotide
  Sense strand starting at position 3650 of SEQ ID NO: 1243611
ucggguucugaucgugaaa

SEQ ID NO: 1428551 - RNA, 19 nt, Artificial Sequence
  Description of Artificial Sequence: Synthetic oligonucleotide
  Antisense strand to SEQ ID NO: 1428550
uuucacgaucagaacccga

SEQ ID NO: 1428552 - RNA, 19 nt, Artificial Sequence
  Description of Artificial Sequence: Synthetic oligonucleotide
  Sense strand starting at position 3653 of SEQ ID NO: 1243611
gguucugaucgugaaaccu

SEQ ID NO: 1428553 - RNA, 19 nt, Artificial Sequence
  Description of Artificial Sequence: Synthetic oligonucleotide
  Antisense strand to SEQ ID NO: 1428552
agguuucacgaucagaacc

SEQ ID NO: 1428554 - RNA, 19 nt, Artificial Sequence
  Description of Artificial Sequence: Synthetic oligonucleotide
  Sense strand starting at position 3665 of SEQ ID NO: 1243611
gaaaccucgugacuccuaa

SEQ ID NO: 1428555 - RNA, 19 nt, Artificial Sequence
  Description of Artificial Sequence: Synthetic oligonucleotide
  Antisense strand to SEQ ID NO: 1428554
uuaggagucacgagguuuc

SEQ ID NO: 1428556 - RNA, 19 nt, Artificial Sequence
  Description of Artificial Sequence: Synthetic oligonucleotide
  Sense strand starting at position 3669 of SEQ ID NO: 1243611
ccucgugacuccuaauuuc

SEQ ID NO: 1428557 - RNA, 19 nt, Artificial Sequence
  Description of Artificial Sequence: Synthetic oligonucleotide
  Antisense strand to SEQ ID NO: 1428556
gaaauuaggagucacgagg

SEQ ID NO: 1428558 - RNA, 19 nt, Artificial Sequence
  Description of Artificial Sequence: Synthetic oligonucleotide
  Sense strand starting at position 3787 of SEQ ID NO: 1243611
ugacucguguucucccgaa

SEQ ID NO: 1428559 - RNA, 19 nt, Artificial Sequence
  Description of Artificial Sequence: Synthetic oligonucleotide
  Antisense strand to SEQ ID NO: 1428558
uucgggagaacacgaguca

SEQ ID NO: 1428560 - RNA, 19 nt, Artificial Sequence
  Description of Artificial Sequence: Synthetic oligonucleotide
  Sense strand starting at position 3791 of SEQ ID NO: 1243611
ucguguucucccgaaagga

SEQ ID NO: 1428561 - RNA, 19 nt, Artificial Sequence
  Description of Artificial Sequence: Synthetic oligonucleotide
  Antisense strand to SEQ ID NO: 1428560
uccuuucgggagaacacga

SEQ ID NO: 1428562 - RNA, 19 nt, Artificial Sequence
  Description of Artificial Sequence: Synthetic oligonucleotide
  Sense strand starting at position 3884 of SEQ ID NO: 1243611
ucacgagacugacaucaaa

SEQ ID NO: 1428563 - RNA, 19 nt, Artificial Sequence
  Description of Artificial Sequence: Synthetic oligonucleotide
  Antisense strand to SEQ ID NO: 1428562
uuugaugucagucucguga

SEQ ID NO: 1428564 - RNA, 19 nt, Artificial Sequence
  Description of Artificial Sequence: Synthetic oligonucleotide
  Sense strand starting at position 3923 of SEQ ID NO: 1243611
gaaagaguuucccaguguc

SEQ ID NO: 1428565 - RNA, 19 nt, Artificial Sequence
  Description of Artificial Sequence: Synthetic oligonucleotide
  Antisense strand to SEQ ID NO: 1428564
gacacugggaaacucuuuc

SEQ ID NO: 1428566 - RNA, 19 nt, Artificial Sequence
  Description of Artificial Sequence: Synthetic oligonucleotide
  Sense strand starting at position 3926 of SEQ ID NO: 1243611
agaguuucccagugucuaa

SEQ ID NO: 1428567 - RNA, 19 nt, Artificial Sequence
  Description of Artificial Sequence: Synthetic oligonucleotide
  Antisense strand to SEQ ID NO: 1428566
uuagacacugggaaacucu

SEQ ID NO: 1428568 - RNA, 19 nt, Artificial Sequence
  Description of Artificial Sequence: Synthetic oligonucleotide
  Sense strand starting at position 3953 of SEQ ID NO: 1243611
gaaggcuugcucuaagaca

SEQ ID NO: 1428569 - RNA, 19 nt, Artificial Sequence
  Description of Artificial Sequence: Synthetic oligonucleotide
  Antisense strand to SEQ ID NO: 1428568
ugucuuagagcaagccuuc

SEQ ID NO: 1428570 - RNA, 19 nt, Artificial Sequence
  Description of Artificial Sequence: Synthetic oligonucleotide
  Sense strand starting at position 3979 of SEQ ID NO: 1243611
acacauguagcaugucauu

SEQ ID NO: 1428571 - RNA, 19 nt, Artificial Sequence
  Description of Artificial Sequence: Synthetic oligonucleotide
  Antisense strand to SEQ ID NO: 1428570
aaugacaugcuacaugugu

SEQ ID NO: 1428572 - RNA, 19 nt, Artificial Sequence
  Description of Artificial Sequence: Synthetic oligonucleotide
  Sense strand starting at position 142 of SEQ ID NO: 1243612
gauggaaucgcucgucaca

SEQ ID NO: 1428573 - RNA, 19 nt, Artificial Sequence
  Description of Artificial Sequence: Synthetic oligonucleotide
  Antisense strand to SEQ ID NO: 1428572
ugugacgagcgauuccauc

SEQ ID NO: 1428574 - RNA, 19 nt, Artificial Sequence
  Description of Artificial Sequence: Synthetic oligonucleotide
  Sense strand starting at position 144 of SEQ ID NO: 1243612
uggaaucgcucgucacaca

SEQ ID NO: 1428575 - RNA, 19 nt, Artificial Sequence
  Description of Artificial Sequence: Synthetic oligonucleotide
  Antisense strand to SEQ ID NO: 1428574
ugugugacgagcgauucca

SEQ ID NO: 1428576 - RNA, 19 nt, Artificial Sequence
  Description of Artificial Sequence: Synthetic oligonucleotide
  Sense strand starting at position 482 of SEQ ID NO: 1243612
caggucaguuucuugccaa

SEQ ID NO: 1428577 - RNA, 19 nt, Artificial Sequence
  Description of Artificial Sequence: Synthetic oligonucleotide
  Antisense strand to SEQ ID NO: 1428576
uuggcaagaaacugaccug

SEQ ID NO: 1428578 - RNA, 19 nt, Artificial Sequence
  Description of Artificial Sequence: Synthetic oligonucleotide
  Sense strand starting at position 724 of SEQ ID NO: 1243612
agcacuuuccagggcugau

SEQ ID NO: 1428579 - RNA, 19 nt, Artificial Sequence
  Description of Artificial Sequence: Synthetic oligonucleotide
  Antisense strand to SEQ ID NO: 1428578
aucagcccuggaaagugcu

SEQ ID NO: 1428580 - RNA, 19 nt, Artificial Sequence
  Description of Artificial Sequence: Synthetic oligonucleotide
  Sense strand starting at position 936 of SEQ ID NO: 1243612
uguugcucucuugauggau

SEQ ID NO: 1428581 - RNA, 19 nt, Artificial Sequence
  Description of Artificial Sequence: Synthetic oligonucleotide
  Antisense strand to SEQ ID NO: 1428580
auccaucaagagagcaaca

SEQ ID NO: 1428582 - RNA, 19 nt, Artificial Sequence
  Description of Artificial Sequence: Synthetic oligonucleotide
  Sense strand starting at position 980 of SEQ ID NO: 1243612
ggcacucugagacagcuaa

SEQ ID NO: 1428583 - RNA, 19 nt, Artificial Sequence
  Description of Artificial Sequence: Synthetic oligonucleotide
  Antisense strand to SEQ ID NO: 1428582
uuagcugucucagagugcc

SEQ ID NO: 1428584 - RNA, 19 nt, Artificial Sequence
  Description of Artificial Sequence: Synthetic oligonucleotide
  Sense strand starting at position 991 of SEQ ID NO: 1243612
acagcuaacucggacaguu

SEQ ID NO: 1428585 - RNA, 19 nt, Artificial Sequence
  Description of Artificial Sequence: Synthetic oligonucleotide
  Antisense strand to SEQ ID NO: 1428584
aacuguccgaguuagcugu

SEQ ID NO: 1428586 - RNA, 19 nt, Artificial Sequence
  Description of Artificial Sequence: Synthetic oligonucleotide
  Sense strand starting at position 1019 of SEQ ID NO: 1243612
ugcagaguuaucgagcacu

SEQ ID NO: 1428587 - RNA, 19 nt, Artificial Sequence
  Description of Artificial Sequence: Synthetic oligonucleotide
  Antisense strand to SEQ ID NO: 1428586
agugcucgauaacucugca

SEQ ID NO: 1428588 - RNA, 19 nt, Artificial Sequence
  Description of Artificial Sequence: Synthetic oligonucleotide
  Sense strand starting at position 1132 of SEQ ID NO: 1243612
gucggcuucuaucucagau

SEQ ID NO: 1428589 - RNA, 19 nt, Artificial Sequence
  Description of Artificial Sequence: Synthetic oligonucleotide
  Antisense strand to SEQ ID NO: 1428588
aucugagauagaagccgac

SEQ ID NO: 1428590 - RNA, 19 nt, Artificial Sequence
  Description of Artificial Sequence: Synthetic oligonucleotide
  Sense strand starting at position 1134 of SEQ ID NO: 1243612
cggcuucuaucucagauuu

SEQ ID NO: 1428591 - RNA, 19 nt, Artificial Sequence
  Description of Artificial Sequence: Synthetic oligonucleotide
  Antisense strand to SEQ ID NO: 1428590
aaaucugagauagaagccg

SEQ ID NO: 1428592 - RNA, 19 nt, Artificial Sequence
  Description of Artificial Sequence: Synthetic oligonucleotide
  Sense strand starting at position 1577 of SEQ ID NO: 1243612
cagcguucgccaucaaguu

SEQ ID NO: 1428593 - RNA, 19 nt, Artificial Sequence
  Description of Artificial Sequence: Synthetic oligonucleotide
  Antisense strand to SEQ ID NO: 1428592
aacuugauggcgaacgcug

SEQ ID NO: 1428594 - RNA, 19 nt, Artificial Sequence
  Description of Artificial Sequence: Synthetic oligonucleotide
  Sense strand starting at position 2175 of SEQ ID NO: 1243612
cggguuucaucccuggcaa

SEQ ID NO: 1428595 - RNA, 19 nt, Artificial Sequence
  Description of Artificial Sequence: Synthetic oligonucleotide
  Antisense strand to SEQ ID NO: 1428594
uugccagggaugaaacccg

SEQ ID NO: 1428596 - RNA, 19 nt, Artificial Sequence
  Description of Artificial Sequence: Synthetic oligonucleotide
  Sense strand starting at position 2176 of SEQ ID NO: 1243612
ggguuucaucccuggcaag

SEQ ID NO: 1428597 - RNA, 19 nt, Artificial Sequence
  Description of Artificial Sequence: Synthetic oligonucleotide
  Antisense strand to SEQ ID NO: 1428596
cuugccagggaugaaaccc

SEQ ID NO: 1428598 - RNA, 19 nt, Artificial Sequence
  Description of Artificial Sequence: Synthetic oligonucleotide
  Sense strand starting at position 2493 of SEQ ID NO: 1243612
agccuccucaggugagaaa

SEQ ID NO: 1428599 - RNA, 19 nt, Artificial Sequence
  Description of Artificial Sequence: Synthetic oligonucleotide
  Antisense strand to SEQ ID NO: 1428598
uuucucaccugaggaggcu

SEQ ID NO: 1428600 - RNA, 19 nt, Artificial Sequence
  Description of Artificial Sequence: Synthetic oligonucleotide
  Sense strand starting at position 2494 of SEQ ID NO: 1243612
gccuccucaggugagaaau

SEQ ID NO: 1428601 - RNA, 19 nt, Artificial Sequence
  Description of Artificial Sequence: Synthetic oligonucleotide
  Antisense strand to SEQ ID NO: 1428600
auuucucaccugaggaggc

SEQ ID NO: 1428602 - RNA, 19 nt, Artificial Sequence
  Description of Artificial Sequence: Synthetic oligonucleotide
  Sense strand starting at position 2505 of SEQ ID NO: 1243612
ugagaaauguaaggauaaa

SEQ ID NO: 1428603 - RNA, 19 nt, Artificial Sequence
  Description of Artificial Sequence: Synthetic oligonucleotide
  Antisense strand to SEQ ID NO: 1428602
uuuauccuuacauuucuca

SEQ ID NO: 1428604 - RNA, 19 nt, Artificial Sequence
  Description of Artificial Sequence: Synthetic oligonucleotide
  Sense strand starting at position 2538 of SEQ ID NO: 1243612
ugggaaucccagugggaau

SEQ ID NO: 1428605 - RNA, 19 nt, Artificial Sequence
  Description of Artificial Sequence: Synthetic oligonucleotide
  Antisense strand to SEQ ID NO: 1428604
auucccacugggauuccca

SEQ ID NO: 1428606 - RNA, 19 nt, Artificial Sequence
  Description of Artificial Sequence: Synthetic oligonucleotide
  Sense strand starting at position 2550 of SEQ ID NO: 1243612
ugggaaucgggucacugau

SEQ ID NO: 1428607 - RNA, 19 nt, Artificial Sequence
  Description of Artificial Sequence: Synthetic oligonucleotide
  Antisense strand to SEQ ID NO: 1428606
aucagugacccgauuccca

SEQ ID NO: 1428608 - RNA, 19 nt, Artificial Sequence
  Description of Artificial Sequence: Synthetic oligonucleotide
  Sense strand starting at position 2831 of SEQ ID NO: 1243612
agaagaacuuguucuugac

SEQ ID NO: 1428609 - RNA, 19 nt, Artificial Sequence
  Description of Artificial Sequence: Synthetic oligonucleotide
  Antisense strand to SEQ ID NO: 1428608
gucaagaacaaguucuucu

SEQ ID NO: 1428610 - RNA, 19 nt, Artificial Sequence
  Description of Artificial Sequence: Synthetic oligonucleotide
  Sense strand starting at position 2834 of SEQ ID NO: 1243612
agaacuuguucuugaccuu

SEQ ID NO: 1428611 - RNA, 19 nt, Artificial Sequence
  Description of Artificial Sequence: Synthetic oligonucleotide
  Antisense strand to SEQ ID NO: 1428610
aaggucaagaacaaguucu

SEQ ID NO: 1428612 - RNA, 19 nt, Artificial Sequence
  Description of Artificial Sequence: Synthetic oligonucleotide
  Sense strand starting at position 2865 of SEQ ID NO: 1243612
ugaacuuucuaaccgcaga

SEQ ID NO: 1428613 - RNA, 19 nt, Artificial Sequence
  Description of Artificial Sequence: Synthetic oligonucleotide
  Antisense strand to SEQ ID NO: 1428612
ucugcgguuagaaaguuca

SEQ ID NO: 1428614 - RNA, 19 nt, Artificial Sequence
  Description of Artificial Sequence: Synthetic oligonucleotide
  Sense strand starting at position 2894 of SEQ ID NO: 1243612
caaauuacgucucaaggua

SEQ ID NO: 1428615 - RNA, 19 nt, Artificial Sequence
  Description of Artificial Sequence: Synthetic oligonucleotide
  Antisense strand to SEQ ID NO: 1428614
uaccuugagacguaauuug

SEQ ID NO: 1428616 - RNA, 19 nt, Artificial Sequence
  Description of Artificial Sequence: Synthetic oligonucleotide
  Sense strand starting at position 2919 of SEQ ID NO: 1243612
caaguuagaguacgguauu

SEQ ID NO: 1428617 - RNA, 19 nt, Artificial Sequence
  Description of Artificial Sequence: Synthetic oligonucleotide
  Antisense strand to SEQ ID NO: 1428616
aauaccguacucuaacuug

SEQ ID NO: 1428618 - RNA, 19 nt, Artificial Sequence
  Description of Artificial Sequence: Synthetic oligonucleotide
  Sense strand starting at position 2922 of SEQ ID NO: 1243612
guuagaguacgguauucag

SEQ ID NO: 1428619 - RNA, 19 nt, Artificial Sequence
  Description of Artificial Sequence: Synthetic oligonucleotide
  Antisense strand to SEQ ID NO: 1428618
cugaauaccguacucuaac

SEQ ID NO: 1428620 - RNA, 19 nt, Artificial Sequence
  Description of Artificial Sequence: Synthetic oligonucleotide
  Sense strand starting at position 2925 of SEQ ID NO: 1243612
agaguacgguauucagaga

SEQ ID NO: 1428621 - RNA, 19 nt, Artificial Sequence
  Description of Artificial Sequence: Synthetic oligonucleotide
  Antisense strand to SEQ ID NO: 1428620
ucucugaauaccguacucu

SEQ ID NO: 1428622 - RNA, 19 nt, Artificial Sequence
  Description of Artificial Sequence: Synthetic oligonucleotide
  Sense strand starting at position 3095 of SEQ ID NO: 1243612
augugagccucacauucuu

SEQ ID NO: 1428623 - RNA, 19 nt, Artificial Sequence
  Description of Artificial Sequence: Synthetic oligonucleotide
  Antisense strand to SEQ ID NO: 1428622
aagaaugugaggcucacau

SEQ ID NO: 1428624 - RNA, 19 nt, Artificial Sequence
  Description of Artificial Sequence: Synthetic oligonucleotide
  Sense strand starting at position 3110 of SEQ ID NO: 1243612
ucuugucauguugguguua

SEQ ID NO: 1428625 - RNA, 19 nt, Artificial Sequence
  Description of Artificial Sequence: Synthetic oligonucleotide
  Antisense strand to SEQ ID NO: 1428624
uaacaccaacaugacaaga

SEQ ID NO: 1428626 - RNA, 19 nt, Artificial Sequence
  Description of Artificial Sequence: Synthetic oligonucleotide
  Sense strand starting at position 3123 of SEQ ID NO: 1243612
guguuacugcccuguucua

SEQ ID NO: 1428627 - RNA, 19 nt, Artificial Sequence
  Description of Artificial Sequence: Synthetic oligonucleotide
  Antisense strand to SEQ ID NO: 1428626
uagaacagggcaguaacac

SEQ ID NO: 1428628 - RNA, 19 nt, Artificial Sequence
  Description of Artificial Sequence: Synthetic oligonucleotide
  Sense strand starting at position 3130 of SEQ ID NO: 1243612
ugcccuguucuagagaggu

SEQ ID NO: 1428629 - RNA, 19 nt, Artificial Sequence
  Description of Artificial Sequence: Synthetic oligonucleotide
  Antisense strand to SEQ ID NO: 1428628
accucucuagaacagggca

SEQ ID NO: 1428630 - RNA, 19 nt, Artificial Sequence
  Description of Artificial Sequence: Synthetic oligonucleotide
  Sense strand starting at position 3132 of SEQ ID NO: 1243612
cccuguucuagagagguga

SEQ ID NO: 1428631 - RNA, 19 nt, Artificial Sequence
  Description of Artificial Sequence: Synthetic oligonucleotide
  Antisense strand to SEQ ID NO: 1428630
ucaccucucuagaacaggg

SEQ ID NO: 1428632 - RNA, 19 nt, Artificial Sequence
  Description of Artificial Sequence: Synthetic oligonucleotide
  Sense strand starting at position 3172 of SEQ ID NO: 1243612
aguucuugccaggguuaca

SEQ ID NO: 1428633 - RNA, 19 nt, Artificial Sequence
  Description of Artificial Sequence: Synthetic oligonucleotide
  Antisense strand to SEQ ID NO: 1428632
uguaacccuggcaagaacu

SEQ ID NO: 1428634 - RNA, 19 nt, Artificial Sequence
  Description of Artificial Sequence: Synthetic oligonucleotide
  Sense strand starting at position 3241 of SEQ ID NO: 1243612
agcacugugccuuacucaa

SEQ ID NO: 1428635 - RNA, 19 nt, Artificial Sequence
  Description of Artificial Sequence: Synthetic oligonucleotide
  Antisense strand to SEQ ID NO: 1428634
uugaguaaggcacagugcu

SEQ ID NO: 1428636 - RNA, 19 nt, Artificial Sequence
  Description of Artificial Sequence: Synthetic oligonucleotide
  Sense strand starting at position 3299 of SEQ ID NO: 1243612
caggacauuucuugguuga

SEQ ID NO: 1428637 - RNA, 19 nt, Artificial Sequence
  Description of Artificial Sequence: Synthetic oligonucleotide
  Antisense strand to SEQ ID NO: 1428636
ucaaccaagaaauguccug

SEQ ID NO: 1428638 - RNA, 19 nt, Artificial Sequence
  Description of Artificial Sequence: Synthetic oligonucleotide
  Sense strand starting at position 3378 of SEQ ID NO: 1243612
ggcaggugucgggauuucu

SEQ ID NO: 1428639 - RNA, 19 nt, Artificial Sequence
  Description of Artificial Sequence: Synthetic oligonucleotide
  Antisense strand to SEQ ID NO: 1428638
agaaaucccgacaccugcc

SEQ ID NO: 1428640 - RNA, 19 nt, Artificial Sequence
  Description of Artificial Sequence: Synthetic oligonucleotide
  Sense strand starting at position 3450 of SEQ ID NO: 1243612
cguagucagagcuguccuu

SEQ ID NO: 1428641 - RNA, 19 nt, Artificial Sequence
  Description of Artificial Sequence: Synthetic oligonucleotide
  Antisense strand to SEQ ID NO: 1428640
aaggacagcucugacuacg

SEQ ID NO: 1428642 - RNA, 19 nt, Artificial Sequence
  Description of Artificial Sequence: Synthetic oligonucleotide
  Sense strand starting at position 3457 of SEQ ID NO: 1243612
agagcuguccuucguggaa

SEQ ID NO: 1428643 - RNA, 19 nt, Artificial Sequence
  Description of Artificial Sequence: Synthetic oligonucleotide
  Antisense strand to SEQ ID NO: 1428642
uuccacgaaggacagcucu

SEQ ID NO: 1428644 - RNA, 19 nt, Artificial Sequence
  Description of Artificial Sequence: Synthetic oligonucleotide
  Sense strand starting at position 3491 of SEQ ID NO: 1243612
ggcaucauggauuaaguca

SEQ ID NO: 1428645 - RNA, 19 nt, Artificial Sequence
  Description of Artificial Sequence: Synthetic oligonucleotide
  Antisense strand to SEQ ID NO: 1428644
ugacuuaauccaugaugcc

SEQ ID NO: 1428646 - RNA, 19 nt, Artificial Sequence
  Description of Artificial Sequence: Synthetic oligonucleotide
  Sense strand starting at position 3549 of SEQ ID NO: 1243612
ccgcuuuaccucugaggaa

SEQ ID NO: 1428647 - RNA, 19 nt, Artificial Sequence
  Description of Artificial Sequence: Synthetic oligonucleotide
  Antisense strand to SEQ ID NO: 1428646
uuccucagagguaaagcgg

SEQ ID NO: 1428648 - RNA, 19 nt, Artificial Sequence
  Description of Artificial Sequence: Synthetic oligonucleotide
  Sense strand starting at position 3550 of SEQ ID NO: 1243612
cgcuuuaccucugaggaaa

SEQ ID NO: 1428649 - RNA, 19 nt, Artificial Sequence
  Description of Artificial Sequence: Synthetic oligonucleotide
  Antisense strand to SEQ ID NO: 1428648
uuuccucagagguaaagcg

SEQ ID NO: 1428650 - RNA, 19 nt, Artificial Sequence
  Description of Artificial Sequence: Synthetic oligonucleotide
  Sense strand starting at position 3584 of SEQ ID NO: 1243612
agcugagcuacguguccaa

SEQ ID NO: 1428651 - RNA, 19 nt, Artificial Sequence
  Description of Artificial Sequence: Synthetic oligonucleotide
  Antisense strand to SEQ ID NO: 1428650
uuggacacguagcucagcu

SEQ ID NO: 1428652 - RNA, 19 nt, Artificial Sequence
  Description of Artificial Sequence: Synthetic oligonucleotide
  Sense strand starting at position 62 of SEQ ID NO: 1243613
acaggagcguucuuggaaa

SEQ ID NO: 1428653 - RNA, 19 nt, Artificial Sequence
  Description of Artificial Sequence: Synthetic oligonucleotide
  Antisense strand to SEQ ID NO: 1428652
uuuccaagaacgcuccugu

SEQ ID NO: 1428654 - RNA, 19 nt, Artificial Sequence
  Description of Artificial Sequence: Synthetic oligonucleotide
  Sense strand starting at position 64 of SEQ ID NO: 1243613
aggagcguucuuggaaaga

SEQ ID NO: 1428655 - RNA, 19 nt, Artificial Sequence
  Description of Artificial Sequence: Synthetic oligonucleotide
  Antisense strand to SEQ ID NO: 1428654
ucuuuccaagaacgcuccu

SEQ ID NO: 1428656 - RNA, 19 nt, Artificial Sequence
  Description of Artificial Sequence: Synthetic oligonucleotide
  Sense strand starting at position 415 of SEQ ID NO: 1243613
agagcuugcuuccaucaag

SEQ ID NO: 1428657 - RNA, 19 nt, Artificial Sequence
  Description of Artificial Sequence: Synthetic oligonucleotide
  Antisense strand to SEQ ID NO: 1428656
cuugauggaagcaagcucu

SEQ ID NO: 1428658 - RNA, 19 nt, Artificial Sequence
  Description of Artificial Sequence: Synthetic oligonucleotide
  Sense strand starting at position 429 of SEQ ID NO: 1243613
ucaagaggguccugagaag

SEQ ID NO: 1428659 - RNA, 19 nt, Artificial Sequence
  Description of Artificial Sequence: Synthetic oligonucleotide
  Antisense strand to SEQ ID NO: 1428658
cuucucaggacccucuuga

SEQ ID NO: 1428660 - RNA, 19 nt, Artificial Sequence
  Description of Artificial Sequence: Synthetic oligonucleotide
  Sense strand starting at position 849 of SEQ ID NO: 1243613
gaccgacagucguguugau

SEQ ID NO: 1428661 - RNA, 19 nt, Artificial Sequence
  Description of Artificial Sequence: Synthetic oligonucleotide
  Antisense strand to SEQ ID NO: 1428660
aucaacacgacugucgguc

SEQ ID NO: 1428662 - RNA, 19 nt, Artificial Sequence
  Description of Artificial Sequence: Synthetic oligonucleotide
  Sense strand starting at position 853 of SEQ ID NO: 1243613
gacagucguguugaugaca

SEQ ID NO: 1428663 - RNA, 19 nt, Artificial Sequence
  Description of Artificial Sequence: Synthetic oligonucleotide
  Antisense strand to SEQ ID NO: 1428662
ugucaucaacacgacuguc

SEQ ID NO: 1428664 - RNA, 19 nt, Artificial Sequence
  Description of Artificial Sequence: Synthetic oligonucleotide
  Sense strand starting at position 979 of SEQ ID NO: 1243613
gugugugaccuucacagag

SEQ ID NO: 1428665 - RNA, 19 nt, Artificial Sequence
  Description of Artificial Sequence: Synthetic oligonucleotide
  Antisense strand to SEQ ID NO: 1428664
cucugugaaggucacacac

SEQ ID NO: 1428666 - RNA, 19 nt, Artificial Sequence
  Description of Artificial Sequence: Synthetic oligonucleotide
  Sense strand starting at position 1185 of SEQ ID NO: 1243613
cgccucucuccagaaacaa

SEQ ID NO: 1428667 - RNA, 19 nt, Artificial Sequence
  Description of Artificial Sequence: Synthetic oligonucleotide
  Antisense strand to SEQ ID NO: 1428666
uuguuucuggagagaggcg

SEQ ID NO: 1428668 - RNA, 19 nt, Artificial Sequence
  Description of Artificial Sequence: Synthetic oligonucleotide
  Sense strand starting at position 1689 of SEQ ID NO: 1243613
agcgaauaaugaggagaau

SEQ ID NO: 1428669 - RNA, 19 nt, Artificial Sequence
  Description of Artificial Sequence: Synthetic oligonucleotide
  Antisense strand to SEQ ID NO: 1428668
auucuccucauuauucgcu

SEQ ID NO: 1428670 - RNA, 19 nt, Artificial Sequence
  Description of Artificial Sequence: Synthetic oligonucleotide
  Sense strand starting at position 2144 of SEQ ID NO: 1243613
aaagguaggugccuguaau

SEQ ID NO: 1428671 - RNA, 19 nt, Artificial Sequence
  Description of Artificial Sequence: Synthetic oligonucleotide
  Antisense strand to SEQ ID NO: 1428670
auuacaggcaccuaccuuu

SEQ ID NO: 1428672 - RNA, 19 nt, Artificial Sequence
  Description of Artificial Sequence: Synthetic oligonucleotide
  Sense strand starting at position 2145 of SEQ ID NO: 1243613
aagguaggugccuguaauc

SEQ ID NO: 1428673 - RNA, 19 nt, Artificial Sequence
  Description of Artificial Sequence: Synthetic oligonucleotide
  Antisense strand to SEQ ID NO: 1428672
gauuacaggcaccuaccuu

SEQ ID NO: 1428674 - RNA, 19 nt, Artificial Sequence
  Description of Artificial Sequence: Synthetic oligonucleotide
  Sense strand starting at position 2179 of SEQ ID NO: 1243613
gguaccuuccauggugaca

SEQ ID NO: 1428675 - RNA, 19 nt, Artificial Sequence
  Description of Artificial Sequence: Synthetic oligonucleotide
  Antisense strand to SEQ ID NO: 1428674
ugucaccauggaagguacc

SEQ ID NO: 1428676 - RNA, 19 nt, Artificial Sequence
  Description of Artificial Sequence: Synthetic oligonucleotide
  Sense strand starting at position 2181 of SEQ ID NO: 1243613
uaccuuccauggugacaga

SEQ ID NO: 1428677 - RNA, 19 nt, Artificial Sequence
  Description of Artificial Sequence: Synthetic oligonucleotide
  Antisense strand to SEQ ID NO: 1428676
ucugucaccauggaaggua

SEQ ID NO: 1428678 - RNA, 19 nt, Artificial Sequence
  Description of Artificial Sequence: Synthetic oligonucleotide
  Sense strand starting at position 2328 of SEQ ID NO: 1243613
uucugaaacucagggugua

SEQ ID NO: 1428679 - RNA, 19 nt, Artificial Sequence
  Description of Artificial Sequence: Synthetic oligonucleotide
  Antisense strand to SEQ ID NO: 1428678
uacacccugaguuucagaa

SEQ ID NO: 1428680 - RNA, 19 nt, Artificial Sequence
  Description of Artificial Sequence: Synthetic oligonucleotide
  Sense strand starting at position 2340 of SEQ ID NO: 1243613
ggguguacauaugagaaca

SEQ ID NO: 1428681 - RNA, 19 nt, Artificial Sequence
  Description of Artificial Sequence: Synthetic oligonucleotide
  Antisense strand to SEQ ID NO: 1428680
uguucucauauguacaccc

SEQ ID NO: 1428682 - RNA, 19 nt, Artificial Sequence
  Description of Artificial Sequence: Synthetic oligonucleotide
  Sense strand starting at position 2342 of SEQ ID NO: 1243613
guguacauaugagaacaga

SEQ ID NO: 1428683 - RNA, 19 nt, Artificial Sequence
  Description of Artificial Sequence: Synthetic oligonucleotide
  Antisense strand to SEQ ID NO: 1428682
ucuguucucauauguacac

SEQ ID NO: 1428684 - RNA, 19 nt, Artificial Sequence
  Description of Artificial Sequence: Synthetic oligonucleotide
  Sense strand starting at position 2802 of SEQ ID NO: 1243613
gacuccaggucccagagau

SEQ ID NO: 1428685 - RNA, 19 nt, Artificial Sequence
  Description of Artificial Sequence: Synthetic oligonucleotide
  Antisense strand to SEQ ID NO: 1428684
aucucugggaccuggaguc

SEQ ID NO: 1428686 - RNA, 19 nt, Artificial Sequence
  Description of Artificial Sequence: Synthetic oligonucleotide
  Sense strand starting at position 2833 of SEQ ID NO: 1243613
cagggagcccugugauuac

SEQ ID NO: 1428687 - RNA, 19 nt, Artificial Sequence
  Description of Artificial Sequence: Synthetic oligonucleotide
  Antisense strand to SEQ ID NO: 1428686
guaaucacagggcucccug

SEQ ID NO: 1428688 - RNA, 19 nt, Artificial Sequence
  Description of Artificial Sequence: Synthetic oligonucleotide
  Sense strand starting at position 2932 of SEQ ID NO: 1243613
aucuuuagggcaugaggaa

SEQ ID NO: 1428689 - RNA, 19 nt, Artificial Sequence
  Description of Artificial Sequence: Synthetic oligonucleotide
  Antisense strand to SEQ ID NO: 1428688
uuccucaugcccuaaagau

SEQ ID NO: 1428690 - RNA, 19 nt, Artificial Sequence
  Description of Artificial Sequence: Synthetic oligonucleotide
  Sense strand starting at position 2996 of SEQ ID NO: 1243613
guggaccuucggcagagau

SEQ ID NO: 1428691 - RNA, 19 nt, Artificial Sequence
  Description of Artificial Sequence: Synthetic oligonucleotide
  Antisense strand to SEQ ID NO: 1428690
aucucugccgaagguccac

SEQ ID NO: 1428692 - RNA, 19 nt, Artificial Sequence
  Description of Artificial Sequence: Synthetic oligonucleotide
  Sense strand starting at position 3029 of SEQ ID NO: 1243613
gacagugagcugcauccua

SEQ ID NO: 1428693 - RNA, 19 nt, Artificial Sequence
  Description of Artificial Sequence: Synthetic oligonucleotide
  Antisense strand to SEQ ID NO: 1428692
uaggaugcagcucacuguc

SEQ ID NO: 1428694 - RNA, 19 nt, Artificial Sequence
  Description of Artificial Sequence: Synthetic oligonucleotide
  Sense strand starting at position 3128 of SEQ ID NO: 1243613
ggaagcuucgagggaggaa

SEQ ID NO: 1428695 - RNA, 19 nt, Artificial Sequence
  Description of Artificial Sequence: Synthetic oligonucleotide
  Antisense strand to SEQ ID NO: 1428694
uuccucccucgaagcuucc

SEQ ID NO: 1428696 - RNA, 19 nt, Artificial Sequence
  Description of Artificial Sequence: Synthetic oligonucleotide
  Sense strand starting at position 3181 of SEQ ID NO: 1243613
gcagguagugaguacugga

SEQ ID NO: 1428697 - RNA, 19 nt, Artificial Sequence
  Description of Artificial Sequence: Synthetic oligonucleotide
  Antisense strand to SEQ ID NO: 1428696
uccaguacucacuaccugc

SEQ ID NO: 1428698 - RNA, 19 nt, Artificial Sequence
  Description of Artificial Sequence: Synthetic oligonucleotide
  Sense strand starting at position 3184 of SEQ ID NO: 1243613
gguagugaguacuggaaag

SEQ ID NO: 1428699 - RNA, 19 nt, Artificial Sequence
  Description of Artificial Sequence: Synthetic oligonucleotide
  Antisense strand to SEQ ID NO: 1428698
cuuuccaguacucacuacc

SEQ ID NO: 1428700 - RNA, 19 nt, Artificial Sequence
  Description of Artificial Sequence: Synthetic oligonucleotide
  Sense strand starting at position 3292 of SEQ ID NO: 1243613
ugcaacuggagcuguaaua

SEQ ID NO: 1428701 - RNA, 19 nt, Artificial Sequence
  Description of Artificial Sequence: Synthetic oligonucleotide
  Antisense strand to SEQ ID NO: 1428700
uauuacagcuccaguugca

SEQ ID NO: 1428702 - RNA, 19 nt, Artificial Sequence
  Description of Artificial Sequence: Synthetic oligonucleotide
  Sense strand starting at position 3530 of SEQ ID NO: 1243613
gcaggaacuuccuacuucu

SEQ ID NO: 1428703 - RNA, 19 nt, Artificial Sequence
  Description of Artificial Sequence: Synthetic oligonucleotide
  Antisense strand to SEQ ID NO: 1428702
agaaguaggaaguuccugc

SEQ ID NO: 1428704 - RNA, 19 nt, Artificial Sequence
  Description of Artificial Sequence: Synthetic oligonucleotide
  Sense strand starting at position 3549 of SEQ ID NO: 1243613
gucucaagcuguuucuaga

SEQ ID NO: 1428705 - RNA, 19 nt, Artificial Sequence
  Description of Artificial Sequence: Synthetic oligonucleotide
  Antisense strand to SEQ ID NO: 1428704
ucuagaaacagcuugagac

SEQ ID NO: 1428706 - RNA, 19 nt, Artificial Sequence
  Description of Artificial Sequence: Synthetic oligonucleotide
  Sense strand starting at position 3556 of SEQ ID NO: 1243613
gcuguuucuagacagagaa

SEQ ID NO: 1428707 - RNA, 19 nt, Artificial Sequence
  Description of Artificial Sequence: Synthetic oligonucleotide
  Antisense strand to SEQ ID NO: 1428706
uucucugucuagaaacagc

SEQ ID NO: 1428708 - RNA, 19 nt, Artificial Sequence
  Description of Artificial Sequence: Synthetic oligonucleotide
  Sense strand starting at position 3708 of SEQ ID NO: 1243613
uccagugaagucuagggua

SEQ ID NO: 1428709 - RNA, 19 nt, Artificial Sequence
  Description of Artificial Sequence: Synthetic oligonucleotide
  Antisense strand to SEQ ID NO: 1428708
uacccuagacuucacugga

SEQ ID NO: 1428710 - RNA, 19 nt, Artificial Sequence
  Description of Artificial Sequence: Synthetic oligonucleotide
  Sense strand starting at position 3710 of SEQ ID NO: 1243613
cagugaagucuaggguaug

SEQ ID NO: 1428711 - RNA, 19 nt, Artificial Sequence
  Description of Artificial Sequence: Synthetic oligonucleotide
  Antisense strand to SEQ ID NO: 1428710
cauacccuagacuucacug

SEQ ID NO: 1428712 - RNA, 19 nt, Artificial Sequence
  Description of Artificial Sequence: Synthetic oligonucleotide
  Sense strand starting at position 3711 of SEQ ID NO: 1243613
agugaagucuaggguauga

SEQ ID NO: 1428713 - RNA, 19 nt, Artificial Sequence
  Description of Artificial Sequence: Synthetic oligonucleotide
  Antisense strand to SEQ ID NO: 1428712
ucauacccuagacuucacu

SEQ ID NO: 1428714 - RNA, 19 nt, Artificial Sequence
  Description of Artificial Sequence: Synthetic oligonucleotide
  Sense strand starting at position 3715 of SEQ ID NO: 1243613
aagucuaggguaugaaauc

SEQ ID NO: 1428715 - RNA, 19 nt, Artificial Sequence
  Description of Artificial Sequence: Synthetic oligonucleotide
  Antisense strand to SEQ ID NO: 1428714
gauuucauacccuagacuu

SEQ ID NO: 1428716 - RNA, 19 nt, Artificial Sequence
  Description of Artificial Sequence: Synthetic oligonucleotide
  Sense strand starting at position 3727 of SEQ ID NO: 1243613
ugaaaucacuccugcugca

SEQ ID NO: 1428717 - RNA, 19 nt, Artificial Sequence
  Description of Artificial Sequence: Synthetic oligonucleotide
  Antisense strand to SEQ ID NO: 1428716
ugcagcaggagugauuuca

SEQ ID NO: 1428718 - RNA, 19 nt, Artificial Sequence
  Description of Artificial Sequence: Synthetic oligonucleotide
  Sense strand starting at position 3750 of SEQ ID NO: 1243613
ggagccuaauugcaguaau

SEQ ID NO: 1428719 - RNA, 19 nt, Artificial Sequence
  Description of Artificial Sequence: Synthetic oligonucleotide
  Antisense strand to SEQ ID NO: 1428718
auuacugcaauuaggcucc

SEQ ID NO: 1428720 - RNA, 19 nt, Artificial Sequence
  Description of Artificial Sequence: Synthetic oligonucleotide
  Sense strand starting at position 3753 of SEQ ID NO: 1243613
gccuaauugcaguaauuaa

SEQ ID NO: 1428721 - RNA, 19 nt, Artificial Sequence
  Description of Artificial Sequence: Synthetic oligonucleotide
  Antisense strand to SEQ ID NO: 1428720
uuaauuacugcaauuaggc

SEQ ID NO: 1428722 - RNA, 19 nt, Artificial Sequence
  Description of Artificial Sequence: Synthetic oligonucleotide
  Sense strand starting at position 3796 of SEQ ID NO: 1243613
cacgucaucgagugaguca

SEQ ID NO: 1428723 - RNA, 19 nt, Artificial Sequence
  Description of Artificial Sequence: Synthetic oligonucleotide
  Antisense strand to SEQ ID NO: 1428722
ugacucacucgaugacgug

SEQ ID NO: 1428724 - RNA, 19 nt, Artificial Sequence
  Description of Artificial Sequence: Synthetic oligonucleotide
  Sense strand starting at position 37 of SEQ ID NO: 1243614
cuuugauguugagaaacca

SEQ ID NO: 1428725 - RNA, 19 nt, Artificial Sequence
  Description of Artificial Sequence: Synthetic oligonucleotide
  Antisense strand to SEQ ID NO: 1428724
ugguuucucaacaucaaag

SEQ ID NO: 1428726 - RNA, 19 nt, Artificial Sequence
  Description of Artificial Sequence: Synthetic oligonucleotide
  Sense strand starting at position 174 of SEQ ID NO: 1243614
gaggucagagguugaaugu

SEQ ID NO: 1428727 - RNA, 19 nt, Artificial Sequence
  Description of Artificial Sequence: Synthetic oligonucleotide
  Antisense strand to SEQ ID NO: 1428726
acauucaaccucugaccuc

SEQ ID NO: 1428728 - RNA, 19 nt, Artificial Sequence
  Description of Artificial Sequence: Synthetic oligonucleotide
  Sense strand starting at position 175 of SEQ ID NO: 1243614
aggucagagguugaauguu

SEQ ID NO: 1428729 - RNA, 19 nt, Artificial Sequence
  Description of Artificial Sequence: Synthetic oligonucleotide
  Antisense strand to SEQ ID NO: 1428728
aacauucaaccucugaccu

SEQ ID NO: 1428730 - RNA, 19 nt, Artificial Sequence
  Description of Artificial Sequence: Synthetic oligonucleotide
  Sense strand starting at position 183 of SEQ ID NO: 1243614
gguugaauguuggguacca

SEQ ID NO: 1428731 - RNA, 19 nt, Artificial Sequence
  Description of Artificial Sequence: Synthetic oligonucleotide
  Antisense strand to SEQ ID NO: 1428730
ugguacccaacauucaacc

SEQ ID NO: 1428732 - RNA, 19 nt, Artificial Sequence
  Description of Artificial Sequence: Synthetic oligonucleotide
  Sense strand starting at position 185 of SEQ ID NO: 1243614
uugaauguuggguaccaca

SEQ ID NO: 1428733 - RNA, 19 nt, Artificial Sequence
  Description of Artificial Sequence: Synthetic oligonucleotide
  Antisense strand to SEQ ID NO: 1428732
ugugguacccaacauucaa

SEQ ID NO: 1428734 - RNA, 19 nt, Artificial Sequence
  Description of Artificial Sequence: Synthetic oligonucleotide
  Sense strand starting at position 282 of SEQ ID NO: 1243614
ggaacucuagcugggauga

SEQ ID NO: 1428735 - RNA, 19 nt, Artificial Sequence
  Description of Artificial Sequence: Synthetic oligonucleotide
  Antisense strand to SEQ ID NO: 1428734
ucaucccagcuagaguucc

SEQ ID NO: 1428736 - RNA, 19 nt, Artificial Sequence
  Description of Artificial Sequence: Synthetic oligonucleotide
  Sense strand starting at position 638 of SEQ ID NO: 1243614
ugccuagaaucaggcugaa

SEQ ID NO: 1428737 - RNA, 19 nt, Artificial Sequence
  Description of Artificial Sequence: Synthetic oligonucleotide
  Antisense strand to SEQ ID NO: 1428736
uucagccugauucuaggca

SEQ ID NO: 1428738 - RNA, 19 nt, Artificial Sequence
  Description of Artificial Sequence: Synthetic oligonucleotide
  Sense strand starting at position 750 of SEQ ID NO: 1243614
ggcgaaauccacuauguaa

SEQ ID NO: 1428739 - RNA, 19 nt, Artificial Sequence
  Description of Artificial Sequence: Synthetic oligonucleotide
  Antisense strand to SEQ ID NO: 1428738
uuacauaguggauuucgcc

SEQ ID NO: 1428740 - RNA, 19 nt, Artificial Sequence
  Description of Artificial Sequence: Synthetic oligonucleotide
  Sense strand starting at position 774 of SEQ ID NO: 1243614
ggaggacccucuuccuaau

SEQ ID NO: 1428741 - RNA, 19 nt, Artificial Sequence
  Description of Artificial Sequence: Synthetic oligonucleotide
  Antisense strand to SEQ ID NO: 1428740
auuaggaagaggguccucc

SEQ ID NO: 1428742 - RNA, 19 nt, Artificial Sequence
  Description of Artificial Sequence: Synthetic oligonucleotide
  Sense strand starting at position 787 of SEQ ID NO: 1243614
ccuaaucccugagagcuuu

SEQ ID NO: 1428743 - RNA, 19 nt, Artificial Sequence
  Description of Artificial Sequence: Synthetic oligonucleotide
  Antisense strand to SEQ ID NO: 1428742
aaagcucucagggauuagg

SEQ ID NO: 1428744 - RNA, 19 nt, Artificial Sequence
  Description of Artificial Sequence: Synthetic oligonucleotide
  Sense strand starting at position 795 of SEQ ID NO: 1243614
cugagagcuuucgggaaag

SEQ ID NO: 1428745 - RNA, 19 nt, Artificial Sequence
  Description of Artificial Sequence: Synthetic oligonucleotide
  Antisense strand to SEQ ID NO: 1428744
cuuucccgaaagcucucag

SEQ ID NO: 1428746 - RNA, 19 nt, Artificial Sequence
  Description of Artificial Sequence: Synthetic oligonucleotide
  Sense strand starting at position 797 of SEQ ID NO: 1243614
gagagcuuucgggaaaggu

SEQ ID NO: 1428747 - RNA, 19 nt, Artificial Sequence
  Description of Artificial Sequence: Synthetic oligonucleotide
  Antisense strand to SEQ ID NO: 1428746
accuuucccgaaagcucuc

SEQ ID NO: 1428748 - RNA, 19 nt, Artificial Sequence
  Description of Artificial Sequence: Synthetic oligonucleotide
  Sense strand starting at position 841 of SEQ ID NO: 1243614
ggcggugccuuucuagcaa

SEQ ID NO: 1428749 - RNA, 19 nt, Artificial Sequence
  Description of Artificial Sequence: Synthetic oligonucleotide
  Antisense strand to SEQ ID NO: 1428748
uugcuagaaaggcaccgcc

SEQ ID NO: 1428750 - RNA, 19 nt, Artificial Sequence
  Description of Artificial Sequence: Synthetic oligonucleotide
  Sense strand starting at position 845 of SEQ ID NO: 1243614
gugccuuucuagcaacgga

SEQ ID NO: 1428751 - RNA, 19 nt, Artificial Sequence
  Description of Artificial Sequence: Synthetic oligonucleotide
  Antisense strand to SEQ ID NO: 1428750
uccguugcuagaaaggcac

SEQ ID NO: 1428752 - RNA, 19 nt, Artificial Sequence
  Description of Artificial Sequence: Synthetic oligonucleotide
  Sense strand starting at position 926 of SEQ ID NO: 1243614
caccauuacccgugaucag

SEQ ID NO: 1428753 - RNA, 19 nt, Artificial Sequence
  Description of Artificial Sequence: Synthetic oligonucleotide
  Antisense strand to SEQ ID NO: 1428752
cugaucacggguaauggug

SEQ ID NO: 1428754 - RNA, 19 nt, Artificial Sequence
  Description of Artificial Sequence: Synthetic oligonucleotide
  Sense strand starting at position 927 of SEQ ID NO: 1243614
accauuacccgugaucagu

SEQ ID NO: 1428755 - RNA, 19 nt, Artificial Sequence
  Description of Artificial Sequence: Synthetic oligonucleotide
  Antisense strand to SEQ ID NO: 1428754
acugaucacggguaauggu

SEQ ID NO: 1428756 - RNA, 19 nt, Artificial Sequence
  Description of Artificial Sequence: Synthetic oligonucleotide
  Sense strand starting at position 929 of SEQ ID NO: 1243614
cauuacccgugaucaguua

SEQ ID NO: 1428757 - RNA, 19 nt, Artificial Sequence
  Description of Artificial Sequence: Synthetic oligonucleotide
  Antisense strand to SEQ ID NO: 1428756
uaacugaucacggguaaug

SEQ ID NO: 1428758 - RNA, 19 nt, Artificial Sequence
  Description of Artificial Sequence: Synthetic oligonucleotide
  Sense strand starting at position 1097 of SEQ ID NO: 1243614
gauugcugagcccgggauu

SEQ ID NO: 1428759 - RNA, 19 nt, Artificial Sequence
  Description of Artificial Sequence: Synthetic oligonucleotide
  Antisense strand to SEQ ID NO: 1428758
aaucccgggcucagcaauc

SEQ ID NO: 1428760 - RNA, 19 nt, Artificial Sequence
  Description of Artificial Sequence: Synthetic oligonucleotide
  Sense strand starting at position 1281 of SEQ ID NO: 1243614
cggcuucagccuggacaga

SEQ ID NO: 1428761 - RNA, 19 nt, Artificial Sequence
  Description of Artificial Sequence: Synthetic oligonucleotide
  Antisense strand to SEQ ID NO: 1428760
ucuguccaggcugaagccg

SEQ ID NO: 1428762 - RNA, 19 nt, Artificial Sequence
  Description of Artificial Sequence: Synthetic oligonucleotide
  Sense strand starting at position 2695 of SEQ ID NO: 1243614
uggaaagcccaucguguuu

SEQ ID NO: 1428763 - RNA, 19 nt, Artificial Sequence
  Description of Artificial Sequence: Synthetic oligonucleotide
  Antisense strand to SEQ ID NO: 1428762
aaacacgaugggcuuucca

SEQ ID NO: 1428764 - RNA, 19 nt, Artificial Sequence
  Description of Artificial Sequence: Synthetic oligonucleotide
  Sense strand starting at position 2708 of SEQ ID NO: 1243614
guguuugcaucaucaccua

SEQ ID NO: 1428765 - RNA, 19 nt, Artificial Sequence
  Description of Artificial Sequence: Synthetic oligonucleotide
  Antisense strand to SEQ ID NO: 1428764
uaggugaugaugcaaacac

SEQ ID NO: 1428766 - RNA, 19 nt, Artificial Sequence
  Description of Artificial Sequence: Synthetic oligonucleotide
  Sense strand starting at position 2723 of SEQ ID NO: 1243614
ccuagaaauggugggaagu

SEQ ID NO: 1428767 - RNA, 19 nt, Artificial Sequence
  Description of Artificial Sequence: Synthetic oligonucleotide
  Antisense strand to SEQ ID NO: 1428766
acuucccaccauuucuagg

SEQ ID NO: 1428768 - RNA, 19 nt, Artificial Sequence
  Description of Artificial Sequence: Synthetic oligonucleotide
  Sense strand starting at position 2744 of SEQ ID NO: 1243614
ggucaagaggccugagaaa

SEQ ID NO: 1428769 - RNA, 19 nt, Artificial Sequence
  Description of Artificial Sequence: Synthetic oligonucleotide
  Antisense strand to SEQ ID NO: 1428768
uuucucaggccucuugacc

SEQ ID NO: 1428770 - RNA, 19 nt, Artificial Sequence
  Description of Artificial Sequence: Synthetic oligonucleotide
  Sense strand starting at position 2755 of SEQ ID NO: 1243614
cugagaaaugaccguuuag

SEQ ID NO: 1428771 - RNA, 19 nt, Artificial Sequence
  Description of Artificial Sequence: Synthetic oligonucleotide
  Antisense strand to SEQ ID NO: 1428770
cuaaacggucauuucucag

SEQ ID NO: 1428772 - RNA, 19 nt, Artificial Sequence
  Description of Artificial Sequence: Synthetic oligonucleotide
  Sense strand starting at position 2765 of SEQ ID NO: 1243614
accguuuagagacgaaauu
